United States Patent Application Publication US 2018/0305689 A1 - sequence listing, part 115

SEQ ID NO: 1633314 - RNA, 19 nt, Artificial Sequence
  Description of Artificial Sequence: Synthetic oligonucleotide
  Antisense strand to SEQ ID NO: 1633313
aaacucaaacacugacccu

SEQ ID NO: 1633315 - RNA, 19 nt, Artificial Sequence
  Description of Artificial Sequence: Synthetic oligonucleotide
  Sense strand starting at position 2503 of SEQ ID NO: 1560910
cugagcaaggcuuagaagu

SEQ ID NO: 1633316 - RNA, 19 nt, Artificial Sequence
  Description of Artificial Sequence: Synthetic oligonucleotide
  Antisense strand to SEQ ID NO: 1633315
acuucuaagccuugcucag

SEQ ID NO: 1633317 - RNA, 19 nt, Artificial Sequence
  Description of Artificial Sequence: Synthetic oligonucleotide
  Sense strand starting at position 2511 of SEQ ID NO: 1560910
ggcuuagaaguguguugca

SEQ ID NO: 1633318 - RNA, 19 nt, Artificial Sequence
  Description of Artificial Sequence: Synthetic oligonucleotide
  Antisense strand to SEQ ID NO: 1633317
ugcaacacacuucuaagcc

SEQ ID NO: 1633319 - RNA, 19 nt, Artificial Sequence
  Description of Artificial Sequence: Synthetic oligonucleotide
  Sense strand starting at position 2606 of SEQ ID NO: 1560910
auucucuugucugagauca

SEQ ID NO: 1633320 - RNA, 19 nt, Artificial Sequence
  Description of Artificial Sequence: Synthetic oligonucleotide
  Antisense strand to SEQ ID NO: 1633319
ugaucucagacaagagaau

SEQ ID NO: 1633321 - RNA, 19 nt, Artificial Sequence
  Description of Artificial Sequence: Synthetic oligonucleotide
  Sense strand starting at position 2769 of SEQ ID NO: 1560910
cccgguuuaagcgauucuu

SEQ ID NO: 1633322 - RNA, 19 nt, Artificial Sequence
  Description of Artificial Sequence: Synthetic oligonucleotide
  Antisense strand to SEQ ID NO: 1633321
aagaaucgcuuaaaccggg

SEQ ID NO: 1633323 - RNA, 19 nt, Artificial Sequence
  Description of Artificial Sequence: Synthetic oligonucleotide
  Sense strand starting at position 2976 of SEQ ID NO: 1560910
gagggaucuuucuaagaca

SEQ ID NO: 1633324 - RNA, 19 nt, Artificial Sequence
  Description of Artificial Sequence: Synthetic oligonucleotide
  Antisense strand to SEQ ID NO: 1633323
ugucuuagaaagaucccuc

SEQ ID NO: 1633325 - RNA, 19 nt, Artificial Sequence
  Description of Artificial Sequence: Synthetic oligonucleotide
  Sense strand starting at position 2979 of SEQ ID NO: 1560910
ggaucuuucuaagacauga

SEQ ID NO: 1633326 - RNA, 19 nt, Artificial Sequence
  Description of Artificial Sequence: Synthetic oligonucleotide
  Antisense strand to SEQ ID NO: 1633325
ucaugucuuagaaagaucc

SEQ ID NO: 1633327 - RNA, 19 nt, Artificial Sequence
  Description of Artificial Sequence: Synthetic oligonucleotide
  Sense strand starting at position 3098 of SEQ ID NO: 1560910
caggcugaauagucuaaua

SEQ ID NO: 1633328 - RNA, 19 nt, Artificial Sequence
  Description of Artificial Sequence: Synthetic oligonucleotide
  Antisense strand to SEQ ID NO: 1633327
uauuagacuauucagccug

SEQ ID NO: 1633329 - RNA, 19 nt, Artificial Sequence
  Description of Artificial Sequence: Synthetic oligonucleotide
  Sense strand starting at position 3100 of SEQ ID NO: 1560910
ggcugaauagucuaauauc

SEQ ID NO: 1633330 - RNA, 19 nt, Artificial Sequence
  Description of Artificial Sequence: Synthetic oligonucleotide
  Antisense strand to SEQ ID NO: 1633329
gauauuagacuauucagcc

SEQ ID NO: 1633331 - RNA, 19 nt, Artificial Sequence
  Description of Artificial Sequence: Synthetic oligonucleotide
  Sense strand starting at position 3103 of SEQ ID NO: 1560910
ugaauagucuaauauccag

SEQ ID NO: 1633332 - RNA, 19 nt, Artificial Sequence
  Description of Artificial Sequence: Synthetic oligonucleotide
  Antisense strand to SEQ ID NO: 1633331
cuggauauuagacuauuca

SEQ ID NO: 1633333 - RNA, 19 nt, Artificial Sequence
  Description of Artificial Sequence: Synthetic oligonucleotide
  Sense strand starting at position 3161 of SEQ ID NO: 1560910
uccagucuguccuuucuaa

SEQ ID NO: 1633334 - RNA, 19 nt, Artificial Sequence
  Description of Artificial Sequence: Synthetic oligonucleotide
  Antisense strand to SEQ ID NO: 1633333
uuagaaaggacagacugga

SEQ ID NO: 1633335 - RNA, 19 nt, Artificial Sequence
  Description of Artificial Sequence: Synthetic oligonucleotide
  Sense strand starting at position 3192 of SEQ ID NO: 1560910
cacuaaguccuguaaggcu

SEQ ID NO: 1633336 - RNA, 19 nt, Artificial Sequence
  Description of Artificial Sequence: Synthetic oligonucleotide
  Antisense strand to SEQ ID NO: 1633335
agccuuacaggacuuagug

SEQ ID NO: 1633337 - RNA, 19 nt, Artificial Sequence
  Description of Artificial Sequence: Synthetic oligonucleotide
  Sense strand starting at position 3373 of SEQ ID NO: 1560910
ugcagagguguuugacgaa

SEQ ID NO: 1633338 - RNA, 19 nt, Artificial Sequence
  Description of Artificial Sequence: Synthetic oligonucleotide
  Antisense strand to SEQ ID NO: 1633337
uucgucaaacaccucugca

SEQ ID NO: 1633339 - RNA, 19 nt, Artificial Sequence
  Description of Artificial Sequence: Synthetic oligonucleotide
  Sense strand starting at position 3380 of SEQ ID NO: 1560910
guguuugacgaaggucaca

SEQ ID NO: 1633340 - RNA, 19 nt, Artificial Sequence
  Description of Artificial Sequence: Synthetic oligonucleotide
  Antisense strand to SEQ ID NO: 1633339
ugugaccuucgucaaacac

SEQ ID NO: 1633341 - RNA, 19 nt, Artificial Sequence
  Description of Artificial Sequence: Synthetic oligonucleotide
  Sense strand starting at position 3492 of SEQ ID NO: 1560910
ccaucuugguggguuagua

SEQ ID NO: 1633342 - RNA, 19 nt, Artificial Sequence
  Description of Artificial Sequence: Synthetic oligonucleotide
  Antisense strand to SEQ ID NO: 1633341
uacuaacccaccaagaugg

SEQ ID NO: 1633343 - RNA, 19 nt, Artificial Sequence
  Description of Artificial Sequence: Synthetic oligonucleotide
  Sense strand starting at position 3496 of SEQ ID NO: 1560910
cuugguggguuaguaaauu

SEQ ID NO: 1633344 - RNA, 19 nt, Artificial Sequence
  Description of Artificial Sequence: Synthetic oligonucleotide
  Antisense strand to SEQ ID NO: 1633343
aauuuacuaacccaccaag

SEQ ID NO: 1633345 - RNA, 19 nt, Artificial Sequence
  Description of Artificial Sequence: Synthetic oligonucleotide
  Sense strand starting at position 3577 of SEQ ID NO: 1560910
uuugaauucugguuucgag

SEQ ID NO: 1633346 - RNA, 19 nt, Artificial Sequence
  Description of Artificial Sequence: Synthetic oligonucleotide
  Antisense strand to SEQ ID NO: 1633345
cucgaaaccagaauucaaa

SEQ ID NO: 1633347 - RNA, 19 nt, Artificial Sequence
  Description of Artificial Sequence: Synthetic oligonucleotide
  Sense strand starting at position 3600 of SEQ ID NO: 1560910
gcggaauccuuccugacac

SEQ ID NO: 1633348 - RNA, 19 nt, Artificial Sequence
  Description of Artificial Sequence: Synthetic oligonucleotide
  Antisense strand to SEQ ID NO: 1633347
gugucaggaaggauuccgc

SEQ ID NO: 1633349 - RNA, 19 nt, Artificial Sequence
  Description of Artificial Sequence: Synthetic oligonucleotide
  Sense strand starting at position 3709 of SEQ ID NO: 1560910
agaggagaguucgacaaca

SEQ ID NO: 1633350 - RNA, 19 nt, Artificial Sequence
  Description of Artificial Sequence: Synthetic oligonucleotide
  Antisense strand to SEQ ID NO: 1633349
uguugucgaacucuccucu

SEQ ID NO: 1633351 - RNA, 19 nt, Artificial Sequence
  Description of Artificial Sequence: Synthetic oligonucleotide
  Sense strand starting at position 3714 of SEQ ID NO: 1560910
agaguucgacaacaugagu

SEQ ID NO: 1633352 - RNA, 19 nt, Artificial Sequence
  Description of Artificial Sequence: Synthetic oligonucleotide
  Antisense strand to SEQ ID NO: 1633351
acucauguugucgaacucu

SEQ ID NO: 1633353 - RNA, 19 nt, Artificial Sequence
  Description of Artificial Sequence: Synthetic oligonucleotide
  Sense strand starting at position 3735 of SEQ ID NO: 1560910
agcauuugucagggagccu

SEQ ID NO: 1633354 - RNA, 19 nt, Artificial Sequence
  Description of Artificial Sequence: Synthetic oligonucleotide
  Antisense strand to SEQ ID NO: 1633353
aggcucccugacaaaugcu

SEQ ID NO: 1633355 - RNA, 19 nt, Artificial Sequence
  Description of Artificial Sequence: Synthetic oligonucleotide
  Sense strand starting at position 3816 of SEQ ID NO: 1560910
agcucaugccuguaaucga

SEQ ID NO: 1633356 - RNA, 19 nt, Artificial Sequence
  Description of Artificial Sequence: Synthetic oligonucleotide
  Antisense strand to SEQ ID NO: 1633355
ucgauuacaggcaugagcu

SEQ ID NO: 1633357 - RNA, 19 nt, Artificial Sequence
  Description of Artificial Sequence: Synthetic oligonucleotide
  Sense strand starting at position 3912 of SEQ ID NO: 1560910
ccgucacuaccagaaauac

SEQ ID NO: 1633358 - RNA, 19 nt, Artificial Sequence
  Description of Artificial Sequence: Synthetic oligonucleotide
  Antisense strand to SEQ ID NO: 1633357
guauuucugguagugacgg

SEQ ID NO: 1633359 - RNA, 19 nt, Artificial Sequence
  Description of Artificial Sequence: Synthetic oligonucleotide
  Sense strand starting at position 46 of SEQ ID NO: 1560911
gggauaucccaguagcaua

SEQ ID NO: 1633360 - RNA, 19 nt, Artificial Sequence
  Description of Artificial Sequence: Synthetic oligonucleotide
  Antisense strand to SEQ ID NO: 1633359
uaugcuacugggauauccc

SEQ ID NO: 1633361 - RNA, 19 nt, Artificial Sequence
  Description of Artificial Sequence: Synthetic oligonucleotide
  Sense strand starting at position 162 of SEQ ID NO: 1560911
ggccaaguuauagaguaga

SEQ ID NO: 1633362 - RNA, 19 nt, Artificial Sequence
  Description of Artificial Sequence: Synthetic oligonucleotide
  Antisense strand to SEQ ID NO: 1633361
ucuacucuauaacuuggcc

SEQ ID NO: 1633363 - RNA, 19 nt, Artificial Sequence
  Description of Artificial Sequence: Synthetic oligonucleotide
  Sense strand starting at position 225 of SEQ ID NO: 1560911
gucuguggcuauucucaga

SEQ ID NO: 1633364 - RNA, 19 nt, Artificial Sequence
  Description of Artificial Sequence: Synthetic oligonucleotide
  Antisense strand to SEQ ID NO: 1633363
ucugagaauagccacagac

SEQ ID NO: 1633365 - RNA, 19 nt, Artificial Sequence
  Description of Artificial Sequence: Synthetic oligonucleotide
  Sense strand starting at position 230 of SEQ ID NO: 1560911
uggcuauucucagaggaua

SEQ ID NO: 1633366 - RNA, 19 nt, Artificial Sequence
  Description of Artificial Sequence: Synthetic oligonucleotide
  Antisense strand to SEQ ID NO: 1633365
uauccucugagaauagcca

SEQ ID NO: 1633367 - RNA, 19 nt, Artificial Sequence
  Description of Artificial Sequence: Synthetic oligonucleotide
  Sense strand starting at position 261 of SEQ ID NO: 1560911
ggcacuccugaugguugua

SEQ ID NO: 1633368 - RNA, 19 nt, Artificial Sequence
  Description of Artificial Sequence: Synthetic oligonucleotide
  Antisense strand to SEQ ID NO: 1633367
uacaaccaucaggagugcc

SEQ ID NO: 1633369 - RNA, 19 nt, Artificial Sequence
  Description of Artificial Sequence: Synthetic oligonucleotide
  Sense strand starting at position 271 of SEQ ID NO: 1560911
augguuguauucuugugau

SEQ ID NO: 1633370 - RNA, 19 nt, Artificial Sequence
  Description of Artificial Sequence: Synthetic oligonucleotide
  Antisense strand to SEQ ID NO: 1633369
aucacaagaauacaaccau

SEQ ID NO: 1633371 - RNA, 19 nt, Artificial Sequence
  Description of Artificial Sequence: Synthetic oligonucleotide
  Sense strand starting at position 277 of SEQ ID NO: 1560911
guauucuugugauuacagc

SEQ ID NO: 1633372 - RNA, 19 nt, Artificial Sequence
  Description of Artificial Sequence: Synthetic oligonucleotide
  Antisense strand to SEQ ID NO: 1633371
gcuguaaucacaagaauac

SEQ ID NO: 1633373 - RNA, 19 nt, Artificial Sequence
  Description of Artificial Sequence: Synthetic oligonucleotide
  Sense strand starting at position 551 of SEQ ID NO: 1560911
uacagaucuugugugaacu

SEQ ID NO: 1633374 - RNA, 19 nt, Artificial Sequence
  Description of Artificial Sequence: Synthetic oligonucleotide
  Antisense strand to SEQ ID NO: 1633373
aguucacacaagaucugua

SEQ ID NO: 1633375 - RNA, 19 nt, Artificial Sequence
  Description of Artificial Sequence: Synthetic oligonucleotide
  Sense strand starting at position 586 of SEQ ID NO: 1560911
acuuguuaccgugaggaca

SEQ ID NO: 1633376 - RNA, 19 nt, Artificial Sequence
  Description of Artificial Sequence: Synthetic oligonucleotide
  Antisense strand to SEQ ID NO: 1633375
uguccucacgguaacaagu

SEQ ID NO: 1633377 - RNA, 19 nt, Artificial Sequence
  Description of Artificial Sequence: Synthetic oligonucleotide
  Sense strand starting at position 843 of SEQ ID NO: 1560911
ugaccauagucagaaucua

SEQ ID NO: 1633378 - RNA, 19 nt, Artificial Sequence
  Description of Artificial Sequence: Synthetic oligonucleotide
  Antisense strand to SEQ ID NO: 1633377
uagauucugacuaugguca

SEQ ID NO: 1633379 - RNA, 19 nt, Artificial Sequence
  Description of Artificial Sequence: Synthetic oligonucleotide
  Sense strand starting at position 925 of SEQ ID NO: 1560911
gaaggacucucauugguuc

SEQ ID NO: 1633380 - RNA, 19 nt, Artificial Sequence
  Description of Artificial Sequence: Synthetic oligonucleotide
  Antisense strand to SEQ ID NO: 1633379
gaaccaaugagaguccuuc

SEQ ID NO: 1633381 - RNA, 19 nt, Artificial Sequence
  Description of Artificial Sequence: Synthetic oligonucleotide
  Sense strand starting at position 966 of SEQ ID NO: 1560911
gagcauaaugauuggucca

SEQ ID NO: 1633382 - RNA, 19 nt, Artificial Sequence
  Description of Artificial Sequence: Synthetic oligonucleotide
  Antisense strand to SEQ ID NO: 1633381
uggaccaaucauuaugcuc

SEQ ID NO: 1633383 - RNA, 19 nt, Artificial Sequence
  Description of Artificial Sequence: Synthetic oligonucleotide
  Sense strand starting at position 1039 of SEQ ID NO: 1560911
aggagacugucagcuccua

SEQ ID NO: 1633384 - RNA, 19 nt, Artificial Sequence
  Description of Artificial Sequence: Synthetic oligonucleotide
  Antisense strand to SEQ ID NO: 1633383
uaggagcugacagucuccu

SEQ ID NO: 1633385 - RNA, 19 nt, Artificial Sequence
  Description of Artificial Sequence: Synthetic oligonucleotide
  Sense strand starting at position 1242 of SEQ ID NO: 1560911
cuaauugaugcuuauagca

SEQ ID NO: 1633386 - RNA, 19 nt, Artificial Sequence
  Description of Artificial Sequence: Synthetic oligonucleotide
  Antisense strand to SEQ ID NO: 1633385
ugcuauaagcaucaauuag

SEQ ID NO: 1633387 - RNA, 19 nt, Artificial Sequence
  Description of Artificial Sequence: Synthetic oligonucleotide
  Sense strand starting at position 1249 of SEQ ID NO: 1560911
augcuuauagcacgaauga

SEQ ID NO: 1633388 - RNA, 19 nt, Artificial Sequence
  Description of Artificial Sequence: Synthetic oligonucleotide
  Antisense strand to SEQ ID NO: 1633387
ucauucgugcuauaagcau

SEQ ID NO: 1633389 - RNA, 19 nt, Artificial Sequence
  Description of Artificial Sequence: Synthetic oligonucleotide
  Sense strand starting at position 1299 of SEQ ID NO: 1560911
cugggaugguccuaauuuc

SEQ ID NO: 1633390 - RNA, 19 nt, Artificial Sequence
  Description of Artificial Sequence: Synthetic oligonucleotide
  Antisense strand to SEQ ID NO: 1633389
gaaauuaggaccaucccag

SEQ ID NO: 1633391 - RNA, 19 nt, Artificial Sequence
  Description of Artificial Sequence: Synthetic oligonucleotide
  Sense strand starting at position 1323 of SEQ ID NO: 1560911
cccugagcggaucaagaau

SEQ ID NO: 1633392 - RNA, 19 nt, Artificial Sequence
  Description of Artificial Sequence: Synthetic oligonucleotide
  Antisense strand to SEQ ID NO: 1633391
auucuugauccgcucaggg

SEQ ID NO: 1633393 - RNA, 19 nt, Artificial Sequence
  Description of Artificial Sequence: Synthetic oligonucleotide
  Sense strand starting at position 1410 of SEQ ID NO: 1560911
gcggaaccucugagcguua

SEQ ID NO: 1633394 - RNA, 19 nt, Artificial Sequence
  Description of Artificial Sequence: Synthetic oligonucleotide
  Antisense strand to SEQ ID NO: 1633393
uaacgcucagagguuccgc

SEQ ID NO: 1633395 - RNA, 19 nt, Artificial Sequence
  Description of Artificial Sequence: Synthetic oligonucleotide
  Sense strand starting at position 1593 of SEQ ID NO: 1560911
cgacguauuugcuucucua

SEQ ID NO: 1633396 - RNA, 19 nt, Artificial Sequence
  Description of Artificial Sequence: Synthetic oligonucleotide
  Antisense strand to SEQ ID NO: 1633395
uagagaagcaaauacgucg

SEQ ID NO: 1633397 - RNA, 19 nt, Artificial Sequence
  Description of Artificial Sequence: Synthetic oligonucleotide
  Sense strand starting at position 1708 of SEQ ID NO: 1560911
cccaguuugacgcauugca

SEQ ID NO: 1633398 - RNA, 19 nt, Artificial Sequence
  Description of Artificial Sequence: Synthetic oligonucleotide
  Antisense strand to SEQ ID NO: 1633397
ugcaaugcgucaaacuggg

SEQ ID NO: 1633399 - RNA, 19 nt, Artificial Sequence
  Description of Artificial Sequence: Synthetic oligonucleotide
  Sense strand starting at position 1725 of SEQ ID NO: 1560911
cagggaaggucggaccaau

SEQ ID NO: 1633400 - RNA, 19 nt, Artificial Sequence
  Description of Artificial Sequence: Synthetic oligonucleotide
  Antisense strand to SEQ ID NO: 1633399
auugguccgaccuucccug

SEQ ID NO: 1633401 - RNA, 19 nt, Artificial Sequence
  Description of Artificial Sequence: Synthetic oligonucleotide
  Sense strand starting at position 2443 of SEQ ID NO: 1560911
caccaaaugggauguuuaa

SEQ ID NO: 1633402 - RNA, 19 nt, Artificial Sequence
  Description of Artificial Sequence: Synthetic oligonucleotide
  Antisense strand to SEQ ID NO: 1633401
uuaaacaucccauuuggug

SEQ ID NO: 1633403 - RNA, 19 nt, Artificial Sequence
  Description of Artificial Sequence: Synthetic oligonucleotide
  Sense strand starting at position 2450 of SEQ ID NO: 1560911
ugggauguuuaaguccaca

SEQ ID NO: 1633404 - RNA, 19 nt, Artificial Sequence
  Description of Artificial Sequence: Synthetic oligonucleotide
  Antisense strand to SEQ ID NO: 1633403
uguggacuuaaacauccca

SEQ ID NO: 1633405 - RNA, 19 nt, Artificial Sequence
  Description of Artificial Sequence: Synthetic oligonucleotide
  Sense strand starting at position 2638 of SEQ ID NO: 1560911
cuauucgggcccugaugaa

SEQ ID NO: 1633406 - RNA, 19 nt, Artificial Sequence
  Description of Artificial Sequence: Synthetic oligonucleotide
  Antisense strand to SEQ ID NO: 1633405
uucaucagggcccgaauag

SEQ ID NO: 1633407 - RNA, 19 nt, Artificial Sequence
  Description of Artificial Sequence: Synthetic oligonucleotide
  Sense strand starting at position 2658 of SEQ ID NO: 1560911
gcguuugguccugagagga

SEQ ID NO: 1633408 - RNA, 19 nt, Artificial Sequence
  Description of Artificial Sequence: Synthetic oligonucleotide
  Antisense strand to SEQ ID NO: 1633407
uccucucaggaccaaacgc

SEQ ID NO: 1633409 - RNA, 19 nt, Artificial Sequence
  Description of Artificial Sequence: Synthetic oligonucleotide
  Sense strand starting at position 2803 of SEQ ID NO: 1560911
cggucacuucuacagauga

SEQ ID NO: 1633410 - RNA, 19 nt, Artificial Sequence
  Description of Artificial Sequence: Synthetic oligonucleotide
  Antisense strand to SEQ ID NO: 1633409
ucaucuguagaagugaccg

SEQ ID NO: 1633411 - RNA, 19 nt, Artificial Sequence
  Description of Artificial Sequence: Synthetic oligonucleotide
  Sense strand starting at position 2889 of SEQ ID NO: 1560911
gggugaggugcaagcuuau

SEQ ID NO: 1633412 - RNA, 19 nt, Artificial Sequence
  Description of Artificial Sequence: Synthetic oligonucleotide
  Antisense strand to SEQ ID NO: 1633411
auaagcuugcaccucaccc

SEQ ID NO: 1633413 - RNA, 19 nt, Artificial Sequence
  Description of Artificial Sequence: Synthetic oligonucleotide
  Sense strand starting at position 3086 of SEQ ID NO: 1560911
gagguuacuaguggguuaa

SEQ ID NO: 1633414 - RNA, 19 nt, Artificial Sequence
  Description of Artificial Sequence: Synthetic oligonucleotide
  Antisense strand to SEQ ID NO: 1633413
uuaacccacuaguaaccuc

SEQ ID NO: 1633415 - RNA, 19 nt, Artificial Sequence
  Description of Artificial Sequence: Synthetic oligonucleotide
  Sense strand starting at position 3088 of SEQ ID NO: 1560911
gguuacuaguggguuaaga

SEQ ID NO: 1633416 - RNA, 19 nt, Artificial Sequence
  Description of Artificial Sequence: Synthetic oligonucleotide
  Antisense strand to SEQ ID NO: 1633415
ucuuaacccacuaguaacc

SEQ ID NO: 1633417 - RNA, 19 nt, Artificial Sequence
  Description of Artificial Sequence: Synthetic oligonucleotide
  Sense strand starting at position 3090 of SEQ ID NO: 1560911
uuacuaguggguuaagacu

SEQ ID NO: 1633418 - RNA, 19 nt, Artificial Sequence
  Description of Artificial Sequence: Synthetic oligonucleotide
  Antisense strand to SEQ ID NO: 1633417
agucuuaacccacuaguaa

SEQ ID NO: 1633419 - RNA, 19 nt, Artificial Sequence
  Description of Artificial Sequence: Synthetic oligonucleotide
  Sense strand starting at position 3101 of SEQ ID NO: 1560911
uuaagacuguugcucuaga

SEQ ID NO: 1633420 - RNA, 19 nt, Artificial Sequence
  Description of Artificial Sequence: Synthetic oligonucleotide
  Antisense strand to SEQ ID NO: 1633419
ucuagagcaacagucuuaa

SEQ ID NO: 1633421 - RNA, 19 nt, Artificial Sequence
  Description of Artificial Sequence: Synthetic oligonucleotide
  Sense strand starting at position 3102 of SEQ ID NO: 1560911
uaagacuguugcucuagaa

SEQ ID NO: 1633422 - RNA, 19 nt, Artificial Sequence
  Description of Artificial Sequence: Synthetic oligonucleotide
  Antisense strand to SEQ ID NO: 1633421
uucuagagcaacagucuua

SEQ ID NO: 1633423 - RNA, 19 nt, Artificial Sequence
  Description of Artificial Sequence: Synthetic oligonucleotide
  Sense strand starting at position 3106 of SEQ ID NO: 1560911
acuguugcucuagaaagac

SEQ ID NO: 1633424 - RNA, 19 nt, Artificial Sequence
  Description of Artificial Sequence: Synthetic oligonucleotide
  Antisense strand to SEQ ID NO: 1633423
gucuuucuagagcaacagu

SEQ ID NO: 1633425 - RNA, 19 nt, Artificial Sequence
  Description of Artificial Sequence: Synthetic oligonucleotide
  Sense strand starting at position 3152 of SEQ ID NO: 1560911
uguguuuggguccaagaga

SEQ ID NO: 1633426 - RNA, 19 nt, Artificial Sequence
  Description of Artificial Sequence: Synthetic oligonucleotide
  Antisense strand to SEQ ID NO: 1633425
ucucuuggacccaaacaca

SEQ ID NO: 1633427 - RNA, 19 nt, Artificial Sequence
  Description of Artificial Sequence: Synthetic oligonucleotide
  Sense strand starting at position 3516 of SEQ ID NO: 1560911
ccucgaaugagccagcuuu

SEQ ID NO: 1633428 - RNA, 19 nt, Artificial Sequence
  Description of Artificial Sequence: Synthetic oligonucleotide
  Antisense strand to SEQ ID NO: 1633427
aaagcuggcucauucgagg

SEQ ID NO: 1633429 - RNA, 19 nt, Artificial Sequence
  Description of Artificial Sequence: Synthetic oligonucleotide
  Sense strand starting at position 3649 of SEQ ID NO: 1560911
cucgucacuugugccaaau

SEQ ID NO: 1633430 - RNA, 19 nt, Artificial Sequence
  Description of Artificial Sequence: Synthetic oligonucleotide
  Antisense strand to SEQ ID NO: 1633429
auuuggcacaagugacgag

SEQ ID NO: 1633431 - RNA, 19 nt, Artificial Sequence
  Description of Artificial Sequence: Synthetic oligonucleotide
  Sense strand starting at position 3661 of SEQ ID NO: 1560911
gccaaaugacagugcagua

SEQ ID NO: 1633432 - RNA, 19 nt, Artificial Sequence
  Description of Artificial Sequence: Synthetic oligonucleotide
  Antisense strand to SEQ ID NO: 1633431
uacugcacugucauuuggc

SEQ ID NO: 1633433 - RNA, 19 nt, Artificial Sequence
  Description of Artificial Sequence: Synthetic oligonucleotide
  Sense strand starting at position 3733 of SEQ ID NO: 1560911
gcugcagagcuugaucaga

SEQ ID NO: 1633434 - RNA, 19 nt, Artificial Sequence
  Description of Artificial Sequence: Synthetic oligonucleotide
  Antisense strand to SEQ ID NO: 1633433
ucugaucaagcucugcagc

SEQ ID NO: 1633435 - RNA, 19 nt, Artificial Sequence
  Description of Artificial Sequence: Synthetic oligonucleotide
  Sense strand starting at position 3735 of SEQ ID NO: 1560911
ugcagagcuugaucagaga

SEQ ID NO: 1633436 - RNA, 19 nt, Artificial Sequence
  Description of Artificial Sequence: Synthetic oligonucleotide
  Antisense strand to SEQ ID NO: 1633435
ucucugaucaagcucugca

SEQ ID NO: 1633437 - RNA, 19 nt, Artificial Sequence
  Description of Artificial Sequence: Synthetic oligonucleotide
  Sense strand starting at position 3856 of SEQ ID NO: 1560911
gcagacuaguucuuuccua

SEQ ID NO: 1633438 - RNA, 19 nt, Artificial Sequence
  Description of Artificial Sequence: Synthetic oligonucleotide
  Antisense strand to SEQ ID NO: 1633437
uaggaaagaacuagucugc

SEQ ID NO: 1633439 - RNA, 19 nt, Artificial Sequence
  Description of Artificial Sequence: Synthetic oligonucleotide
  Sense strand starting at position 181 of SEQ ID NO: 1560912
gagugucaugugccuugca

SEQ ID NO: 1633440 - RNA, 19 nt, Artificial Sequence
  Description of Artificial Sequence: Synthetic oligonucleotide
  Antisense strand to SEQ ID NO: 1633439
ugcaaggcacaugacacuc

SEQ ID NO: 1633441 - RNA, 19 nt, Artificial Sequence
  Description of Artificial Sequence: Synthetic oligonucleotide
  Sense strand starting at position 183 of SEQ ID NO: 1560912
gugucaugugccuugcauu

SEQ ID NO: 1633442 - RNA, 19 nt, Artificial Sequence
  Description of Artificial Sequence: Synthetic oligonucleotide
  Antisense strand to SEQ ID NO: 1633441
aaugcaaggcacaugacac

SEQ ID NO: 1633443 - RNA, 19 nt, Artificial Sequence
  Description of Artificial Sequence: Synthetic oligonucleotide
  Sense strand starting at position 284 of SEQ ID NO: 1560912
cgaggaacaacuuguccaa

SEQ ID NO: 1633444 - RNA, 19 nt, Artificial Sequence
  Description of Artificial Sequence: Synthetic oligonucleotide
  Antisense strand to SEQ ID NO: 1633443
uuggacaaguuguuccucg

SEQ ID NO: 1633445 - RNA, 19 nt, Artificial Sequence
  Description of Artificial Sequence: Synthetic oligonucleotide
  Sense strand starting at position 300 of SEQ ID NO: 1560912
caaggucucgcuuggcaga

SEQ ID NO: 1633446 - RNA, 19 nt, Artificial Sequence
  Description of Artificial Sequence: Synthetic oligonucleotide
  Antisense strand to SEQ ID NO: 1633445
ucugccaagcgagaccuug

SEQ ID NO: 1633447 - RNA, 19 nt, Artificial Sequence
  Description of Artificial Sequence: Synthetic oligonucleotide
  Sense strand starting at position 369 of SEQ ID NO: 1560912
uggacugccuucucaugau

SEQ ID NO: 1633448 - RNA, 19 nt, Artificial Sequence
  Description of Artificial Sequence: Synthetic oligonucleotide
  Antisense strand to SEQ ID NO: 1633447
aucaugagaaggcagucca

SEQ ID NO: 1633449 - RNA, 19 nt, Artificial Sequence
  Description of Artificial Sequence: Synthetic oligonucleotide
  Sense strand starting at position 511 of SEQ ID NO: 1560912
auguguguugugcauguau

SEQ ID NO: 1633450 - RNA, 19 nt, Artificial Sequence
  Description of Artificial Sequence: Synthetic oligonucleotide
  Antisense strand to SEQ ID NO: 1633449
auacaugcacaacacacau

SEQ ID NO: 1633451 - RNA, 19 nt, Artificial Sequence
  Description of Artificial Sequence: Synthetic oligonucleotide
  Sense strand starting at position 514 of SEQ ID NO: 1560912
uguguugugcauguaugua

SEQ ID NO: 1633452 - RNA, 19 nt, Artificial Sequence
  Description of Artificial Sequence: Synthetic oligonucleotide
  Antisense strand to SEQ ID NO: 1633451
uacauacaugcacaacaca

SEQ ID NO: 1633453 - RNA, 19 nt, Artificial Sequence
  Description of Artificial Sequence: Synthetic oligonucleotide
  Sense strand starting at position 539 of SEQ ID NO: 1560912
guccucauccuguguuauc

SEQ ID NO: 1633454 - RNA, 19 nt, Artificial Sequence
  Description of Artificial Sequence: Synthetic oligonucleotide
  Antisense strand to SEQ ID NO: 1633453
gauaacacaggaugaggac

SEQ ID NO: 1633455 - RNA, 19 nt, Artificial Sequence
  Description of Artificial Sequence: Synthetic oligonucleotide
  Sense strand starting at position 548 of SEQ ID NO: 1560912
cuguguuauccaggcaauc

SEQ ID NO: 1633456 - RNA, 19 nt, Artificial Sequence
  Description of Artificial Sequence: Synthetic oligonucleotide
  Antisense strand to SEQ ID NO: 1633455
gauugccuggauaacacag

SEQ ID NO: 1633457 - RNA, 19 nt, Artificial Sequence
  Description of Artificial Sequence: Synthetic oligonucleotide
  Sense strand starting at position 565 of SEQ ID NO: 1560912
ucucgaguccuugcugcau

SEQ ID NO: 1633458 - RNA, 19 nt, Artificial Sequence
  Description of Artificial Sequence: Synthetic oligonucleotide
  Antisense strand to SEQ ID NO: 1633457
augcagcaaggacucgaga

SEQ ID NO: 1633459 - RNA, 19 nt, Artificial Sequence
  Description of Artificial Sequence: Synthetic oligonucleotide
  Sense strand starting at position 567 of SEQ ID NO: 1560912
ucgaguccuugcugcauuu

SEQ ID NO: 1633460 - RNA, 19 nt, Artificial Sequence
  Description of Artificial Sequence: Synthetic oligonucleotide
  Antisense strand to SEQ ID NO: 1633459
aaaugcagcaaggacucga

SEQ ID NO: 1633461 - RNA, 19 nt, Artificial Sequence
  Description of Artificial Sequence: Synthetic oligonucleotide
  Sense strand starting at position 613 of SEQ ID NO: 1560912
gcccuugggcuggaugaaa

SEQ ID NO: 1633462 - RNA, 19 nt, Artificial Sequence
  Description of Artificial Sequence: Synthetic oligonucleotide
  Antisense strand to SEQ ID NO: 1633461
uuucauccagcccaagggc

SEQ ID NO: 1633463 - RNA, 19 nt, Artificial Sequence
  Description of Artificial Sequence: Synthetic oligonucleotide
  Sense strand starting at position 626 of SEQ ID NO: 1560912
augaaaucccacugcaguu

SEQ ID NO: 1633464 - RNA, 19 nt, Artificial Sequence
  Description of Artificial Sequence: Synthetic oligonucleotide
  Antisense strand to SEQ ID NO: 1633463
aacugcagugggauuucau

SEQ ID NO: 1633465 - RNA, 19 nt, Artificial Sequence
  Description of Artificial Sequence: Synthetic oligonucleotide
  Sense strand starting at position 639 of SEQ ID NO: 1560912
gcaguuucucuacaacugu

SEQ ID NO: 1633466 - RNA, 19 nt, Artificial Sequence
  Description of Artificial Sequence: Synthetic oligonucleotide
  Antisense strand to SEQ ID NO: 1633465
acaguuguagagaaacugc

SEQ ID NO: 1633467 - RNA, 19 nt, Artificial Sequence
  Description of Artificial Sequence: Synthetic oligonucleotide
  Sense strand starting at position 686 of SEQ ID NO: 1560912
gcagcuuccuuuccugaaa

SEQ ID NO: 1633468 - RNA, 19 nt, Artificial Sequence
  Description of Artificial Sequence: Synthetic oligonucleotide
  Antisense strand to SEQ ID NO: 1633467
uuucaggaaaggaagcugc

SEQ ID NO: 1633469 - RNA, 19 nt, Artificial Sequence
  Description of Artificial Sequence: Synthetic oligonucleotide
  Sense strand starting at position 719 of SEQ ID NO: 1560912
ggcgggugucuauggucau

SEQ ID NO: 1633470 - RNA, 19 nt, Artificial Sequence
  Description of Artificial Sequence: Synthetic oligonucleotide
  Antisense strand to SEQ ID NO: 1633469
augaccauagacacccgcc

SEQ ID NO: 1633471 - RNA, 19 nt, Artificial Sequence
  Description of Artificial Sequence: Synthetic oligonucleotide
  Sense strand starting at position 725 of SEQ ID NO: 1560912
ugucuauggucaugucugu

SEQ ID NO: 1633472 - RNA, 19 nt, Artificial Sequence
  Description of Artificial Sequence: Synthetic oligonucleotide
  Antisense strand to SEQ ID NO: 1633471
acagacaugaccauagaca

SEQ ID NO: 1633473 - RNA, 19 nt, Artificial Sequence
  Description of Artificial Sequence: Synthetic oligonucleotide
  Sense strand starting at position 730 of SEQ ID NO: 1560912
auggucaugucugugugua

SEQ ID NO: 1633474 - RNA, 19 nt, Artificial Sequence
  Description of Artificial Sequence: Synthetic oligonucleotide
  Antisense strand to SEQ ID NO: 1633473
uacacacagacaugaccau

SEQ ID NO: 1633475 - RNA, 19 nt, Artificial Sequence
  Description of Artificial Sequence: Synthetic oligonucleotide
  Sense strand starting at position 731 of SEQ ID NO: 1560912
uggucaugucuguguguac

SEQ ID NO: 1633476 - RNA, 19 nt, Artificial Sequence
  Description of Artificial Sequence: Synthetic oligonucleotide
  Antisense strand to SEQ ID NO: 1633475
guacacacagacaugacca

SEQ ID NO: 1633477 - RNA, 19 nt, Artificial Sequence
  Description of Artificial Sequence: Synthetic oligonucleotide
  Sense strand starting at position 732 of SEQ ID NO: 1560912
ggucaugucuguguguacu

SEQ ID NO: 1633478 - RNA, 19 nt, Artificial Sequence
  Description of Artificial Sequence: Synthetic oligonucleotide
  Antisense strand to SEQ ID NO: 1633477
aguacacacagacaugacc

SEQ ID NO: 1633479 - RNA, 19 nt, Artificial Sequence
  Description of Artificial Sequence: Synthetic oligonucleotide
  Sense strand starting at position 784 of SEQ ID NO: 1560912
ccauucgaggccuggauaa

SEQ ID NO: 1633480 - RNA, 19 nt, Artificial Sequence
  Description of Artificial Sequence: Synthetic oligonucleotide
  Antisense strand to SEQ ID NO: 1633479
uuauccaggccucgaaugg

SEQ ID NO: 1633481 - RNA, 19 nt, Artificial Sequence
  Description of Artificial Sequence: Synthetic oligonucleotide
  Sense strand starting at position 2591 of SEQ ID NO: 1560912
ccgugaauauuccgcucca

SEQ ID NO: 1633482 - RNA, 19 nt, Artificial Sequence
  Description of Artificial Sequence: Synthetic oligonucleotide
  Antisense strand to SEQ ID NO: 1633481
uggagcggaauauucacgg

SEQ ID NO: 1633483 - RNA, 19 nt, Artificial Sequence
  Description of Artificial Sequence: Synthetic oligonucleotide
  Sense strand starting at position 2592 of SEQ ID NO: 1560912
cgugaauauuccgcuccag

SEQ ID NO: 1633484 - RNA, 19 nt, Artificial Sequence
  Description of Artificial Sequence: Synthetic oligonucleotide
  Antisense strand to SEQ ID NO: 1633483
cuggagcggaauauucacg

SEQ ID NO: 1633485 - RNA, 19 nt, Artificial Sequence
  Description of Artificial Sequence: Synthetic oligonucleotide
  Sense strand starting at position 2624 of SEQ ID NO: 1560912
acucgcuccguuuggaaau

SEQ ID NO: 1633486 - RNA, 19 nt, Artificial Sequence
  Description of Artificial Sequence: Synthetic oligonucleotide
  Antisense strand to SEQ ID NO: 1633485
auuuccaaacggagcgagu

SEQ ID NO: 1633487 - RNA, 19 nt, Artificial Sequence
  Description of Artificial Sequence: Synthetic oligonucleotide
  Sense strand starting at position 2635 of SEQ ID NO: 1560912
uuggaaauccguucgcugu

SEQ ID NO: 1633488 - RNA, 19 nt, Artificial Sequence
  Description of Artificial Sequence: Synthetic oligonucleotide
  Antisense strand to SEQ ID NO: 1633487
acagcgaacggauuuccaa

SEQ ID NO: 1633489 - RNA, 19 nt, Artificial Sequence
  Description of Artificial Sequence: Synthetic oligonucleotide
  Sense strand starting at position 2636 of SEQ ID NO: 1560912
uggaaauccguucgcuguu

SEQ ID NO: 1633490 - RNA, 19 nt, Artificial Sequence
  Description of Artificial Sequence: Synthetic oligonucleotide
  Antisense strand to SEQ ID NO: 1633489
aacagcgaacggauuucca

SEQ ID NO: 1633491 - RNA, 19 nt, Artificial Sequence
  Description of Artificial Sequence: Synthetic oligonucleotide
  Sense strand starting at position 2649 of SEQ ID NO: 1560912
gcuguucugucuccucuaa

SEQ ID NO: 1633492 - RNA, 19 nt, Artificial Sequence
  Description of Artificial Sequence: Synthetic oligonucleotide
  Antisense strand to SEQ ID NO: 1633491
uuagaggagacagaacagc

SEQ ID NO: 1633493 - RNA, 19 nt, Artificial Sequence
  Description of Artificial Sequence: Synthetic oligonucleotide
  Sense strand starting at position 2651 of SEQ ID NO: 1560912
uguucugucuccucuaauc

SEQ ID NO: 1633494 - RNA, 19 nt, Artificial Sequence
  Description of Artificial Sequence: Synthetic oligonucleotide
  Antisense strand to SEQ ID NO: 1633493
gauuagaggagacagaaca

SEQ ID NO: 1633495 - RNA, 19 nt, Artificial Sequence
  Description of Artificial Sequence: Synthetic oligonucleotide
  Sense strand starting at position 2656 of SEQ ID NO: 1560912
ugucuccucuaaucauagu

SEQ ID NO: 1633496 - RNA, 19 nt, Artificial Sequence
  Description of Artificial Sequence: Synthetic oligonucleotide
  Antisense strand to SEQ ID NO: 1633495
acuaugauuagaggagaca

SEQ ID NO: 1633497 - RNA, 19 nt, Artificial Sequence
  Description of Artificial Sequence: Synthetic oligonucleotide
  Sense strand starting at position 2690 of SEQ ID NO: 1560912
gggucgggcucuugcgaaa

SEQ ID NO: 1633498 - RNA, 19 nt, Artificial Sequence
  Description of Artificial Sequence: Synthetic oligonucleotide
  Antisense strand to SEQ ID NO: 1633497
uuucgcaagagcccgaccc

SEQ ID NO: 1633499 - RNA, 19 nt, Artificial Sequence
  Description of Artificial Sequence: Synthetic oligonucleotide
  Sense strand starting at position 2895 of SEQ ID NO: 1560912
ccuagaccuugugucuaga

SEQ ID NO: 1633500 - RNA, 19 nt, Artificial Sequence
  Description of Artificial Sequence: Synthetic oligonucleotide
  Antisense strand to SEQ ID NO: 1633499
ucuagacacaaggucuagg

SEQ ID NO: 1633501 - RNA, 19 nt, Artificial Sequence
  Description of Artificial Sequence: Synthetic oligonucleotide
  Sense strand starting at position 2897 of SEQ ID NO: 1560912
uagaccuugugucuagauu

SEQ ID NO: 1633502 - RNA, 19 nt, Artificial Sequence
  Description of Artificial Sequence: Synthetic oligonucleotide
  Antisense strand to SEQ ID NO: 1633501
aaucuagacacaaggucua

SEQ ID NO: 1633503 - RNA, 19 nt, Artificial Sequence
  Description of Artificial Sequence: Synthetic oligonucleotide
  Sense strand starting at position 2898 of SEQ ID NO: 1560912
agaccuugugucuagauug

SEQ ID NO: 1633504 - RNA, 19 nt, Artificial Sequence
  Description of Artificial Sequence: Synthetic oligonucleotide
  Antisense strand to SEQ ID NO: 1633503
caaucuagacacaaggucu

SEQ ID NO: 1633505 - RNA, 19 nt, Artificial Sequence
  Description of Artificial Sequence: Synthetic oligonucleotide
  Sense strand starting at position 2903 of SEQ ID NO: 1560912
uugugucuagauugaugaa

SEQ ID NO: 1633506 - RNA, 19 nt, Artificial Sequence
  Description of Artificial Sequence: Synthetic oligonucleotide
  Antisense strand to SEQ ID NO: 1633505
uucaucaaucuagacacaa

SEQ ID NO: 1633507 - RNA, 19 nt, Artificial Sequence
  Description of Artificial Sequence: Synthetic oligonucleotide
  Sense strand starting at position 2904 of SEQ ID NO: 1560912
ugugucuagauugaugaag

SEQ ID NO: 1633508 - RNA, 19 nt, Artificial Sequence
  Description of Artificial Sequence: Synthetic oligonucleotide
  Antisense strand to SEQ ID NO: 1633507
cuucaucaaucuagacaca

SEQ ID NO: 1633509 - RNA, 19 nt, Artificial Sequence
  Description of Artificial Sequence: Synthetic oligonucleotide
  Sense strand starting at position 2906 of SEQ ID NO: 1560912
ugucuagauugaugaaggu

SEQ ID NO: 1633510 - RNA, 19 nt, Artificial Sequence
  Description of Artificial Sequence: Synthetic oligonucleotide
  Antisense strand to SEQ ID NO: 1633509
accuucaucaaucuagaca

SEQ ID NO: 1633511 - RNA, 19 nt, Artificial Sequence
  Description of Artificial Sequence: Synthetic oligonucleotide
  Sense strand starting at position 2968 of SEQ ID NO: 1560912
ccucucuacccauguuaga

SEQ ID NO: 1633512 - RNA, 19 nt, Artificial Sequence
  Description of Artificial Sequence: Synthetic oligonucleotide
  Antisense strand to SEQ ID NO: 1633511
ucuaacauggguagagagg

SEQ ID NO: 1633513 - RNA, 19 nt, Artificial Sequence
  Description of Artificial Sequence: Synthetic oligonucleotide
  Sense strand starting at position 2979 of SEQ ID NO: 1560912
auguuagaggccuacugua

SEQ ID NO: 1633514 - RNA, 19 nt, Artificial Sequence
  Description of Artificial Sequence: Synthetic oligonucleotide
  Antisense strand to SEQ ID NO: 1633513
uacaguaggccucuaacau

SEQ ID NO: 1633515 - RNA, 19 nt, Artificial Sequence
  Description of Artificial Sequence: Synthetic oligonucleotide
  Sense strand starting at position 3801 of SEQ ID NO: 1560912
gcuagucucuuccagaaau

SEQ ID NO: 1633516 - RNA, 19 nt, Artificial Sequence
  Description of Artificial Sequence: Synthetic oligonucleotide
  Antisense strand to SEQ ID NO: 1633515
auuucuggaagagacuagc

SEQ ID NO: 1633517 - RNA, 19 nt, Artificial Sequence
  Description of Artificial Sequence: Synthetic oligonucleotide
  Sense strand starting at position 3979 of SEQ ID NO: 1560912
acaauaugauggcaucauu

SEQ ID NO: 1633518 - RNA, 19 nt, Artificial Sequence
  Description of Artificial Sequence: Synthetic oligonucleotide
  Antisense strand to SEQ ID NO: 1633517
aaugaugccaucauauugu

SEQ ID NO: 1633519 - RNA, 19 nt, Artificial Sequence
  Description of Artificial Sequence: Synthetic oligonucleotide
  Sense strand starting at position 14 of SEQ ID NO: 1560913
aggacaugucucugcacca

SEQ ID NO: 1633520 - RNA, 19 nt, Artificial Sequence
  Description of Artificial Sequence: Synthetic oligonucleotide
  Antisense strand to SEQ ID NO: 1633519
uggugcagagacauguccu

SEQ ID NO: 1633521 - RNA, 19 nt, Artificial Sequence
  Description of Artificial Sequence: Synthetic oligonucleotide
  Sense strand starting at position 56 of SEQ ID NO: 1560913
cccagccucuguucucaua

SEQ ID NO: 1633522 - RNA, 19 nt, Artificial Sequence
  Description of Artificial Sequence: Synthetic oligonucleotide
  Antisense strand to SEQ ID NO: 1633521
uaugagaacagaggcuggg

SEQ ID NO: 1633523 - RNA, 19 nt, Artificial Sequence
  Description of Artificial Sequence: Synthetic oligonucleotide
  Sense strand starting at position 59 of SEQ ID NO: 1560913
agccucuguucucauauuu

SEQ ID NO: 1633524 - RNA, 19 nt, Artificial Sequence
  Description of Artificial Sequence: Synthetic oligonucleotide
  Antisense strand to SEQ ID NO: 1633523
aaauaugagaacagaggcu

SEQ ID NO: 1633525 - RNA, 19 nt, Artificial Sequence
  Description of Artificial Sequence: Synthetic oligonucleotide
  Sense strand starting at position 503 of SEQ ID NO: 1560913
gguggaaucucgccauacu

SEQ ID NO: 1633526 - RNA, 19 nt, Artificial Sequence
  Description of Artificial Sequence: Synthetic oligonucleotide
  Antisense strand to SEQ ID NO: 1633525
aguauggcgagauuccacc

SEQ ID NO: 1633527 - RNA, 19 nt, Artificial Sequence
  Description of Artificial Sequence: Synthetic oligonucleotide
  Sense strand starting at position 504 of SEQ ID NO: 1560913
guggaaucucgccauacug

SEQ ID NO: 1633528 - RNA, 19 nt, Artificial Sequence
  Description of Artificial Sequence: Synthetic oligonucleotide
  Antisense strand to SEQ ID NO: 1633527
caguauggcgagauuccac

SEQ ID NO: 1633529 - RNA, 19 nt, Artificial Sequence
  Description of Artificial Sequence: Synthetic oligonucleotide
  Sense strand starting at position 810 of SEQ ID NO: 1560913
cccuacguauuauacuauu

SEQ ID NO: 1633530 - RNA, 19 nt, Artificial Sequence
  Description of Artificial Sequence: Synthetic oligonucleotide
  Antisense strand to SEQ ID NO: 1633529
aauaguauaauacguaggg

SEQ ID NO: 1633531 - RNA, 19 nt, Artificial Sequence
  Description of Artificial Sequence: Synthetic oligonucleotide
  Sense strand starting at position 919 of SEQ ID NO: 1560913
ggcagagacuuggcucauu

SEQ ID NO: 1633532 - RNA, 19 nt, Artificial Sequence
  Description of Artificial Sequence: Synthetic oligonucleotide
  Antisense strand to SEQ ID NO: 1633531
aaugagccaagucucugcc

SEQ ID NO: 1633533 - RNA, 19 nt, Artificial Sequence
  Description of Artificial Sequence: Synthetic oligonucleotide
  Sense strand starting at position 1108 of SEQ ID NO: 1560913
cgggcugauggucaggaau

SEQ ID NO: 1633534 - RNA, 19 nt, Artificial Sequence
  Description of Artificial Sequence: Synthetic oligonucleotide
  Antisense strand to SEQ ID NO: 1633533
auuccugaccaucagcccg

SEQ ID NO: 1633535 - RNA, 19 nt, Artificial Sequence
  Description of Artificial Sequence: Synthetic oligonucleotide
  Sense strand starting at position 1120 of SEQ ID NO: 1560913
caggaaugcucacaguuga

SEQ ID NO: 1633536 - RNA, 19 nt, Artificial Sequence
  Description of Artificial Sequence: Synthetic oligonucleotide
  Antisense strand to SEQ ID NO: 1633535
ucaacugugagcauuccug

SEQ ID NO: 1633537 - RNA, 19 nt, Artificial Sequence
  Description of Artificial Sequence: Synthetic oligonucleotide
  Sense strand starting at position 1137 of SEQ ID NO: 1560913
gacagugccugagaggauu

SEQ ID NO: 1633538 - RNA, 19 nt, Artificial Sequence
  Description of Artificial Sequence: Synthetic oligonucleotide
  Antisense strand to SEQ ID NO: 1633537
aauccucucaggcacuguc

SEQ ID NO: 1633539 - RNA, 19 nt, Artificial Sequence
  Description of Artificial Sequence: Synthetic oligonucleotide
  Sense strand starting at position 1176 of SEQ ID NO: 1560913
aggcgcugucuccugcaua

SEQ ID NO: 1633540 - RNA, 19 nt, Artificial Sequence
  Description of Artificial Sequence: Synthetic oligonucleotide
  Antisense strand to SEQ ID NO: 1633539
uaugcaggagacagcgccu

SEQ ID NO: 1633541 - RNA, 19 nt, Artificial Sequence
  Description of Artificial Sequence: Synthetic oligonucleotide
  Sense strand starting at position 1302 of SEQ ID NO: 1560913
accuguggucaaggagauu

SEQ ID NO: 1633542 - RNA, 19 nt, Artificial Sequence
  Description of Artificial Sequence: Synthetic oligonucleotide
  Antisense strand to SEQ ID NO: 1633541
aaucuccuugaccacaggu

SEQ ID NO: 1633543 - RNA, 19 nt, Artificial Sequence
  Description of Artificial Sequence: Synthetic oligonucleotide
  Sense strand starting at position 1335 of SEQ ID NO: 1560913
gcagaaacguguggccuuu

SEQ ID NO: 1633544 - RNA, 19 nt, Artificial Sequence
  Description of Artificial Sequence: Synthetic oligonucleotide
  Antisense strand to SEQ ID NO: 1633543
aaaggccacacguuucugc

SEQ ID NO: 1633545 - RNA, 19 nt, Artificial Sequence
  Description of Artificial Sequence: Synthetic oligonucleotide
  Sense strand starting at position 1399 of SEQ ID NO: 1560913
caggauugcuccuuggaaa

SEQ ID NO: 1633546 - RNA, 19 nt, Artificial Sequence
  Description of Artificial Sequence: Synthetic oligonucleotide
  Antisense strand to SEQ ID NO: 1633545
uuuccaaggagcaauccug

SEQ ID NO: 1633547 - RNA, 19 nt, Artificial Sequence
  Description of Artificial Sequence: Synthetic oligonucleotide
  Sense strand starting at position 1400 of SEQ ID NO: 1560913
aggauugcuccuuggaaag

SEQ ID NO: 1633548 - RNA, 19 nt, Artificial Sequence
  Description of Artificial Sequence: Synthetic oligonucleotide
  Antisense strand to SEQ ID NO: 1633547
cuuuccaaggagcaauccu

SEQ ID NO: 1633549 - RNA, 19 nt, Artificial Sequence
  Description of Artificial Sequence: Synthetic oligonucleotide
  Sense strand starting at position 1502 of SEQ ID NO: 1560913
cuagauaagucaggguuag

SEQ ID NO: 1633550 - RNA, 19 nt, Artificial Sequence
  Description of Artificial Sequence: Synthetic oligonucleotide
  Antisense strand to SEQ ID NO: 1633549
cuaacccugacuuaucuag

SEQ ID NO: 1633551 - RNA, 19 nt, Artificial Sequence
  Description of Artificial Sequence: Synthetic oligonucleotide
  Sense strand starting at position 1775 of SEQ ID NO: 1560913
ucccguuucccagaugucu

SEQ ID NO: 1633552 - RNA, 19 nt, Artificial Sequence
  Description of Artificial Sequence: Synthetic oligonucleotide
  Antisense strand to SEQ ID NO: 1633551
agacaucugggaaacggga

SEQ ID NO: 1633553 - RNA, 19 nt, Artificial Sequence
  Description of Artificial Sequence: Synthetic oligonucleotide
  Sense strand starting at position 1838 of SEQ ID NO: 1560913
auccuauccuucugggaac

SEQ ID NO: 1633554 - RNA, 19 nt, Artificial Sequence
  Description of Artificial Sequence: Synthetic oligonucleotide
  Antisense strand to SEQ ID NO: 1633553
guucccagaaggauaggau

SEQ ID NO: 1633555 - RNA, 19 nt, Artificial Sequence
  Description of Artificial Sequence: Synthetic oligonucleotide
  Sense strand starting at position 1839 of SEQ ID NO: 1560913
uccuauccuucugggaaca

SEQ ID NO: 1633556 - RNA, 19 nt, Artificial Sequence
  Description of Artificial Sequence: Synthetic oligonucleotide
  Antisense strand to SEQ ID NO: 1633555
uguucccagaaggauagga

SEQ ID NO: 1633557 - RNA, 19 nt, Artificial Sequence
  Description of Artificial Sequence: Synthetic oligonucleotide
  Sense strand starting at position 1840 of SEQ ID NO: 1560913
ccuauccuucugggaacau

SEQ ID NO: 1633558 - RNA, 19 nt, Artificial Sequence
  Description of Artificial Sequence: Synthetic oligonucleotide
  Antisense strand to SEQ ID NO: 1633557
auguucccagaaggauagg

SEQ ID NO: 1633559 - RNA, 19 nt, Artificial Sequence
  Description of Artificial Sequence: Synthetic oligonucleotide
  Sense strand starting at position 1841 of SEQ ID NO: 1560913
cuauccuucugggaacauc

SEQ ID NO: 1633560 - RNA, 19 nt, Artificial Sequence
  Description of Artificial Sequence: Synthetic oligonucleotide
  Antisense strand to SEQ ID NO: 1633559
gauguucccagaaggauag

SEQ ID NO: 1633561 - RNA, 19 nt, Artificial Sequence
  Description of Artificial Sequence: Synthetic oligonucleotide
  Sense strand starting at position 2410 of SEQ ID NO: 1560913
acuucuauuucgcuugaau

SEQ ID NO: 1633562 - RNA, 19 nt, Artificial Sequence
  Description of Artificial Sequence: Synthetic oligonucleotide
  Antisense strand to SEQ ID NO: 1633561
auucaagcgaaauagaagu

SEQ ID NO: 1633563 - RNA, 19 nt, Artificial Sequence
  Description of Artificial Sequence: Synthetic oligonucleotide
  Sense strand starting at position 2412 of SEQ ID NO: 1560913
uucuauuucgcuugaauuc

SEQ ID NO: 1633564 - RNA, 19 nt, Artificial Sequence
  Description of Artificial Sequence: Synthetic oligonucleotide
  Antisense strand to SEQ ID NO: 1633563
gaauucaagcgaaauagaa

SEQ ID NO: 1633565 - RNA, 19 nt, Artificial Sequence
  Description of Artificial Sequence: Synthetic oligonucleotide
  Sense strand starting at position 2471 of SEQ ID NO: 1560913
gcccgcauguuccuaacau

SEQ ID NO: 1633566 - RNA, 19 nt, Artificial Sequence
  Description of Artificial Sequence: Synthetic oligonucleotide
  Antisense strand to SEQ ID NO: 1633565
auguuaggaacaugcgggc

SEQ ID NO: 1633567 - RNA, 19 nt, Artificial Sequence
  Description of Artificial Sequence: Synthetic oligonucleotide
  Sense strand starting at position 2472 of SEQ ID NO: 1560913
cccgcauguuccuaacaug

SEQ ID NO: 1633568 - RNA, 19 nt, Artificial Sequence
  Description of Artificial Sequence: Synthetic oligonucleotide
  Antisense strand to SEQ ID NO: 1633567
cauguuaggaacaugcggg

SEQ ID NO: 1633569 - RNA, 19 nt, Artificial Sequence
  Description of Artificial Sequence: Synthetic oligonucleotide
  Sense strand starting at position 2483 of SEQ ID NO: 1560913
cuaacauggucacuaguuu

SEQ ID NO: 1633570 - RNA, 19 nt, Artificial Sequence
  Description of Artificial Sequence: Synthetic oligonucleotide
  Antisense strand to SEQ ID NO: 1633569
aaacuagugaccauguuag

SEQ ID NO: 1633571 - RNA, 19 nt, Artificial Sequence
  Description of Artificial Sequence: Synthetic oligonucleotide
  Sense strand starting at position 2821 of SEQ ID NO: 1560913
guuucuuacucucuauagu

SEQ ID NO: 1633572 - RNA, 19 nt, Artificial Sequence
  Description of Artificial Sequence: Synthetic oligonucleotide
  Antisense strand to SEQ ID NO: 1633571
acuauagagaguaagaaac

SEQ ID NO: 1633573 - RNA, 19 nt, Artificial Sequence
  Description of Artificial Sequence: Synthetic oligonucleotide
  Sense strand starting at position 3140 of SEQ ID NO: 1560913
gcagauaucacaggccaug

SEQ ID NO: 1633574 - RNA, 19 nt, Artificial Sequence
  Description of Artificial Sequence: Synthetic oligonucleotide
  Antisense strand to SEQ ID NO: 1633573
cauggccugugauaucugc

SEQ ID NO: 1633575 - RNA, 19 nt, Artificial Sequence
  Description of Artificial Sequence: Synthetic oligonucleotide
  Sense strand starting at position 3182 of SEQ ID NO: 1560913
gcagaaagcuuagcuggua

SEQ ID NO: 1633576 - RNA, 19 nt, Artificial Sequence
  Description of Artificial Sequence: Synthetic oligonucleotide
  Antisense strand to SEQ ID NO: 1633575
uaccagcuaagcuuucugc

SEQ ID NO: 1633577 - RNA, 19 nt, Artificial Sequence
  Description of Artificial Sequence: Synthetic oligonucleotide
  Sense strand starting at position 3219 of SEQ ID NO: 1560913
gugggugaguggugucaaa

SEQ ID NO: 1633578 - RNA, 19 nt, Artificial Sequence
  Description of Artificial Sequence: Synthetic oligonucleotide
  Antisense strand to SEQ ID NO: 1633577
uuugacaccacucacccac

SEQ ID NO: 1633579 - RNA, 19 nt, Artificial Sequence
  Description of Artificial Sequence: Synthetic oligonucleotide
  Sense strand starting at position 3552 of SEQ ID NO: 1560913
uuugcaguucuggaggagu

SEQ ID NO: 1633580 - RNA, 19 nt, Artificial Sequence
  Description of Artificial Sequence: Synthetic oligonucleotide
  Antisense strand to SEQ ID NO: 1633579
acuccuccagaacugcaaa

SEQ ID NO: 1633581 - RNA, 19 nt, Artificial Sequence
  Description of Artificial Sequence: Synthetic oligonucleotide
  Sense strand starting at position 3554 of SEQ ID NO: 1560913
ugcaguucuggaggaguga

SEQ ID NO: 1633582 - RNA, 19 nt, Artificial Sequence
  Description of Artificial Sequence: Synthetic oligonucleotide
  Antisense strand to SEQ ID NO: 1633581
ucacuccuccagaacugca

SEQ ID NO: 1633583 - RNA, 19 nt, Artificial Sequence
  Description of Artificial Sequence: Synthetic oligonucleotide
  Sense strand starting at position 3748 of SEQ ID NO: 1560913
aguaaucuccgucacggua

SEQ ID NO: 1633584 - RNA, 19 nt, Artificial Sequence
  Description of Artificial Sequence: Synthetic oligonucleotide
  Antisense strand to SEQ ID NO: 1633583
uaccgugacggagauuacu

SEQ ID NO: 1633585 - RNA, 19 nt, Artificial Sequence
  Description of Artificial Sequence: Synthetic oligonucleotide
  Sense strand starting at position 3828 of SEQ ID NO: 1560913
guuggaauugccugaacag

SEQ ID NO: 1633586 - RNA, 19 nt, Artificial Sequence
  Description of Artificial Sequence: Synthetic oligonucleotide
  Antisense strand to SEQ ID NO: 1633585
cuguucaggcaauuccaac

SEQ ID NO: 1633587 - RNA, 19 nt, Artificial Sequence
  Description of Artificial Sequence: Synthetic oligonucleotide
  Sense strand starting at position 3829 of SEQ ID NO: 1560913
uuggaauugccugaacagu

SEQ ID NO: 1633588 - RNA, 19 nt, Artificial Sequence
  Description of Artificial Sequence: Synthetic oligonucleotide
  Antisense strand to SEQ ID NO: 1633587
acuguucaggcaauuccaa

SEQ ID NO: 1633589 - RNA, 19 nt, Artificial Sequence
  Description of Artificial Sequence: Synthetic oligonucleotide
  Sense strand starting at position 3929 of SEQ ID NO: 1560913
uggaucaccugagguugau

SEQ ID NO: 1633590 - RNA, 19 nt, Artificial Sequence
  Description of Artificial Sequence: Synthetic oligonucleotide
  Antisense strand to SEQ ID NO: 1633589
aucaaccucaggugaucca

SEQ ID NO: 1633591 - RNA, 19 nt, Artificial Sequence
  Description of Artificial Sequence: Synthetic oligonucleotide
  Sense strand starting at position 21 of SEQ ID NO: 1560914
gcaaaucauuaacagugau

SEQ ID NO: 1633592 - RNA, 19 nt, Artificial Sequence
  Description of Artificial Sequence: Synthetic oligonucleotide
  Antisense strand to SEQ ID NO: 1633591
aucacuguuaaugauuugc

SEQ ID NO: 1633593 - RNA, 19 nt, Artificial Sequence
  Description of Artificial Sequence: Synthetic oligonucleotide
  Sense strand starting at position 29 of SEQ ID NO: 1560914
uuaacagugaucuggcgaa

SEQ ID NO: 1633594 - RNA, 19 nt, Artificial Sequence
  Description of Artificial Sequence: Synthetic oligonucleotide
  Antisense strand to SEQ ID NO: 1633593
uucgccagaucacuguuaa

SEQ ID NO: 1633595 - RNA, 19 nt, Artificial Sequence
  Description of Artificial Sequence: Synthetic oligonucleotide
  Sense strand starting at position 51 of SEQ ID NO: 1560914
cacccuugccaucgaugau

SEQ ID NO: 1633596 - RNA, 19 nt, Artificial Sequence
  Description of Artificial Sequence: Synthetic oligonucleotide
  Antisense strand to SEQ ID NO: 1633595
aucaucgauggcaagggug

SEQ ID NO: 1633597 - RNA, 19 nt, Artificial Sequence
  Description of Artificial Sequence: Synthetic oligonucleotide
  Sense strand starting at position 54 of SEQ ID NO: 1560914
ccuugccaucgaugauaaa

SEQ ID NO: 1633598 - RNA, 19 nt, Artificial Sequence
  Description of Artificial Sequence: Synthetic oligonucleotide
  Antisense strand to SEQ ID NO: 1633597
uuuaucaucgauggcaagg

SEQ ID NO: 1633599 - RNA, 19 nt, Artificial Sequence
  Description of Artificial Sequence: Synthetic oligonucleotide
  Sense strand starting at position 298 of SEQ ID NO: 1560914
cgccguaauccucagacaa

SEQ ID NO: 1633600 - RNA, 19 nt, Artificial Sequence
  Description of Artificial Sequence: Synthetic oligonucleotide
  Antisense strand to SEQ ID NO: 1633599
uugucugaggauuacggcg

SEQ ID NO: 1633601 - RNA, 19 nt, Artificial Sequence
  Description of Artificial Sequence: Synthetic oligonucleotide
  Sense strand starting at position 380 of SEQ ID NO: 1560914
gguguugauccugggagua

SEQ ID NO: 1633602 - RNA, 19 nt, Artificial Sequence
  Description of Artificial Sequence: Synthetic oligonucleotide
  Antisense strand to SEQ ID NO: 1633601
uacucccaggaucaacacc

SEQ ID NO: 1633603 - RNA, 19 nt, Artificial Sequence
  Description of Artificial Sequence: Synthetic oligonucleotide
  Sense strand starting at position 776 of SEQ ID NO: 1560914
aguagauagaguugcaucu

SEQ ID NO: 1633604 - RNA, 19 nt, Artificial Sequence
  Description of Artificial Sequence: Synthetic oligonucleotide
  Antisense strand to SEQ ID NO: 1633603
agaugcaacucuaucuacu

SEQ ID NO: 1633605 - RNA, 19 nt, Artificial Sequence
  Description of Artificial Sequence: Synthetic oligonucleotide
  Sense strand starting at position 778 of SEQ ID NO: 1560914
uagauagaguugcaucuga

SEQ ID NO: 1633606 - RNA, 19 nt, Artificial Sequence
  Description of Artificial Sequence: Synthetic oligonucleotide
  Antisense strand to SEQ ID NO: 1633605
ucagaugcaacucuaucua

SEQ ID NO: 1633607 - RNA, 19 nt, Artificial Sequence
  Description of Artificial Sequence: Synthetic oligonucleotide
  Sense strand starting at position 782 of SEQ ID NO: 1560914
uagaguugcaucugaguug

SEQ ID NO: 1633608 - RNA, 19 nt, Artificial Sequence
  Description of Artificial Sequence: Synthetic oligonucleotide
  Antisense strand to SEQ ID NO: 1633607
caacucagaugcaacucua

SEQ ID NO: 1633609 - RNA, 19 nt, Artificial Sequence
  Description of Artificial Sequence: Synthetic oligonucleotide
  Sense strand starting at position 785 of SEQ ID NO: 1560914
aguugcaucugaguugcau

SEQ ID NO: 1633610 - RNA, 19 nt, Artificial Sequence
  Description of Artificial Sequence: Synthetic oligonucleotide
  Antisense strand to SEQ ID NO: 1633609
augcaacucagaugcaacu

SEQ ID NO: 1633611 - RNA, 19 nt, Artificial Sequence
  Description of Artificial Sequence: Synthetic oligonucleotide
  Sense strand starting at position 819 of SEQ ID NO: 1560914
ccaggcaacuaguugucaa

SEQ ID NO: 1633612 - RNA, 19 nt, Artificial Sequence
  Description of Artificial Sequence: Synthetic oligonucleotide
  Antisense strand to SEQ ID NO: 1633611
uugacaacuaguugccugg

SEQ ID NO: 1633613 - RNA, 19 nt, Artificial Sequence
  Description of Artificial Sequence: Synthetic oligonucleotide
  Sense strand starting at position 822 of SEQ ID NO: 1560914
ggcaacuaguugucaaaug

SEQ ID NO: 1633614 - RNA, 19 nt, Artificial Sequence
  Description of Artificial Sequence: Synthetic oligonucleotide
  Antisense strand to SEQ ID NO: 1633613
cauuugacaacuaguugcc

SEQ ID NO: 1633615 - RNA, 19 nt, Artificial Sequence
  Description of Artificial Sequence: Synthetic oligonucleotide
  Sense strand starting at position 833 of SEQ ID NO: 1560914
gucaaaugcuaauuacugu

SEQ ID NO: 1633616 - RNA, 19 nt, Artificial Sequence
  Description of Artificial Sequence: Synthetic oligonucleotide
  Antisense strand to SEQ ID NO: 1633615
acaguaauuagcauuugac

SEQ ID NO: 1633617 - RNA, 19 nt, Artificial Sequence
  Description of Artificial Sequence: Synthetic oligonucleotide
  Sense strand starting at position 872 of SEQ ID NO: 1560914
gcggcaauguuuccauuau

SEQ ID NO: 1633618 - RNA, 19 nt, Artificial Sequence
  Description of Artificial Sequence: Synthetic oligonucleotide
  Antisense strand to SEQ ID NO: 1633617
auaauggaaacauugccgc

SEQ ID NO: 1633619 - RNA, 19 nt, Artificial Sequence
  Description of Artificial Sequence: Synthetic oligonucleotide
  Sense strand starting at position 912 of SEQ ID NO: 1560914
guuccagagguugagcaau

SEQ ID NO: 1633620 - RNA, 19 nt, Artificial Sequence
  Description of Artificial Sequence: Synthetic oligonucleotide
  Antisense strand to SEQ ID NO: 1633619
auugcucaaccucuggaac

SEQ ID NO: 1633621 - RNA, 19 nt, Artificial Sequence
  Description of Artificial Sequence: Synthetic oligonucleotide
  Sense strand starting at position 1082 of SEQ ID NO: 1560914
gguugcugaacgcgaugau

SEQ ID NO: 1633622 - RNA, 19 nt, Artificial Sequence
  Description of Artificial Sequence: Synthetic oligonucleotide
  Antisense strand to SEQ ID NO: 1633621
aucaucgcguucagcaacc

SEQ ID NO: 1633623 - RNA, 19 nt, Artificial Sequence
  Description of Artificial Sequence: Synthetic oligonucleotide
  Sense strand starting at position 1245 of SEQ ID NO: 1560914
ucaccuuuguaguccgaca

SEQ ID NO: 1633624 - RNA, 19 nt, Artificial Sequence
  Description of Artificial Sequence: Synthetic oligonucleotide
  Antisense strand to SEQ ID NO: 1633623
ugucggacuacaaagguga

SEQ ID NO: 1633625 - RNA, 19 nt, Artificial Sequence
  Description of Artificial Sequence: Synthetic oligonucleotide
  Sense strand starting at position 1433 of SEQ ID NO: 1560914
gggcccuaugacugaguca

SEQ ID NO: 1633626 - RNA, 19 nt, Artificial Sequence
  Description of Artificial Sequence: Synthetic oligonucleotide
  Antisense strand to SEQ ID NO: 1633625
ugacucagucauagggccc

SEQ ID NO: 1633627 - RNA, 19 nt, Artificial Sequence
  Description of Artificial Sequence: Synthetic oligonucleotide
  Sense strand starting at position 2227 of SEQ ID NO: 1560914
ccuggucuaccaggacuau

SEQ ID NO: 1633628 - RNA, 19 nt, Artificial Sequence
  Description of Artificial Sequence: Synthetic oligonucleotide
  Antisense strand to SEQ ID NO: 1633627
auaguccugguagaccagg

SEQ ID NO: 1633629 - RNA, 19 nt, Artificial Sequence
  Description of Artificial Sequence: Synthetic oligonucleotide
  Sense strand starting at position 2236 of SEQ ID NO: 1560914
ccaggacuaucaguacuua

SEQ ID NO: 1633630 - RNA, 19 nt, Artificial Sequence
  Description of Artificial Sequence: Synthetic oligonucleotide
  Antisense strand to SEQ ID NO: 1633629
uaaguacugauaguccugg

SEQ ID NO: 1633631 - RNA, 19 nt, Artificial Sequence
  Description of Artificial Sequence: Synthetic oligonucleotide
  Sense strand starting at position 2453 of SEQ ID NO: 1560914
uucucuaaggcucgguuua

SEQ ID NO: 1633632 - RNA, 19 nt, Artificial Sequence
  Description of Artificial Sequence: Synthetic oligonucleotide
  Antisense strand to SEQ ID NO: 1633631
uaaaccgagccuuagagaa

SEQ ID NO: 1633633 - RNA, 19 nt, Artificial Sequence
  Description of Artificial Sequence: Synthetic oligonucleotide
  Sense strand starting at position 2465 of SEQ ID NO: 1560914
cgguuuacucuuggauaua

SEQ ID NO: 1633634 - RNA, 19 nt, Artificial Sequence
  Description of Artificial Sequence: Synthetic oligonucleotide
  Antisense strand to SEQ ID NO: 1633633
uauauccaagaguaaaccg

SEQ ID NO: 1633635 - RNA, 19 nt, Artificial Sequence
  Description of Artificial Sequence: Synthetic oligonucleotide
  Sense strand starting at position 2466 of SEQ ID NO: 1560914
gguuuacucuuggauauau

SEQ ID NO: 1633636 - RNA, 19 nt, Artificial Sequence
  Description of Artificial Sequence: Synthetic oligonucleotide
  Antisense strand to SEQ ID NO: 1633635
auauauccaagaguaaacc

SEQ ID NO: 1633637 - RNA, 19 nt, Artificial Sequence
  Description of Artificial Sequence: Synthetic oligonucleotide
  Sense strand starting at position 2599 of SEQ ID NO: 1560914
gcgggcaagcuugggaaau

SEQ ID NO: 1633638 - RNA, 19 nt, Artificial Sequence
  Description of Artificial Sequence: Synthetic oligonucleotide
  Antisense strand to SEQ ID NO: 1633637
auuucccaagcuugcccgc

SEQ ID NO: 1633639 - RNA, 19 nt, Artificial Sequence
  Description of Artificial Sequence: Synthetic oligonucleotide
  Sense strand starting at position 2601 of SEQ ID NO: 1560914
gggcaagcuugggaaauca

SEQ ID NO: 1633640 - RNA, 19 nt, Artificial Sequence
  Description of Artificial Sequence: Synthetic oligonucleotide
  Antisense strand to SEQ ID NO: 1633639
ugauuucccaagcuugccc

SEQ ID NO: 1633641 - RNA, 19 nt, Artificial Sequence
  Description of Artificial Sequence: Synthetic oligonucleotide
  Sense strand starting at position 2670 of SEQ ID NO: 1560914
gcgaaagucccauauggaa

SEQ ID NO: 1633642 - RNA, 19 nt, Artificial Sequence
  Description of Artificial Sequence: Synthetic oligonucleotide
  Antisense strand to SEQ ID NO: 1633641
uuccauaugggacuuucgc

SEQ ID NO: 1633643 - RNA, 19 nt, Artificial Sequence
  Description of Artificial Sequence: Synthetic oligonucleotide
  Sense strand starting at position 2724 of SEQ ID NO: 1560914
agcaaaugccaaggugaaa

SEQ ID NO: 1633644 - RNA, 19 nt, Artificial Sequence
  Description of Artificial Sequence: Synthetic oligonucleotide
  Antisense strand to SEQ ID NO: 1633643
uuucaccuuggcauuugcu

SEQ ID NO: 1633645 - RNA, 19 nt, Artificial Sequence
  Description of Artificial Sequence: Synthetic oligonucleotide
  Sense strand starting at position 2773 of SEQ ID NO: 1560914
ugagguguggcagagacau

SEQ ID NO: 1633646 - RNA, 19 nt, Artificial Sequence
  Description of Artificial Sequence: Synthetic oligonucleotide
  Antisense strand to SEQ ID NO: 1633645
augucucugccacaccuca

SEQ ID NO: 1633647 - RNA, 19 nt, Artificial Sequence
  Description of Artificial Sequence: Synthetic oligonucleotide
  Sense strand starting at position 2800 of SEQ ID NO: 1560914
gaggguaggaggugucaga

SEQ ID NO: 1633648 - RNA, 19 nt, Artificial Sequence
  Description of Artificial Sequence: Synthetic oligonucleotide
  Antisense strand to SEQ ID NO: 1633647
ucugacaccuccuacccuc

SEQ ID NO: 1633649 - RNA, 19 nt, Artificial Sequence
  Description of Artificial Sequence: Synthetic oligonucleotide
  Sense strand starting at position 2836 of SEQ ID NO: 1560914
uugggauaagaucggaguu

SEQ ID NO: 1633650 - RNA, 19 nt, Artificial Sequence
  Description of Artificial Sequence: Synthetic oligonucleotide
  Antisense strand to SEQ ID NO: 1633649
aacuccgaucuuaucccaa

SEQ ID NO: 1633651 - RNA, 19 nt, Artificial Sequence
  Description of Artificial Sequence: Synthetic oligonucleotide
  Sense strand starting at position 2842 of SEQ ID NO: 1560914
uaagaucggaguugggaua

SEQ ID NO: 1633652 - RNA, 19 nt, Artificial Sequence
  Description of Artificial Sequence: Synthetic oligonucleotide
  Antisense strand to SEQ ID NO: 1633651
uaucccaacuccgaucuua

SEQ ID NO: 1633653 - RNA, 19 nt, Artificial Sequence
  Description of Artificial Sequence: Synthetic oligonucleotide
  Sense strand starting at position 2854 of SEQ ID NO: 1560914
ugggauaagaucugucuca

SEQ ID NO: 1633654 - RNA, 19 nt, Artificial Sequence
  Description of Artificial Sequence: Synthetic oligonucleotide
  Antisense strand to SEQ ID NO: 1633653
ugagacagaucuuauccca

SEQ ID NO: 1633655 - RNA, 19 nt, Artificial Sequence
  Description of Artificial Sequence: Synthetic oligonucleotide
  Sense strand starting at position 2855 of SEQ ID NO: 1560914
gggauaagaucugucucau

SEQ ID NO: 1633656 - RNA, 19 nt, Artificial Sequence
  Description of Artificial Sequence: Synthetic oligonucleotide
  Antisense strand to SEQ ID NO: 1633655
augagacagaucuuauccc

SEQ ID NO: 1633657 - RNA, 19 nt, Artificial Sequence
  Description of Artificial Sequence: Synthetic oligonucleotide
  Sense strand starting at position 2903 of SEQ ID NO: 1560914
ccuuuaaagugaucacagu

SEQ ID NO: 1633658 - RNA, 19 nt, Artificial Sequence
  Description of Artificial Sequence: Synthetic oligonucleotide
  Antisense strand to SEQ ID NO: 1633657
acugugaucacuuuaaagg

SEQ ID NO: 1633659 - RNA, 19 nt, Artificial Sequence
  Description of Artificial Sequence: Synthetic oligonucleotide
  Sense strand starting at position 3256 of SEQ ID NO: 1560914
gaccauuugugccaaggag

SEQ ID NO: 1633660 - RNA, 19 nt, Artificial Sequence
  Description of Artificial Sequence: Synthetic oligonucleotide
  Antisense strand to SEQ ID NO: 1633659
cuccuuggcacaaaugguc

SEQ ID NO: 1633661 - RNA, 19 nt, Artificial Sequence
  Description of Artificial Sequence: Synthetic oligonucleotide
  Sense strand starting at position 3292 of SEQ ID NO: 1560914
ccaugauuaugcccuugca

SEQ ID NO: 1633662 - RNA, 19 nt, Artificial Sequence
  Description of Artificial Sequence: Synthetic oligonucleotide
  Antisense strand to SEQ ID NO: 1633661
ugcaagggcauaaucaugg

SEQ ID NO: 1633663 - RNA, 19 nt, Artificial Sequence
  Description of Artificial Sequence: Synthetic oligonucleotide
  Sense strand starting at position 3595 of SEQ ID NO: 1560914
ccuggaagugucagguugu

SEQ ID NO: 1633664 - RNA, 19 nt, Artificial Sequence
  Description of Artificial Sequence: Synthetic oligonucleotide
  Antisense strand to SEQ ID NO: 1633663
acaaccugacacuuccagg

SEQ ID NO: 1633665 - RNA, 19 nt, Artificial Sequence
  Description of Artificial Sequence: Synthetic oligonucleotide
  Sense strand starting at position 3637 of SEQ ID NO: 1560914
guauaugagcuuggaaggu

SEQ ID NO: 1633666 - RNA, 19 nt, Artificial Sequence
  Description of Artificial Sequence: Synthetic oligonucleotide
  Antisense strand to SEQ ID NO: 1633665
accuuccaagcucauauac

SEQ ID NO: 1633667 - RNA, 19 nt, Artificial Sequence
  Description of Artificial Sequence: Synthetic oligonucleotide
  Sense strand starting at position 3685 of SEQ ID NO: 1560914
ccaccugagacucguggaa

SEQ ID NO: 1633668 - RNA, 19 nt, Artificial Sequence
  Description of Artificial Sequence: Synthetic oligonucleotide
  Antisense strand to SEQ ID NO: 1633667
uuccacgagucucaggugg

SEQ ID NO: 1633669 - RNA, 19 nt, Artificial Sequence
  Description of Artificial Sequence: Synthetic oligonucleotide
  Sense strand starting at position 3687 of SEQ ID NO: 1560914
accugagacucguggaaau

SEQ ID NO: 1633670 - RNA, 19 nt, Artificial Sequence
  Description of Artificial Sequence: Synthetic oligonucleotide
  Antisense strand to SEQ ID NO: 1633669
auuuccacgagucucaggu

SEQ ID NO: 1633671 - RNA, 19 nt, Artificial Sequence
  Description of Artificial Sequence: Synthetic oligonucleotide
  Sense strand starting at position 49 of SEQ ID NO: 1560915
gagcuaccgcaauauauag

SEQ ID NO: 1633672 - RNA, 19 nt, Artificial Sequence
  Description of Artificial Sequence: Synthetic oligonucleotide
  Antisense strand to SEQ ID NO: 1633671
cuauauauugcgguagcuc

SEQ ID NO: 1633673 - RNA, 19 nt, Artificial Sequence
  Description of Artificial Sequence: Synthetic oligonucleotide
  Sense strand starting at position 264 of SEQ ID NO: 1560915
ucaugaucgcucugugacu

SEQ ID NO: 1633674 - RNA, 19 nt, Artificial Sequence
  Description of Artificial Sequence: Synthetic oligonucleotide
  Antisense strand to SEQ ID NO: 1633673
agucacagagcgaucauga

SEQ ID NO: 1633675 - RNA, 19 nt, Artificial Sequence
  Description of Artificial Sequence: Synthetic oligonucleotide
  Sense strand starting at position 296 of SEQ ID NO: 1560915
uuugaauccguaugggaau

SEQ ID NO: 1633676 - RNA, 19 nt, Artificial Sequence
  Description of Artificial Sequence: Synthetic oligonucleotide
  Antisense strand to SEQ ID NO: 1633675
auucccauacggauucaaa

SEQ ID NO: 1633677 - RNA, 19 nt, Artificial Sequence
  Description of Artificial Sequence: Synthetic oligonucleotide
  Sense strand starting at position 298 of SEQ ID NO: 1560915
ugaauccguaugggaauaa

SEQ ID NO: 1633678 - RNA, 19 nt, Artificial Sequence
  Description of Artificial Sequence: Synthetic oligonucleotide
  Antisense strand to SEQ ID NO: 1633677
uuauucccauacggauuca

SEQ ID NO: 1633679 - RNA, 19 nt, Artificial Sequence
  Description of Artificial Sequence: Synthetic oligonucleotide
  Sense strand starting at position 302 of SEQ ID NO: 1560915
uccguaugggaauaaaguu

SEQ ID NO: 1633680 - RNA, 19 nt, Artificial Sequence
  Description of Artificial Sequence: Synthetic oligonucleotide
  Antisense strand to SEQ ID NO: 1633679
aacuuuauucccauacgga

SEQ ID NO: 1633681 - RNA, 19 nt, Artificial Sequence
  Description of Artificial Sequence: Synthetic oligonucleotide
  Sense strand starting at position 311 of SEQ ID NO: 1560915
gaauaaaguucccuggcuu

SEQ ID NO: 1633682 - RNA, 19 nt, Artificial Sequence
  Description of Artificial Sequence: Synthetic oligonucleotide
  Antisense strand to SEQ ID NO: 1633681
aagccagggaacuuuauuc

SEQ ID NO: 1633683 - RNA, 19 nt, Artificial Sequence
  Description of Artificial Sequence: Synthetic oligonucleotide
  Sense strand starting at position 415 of SEQ ID NO: 1560915
uccgacuauuucuggguaa

SEQ ID NO: 1633684 - RNA, 19 nt, Artificial Sequence
  Description of Artificial Sequence: Synthetic oligonucleotide
  Antisense strand to SEQ ID NO: 1633683
uuacccagaaauagucgga

SEQ ID NO: 1633685 - RNA, 19 nt, Artificial Sequence
  Description of Artificial Sequence: Synthetic oligonucleotide
  Sense strand starting at position 416 of SEQ ID NO: 1560915
ccgacuauuucuggguaag

SEQ ID NO: 1633686 - RNA, 19 nt, Artificial Sequence
  Description of Artificial Sequence: Synthetic oligonucleotide
  Antisense strand to SEQ ID NO: 1633685
cuuacccagaaauagucgg

SEQ ID NO: 1633687 - RNA, 19 nt, Artificial Sequence
  Description of Artificial Sequence: Synthetic oligonucleotide
  Sense strand starting at position 417 of SEQ ID NO: 1560915
cgacuauuucuggguaagu

SEQ ID NO: 1633688 - RNA, 19 nt, Artificial Sequence
  Description of Artificial Sequence: Synthetic oligonucleotide
  Antisense strand to SEQ ID NO: 1633687
acuuacccagaaauagucg

SEQ ID NO: 1633689 - RNA, 19 nt, Artificial Sequence
  Description of Artificial Sequence: Synthetic oligonucleotide
  Sense strand starting at position 518 of SEQ ID NO: 1560915
aagaccauuucugauggua

SEQ ID NO: 1633690 - RNA, 19 nt, Artificial Sequence
  Description of Artificial Sequence: Synthetic oligonucleotide
  Antisense strand to SEQ ID NO: 1633689
uaccaucagaaauggucuu

SEQ ID NO: 1633691 - RNA, 19 nt, Artificial Sequence
  Description of Artificial Sequence: Synthetic oligonucleotide
  Sense strand starting at position 520 of SEQ ID NO: 1560915
gaccauuucugaugguauu

SEQ ID NO: 1633692 - RNA, 19 nt, Artificial Sequence
  Description of Artificial Sequence: Synthetic oligonucleotide
  Antisense strand to SEQ ID NO: 1633691
aauaccaucagaaaugguc

SEQ ID NO: 1633693 - RNA, 19 nt, Artificial Sequence
  Description of Artificial Sequence: Synthetic oligonucleotide
  Sense strand starting at position 582 of SEQ ID NO: 1560915
accuaaugugugggcaagu

SEQ ID NO: 1633694 - RNA, 19 nt, Artificial Sequence
  Description of Artificial Sequence: Synthetic oligonucleotide
  Antisense strand to SEQ ID NO: 1633693
acuugcccacacauuaggu

SEQ ID NO: 1633695 - RNA, 19 nt, Artificial Sequence
  Description of Artificial Sequence: Synthetic oligonucleotide
  Sense strand starting at position 622 of SEQ ID NO: 1560915
ggcugagcccugggaauga

SEQ ID NO: 1633696 - RNA, 19 nt, Artificial Sequence
  Description of Artificial Sequence: Synthetic oligonucleotide
  Antisense strand to SEQ ID NO: 1633695
ucauucccagggcucagcc

SEQ ID NO: 1633697 - RNA, 19 nt, Artificial Sequence
  Description of Artificial Sequence: Synthetic oligonucleotide
  Sense strand starting at position 632 of SEQ ID NO: 1560915
ugggaaugaucagaaucac

SEQ ID NO: 1633698 - RNA, 19 nt, Artificial Sequence
  Description of Artificial Sequence: Synthetic oligonucleotide
  Antisense strand to SEQ ID NO: 1633697
gugauucugaucauuccca

SEQ ID NO: 1633699 - RNA, 19 nt, Artificial Sequence
  Description of Artificial Sequence: Synthetic oligonucleotide
  Sense strand starting at position 723 of SEQ ID NO: 1560915
cugaccaucucaguuagaa

SEQ ID NO: 1633700 - RNA, 19 nt, Artificial Sequence
  Description of Artificial Sequence: Synthetic oligonucleotide
  Antisense strand to SEQ ID NO: 1633699
uucuaacugagauggucag

SEQ ID NO: 1633701 - RNA, 19 nt, Artificial Sequence
  Description of Artificial Sequence: Synthetic oligonucleotide
  Sense strand starting at position 731 of SEQ ID NO: 1560915
cucaguuagaaccgaauga

SEQ ID NO: 1633702 - RNA, 19 nt, Artificial Sequence
  Description of Artificial Sequence: Synthetic oligonucleotide
  Antisense strand to SEQ ID NO: 1633701
ucauucgguucuaacugag

SEQ ID NO: 1633703 - RNA, 19 nt, Artificial Sequence
  Description of Artificial Sequence: Synthetic oligonucleotide
  Sense strand starting at position 742 of SEQ ID NO: 1560915
ccgaaugaaccucgcuaaa

SEQ ID NO: 1633704 - RNA, 19 nt, Artificial Sequence
  Description of Artificial Sequence: Synthetic oligonucleotide
  Antisense strand to SEQ ID NO: 1633703
uuuagcgagguucauucgg

SEQ ID NO: 1633705 - RNA, 19 nt, Artificial Sequence
  Description of Artificial Sequence: Synthetic oligonucleotide
  Sense strand starting at position 823 of SEQ ID NO: 1560915
cggagccucaguugugaaa

SEQ ID NO: 1633706 - RNA, 19 nt, Artificial Sequence
  Description of Artificial Sequence: Synthetic oligonucleotide
  Antisense strand to SEQ ID NO: 1633705
uuucacaacugaggcuccg

SEQ ID NO: 1633707 - RNA, 19 nt, Artificial Sequence
  Description of Artificial Sequence: Synthetic oligonucleotide
  Sense strand starting at position 830 of SEQ ID NO: 1560915
ucaguugugaaacgaccau

SEQ ID NO: 1633708 - RNA, 19 nt, Artificial Sequence
  Description of Artificial Sequence: Synthetic oligonucleotide
  Antisense strand to SEQ ID NO: 1633707
auggucguuucacaacuga

SEQ ID NO: 1633709 - RNA, 19 nt, Artificial Sequence
  Description of Artificial Sequence: Synthetic oligonucleotide
  Sense strand starting at position 872 of SEQ ID NO: 1560915
ccuagagcucacugcaaga

SEQ ID NO: 1633710 - RNA, 19 nt, Artificial Sequence
  Description of Artificial Sequence: Synthetic oligonucleotide
  Antisense strand to SEQ ID NO: 1633709
ucuugcagugagcucuagg

SEQ ID NO: 1633711 - RNA, 19 nt, Artificial Sequence
  Description of Artificial Sequence: Synthetic oligonucleotide
  Sense strand starting at position 994 of SEQ ID NO: 1560915
ugaagcaauucucuacguu

SEQ ID NO: 1633712 - RNA, 19 nt, Artificial Sequence
  Description of Artificial Sequence: Synthetic oligonucleotide
  Antisense strand to SEQ ID NO: 1633711
aacguagagaauugcuuca

SEQ ID NO: 1633713 - RNA, 19 nt, Artificial Sequence
  Description of Artificial Sequence: Synthetic oligonucleotide
  Sense strand starting at position 995 of SEQ ID NO: 1560915
gaagcaauucucuacguuc

SEQ ID NO: 1633714 - RNA, 19 nt, Artificial Sequence
  Description of Artificial Sequence: Synthetic oligonucleotide
  Antisense strand to SEQ ID NO: 1633713
gaacguagagaauugcuuc

SEQ ID NO: 1633715 - RNA, 19 nt, Artificial Sequence
  Description of Artificial Sequence: Synthetic oligonucleotide
  Sense strand starting at position 1420 of SEQ ID NO: 1560915
ggauuagaaucugggaaga

SEQ ID NO: 1633716 - RNA, 19 nt, Artificial Sequence
  Description of Artificial Sequence: Synthetic oligonucleotide
  Antisense strand to SEQ ID NO: 1633715
ucuucccagauucuaaucc

SEQ ID NO: 1633717 - RNA, 19 nt, Artificial Sequence
  Description of Artificial Sequence: Synthetic oligonucleotide
  Sense strand starting at position 2284 of SEQ ID NO: 1560915
gcagaacgcucagugucaa

SEQ ID NO: 1633718 - RNA, 19 nt, Artificial Sequence
  Description of Artificial Sequence: Synthetic oligonucleotide
  Antisense strand to SEQ ID NO: 1633717
uugacacugagcguucugc

SEQ ID NO: 1633719 - RNA, 19 nt, Artificial Sequence
  Description of Artificial Sequence: Synthetic oligonucleotide
  Sense strand starting at position 2285 of SEQ ID NO: 1560915
cagaacgcucagugucaau

SEQ ID NO: 1633720 - RNA, 19 nt, Artificial Sequence
  Description of Artificial Sequence: Synthetic oligonucleotide
  Antisense strand to SEQ ID NO: 1633719
auugacacugagcguucug

SEQ ID NO: 1633721 - RNA, 19 nt, Artificial Sequence
  Description of Artificial Sequence: Synthetic oligonucleotide
  Sense strand starting at position 2912 of SEQ ID NO: 1560915
guauuuccugucugggcaa

SEQ ID NO: 1633722 - RNA, 19 nt, Artificial Sequence
  Description of Artificial Sequence: Synthetic oligonucleotide
  Antisense strand to SEQ ID NO: 1633721
uugcccagacaggaaauac

SEQ ID NO: 1633723 - RNA, 19 nt, Artificial Sequence
  Description of Artificial Sequence: Synthetic oligonucleotide
  Sense strand starting at position 3152 of SEQ ID NO: 1560915
gucuccugacauuggugaa

SEQ ID NO: 1633724 - RNA, 19 nt, Artificial Sequence
  Description of Artificial Sequence: Synthetic oligonucleotide
  Antisense strand to SEQ ID NO: 1633723
uucaccaaugucaggagac

SEQ ID NO: 1633725 - RNA, 19 nt, Artificial Sequence
  Description of Artificial Sequence: Synthetic oligonucleotide
  Sense strand starting at position 3292 of SEQ ID NO: 1560915
gcugcuucgacuugaauag

SEQ ID NO: 1633726 - RNA, 19 nt, Artificial Sequence
  Description of Artificial Sequence: Synthetic oligonucleotide
  Antisense strand to SEQ ID NO: 1633725
cuauucaagucgaagcagc

SEQ ID NO: 1633727 - RNA, 19 nt, Artificial Sequence
  Description of Artificial Sequence: Synthetic oligonucleotide
  Sense strand starting at position 3378 of SEQ ID NO: 1560915
gucagagccuuucugugaa

SEQ ID NO: 1633728 - RNA, 19 nt, Artificial Sequence
  Description of Artificial Sequence: Synthetic oligonucleotide
  Antisense strand to SEQ ID NO: 1633727
uucacagaaaggcucugac

SEQ ID NO: 1633729 - RNA, 19 nt, Artificial Sequence
  Description of Artificial Sequence: Synthetic oligonucleotide
  Sense strand starting at position 3381 of SEQ ID NO: 1560915
agagccuuucugugaacua

SEQ ID NO: 1633730 - RNA, 19 nt, Artificial Sequence
  Description of Artificial Sequence: Synthetic oligonucleotide
  Antisense strand to SEQ ID NO: 1633729
uaguucacagaaaggcucu

SEQ ID NO: 1633731 - RNA, 19 nt, Artificial Sequence
  Description of Artificial Sequence: Synthetic oligonucleotide
  Sense strand starting at position 3441 of SEQ ID NO: 1560915
caugguaagguuuaguaaa

SEQ ID NO: 1633732 - RNA, 19 nt, Artificial Sequence
  Description of Artificial Sequence: Synthetic oligonucleotide
  Antisense strand to SEQ ID NO: 1633731
uuuacuaaaccuuaccaug

SEQ ID NO: 1633733 - RNA, 19 nt, Artificial Sequence
  Description of Artificial Sequence: Synthetic oligonucleotide
  Sense strand starting at position 3468 of SEQ ID NO: 1560915
aaagcauugcuguuugugu

SEQ ID NO: 1633734 - RNA, 19 nt, Artificial Sequence
  Description of Artificial Sequence: Synthetic oligonucleotide
  Antisense strand to SEQ ID NO: 1633733
acacaaacagcaaugcuuu

SEQ ID NO: 1633735 - RNA, 19 nt, Artificial Sequence
  Description of Artificial Sequence: Synthetic oligonucleotide
  Sense strand starting at position 3476 of SEQ ID NO: 1560915
gcuguuuguguguugggau

SEQ ID NO: 1633736 - RNA, 19 nt, Artificial Sequence
  Description of Artificial Sequence: Synthetic oligonucleotide
  Antisense strand to SEQ ID NO: 1633735
aucccaacacacaaacagc

SEQ ID NO: 1633737 - RNA, 19 nt, Artificial Sequence
  Description of Artificial Sequence: Synthetic oligonucleotide
  Sense strand starting at position 3488 of SEQ ID NO: 1560915
uugggaucacgauguuaau

SEQ ID NO: 1633738 - RNA, 19 nt, Artificial Sequence
  Description of Artificial Sequence: Synthetic oligonucleotide
  Antisense strand to SEQ ID NO: 1633737
auuaacaucgugaucccaa

SEQ ID NO: 1633739 - RNA, 19 nt, Artificial Sequence
  Description of Artificial Sequence: Synthetic oligonucleotide
  Sense strand starting at position 3501 of SEQ ID NO: 1560915
guuaauuuccuguggguca

SEQ ID NO: 1633740 - RNA, 19 nt, Artificial Sequence
  Description of Artificial Sequence: Synthetic oligonucleotide
  Antisense strand to SEQ ID NO: 1633739
ugacccacaggaaauuaac

SEQ ID NO: 1633741 - RNA, 19 nt, Artificial Sequence
  Description of Artificial Sequence: Synthetic oligonucleotide
  Sense strand starting at position 3502 of SEQ ID NO: 1560915
uuaauuuccugugggucaa

SEQ ID NO: 1633742 - RNA, 19 nt, Artificial Sequence
  Description of Artificial Sequence: Synthetic oligonucleotide
  Antisense strand to SEQ ID NO: 1633741
uugacccacaggaaauuaa

SEQ ID NO: 1633743 - RNA, 19 nt, Artificial Sequence
  Description of Artificial Sequence: Synthetic oligonucleotide
  Sense strand starting at position 3559 of SEQ ID NO: 1560915
caggacagcugguuuaagu

SEQ ID NO: 1633744 - RNA, 19 nt, Artificial Sequence
  Description of Artificial Sequence: Synthetic oligonucleotide
  Antisense strand to SEQ ID NO: 1633743
acuuaaaccagcuguccug

SEQ ID NO: 1633745 - RNA, 19 nt, Artificial Sequence
  Description of Artificial Sequence: Synthetic oligonucleotide
  Sense strand starting at position 3601 of SEQ ID NO: 1560915
ggaaccucagucuggaaua

SEQ ID NO: 1633746 - RNA, 19 nt, Artificial Sequence
  Description of Artificial Sequence: Synthetic oligonucleotide
  Antisense strand to SEQ ID NO: 1633745
uauuccagacugagguucc

SEQ ID NO: 1633747 - RNA, 19 nt, Artificial Sequence
  Description of Artificial Sequence: Synthetic oligonucleotide
  Sense strand starting at position 3926 of SEQ ID NO: 1560915
uugcuucccuggcuugaaa

SEQ ID NO: 1633748 - RNA, 19 nt, Artificial Sequence
  Description of Artificial Sequence: Synthetic oligonucleotide
  Antisense strand to SEQ ID NO: 1633747
uuucaagccagggaagcaa

SEQ ID NO: 1633749 - RNA, 19 nt, Artificial Sequence
  Description of Artificial Sequence: Synthetic oligonucleotide
  Sense strand starting at position 3940 of SEQ ID NO: 1560915
ugaaaucacccugguccua

SEQ ID NO: 1633750 - RNA, 19 nt, Artificial Sequence
  Description of Artificial Sequence: Synthetic oligonucleotide
  Antisense strand to SEQ ID NO: 1633749
uaggaccagggugauuuca

SEQ ID NO: 1633751 - RNA, 19 nt, Artificial Sequence
  Description of Artificial Sequence: Synthetic oligonucleotide
  Sense strand starting at position 310 of SEQ ID NO: 1560916
gggcucucccuggaaucuu

SEQ ID NO: 1633752 - RNA, 19 nt, Artificial Sequence
  Description of Artificial Sequence: Synthetic oligonucleotide
  Antisense strand to SEQ ID NO: 1633751
aagauuccagggagagccc

SEQ ID NO: 1633753 - RNA, 19 nt, Artificial Sequence
  Description of Artificial Sequence: Synthetic oligonucleotide
  Sense strand starting at position 365 of SEQ ID NO: 1560916
aagucagcuuccuugggau

SEQ ID NO: 1633754 - RNA, 19 nt, Artificial Sequence
  Description of Artificial Sequence: Synthetic oligonucleotide
  Antisense strand to SEQ ID NO: 1633753
aucccaaggaagcugacuu

SEQ ID NO: 1633755 - RNA, 19 nt, Artificial Sequence
  Description of Artificial Sequence: Synthetic oligonucleotide
  Sense strand starting at position 743 of SEQ ID NO: 1560916
cucccuuaauucgcugaaa

SEQ ID NO: 1633756 - RNA, 19 nt, Artificial Sequence
  Description of Artificial Sequence: Synthetic oligonucleotide
  Antisense strand to SEQ ID NO: 1633755
uuucagcgaauuaagggag

SEQ ID NO: 1633757 - RNA, 19 nt, Artificial Sequence
  Description of Artificial Sequence: Synthetic oligonucleotide
  Sense strand starting at position 744 of SEQ ID NO: 1560916
ucccuuaauucgcugaaag

SEQ ID NO: 1633758 - RNA, 19 nt, Artificial Sequence
  Description of Artificial Sequence: Synthetic oligonucleotide
  Antisense strand to SEQ ID NO: 1633757
cuuucagcgaauuaaggga

SEQ ID NO: 1633759 - RNA, 19 nt, Artificial Sequence
  Description of Artificial Sequence: Synthetic oligonucleotide
  Sense strand starting at position 745 of SEQ ID NO: 1560916
cccuuaauucgcugaaaga

SEQ ID NO: 1633760 - RNA, 19 nt, Artificial Sequence
  Description of Artificial Sequence: Synthetic oligonucleotide
  Antisense strand to SEQ ID NO: 1633759
ucuuucagcgaauuaaggg

SEQ ID NO: 1633761 - RNA, 19 nt, Artificial Sequence
  Description of Artificial Sequence: Synthetic oligonucleotide
  Sense strand starting at position 746 of SEQ ID NO: 1560916
ccuuaauucgcugaaagaa

SEQ ID NO: 1633762 - RNA, 19 nt, Artificial Sequence
  Description of Artificial Sequence: Synthetic oligonucleotide
  Antisense strand to SEQ ID NO: 1633761
uucuuucagcgaauuaagg

SEQ ID NO: 1633763 - RNA, 19 nt, Artificial Sequence
  Description of Artificial Sequence: Synthetic oligonucleotide
  Sense strand starting at position 978 of SEQ ID NO: 1560916
ucuacucucggccaugaaa

SEQ ID NO: 1633764 - RNA, 19 nt, Artificial Sequence
  Description of Artificial Sequence: Synthetic oligonucleotide
  Antisense strand to SEQ ID NO: 1633763
uuucauggccgagaguaga

SEQ ID NO: 1633765 - RNA, 19 nt, Artificial Sequence
  Description of Artificial Sequence: Synthetic oligonucleotide
  Sense strand starting at position 1236 of SEQ ID NO: 1560916
cucucacucugguccagau

SEQ ID NO: 1633766 - RNA, 19 nt, Artificial Sequence
  Description of Artificial Sequence: Synthetic oligonucleotide
  Antisense strand to SEQ ID NO: 1633765
aucuggaccagagugagag

SEQ ID NO: 1633767 - RNA, 19 nt, Artificial Sequence
  Description of Artificial Sequence: Synthetic oligonucleotide
  Sense strand starting at position 1328 of SEQ ID NO: 1560916
agaaacucgcccugggaau

SEQ ID NO: 1633768 - RNA, 19 nt, Artificial Sequence
  Description of Artificial Sequence: Synthetic oligonucleotide
  Antisense strand to SEQ ID NO: 1633767
auucccagggcgaguuucu

SEQ ID NO: 1633769 - RNA, 19 nt, Artificial Sequence
  Description of Artificial Sequence: Synthetic oligonucleotide
  Sense strand starting at position 1425 of SEQ ID NO: 1560916
ccuuccuccggacaacaau

SEQ ID NO: 1633770 - RNA, 19 nt, Artificial Sequence
  Description of Artificial Sequence: Synthetic oligonucleotide
  Antisense strand to SEQ ID NO: 1633769
auuguuguccggaggaagg

SEQ ID NO: 1633771 - RNA, 19 nt, Artificial Sequence
  Description of Artificial Sequence: Synthetic oligonucleotide
  Sense strand starting at position 1533 of SEQ ID NO: 1560916
ggcugauuccuccagugga

SEQ ID NO: 1633772 - RNA, 19 nt, Artificial Sequence
  Description of Artificial Sequence: Synthetic oligonucleotide
  Antisense strand to SEQ ID NO: 1633771
uccacuggaggaaucagcc

SEQ ID NO: 1633773 - RNA, 19 nt, Artificial Sequence
  Description of Artificial Sequence: Synthetic oligonucleotide
  Sense strand starting at position 1651 of SEQ ID NO: 1560916
ugggauggcucauccuaca

SEQ ID NO: 1633774 - RNA, 19 nt, Artificial Sequence
  Description of Artificial Sequence: Synthetic oligonucleotide
  Antisense strand to SEQ ID NO: 1633773
uguaggaugagccauccca

SEQ ID NO: 1633775 - RNA, 19 nt, Artificial Sequence
  Description of Artificial Sequence: Synthetic oligonucleotide
  Sense strand starting at position 1906 of SEQ ID NO: 1560916
ggcagagugugccuaggaa

SEQ ID NO: 1633776 - RNA, 19 nt, Artificial Sequence
  Description of Artificial Sequence: Synthetic oligonucleotide
  Antisense strand to SEQ ID NO: 1633775
uuccuaggcacacucugcc

SEQ ID NO: 1633777 - RNA, 19 nt, Artificial Sequence
  Description of Artificial Sequence: Synthetic oligonucleotide
  Sense strand starting at position 2197 of SEQ ID NO: 1560916
gagagcugccuugauaaga

SEQ ID NO: 1633778 - RNA, 19 nt, Artificial Sequence
  Description of Artificial Sequence: Synthetic oligonucleotide
  Antisense strand to SEQ ID NO: 1633777
ucuuaucaaggcagcucuc

SEQ ID NO: 1633779 - RNA, 19 nt, Artificial Sequence
  Description of Artificial Sequence: Synthetic oligonucleotide
  Sense strand starting at position 2263 of SEQ ID NO: 1560916
gucuuaggcauccauagga

SEQ ID NO: 1633780 - RNA, 19 nt, Artificial Sequence
  Description of Artificial Sequence: Synthetic oligonucleotide
  Antisense strand to SEQ ID NO: 1633779
uccuauggaugccuaagac

SEQ ID NO: 1633781 - RNA, 19 nt, Artificial Sequence
  Description of Artificial Sequence: Synthetic oligonucleotide
  Sense strand starting at position 2270 of SEQ ID NO: 1560916
gcauccauaggauguuaca

SEQ ID NO: 1633782 - RNA, 19 nt, Artificial Sequence
  Description of Artificial Sequence: Synthetic oligonucleotide
  Antisense strand to SEQ ID NO: 1633781
uguaacauccuauggaugc

SEQ ID NO: 1633783 - RNA, 19 nt, Artificial Sequence
  Description of Artificial Sequence: Synthetic oligonucleotide
  Sense strand starting at position 3058 of SEQ ID NO: 1560916
auauaacuggcauggcaau

SEQ ID NO: 1633784 - RNA, 19 nt, Artificial Sequence
  Description of Artificial Sequence: Synthetic oligonucleotide
  Antisense strand to SEQ ID NO: 1633783
auugccaugccaguuauau

SEQ ID NO: 1633785 - RNA, 19 nt, Artificial Sequence
  Description of Artificial Sequence: Synthetic oligonucleotide
  Sense strand starting at position 3099 of SEQ ID NO: 1560916
uguuuagaaugagcuccaa

SEQ ID NO: 1633786 - RNA, 19 nt, Artificial Sequence
  Description of Artificial Sequence: Synthetic oligonucleotide
  Antisense strand to SEQ ID NO: 1633785
uuggagcucauucuaaaca

SEQ ID NO: 1633787 - RNA, 19 nt, Artificial Sequence
  Description of Artificial Sequence: Synthetic oligonucleotide
  Sense strand starting at position 3103 of SEQ ID NO: 1560916
uagaaugagcuccaaguuu

SEQ ID NO: 1633788 - RNA, 19 nt, Artificial Sequence
  Description of Artificial Sequence: Synthetic oligonucleotide
  Antisense strand to SEQ ID NO: 1633787
aaacuuggagcucauucua

SEQ ID NO: 1633789 - RNA, 19 nt, Artificial Sequence
  Description of Artificial Sequence: Synthetic oligonucleotide
  Sense strand starting at position 3246 of SEQ ID NO: 1560916
gguagauggaucuggaugu

SEQ ID NO: 1633790 - RNA, 19 nt, Artificial Sequence
  Description of Artificial Sequence: Synthetic oligonucleotide
  Antisense strand to SEQ ID NO: 1633789
acauccagauccaucuacc

SEQ ID NO: 1633791 - RNA, 19 nt, Artificial Sequence
  Description of Artificial Sequence: Synthetic oligonucleotide
  Sense strand starting at position 3265 of SEQ ID NO: 1560916
gaauccugccucugugaca

SEQ ID NO: 1633792 - RNA, 19 nt, Artificial Sequence
  Description of Artificial Sequence: Synthetic oligonucleotide
  Antisense strand to SEQ ID NO: 1633791
ugucacagaggcaggauuc

SEQ ID NO: 1633793 - RNA, 19 nt, Artificial Sequence
  Description of Artificial Sequence: Synthetic oligonucleotide
  Sense strand starting at position 3279 of SEQ ID NO: 1560916
ugacaucaucuaugucaug

SEQ ID NO: 1633794 - RNA, 19 nt, Artificial Sequence
  Description of Artificial Sequence: Synthetic oligonucleotide
  Antisense strand to SEQ ID NO: 1633793
caugacauagaugauguca

SEQ ID NO: 1633795 - RNA, 19 nt, Artificial Sequence
  Description of Artificial Sequence: Synthetic oligonucleotide
  Sense strand starting at position 3285 of SEQ ID NO: 1560916
caucuaugucauggauguc

SEQ ID NO: 1633796 - RNA, 19 nt, Artificial Sequence
  Description of Artificial Sequence: Synthetic oligonucleotide
  Antisense strand to SEQ ID NO: 1633795
gacauccaugacauagaug

SEQ ID NO: 1633797 - RNA, 19 nt, Artificial Sequence
  Description of Artificial Sequence: Synthetic oligonucleotide
  Sense strand starting at position 3288 of SEQ ID NO: 1560916
cuaugucauggaugucauu

SEQ ID NO: 1633798 - RNA, 19 nt, Artificial Sequence
  Description of Artificial Sequence: Synthetic oligonucleotide
  Antisense strand to SEQ ID NO: 1633797
aaugacauccaugacauag

SEQ ID NO: 1633799 - RNA, 19 nt, Artificial Sequence
  Description of Artificial Sequence: Synthetic oligonucleotide
  Sense strand starting at position 3297 of SEQ ID NO: 1560916
ggaugucauuucuaccaga

SEQ ID NO: 1633800 - RNA, 19 nt, Artificial Sequence
  Description of Artificial Sequence: Synthetic oligonucleotide
  Antisense strand to SEQ ID NO: 1633799
ucugguagaaaugacaucc

SEQ ID NO: 1633801 - RNA, 19 nt, Artificial Sequence
  Description of Artificial Sequence: Synthetic oligonucleotide
  Sense strand starting at position 3337 of SEQ ID NO: 1560916
auaacagcccguuaugaaa

SEQ ID NO: 1633802 - RNA, 19 nt, Artificial Sequence
  Description of Artificial Sequence: Synthetic oligonucleotide
  Antisense strand to SEQ ID NO: 1633801
uuucauaacgggcuguuau

SEQ ID NO: 1633803 - RNA, 19 nt, Artificial Sequence
  Description of Artificial Sequence: Synthetic oligonucleotide
  Sense strand starting at position 3346 of SEQ ID NO: 1560916
cguuaugaaagucaccaga

SEQ ID NO: 1633804 - RNA, 19 nt, Artificial Sequence
  Description of Artificial Sequence: Synthetic oligonucleotide
  Antisense strand to SEQ ID NO: 1633803
ucuggugacuuucauaacg

SEQ ID NO: 1633805 - RNA, 19 nt, Artificial Sequence
  Description of Artificial Sequence: Synthetic oligonucleotide
  Sense strand starting at position 3348 of SEQ ID NO: 1560916
uuaugaaagucaccagagu

SEQ ID NO: 1633806 - RNA, 19 nt, Artificial Sequence
  Description of Artificial Sequence: Synthetic oligonucleotide
  Antisense strand to SEQ ID NO: 1633805
acucuggugacuuucauaa

SEQ ID NO: 1633807 - RNA, 19 nt, Artificial Sequence
  Description of Artificial Sequence: Synthetic oligonucleotide
  Sense strand starting at position 3387 of SEQ ID NO: 1560916
ccauuuagccuguggcaca

SEQ ID NO: 1633808 - RNA, 19 nt, Artificial Sequence
  Description of Artificial Sequence: Synthetic oligonucleotide
  Antisense strand to SEQ ID NO: 1633807
ugugccacaggcuaaaugg

SEQ ID NO: 1633809 - RNA, 19 nt, Artificial Sequence
  Description of Artificial Sequence: Synthetic oligonucleotide
  Sense strand starting at position 3405 of SEQ ID NO: 1560916
agccuagaugcccaauaaa

SEQ ID NO: 1633810 - RNA, 19 nt, Artificial Sequence
  Description of Artificial Sequence: Synthetic oligonucleotide
  Antisense strand to SEQ ID NO: 1633809
uuuauugggcaucuaggcu

SEQ ID NO: 1633811 - RNA, 19 nt, Artificial Sequence
  Description of Artificial Sequence: Synthetic oligonucleotide
  Sense strand starting at position 3465 of SEQ ID NO: 1560916
ugaccugugcucugagaga

SEQ ID NO: 1633812 - RNA, 19 nt, Artificial Sequence
  Description of Artificial Sequence: Synthetic oligonucleotide
  Antisense strand to SEQ ID NO: 1633811
ucucucagagcacagguca

SEQ ID NO: 1633813 - RNA, 19 nt, Artificial Sequence
  Description of Artificial Sequence: Synthetic oligonucleotide
  Sense strand starting at position 3478 of SEQ ID NO: 1560916
gagagaaucagugguuccu

SEQ ID NO: 1633814 - RNA, 19 nt, Artificial Sequence
  Description of Artificial Sequence: Synthetic oligonucleotide
  Antisense strand to SEQ ID NO: 1633813
aggaaccacugauucucuc

SEQ ID NO: 1633815 - RNA, 19 nt, Artificial Sequence
  Description of Artificial Sequence: Synthetic oligonucleotide
  Sense strand starting at position 3484 of SEQ ID NO: 1560916
aucagugguuccuuccaga

SEQ ID NO: 1633816 - RNA, 19 nt, Artificial Sequence
  Description of Artificial Sequence: Synthetic oligonucleotide
  Antisense strand to SEQ ID NO: 1633815
ucuggaaggaaccacugau

SEQ ID NO: 1633817 - RNA, 19 nt, Artificial Sequence
  Description of Artificial Sequence: Synthetic oligonucleotide
  Sense strand starting at position 3564 of SEQ ID NO: 1560916
gucugauagccuugaaggu

SEQ ID NO: 1633818 - RNA, 19 nt, Artificial Sequence
  Description of Artificial Sequence: Synthetic oligonucleotide
  Antisense strand to SEQ ID NO: 1633817
accuucaaggcuaucagac

SEQ ID NO: 1633819 - RNA, 19 nt, Artificial Sequence
  Description of Artificial Sequence: Synthetic oligonucleotide
  Sense strand starting at position 3565 of SEQ ID NO: 1560916
ucugauagccuugaagguu

SEQ ID NO: 1633820 - RNA, 19 nt, Artificial Sequence
  Description of Artificial Sequence: Synthetic oligonucleotide
  Antisense strand to SEQ ID NO: 1633819
aaccuucaaggcuaucaga

SEQ ID NO: 1633821 - RNA, 19 nt, Artificial Sequence
  Description of Artificial Sequence: Synthetic oligonucleotide
  Sense strand starting at position 3616 of SEQ ID NO: 1560916
gagcuaccgcaauauauag

SEQ ID NO: 1633822 - RNA, 19 nt, Artificial Sequence
  Description of Artificial Sequence: Synthetic oligonucleotide
  Antisense strand to SEQ ID NO: 1633821
cuauauauugcgguagcuc

SEQ ID NO: 1633823 - RNA, 19 nt, Artificial Sequence
  Description of Artificial Sequence: Synthetic oligonucleotide
  Sense strand starting at position 3863 of SEQ ID NO: 1560916
uuugaauccguaugggaau

SEQ ID NO: 1633824 - RNA, 19 nt, Artificial Sequence
  Description of Artificial Sequence: Synthetic oligonucleotide
  Antisense strand to SEQ ID NO: 1633823
auucccauacggauucaaa

SEQ ID NO: 1633825 - RNA, 19 nt, Artificial Sequence
  Description of Artificial Sequence: Synthetic oligonucleotide
  Sense strand starting at position 3865 of SEQ ID NO: 1560916
ugaauccguaugggaauaa

SEQ ID NO: 1633826 - RNA, 19 nt, Artificial Sequence
  Description of Artificial Sequence: Synthetic oligonucleotide
  Antisense strand to SEQ ID NO: 1633825
uuauucccauacggauuca

SEQ ID NO: 1633827 - RNA, 19 nt, Artificial Sequence
  Description of Artificial Sequence: Synthetic oligonucleotide
  Sense strand starting at position 3869 of SEQ ID NO: 1560916
uccguaugggaauaaaguu

SEQ ID NO: 1633828 - RNA, 19 nt, Artificial Sequence
  Description of Artificial Sequence: Synthetic oligonucleotide
  Antisense strand to SEQ ID NO: 1633827
aacuuuauucccauacgga

SEQ ID NO: 1633829 - RNA, 19 nt, Artificial Sequence
  Description of Artificial Sequence: Synthetic oligonucleotide
  Sense strand starting at position 3878 of SEQ ID NO: 1560916
gaauaaaguucccuggcuu

SEQ ID NO: 1633830 - RNA, 19 nt, Artificial Sequence
  Description of Artificial Sequence: Synthetic oligonucleotide
  Antisense strand to SEQ ID NO: 1633829
aagccagggaacuuuauuc

SEQ ID NO: 1633831 - RNA, 19 nt, Artificial Sequence
  Description of Artificial Sequence: Synthetic oligonucleotide
  Sense strand starting at position 89 of SEQ ID NO: 1560917
auggauuaguccagcggga

SEQ ID NO: 1633832 - RNA, 19 nt, Artificial Sequence
  Description of Artificial Sequence: Synthetic oligonucleotide
  Antisense strand to SEQ ID NO: 1633831
ucccgcuggacuaauccau

SEQ ID NO: 1633833 - RNA, 19 nt, Artificial Sequence
  Description of Artificial Sequence: Synthetic oligonucleotide
  Sense strand starting at position 91 of SEQ ID NO: 1560917
ggauuaguccagcgggaga

SEQ ID NO: 1633834 - RNA, 19 nt, Artificial Sequence
  Description of Artificial Sequence: Synthetic oligonucleotide
  Antisense strand to SEQ ID NO: 1633833
ucucccgcuggacuaaucc

SEQ ID NO: 1633835 - RNA, 19 nt, Artificial Sequence
  Description of Artificial Sequence: Synthetic oligonucleotide
  Sense strand starting at position 462 of SEQ ID NO: 1560917
gcaacuugggcagaaguga

SEQ ID NO: 1633836 - RNA, 19 nt, Artificial Sequence
  Description of Artificial Sequence: Synthetic oligonucleotide
  Antisense strand to SEQ ID NO: 1633835
ucacuucugcccaaguugc

SEQ ID NO: 1633837 - RNA, 19 nt, Artificial Sequence
  Description of Artificial Sequence: Synthetic oligonucleotide
  Sense strand starting at position 756 of SEQ ID NO: 1560917
ccauguucccauggcaaca

SEQ ID NO: 1633838 - RNA, 19 nt, Artificial Sequence
  Description of Artificial Sequence: Synthetic oligonucleotide
  Antisense strand to SEQ ID NO: 1633837
uguugccaugggaacaugg

SEQ ID NO: 1633839 - RNA, 19 nt, Artificial Sequence
  Description of Artificial Sequence: Synthetic oligonucleotide
  Sense strand starting at position 768 of SEQ ID NO: 1560917
ggcaacagauucuccaaau

SEQ ID NO: 1633840 - RNA, 19 nt, Artificial Sequence
  Description of Artificial Sequence: Synthetic oligonucleotide
  Antisense strand to SEQ ID NO: 1633839
auuuggagaaucuguugcc

SEQ ID NO: 1633841 - RNA, 19 nt, Artificial Sequence
  Description of Artificial Sequence: Synthetic oligonucleotide
  Sense strand starting at position 931 of SEQ ID NO: 1560917
agagaacacgugugucaag

SEQ ID NO: 1633842 - RNA, 19 nt, Artificial Sequence
  Description of Artificial Sequence: Synthetic oligonucleotide
  Antisense strand to SEQ ID NO: 1633841
cuugacacacguguucucu

SEQ ID NO: 1633843 - RNA, 19 nt, Artificial Sequence
  Description of Artificial Sequence: Synthetic oligonucleotide
  Sense strand starting at position 1067 of SEQ ID NO: 1560917
auccuaggucagugcagaa

SEQ ID NO: 1633844 - RNA, 19 nt, Artificial Sequence
  Description of Artificial Sequence: Synthetic oligonucleotide
  Antisense strand to SEQ ID NO: 1633843
uucugcacugaccuaggau

SEQ ID NO: 1633845 - RNA, 19 nt, Artificial Sequence
  Description of Artificial Sequence: Synthetic oligonucleotide
  Sense strand starting at position 2358 of SEQ ID NO: 1560917
gcgcuaagguucucacuuu

SEQ ID NO: 1633846 - RNA, 19 nt, Artificial Sequence
  Description of Artificial Sequence: Synthetic oligonucleotide
  Antisense strand to SEQ ID NO: 1633845
aaagugagaaccuuagcgc

SEQ ID NO: 1633847 - RNA, 19 nt, Artificial Sequence
  Description of Artificial Sequence: Synthetic oligonucleotide
  Sense strand starting at position 2418 of SEQ ID NO: 1560917
ccauuauuuguguagcucu

SEQ ID NO: 1633848 - RNA, 19 nt, Artificial Sequence
  Description of Artificial Sequence: Synthetic oligonucleotide
  Antisense strand to SEQ ID NO: 1633847
agagcuacacaaauaaugg

SEQ ID NO: 1633849 - RNA, 19 nt, Artificial Sequence
  Description of Artificial Sequence: Synthetic oligonucleotide
  Sense strand starting at position 2475 of SEQ ID NO: 1560917
cccucuauuccuggagcga

SEQ ID NO: 1633850 - RNA, 19 nt, Artificial Sequence
  Description of Artificial Sequence: Synthetic oligonucleotide
  Antisense strand to SEQ ID NO: 1633849
ucgcuccaggaauagaggg

SEQ ID NO: 1633851 - RNA, 19 nt, Artificial Sequence
  Description of Artificial Sequence: Synthetic oligonucleotide
  Sense strand starting at position 2476 of SEQ ID NO: 1560917
ccucuauuccuggagcgag

SEQ ID NO: 1633852 - RNA, 19 nt, Artificial Sequence
  Description of Artificial Sequence: Synthetic oligonucleotide
  Antisense strand to SEQ ID NO: 1633851
cucgcuccaggaauagagg

SEQ ID NO: 1633853 - RNA, 19 nt, Artificial Sequence
  Description of Artificial Sequence: Synthetic oligonucleotide
  Sense strand starting at position 2488 of SEQ ID NO: 1560917
gagcgagcuuucucgaugu

SEQ ID NO: 1633854 - RNA, 19 nt, Artificial Sequence
  Description of Artificial Sequence: Synthetic oligonucleotide
  Antisense strand to SEQ ID NO: 1633853
acaucgagaaagcucgcuc

SEQ ID NO: 1633855 - RNA, 19 nt, Artificial Sequence
  Description of Artificial Sequence: Synthetic oligonucleotide
  Sense strand starting at position 2490 of SEQ ID NO: 1560917
gcgagcuuucucgaugugu

SEQ ID NO: 1633856 - RNA, 19 nt, Artificial Sequence
  Description of Artificial Sequence: Synthetic oligonucleotide
  Antisense strand to SEQ ID NO: 1633855
acacaucgagaaagcucgc

SEQ ID NO: 1633857 - RNA, 19 nt, Artificial Sequence
  Description of Artificial Sequence: Synthetic oligonucleotide
  Sense strand starting at position 2492 of SEQ ID NO: 1560917
gagcuuucucgaugugucu

SEQ ID NO: 1633858 - RNA, 19 nt, Artificial Sequence
  Description of Artificial Sequence: Synthetic oligonucleotide
  Antisense strand to SEQ ID NO: 1633857
agacacaucgagaaagcuc

SEQ ID NO: 1633859 - RNA, 19 nt, Artificial Sequence
  Description of Artificial Sequence: Synthetic oligonucleotide
  Sense strand starting at position 2498 of SEQ ID NO: 1560917
ucucgaugugucucuguuu

SEQ ID NO: 1633860 - RNA, 19 nt, Artificial Sequence
  Description of Artificial Sequence: Synthetic oligonucleotide
  Antisense strand to SEQ ID NO: 1633859
aaacagagacacaucgaga

SEQ ID NO: 1633861 - RNA, 19 nt, Artificial Sequence
  Description of Artificial Sequence: Synthetic oligonucleotide
  Sense strand starting at position 2542 of SEQ ID NO: 1560917
uuucccugucuccgagaaa

SEQ ID NO: 1633862 - RNA, 19 nt, Artificial Sequence
  Description of Artificial Sequence: Synthetic oligonucleotide
  Antisense strand to SEQ ID NO: 1633861
uuucucggagacagggaaa

SEQ ID NO: 1633863 - RNA, 19 nt, Artificial Sequence
  Description of Artificial Sequence: Synthetic oligonucleotide
  Sense strand starting at position 2543 of SEQ ID NO: 1560917
uucccugucuccgagaaau

SEQ ID NO: 1633864 - RNA, 19 nt, Artificial Sequence
  Description of Artificial Sequence: Synthetic oligonucleotide
  Antisense strand to SEQ ID NO: 1633863
auuucucggagacagggaa

SEQ ID NO: 1633865 - RNA, 19 nt, Artificial Sequence
  Description of Artificial Sequence: Synthetic oligonucleotide
  Sense strand starting at position 2555 of SEQ ID NO: 1560917
gagaaaugcuguuucuauu

SEQ ID NO: 1633866 - RNA, 19 nt, Artificial Sequence
  Description of Artificial Sequence: Synthetic oligonucleotide
  Antisense strand to SEQ ID NO: 1633865
aauagaaacagcauuucuc

SEQ ID NO: 1633867 - RNA, 19 nt, Artificial Sequence
  Description of Artificial Sequence: Synthetic oligonucleotide
  Sense strand starting at position 2665 of SEQ ID NO: 1560917
uggucugccucacugugaa

SEQ ID NO: 1633868 - RNA, 19 nt, Artificial Sequence
  Description of Artificial Sequence: Synthetic oligonucleotide
  Antisense strand to SEQ ID NO: 1633867
uucacagugaggcagacca

SEQ ID NO: 1633869 - RNA, 19 nt, Artificial Sequence
  Description of Artificial Sequence: Synthetic oligonucleotide
  Sense strand starting at position 2702 of SEQ ID NO: 1560917
ucccucuacgucugauaaa

SEQ ID NO: 1633870 - RNA, 19 nt, Artificial Sequence
  Description of Artificial Sequence: Synthetic oligonucleotide
  Antisense strand to SEQ ID NO: 1633869
uuuaucagacguagaggga

SEQ ID NO: 1633871 - RNA, 19 nt, Artificial Sequence
  Description of Artificial Sequence: Synthetic oligonucleotide
  Sense strand starting at position 2703 of SEQ ID NO: 1560917
cccucuacgucugauaaau

SEQ ID NO: 1633872 - RNA, 19 nt, Artificial Sequence
  Description of Artificial Sequence: Synthetic oligonucleotide
  Antisense strand to SEQ ID NO: 1633871
auuuaucagacguagaggg

SEQ ID NO: 1633873 - RNA, 19 nt, Artificial Sequence
  Description of Artificial Sequence: Synthetic oligonucleotide
  Sense strand starting at position 2705 of SEQ ID NO: 1560917
cucuacgucugauaaauuc

SEQ ID NO: 1633874 - RNA, 19 nt, Artificial Sequence
  Description of Artificial Sequence: Synthetic oligonucleotide
  Antisense strand to SEQ ID NO: 1633873
gaauuuaucagacguagag

SEQ ID NO: 1633875 - RNA, 19 nt, Artificial Sequence
  Description of Artificial Sequence: Synthetic oligonucleotide
  Sense strand starting at position 2713 of SEQ ID NO: 1560917
cugauaaauucuuccgccu

SEQ ID NO: 1633876 - RNA, 19 nt, Artificial Sequence
  Description of Artificial Sequence: Synthetic oligonucleotide
  Antisense strand to SEQ ID NO: 1633875
aggcggaagaauuuaucag

SEQ ID NO: 1633877 - RNA, 19 nt, Artificial Sequence
  Description of Artificial Sequence: Synthetic oligonucleotide
  Sense strand starting at position 2767 of SEQ ID NO: 1560917
ucucucuggcucugugaau

SEQ ID NO: 1633878 - RNA, 19 nt, Artificial Sequence
  Description of Artificial Sequence: Synthetic oligonucleotide
  Antisense strand to SEQ ID NO: 1633877
auucacagagccagagaga

SEQ ID NO: 1633879 - RNA, 19 nt, Artificial Sequence
  Description of Artificial Sequence: Synthetic oligonucleotide
  Sense strand starting at position 2832 of SEQ ID NO: 1560917
acuugaucucuuugggagu

SEQ ID NO: 1633880 - RNA, 19 nt, Artificial Sequence
  Description of Artificial Sequence: Synthetic oligonucleotide
  Antisense strand to SEQ ID NO: 1633879
acucccaaagagaucaagu

SEQ ID NO: 1633881 - RNA, 19 nt, Artificial Sequence
  Description of Artificial Sequence: Synthetic oligonucleotide
  Sense strand starting at position 2871 of SEQ ID NO: 1560917
gggagucacucucuaaaug

SEQ ID NO: 1633882 - RNA, 19 nt, Artificial Sequence
  Description of Artificial Sequence: Synthetic oligonucleotide
  Antisense strand to SEQ ID NO: 1633881
cauuuagagagugacuccc

SEQ ID NO: 1633883 - RNA, 19 nt, Artificial Sequence
  Description of Artificial Sequence: Synthetic oligonucleotide
  Sense strand starting at position 2995 of SEQ ID NO: 1560917
uuguuugucucuuccuaua

SEQ ID NO: 1633884 - RNA, 19 nt, Artificial Sequence
  Description of Artificial Sequence: Synthetic oligonucleotide
  Antisense strand to SEQ ID NO: 1633883
uauaggaagagacaaacaa

SEQ ID NO: 1633885 - RNA, 19 nt, Artificial Sequence
  Description of Artificial Sequence: Synthetic oligonucleotide
  Sense strand starting at position 2997 of SEQ ID NO: 1560917
guuugucucuuccuauauc

SEQ ID NO: 1633886 - RNA, 19 nt, Artificial Sequence
  Description of Artificial Sequence: Synthetic oligonucleotide
  Antisense strand to SEQ ID NO: 1633885
gauauaggaagagacaaac

SEQ ID NO: 1633887 - RNA, 19 nt, Artificial Sequence
  Description of Artificial Sequence: Synthetic oligonucleotide
  Sense strand starting at position 3237 of SEQ ID NO: 1560917
ucucucuggcucuaugaau

SEQ ID NO: 1633888 - RNA, 19 nt, Artificial Sequence
  Description of Artificial Sequence: Synthetic oligonucleotide
  Antisense strand to SEQ ID NO: 1633887
auucauagagccagagaga

SEQ ID NO: 1633889 - RNA, 19 nt, Artificial Sequence
  Description of Artificial Sequence: Synthetic oligonucleotide
  Sense strand starting at position 3283 of SEQ ID NO: 1560917
ucccucugugucugugauu

SEQ ID NO: 1633890 - RNA, 19 nt, Artificial Sequence
  Description of Artificial Sequence: Synthetic oligonucleotide
  Antisense strand to SEQ ID NO: 1633889
aaucacagacacagaggga

SEQ ID NO: 1633891 - RNA, 19 nt, Artificial Sequence
  Description of Artificial Sequence: Synthetic oligonucleotide
  Sense strand starting at position 3361 of SEQ ID NO: 1560917
ugucucuggcucuaugaau

SEQ ID NO: 1633892 - RNA, 19 nt, Artificial Sequence
  Description of Artificial Sequence: Synthetic oligonucleotide
  Antisense strand to SEQ ID NO: 1633891
auucauagagccagagaca

SEQ ID NO: 1633893 - RNA, 19 nt, Artificial Sequence
  Description of Artificial Sequence: Synthetic oligonucleotide
  Sense strand starting at position 3367 of SEQ ID NO: 1560917
uggcucuaugaaugucuau

SEQ ID NO: 1633894 - RNA, 19 nt, Artificial Sequence
  Description of Artificial Sequence: Synthetic oligonucleotide
  Antisense strand to SEQ ID NO: 1633893
auagacauucauagagcca

SEQ ID NO: 1633895 - RNA, 19 nt, Artificial Sequence
  Description of Artificial Sequence: Synthetic oligonucleotide
  Sense strand starting at position 3407 of SEQ ID NO: 1560917
ugucuccggcucuaugaau

SEQ ID NO: 1633896 - RNA, 19 nt, Artificial Sequence
  Description of Artificial Sequence: Synthetic oligonucleotide
  Antisense strand to SEQ ID NO: 1633895
auucauagagccggagaca

SEQ ID NO: 1633897 - RNA, 19 nt, Artificial Sequence
  Description of Artificial Sequence: Synthetic oligonucleotide
  Sense strand starting at position 3418 of SEQ ID NO: 1560917
cuaugaaugucucucuaug

SEQ ID NO: 1633898 - RNA, 19 nt, Artificial Sequence
  Description of Artificial Sequence: Synthetic oligonucleotide
  Antisense strand to SEQ ID NO: 1633897
cauagagagacauucauag

SEQ ID NO: 1633899 - RNA, 19 nt, Artificial Sequence
  Description of Artificial Sequence: Synthetic oligonucleotide
  Sense strand starting at position 3456 of SEQ ID NO: 1560917
cugugucucuggcucuaua

SEQ ID NO: 1633900 - RNA, 19 nt, Artificial Sequence
  Description of Artificial Sequence: Synthetic oligonucleotide
  Antisense strand to SEQ ID NO: 1633899
uauagagccagagacacag

SEQ ID NO: 1633901 - RNA, 19 nt, Artificial Sequence
  Description of Artificial Sequence: Synthetic oligonucleotide
  Sense strand starting at position 3459 of SEQ ID NO: 1560917
ugucucuggcucuauaaau

SEQ ID NO: 1633902 - RNA, 19 nt, Artificial Sequence
  Description of Artificial Sequence: Synthetic oligonucleotide
  Antisense strand to SEQ ID NO: 1633901
auuuauagagccagagaca

SEQ ID NO: 1633903 - RNA, 19 nt, Artificial Sequence
  Description of Artificial Sequence: Synthetic oligonucleotide
  Sense strand starting at position 3584 of SEQ ID NO: 1560917
auguuucucugacucugaa

SEQ ID NO: 1633904 - RNA, 19 nt, Artificial Sequence
  Description of Artificial Sequence: Synthetic oligonucleotide
  Antisense strand to SEQ ID NO: 1633903
uucagagucagagaaacau

SEQ ID NO: 1633905 - RNA, 19 nt, Artificial Sequence
  Description of Artificial Sequence: Synthetic oligonucleotide
  Sense strand starting at position 3622 of SEQ ID NO: 1560917
cuaugaaugucuuucuaug

SEQ ID NO: 1633906 - RNA, 19 nt, Artificial Sequence
  Description of Artificial Sequence: Synthetic oligonucleotide
  Antisense strand to SEQ ID NO: 1633905
cauagaaagacauucauag

SEQ ID NO: 1633907 - RNA, 19 nt, Artificial Sequence
  Description of Artificial Sequence: Synthetic oligonucleotide
  Sense strand starting at position 3774 of SEQ ID NO: 1560917
cuaugaaucucucuguuug

SEQ ID NO: 1633908 - RNA, 19 nt, Artificial Sequence
  Description of Artificial Sequence: Synthetic oligonucleotide
  Antisense strand to SEQ ID NO: 1633907
caaacagagagauucauag

SEQ ID NO: 1633909 - RNA, 19 nt, Artificial Sequence
  Description of Artificial Sequence: Synthetic oligonucleotide
  Sense strand starting at position 3793 of SEQ ID NO: 1560917
ucucuuuggcucugugaau

SEQ ID NO: 1633910 - RNA, 19 nt, Artificial Sequence
  Description of Artificial Sequence: Synthetic oligonucleotide
  Antisense strand to SEQ ID NO: 1633909
auucacagagccaaagaga

SEQ ID NO: 1633911 - RNA, 19 nt, Artificial Sequence
  Description of Artificial Sequence: Synthetic oligonucleotide
  Sense strand starting at position 619 of SEQ ID NO: 1560918
accacugacuucugagcuu

SEQ ID NO: 1633912 - RNA, 19 nt, Artificial Sequence
  Description of Artificial Sequence: Synthetic oligonucleotide
  Antisense strand to SEQ ID NO: 1633911
aagcucagaagucaguggu

SEQ ID NO: 1633913 - RNA, 19 nt, Artificial Sequence
  Description of Artificial Sequence: Synthetic oligonucleotide
  Sense strand starting at position 625 of SEQ ID NO: 1560918
gacuucugagcuuguuucu

SEQ ID NO: 1633914 - RNA, 19 nt, Artificial Sequence
  Description of Artificial Sequence: Synthetic oligonucleotide
  Antisense strand to SEQ ID NO: 1633913
agaaacaagcucagaaguc

SEQ ID NO: 1633915 - RNA, 19 nt, Artificial Sequence
  Description of Artificial Sequence: Synthetic oligonucleotide
  Sense strand starting at position 634 of SEQ ID NO: 1560918
gcuuguuucugcccacuca

SEQ ID NO: 1633916 - RNA, 19 nt, Artificial Sequence
  Description of Artificial Sequence: Synthetic oligonucleotide
  Antisense strand to SEQ ID NO: 1633915
ugagugggcagaaacaagc

SEQ ID NO: 1633917 - RNA, 19 nt, Artificial Sequence
  Description of Artificial Sequence: Synthetic oligonucleotide
  Sense strand starting at position 667 of SEQ ID NO: 1560918
gagguaguaucuuggucac

SEQ ID NO: 1633918 - RNA, 19 nt, Artificial Sequence
  Description of Artificial Sequence: Synthetic oligonucleotide
  Antisense strand to SEQ ID NO: 1633917
gugaccaagauacuaccuc

SEQ ID NO: 1633919 - RNA, 19 nt, Artificial Sequence
  Description of Artificial Sequence: Synthetic oligonucleotide
  Sense strand starting at position 669 of SEQ ID NO: 1560918
gguaguaucuuggucacac

SEQ ID NO: 1633920 - RNA, 19 nt, Artificial Sequence
  Description of Artificial Sequence: Synthetic oligonucleotide
  Antisense strand to SEQ ID NO: 1633919
gugugaccaagauacuacc

SEQ ID NO: 1633921 - RNA, 19 nt, Artificial Sequence
  Description of Artificial Sequence: Synthetic oligonucleotide
  Sense strand starting at position 670 of SEQ ID NO: 1560918
guaguaucuuggucacaca

SEQ ID NO: 1633922 - RNA, 19 nt, Artificial Sequence
  Description of Artificial Sequence: Synthetic oligonucleotide
  Antisense strand to SEQ ID NO: 1633921
ugugugaccaagauacuac

SEQ ID NO: 1633923 - RNA, 19 nt, Artificial Sequence
  Description of Artificial Sequence: Synthetic oligonucleotide
  Sense strand starting at position 699 of SEQ ID NO: 1560918
ggcacugagcaguguucaa

SEQ ID NO: 1633924 - RNA, 19 nt, Artificial Sequence
  Description of Artificial Sequence: Synthetic oligonucleotide
  Antisense strand to SEQ ID NO: 1633923
uugaacacugcucagugcc

SEQ ID NO: 1633925 - RNA, 19 nt, Artificial Sequence
  Description of Artificial Sequence: Synthetic oligonucleotide
  Sense strand starting at position 717 of SEQ ID NO: 1560918
auaaacaucugauggauga

SEQ ID NO: 1633926 - RNA, 19 nt, Artificial Sequence
  Description of Artificial Sequence: Synthetic oligonucleotide
  Antisense strand to SEQ ID NO: 1633925
ucauccaucagauguuuau

SEQ ID NO: 1633927 - RNA, 19 nt, Artificial Sequence
  Description of Artificial Sequence: Synthetic oligonucleotide
  Sense strand starting at position 2042 of SEQ ID NO: 1560918
gcgggugaucuccauggaa

SEQ ID NO: 1633928 - RNA, 19 nt, Artificial Sequence
  Description of Artificial Sequence: Synthetic oligonucleotide
  Antisense strand to SEQ ID NO: 1633927
uuccauggagaucacccgc

SEQ ID NO: 1633929 - RNA, 19 nt, Artificial Sequence
  Description of Artificial Sequence: Synthetic oligonucleotide
  Sense strand starting at position 2044 of SEQ ID NO: 1560918
gggugaucuccauggaaac

SEQ ID NO: 1633930 - RNA, 19 nt, Artificial Sequence
  Description of Artificial Sequence: Synthetic oligonucleotide
  Antisense strand to SEQ ID NO: 1633929
guuuccauggagaucaccc

SEQ ID NO: 1633931 - RNA, 19 nt, Artificial Sequence
  Description of Artificial Sequence: Synthetic oligonucleotide
  Sense strand starting at position 2045 of SEQ ID NO: 1560918
ggugaucuccauggaaaca

SEQ ID NO: 1633932 - RNA, 19 nt, Artificial Sequence
  Description of Artificial Sequence: Synthetic oligonucleotide
  Antisense strand to SEQ ID NO: 1633931
uguuuccauggagaucacc

SEQ ID NO: 1633933 - RNA, 19 nt, Artificial Sequence
  Description of Artificial Sequence: Synthetic oligonucleotide
  Sense strand starting at position 2185 of SEQ ID NO: 1560918
gcgacugacuccuaguuau

SEQ ID NO: 1633934 - RNA, 19 nt, Artificial Sequence
  Description of Artificial Sequence: Synthetic oligonucleotide
  Antisense strand to SEQ ID NO: 1633933
auaacuaggagucagucgc

SEQ ID NO: 1633935 - RNA, 19 nt, Artificial Sequence
  Description of Artificial Sequence: Synthetic oligonucleotide
  Sense strand starting at position 2445 of SEQ ID NO: 1560918
cucucagguggcugaguua

SEQ ID NO: 1633936 - RNA, 19 nt, Artificial Sequence
  Description of Artificial Sequence: Synthetic oligonucleotide
  Antisense strand to SEQ ID NO: 1633935
uaacucagccaccugagag

SEQ ID NO: 1633937 - RNA, 19 nt, Artificial Sequence
  Description of Artificial Sequence: Synthetic oligonucleotide
  Sense strand starting at position 2448 of SEQ ID NO: 1560918
ucagguggcugaguuacau

SEQ ID NO: 1633938 - RNA, 19 nt, Artificial Sequence
  Description of Artificial Sequence: Synthetic oligonucleotide
  Antisense strand to SEQ ID NO: 1633937
auguaacucagccaccuga

SEQ ID NO: 1633939 - RNA, 19 nt, Artificial Sequence
  Description of Artificial Sequence: Synthetic oligonucleotide
  Sense strand starting at position 2471 of SEQ ID NO: 1560918
agauacaacuguuagguaa

SEQ ID NO: 1633940 - RNA, 19 nt, Artificial Sequence
  Description of Artificial Sequence: Synthetic oligonucleotide
  Antisense strand to SEQ ID NO: 1633939
uuaccuaacaguuguaucu

SEQ ID NO: 1633941 - RNA, 19 nt, Artificial Sequence
  Description of Artificial Sequence: Synthetic oligonucleotide
  Sense strand starting at position 2473 of SEQ ID NO: 1560918
auacaacuguuagguaaga

SEQ ID NO: 1633942 - RNA, 19 nt, Artificial Sequence
  Description of Artificial Sequence: Synthetic oligonucleotide
  Antisense strand to SEQ ID NO: 1633941
ucuuaccuaacaguuguau

SEQ ID NO: 1633943 - RNA, 19 nt, Artificial Sequence
  Description of Artificial Sequence: Synthetic oligonucleotide
  Sense strand starting at position 2474 of SEQ ID NO: 1560918
uacaacuguuagguaagau

SEQ ID NO: 1633944 - RNA, 19 nt, Artificial Sequence
  Description of Artificial Sequence: Synthetic oligonucleotide
  Antisense strand to SEQ ID NO: 1633943
aucuuaccuaacaguugua

SEQ ID NO: 1633945 - RNA, 19 nt, Artificial Sequence
  Description of Artificial Sequence: Synthetic oligonucleotide
  Sense strand starting at position 2566 of SEQ ID NO: 1560918
ccagcaugagucuagguaa

SEQ ID NO: 1633946 - RNA, 19 nt, Artificial Sequence
  Description of Artificial Sequence: Synthetic oligonucleotide
  Antisense strand to SEQ ID NO: 1633945
uuaccuagacucaugcugg

SEQ ID NO: 1633947 - RNA, 19 nt, Artificial Sequence
  Description of Artificial Sequence: Synthetic oligonucleotide
  Sense strand starting at position 2569 of SEQ ID NO: 1560918
gcaugagucuagguaaacc

SEQ ID NO: 1633948 - RNA, 19 nt, Artificial Sequence
  Description of Artificial Sequence: Synthetic oligonucleotide
  Antisense strand to SEQ ID NO: 1633947
gguuuaccuagacucaugc

SEQ ID NO: 1633949 - RNA, 19 nt, Artificial Sequence
  Description of Artificial Sequence: Synthetic oligonucleotide
  Sense strand starting at position 3362 of SEQ ID NO: 1560918
ggaguguagugguuggaua

SEQ ID NO: 1633950 - RNA, 19 nt, Artificial Sequence
  Description of Artificial Sequence: Synthetic oligonucleotide
  Antisense strand to SEQ ID NO: 1633949
uauccaaccacuacacucc

SEQ ID NO: 1633951 - RNA, 19 nt, Artificial Sequence
  Description of Artificial Sequence: Synthetic oligonucleotide
  Sense strand starting at position 3363 of SEQ ID NO: 1560918
gaguguagugguuggauaa

SEQ ID NO: 1633952 - RNA, 19 nt, Artificial Sequence
  Description of Artificial Sequence: Synthetic oligonucleotide
  Antisense strand to SEQ ID NO: 1633951
uuauccaaccacuacacuc

SEQ ID NO: 1633953 - RNA, 19 nt, Artificial Sequence
  Description of Artificial Sequence: Synthetic oligonucleotide
  Sense strand starting at position 3364 of SEQ ID NO: 1560918
aguguagugguuggauaac

SEQ ID NO: 1633954 - RNA, 19 nt, Artificial Sequence
  Description of Artificial Sequence: Synthetic oligonucleotide
  Antisense strand to SEQ ID NO: 1633953
guuauccaaccacuacacu

SEQ ID NO: 1633955 - RNA, 19 nt, Artificial Sequence
  Description of Artificial Sequence: Synthetic oligonucleotide
  Sense strand starting at position 3654 of SEQ ID NO: 1560918
ccuggcucugcauaauagu

SEQ ID NO: 1633956 - RNA, 19 nt, Artificial Sequence
  Description of Artificial Sequence: Synthetic oligonucleotide
  Antisense strand to SEQ ID NO: 1633955
acuauuaugcagagccagg

SEQ ID NO: 1633957 - RNA, 19 nt, Artificial Sequence
  Description of Artificial Sequence: Synthetic oligonucleotide
  Sense strand starting at position 3665 of SEQ ID NO: 1560918
auaauaguuguccaaccuu

SEQ ID NO: 1633958 - RNA, 19 nt, Artificial Sequence
  Description of Artificial Sequence: Synthetic oligonucleotide
  Antisense strand to SEQ ID NO: 1633957
aagguuggacaacuauuau

SEQ ID NO: 1633959 - RNA, 19 nt, Artificial Sequence
  Description of Artificial Sequence: Synthetic oligonucleotide
  Sense strand starting at position 3693 of SEQ ID NO: 1560918
agaguaaccuaauuguucu

SEQ ID NO: 1633960 - RNA, 19 nt, Artificial Sequence
  Description of Artificial Sequence: Synthetic oligonucleotide
  Antisense strand to SEQ ID NO: 1633959
agaacaauuagguuacucu

SEQ ID NO: 1633961 - RNA, 19 nt, Artificial Sequence
  Description of Artificial Sequence: Synthetic oligonucleotide
  Sense strand starting at position 3699 of SEQ ID NO: 1560918
accuaauuguucucaguuu

SEQ ID NO: 1633962 - RNA, 19 nt, Artificial Sequence
  Description of Artificial Sequence: Synthetic oligonucleotide
  Antisense strand to SEQ ID NO: 1633961
aaacugagaacaauuaggu

SEQ ID NO: 1633963 - RNA, 19 nt, Artificial Sequence
  Description of Artificial Sequence: Synthetic oligonucleotide
  Sense strand starting at position 3711 of SEQ ID NO: 1560918
ucaguuucucgauguguga

SEQ ID NO: 1633964 - RNA, 19 nt, Artificial Sequence
  Description of Artificial Sequence: Synthetic oligonucleotide
  Antisense strand to SEQ ID NO: 1633963
ucacacaucgagaaacuga

SEQ ID NO: 1633965 - RNA, 19 nt, Artificial Sequence
  Description of Artificial Sequence: Synthetic oligonucleotide
  Sense strand starting at position 3714 of SEQ ID NO: 1560918
guuucucgaugugugaaau

SEQ ID NO: 1633966 - RNA, 19 nt, Artificial Sequence
  Description of Artificial Sequence: Synthetic oligonucleotide
  Antisense strand to SEQ ID NO: 1633965
auuucacacaucgagaaac

SEQ ID NO: 1633967 - RNA, 19 nt, Artificial Sequence
  Description of Artificial Sequence: Synthetic oligonucleotide
  Sense strand starting at position 3715 of SEQ ID NO: 1560918
uuucucgaugugugaaaug

SEQ ID NO: 1633968 - RNA, 19 nt, Artificial Sequence
  Description of Artificial Sequence: Synthetic oligonucleotide
  Antisense strand to SEQ ID NO: 1633967
cauuucacacaucgagaaa

SEQ ID NO: 1633969 - RNA, 19 nt, Artificial Sequence
  Description of Artificial Sequence: Synthetic oligonucleotide
  Sense strand starting at position 3755 of SEQ ID NO: 1560918
agguaccugaaauguguaa

SEQ ID NO: 1633970 - RNA, 19 nt, Artificial Sequence
  Description of Artificial Sequence: Synthetic oligonucleotide
  Antisense strand to SEQ ID NO: 1633969
uuacacauuucagguaccu

SEQ ID NO: 1633971 - RNA, 19 nt, Artificial Sequence
  Description of Artificial Sequence: Synthetic oligonucleotide
  Sense strand starting at position 3757 of SEQ ID NO: 1560918
guaccugaaauguguaaag

SEQ ID NO: 1633972 - RNA, 19 nt, Artificial Sequence
  Description of Artificial Sequence: Synthetic oligonucleotide
  Antisense strand to SEQ ID NO: 1633971
cuuuacacauuucagguac

SEQ ID NO: 1633973 - RNA, 19 nt, Artificial Sequence
  Description of Artificial Sequence: Synthetic oligonucleotide
  Sense strand starting at position 3759 of SEQ ID NO: 1560918
accugaaauguguaaagug

SEQ ID NO: 1633974 - RNA, 19 nt, Artificial Sequence
  Description of Artificial Sequence: Synthetic oligonucleotide
  Antisense strand to SEQ ID NO: 1633973
cacuuuacacauuucaggu

SEQ ID NO: 1633975 - RNA, 19 nt, Artificial Sequence
  Description of Artificial Sequence: Synthetic oligonucleotide
  Sense strand starting at position 3815 of SEQ ID NO: 1560918
gguguaaaccagugguucu

SEQ ID NO: 1633976 - RNA, 19 nt, Artificial Sequence
  Description of Artificial Sequence: Synthetic oligonucleotide
  Antisense strand to SEQ ID NO: 1633975
agaaccacugguuuacacc

SEQ ID NO: 1633977 - RNA, 19 nt, Artificial Sequence
  Description of Artificial Sequence: Synthetic oligonucleotide
  Sense strand starting at position 3816 of SEQ ID NO: 1560918
guguaaaccagugguucuu

SEQ ID NO: 1633978 - RNA, 19 nt, Artificial Sequence
  Description of Artificial Sequence: Synthetic oligonucleotide
  Antisense strand to SEQ ID NO: 1633977
aagaaccacugguuuacac

SEQ ID NO: 1633979 - RNA, 19 nt, Artificial Sequence
  Description of Artificial Sequence: Synthetic oligonucleotide
  Sense strand starting at position 3865 of SEQ ID NO: 1560918
gccauuuggcaauguccua

SEQ ID NO: 1633980 - RNA, 19 nt, Artificial Sequence
  Description of Artificial Sequence: Synthetic oligonucleotide
  Antisense strand to SEQ ID NO: 1633979
uaggacauugccaaauggc

SEQ ID NO: 1633981 - RNA, 19 nt, Artificial Sequence
  Description of Artificial Sequence: Synthetic oligonucleotide
  Sense strand starting at position 3870 of SEQ ID NO: 1560918
uuggcaauguccuaagaca

SEQ ID NO: 1633982 - RNA, 19 nt, Artificial Sequence
  Description of Artificial Sequence: Synthetic oligonucleotide
  Antisense strand to SEQ ID NO: 1633981
ugucuuaggacauugccaa

SEQ ID NO: 1633983 - RNA, 19 nt, Artificial Sequence
  Description of Artificial Sequence: Synthetic oligonucleotide
  Sense strand starting at position 12 of SEQ ID NO: 1560919
acagccagggcucgaaaua

SEQ ID NO: 1633984 - RNA, 19 nt, Artificial Sequence
  Description of Artificial Sequence: Synthetic oligonucleotide
  Antisense strand to SEQ ID NO: 1633983
uauuucgagcccuggcugu

SEQ ID NO: 1633985 - RNA, 19 nt, Artificial Sequence
  Description of Artificial Sequence: Synthetic oligonucleotide
  Sense strand starting at position 13 of SEQ ID NO: 1560919
cagccagggcucgaaauaa

SEQ ID NO: 1633986 - RNA, 19 nt, Artificial Sequence
  Description of Artificial Sequence: Synthetic oligonucleotide
  Antisense strand to SEQ ID NO: 1633985
uuauuucgagcccuggcug

SEQ ID NO: 1633987 - RNA, 19 nt, Artificial Sequence
  Description of Artificial Sequence: Synthetic oligonucleotide
  Sense strand starting at position 1102 of SEQ ID NO: 1560919
accacugacuucugagcuu

SEQ ID NO: 1633988 - RNA, 19 nt, Artificial Sequence
  Description of Artificial Sequence: Synthetic oligonucleotide
  Antisense strand to SEQ ID NO: 1633987
aagcucagaagucaguggu

SEQ ID NO: 1633989 - RNA, 19 nt, Artificial Sequence
  Description of Artificial Sequence: Synthetic oligonucleotide
  Sense strand starting at position 1108 of SEQ ID NO: 1560919
gacuucugagcuuguuucu

SEQ ID NO: 1633990 - RNA, 19 nt, Artificial Sequence
  Description of Artificial Sequence: Synthetic oligonucleotide
  Antisense strand to SEQ ID NO: 1633989
agaaacaagcucagaaguc

SEQ ID NO: 1633991 - RNA, 19 nt, Artificial Sequence
  Description of Artificial Sequence: Synthetic oligonucleotide
  Sense strand starting at position 1117 of SEQ ID NO: 1560919
gcuuguuucugcccacuca

SEQ ID NO: 1633992 - RNA, 19 nt, Artificial Sequence
  Description of Artificial Sequence: Synthetic oligonucleotide
  Antisense strand to SEQ ID NO: 1633991
ugagugggcagaaacaagc

SEQ ID NO: 1633993 - RNA, 19 nt, Artificial Sequence
  Description of Artificial Sequence: Synthetic oligonucleotide
  Sense strand starting at position 1150 of SEQ ID NO: 1560919
gagguaguaucuuggucac

SEQ ID NO: 1633994 - RNA, 19 nt, Artificial Sequence
  Description of Artificial Sequence: Synthetic oligonucleotide
  Antisense strand to SEQ ID NO: 1633993
gugaccaagauacuaccuc

SEQ ID NO: 1633995 - RNA, 19 nt, Artificial Sequence
  Description of Artificial Sequence: Synthetic oligonucleotide
  Sense strand starting at position 1152 of SEQ ID NO: 1560919
gguaguaucuuggucacac

SEQ ID NO: 1633996 - RNA, 19 nt, Artificial Sequence
  Description of Artificial Sequence: Synthetic oligonucleotide
  Antisense strand to SEQ ID NO: 1633995
gugugaccaagauacuacc

SEQ ID NO: 1633997 - RNA, 19 nt, Artificial Sequence
  Description of Artificial Sequence: Synthetic oligonucleotide
  Sense strand starting at position 1153 of SEQ ID NO: 1560919
guaguaucuuggucacaca

SEQ ID NO: 1633998 - RNA, 19 nt, Artificial Sequence
  Description of Artificial Sequence: Synthetic oligonucleotide
  Antisense strand to SEQ ID NO: 1633997
ugugugaccaagauacuac

SEQ ID NO: 1633999 - RNA, 19 nt, Artificial Sequence
  Description of Artificial Sequence: Synthetic oligonucleotide
  Sense strand starting at position 1182 of SEQ ID NO: 1560919
ggcacugagcaguguucaa

SEQ ID NO: 1634000 - RNA, 19 nt, Artificial Sequence
  Description of Artificial Sequence: Synthetic oligonucleotide
  Antisense strand to SEQ ID NO: 1633999
uugaacacugcucagugcc

SEQ ID NO: 1634001 - RNA, 19 nt, Artificial Sequence
  Description of Artificial Sequence: Synthetic oligonucleotide
  Sense strand starting at position 1200 of SEQ ID NO: 1560919
auaaacaucugauggauga

SEQ ID NO: 1634002 - RNA, 19 nt, Artificial Sequence
  Description of Artificial Sequence: Synthetic oligonucleotide
  Antisense strand to SEQ ID NO: 1634001
ucauccaucagauguuuau

SEQ ID NO: 1634003 - RNA, 19 nt, Artificial Sequence
  Description of Artificial Sequence: Synthetic oligonucleotide
  Sense strand starting at position 2525 of SEQ ID NO: 1560919
gcgggugaucuccauggaa

SEQ ID NO: 1634004 - RNA, 19 nt, Artificial Sequence
  Description of Artificial Sequence: Synthetic oligonucleotide
  Antisense strand to SEQ ID NO: 1634003
uuccauggagaucacccgc

SEQ ID NO: 1634005 - RNA, 19 nt, Artificial Sequence
  Description of Artificial Sequence: Synthetic oligonucleotide
  Sense strand starting at position 2527 of SEQ ID NO: 1560919
gggugaucuccauggaaac

SEQ ID NO: 1634006 - RNA, 19 nt, Artificial Sequence
  Description of Artificial Sequence: Synthetic oligonucleotide
  Antisense strand to SEQ ID NO: 1634005
guuuccauggagaucaccc

SEQ ID NO: 1634007 - RNA, 19 nt, Artificial Sequence
  Description of Artificial Sequence: Synthetic oligonucleotide
  Sense strand starting at position 2528 of SEQ ID NO: 1560919
ggugaucuccauggaaaca

SEQ ID NO: 1634008 - RNA, 19 nt, Artificial Sequence
  Description of Artificial Sequence: Synthetic oligonucleotide
  Antisense strand to SEQ ID NO: 1634007
uguuuccauggagaucacc

SEQ ID NO: 1634009 - RNA, 19 nt, Artificial Sequence
  Description of Artificial Sequence: Synthetic oligonucleotide
  Sense strand starting at position 2668 of SEQ ID NO: 1560919
gcgacugacuccuaguuau

SEQ ID NO: 1634010 - RNA, 19 nt, Artificial Sequence
  Description of Artificial Sequence: Synthetic oligonucleotide
  Antisense strand to SEQ ID NO: 1634009
auaacuaggagucagucgc

SEQ ID NO: 1634011 - RNA, 19 nt, Artificial Sequence
  Description of Artificial Sequence: Synthetic oligonucleotide
  Sense strand starting at position 2928 of SEQ ID NO: 1560919
cucucagguggcugaguua

SEQ ID NO: 1634012 - RNA, 19 nt, Artificial Sequence
  Description of Artificial Sequence: Synthetic oligonucleotide
  Antisense strand to SEQ ID NO: 1634011
uaacucagccaccugagag

SEQ ID NO: 1634013 - RNA, 19 nt, Artificial Sequence
  Description of Artificial Sequence: Synthetic oligonucleotide
  Sense strand starting at position 2931 of SEQ ID NO: 1560919
ucagguggcugaguuacau

SEQ ID NO: 1634014 - RNA, 19 nt, Artificial Sequence
  Description of Artificial Sequence: Synthetic oligonucleotide
  Antisense strand to SEQ ID NO: 1634013
auguaacucagccaccuga

SEQ ID NO: 1634015 - RNA, 19 nt, Artificial Sequence
  Description of Artificial Sequence: Synthetic oligonucleotide
  Sense strand starting at position 2954 of SEQ ID NO: 1560919
agauacaacuguuagguaa

SEQ ID NO: 1634016 - RNA, 19 nt, Artificial Sequence
  Description of Artificial Sequence: Synthetic oligonucleotide
  Antisense strand to SEQ ID NO: 1634015
uuaccuaacaguuguaucu

SEQ ID NO: 1634017 - RNA, 19 nt, Artificial Sequence
  Description of Artificial Sequence: Synthetic oligonucleotide
  Sense strand starting at position 2956 of SEQ ID NO: 1560919
auacaacuguuagguaaga

SEQ ID NO: 1634018 - RNA, 19 nt, Artificial Sequence
  Description of Artificial Sequence: Synthetic oligonucleotide
  Antisense strand to SEQ ID NO: 1634017
ucuuaccuaacaguuguau

SEQ ID NO: 1634019 - RNA, 19 nt, Artificial Sequence
  Description of Artificial Sequence: Synthetic oligonucleotide
  Sense strand starting at position 2957 of SEQ ID NO: 1560919
uacaacuguuagguaagau

SEQ ID NO: 1634020 - RNA, 19 nt, Artificial Sequence
  Description of Artificial Sequence: Synthetic oligonucleotide
  Antisense strand to SEQ ID NO: 1634019
aucuuaccuaacaguugua

SEQ ID NO: 1634021 - RNA, 19 nt, Artificial Sequence
  Description of Artificial Sequence: Synthetic oligonucleotide
  Sense strand starting at position 3049 of SEQ ID NO: 1560919
ccagcaugagucuagguaa

SEQ ID NO: 1634022 - RNA, 19 nt, Artificial Sequence
  Description of Artificial Sequence: Synthetic oligonucleotide
  Antisense strand to SEQ ID NO: 1634021
uuaccuagacucaugcugg

SEQ ID NO: 1634023 - RNA, 19 nt, Artificial Sequence
  Description of Artificial Sequence: Synthetic oligonucleotide
  Sense strand starting at position 3052 of SEQ ID NO: 1560919
gcaugagucuagguaaacc

SEQ ID NO: 1634024 - RNA, 19 nt, Artificial Sequence
  Description of Artificial Sequence: Synthetic oligonucleotide
  Antisense strand to SEQ ID NO: 1634023
gguuuaccuagacucaugc

SEQ ID NO: 1634025 - RNA, 19 nt, Artificial Sequence
  Description of Artificial Sequence: Synthetic oligonucleotide
  Sense strand starting at position 3845 of SEQ ID NO: 1560919
ggaguguagugguuggaua

SEQ ID NO: 1634026 - RNA, 19 nt, Artificial Sequence
  Description of Artificial Sequence: Synthetic oligonucleotide
  Antisense strand to SEQ ID NO: 1634025
uauccaaccacuacacucc

SEQ ID NO: 1634027 - RNA, 19 nt, Artificial Sequence
  Description of Artificial Sequence: Synthetic oligonucleotide
  Sense strand starting at position 3846 of SEQ ID NO: 1560919
gaguguagugguuggauaa

SEQ ID NO: 1634028 - RNA, 19 nt, Artificial Sequence
  Description of Artificial Sequence: Synthetic oligonucleotide
  Antisense strand to SEQ ID NO: 1634027
uuauccaaccacuacacuc

SEQ ID NO: 1634029 - RNA, 19 nt, Artificial Sequence
  Description of Artificial Sequence: Synthetic oligonucleotide
  Sense strand starting at position 3847 of SEQ ID NO: 1560919
aguguagugguuggauaac

SEQ ID NO: 1634030 - RNA, 19 nt, Artificial Sequence
  Description of Artificial Sequence: Synthetic oligonucleotide
  Antisense strand to SEQ ID NO: 1634029
guuauccaaccacuacacu

SEQ ID NO: 1634031 - RNA, 19 nt, Artificial Sequence
  Description of Artificial Sequence: Synthetic oligonucleotide
  Sense strand starting at position 1007 of SEQ ID NO: 1560920
accacugacuucugagcuu

SEQ ID NO: 1634032 - RNA, 19 nt, Artificial Sequence
  Description of Artificial Sequence: Synthetic oligonucleotide
  Antisense strand to SEQ ID NO: 1634031
aagcucagaagucaguggu

SEQ ID NO: 1634033 - RNA, 19 nt, Artificial Sequence
  Description of Artificial Sequence: Synthetic oligonucleotide
  Sense strand starting at position 1013 of SEQ ID NO: 1560920
gacuucugagcuuguuucu

SEQ ID NO: 1634034 - RNA, 19 nt, Artificial Sequence
  Description of Artificial Sequence: Synthetic oligonucleotide
  Antisense strand to SEQ ID NO: 1634033
agaaacaagcucagaaguc

SEQ ID NO: 1634035 - RNA, 19 nt, Artificial Sequence
  Description of Artificial Sequence: Synthetic oligonucleotide
  Sense strand starting at position 1022 of SEQ ID NO: 1560920
gcuuguuucugcccacuca

SEQ ID NO: 1634036 - RNA, 19 nt, Artificial Sequence
  Description of Artificial Sequence: Synthetic oligonucleotide
  Antisense strand to SEQ ID NO: 1634035
ugagugggcagaaacaagc

SEQ ID NO: 1634037 - RNA, 19 nt, Artificial Sequence
  Description of Artificial Sequence: Synthetic oligonucleotide
  Sense strand starting at position 1055 of SEQ ID NO: 1560920
gagguaguaucuuggucac

SEQ ID NO: 1634038 - RNA, 19 nt, Artificial Sequence
  Description of Artificial Sequence: Synthetic oligonucleotide
  Antisense strand to SEQ ID NO: 1634037
gugaccaagauacuaccuc

SEQ ID NO: 1634039 - RNA, 19 nt, Artificial Sequence
  Description of Artificial Sequence: Synthetic oligonucleotide
  Sense strand starting at position 1057 of SEQ ID NO: 1560920
gguaguaucuuggucacac

SEQ ID NO: 1634040 - RNA, 19 nt, Artificial Sequence
  Description of Artificial Sequence: Synthetic oligonucleotide
  Antisense strand to SEQ ID NO: 1634039
gugugaccaagauacuacc

SEQ ID NO: 1634041 - RNA, 19 nt, Artificial Sequence
  Description of Artificial Sequence: Synthetic oligonucleotide
  Sense strand starting at position 1058 of SEQ ID NO: 1560920
guaguaucuuggucacaca

SEQ ID NO: 1634042 - RNA, 19 nt, Artificial Sequence
  Description of Artificial Sequence: Synthetic oligonucleotide
  Antisense strand to SEQ ID NO: 1634041
ugugugaccaagauacuac

SEQ ID NO: 1634043 - RNA, 19 nt, Artificial Sequence
  Description of Artificial Sequence: Synthetic oligonucleotide
  Sense strand starting at position 1087 of SEQ ID NO: 1560920
ggcacugagcaguguucaa

SEQ ID NO: 1634044 - RNA, 19 nt, Artificial Sequence
  Description of Artificial Sequence: Synthetic oligonucleotide
  Antisense strand to SEQ ID NO: 1634043
uugaacacugcucagugcc

SEQ ID NO: 1634045 - RNA, 19 nt, Artificial Sequence
  Description of Artificial Sequence: Synthetic oligonucleotide
  Sense strand starting at position 1105 of SEQ ID NO: 1560920
auaaacaucugauggauga

SEQ ID NO: 1634046 - RNA, 19 nt, Artificial Sequence
  Description of Artificial Sequence: Synthetic oligonucleotide
  Antisense strand to SEQ ID NO: 1634045
ucauccaucagauguuuau

SEQ ID NO: 1634047 - RNA, 19 nt, Artificial Sequence
  Description of Artificial Sequence: Synthetic oligonucleotide
  Sense strand starting at position 2430 of SEQ ID NO: 1560920
gcgggugaucuccauggaa

SEQ ID NO: 1634048 - RNA, 19 nt, Artificial Sequence
  Description of Artificial Sequence: Synthetic oligonucleotide
  Antisense strand to SEQ ID NO: 1634047
uuccauggagaucacccgc

SEQ ID NO: 1634049 - RNA, 19 nt, Artificial Sequence
  Description of Artificial Sequence: Synthetic oligonucleotide
  Sense strand starting at position 2432 of SEQ ID NO: 1560920
gggugaucuccauggaaac

SEQ ID NO: 1634050 - RNA, 19 nt, Artificial Sequence
  Description of Artificial Sequence: Synthetic oligonucleotide
  Antisense strand to SEQ ID NO: 1634049
guuuccauggagaucaccc

SEQ ID NO: 1634051 - RNA, 19 nt, Artificial Sequence
  Description of Artificial Sequence: Synthetic oligonucleotide
  Sense strand starting at position 2433 of SEQ ID NO: 1560920
ggugaucuccauggaaaca

SEQ ID NO: 1634052 - RNA, 19 nt, Artificial Sequence
  Description of Artificial Sequence: Synthetic oligonucleotide
  Antisense strand to SEQ ID NO: 1634051
uguuuccauggagaucacc

SEQ ID NO: 1634053 - RNA, 19 nt, Artificial Sequence
  Description of Artificial Sequence: Synthetic oligonucleotide
  Sense strand starting at position 2573 of SEQ ID NO: 1560920
gcgacugacuccuaguuau

SEQ ID NO: 1634054 - RNA, 19 nt, Artificial Sequence
  Description of Artificial Sequence: Synthetic oligonucleotide
  Antisense strand to SEQ ID NO: 1634053
auaacuaggagucagucgc

SEQ ID NO: 1634055 - RNA, 19 nt, Artificial Sequence
  Description of Artificial Sequence: Synthetic oligonucleotide
  Sense strand starting at position 2833 of SEQ ID NO: 1560920
cucucagguggcugaguua

SEQ ID NO: 1634056 - RNA, 19 nt, Artificial Sequence
  Description of Artificial Sequence: Synthetic oligonucleotide
  Antisense strand to SEQ ID NO: 1634055
uaacucagccaccugagag

SEQ ID NO: 1634057 - RNA, 19 nt, Artificial Sequence
  Description of Artificial Sequence: Synthetic oligonucleotide
  Sense strand starting at position 2836 of SEQ ID NO: 1560920
ucagguggcugaguuacau

SEQ ID NO: 1634058 - RNA, 19 nt, Artificial Sequence
  Description of Artificial Sequence: Synthetic oligonucleotide
  Antisense strand to SEQ ID NO: 1634057
auguaacucagccaccuga

SEQ ID NO: 1634059 - RNA, 19 nt, Artificial Sequence
  Description of Artificial Sequence: Synthetic oligonucleotide
  Sense strand starting at position 2859 of SEQ ID NO: 1560920
agauacaacuguuagguaa

SEQ ID NO: 1634060 - RNA, 19 nt, Artificial Sequence
  Description of Artificial Sequence: Synthetic oligonucleotide
  Antisense strand to SEQ ID NO: 1634059
uuaccuaacaguuguaucu

SEQ ID NO: 1634061 - RNA, 19 nt, Artificial Sequence
  Description of Artificial Sequence: Synthetic oligonucleotide
  Sense strand starting at position 2861 of SEQ ID NO: 1560920
auacaacuguuagguaaga

SEQ ID NO: 1634062 - RNA, 19 nt, Artificial Sequence
  Description of Artificial Sequence: Synthetic oligonucleotide
  Antisense strand to SEQ ID NO: 1634061
ucuuaccuaacaguuguau

SEQ ID NO: 1634063 - RNA, 19 nt, Artificial Sequence
  Description of Artificial Sequence: Synthetic oligonucleotide
  Sense strand starting at position 2862 of SEQ ID NO: 1560920
uacaacuguuagguaagau

SEQ ID NO: 1634064 - RNA, 19 nt, Artificial Sequence
  Description of Artificial Sequence: Synthetic oligonucleotide
  Antisense strand to SEQ ID NO: 1634063
aucuuaccuaacaguugua

SEQ ID NO: 1634065 - RNA, 19 nt, Artificial Sequence
  Description of Artificial Sequence: Synthetic oligonucleotide
  Sense strand starting at position 2954 of SEQ ID NO: 1560920
ccagcaugagucuagguaa

SEQ ID NO: 1634066 - RNA, 19 nt, Artificial Sequence
  Description of Artificial Sequence: Synthetic oligonucleotide
  Antisense strand to SEQ ID NO: 1634065
uuaccuagacucaugcugg

SEQ ID NO: 1634067 - RNA, 19 nt, Artificial Sequence
  Description of Artificial Sequence: Synthetic oligonucleotide
  Sense strand starting at position 2957 of SEQ ID NO: 1560920
gcaugagucuagguaaacc

SEQ ID NO: 1634068 - RNA, 19 nt, Artificial Sequence
  Description of Artificial Sequence: Synthetic oligonucleotide
  Antisense strand to SEQ ID NO: 1634067
gguuuaccuagacucaugc

SEQ ID NO: 1634069 - RNA, 19 nt, Artificial Sequence
  Description of Artificial Sequence: Synthetic oligonucleotide
  Sense strand starting at position 3750 of SEQ ID NO: 1560920
ggaguguagugguuggaua

SEQ ID NO: 1634070 - RNA, 19 nt, Artificial Sequence
  Description of Artificial Sequence: Synthetic oligonucleotide
  Antisense strand to SEQ ID NO: 1634069
uauccaaccacuacacucc

SEQ ID NO: 1634071 - RNA, 19 nt, Artificial Sequence
  Description of Artificial Sequence: Synthetic oligonucleotide
  Sense strand starting at position 3751 of SEQ ID NO: 1560920
gaguguagugguuggauaa

SEQ ID NO: 1634072 - RNA, 19 nt, Artificial Sequence
  Description of Artificial Sequence: Synthetic oligonucleotide
  Antisense strand to SEQ ID NO: 1634071
uuauccaaccacuacacuc

SEQ ID NO: 1634073 - RNA, 19 nt, Artificial Sequence
  Description of Artificial Sequence: Synthetic oligonucleotide
  Sense strand starting at position 3752 of SEQ ID NO: 1560920
aguguagugguuggauaac

SEQ ID NO: 1634074 - RNA, 19 nt, Artificial Sequence
  Description of Artificial Sequence: Synthetic oligonucleotide
  Antisense strand to SEQ ID NO: 1634073
guuauccaaccacuacacu

SEQ ID NO: 1634075 - RNA, 19 nt, Artificial Sequence
  Description of Artificial Sequence: Synthetic oligonucleotide
  Sense strand starting at position 18 of SEQ ID NO: 1560921
cuaaauaagcgguaaucua

SEQ ID NO: 1634076 - RNA, 19 nt, Artificial Sequence
  Description of Artificial Sequence: Synthetic oligonucleotide
  Antisense strand to SEQ ID NO: 1634075
uagauuaccgcuuauuuag

SEQ ID NO: 1634077 - RNA, 19 nt, Artificial Sequence
  Description of Artificial Sequence: Synthetic oligonucleotide
  Sense strand starting at position 41 of SEQ ID NO: 1560921
uuuaauauucuaggagucu

SEQ ID NO: 1634078 - RNA, 19 nt, Artificial Sequence
  Description of Artificial Sequence: Synthetic oligonucleotide
  Antisense strand to SEQ ID NO: 1634077
agacuccuagaauauuaaa

SEQ ID NO: 1634079 - RNA, 19 nt, Artificial Sequence
  Description of Artificial Sequence: Synthetic oligonucleotide
  Sense strand starting at position 42 of SEQ ID NO: 1560921
uuaauauucuaggagucug

SEQ ID NO: 1634080 - RNA, 19 nt, Artificial Sequence
  Description of Artificial Sequence: Synthetic oligonucleotide
  Antisense strand to SEQ ID NO: 1634079
cagacuccuagaauauuaa

SEQ ID NO: 1634081 - RNA, 19 nt, Artificial Sequence
  Description of Artificial Sequence: Synthetic oligonucleotide
  Sense strand starting at position 47 of SEQ ID NO: 1560921
auucuaggagucugacaag

SEQ ID NO: 1634082 - RNA, 19 nt, Artificial Sequence
  Description of Artificial Sequence: Synthetic oligonucleotide
  Antisense strand to SEQ ID NO: 1634081
cuugucagacuccuagaau

SEQ ID NO: 1634083 - RNA, 19 nt, Artificial Sequence
  Description of Artificial Sequence: Synthetic oligonucleotide
  Sense strand starting at position 50 of SEQ ID NO: 1560921
cuaggagucugacaagcua

SEQ ID NO: 1634084 - RNA, 19 nt, Artificial Sequence
  Description of Artificial Sequence: Synthetic oligonucleotide
  Antisense strand to SEQ ID NO: 1634083
uagcuugucagacuccuag

SEQ ID NO: 1634085 - RNA, 19 nt, Artificial Sequence
  Description of Artificial Sequence: Synthetic oligonucleotide
  Sense strand starting at position 66 of SEQ ID NO: 1560921
cuaggacugugcucuuuga

SEQ ID NO: 1634086 - RNA, 19 nt, Artificial Sequence
  Description of Artificial Sequence: Synthetic oligonucleotide
  Antisense strand to SEQ ID NO: 1634085
ucaaagagcacaguccuag

SEQ ID NO: 1634087 - RNA, 19 nt, Artificial Sequence
  Description of Artificial Sequence: Synthetic oligonucleotide
  Sense strand starting at position 70 of SEQ ID NO: 1560921
gacugugcucuuugaauuc

SEQ ID NO: 1634088 - RNA, 19 nt, Artificial Sequence
  Description of Artificial Sequence: Synthetic oligonucleotide
  Antisense strand to SEQ ID NO: 1634087
gaauucaaagagcacaguc

SEQ ID NO: 1634089 - RNA, 19 nt, Artificial Sequence
  Description of Artificial Sequence: Synthetic oligonucleotide
  Sense strand starting at position 164 of SEQ ID NO: 1560921
ggaaucuaauauuccagca

SEQ ID NO: 1634090 - RNA, 19 nt, Artificial Sequence
  Description of Artificial Sequence: Synthetic oligonucleotide
  Antisense strand to SEQ ID NO: 1634089
ugcuggaauauuagauucc

SEQ ID NO: 1634091 - RNA, 19 nt, Artificial Sequence
  Description of Artificial Sequence: Synthetic oligonucleotide
  Sense strand starting at position 351 of SEQ ID NO: 1560921
acgguuuagacguggaguu

SEQ ID NO: 1634092 - RNA, 19 nt, Artificial Sequence
  Description of Artificial Sequence: Synthetic oligonucleotide
  Antisense strand to SEQ ID NO: 1634091
aacuccacgucuaaaccgu

SEQ ID NO: 1634093 - RNA, 19 nt, Artificial Sequence
  Description of Artificial Sequence: Synthetic oligonucleotide
  Sense strand starting at position 591 of SEQ ID NO: 1560921
cacacaugucaccggauca

SEQ ID NO: 1634094 - RNA, 19 nt, Artificial Sequence
  Description of Artificial Sequence: Synthetic oligonucleotide
  Antisense strand to SEQ ID NO: 1634093
ugauccggugacaugugug

SEQ ID NO: 1634095 - RNA, 19 nt, Artificial Sequence
  Description of Artificial Sequence: Synthetic oligonucleotide
  Sense strand starting at position 1087 of SEQ ID NO: 1560921
gcccgaucuggaugugaaa

SEQ ID NO: 1634096 - RNA, 19 nt, Artificial Sequence
  Description of Artificial Sequence: Synthetic oligonucleotide
  Antisense strand to SEQ ID NO: 1634095
uuucacauccagaucgggc

SEQ ID NO: 1634097 - RNA, 19 nt, Artificial Sequence
  Description of Artificial Sequence: Synthetic oligonucleotide
  Sense strand starting at position 1314 of SEQ ID NO: 1560921
guucuagauccgcgggauc

SEQ ID NO: 1634098 - RNA, 19 nt, Artificial Sequence
  Description of Artificial Sequence: Synthetic oligonucleotide
  Antisense strand to SEQ ID NO: 1634097
gaucccgcggaucuagaac

SEQ ID NO: 1634099 - RNA, 19 nt, Artificial Sequence
  Description of Artificial Sequence: Synthetic oligonucleotide
  Sense strand starting at position 1425 of SEQ ID NO: 1560921
ggcacuauagugggucaga

SEQ ID NO: 1634100 - RNA, 19 nt, Artificial Sequence
  Description of Artificial Sequence: Synthetic oligonucleotide
  Antisense strand to SEQ ID NO: 1634099
ucugacccacuauagugcc

SEQ ID NO: 1634101 - RNA, 19 nt, Artificial Sequence
  Description of Artificial Sequence: Synthetic oligonucleotide
  Sense strand starting at position 1493 of SEQ ID NO: 1560921
guuggaggucccagcgauu

SEQ ID NO: 1634102 - RNA, 19 nt, Artificial Sequence
  Description of Artificial Sequence: Synthetic oligonucleotide
  Antisense strand to SEQ ID NO: 1634101
aaucgcugggaccuccaac

SEQ ID NO: 1634103 - RNA, 19 nt, Artificial Sequence
  Description of Artificial Sequence: Synthetic oligonucleotide
  Sense strand starting at position 1499 of SEQ ID NO: 1560921
ggucccagcgauugagauu

SEQ ID NO: 1634104 - RNA, 19 nt, Artificial Sequence
  Description of Artificial Sequence: Synthetic oligonucleotide
  Antisense strand to SEQ ID NO: 1634103
aaucucaaucgcugggacc

SEQ ID NO: 1634105 - RNA, 19 nt, Artificial Sequence
  Description of Artificial Sequence: Synthetic oligonucleotide
  Sense strand starting at position 1519 of SEQ ID NO: 1560921
caagaagccugagaggaaa

SEQ ID NO: 1634106 - RNA, 19 nt, Artificial Sequence
  Description of Artificial Sequence: Synthetic oligonucleotide
  Antisense strand to SEQ ID NO: 1634105
uuuccucucaggcuucuug

SEQ ID NO: 1634107 - RNA, 19 nt, Artificial Sequence
  Description of Artificial Sequence: Synthetic oligonucleotide
  Sense strand starting at position 1564 of SEQ ID NO: 1560921
aggagagcccgcgauucaa

SEQ ID NO: 1634108 - RNA, 19 nt, Artificial Sequence
  Description of Artificial Sequence: Synthetic oligonucleotide
  Antisense strand to SEQ ID NO: 1634107
uugaaucgcgggcucuccu

SEQ ID NO: 1634109 - RNA, 19 nt, Artificial Sequence
  Description of Artificial Sequence: Synthetic oligonucleotide
  Sense strand starting at position 1633 of SEQ ID NO: 1560921
gauccagugcuccaagaag

SEQ ID NO: 1634110 - RNA, 19 nt, Artificial Sequence
  Description of Artificial Sequence: Synthetic oligonucleotide
  Antisense strand to SEQ ID NO: 1634109
cuucuuggagcacuggauc

SEQ ID NO: 1634111 - RNA, 19 nt, Artificial Sequence
  Description of Artificial Sequence: Synthetic oligonucleotide
  Sense strand starting at position 1724 of SEQ ID NO: 1560921
ccgaguggauuccagagau

SEQ ID NO: 1634112 - RNA, 19 nt, Artificial Sequence
  Description of Artificial Sequence: Synthetic oligonucleotide
  Antisense strand to SEQ ID NO: 1634111
aucucuggaauccacucgg

SEQ ID NO: 1634113 - RNA, 19 nt, Artificial Sequence
  Description of Artificial Sequence: Synthetic oligonucleotide
  Sense strand starting at position 1980 of SEQ ID NO: 1560921
ggaaguguccggagcgaca

SEQ ID NO: 1634114 - RNA, 19 nt, Artificial Sequence
  Description of Artificial Sequence: Synthetic oligonucleotide
  Antisense strand to SEQ ID NO: 1634113
ugucgcuccggacacuucc

SEQ ID NO: 1634115 - RNA, 19 nt, Artificial Sequence
  Description of Artificial Sequence: Synthetic oligonucleotide
  Sense strand starting at position 2193 of SEQ ID NO: 1560921
cagccaagccuggaaaguu

SEQ ID NO: 1634116 - RNA, 19 nt, Artificial Sequence
  Description of Artificial Sequence: Synthetic oligonucleotide
  Antisense strand to SEQ ID NO: 1634115
aacuuuccaggcuuggcug

SEQ ID NO: 1634117 - RNA, 19 nt, Artificial Sequence
  Description of Artificial Sequence: Synthetic oligonucleotide
  Sense strand starting at position 2349 of SEQ ID NO: 1560921
gugggaaaucgguaucagg

SEQ ID NO: 1634118 - RNA, 19 nt, Artificial Sequence
  Description of Artificial Sequence: Synthetic oligonucleotide
  Antisense strand to SEQ ID NO: 1634117
ccugauaccgauuucccac

SEQ ID NO: 1634119 - RNA, 19 nt, Artificial Sequence
  Description of Artificial Sequence: Synthetic oligonucleotide
  Sense strand starting at position 2722 of SEQ ID NO: 1560921
ugucuuucucuccauguga

SEQ ID NO: 1634120 - RNA, 19 nt, Artificial Sequence
  Description of Artificial Sequence: Synthetic oligonucleotide
  Antisense strand to SEQ ID NO: 1634119
ucacauggagagaaagaca

SEQ ID NO: 1634121 - RNA, 19 nt, Artificial Sequence
  Description of Artificial Sequence: Synthetic oligonucleotide
  Sense strand starting at position 2780 of SEQ ID NO: 1560921
aucuguugggacuguaaua

SEQ ID NO: 1634122 - RNA, 19 nt, Artificial Sequence
  Description of Artificial Sequence: Synthetic oligonucleotide
  Antisense strand to SEQ ID NO: 1634121
uauuacagucccaacagau

SEQ ID NO: 1634123 - RNA, 19 nt, Artificial Sequence
  Description of Artificial Sequence: Synthetic oligonucleotide
  Sense strand starting at position 2838 of SEQ ID NO: 1560921
guauacuggugccuggaaa

SEQ ID NO: 1634124 - RNA, 19 nt, Artificial Sequence
  Description of Artificial Sequence: Synthetic oligonucleotide
  Antisense strand to SEQ ID NO: 1634123
uuuccaggcaccaguauac

SEQ ID NO: 1634125 - RNA, 19 nt, Artificial Sequence
  Description of Artificial Sequence: Synthetic oligonucleotide
  Sense strand starting at position 2872 of SEQ ID NO: 1560921
agaggugguugucucugau

SEQ ID NO: 1634126 - RNA, 19 nt, Artificial Sequence
  Description of Artificial Sequence: Synthetic oligonucleotide
  Antisense strand to SEQ ID NO: 1634125
aucagagacaaccaccucu

SEQ ID NO: 1634127 - RNA, 19 nt, Artificial Sequence
  Description of Artificial Sequence: Synthetic oligonucleotide
  Sense strand starting at position 2876 of SEQ ID NO: 1560921
gugguugucucugauaaua

SEQ ID NO: 1634128 - RNA, 19 nt, Artificial Sequence
  Description of Artificial Sequence: Synthetic oligonucleotide
  Antisense strand to SEQ ID NO: 1634127
uauuaucagagacaaccac

SEQ ID NO: 1634129 - RNA, 19 nt, Artificial Sequence
  Description of Artificial Sequence: Synthetic oligonucleotide
  Sense strand starting at position 2878 of SEQ ID NO: 1560921
gguugucucugauaauacg

SEQ ID NO: 1634130 - RNA, 19 nt, Artificial Sequence
  Description of Artificial Sequence: Synthetic oligonucleotide
  Antisense strand to SEQ ID NO: 1634129
cguauuaucagagacaacc

SEQ ID NO: 1634131 - RNA, 19 nt, Artificial Sequence
  Description of Artificial Sequence: Synthetic oligonucleotide
  Sense strand starting at position 2884 of SEQ ID NO: 1560921
cucugauaauacgcggaaa

SEQ ID NO: 1634132 - RNA, 19 nt, Artificial Sequence
  Description of Artificial Sequence: Synthetic oligonucleotide
  Antisense strand to SEQ ID NO: 1634131
uuuccgcguauuaucagag

SEQ ID NO: 1634133 - RNA, 19 nt, Artificial Sequence
  Description of Artificial Sequence: Synthetic oligonucleotide
  Sense strand starting at position 2960 of SEQ ID NO: 1560921
cagcaaguaucugugagga

SEQ ID NO: 1634134 - RNA, 19 nt, Artificial Sequence
  Description of Artificial Sequence: Synthetic oligonucleotide
  Antisense strand to SEQ ID NO: 1634133
uccucacagauacuugcug

SEQ ID NO: 1634135 - RNA, 19 nt, Artificial Sequence
  Description of Artificial Sequence: Synthetic oligonucleotide
  Sense strand starting at position 2964 of SEQ ID NO: 1560921
aaguaucugugaggaccua

SEQ ID NO: 1634136 - RNA, 19 nt, Artificial Sequence
  Description of Artificial Sequence: Synthetic oligonucleotide
  Antisense strand to SEQ ID NO: 1634135
uagguccucacagauacuu

SEQ ID NO: 1634137 - RNA, 19 nt, Artificial Sequence
  Description of Artificial Sequence: Synthetic oligonucleotide
  Sense strand starting at position 3061 of SEQ ID NO: 1560921
ucaaauaguggcuaccauu

SEQ ID NO: 1634138 - RNA, 19 nt, Artificial Sequence
  Description of Artificial Sequence: Synthetic oligonucleotide
  Antisense strand to SEQ ID NO: 1634137
aaugguagccacuauuuga

SEQ ID NO: 1634139 - RNA, 19 nt, Artificial Sequence
  Description of Artificial Sequence: Synthetic oligonucleotide
  Sense strand starting at position 3117 of SEQ ID NO: 1560921
aaacgucuugcccaagauc

SEQ ID NO: 1634140 - RNA, 19 nt, Artificial Sequence
  Description of Artificial Sequence: Synthetic oligonucleotide
  Antisense strand to SEQ ID NO: 1634139
gaucuugggcaagacguuu

SEQ ID NO: 1634141 - RNA, 19 nt, Artificial Sequence
  Description of Artificial Sequence: Synthetic oligonucleotide
  Sense strand starting at position 3140 of SEQ ID NO: 1560921
agugaaguugcuugaggga

SEQ ID NO: 1634142 - RNA, 19 nt, Artificial Sequence
  Description of Artificial Sequence: Synthetic oligonucleotide
  Antisense strand to SEQ ID NO: 1634141
ucccucaagcaacuucacu

SEQ ID NO: 1634143 - RNA, 19 nt, Artificial Sequence
  Description of Artificial Sequence: Synthetic oligonucleotide
  Sense strand starting at position 3174 of SEQ ID NO: 1560921
cccuuugauugacaaguca

SEQ ID NO: 1634144 - RNA, 19 nt, Artificial Sequence
  Description of Artificial Sequence: Synthetic oligonucleotide
  Antisense strand to SEQ ID NO: 1634143
ugacuugucaaucaaaggg

SEQ ID NO: 1634145 - RNA, 19 nt, Artificial Sequence
  Description of Artificial Sequence: Synthetic oligonucleotide
  Sense strand starting at position 3326 of SEQ ID NO: 1560921
agcugaggucgguacagua

SEQ ID NO: 1634146 - RNA, 19 nt, Artificial Sequence
  Description of Artificial Sequence: Synthetic oligonucleotide
  Antisense strand to SEQ ID NO: 1634145
uacuguaccgaccucagcu

SEQ ID NO: 1634147 - RNA, 19 nt, Artificial Sequence
  Description of Artificial Sequence: Synthetic oligonucleotide
  Sense strand starting at position 3388 of SEQ ID NO: 1560921
gucugaggcuggagugaaa

SEQ ID NO: 1634148 - RNA, 19 nt, Artificial Sequence
  Description of Artificial Sequence: Synthetic oligonucleotide
  Antisense strand to SEQ ID NO: 1634147
uuucacuccagccucagac

SEQ ID NO: 1634149 - RNA, 19 nt, Artificial Sequence
  Description of Artificial Sequence: Synthetic oligonucleotide
  Sense strand starting at position 3542 of SEQ ID NO: 1560921
agaugacugucccagcaaa

SEQ ID NO: 1634150 - RNA, 19 nt, Artificial Sequence
  Description of Artificial Sequence: Synthetic oligonucleotide
  Antisense strand to SEQ ID NO: 1634149
uuugcugggacagucaucu

SEQ ID NO: 1634151 - RNA, 19 nt, Artificial Sequence
  Description of Artificial Sequence: Synthetic oligonucleotide
  Sense strand starting at position 3668 of SEQ ID NO: 1560921
gcauuagugcccuguggca

SEQ ID NO: 1634152 - RNA, 19 nt, Artificial Sequence
  Description of Artificial Sequence: Synthetic oligonucleotide
  Antisense strand to SEQ ID NO: 1634151
ugccacagggcacuaaugc

SEQ ID NO: 1634153 - RNA, 19 nt, Artificial Sequence
  Description of Artificial Sequence: Synthetic oligonucleotide
  Sense strand starting at position 3817 of SEQ ID NO: 1560921
agugaaaugccauguaaag

SEQ ID NO: 1634154 - RNA, 19 nt, Artificial Sequence
  Description of Artificial Sequence: Synthetic oligonucleotide
  Antisense strand to SEQ ID NO: 1634153
cuuuacauggcauuucacu

SEQ ID NO: 1634155 - RNA, 19 nt, Artificial Sequence
  Description of Artificial Sequence: Synthetic oligonucleotide
  Sense strand starting at position 309 of SEQ ID NO: 1560922
gccagcuuaugauaugaaa

SEQ ID NO: 1634156 - RNA, 19 nt, Artificial Sequence
  Description of Artificial Sequence: Synthetic oligonucleotide
  Antisense strand to SEQ ID NO: 1634155
uuucauaucauaagcuggc

SEQ ID NO: 1634157 - RNA, 19 nt, Artificial Sequence
  Description of Artificial Sequence: Synthetic oligonucleotide
  Sense strand starting at position 330 of SEQ ID NO: 1560922
guacuuaaagccugaacaa

SEQ ID NO: 1634158 - RNA, 19 nt, Artificial Sequence
  Description of Artificial Sequence: Synthetic oligonucleotide
  Antisense strand to SEQ ID NO: 1634157
uuguucaggcuuuaaguac

SEQ ID NO: 1634159 - RNA, 19 nt, Artificial Sequence
  Description of Artificial Sequence: Synthetic oligonucleotide
  Sense strand starting at position 349 of SEQ ID NO: 1560922
ggucacuaaagguguaaau

SEQ ID NO: 1634160 - RNA, 19 nt, Artificial Sequence
  Description of Artificial Sequence: Synthetic oligonucleotide
  Antisense strand to SEQ ID NO: 1634159
auuuacaccuuuagugacc

SEQ ID NO: 1634161 - RNA, 19 nt, Artificial Sequence
  Description of Artificial Sequence: Synthetic oligonucleotide
  Sense strand starting at position 359 of SEQ ID NO: 1560922
gguguaaauccagacuucu

SEQ ID NO: 1634162 - RNA, 19 nt, Artificial Sequence
  Description of Artificial Sequence: Synthetic oligonucleotide
  Antisense strand to SEQ ID NO: 1634161
agaagucuggauuuacacc

SEQ ID NO: 1634163 - RNA, 19 nt, Artificial Sequence
  Description of Artificial Sequence: Synthetic oligonucleotide
  Sense strand starting at position 531 of SEQ ID NO: 1560922
uggaauagugaguggauga

SEQ ID NO: 1634164 - RNA, 19 nt, Artificial Sequence
  Description of Artificial Sequence: Synthetic oligonucleotide
  Antisense strand to SEQ ID NO: 1634163
ucauccacucacuauucca

SEQ ID NO: 1634165 - RNA, 19 nt, Artificial Sequence
  Description of Artificial Sequence: Synthetic oligonucleotide
  Sense strand starting at position 553 of SEQ ID NO: 1560922
ggcuucuggcugugucuua

SEQ ID NO: 1634166 - RNA, 19 nt, Artificial Sequence
  Description of Artificial Sequence: Synthetic oligonucleotide
  Antisense strand to SEQ ID NO: 1634165
uaagacacagccagaagcc

SEQ ID NO: 1634167 - RNA, 19 nt, Artificial Sequence
  Description of Artificial Sequence: Synthetic oligonucleotide
  Sense strand starting at position 595 of SEQ ID NO: 1560922
aaauacugaugugcagauu

SEQ ID NO: 1634168 - RNA, 19 nt, Artificial Sequence
  Description of Artificial Sequence: Synthetic oligonucleotide
  Antisense strand to SEQ ID NO: 1634167
aaucugcacaucaguauuu

SEQ ID NO: 1634169 - RNA, 19 nt, Artificial Sequence
  Description of Artificial Sequence: Synthetic oligonucleotide
  Sense strand starting at position 614 of SEQ ID NO: 1560922
ccaucucacuuugcagaga

SEQ ID NO: 1634170 - RNA, 19 nt, Artificial Sequence
  Description of Artificial Sequence: Synthetic oligonucleotide
  Antisense strand to SEQ ID NO: 1634169
ucucugcaaagugagaugg

SEQ ID NO: 1634171 - RNA, 19 nt, Artificial Sequence
  Description of Artificial Sequence: Synthetic oligonucleotide
  Sense strand starting at position 1189 of SEQ ID NO: 1560922
gcgugucacuagcauccua

SEQ ID NO: 1634172 - RNA, 19 nt, Artificial Sequence
  Description of Artificial Sequence: Synthetic oligonucleotide
  Antisense strand to SEQ ID NO: 1634171
uaggaugcuagugacacgc

SEQ ID NO: 1634173 - RNA, 19 nt, Artificial Sequence
  Description of Artificial Sequence: Synthetic oligonucleotide
  Sense strand starting at position 1215 of SEQ ID NO: 1560922
aaugaaaguuuagaccagu

SEQ ID NO: 1634174 - RNA, 19 nt, Artificial Sequence
  Description of Artificial Sequence: Synthetic oligonucleotide
  Antisense strand to SEQ ID NO: 1634173
acuggucuaaacuuucauu

SEQ ID NO: 1634175 - RNA, 19 nt, Artificial Sequence
  Description of Artificial Sequence: Synthetic oligonucleotide
  Sense strand starting at position 1447 of SEQ ID NO: 1560922
ggccucuccugacuucuaa

SEQ ID NO: 1634176 - RNA, 19 nt, Artificial Sequence
  Description of Artificial Sequence: Synthetic oligonucleotide
  Antisense strand to SEQ ID NO: 1634175
uuagaagucaggagaggcc

SEQ ID NO: 1634177 - RNA, 19 nt, Artificial Sequence
  Description of Artificial Sequence: Synthetic oligonucleotide
  Sense strand starting at position 1573 of SEQ ID NO: 1560922
ccuggaugucuccggacga

SEQ ID NO: 1634178 - RNA, 19 nt, Artificial Sequence
  Description of Artificial Sequence: Synthetic oligonucleotide
  Antisense strand to SEQ ID NO: 1634177
ucguccggagacauccagg

SEQ ID NO: 1634179 - RNA, 19 nt, Artificial Sequence
  Description of Artificial Sequence: Synthetic oligonucleotide
  Sense strand starting at position 1639 of SEQ ID NO: 1560922
gcaggaucuugucguaaag

SEQ ID NO: 1634180 - RNA, 19 nt, Artificial Sequence
  Description of Artificial Sequence: Synthetic oligonucleotide
  Antisense strand to SEQ ID NO: 1634179
cuuuacgacaagauccugc

SEQ ID NO: 1634181 - RNA, 19 nt, Artificial Sequence
  Description of Artificial Sequence: Synthetic oligonucleotide
  Sense strand starting at position 2060 of SEQ ID NO: 1560922
ccuggaucugucuauuguu

SEQ ID NO: 1634182 - RNA, 19 nt, Artificial Sequence
  Description of Artificial Sequence: Synthetic oligonucleotide
  Antisense strand to SEQ ID NO: 1634181
aacaauagacagauccagg

SEQ ID NO: 1634183 - RNA, 19 nt, Artificial Sequence
  Description of Artificial Sequence: Synthetic oligonucleotide
  Sense strand starting at position 2068 of SEQ ID NO: 1560922
ugucuauuguugucccagu

SEQ ID NO: 1634184 - RNA, 19 nt, Artificial Sequence
  Description of Artificial Sequence: Synthetic oligonucleotide
  Antisense strand to SEQ ID NO: 1634183
acugggacaacaauagaca

SEQ ID NO: 1634185 - RNA, 19 nt, Artificial Sequence
  Description of Artificial Sequence: Synthetic oligonucleotide
  Sense strand starting at position 2069 of SEQ ID NO: 1560922
gucuauuguugucccaguu

SEQ ID NO: 1634186 - RNA, 19 nt, Artificial Sequence
  Description of Artificial Sequence: Synthetic oligonucleotide
  Antisense strand to SEQ ID NO: 1634185
aacugggacaacaauagac

SEQ ID NO: 1634187 - RNA, 19 nt, Artificial Sequence
  Description of Artificial Sequence: Synthetic oligonucleotide
  Sense strand starting at position 2406 of SEQ ID NO: 1560922
ggacuugagcacuggacaa

SEQ ID NO: 1634188 - RNA, 19 nt, Artificial Sequence
  Description of Artificial Sequence: Synthetic oligonucleotide
  Antisense strand to SEQ ID NO: 1634187
uuguccagugcucaagucc

SEQ ID NO: 1634189 - RNA, 19 nt, Artificial Sequence
  Description of Artificial Sequence: Synthetic oligonucleotide
  Sense strand starting at position 2548 of SEQ ID NO: 1560922
aucaguucucacugcuaag

SEQ ID NO: 1634190 - RNA, 19 nt, Artificial Sequence
  Description of Artificial Sequence: Synthetic oligonucleotide
  Antisense strand to SEQ ID NO: 1634189
cuuagcagugagaacugau

SEQ ID NO: 1634191 - RNA, 19 nt, Artificial Sequence
  Description of Artificial Sequence: Synthetic oligonucleotide
  Sense strand starting at position 2551 of SEQ ID NO: 1560922
aguucucacugcuaagaga

SEQ ID NO: 1634192 - RNA, 19 nt, Artificial Sequence
  Description of Artificial Sequence: Synthetic oligonucleotide
  Antisense strand to SEQ ID NO: 1634191
ucucuuagcagugagaacu

SEQ ID NO: 1634193 - RNA, 19 nt, Artificial Sequence
  Description of Artificial Sequence: Synthetic oligonucleotide
  Sense strand starting at position 2675 of SEQ ID NO: 1560922
acguuucucugaugcccaa

SEQ ID NO: 1634194 - RNA, 19 nt, Artificial Sequence
  Description of Artificial Sequence: Synthetic oligonucleotide
  Antisense strand to SEQ ID NO: 1634193
uugggcaucagagaaacgu

SEQ ID NO: 1634195 - RNA, 19 nt, Artificial Sequence
  Description of Artificial Sequence: Synthetic oligonucleotide
  Sense strand starting at position 2779 of SEQ ID NO: 1560922
cuagauuccuaccugguau

SEQ ID NO: 1634196 - RNA, 19 nt, Artificial Sequence
  Description of Artificial Sequence: Synthetic oligonucleotide
  Antisense strand to SEQ ID NO: 1634195
auaccagguaggaaucuag

SEQ ID NO: 1634197 - RNA, 19 nt, Artificial Sequence
  Description of Artificial Sequence: Synthetic oligonucleotide
  Sense strand starting at position 2781 of SEQ ID NO: 1560922
agauuccuaccugguauca

SEQ ID NO: 1634198 - RNA, 19 nt, Artificial Sequence
  Description of Artificial Sequence: Synthetic oligonucleotide
  Antisense strand to SEQ ID NO: 1634197
ugauaccagguaggaaucu

SEQ ID NO: 1634199 - RNA, 19 nt, Artificial Sequence
  Description of Artificial Sequence: Synthetic oligonucleotide
  Sense strand starting at position 2786 of SEQ ID NO: 1560922
ccuaccugguaucacuaua

SEQ ID NO: 1634200 - RNA, 19 nt, Artificial Sequence
  Description of Artificial Sequence: Synthetic oligonucleotide
  Antisense strand to SEQ ID NO: 1634199
uauagugauaccagguagg

SEQ ID NO: 1634201 - RNA, 19 nt, Artificial Sequence
  Description of Artificial Sequence: Synthetic oligonucleotide
  Sense strand starting at position 2825 of SEQ ID NO: 1560922
cuaaauaagcgguaaucua

SEQ ID NO: 1634202 - RNA, 19 nt, Artificial Sequence
  Description of Artificial Sequence: Synthetic oligonucleotide
  Antisense strand to SEQ ID NO: 1634201
uagauuaccgcuuauuuag

SEQ ID NO: 1634203 - RNA, 19 nt, Artificial Sequence
  Description of Artificial Sequence: Synthetic oligonucleotide
  Sense strand starting at position 2848 of SEQ ID NO: 1560922
uuuaauauucuaggagucu

SEQ ID NO: 1634204 - RNA, 19 nt, Artificial Sequence
  Description of Artificial Sequence: Synthetic oligonucleotide
  Antisense strand to SEQ ID NO: 1634203
agacuccuagaauauuaaa

SEQ ID NO: 1634205 - RNA, 19 nt, Artificial Sequence
  Description of Artificial Sequence: Synthetic oligonucleotide
  Sense strand starting at position 2849 of SEQ ID NO: 1560922
uuaauauucuaggagucug

SEQ ID NO: 1634206 - RNA, 19 nt, Artificial Sequence
  Description of Artificial Sequence: Synthetic oligonucleotide
  Antisense strand to SEQ ID NO: 1634205
cagacuccuagaauauuaa

SEQ ID NO: 1634207 - RNA, 19 nt, Artificial Sequence
  Description of Artificial Sequence: Synthetic oligonucleotide
  Sense strand starting at position 2854 of SEQ ID NO: 1560922
auucuaggagucugacaag

SEQ ID NO: 1634208 - RNA, 19 nt, Artificial Sequence
  Description of Artificial Sequence: Synthetic oligonucleotide
  Antisense strand to SEQ ID NO: 1634207
cuugucagacuccuagaau

SEQ ID NO: 1634209 - RNA, 19 nt, Artificial Sequence
  Description of Artificial Sequence: Synthetic oligonucleotide
  Sense strand starting at position 2857 of SEQ ID NO: 1560922
cuaggagucugacaagcua

SEQ ID NO: 1634210 - RNA, 19 nt, Artificial Sequence
  Description of Artificial Sequence: Synthetic oligonucleotide
  Antisense strand to SEQ ID NO: 1634209
uagcuugucagacuccuag

SEQ ID NO: 1634211 - RNA, 19 nt, Artificial Sequence
  Description of Artificial Sequence: Synthetic oligonucleotide
  Sense strand starting at position 2873 of SEQ ID NO: 1560922
cuaggacugugcucuuuga

SEQ ID NO: 1634212 - RNA, 19 nt, Artificial Sequence
  Description of Artificial Sequence: Synthetic oligonucleotide
  Antisense strand to SEQ ID NO: 1634211
ucaaagagcacaguccuag

SEQ ID NO: 1634213 - RNA, 19 nt, Artificial Sequence
  Description of Artificial Sequence: Synthetic oligonucleotide
  Sense strand starting at position 2877 of SEQ ID NO: 1560922
gacugugcucuuugaauuc

SEQ ID NO: 1634214 - RNA, 19 nt, Artificial Sequence
  Description of Artificial Sequence: Synthetic oligonucleotide
  Antisense strand to SEQ ID NO: 1634213
gaauucaaagagcacaguc

SEQ ID NO: 1634215 - RNA, 19 nt, Artificial Sequence
  Description of Artificial Sequence: Synthetic oligonucleotide
  Sense strand starting at position 2971 of SEQ ID NO: 1560922
ggaaucuaauauuccagca

SEQ ID NO: 1634216 - RNA, 19 nt, Artificial Sequence
  Description of Artificial Sequence: Synthetic oligonucleotide
  Antisense strand to SEQ ID NO: 1634215
ugcuggaauauuagauucc

SEQ ID NO: 1634217 - RNA, 19 nt, Artificial Sequence
  Description of Artificial Sequence: Synthetic oligonucleotide
  Sense strand starting at position 3158 of SEQ ID NO: 1560922
acgguuuagacguggaguu

SEQ ID NO: 1634218 - RNA, 19 nt, Artificial Sequence
  Description of Artificial Sequence: Synthetic oligonucleotide
  Antisense strand to SEQ ID NO: 1634217
aacuccacgucuaaaccgu

SEQ ID NO: 1634219 - RNA, 19 nt, Artificial Sequence
  Description of Artificial Sequence: Synthetic oligonucleotide
  Sense strand starting at position 3181 of SEQ ID NO: 1560922
cugguuuccucuugccaua

SEQ ID NO: 1634220 - RNA, 19 nt, Artificial Sequence
  Description of Artificial Sequence: Synthetic oligonucleotide
  Antisense strand to SEQ ID NO: 1634219
uauggcaagaggaaaccag

SEQ ID NO: 1634221 - RNA, 19 nt, Artificial Sequence
  Description of Artificial Sequence: Synthetic oligonucleotide
  Sense strand starting at position 3398 of SEQ ID NO: 1560922
cacacaugucaccggauca

SEQ ID NO: 1634222 - RNA, 19 nt, Artificial Sequence
  Description of Artificial Sequence: Synthetic oligonucleotide
  Antisense strand to SEQ ID NO: 1634221
ugauccggugacaugugug

SEQ ID NO: 1634223 - RNA, 19 nt, Artificial Sequence
  Description of Artificial Sequence: Synthetic oligonucleotide
  Sense strand starting at position 3894 of SEQ ID NO: 1560922
gcccgaucuggaugugaaa

SEQ ID NO: 1634224 - RNA, 19 nt, Artificial Sequence
  Description of Artificial Sequence: Synthetic oligonucleotide
  Antisense strand to SEQ ID NO: 1634223
uuucacauccagaucgggc

SEQ ID NO: 1634225 - RNA, 19 nt, Artificial Sequence
  Description of Artificial Sequence: Synthetic oligonucleotide
  Sense strand starting at position 352 of SEQ ID NO: 1560923
ggccaccucugggaaaguu

SEQ ID NO: 1634226 - RNA, 19 nt, Artificial Sequence
  Description of Artificial Sequence: Synthetic oligonucleotide
  Antisense strand to SEQ ID NO: 1634225
aacuuucccagagguggcc

SEQ ID NO: 1634227 - RNA, 19 nt, Artificial Sequence
  Description of Artificial Sequence: Synthetic oligonucleotide
  Sense strand starting at position 417 of SEQ ID NO: 1560923
gugggaagucauuacagug

SEQ ID NO: 1634228 - RNA, 19 nt, Artificial Sequence
  Description of Artificial Sequence: Synthetic oligonucleotide
  Antisense strand to SEQ ID NO: 1634227
cacuguaaugacuucccac

SEQ ID NO: 1634229 - RNA, 19 nt, Artificial Sequence
  Description of Artificial Sequence: Synthetic oligonucleotide
  Sense strand starting at position 482 of SEQ ID NO: 1560923
cagccaaugccauagguaa

SEQ ID NO: 1634230 - RNA, 19 nt, Artificial Sequence
  Description of Artificial Sequence: Synthetic oligonucleotide
  Antisense strand to SEQ ID NO: 1634229
uuaccuauggcauuggcug

SEQ ID NO: 1634231 - RNA, 19 nt, Artificial Sequence
  Description of Artificial Sequence: Synthetic oligonucleotide
  Sense strand starting at position 529 of SEQ ID NO: 1560923
uuacaucucuuccagaugu

SEQ ID NO: 1634232 - RNA, 19 nt, Artificial Sequence
  Description of Artificial Sequence: Synthetic oligonucleotide
  Antisense strand to SEQ ID NO: 1634231
acaucuggaagagauguaa

SEQ ID NO: 1634233 - RNA, 19 nt, Artificial Sequence
  Description of Artificial Sequence: Synthetic oligonucleotide
  Sense strand starting at position 531 of SEQ ID NO: 1560923
acaucucuuccagauguga

SEQ ID NO: 1634234 - RNA, 19 nt, Artificial Sequence
  Description of Artificial Sequence: Synthetic oligonucleotide
  Antisense strand to SEQ ID NO: 1634233
ucacaucuggaagagaugu

SEQ ID NO: 1634235 - RNA, 19 nt, Artificial Sequence
  Description of Artificial Sequence: Synthetic oligonucleotide
  Sense strand starting at position 640 of SEQ ID NO: 1560923
ggaugccuauaagaagaaa

SEQ ID NO: 1634236 - RNA, 19 nt, Artificial Sequence
  Description of Artificial Sequence: Synthetic oligonucleotide
  Antisense strand to SEQ ID NO: 1634235
uuucuucuuauaggcaucc

SEQ ID NO: 1634237 - RNA, 19 nt, Artificial Sequence
  Description of Artificial Sequence: Synthetic oligonucleotide
  Sense strand starting at position 680 of SEQ ID NO: 1560923
ucgggccuauuucucaaua

SEQ ID NO: 1634238 - RNA, 19 nt, Artificial Sequence
  Description of Artificial Sequence: Synthetic oligonucleotide
  Antisense strand to SEQ ID NO: 1634237
uauugagaaauaggcccga

SEQ ID NO: 1634239 - RNA, 19 nt, Artificial Sequence
  Description of Artificial Sequence: Synthetic oligonucleotide
  Sense strand starting at position 918 of SEQ ID NO: 1560923
ggguaaagcucucagccua

SEQ ID NO: 1634240 - RNA, 19 nt, Artificial Sequence
  Description of Artificial Sequence: Synthetic oligonucleotide
  Antisense strand to SEQ ID NO: 1634239
uaggcugagagcuuuaccc

SEQ ID NO: 1634241 - RNA, 19 nt, Artificial Sequence
  Description of Artificial Sequence: Synthetic oligonucleotide
  Sense strand starting at position 1077 of SEQ ID NO: 1560923
gugcacggcgccuauuaau

SEQ ID NO: 1634242 - RNA, 19 nt, Artificial Sequence
  Description of Artificial Sequence: Synthetic oligonucleotide
  Antisense strand to SEQ ID NO: 1634241
auuaauaggcgccgugcac

SEQ ID NO: 1634243 - RNA, 19 nt, Artificial Sequence
  Description of Artificial Sequence: Synthetic oligonucleotide
  Sense strand starting at position 1083 of SEQ ID NO: 1560923
ggcgccuauuaaugggaaa

SEQ ID NO: 1634244 - RNA, 19 nt, Artificial Sequence
  Description of Artificial Sequence: Synthetic oligonucleotide
  Antisense strand to SEQ ID NO: 1634243
uuucccauuaauaggcgcc

SEQ ID NO: 1634245 - RNA, 19 nt, Artificial Sequence
  Description of Artificial Sequence: Synthetic oligonucleotide
  Sense strand starting at position 2005 of SEQ ID NO: 1560923
ggcggcccgucugagaaua

SEQ ID NO: 1634246 - RNA, 19 nt, Artificial Sequence
  Description of Artificial Sequence: Synthetic oligonucleotide
  Antisense strand to SEQ ID NO: 1634245
uauucucagacgggccgcc

SEQ ID NO: 1634247 - RNA, 19 nt, Artificial Sequence
  Description of Artificial Sequence: Synthetic oligonucleotide
  Sense strand starting at position 2017 of SEQ ID NO: 1560923
gagaauaccgucuaguaau

SEQ ID NO: 1634248 - RNA, 19 nt, Artificial Sequence
  Description of Artificial Sequence: Synthetic oligonucleotide
  Antisense strand to SEQ ID NO: 1634247
auuacuagacgguauucuc

SEQ ID NO: 1634249 - RNA, 19 nt, Artificial Sequence
  Description of Artificial Sequence: Synthetic oligonucleotide
  Sense strand starting at position 2025 of SEQ ID NO: 1560923
cgucuaguaauuggcuaga

SEQ ID NO: 1634250 - RNA, 19 nt, Artificial Sequence
  Description of Artificial Sequence: Synthetic oligonucleotide
  Antisense strand to SEQ ID NO: 1634249
ucuagccaauuacuagacg

SEQ ID NO: 1634251 - RNA, 19 nt, Artificial Sequence
  Description of Artificial Sequence: Synthetic oligonucleotide
  Sense strand starting at position 2027 of SEQ ID NO: 1560923
ucuaguaauuggcuagaga

SEQ ID NO: 1634252 - RNA, 19 nt, Artificial Sequence
  Description of Artificial Sequence: Synthetic oligonucleotide
  Antisense strand to SEQ ID NO: 1634251
ucucuagccaauuacuaga

SEQ ID NO: 1634253 - RNA, 19 nt, Artificial Sequence
  Description of Artificial Sequence: Synthetic oligonucleotide
  Sense strand starting at position 2279 of SEQ ID NO: 1560923
ccuccuaaucgcugccauu

SEQ ID NO: 1634254 - RNA, 19 nt, Artificial Sequence
  Description of Artificial Sequence: Synthetic oligonucleotide
  Antisense strand to SEQ ID NO: 1634253
aauggcagcgauuaggagg

SEQ ID NO: 1634255 - RNA, 19 nt, Artificial Sequence
  Description of Artificial Sequence: Synthetic oligonucleotide
  Sense strand starting at position 2292 of SEQ ID NO: 1560923
gccauugguuuauccggaa

SEQ ID NO: 1634256 - RNA, 19 nt, Artificial Sequence
  Description of Artificial Sequence: Synthetic oligonucleotide
  Antisense strand to SEQ ID NO: 1634255
uuccggauaaaccaauggc

SEQ ID NO: 1634257 - RNA, 19 nt, Artificial Sequence
  Description of Artificial Sequence: Synthetic oligonucleotide
  Sense strand starting at position 2296 of SEQ ID NO: 1560923
uugguuuauccggaagcga

SEQ ID NO: 1634258 - RNA, 19 nt, Artificial Sequence
  Description of Artificial Sequence: Synthetic oligonucleotide
  Antisense strand to SEQ ID NO: 1634257
ucgcuuccggauaaaccaa

SEQ ID NO: 1634259 - RNA, 19 nt, Artificial Sequence
  Description of Artificial Sequence: Synthetic oligonucleotide
  Sense strand starting at position 2490 of SEQ ID NO: 1560923
aagggagcuugugcucauu

SEQ ID NO: 1634260 - RNA, 19 nt, Artificial Sequence
  Description of Artificial Sequence: Synthetic oligonucleotide
  Antisense strand to SEQ ID NO: 1634259
aaugagcacaagcucccuu

SEQ ID NO: 1634261 - RNA, 19 nt, Artificial Sequence
  Description of Artificial Sequence: Synthetic oligonucleotide
  Sense strand starting at position 2585 of SEQ ID NO: 1560923
auaggaguccgucgucaac

SEQ ID NO: 1634262 - RNA, 19 nt, Artificial Sequence
  Description of Artificial Sequence: Synthetic oligonucleotide
  Antisense strand to SEQ ID NO: 1634261
guugacgacggacuccuau

SEQ ID NO: 1634263 - RNA, 19 nt, Artificial Sequence
  Description of Artificial Sequence: Synthetic oligonucleotide
  Sense strand starting at position 2591 of SEQ ID NO: 1560923
guccgucgucaacacauua

SEQ ID NO: 1634264 - RNA, 19 nt, Artificial Sequence
  Description of Artificial Sequence: Synthetic oligonucleotide
  Antisense strand to SEQ ID NO: 1634263
uaauguguugacgacggac

SEQ ID NO: 1634265 - RNA, 19 nt, Artificial Sequence
  Description of Artificial Sequence: Synthetic oligonucleotide
  Sense strand starting at position 2737 of SEQ ID NO: 1560923
aaacgugaaucagagcaca

SEQ ID NO: 1634266 - RNA, 19 nt, Artificial Sequence
  Description of Artificial Sequence: Synthetic oligonucleotide
  Antisense strand to SEQ ID NO: 1634265
ugugcucugauucacguuu

SEQ ID NO: 1634267 - RNA, 19 nt, Artificial Sequence
  Description of Artificial Sequence: Synthetic oligonucleotide
  Sense strand starting at position 2774 of SEQ ID NO: 1560923
ccgggaagcuuuccuugau

SEQ ID NO: 1634268 - RNA, 19 nt, Artificial Sequence
  Description of Artificial Sequence: Synthetic oligonucleotide
  Antisense strand to SEQ ID NO: 1634267
aucaaggaaagcuucccgg

SEQ ID NO: 1634269 - RNA, 19 nt, Artificial Sequence
  Description of Artificial Sequence: Synthetic oligonucleotide
  Sense strand starting at position 2775 of SEQ ID NO: 1560923
cgggaagcuuuccuugauu

SEQ ID NO: 1634270 - RNA, 19 nt, Artificial Sequence
  Description of Artificial Sequence: Synthetic oligonucleotide
  Antisense strand to SEQ ID NO: 1634269
aaucaaggaaagcuucccg

SEQ ID NO: 1634271 - RNA, 19 nt, Artificial Sequence
  Description of Artificial Sequence: Synthetic oligonucleotide
  Sense strand starting at position 2907 of SEQ ID NO: 1560923
ccggaaugagcucgcucuu

SEQ ID NO: 1634272 - RNA, 19 nt, Artificial Sequence
  Description of Artificial Sequence: Synthetic oligonucleotide
  Antisense strand to SEQ ID NO: 1634271
aagagcgagcucauuccgg

SEQ ID NO: 1634273 - RNA, 19 nt, Artificial Sequence
  Description of Artificial Sequence: Synthetic oligonucleotide
  Sense strand starting at position 2970 of SEQ ID NO: 1560923
uggcaaacgccugagacuu

SEQ ID NO: 1634274 - RNA, 19 nt, Artificial Sequence
  Description of Artificial Sequence: Synthetic oligonucleotide
  Antisense strand to SEQ ID NO: 1634273
aagucucaggcguuugcca

SEQ ID NO: 1634275 - RNA, 19 nt, Artificial Sequence
  Description of Artificial Sequence: Synthetic oligonucleotide
  Sense strand starting at position 3015 of SEQ ID NO: 1560923
auggcucacggguguaauu

SEQ ID NO: 1634276 - RNA, 19 nt, Artificial Sequence
  Description of Artificial Sequence: Synthetic oligonucleotide
  Antisense strand to SEQ ID NO: 1634275
aauuacacccgugagccau

SEQ ID NO: 1634277 - RNA, 19 nt, Artificial Sequence
  Description of Artificial Sequence: Synthetic oligonucleotide
  Sense strand starting at position 3830 of SEQ ID NO: 1560923
ugcagugagccaggaugaa

SEQ ID NO: 1634278 - RNA, 19 nt, Artificial Sequence
  Description of Artificial Sequence: Synthetic oligonucleotide
  Antisense strand to SEQ ID NO: 1634277
uucauccuggcucacugca

SEQ ID NO: 1634279 - RNA, 19 nt, Artificial Sequence
  Description of Artificial Sequence: Synthetic oligonucleotide
  Sense strand starting at position 3877 of SEQ ID NO: 1560923
ccgagacucuaacuuuaaa

SEQ ID NO: 1634280 - RNA, 19 nt, Artificial Sequence
  Description of Artificial Sequence: Synthetic oligonucleotide
  Antisense strand to SEQ ID NO: 1634279
uuuaaaguuagagucucgg

SEQ ID NO: 1634281 - RNA, 19 nt, Artificial Sequence
  Description of Artificial Sequence: Synthetic oligonucleotide
  Sense strand starting at position 3943 of SEQ ID NO: 1560923
ggacauuuguuuccagugu

SEQ ID NO: 1634282 - RNA, 19 nt, Artificial Sequence
  Description of Artificial Sequence: Synthetic oligonucleotide
  Antisense strand to SEQ ID NO: 1634281
acacuggaaacaaaugucc

SEQ ID NO: 1634283 - RNA, 19 nt, Artificial Sequence
  Description of Artificial Sequence: Synthetic oligonucleotide
  Sense strand starting at position 3944 of SEQ ID NO: 1560923
gacauuuguuuccaguguu

SEQ ID NO: 1634284 - RNA, 19 nt, Artificial Sequence
  Description of Artificial Sequence: Synthetic oligonucleotide
  Antisense strand to SEQ ID NO: 1634283
aacacuggaaacaaauguc

SEQ ID NO: 1634285 - RNA, 19 nt, Artificial Sequence
  Description of Artificial Sequence: Synthetic oligonucleotide
  Sense strand starting at position 3947 of SEQ ID NO: 1560923
auuuguuuccaguguuuga

SEQ ID NO: 1634286 - RNA, 19 nt, Artificial Sequence
  Description of Artificial Sequence: Synthetic oligonucleotide
  Antisense strand to SEQ ID NO: 1634285
ucaaacacuggaaacaaau

SEQ ID NO: 1634287 - RNA, 19 nt, Artificial Sequence
  Description of Artificial Sequence: Synthetic oligonucleotide
  Sense strand starting at position 3954 of SEQ ID NO: 1560923
uccaguguuugagcugaag

SEQ ID NO: 1634288 - RNA, 19 nt, Artificial Sequence
  Description of Artificial Sequence: Synthetic oligonucleotide
  Antisense strand to SEQ ID NO: 1634287
cuucagcucaaacacugga

SEQ ID NO: 1634289 - RNA, 19 nt, Artificial Sequence
  Description of Artificial Sequence: Synthetic oligonucleotide
  Sense strand starting at position 3956 of SEQ ID NO: 1560923
caguguuugagcugaagca

SEQ ID NO: 1634290 - RNA, 19 nt, Artificial Sequence
  Description of Artificial Sequence: Synthetic oligonucleotide
  Antisense strand to SEQ ID NO: 1634289
ugcuucagcucaaacacug

SEQ ID NO: 1634291 - RNA, 19 nt, Artificial Sequence
  Description of Artificial Sequence: Synthetic oligonucleotide
  Sense strand starting at position 3957 of SEQ ID NO: 1560923
aguguuugagcugaagcaa

SEQ ID NO: 1634292 - RNA, 19 nt, Artificial Sequence
  Description of Artificial Sequence: Synthetic oligonucleotide
  Antisense strand to SEQ ID NO: 1634291
uugcuucagcucaaacacu

SEQ ID NO: 1634293 - RNA, 19 nt, Artificial Sequence
  Description of Artificial Sequence: Synthetic oligonucleotide
  Sense strand starting at position 62 of SEQ ID NO: 1560924
ugugcaauacaguaagaca

SEQ ID NO: 1634294 - RNA, 19 nt, Artificial Sequence
  Description of Artificial Sequence: Synthetic oligonucleotide
  Antisense strand to SEQ ID NO: 1634293
ugucuuacuguauugcaca

SEQ ID NO: 1634295 - RNA, 19 nt, Artificial Sequence
  Description of Artificial Sequence: Synthetic oligonucleotide
  Sense strand starting at position 281 of SEQ ID NO: 1560924
gaaagagaauguggagaua

SEQ ID NO: 1634296 - RNA, 19 nt, Artificial Sequence
  Description of Artificial Sequence: Synthetic oligonucleotide
  Antisense strand to SEQ ID NO: 1634295
uaucuccacauucucuuuc

SEQ ID NO: 1634297 - RNA, 19 nt, Artificial Sequence
  Description of Artificial Sequence: Synthetic oligonucleotide
  Sense strand starting at position 339 of SEQ ID NO: 1560924
uuggccuaaucagaacuua

SEQ ID NO: 1634298 - RNA, 19 nt, Artificial Sequence
  Description of Artificial Sequence: Synthetic oligonucleotide
  Antisense strand to SEQ ID NO: 1634297
uaaguucugauuaggccaa

SEQ ID NO: 1634299 - RNA, 19 nt, Artificial Sequence
  Description of Artificial Sequence: Synthetic oligonucleotide
  Sense strand starting at position 382 of SEQ ID NO: 1560924
agcuguguugacugagaac

SEQ ID NO: 1634300 - RNA, 19 nt, Artificial Sequence
  Description of Artificial Sequence: Synthetic oligonucleotide
  Antisense strand to SEQ ID NO: 1634299
guucucagucaacacagcu

SEQ ID NO: 1634301 - RNA, 19 nt, Artificial Sequence
  Description of Artificial Sequence: Synthetic oligonucleotide
  Sense strand starting at position 393 of SEQ ID NO: 1560924
cugagaacacacugaugua

SEQ ID NO: 1634302 - RNA, 19 nt, Artificial Sequence
  Description of Artificial Sequence: Synthetic oligonucleotide
  Antisense strand to SEQ ID NO: 1634301
uacaucaguguguucucag

SEQ ID NO: 1634303 - RNA, 19 nt, Artificial Sequence
  Description of Artificial Sequence: Synthetic oligonucleotide
  Sense strand starting at position 566 of SEQ ID NO: 1560924
uggagguggccguagcauu

SEQ ID NO: 1634304 - RNA, 19 nt, Artificial Sequence
  Description of Artificial Sequence: Synthetic oligonucleotide
  Antisense strand to SEQ ID NO: 1634303
aaugcuacggccaccucca

SEQ ID NO: 1634305 - RNA, 19 nt, Artificial Sequence
  Description of Artificial Sequence: Synthetic oligonucleotide
  Sense strand starting at position 639 of SEQ ID NO: 1560924
gacagucccgcuugagauc

SEQ ID NO: 1634306 - RNA, 19 nt, Artificial Sequence
  Description of Artificial Sequence: Synthetic oligonucleotide
  Antisense strand to SEQ ID NO: 1634305
gaucucaagcgggacuguc

SEQ ID NO: 1634307 - RNA, 19 nt, Artificial Sequence
  Description of Artificial Sequence: Synthetic oligonucleotide
  Sense strand starting at position 736 of SEQ ID NO: 1560924
gaggcuagcuccuucugaa

SEQ ID NO: 1634308 - RNA, 19 nt, Artificial Sequence
  Description of Artificial Sequence: Synthetic oligonucleotide
  Antisense strand to SEQ ID NO: 1634307
uucagaaggagcuagccuc

SEQ ID NO: 1634309 - RNA, 19 nt, Artificial Sequence
  Description of Artificial Sequence: Synthetic oligonucleotide
  Sense strand starting at position 1192 of SEQ ID NO: 1560924
gacggaugcucggagaaau

SEQ ID NO: 1634310 - RNA, 19 nt, Artificial Sequence
  Description of Artificial Sequence: Synthetic oligonucleotide
  Antisense strand to SEQ ID NO: 1634309
auuucuccgagcauccguc

SEQ ID NO: 1634311 - RNA, 19 nt, Artificial Sequence
  Description of Artificial Sequence: Synthetic oligonucleotide
  Sense strand starting at position 1204 of SEQ ID NO: 1560924
gagaaaugcgccugagagc

SEQ ID NO: 1634312 - RNA, 19 nt, Artificial Sequence
  Description of Artificial Sequence: Synthetic oligonucleotide
  Antisense strand to SEQ ID NO: 1634311
gcucucaggcgcauuucuc

SEQ ID NO: 1634313 - RNA, 19 nt, Artificial Sequence
  Description of Artificial Sequence: Synthetic oligonucleotide
  Sense strand starting at position 1588 of SEQ ID NO: 1560924
ggcagugacugauuaacug

SEQ ID NO: 1634314 - RNA, 19 nt, Artificial Sequence
  Description of Artificial Sequence: Synthetic oligonucleotide
  Antisense strand to SEQ ID NO: 1634313
caguuaaucagucacugcc

SEQ ID NO: 1634315 - RNA, 19 nt, Artificial Sequence
  Description of Artificial Sequence: Synthetic oligonucleotide
  Sense strand starting at position 1735 of SEQ ID NO: 1560924
ugcacuuauuagguaacca

SEQ ID NO: 1634316 - RNA, 19 nt, Artificial Sequence
  Description of Artificial Sequence: Synthetic oligonucleotide
  Antisense strand to SEQ ID NO: 1634315
ugguuaccuaauaagugca

SEQ ID NO: 1634317 - RNA, 19 nt, Artificial Sequence
  Description of Artificial Sequence: Synthetic oligonucleotide
  Sense strand starting at position 1809 of SEQ ID NO: 1560924
cgggcuuugugauccagga

SEQ ID NO: 1634318 - RNA, 19 nt, Artificial Sequence
  Description of Artificial Sequence: Synthetic oligonucleotide
  Antisense strand to SEQ ID NO: 1634317
uccuggaucacaaagcccg

SEQ ID NO: 1634319 - RNA, 19 nt, Artificial Sequence
  Description of Artificial Sequence: Synthetic oligonucleotide
  Sense strand starting at position 1811 of SEQ ID NO: 1560924
ggcuuugugauccaggaca

SEQ ID NO: 1634320 - RNA, 19 nt, Artificial Sequence
  Description of Artificial Sequence: Synthetic oligonucleotide
  Antisense strand to SEQ ID NO: 1634319
uguccuggaucacaaagcc

SEQ ID NO: 1634321 - RNA, 19 nt, Artificial Sequence
  Description of Artificial Sequence: Synthetic oligonucleotide
  Sense strand starting at position 1850 of SEQ ID NO: 1560924
ggcaauugcuuccucuuaa

SEQ ID NO: 1634322 - RNA, 19 nt, Artificial Sequence
  Description of Artificial Sequence: Synthetic oligonucleotide
  Antisense strand to SEQ ID NO: 1634321
uuaagaggaagcaauugcc

SEQ ID NO: 1634323 - RNA, 19 nt, Artificial Sequence
  Description of Artificial Sequence: Synthetic oligonucleotide
  Sense strand starting at position 1871 of SEQ ID NO: 1560924
uuggaaacgcuguaguguu

SEQ ID NO: 1634324 - RNA, 19 nt, Artificial Sequence
  Description of Artificial Sequence: Synthetic oligonucleotide
  Antisense strand to SEQ ID NO: 1634323
aacacuacagcguuuccaa

SEQ ID NO: 1634325 - RNA, 19 nt, Artificial Sequence
  Description of Artificial Sequence: Synthetic oligonucleotide
  Sense strand starting at position 1879 of SEQ ID NO: 1560924
gcuguaguguuauugaaua

SEQ ID NO: 1634326 - RNA, 19 nt, Artificial Sequence
  Description of Artificial Sequence: Synthetic oligonucleotide
  Antisense strand to SEQ ID NO: 1634325
uauucaauaacacuacagc

SEQ ID NO: 1634327 - RNA, 19 nt, Artificial Sequence
  Description of Artificial Sequence: Synthetic oligonucleotide
  Sense strand starting at position 1881 of SEQ ID NO: 1560924
uguaguguuauugaauaca

SEQ ID NO: 1634328 - RNA, 19 nt, Artificial Sequence
  Description of Artificial Sequence: Synthetic oligonucleotide
  Antisense strand to SEQ ID NO: 1634327
uguauucaauaacacuaca

SEQ ID NO: 1634329 - RNA, 19 nt, Artificial Sequence
  Description of Artificial Sequence: Synthetic oligonucleotide
  Sense strand starting at position 1908 of SEQ ID NO: 1560924
uacgguucucacguuugua

SEQ ID NO: 1634330 - RNA, 19 nt, Artificial Sequence
  Description of Artificial Sequence: Synthetic oligonucleotide
  Antisense strand to SEQ ID NO: 1634329
uacaaacgugagaaccgua

SEQ ID NO: 1634331 - RNA, 19 nt, Artificial Sequence
  Description of Artificial Sequence: Synthetic oligonucleotide
  Sense strand starting at position 1910 of SEQ ID NO: 1560924
cgguucucacguuuguaau

SEQ ID NO: 1634332 - RNA, 19 nt, Artificial Sequence
  Description of Artificial Sequence: Synthetic oligonucleotide
  Antisense strand to SEQ ID NO: 1634331
auuacaaacgugagaaccg

SEQ ID NO: 1634333 - RNA, 19 nt, Artificial Sequence
  Description of Artificial Sequence: Synthetic oligonucleotide
  Sense strand starting at position 1911 of SEQ ID NO: 1560924
gguucucacguuuguaauc

SEQ ID NO: 1634334 - RNA, 19 nt, Artificial Sequence
  Description of Artificial Sequence: Synthetic oligonucleotide
  Antisense strand to SEQ ID NO: 1634333
gauuacaaacgugagaacc

SEQ ID NO: 1634335 - RNA, 19 nt, Artificial Sequence
  Description of Artificial Sequence: Synthetic oligonucleotide
  Sense strand starting at position 1950 of SEQ ID NO: 1560924
gaccgaggaguuugagacu

SEQ ID NO: 1634336 - RNA, 19 nt, Artificial Sequence
  Description of Artificial Sequence: Synthetic oligonucleotide
  Antisense strand to SEQ ID NO: 1634335
agucucaaacuccucgguc

SEQ ID NO: 1634337 - RNA, 19 nt, Artificial Sequence
  Description of Artificial Sequence: Synthetic oligonucleotide
  Sense strand starting at position 2204 of SEQ ID NO: 1560924
ccagcuguuccaugcuaag

SEQ ID NO: 1634338 - RNA, 19 nt, Artificial Sequence
  Description of Artificial Sequence: Synthetic oligonucleotide
  Antisense strand to SEQ ID NO: 1634337
cuuagcauggaacagcugg

SEQ ID NO: 1634339 - RNA, 19 nt, Artificial Sequence
  Description of Artificial Sequence: Synthetic oligonucleotide
  Sense strand starting at position 2210 of SEQ ID NO: 1560924
guuccaugcuaaguacaua

SEQ ID NO: 1634340 - RNA, 19 nt, Artificial Sequence
  Description of Artificial Sequence: Synthetic oligonucleotide
  Antisense strand to SEQ ID NO: 1634339
uauguacuuagcauggaac

SEQ ID NO: 1634341 - RNA, 19 nt, Artificial Sequence
  Description of Artificial Sequence: Synthetic oligonucleotide
  Sense strand starting at position 2284 of SEQ ID NO: 1560924
aggagcagugucugaacua

SEQ ID NO: 1634342 - RNA, 19 nt, Artificial Sequence
  Description of Artificial Sequence: Synthetic oligonucleotide
  Antisense strand to SEQ ID NO: 1634341
uaguucagacacugcuccu

SEQ ID NO: 1634343 - RNA, 19 nt, Artificial Sequence
  Description of Artificial Sequence: Synthetic oligonucleotide
  Sense strand starting at position 2343 of SEQ ID NO: 1560924
gguguaguuaugcaaugga

SEQ ID NO: 1634344 - RNA, 19 nt, Artificial Sequence
  Description of Artificial Sequence: Synthetic oligonucleotide
  Antisense strand to SEQ ID NO: 1634343
uccauugcauaacuacacc

SEQ ID NO: 1634345 - RNA, 19 nt, Artificial Sequence
  Description of Artificial Sequence: Synthetic oligonucleotide
  Sense strand starting at position 2346 of SEQ ID NO: 1560924
guaguuaugcaauggaaua

SEQ ID NO: 1634346 - RNA, 19 nt, Artificial Sequence
  Description of Artificial Sequence: Synthetic oligonucleotide
  Antisense strand to SEQ ID NO: 1634345
uauuccauugcauaacuac

SEQ ID NO: 1634347 - RNA, 19 nt, Artificial Sequence
  Description of Artificial Sequence: Synthetic oligonucleotide
  Sense strand starting at position 2454 of SEQ ID NO: 1560924
cagggcaagcuguauuauu

SEQ ID NO: 1634348 - RNA, 19 nt, Artificial Sequence
  Description of Artificial Sequence: Synthetic oligonucleotide
  Antisense strand to SEQ ID NO: 1634347
aauaauacagcuugcccug

SEQ ID NO: 1634349 - RNA, 19 nt, Artificial Sequence
  Description of Artificial Sequence: Synthetic oligonucleotide
  Sense strand starting at position 2883 of SEQ ID NO: 1560924
ggacaugauuaucacagaa

SEQ ID NO: 1634350 - RNA, 19 nt, Artificial Sequence
  Description of Artificial Sequence: Synthetic oligonucleotide
  Antisense strand to SEQ ID NO: 1634349
uucugugauaaucaugucc

SEQ ID NO: 1634351 - RNA, 19 nt, Artificial Sequence
  Description of Artificial Sequence: Synthetic oligonucleotide
  Sense strand starting at position 2885 of SEQ ID NO: 1560924
acaugauuaucacagaagu

SEQ ID NO: 1634352 - RNA, 19 nt, Artificial Sequence
  Description of Artificial Sequence: Synthetic oligonucleotide
  Antisense strand to SEQ ID NO: 1634351
acuucugugauaaucaugu

SEQ ID NO: 1634353 - RNA, 19 nt, Artificial Sequence
  Description of Artificial Sequence: Synthetic oligonucleotide
  Sense strand starting at position 2898 of SEQ ID NO: 1560924
agaagucagagaggugguu

SEQ ID NO: 1634354 - RNA, 19 nt, Artificial Sequence
  Description of Artificial Sequence: Synthetic oligonucleotide
  Antisense strand to SEQ ID NO: 1634353
aaccaccucucugacuucu

SEQ ID NO: 1634355 - RNA, 19 nt, Artificial Sequence
  Description of Artificial Sequence: Synthetic oligonucleotide
  Sense strand starting at position 2904 of SEQ ID NO: 1560924
cagagaggugguugauugu

SEQ ID NO: 1634356 - RNA, 19 nt, Artificial Sequence
  Description of Artificial Sequence: Synthetic oligonucleotide
  Antisense strand to SEQ ID NO: 1634355
acaaucaaccaccucucug

SEQ ID NO: 1634357 - RNA, 19 nt, Artificial Sequence
  Description of Artificial Sequence: Synthetic oligonucleotide
  Sense strand starting at position 2994 of SEQ ID NO: 1560924
uggaaaccauaugucuuaa

SEQ ID NO: 1634358 - RNA, 19 nt, Artificial Sequence
  Description of Artificial Sequence: Synthetic oligonucleotide
  Antisense strand to SEQ ID NO: 1634357
uuaagacauaugguuucca

SEQ ID NO: 1634359 - RNA, 19 nt, Artificial Sequence
  Description of Artificial Sequence: Synthetic oligonucleotide
  Sense strand starting at position 3282 of SEQ ID NO: 1560924
ggauuacaggcgugaaguc

SEQ ID NO: 1634360 - RNA, 19 nt, Artificial Sequence
  Description of Artificial Sequence: Synthetic oligonucleotide
  Antisense strand to SEQ ID NO: 1634359
gacuucacgccuguaaucc

SEQ ID NO: 1634361 - RNA, 19 nt, Artificial Sequence
  Description of Artificial Sequence: Synthetic oligonucleotide
  Sense strand starting at position 3292 of SEQ ID NO: 1560924
cgugaaguccuaggucuuu

SEQ ID NO: 1634362 - RNA, 19 nt, Artificial Sequence
  Description of Artificial Sequence: Synthetic oligonucleotide
  Antisense strand to SEQ ID NO: 1634361
aaagaccuaggacuucacg

SEQ ID NO: 1634363 - RNA, 19 nt, Artificial Sequence
  Description of Artificial Sequence: Synthetic oligonucleotide
  Sense strand starting at position 3626 of SEQ ID NO: 1560924
cuaggaguccuaggucuua

SEQ ID NO: 1634364 - RNA, 19 nt, Artificial Sequence
  Description of Artificial Sequence: Synthetic oligonucleotide
  Antisense strand to SEQ ID NO: 1634363
uaagaccuaggacuccuag

SEQ ID NO: 1634365 - RNA, 19 nt, Artificial Sequence
  Description of Artificial Sequence: Synthetic oligonucleotide
  Sense strand starting at position 3637 of SEQ ID NO: 1560924
aggucuuaacauggaugau

SEQ ID NO: 1634366 - RNA, 19 nt, Artificial Sequence
  Description of Artificial Sequence: Synthetic oligonucleotide
  Antisense strand to SEQ ID NO: 1634365
aucauccauguuaagaccu

SEQ ID NO: 1634367 - RNA, 19 nt, Artificial Sequence
  Description of Artificial Sequence: Synthetic oligonucleotide
  Sense strand starting at position 3838 of SEQ ID NO: 1560924
ugugaucacaccgagggua

SEQ ID NO: 1634368 - RNA, 19 nt, Artificial Sequence
  Description of Artificial Sequence: Synthetic oligonucleotide
  Antisense strand to SEQ ID NO: 1634367
uacccucggugugaucaca

SEQ ID NO: 1634369 - RNA, 19 nt, Artificial Sequence
  Description of Artificial Sequence: Synthetic oligonucleotide
  Sense strand starting at position 3840 of SEQ ID NO: 1560924
ugaucacaccgaggguaau

SEQ ID NO: 1634370 - RNA, 19 nt, Artificial Sequence
  Description of Artificial Sequence: Synthetic oligonucleotide
  Antisense strand to SEQ ID NO: 1634369
auuacccucggugugauca

SEQ ID NO: 1634371 - RNA, 19 nt, Artificial Sequence
  Description of Artificial Sequence: Synthetic oligonucleotide
  Sense strand starting at position 3841 of SEQ ID NO: 1560924
gaucacaccgaggguaauu

SEQ ID NO: 1634372 - RNA, 19 nt, Artificial Sequence
  Description of Artificial Sequence: Synthetic oligonucleotide
  Antisense strand to SEQ ID NO: 1634371
aauuacccucggugugauc

SEQ ID NO: 1634373 - RNA, 19 nt, Artificial Sequence
  Description of Artificial Sequence: Synthetic oligonucleotide
  Sense strand starting at position 9 of SEQ ID NO: 1560925
gcaccagaguucuuaacac

SEQ ID NO: 1634374 - RNA, 19 nt, Artificial Sequence
  Description of Artificial Sequence: Synthetic oligonucleotide
  Antisense strand to SEQ ID NO: 1634373
guguuaagaacucuggugc

SEQ ID NO: 1634375 - RNA, 19 nt, Artificial Sequence
  Description of Artificial Sequence: Synthetic oligonucleotide
  Sense strand starting at position 65 of SEQ ID NO: 1560925
cagcucuggccaugaugau

SEQ ID NO: 1634376 - RNA, 19 nt, Artificial Sequence
  Description of Artificial Sequence: Synthetic oligonucleotide
  Antisense strand to SEQ ID NO: 1634375
aucaucauggccagagcug

SEQ ID NO: 1634377 - RNA, 19 nt, Artificial Sequence
  Description of Artificial Sequence: Synthetic oligonucleotide
  Sense strand starting at position 66 of SEQ ID NO: 1560925
agcucuggccaugaugauu

SEQ ID NO: 1634378 - RNA, 19 nt, Artificial Sequence
  Description of Artificial Sequence: Synthetic oligonucleotide
  Antisense strand to SEQ ID NO: 1634377
aaucaucauggccagagcu

SEQ ID NO: 1634379 - RNA, 19 nt, Artificial Sequence
  Description of Artificial Sequence: Synthetic oligonucleotide
  Sense strand starting at position 72 of SEQ ID NO: 1560925
ggccaugaugauuauuacu

SEQ ID NO: 1634380 - RNA, 19 nt, Artificial Sequence
  Description of Artificial Sequence: Synthetic oligonucleotide
  Antisense strand to SEQ ID NO: 1634379
aguaauaaucaucauggcc

SEQ ID NO: 1634381 - RNA, 19 nt, Artificial Sequence
  Description of Artificial Sequence: Synthetic oligonucleotide
  Sense strand starting at position 664 of SEQ ID NO: 1560925
guguccucaccuugggaca

SEQ ID NO: 1634382 - RNA, 19 nt, Artificial Sequence
  Description of Artificial Sequence: Synthetic oligonucleotide
  Antisense strand to SEQ ID NO: 1634381
ugucccaaggugaggacac

SEQ ID NO: 1634383 - RNA, 19 nt, Artificial Sequence
  Description of Artificial Sequence: Synthetic oligonucleotide
  Sense strand starting at position 883 of SEQ ID NO: 1560925
gacugucauuuccaugaag

SEQ ID NO: 1634384 - RNA, 19 nt, Artificial Sequence
  Description of Artificial Sequence: Synthetic oligonucleotide
  Antisense strand to SEQ ID NO: 1634383
cuucauggaaaugacaguc

SEQ ID NO: 1634385 - RNA, 19 nt, Artificial Sequence
  Description of Artificial Sequence: Synthetic oligonucleotide
  Sense strand starting at position 964 of SEQ ID NO: 1560925
cagucuuaacagggagcaa

SEQ ID NO: 1634386 - RNA, 19 nt, Artificial Sequence
  Description of Artificial Sequence: Synthetic oligonucleotide
  Antisense strand to SEQ ID NO: 1634385
uugcucccuguuaagacug

SEQ ID NO: 1634387 - RNA, 19 nt, Artificial Sequence
  Description of Artificial Sequence: Synthetic oligonucleotide
  Sense strand starting at position 1142 of SEQ ID NO: 1560925
cgaaguggaguucagguua

SEQ ID NO: 1634388 - RNA, 19 nt, Artificial Sequence
  Description of Artificial Sequence: Synthetic oligonucleotide
  Antisense strand to SEQ ID NO: 1634387
uaaccugaacuccacuucg

SEQ ID NO: 1634389 - RNA, 19 nt, Artificial Sequence
  Description of Artificial Sequence: Synthetic oligonucleotide
  Sense strand starting at position 1443 of SEQ ID NO: 1560925
gcgagagacucugucuuaa

SEQ ID NO: 1634390 - RNA, 19 nt, Artificial Sequence
  Description of Artificial Sequence: Synthetic oligonucleotide
  Antisense strand to SEQ ID NO: 1634389
uuaagacagagucucucgc

SEQ ID NO: 1634391 - RNA, 19 nt, Artificial Sequence
  Description of Artificial Sequence: Synthetic oligonucleotide
  Sense strand starting at position 1491 of SEQ ID NO: 1560925
uggauuauaucaccgagca

SEQ ID NO: 1634392 - RNA, 19 nt, Artificial Sequence
  Description of Artificial Sequence: Synthetic oligonucleotide
  Antisense strand to SEQ ID NO: 1634391
ugcucggugauauaaucca

SEQ ID NO: 1634393 - RNA, 19 nt, Artificial Sequence
  Description of Artificial Sequence: Synthetic oligonucleotide
  Sense strand starting at position 1492 of SEQ ID NO: 1560925
ggauuauaucaccgagcau

SEQ ID NO: 1634394 - RNA, 19 nt, Artificial Sequence
  Description of Artificial Sequence: Synthetic oligonucleotide
  Antisense strand to SEQ ID NO: 1634393
augcucggugauauaaucc

SEQ ID NO: 1634395 - RNA, 19 nt, Artificial Sequence
  Description of Artificial Sequence: Synthetic oligonucleotide
  Sense strand starting at position 1503 of SEQ ID NO: 1560925
ccgagcauuucccauacau

SEQ ID NO: 1634396 - RNA, 19 nt, Artificial Sequence
  Description of Artificial Sequence: Synthetic oligonucleotide
  Antisense strand to SEQ ID NO: 1634395
auguaugggaaaugcucgg

SEQ ID NO: 1634397 - RNA, 19 nt, Artificial Sequence
  Description of Artificial Sequence: Synthetic oligonucleotide
  Sense strand starting at position 1782 of SEQ ID NO: 1560925
cauguugggaauuguaguu

SEQ ID NO: 1634398 - RNA, 19 nt, Artificial Sequence
  Description of Artificial Sequence: Synthetic oligonucleotide
  Antisense strand to SEQ ID NO: 1634397
aacuacaauucccaacaug

SEQ ID NO: 1634399 - RNA, 19 nt, Artificial Sequence
  Description of Artificial Sequence: Synthetic oligonucleotide
  Sense strand starting at position 1787 of SEQ ID NO: 1560925
ugggaauuguaguuccagu

SEQ ID NO: 1634400 - RNA, 19 nt, Artificial Sequence
  Description of Artificial Sequence: Synthetic oligonucleotide
  Antisense strand to SEQ ID NO: 1634399
acuggaacuacaauuccca

SEQ ID NO: 1634401 - RNA, 19 nt, Artificial Sequence
  Description of Artificial Sequence: Synthetic oligonucleotide
  Sense strand starting at position 1885 of SEQ ID NO: 1560925
uccuguagucccuggaaga

SEQ ID NO: 1634402 - RNA, 19 nt, Artificial Sequence
  Description of Artificial Sequence: Synthetic oligonucleotide
  Antisense strand to SEQ ID NO: 1634401
ucuuccagggacuacagga

SEQ ID NO: 1634403 - RNA, 19 nt, Artificial Sequence
  Description of Artificial Sequence: Synthetic oligonucleotide
  Sense strand starting at position 1886 of SEQ ID NO: 1560925
ccuguagucccuggaagag

SEQ ID NO: 1634404 - RNA, 19 nt, Artificial Sequence
  Description of Artificial Sequence: Synthetic oligonucleotide
  Antisense strand to SEQ ID NO: 1634403
cucuuccagggacuacagg

SEQ ID NO: 1634405 - RNA, 19 nt, Artificial Sequence
  Description of Artificial Sequence: Synthetic oligonucleotide
  Sense strand starting at position 2142 of SEQ ID NO: 1560925
gggcguguuugauuggaga

SEQ ID NO: 1634406 - RNA, 19 nt, Artificial Sequence
  Description of Artificial Sequence: Synthetic oligonucleotide
  Antisense strand to SEQ ID NO: 1634405
ucuccaaucaaacacgccc

SEQ ID NO: 1634407 - RNA, 19 nt, Artificial Sequence
  Description of Artificial Sequence: Synthetic oligonucleotide
  Sense strand starting at position 2143 of SEQ ID NO: 1560925
ggcguguuugauuggagaa

SEQ ID NO: 1634408 - RNA, 19 nt, Artificial Sequence
  Description of Artificial Sequence: Synthetic oligonucleotide
  Antisense strand to SEQ ID NO: 1634407
uucuccaaucaaacacgcc

SEQ ID NO: 1634409 - RNA, 19 nt, Artificial Sequence
  Description of Artificial Sequence: Synthetic oligonucleotide
  Sense strand starting at position 2144 of SEQ ID NO: 1560925
gcguguuugauuggagaac

SEQ ID NO: 1634410 - RNA, 19 nt, Artificial Sequence
  Description of Artificial Sequence: Synthetic oligonucleotide
  Antisense strand to SEQ ID NO: 1634409
guucuccaaucaaacacgc

SEQ ID NO: 1634411 - RNA, 19 nt, Artificial Sequence
  Description of Artificial Sequence: Synthetic oligonucleotide
  Sense strand starting at position 2226 of SEQ ID NO: 1560925
gcgguuaggaggugaucua

SEQ ID NO: 1634412 - RNA, 19 nt, Artificial Sequence
  Description of Artificial Sequence: Synthetic oligonucleotide
  Antisense strand to SEQ ID NO: 1634411
uagaucaccuccuaaccgc

SEQ ID NO: 1634413 - RNA, 19 nt, Artificial Sequence
  Description of Artificial Sequence: Synthetic oligonucleotide
  Sense strand starting at position 2227 of SEQ ID NO: 1560925
cgguuaggaggugaucuaa

SEQ ID NO: 1634414 - RNA, 19 nt, Artificial Sequence
  Description of Artificial Sequence: Synthetic oligonucleotide
  Antisense strand to SEQ ID NO: 1634413
uuagaucaccuccuaaccg

SEQ ID NO: 1634415 - RNA, 19 nt, Artificial Sequence
  Description of Artificial Sequence: Synthetic oligonucleotide
  Sense strand starting at position 2388 of SEQ ID NO: 1560925
ccgcuauuccuccaucagu

SEQ ID NO: 1634416 - RNA, 19 nt, Artificial Sequence
  Description of Artificial Sequence: Synthetic oligonucleotide
  Antisense strand to SEQ ID NO: 1634415
acugauggaggaauagcgg

SEQ ID NO: 1634417 - RNA, 19 nt, Artificial Sequence
  Description of Artificial Sequence: Synthetic oligonucleotide
  Sense strand starting at position 2423 of SEQ ID NO: 1560925
ucccaacggucaucuaacu

SEQ ID NO: 1634418 - RNA, 19 nt, Artificial Sequence
  Description of Artificial Sequence: Synthetic oligonucleotide
  Antisense strand to SEQ ID NO: 1634417
aguuagaugaccguuggga

SEQ ID NO: 1634419 - RNA, 19 nt, Artificial Sequence
  Description of Artificial Sequence: Synthetic oligonucleotide
  Sense strand starting at position 2653 of SEQ ID NO: 1560925
caaggucuggcugaggaua

SEQ ID NO: 1634420 - RNA, 19 nt, Artificial Sequence
  Description of Artificial Sequence: Synthetic oligonucleotide
  Antisense strand to SEQ ID NO: 1634419
uauccucagccagaccuug

SEQ ID NO: 1634421 - RNA, 19 nt, Artificial Sequence
  Description of Artificial Sequence: Synthetic oligonucleotide
  Sense strand starting at position 2721 of SEQ ID NO: 1560925
ccgcauucuccaggaaucu

SEQ ID NO: 1634422 - RNA, 19 nt, Artificial Sequence
  Description of Artificial Sequence: Synthetic oligonucleotide
  Antisense strand to SEQ ID NO: 1634421
agauuccuggagaaugcgg

SEQ ID NO: 1634423 - RNA, 19 nt, Artificial Sequence
  Description of Artificial Sequence: Synthetic oligonucleotide
  Sense strand starting at position 2730 of SEQ ID NO: 1560925
ccaggaaucugcuccuaaa

SEQ ID NO: 1634424 - RNA, 19 nt, Artificial Sequence
  Description of Artificial Sequence: Synthetic oligonucleotide
  Antisense strand to SEQ ID NO: 1634423
uuuaggagcagauuccugg

SEQ ID NO: 1634425 - RNA, 19 nt, Artificial Sequence
  Description of Artificial Sequence: Synthetic oligonucleotide
  Sense strand starting at position 2959 of SEQ ID NO: 1560925
ccagcaggcgcuuaauaaa

SEQ ID NO: 1634426 - RNA, 19 nt, Artificial Sequence
  Description of Artificial Sequence: Synthetic oligonucleotide
  Antisense strand to SEQ ID NO: 1634425
uuuauuaagcgccugcugg

SEQ ID NO: 1634427 - RNA, 19 nt, Artificial Sequence
  Description of Artificial Sequence: Synthetic oligonucleotide
  Sense strand starting at position 2970 of SEQ ID NO: 1560925
uuaauaaauggccaaguca

SEQ ID NO: 1634428 - RNA, 19 nt, Artificial Sequence
  Description of Artificial Sequence: Synthetic oligonucleotide
  Antisense strand to SEQ ID NO: 1634427
ugacuuggccauuuauuaa

SEQ ID NO: 1634429 - RNA, 19 nt, Artificial Sequence
  Description of Artificial Sequence: Synthetic oligonucleotide
  Sense strand starting at position 2981 of SEQ ID NO: 1560925
ccaagucauuguuuggguu

SEQ ID NO: 1634430 - RNA, 19 nt, Artificial Sequence
  Description of Artificial Sequence: Synthetic oligonucleotide
  Antisense strand to SEQ ID NO: 1634429
aacccaaacaaugacuugg

SEQ ID NO: 1634431 - RNA, 19 nt, Artificial Sequence
  Description of Artificial Sequence: Synthetic oligonucleotide
  Sense strand starting at position 2982 of SEQ ID NO: 1560925
caagucauuguuuggguuu

SEQ ID NO: 1634432 - RNA, 19 nt, Artificial Sequence
  Description of Artificial Sequence: Synthetic oligonucleotide
  Antisense strand to SEQ ID NO: 1634431
aaacccaaacaaugacuug

SEQ ID NO: 1634433 - RNA, 19 nt, Artificial Sequence
  Description of Artificial Sequence: Synthetic oligonucleotide
  Sense strand starting at position 2985 of SEQ ID NO: 1560925
gucauuguuuggguuucua

SEQ ID NO: 1634434 - RNA, 19 nt, Artificial Sequence
  Description of Artificial Sequence: Synthetic oligonucleotide
  Antisense strand to SEQ ID NO: 1634433
uagaaacccaaacaaugac

SEQ ID NO: 1634435 - RNA, 19 nt, Artificial Sequence
  Description of Artificial Sequence: Synthetic oligonucleotide
  Sense strand starting at position 2989 of SEQ ID NO: 1560925
uuguuuggguuucuaaaua

SEQ ID NO: 1634436 - RNA, 19 nt, Artificial Sequence
  Description of Artificial Sequence: Synthetic oligonucleotide
  Antisense strand to SEQ ID NO: 1634435
uauuuagaaacccaaacaa

SEQ ID NO: 1634437 - RNA, 19 nt, Artificial Sequence
  Description of Artificial Sequence: Synthetic oligonucleotide
  Sense strand starting at position 3398 of SEQ ID NO: 1560925
gugggaacaugugagagaa

SEQ ID NO: 1634438 - RNA, 19 nt, Artificial Sequence
  Description of Artificial Sequence: Synthetic oligonucleotide
  Antisense strand to SEQ ID NO: 1634437
uucucucacauguucccac

SEQ ID NO: 1634439 - RNA, 19 nt, Artificial Sequence
  Description of Artificial Sequence: Synthetic oligonucleotide
  Sense strand starting at position 3411 of SEQ ID NO: 1560925
agagaauguucguuggccu

SEQ ID NO: 1634440 - RNA, 19 nt, Artificial Sequence
  Description of Artificial Sequence: Synthetic oligonucleotide
  Antisense strand to SEQ ID NO: 1634439
aggccaacgaacauucucu

SEQ ID NO: 1634441 - RNA, 19 nt, Artificial Sequence
  Description of Artificial Sequence: Synthetic oligonucleotide
  Sense strand starting at position 3550 of SEQ ID NO: 1560925
cucucagcucuccagagaa

SEQ ID NO: 1634442 - RNA, 19 nt, Artificial Sequence
  Description of Artificial Sequence: Synthetic oligonucleotide
  Antisense strand to SEQ ID NO: 1634441
uucucuggagagcugagag

SEQ ID NO: 1634443 - RNA, 19 nt, Artificial Sequence
  Description of Artificial Sequence: Synthetic oligonucleotide
  Sense strand starting at position 3594 of SEQ ID NO: 1560925
gagucuugcuuacucugaa

SEQ ID NO: 1634444 - RNA, 19 nt, Artificial Sequence
  Description of Artificial Sequence: Synthetic oligonucleotide
  Antisense strand to SEQ ID NO: 1634443
uucagaguaagcaagacuc

SEQ ID NO: 1634445 - RNA, 19 nt, Artificial Sequence
  Description of Artificial Sequence: Synthetic oligonucleotide
  Sense strand starting at position 3617 of SEQ ID NO: 1560925
gcuggugauccgggaaauc

SEQ ID NO: 1634446 - RNA, 19 nt, Artificial Sequence
  Description of Artificial Sequence: Synthetic oligonucleotide
  Antisense strand to SEQ ID NO: 1634445
gauuucccggaucaccagc

SEQ ID NO: 1634447 - RNA, 19 nt, Artificial Sequence
  Description of Artificial Sequence: Synthetic oligonucleotide
  Sense strand starting at position 3670 of SEQ ID NO: 1560925
gaaggaauguucuuagucu

SEQ ID NO: 1634448 - RNA, 19 nt, Artificial Sequence
  Description of Artificial Sequence: Synthetic oligonucleotide
  Antisense strand to SEQ ID NO: 1634447
agacuaagaacauuccuuc

SEQ ID NO: 1634449 - RNA, 19 nt, Artificial Sequence
  Description of Artificial Sequence: Synthetic oligonucleotide
  Sense strand starting at position 3719 of SEQ ID NO: 1560925
gcccgauaucuccagaaga

SEQ ID NO: 1634450 - RNA, 19 nt, Artificial Sequence
  Description of Artificial Sequence: Synthetic oligonucleotide
  Antisense strand to SEQ ID NO: 1634449
ucuucuggagauaucgggc

SEQ ID NO: 1634451 - RNA, 19 nt, Artificial Sequence
  Description of Artificial Sequence: Synthetic oligonucleotide
  Sense strand starting at position 3953 of SEQ ID NO: 1560925
gcacgaugacuucggauuc

SEQ ID NO: 1634452 - RNA, 19 nt, Artificial Sequence
  Description of Artificial Sequence: Synthetic oligonucleotide
  Antisense strand to SEQ ID NO: 1634451
gaauccgaagucaucgugc

SEQ ID NO: 1634453 - RNA, 19 nt, Artificial Sequence
  Description of Artificial Sequence: Synthetic oligonucleotide
  Sense strand starting at position 87 of SEQ ID NO: 1560926
uugaaauggucuucuaaag

SEQ ID NO: 1634454 - RNA, 19 nt, Artificial Sequence
  Description of Artificial Sequence: Synthetic oligonucleotide
  Antisense strand to SEQ ID NO: 1634453
cuuuagaagaccauuucaa

SEQ ID NO: 1634455 - RNA, 19 nt, Artificial Sequence
  Description of Artificial Sequence: Synthetic oligonucleotide
  Sense strand starting at position 104 of SEQ ID NO: 1560926
agacauuagcuuggccauu

SEQ ID NO: 1634456 - RNA, 19 nt, Artificial Sequence
  Description of Artificial Sequence: Synthetic oligonucleotide
  Antisense strand to SEQ ID NO: 1634455
aauggccaagcuaaugucu

SEQ ID NO: 1634457 - RNA, 19 nt, Artificial Sequence
  Description of Artificial Sequence: Synthetic oligonucleotide
  Sense strand starting at position 105 of SEQ ID NO: 1560926
gacauuagcuuggccauuu

SEQ ID NO: 1634458 - RNA, 19 nt, Artificial Sequence
  Description of Artificial Sequence: Synthetic oligonucleotide
  Antisense strand to SEQ ID NO: 1634457
aaauggccaagcuaauguc

SEQ ID NO: 1634459 - RNA, 19 nt, Artificial Sequence
  Description of Artificial Sequence: Synthetic oligonucleotide
  Sense strand starting at position 116 of SEQ ID NO: 1560926
ggccauuucucaucugcga

SEQ ID NO: 1634460 - RNA, 19 nt, Artificial Sequence
  Description of Artificial Sequence: Synthetic oligonucleotide
  Antisense strand to SEQ ID NO: 1634459
ucgcagaugagaaauggcc

SEQ ID NO: 1634461 - RNA, 19 nt, Artificial Sequence
  Description of Artificial Sequence: Synthetic oligonucleotide
  Sense strand starting at position 120 of SEQ ID NO: 1560926
auuucucaucugcgagcau

SEQ ID NO: 1634462 - RNA, 19 nt, Artificial Sequence
  Description of Artificial Sequence: Synthetic oligonucleotide
  Antisense strand to SEQ ID NO: 1634461
augcucgcagaugagaaau

SEQ ID NO: 1634463 - RNA, 19 nt, Artificial Sequence
  Description of Artificial Sequence: Synthetic oligonucleotide
  Sense strand starting at position 131 of SEQ ID NO: 1560926
gcgagcauuugaucaguaa

SEQ ID NO: 1634464 - RNA, 19 nt, Artificial Sequence
  Description of Artificial Sequence: Synthetic oligonucleotide
  Antisense strand to SEQ ID NO: 1634463
uuacugaucaaaugcucgc

SEQ ID NO: 1634465 - RNA, 19 nt, Artificial Sequence
  Description of Artificial Sequence: Synthetic oligonucleotide
  Sense strand starting at position 186 of SEQ ID NO: 1560926
cucugaguagcagaaacuu

SEQ ID NO: 1634466 - RNA, 19 nt, Artificial Sequence
  Description of Artificial Sequence: Synthetic oligonucleotide
  Antisense strand to SEQ ID NO: 1634465
aaguuucugcuacucagag

SEQ ID NO: 1634467 - RNA, 19 nt, Artificial Sequence
  Description of Artificial Sequence: Synthetic oligonucleotide
  Sense strand starting at position 195 of SEQ ID NO: 1560926
gcagaaacuugaguugguu

SEQ ID NO: 1634468 - RNA, 19 nt, Artificial Sequence
  Description of Artificial Sequence: Synthetic oligonucleotide
  Antisense strand to SEQ ID NO: 1634467
aaccaacucaaguuucugc

SEQ ID NO: 1634469 - RNA, 19 nt, Artificial Sequence
  Description of Artificial Sequence: Synthetic oligonucleotide
  Sense strand starting at position 198 of SEQ ID NO: 1560926
gaaacuugaguugguuaca

SEQ ID NO: 1634470 - RNA, 19 nt, Artificial Sequence
  Description of Artificial Sequence: Synthetic oligonucleotide
  Antisense strand to SEQ ID NO: 1634469
uguaaccaacucaaguuuc

SEQ ID NO: 1634471 - RNA, 19 nt, Artificial Sequence
  Description of Artificial Sequence: Synthetic oligonucleotide
  Sense strand starting at position 199 of SEQ ID NO: 1560926
aaacuugaguugguuacau

SEQ ID NO: 1634472 - RNA, 19 nt, Artificial Sequence
  Description of Artificial Sequence: Synthetic oligonucleotide
  Antisense strand to SEQ ID NO: 1634471
auguaaccaacucaaguuu

SEQ ID NO: 1634473 - RNA, 19 nt, Artificial Sequence
  Description of Artificial Sequence: Synthetic oligonucleotide
  Sense strand starting at position 201 of SEQ ID NO: 1560926
acuugaguugguuacauua

SEQ ID NO: 1634474 - RNA, 19 nt, Artificial Sequence
  Description of Artificial Sequence: Synthetic oligonucleotide
  Antisense strand to SEQ ID NO: 1634473
uaauguaaccaacucaagu

SEQ ID NO: 1634475 - RNA, 19 nt, Artificial Sequence
  Description of Artificial Sequence: Synthetic oligonucleotide
  Sense strand starting at position 211 of SEQ ID NO: 1560926
guuacauuaucggucucuu

SEQ ID NO: 1634476 - RNA, 19 nt, Artificial Sequence
  Description of Artificial Sequence: Synthetic oligonucleotide
  Antisense strand to SEQ ID NO: 1634475
aagagaccgauaauguaac

SEQ ID NO: 1634477 - RNA, 19 nt, Artificial Sequence
  Description of Artificial Sequence: Synthetic oligonucleotide
  Sense strand starting at position 249 of SEQ ID NO: 1560926
acaggagucccuuguaacu

SEQ ID NO: 1634478 - RNA, 19 nt, Artificial Sequence
  Description of Artificial Sequence: Synthetic oligonucleotide
  Antisense strand to SEQ ID NO: 1634477
aguuacaagggacuccugu

SEQ ID NO: 1634479 - RNA, 19 nt, Artificial Sequence
  Description of Artificial Sequence: Synthetic oligonucleotide
  Sense strand starting at position 684 of SEQ ID NO: 1560926
acaggagguugcuuuguga

SEQ ID NO: 1634480 - RNA, 19 nt, Artificial Sequence
  Description of Artificial Sequence: Synthetic oligonucleotide
  Antisense strand to SEQ ID NO: 1634479
ucacaaagcaaccuccugu

SEQ ID NO: 1634481 - RNA, 19 nt, Artificial Sequence
  Description of Artificial Sequence: Synthetic oligonucleotide
  Sense strand starting at position 687 of SEQ ID NO: 1560926
ggagguugcuuugugauaa

SEQ ID NO: 1634482 - RNA, 19 nt, Artificial Sequence
  Description of Artificial Sequence: Synthetic oligonucleotide
  Antisense strand to SEQ ID NO: 1634481
uuaucacaaagcaaccucc

SEQ ID NO: 1634483 - RNA, 19 nt, Artificial Sequence
  Description of Artificial Sequence: Synthetic oligonucleotide
  Sense strand starting at position 2070 of SEQ ID NO: 1560926
uugcgaacggcuuaaccua

SEQ ID NO: 1634484 - RNA, 19 nt, Artificial Sequence
  Description of Artificial Sequence: Synthetic oligonucleotide
  Antisense strand to SEQ ID NO: 1634483
uagguuaagccguucgcaa

SEQ ID NO: 1634485 - RNA, 19 nt, Artificial Sequence
  Description of Artificial Sequence: Synthetic oligonucleotide
  Sense strand starting at position 2216 of SEQ ID NO: 1560926
cugcauugugugcaaccau

SEQ ID NO: 1634486 - RNA, 19 nt, Artificial Sequence
  Description of Artificial Sequence: Synthetic oligonucleotide
  Antisense strand to SEQ ID NO: 1634485
augguugcacacaaugcag

SEQ ID NO: 1634487 - RNA, 19 nt, Artificial Sequence
  Description of Artificial Sequence: Synthetic oligonucleotide
  Sense strand starting at position 2276 of SEQ ID NO: 1560926
gcaacugcuuuaccuuaga

SEQ ID NO: 1634488 - RNA, 19 nt, Artificial Sequence
  Description of Artificial Sequence: Synthetic oligonucleotide
  Antisense strand to SEQ ID NO: 1634487
ucuaagguaaagcaguugc

SEQ ID NO: 1634489 - RNA, 19 nt, Artificial Sequence
  Description of Artificial Sequence: Synthetic oligonucleotide
  Sense strand starting at position 2384 of SEQ ID NO: 1560926
gacucuugcgucugguuga

SEQ ID NO: 1634490 - RNA, 19 nt, Artificial Sequence
  Description of Artificial Sequence: Synthetic oligonucleotide
  Antisense strand to SEQ ID NO: 1634489
ucaaccagacgcaagaguc

SEQ ID NO: 1634491 - RNA, 19 nt, Artificial Sequence
  Description of Artificial Sequence: Synthetic oligonucleotide
  Sense strand starting at position 2565 of SEQ ID NO: 1560926
gauucuacggucugaggga

SEQ ID NO: 1634492 - RNA, 19 nt, Artificial Sequence
  Description of Artificial Sequence: Synthetic oligonucleotide
  Antisense strand to SEQ ID NO: 1634491
ucccucagaccguagaauc

SEQ ID NO: 1634493 - RNA, 19 nt, Artificial Sequence
  Description of Artificial Sequence: Synthetic oligonucleotide
  Sense strand starting at position 2598 of SEQ ID NO: 1560926
ccuggauucuaggaucuca

SEQ ID NO: 1634494 - RNA, 19 nt, Artificial Sequence
  Description of Artificial Sequence: Synthetic oligonucleotide
  Antisense strand to SEQ ID NO: 1634493
ugagauccuagaauccagg

SEQ ID NO: 1634495 - RNA, 19 nt, Artificial Sequence
  Description of Artificial Sequence: Synthetic oligonucleotide
  Sense strand starting at position 2816 of SEQ ID NO: 1560926
ggaaguggaguuuguguca

SEQ ID NO: 1634496 - RNA, 19 nt, Artificial Sequence
  Description of Artificial Sequence: Synthetic oligonucleotide
  Antisense strand to SEQ ID NO: 1634495
ugacacaaacuccacuucc

SEQ ID NO: 1634497 - RNA, 19 nt, Artificial Sequence
  Description of Artificial Sequence: Synthetic oligonucleotide
  Sense strand starting at position 2822 of SEQ ID NO: 1560926
ggaguuugugucagguggu

SEQ ID NO: 1634498 - RNA, 19 nt, Artificial Sequence
  Description of Artificial Sequence: Synthetic oligonucleotide
  Antisense strand to SEQ ID NO: 1634497
accaccugacacaaacucc

SEQ ID NO: 1634499 - RNA, 19 nt, Artificial Sequence
  Description of Artificial Sequence: Synthetic oligonucleotide
  Sense strand starting at position 2910 of SEQ ID NO: 1560926
cgggaauuaaaucgcagaa

SEQ ID NO: 1634500 - RNA, 19 nt, Artificial Sequence
  Description of Artificial Sequence: Synthetic oligonucleotide
  Antisense strand to SEQ ID NO: 1634499
uucugcgauuuaauucccg

SEQ ID NO: 1634501 - RNA, 19 nt, Artificial Sequence
  Description of Artificial Sequence: Synthetic oligonucleotide
  Sense strand starting at position 2912 of SEQ ID NO: 1560926
ggaauuaaaucgcagaaag

SEQ ID NO: 1634502 - RNA, 19 nt, Artificial Sequence
  Description of Artificial Sequence: Synthetic oligonucleotide
  Antisense strand to SEQ ID NO: 1634501
cuuucugcgauuuaauucc

SEQ ID NO: 1634503 - RNA, 19 nt, Artificial Sequence
  Description of Artificial Sequence: Synthetic oligonucleotide
  Sense strand starting at position 3056 of SEQ ID NO: 1560926
uuucuuggcuugcugauau

SEQ ID NO: 1634504 - RNA, 19 nt, Artificial Sequence
  Description of Artificial Sequence: Synthetic oligonucleotide
  Antisense strand to SEQ ID NO: 1634503
auaucagcaagccaagaaa

SEQ ID NO: 1634505 - RNA, 19 nt, Artificial Sequence
  Description of Artificial Sequence: Synthetic oligonucleotide
  Sense strand starting at position 3100 of SEQ ID NO: 1560926
agucauuuagcaugcauua

SEQ ID NO: 1634506 - RNA, 19 nt, Artificial Sequence
  Description of Artificial Sequence: Synthetic oligonucleotide
  Antisense strand to SEQ ID NO: 1634505
uaaugcaugcuaaaugacu

SEQ ID NO: 1634507 - RNA, 19 nt, Artificial Sequence
  Description of Artificial Sequence: Synthetic oligonucleotide
  Sense strand starting at position 3160 of SEQ ID NO: 1560926
cguggagcuucccugacaa

SEQ ID NO: 1634508 - RNA, 19 nt, Artificial Sequence
  Description of Artificial Sequence: Synthetic oligonucleotide
  Antisense strand to SEQ ID NO: 1634507
uugucagggaagcuccacg

SEQ ID NO: 1634509 - RNA, 19 nt, Artificial Sequence
  Description of Artificial Sequence: Synthetic oligonucleotide
  Sense strand starting at position 3180 of SEQ ID NO: 1560926
gcagauggguucucugaug

SEQ ID NO: 1634510 - RNA, 19 nt, Artificial Sequence
  Description of Artificial Sequence: Synthetic oligonucleotide
  Antisense strand to SEQ ID NO: 1634509
caucagagaacccaucugc

SEQ ID NO: 1634511 - RNA, 19 nt, Artificial Sequence
  Description of Artificial Sequence: Synthetic oligonucleotide
  Sense strand starting at position 3368 of SEQ ID NO: 1560926
ccagcugucugggcugaau

SEQ ID NO: 1634512 - RNA, 19 nt, Artificial Sequence
  Description of Artificial Sequence: Synthetic oligonucleotide
  Antisense strand to SEQ ID NO: 1634511
auucagcccagacagcugg

SEQ ID NO: 1634513 - RNA, 19 nt, Artificial Sequence
  Description of Artificial Sequence: Synthetic oligonucleotide
  Sense strand starting at position 3370 of SEQ ID NO: 1560926
agcugucugggcugaauga

SEQ ID NO: 1634514 - RNA, 19 nt, Artificial Sequence
  Description of Artificial Sequence: Synthetic oligonucleotide
  Antisense strand to SEQ ID NO: 1634513
ucauucagcccagacagcu

SEQ ID NO: 1634515 - RNA, 19 nt, Artificial Sequence
  Description of Artificial Sequence: Synthetic oligonucleotide
  Sense strand starting at position 3391 of SEQ ID NO: 1560926
gcaauagccuccuugcuga

SEQ ID NO: 1634516 - RNA, 19 nt, Artificial Sequence
  Description of Artificial Sequence: Synthetic oligonucleotide
  Antisense strand to SEQ ID NO: 1634515
ucagcaaggaggcuauugc

SEQ ID NO: 1634517 - RNA, 19 nt, Artificial Sequence
  Description of Artificial Sequence: Synthetic oligonucleotide
  Sense strand starting at position 3396 of SEQ ID NO: 1560926
agccuccuugcugagaaua

SEQ ID NO: 1634518 - RNA, 19 nt, Artificial Sequence
  Description of Artificial Sequence: Synthetic oligonucleotide
  Antisense strand to SEQ ID NO: 1634517
uauucucagcaaggaggcu

SEQ ID NO: 1634519 - RNA, 19 nt, Artificial Sequence
  Description of Artificial Sequence: Synthetic oligonucleotide
  Sense strand starting at position 3713 of SEQ ID NO: 1560926
aucaaucaaugaggauuaa

SEQ ID NO: 1634520 - RNA, 19 nt, Artificial Sequence
  Description of Artificial Sequence: Synthetic oligonucleotide
  Antisense strand to SEQ ID NO: 1634519
uuaauccucauugauugau

SEQ ID NO: 1634521 - RNA, 19 nt, Artificial Sequence
  Description of Artificial Sequence: Synthetic oligonucleotide
  Sense strand starting at position 3797 of SEQ ID NO: 1560926
uuuccuugagagugaagga

SEQ ID NO: 1634522 - RNA, 19 nt, Artificial Sequence
  Description of Artificial Sequence: Synthetic oligonucleotide
  Antisense strand to SEQ ID NO: 1634521
uccuucacucucaaggaaa

SEQ ID NO: 1634523 - RNA, 19 nt, Artificial Sequence
  Description of Artificial Sequence: Synthetic oligonucleotide
  Sense strand starting at position 3863 of SEQ ID NO: 1560926
gccugaaacucugaagaca

SEQ ID NO: 1634524 - RNA, 19 nt, Artificial Sequence
  Description of Artificial Sequence: Synthetic oligonucleotide
  Antisense strand to SEQ ID NO: 1634523
ugucuucagaguuucaggc

SEQ ID NO: 1634525 - RNA, 19 nt, Artificial Sequence
  Description of Artificial Sequence: Synthetic oligonucleotide
  Sense strand starting at position 3883 of SEQ ID NO: 1560926
uuguauuagucugcuugga

SEQ ID NO: 1634526 - RNA, 19 nt, Artificial Sequence
  Description of Artificial Sequence: Synthetic oligonucleotide
  Antisense strand to SEQ ID NO: 1634525
uccaagcagacuaauacaa

SEQ ID NO: 1634527 - RNA, 19 nt, Artificial Sequence
  Description of Artificial Sequence: Synthetic oligonucleotide
  Sense strand starting at position 3926 of SEQ ID NO: 1560926
gucccucaagcacagaaau

SEQ ID NO: 1634528 - RNA, 19 nt, Artificial Sequence
  Description of Artificial Sequence: Synthetic oligonucleotide
  Antisense strand to SEQ ID NO: 1634527
auuucugugcuugagggac

SEQ ID NO: 1634529 - RNA, 19 nt, Artificial Sequence
  Description of Artificial Sequence: Synthetic oligonucleotide
  Sense strand starting at position 3939 of SEQ ID NO: 1560926
agaaauuccugucugacag

SEQ ID NO: 1634530 - RNA, 19 nt, Artificial Sequence
  Description of Artificial Sequence: Synthetic oligonucleotide
  Antisense strand to SEQ ID NO: 1634529
cugucagacaggaauuucu

SEQ ID NO: 1634531 - RNA, 19 nt, Artificial Sequence
  Description of Artificial Sequence: Synthetic oligonucleotide
  Sense strand starting at position 3940 of SEQ ID NO: 1560926
gaaauuccugucugacagu

SEQ ID NO: 1634532 - RNA, 19 nt, Artificial Sequence
  Description of Artificial Sequence: Synthetic oligonucleotide
  Antisense strand to SEQ ID NO: 1634531
acugucagacaggaauuuc

SEQ ID NO: 1634533 - RNA, 19 nt, Artificial Sequence
  Description of Artificial Sequence: Synthetic oligonucleotide
  Sense strand starting at position 27 of SEQ ID NO: 1560927
ggacgaauccggcgagaaa

SEQ ID NO: 1634534 - RNA, 19 nt, Artificial Sequence
  Description of Artificial Sequence: Synthetic oligonucleotide
  Antisense strand to SEQ ID NO: 1634533
uuucucgccggauucgucc

SEQ ID NO: 1634535 - RNA, 19 nt, Artificial Sequence
  Description of Artificial Sequence: Synthetic oligonucleotide
  Sense strand starting at position 28 of SEQ ID NO: 1560927
gacgaauccggcgagaaau

SEQ ID NO: 1634536 - RNA, 19 nt, Artificial Sequence
  Description of Artificial Sequence: Synthetic oligonucleotide
  Antisense strand to SEQ ID NO: 1634535
auuucucgccggauucguc

SEQ ID NO: 1634537 - RNA, 19 nt, Artificial Sequence
  Description of Artificial Sequence: Synthetic oligonucleotide
  Sense strand starting at position 364 of SEQ ID NO: 1560927
caagcugccuucugagaag

SEQ ID NO: 1634538 - RNA, 19 nt, Artificial Sequence
  Description of Artificial Sequence: Synthetic oligonucleotide
  Antisense strand to SEQ ID NO: 1634537
cuucucagaaggcagcuug

SEQ ID NO: 1634539 - RNA, 19 nt, Artificial Sequence
  Description of Artificial Sequence: Synthetic oligonucleotide
  Sense strand starting at position 367 of SEQ ID NO: 1560927
gcugccuucugagaaggaa

SEQ ID NO: 1634540 - RNA, 19 nt, Artificial Sequence
  Description of Artificial Sequence: Synthetic oligonucleotide
  Antisense strand to SEQ ID NO: 1634539
uuccuucucagaaggcagc

SEQ ID NO: 1634541 - RNA, 19 nt, Artificial Sequence
  Description of Artificial Sequence: Synthetic oligonucleotide
  Sense strand starting at position 528 of SEQ ID NO: 1560927
acuccagagcccgaauaaa

SEQ ID NO: 1634542 - RNA, 19 nt, Artificial Sequence
  Description of Artificial Sequence: Synthetic oligonucleotide
  Antisense strand to SEQ ID NO: 1634541
uuuauucgggcucuggagu

SEQ ID NO: 1634543 - RNA, 19 nt, Artificial Sequence
  Description of Artificial Sequence: Synthetic oligonucleotide
  Sense strand starting at position 543 of SEQ ID NO: 1560927
uaaagagagcccggauagu

SEQ ID NO: 1634544 - RNA, 19 nt, Artificial Sequence
  Description of Artificial Sequence: Synthetic oligonucleotide
  Antisense strand to SEQ ID NO: 1634543
acuauccgggcucucuuua

SEQ ID NO: 1634545 - RNA, 19 nt, Artificial Sequence
  Description of Artificial Sequence: Synthetic oligonucleotide
  Sense strand starting at position 552 of SEQ ID NO: 1560927
cccggauagucucacguuu

SEQ ID NO: 1634546 - RNA, 19 nt, Artificial Sequence
  Description of Artificial Sequence: Synthetic oligonucleotide
  Antisense strand to SEQ ID NO: 1634545
aaacgugagacuauccggg

SEQ ID NO: 1634547 - RNA, 19 nt, Artificial Sequence
  Description of Artificial Sequence: Synthetic oligonucleotide
  Sense strand starting at position 554 of SEQ ID NO: 1560927
cggauagucucacguuuac

SEQ ID NO: 1634548 - RNA, 19 nt, Artificial Sequence
  Description of Artificial Sequence: Synthetic oligonucleotide
  Antisense strand to SEQ ID NO: 1634547
guaaacgugagacuauccg

SEQ ID NO: 1634549 - RNA, 19 nt, Artificial Sequence
  Description of Artificial Sequence: Synthetic oligonucleotide
  Sense strand starting at position 624 of SEQ ID NO: 1560927
gagcaagcgucuugauuug

SEQ ID NO: 1634550 - RNA, 19 nt, Artificial Sequence
  Description of Artificial Sequence: Synthetic oligonucleotide
  Antisense strand to SEQ ID NO: 1634549
caaaucaagacgcuugcuc

SEQ ID NO: 1634551 - RNA, 19 nt, Artificial Sequence
  Description of Artificial Sequence: Synthetic oligonucleotide
  Sense strand starting at position 629 of SEQ ID NO: 1560927
agcgucuugauuugcaaau

SEQ ID NO: 1634552 - RNA, 19 nt, Artificial Sequence
  Description of Artificial Sequence: Synthetic oligonucleotide
  Antisense strand to SEQ ID NO: 1634551
auuugcaaaucaagacgcu

SEQ ID NO: 1634553 - RNA, 19 nt, Artificial Sequence
  Description of Artificial Sequence: Synthetic oligonucleotide
  Sense strand starting at position 630 of SEQ ID NO: 1560927
gcgucuugauuugcaaaug

SEQ ID NO: 1634554 - RNA, 19 nt, Artificial Sequence
  Description of Artificial Sequence: Synthetic oligonucleotide
  Antisense strand to SEQ ID NO: 1634553
cauuugcaaaucaagacgc

SEQ ID NO: 1634555 - RNA, 19 nt, Artificial Sequence
  Description of Artificial Sequence: Synthetic oligonucleotide
  Sense strand starting at position 631 of SEQ ID NO: 1560927
cgucuugauuugcaaauga

SEQ ID NO: 1634556 - RNA, 19 nt, Artificial Sequence
  Description of Artificial Sequence: Synthetic oligonucleotide
  Antisense strand to SEQ ID NO: 1634555
ucauuugcaaaucaagacg

SEQ ID NO: 1634557 - RNA, 19 nt, Artificial Sequence
  Description of Artificial Sequence: Synthetic oligonucleotide
  Sense strand starting at position 739 of SEQ ID NO: 1560927
gccuccucuuccguagaca

SEQ ID NO: 1634558 - RNA, 19 nt, Artificial Sequence
  Description of Artificial Sequence: Synthetic oligonucleotide
  Antisense strand to SEQ ID NO: 1634557
ugucuacggaagaggaggc

SEQ ID NO: 1634559 - RNA, 19 nt, Artificial Sequence
  Description of Artificial Sequence: Synthetic oligonucleotide
  Sense strand starting at position 765 of SEQ ID NO: 1560927
acacauaggcccugaacuu

SEQ ID NO: 1634560 - RNA, 19 nt, Artificial Sequence
  Description of Artificial Sequence: Synthetic oligonucleotide
  Antisense strand to SEQ ID NO: 1634559
aaguucagggccuaugugu

SEQ ID NO: 1634561 - RNA, 19 nt, Artificial Sequence
  Description of Artificial Sequence: Synthetic oligonucleotide
  Sense strand starting at position 814 of SEQ ID NO: 1560927
ggaggaagaucgguuccca

SEQ ID NO: 1634562 - RNA, 19 nt, Artificial Sequence
  Description of Artificial Sequence: Synthetic oligonucleotide
  Antisense strand to SEQ ID NO: 1634561
ugggaaccgaucuuccucc

SEQ ID NO: 1634563 - RNA, 19 nt, Artificial Sequence
  Description of Artificial Sequence: Synthetic oligonucleotide
  Sense strand starting at position 888 of SEQ ID NO: 1560927
cagguacaagugugaacaa

SEQ ID NO: 1634564 - RNA, 19 nt, Artificial Sequence
  Description of Artificial Sequence: Synthetic oligonucleotide
  Antisense strand to SEQ ID NO: 1634563
uuguucacacuuguaccug

SEQ ID NO: 1634565 - RNA, 19 nt, Artificial Sequence
  Description of Artificial Sequence: Synthetic oligonucleotide
  Sense strand starting at position 1065 of SEQ ID NO: 1560927
cugggaaauccaggugugu

SEQ ID NO: 1634566 - RNA, 19 nt, Artificial Sequence
  Description of Artificial Sequence: Synthetic oligonucleotide
  Antisense strand to SEQ ID NO: 1634565
acacaccuggauuucccag

SEQ ID NO: 1634567 - RNA, 19 nt, Artificial Sequence
  Description of Artificial Sequence: Synthetic oligonucleotide
  Sense strand starting at position 1067 of SEQ ID NO: 1560927
gggaaauccagguguguug

SEQ ID NO: 1634568 - RNA, 19 nt, Artificial Sequence
  Description of Artificial Sequence: Synthetic oligonucleotide
  Antisense strand to SEQ ID NO: 1634567
caacacaccuggauuuccc

SEQ ID NO: 1634569 - RNA, 19 nt, Artificial Sequence
  Description of Artificial Sequence: Synthetic oligonucleotide
  Sense strand starting at position 1220 of SEQ ID NO: 1560927
ccgggaaacauccgacucu

SEQ ID NO: 1634570 - RNA, 19 nt, Artificial Sequence
  Description of Artificial Sequence: Synthetic oligonucleotide
  Antisense strand to SEQ ID NO: 1634569
agagucggauguuucccgg

SEQ ID NO: 1634571 - RNA, 19 nt, Artificial Sequence
  Description of Artificial Sequence: Synthetic oligonucleotide
  Sense strand starting at position 1221 of SEQ ID NO: 1560927
cgggaaacauccgacucuu

SEQ ID NO: 1634572 - RNA, 19 nt, Artificial Sequence
  Description of Artificial Sequence: Synthetic oligonucleotide
  Antisense strand to SEQ ID NO: 1634571
aagagucggauguuucccg

SEQ ID NO: 1634573 - RNA, 19 nt, Artificial Sequence
  Description of Artificial Sequence: Synthetic oligonucleotide
  Sense strand starting at position 1230 of SEQ ID NO: 1560927
uccgacucuucccaugcaa

SEQ ID NO: 1634574 - RNA, 19 nt, Artificial Sequence
  Description of Artificial Sequence: Synthetic oligonucleotide
  Antisense strand to SEQ ID NO: 1634573
uugcaugggaagagucgga

SEQ ID NO: 1634575 - RNA, 19 nt, Artificial Sequence
  Description of Artificial Sequence: Synthetic oligonucleotide
  Sense strand starting at position 1286 of SEQ ID NO: 1560927
cuccacuccuugcgaucaa

SEQ ID NO: 1634576 - RNA, 19 nt, Artificial Sequence
  Description of Artificial Sequence: Synthetic oligonucleotide
  Antisense strand to SEQ ID NO: 1634575
uugaucgcaaggaguggag

SEQ ID NO: 1634577 - RNA, 19 nt, Artificial Sequence
  Description of Artificial Sequence: Synthetic oligonucleotide
  Sense strand starting at position 1466 of SEQ ID NO: 1560927
cgcacagucccggaacaau

SEQ ID NO: 1634578 - RNA, 19 nt, Artificial Sequence
  Description of Artificial Sequence: Synthetic oligonucleotide
  Antisense strand to SEQ ID NO: 1634577
auuguuccgggacugugcg

SEQ ID NO: 1634579 - RNA, 19 nt, Artificial Sequence
  Description of Artificial Sequence: Synthetic oligonucleotide
  Sense strand starting at position 1513 of SEQ ID NO: 1560927
agaucugcguucuaauucu

SEQ ID NO: 1634580 - RNA, 19 nt, Artificial Sequence
  Description of Artificial Sequence: Synthetic oligonucleotide
  Antisense strand to SEQ ID NO: 1634579
agaauuagaacgcagaucu

SEQ ID NO: 1634581 - RNA, 19 nt, Artificial Sequence
  Description of Artificial Sequence: Synthetic oligonucleotide
  Sense strand starting at position 1655 of SEQ ID NO: 1560927
ggccuucccguccgaaauu

SEQ ID NO: 1634582 - RNA, 19 nt, Artificial Sequence
  Description of Artificial Sequence: Synthetic oligonucleotide
  Antisense strand to SEQ ID NO: 1634581
aauuucggacgggaaggcc

SEQ ID NO: 1634583 - RNA, 19 nt, Artificial Sequence
  Description of Artificial Sequence: Synthetic oligonucleotide
  Sense strand starting at position 1766 of SEQ ID NO: 1560927
guuguuacaaaccgaggaa

SEQ ID NO: 1634584 - RNA, 19 nt, Artificial Sequence
  Description of Artificial Sequence: Synthetic oligonucleotide
  Antisense strand to SEQ ID NO: 1634583
uuccucgguuuguaacaac

SEQ ID NO: 1634585 - RNA, 19 nt, Artificial Sequence
  Description of Artificial Sequence: Synthetic oligonucleotide
  Sense strand starting at position 1986 of SEQ ID NO: 1560927
gguaguuccuguccaugaa

SEQ ID NO: 1634586 - RNA, 19 nt, Artificial Sequence
  Description of Artificial Sequence: Synthetic oligonucleotide
  Antisense strand to SEQ ID NO: 1634585
uucauggacaggaacuacc

SEQ ID NO: 1634587 - RNA, 19 nt, Artificial Sequence
  Description of Artificial Sequence: Synthetic oligonucleotide
  Sense strand starting at position 1987 of SEQ ID NO: 1560927
guaguuccuguccaugaau

SEQ ID NO: 1634588 - RNA, 19 nt, Artificial Sequence
  Description of Artificial Sequence: Synthetic oligonucleotide
  Antisense strand to SEQ ID NO: 1634587
auucauggacaggaacuac

SEQ ID NO: 1634589 - RNA, 19 nt, Artificial Sequence
  Description of Artificial Sequence: Synthetic oligonucleotide
  Sense strand starting at position 1989 of SEQ ID NO: 1560927
aguuccuguccaugaauug

SEQ ID NO: 1634590 - RNA, 19 nt, Artificial Sequence
  Description of Artificial Sequence: Synthetic oligonucleotide
  Antisense strand to SEQ ID NO: 1634589
caauucauggacaggaacu

SEQ ID NO: 1634591 - RNA, 19 nt, Artificial Sequence
  Description of Artificial Sequence: Synthetic oligonucleotide
  Sense strand starting at position 2525 of SEQ ID NO: 1560927
cccacaaucccgugcaaau

SEQ ID NO: 1634592 - RNA, 19 nt, Artificial Sequence
  Description of Artificial Sequence: Synthetic oligonucleotide
  Antisense strand to SEQ ID NO: 1634591
auuugcacgggauuguggg

SEQ ID NO: 1634593 - RNA, 19 nt, Artificial Sequence
  Description of Artificial Sequence: Synthetic oligonucleotide
  Sense strand starting at position 2611 of SEQ ID NO: 1560927
gggcgcguuugcacagaaa

SEQ ID NO: 1634594 - RNA, 19 nt, Artificial Sequence
  Description of Artificial Sequence: Synthetic oligonucleotide
  Antisense strand to SEQ ID NO: 1634593
uuucugugcaaacgcgccc

SEQ ID NO: 1634595 - RNA, 19 nt, Artificial Sequence
  Description of Artificial Sequence: Synthetic oligonucleotide
  Sense strand starting at position 3310 of SEQ ID NO: 1560927
gagucaaagaucuggcugu

SEQ ID NO: 1634596 - RNA, 19 nt, Artificial Sequence
  Description of Artificial Sequence: Synthetic oligonucleotide
  Antisense strand to SEQ ID NO: 1634595
acagccagaucuuugacuc

SEQ ID NO: 1634597 - RNA, 19 nt, Artificial Sequence
  Description of Artificial Sequence: Synthetic oligonucleotide
  Sense strand starting at position 3311 of SEQ ID NO: 1560927
agucaaagaucuggcuguu

SEQ ID NO: 1634598 - RNA, 19 nt, Artificial Sequence
  Description of Artificial Sequence: Synthetic oligonucleotide
  Antisense strand to SEQ ID NO: 1634597
aacagccagaucuuugacu

SEQ ID NO: 1634599 - RNA, 19 nt, Artificial Sequence
  Description of Artificial Sequence: Synthetic oligonucleotide
  Sense strand starting at position 58 of SEQ ID NO: 1560928
gcugguugaccucaaguga

SEQ ID NO: 1634600 - RNA, 19 nt, Artificial Sequence
  Description of Artificial Sequence: Synthetic oligonucleotide
  Antisense strand to SEQ ID NO: 1634599
ucacuugaggucaaccagc

SEQ ID NO: 1634601 - RNA, 19 nt, Artificial Sequence
  Description of Artificial Sequence: Synthetic oligonucleotide
  Sense strand starting at position 71 of SEQ ID NO: 1560928
aagugauccgaccauguca

SEQ ID NO: 1634602 - RNA, 19 nt, Artificial Sequence
  Description of Artificial Sequence: Synthetic oligonucleotide
  Antisense strand to SEQ ID NO: 1634601
ugacauggucggaucacuu

SEQ ID NO: 1634603 - RNA, 19 nt, Artificial Sequence
  Description of Artificial Sequence: Synthetic oligonucleotide
  Sense strand starting at position 191 of SEQ ID NO: 1560928
agugauuaccugugucuuu

SEQ ID NO: 1634604 - RNA, 19 nt, Artificial Sequence
  Description of Artificial Sequence: Synthetic oligonucleotide
  Antisense strand to SEQ ID NO: 1634603
aaagacacagguaaucacu

SEQ ID NO: 1634605 - RNA, 19 nt, Artificial Sequence
  Description of Artificial Sequence: Synthetic oligonucleotide
  Sense strand starting at position 253 of SEQ ID NO: 1560928
agauacuacuccuaggaaa

SEQ ID NO: 1634606 - RNA, 19 nt, Artificial Sequence
  Description of Artificial Sequence: Synthetic oligonucleotide
  Antisense strand to SEQ ID NO: 1634605
uuuccuaggaguaguaucu

SEQ ID NO: 1634607 - RNA, 19 nt, Artificial Sequence
  Description of Artificial Sequence: Synthetic oligonucleotide
  Sense strand starting at position 362 of SEQ ID NO: 1560928
cuggaucugucucccuaaa

SEQ ID NO: 1634608 - RNA, 19 nt, Artificial Sequence
  Description of Artificial Sequence: Synthetic oligonucleotide
  Antisense strand to SEQ ID NO: 1634607
uuuagggagacagauccag

SEQ ID NO: 1634609 - RNA, 19 nt, Artificial Sequence
  Description of Artificial Sequence: Synthetic oligonucleotide
  Sense strand starting at position 364 of SEQ ID NO: 1560928
ggaucugucucccuaaaca

SEQ ID NO: 1634610 - RNA, 19 nt, Artificial Sequence
  Description of Artificial Sequence: Synthetic oligonucleotide
  Antisense strand to SEQ ID NO: 1634609
uguuuagggagacagaucc

SEQ ID NO: 1634611 - RNA, 19 nt, Artificial Sequence
  Description of Artificial Sequence: Synthetic oligonucleotide
  Sense strand starting at position 427 of SEQ ID NO: 1560928
ucagcaagcacuuguggaa

SEQ ID NO: 1634612 - RNA, 19 nt, Artificial Sequence
  Description of Artificial Sequence: Synthetic oligonucleotide
  Antisense strand to SEQ ID NO: 1634611
uuccacaagugcuugcuga

SEQ ID NO: 1634613 - RNA, 19 nt, Artificial Sequence
  Description of Artificial Sequence: Synthetic oligonucleotide
  Sense strand starting at position 462 of SEQ ID NO: 1560928
ggcccaguuccaggaaagu

SEQ ID NO: 1634614 - RNA, 19 nt, Artificial Sequence
  Description of Artificial Sequence: Synthetic oligonucleotide
  Antisense strand to SEQ ID NO: 1634613
acuuuccuggaacugggcc

SEQ ID NO: 1634615 - RNA, 19 nt, Artificial Sequence
  Description of Artificial Sequence: Synthetic oligonucleotide
  Sense strand starting at position 510 of SEQ ID NO: 1560928
acucaucucugucucagua

SEQ ID NO: 1634616 - RNA, 19 nt, Artificial Sequence
  Description of Artificial Sequence: Synthetic oligonucleotide
  Antisense strand to SEQ ID NO: 1634615
uacugagacagagaugagu

SEQ ID NO: 1634617 - RNA, 19 nt, Artificial Sequence
  Description of Artificial Sequence: Synthetic oligonucleotide
  Sense strand starting at position 514 of SEQ ID NO: 1560928
aucucugucucaguaucaa

SEQ ID NO: 1634618 - RNA, 19 nt, Artificial Sequence
  Description of Artificial Sequence: Synthetic oligonucleotide
  Antisense strand to SEQ ID NO: 1634617
uugauacugagacagagau

SEQ ID NO: 1634619 - RNA, 19 nt, Artificial Sequence
  Description of Artificial Sequence: Synthetic oligonucleotide
  Sense strand starting at position 599 of SEQ ID NO: 1560928
gacguuuagcagggaguga

SEQ ID NO: 1634620 - RNA, 19 nt, Artificial Sequence
  Description of Artificial Sequence: Synthetic oligonucleotide
  Antisense strand to SEQ ID NO: 1634619
ucacucccugcuaaacguc

SEQ ID NO: 1634621 - RNA, 19 nt, Artificial Sequence
  Description of Artificial Sequence: Synthetic oligonucleotide
  Sense strand starting at position 657 of SEQ ID NO: 1560928
gacacugaggucugagauu

SEQ ID NO: 1634622 - RNA, 19 nt, Artificial Sequence
  Description of Artificial Sequence: Synthetic oligonucleotide
  Antisense strand to SEQ ID NO: 1634621
aaucucagaccucaguguc

SEQ ID NO: 1634623 - RNA, 19 nt, Artificial Sequence
  Description of Artificial Sequence: Synthetic oligonucleotide
  Sense strand starting at position 762 of SEQ ID NO: 1560928
gccuguggguuuagagaga

SEQ ID NO: 1634624 - RNA, 19 nt, Artificial Sequence
  Description of Artificial Sequence: Synthetic oligonucleotide
  Antisense strand to SEQ ID NO: 1634623
ucucucuaaacccacaggc

SEQ ID NO: 1634625 - RNA, 19 nt, Artificial Sequence
  Description of Artificial Sequence: Synthetic oligonucleotide
  Sense strand starting at position 792 of SEQ ID NO: 1560928
gcagaucugcaagaugauc

SEQ ID NO: 1634626 - RNA, 19 nt, Artificial Sequence
  Description of Artificial Sequence: Synthetic oligonucleotide
  Antisense strand to SEQ ID NO: 1634625
gaucaucuugcagaucugc

SEQ ID NO: 1634627 - RNA, 19 nt, Artificial Sequence
  Description of Artificial Sequence: Synthetic oligonucleotide
  Sense strand starting at position 803 of SEQ ID NO: 1560928
agaugaucugccggaggga

SEQ ID NO: 1634628 - RNA, 19 nt, Artificial Sequence
  Description of Artificial Sequence: Synthetic oligonucleotide
  Antisense strand to SEQ ID NO: 1634627
ucccuccggcagaucaucu

SEQ ID NO: 1634629 - RNA, 19 nt, Artificial Sequence
  Description of Artificial Sequence: Synthetic oligonucleotide
  Sense strand starting at position 899 of SEQ ID NO: 1560928
guccuauggugucuugaau

SEQ ID NO: 1634630 - RNA, 19 nt, Artificial Sequence
  Description of Artificial Sequence: Synthetic oligonucleotide
  Antisense strand to SEQ ID NO: 1634629
auucaagacaccauaggac

SEQ ID NO: 1634631 - RNA, 19 nt, Artificial Sequence
  Description of Artificial Sequence: Synthetic oligonucleotide
  Sense strand starting at position 905 of SEQ ID NO: 1560928
uggugucuugaaugcaaag

SEQ ID NO: 1634632 - RNA, 19 nt, Artificial Sequence
  Description of Artificial Sequence: Synthetic oligonucleotide
  Antisense strand to SEQ ID NO: 1634631
cuuugcauucaagacacca

SEQ ID NO: 1634633 - RNA, 19 nt, Artificial Sequence
  Description of Artificial Sequence: Synthetic oligonucleotide
  Sense strand starting at position 907 of SEQ ID NO: 1560928
gugucuugaaugcaaagau

SEQ ID NO: 1634634 - RNA, 19 nt, Artificial Sequence
  Description of Artificial Sequence: Synthetic oligonucleotide
  Antisense strand to SEQ ID NO: 1634633
aucuuugcauucaagacac

SEQ ID NO: 1634635 - RNA, 19 nt, Artificial Sequence
  Description of Artificial Sequence: Synthetic oligonucleotide
  Sense strand starting at position 916 of SEQ ID NO: 1560928
augcaaagauauguaguuu

SEQ ID NO: 1634636 - RNA, 19 nt, Artificial Sequence
  Description of Artificial Sequence: Synthetic oligonucleotide
  Antisense strand to SEQ ID NO: 1634635
aaacuacauaucuuugcau

SEQ ID NO: 1634637 - RNA, 19 nt, Artificial Sequence
  Description of Artificial Sequence: Synthetic oligonucleotide
  Sense strand starting at position 986 of SEQ ID NO: 1560928
cugugaugucuugaaugca

SEQ ID NO: 1634638 - RNA, 19 nt, Artificial Sequence
  Description of Artificial Sequence: Synthetic oligonucleotide
  Antisense strand to SEQ ID NO: 1634637
ugcauucaagacaucacag

SEQ ID NO: 1634639 - RNA, 19 nt, Artificial Sequence
  Description of Artificial Sequence: Synthetic oligonucleotide
  Sense strand starting at position 989 of SEQ ID NO: 1560928
ugaugucuugaaugcaaag

SEQ ID NO: 1634640 - RNA, 19 nt, Artificial Sequence
  Description of Artificial Sequence: Synthetic oligonucleotide
  Antisense strand to SEQ ID NO: 1634639
cuuugcauucaagacauca

SEQ ID NO: 1634641 - RNA, 19 nt, Artificial Sequence
  Description of Artificial Sequence: Synthetic oligonucleotide
  Sense strand starting at position 1129 of SEQ ID NO: 1560928
gccuuagaguggcuccuua

SEQ ID NO: 1634642 - RNA, 19 nt, Artificial Sequence
  Description of Artificial Sequence: Synthetic oligonucleotide
  Antisense strand to SEQ ID NO: 1634641
uaaggagccacucuaaggc

SEQ ID NO: 1634643 - RNA, 19 nt, Artificial Sequence
  Description of Artificial Sequence: Synthetic oligonucleotide
  Sense strand starting at position 1133 of SEQ ID NO: 1560928
uagaguggcuccuuagaag

SEQ ID NO: 1634644 - RNA, 19 nt, Artificial Sequence
  Description of Artificial Sequence: Synthetic oligonucleotide
  Antisense strand to SEQ ID NO: 1634643
cuucuaaggagccacucua

SEQ ID NO: 1634645 - RNA, 19 nt, Artificial Sequence
  Description of Artificial Sequence: Synthetic oligonucleotide
  Sense strand starting at position 1368 of SEQ ID NO: 1560928
gcaaaugguuucuucccau

SEQ ID NO: 1634646 - RNA, 19 nt, Artificial Sequence
  Description of Artificial Sequence: Synthetic oligonucleotide
  Antisense strand to SEQ ID NO: 1634645
augggaagaaaccauuugc

SEQ ID NO: 1634647 - RNA, 19 nt, Artificial Sequence
  Description of Artificial Sequence: Synthetic oligonucleotide
  Sense strand starting at position 2269 of SEQ ID NO: 1560928
uuaugagaguacccagauu

SEQ ID NO: 1634648 - RNA, 19 nt, Artificial Sequence
  Description of Artificial Sequence: Synthetic oligonucleotide
  Antisense strand to SEQ ID NO: 1634647
aaucuggguacucucauaa

SEQ ID NO: 1634649 - RNA, 19 nt, Artificial Sequence
  Description of Artificial Sequence: Synthetic oligonucleotide
  Sense strand starting at position 2309 of SEQ ID NO: 1560928
cugagaaucuugguguaag

SEQ ID NO: 1634650 - RNA, 19 nt, Artificial Sequence
  Description of Artificial Sequence: Synthetic oligonucleotide
  Antisense strand to SEQ ID NO: 1634649
cuuacaccaagauucucag

SEQ ID NO: 1634651 - RNA, 19 nt, Artificial Sequence
  Description of Artificial Sequence: Synthetic oligonucleotide
  Sense strand starting at position 2319 of SEQ ID NO: 1560928
ugguguaaggugcaacauu

SEQ ID NO: 1634652 - RNA, 19 nt, Artificial Sequence
  Description of Artificial Sequence: Synthetic oligonucleotide
  Antisense strand to SEQ ID NO: 1634651
aauguugcaccuuacacca

SEQ ID NO: 1634653 - RNA, 19 nt, Artificial Sequence
  Description of Artificial Sequence: Synthetic oligonucleotide
  Sense strand starting at position 2345 of SEQ ID NO: 1560928
gaaagaaauguaugccuug

SEQ ID NO: 1634654 - RNA, 19 nt, Artificial Sequence
  Description of Artificial Sequence: Synthetic oligonucleotide
  Antisense strand to SEQ ID NO: 1634653
caaggcauacauuucuuuc

SEQ ID NO: 1634655 - RNA, 19 nt, Artificial Sequence
  Description of Artificial Sequence: Synthetic oligonucleotide
  Sense strand starting at position 2348 of SEQ ID NO: 1560928
agaaauguaugccuugguu

SEQ ID NO: 1634656 - RNA, 19 nt, Artificial Sequence
  Description of Artificial Sequence: Synthetic oligonucleotide
  Antisense strand to SEQ ID NO: 1634655
aaccaaggcauacauuucu

SEQ ID NO: 1634657 - RNA, 19 nt, Artificial Sequence
  Description of Artificial Sequence: Synthetic oligonucleotide
  Sense strand starting at position 2418 of SEQ ID NO: 1560928
cugccauaggcuugccuaa

SEQ ID NO: 1634658 - RNA, 19 nt, Artificial Sequence
  Description of Artificial Sequence: Synthetic oligonucleotide
  Antisense strand to SEQ ID NO: 1634657
uuaggcaagccuauggcag

SEQ ID NO: 1634659 - RNA, 19 nt, Artificial Sequence
  Description of Artificial Sequence: Synthetic oligonucleotide
  Sense strand starting at position 2449 of SEQ ID NO: 1560928
ucuuguuugcuuuaaguag

SEQ ID NO: 1634660 - RNA, 19 nt, Artificial Sequence
  Description of Artificial Sequence: Synthetic oligonucleotide
  Antisense strand to SEQ ID NO: 1634659
cuacuuaaagcaaacaaga

SEQ ID NO: 1634661 - RNA, 19 nt, Artificial Sequence
  Description of Artificial Sequence: Synthetic oligonucleotide
  Sense strand starting at position 2475 of SEQ ID NO: 1560928
cccuguuggguuuacacaa

SEQ ID NO: 1634662 - RNA, 19 nt, Artificial Sequence
  Description of Artificial Sequence: Synthetic oligonucleotide
  Antisense strand to SEQ ID NO: 1634661
uuguguaaacccaacaggg

SEQ ID NO: 1634663 - RNA, 19 nt, Artificial Sequence
  Description of Artificial Sequence: Synthetic oligonucleotide
  Sense strand starting at position 2671 of SEQ ID NO: 1560928
aagugagucuugcuucuau

SEQ ID NO: 1634664 - RNA, 19 nt, Artificial Sequence
  Description of Artificial Sequence: Synthetic oligonucleotide
  Antisense strand to SEQ ID NO: 1634663
auagaagcaagacucacuu

SEQ ID NO: 1634665 - RNA, 19 nt, Artificial Sequence
  Description of Artificial Sequence: Synthetic oligonucleotide
  Sense strand starting at position 2829 of SEQ ID NO: 1560928
ccaccuuagucuccgagua

SEQ ID NO: 1634666 - RNA, 19 nt, Artificial Sequence
  Description of Artificial Sequence: Synthetic oligonucleotide
  Antisense strand to SEQ ID NO: 1634665
uacucggagacuaaggugg

SEQ ID NO: 1634667 - RNA, 19 nt, Artificial Sequence
  Description of Artificial Sequence: Synthetic oligonucleotide
  Sense strand starting at position 2995 of SEQ ID NO: 1560928
cuugguuuaaagugagaga

SEQ ID NO: 1634668 - RNA, 19 nt, Artificial Sequence
  Description of Artificial Sequence: Synthetic oligonucleotide
  Antisense strand to SEQ ID NO: 1634667
ucucucacuuuaaaccaag

SEQ ID NO: 1634669 - RNA, 19 nt, Artificial Sequence
  Description of Artificial Sequence: Synthetic oligonucleotide
  Sense strand starting at position 3690 of SEQ ID NO: 1560928
uggaguuugcuccagguaa

SEQ ID NO: 1634670 - RNA, 19 nt, Artificial Sequence
  Description of Artificial Sequence: Synthetic oligonucleotide
  Antisense strand to SEQ ID NO: 1634669
uuaccuggagcaaacucca

SEQ ID NO: 1634671 - RNA, 19 nt, Artificial Sequence
  Description of Artificial Sequence: Synthetic oligonucleotide
  Sense strand starting at position 3717 of SEQ ID NO: 1560928
gacugcuuccaugaaguaa

SEQ ID NO: 1634672 - RNA, 19 nt, Artificial Sequence
  Description of Artificial Sequence: Synthetic oligonucleotide
  Antisense strand to SEQ ID NO: 1634671
uuacuucauggaagcaguc

SEQ ID NO: 1634673 - RNA, 19 nt, Artificial Sequence
  Description of Artificial Sequence: Synthetic oligonucleotide
  Sense strand starting at position 3721 of SEQ ID NO: 1560928
gcuuccaugaaguaagguu

SEQ ID NO: 1634674 - RNA, 19 nt, Artificial Sequence
  Description of Artificial Sequence: Synthetic oligonucleotide
  Antisense strand to SEQ ID NO: 1634673
aaccuuacuucauggaagc

SEQ ID NO: 1634675 - RNA, 19 nt, Artificial Sequence
  Description of Artificial Sequence: Synthetic oligonucleotide
  Sense strand starting at position 3729 of SEQ ID NO: 1560928
gaaguaagguucuuccaua

SEQ ID NO: 1634676 - RNA, 19 nt, Artificial Sequence
  Description of Artificial Sequence: Synthetic oligonucleotide
  Antisense strand to SEQ ID NO: 1634675
uauggaagaaccuuacuuc

SEQ ID NO: 1634677 - RNA, 19 nt, Artificial Sequence
  Description of Artificial Sequence: Synthetic oligonucleotide
  Sense strand starting at position 3756 of SEQ ID NO: 1560928
ugguuaacaccuggacaga

SEQ ID NO: 1634678 - RNA, 19 nt, Artificial Sequence
  Description of Artificial Sequence: Synthetic oligonucleotide
  Antisense strand to SEQ ID NO: 1634677
ucuguccagguguuaacca

SEQ ID NO: 1634679 - RNA, 19 nt, Artificial Sequence
  Description of Artificial Sequence: Synthetic oligonucleotide
  Sense strand starting at position 1 of SEQ ID NO: 1560929
agaggagucugauguucca

SEQ ID NO: 1634680 - RNA, 19 nt, Artificial Sequence
  Description of Artificial Sequence: Synthetic oligonucleotide
  Antisense strand to SEQ ID NO: 1634679
uggaacaucagacuccucu

SEQ ID NO: 1634681 - RNA, 19 nt, Artificial Sequence
  Description of Artificial Sequence: Synthetic oligonucleotide
  Sense strand starting at position 198 of SEQ ID NO: 1560929
aaggucaaaugugcuuuaa

SEQ ID NO: 1634682 - RNA, 19 nt, Artificial Sequence
  Description of Artificial Sequence: Synthetic oligonucleotide
  Antisense strand to SEQ ID NO: 1634681
uuaaagcacauuugaccuu

SEQ ID NO: 1634683 - RNA, 19 nt, Artificial Sequence
  Description of Artificial Sequence: Synthetic oligonucleotide
  Sense strand starting at position 200 of SEQ ID NO: 1560929
ggucaaaugugcuuuaaug

SEQ ID NO: 1634684 - RNA, 19 nt, Artificial Sequence
  Description of Artificial Sequence: Synthetic oligonucleotide
  Antisense strand to SEQ ID NO: 1634683
cauuaaagcacauuugacc

SEQ ID NO: 1634685 - RNA, 19 nt, Artificial Sequence
  Description of Artificial Sequence: Synthetic oligonucleotide
  Sense strand starting at position 320 of SEQ ID NO: 1560929
aggccuuucucuugccaga

SEQ ID NO: 1634686 - RNA, 19 nt, Artificial Sequence
  Description of Artificial Sequence: Synthetic oligonucleotide
  Antisense strand to SEQ ID NO: 1634685
ucuggcaagagaaaggccu

SEQ ID NO: 1634687 - RNA, 19 nt, Artificial Sequence
  Description of Artificial Sequence: Synthetic oligonucleotide
  Sense strand starting at position 322 of SEQ ID NO: 1560929
gccuuucucuugccagaca

SEQ ID NO: 1634688 - RNA, 19 nt, Artificial Sequence
  Description of Artificial Sequence: Synthetic oligonucleotide
  Antisense strand to SEQ ID NO: 1634687
ugucuggcaagagaaaggc

SEQ ID NO: 1634689 - RNA, 19 nt, Artificial Sequence
  Description of Artificial Sequence: Synthetic oligonucleotide
  Sense strand starting at position 325 of SEQ ID NO: 1560929
uuucucuugccagacagaa

SEQ ID NO: 1634690 - RNA, 19 nt, Artificial Sequence
  Description of Artificial Sequence: Synthetic oligonucleotide
  Antisense strand to SEQ ID NO: 1634689
uucugucuggcaagagaaa

SEQ ID NO: 1634691 - RNA, 19 nt, Artificial Sequence
  Description of Artificial Sequence: Synthetic oligonucleotide
  Sense strand starting at position 395 of SEQ ID NO: 1560929
cgucgagcgccuugaaguu

SEQ ID NO: 1634692 - RNA, 19 nt, Artificial Sequence
  Description of Artificial Sequence: Synthetic oligonucleotide
  Antisense strand to SEQ ID NO: 1634691
aacuucaaggcgcucgacg

SEQ ID NO: 1634693 - RNA, 19 nt, Artificial Sequence
  Description of Artificial Sequence: Synthetic oligonucleotide
  Sense strand starting at position 401 of SEQ ID NO: 1560929
gcgccuugaaguugaagaa

SEQ ID NO: 1634694 - RNA, 19 nt, Artificial Sequence
  Description of Artificial Sequence: Synthetic oligonucleotide
  Antisense strand to SEQ ID NO: 1634693
uucuucaacuucaaggcgc

SEQ ID NO: 1634695 - RNA, 19 nt, Artificial Sequence
  Description of Artificial Sequence: Synthetic oligonucleotide
  Sense strand starting at position 413 of SEQ ID NO: 1560929
ugaagaaguagucaacguu

SEQ ID NO: 1634696 - RNA, 19 nt, Artificial Sequence
  Description of Artificial Sequence: Synthetic oligonucleotide
  Antisense strand to SEQ ID NO: 1634695
aacguugacuacuucuuca

SEQ ID NO: 1634697 - RNA, 19 nt, Artificial Sequence
  Description of Artificial Sequence: Synthetic oligonucleotide
  Sense strand starting at position 416 of SEQ ID NO: 1560929
agaaguagucaacguugga

SEQ ID NO: 1634698 - RNA, 19 nt, Artificial Sequence
  Description of Artificial Sequence: Synthetic oligonucleotide
  Antisense strand to SEQ ID NO: 1634697
uccaacguugacuacuucu

SEQ ID NO: 1634699 - RNA, 19 nt, Artificial Sequence
  Description of Artificial Sequence: Synthetic oligonucleotide
  Sense strand starting at position 502 of SEQ ID NO: 1560929
cggaugucaucggcugagu

SEQ ID NO: 1634700 - RNA, 19 nt, Artificial Sequence
  Description of Artificial Sequence: Synthetic oligonucleotide
  Antisense strand to SEQ ID NO: 1634699
acucagccgaugacauccg

SEQ ID NO: 1634701 - RNA, 19 nt, Artificial Sequence
  Description of Artificial Sequence: Synthetic oligonucleotide
  Sense strand starting at position 1228 of SEQ ID NO: 1560929
guccacucgauccgauaga

SEQ ID NO: 1634702 - RNA, 19 nt, Artificial Sequence
  Description of Artificial Sequence: Synthetic oligonucleotide
  Antisense strand to SEQ ID NO: 1634701
ucuaucggaucgaguggac

SEQ ID NO: 1634703 - RNA, 19 nt, Artificial Sequence
  Description of Artificial Sequence: Synthetic oligonucleotide
  Sense strand starting at position 1229 of SEQ ID NO: 1560929
uccacucgauccgauagau

SEQ ID NO: 1634704 - RNA, 19 nt, Artificial Sequence
  Description of Artificial Sequence: Synthetic oligonucleotide
  Antisense strand to SEQ ID NO: 1634703
aucuaucggaucgagugga

SEQ ID NO: 1634705 - RNA, 19 nt, Artificial Sequence
  Description of Artificial Sequence: Synthetic oligonucleotide
  Sense strand starting at position 1436 of SEQ ID NO: 1560929
cugggugauggaugacaca

SEQ ID NO: 1634706 - RNA, 19 nt, Artificial Sequence
  Description of Artificial Sequence: Synthetic oligonucleotide
  Antisense strand to SEQ ID NO: 1634705
ugugucauccaucacccag

SEQ ID NO: 1634707 - RNA, 19 nt, Artificial Sequence
  Description of Artificial Sequence: Synthetic oligonucleotide
  Sense strand starting at position 1987 of SEQ ID NO: 1560929
gguucuguuugccugguua

SEQ ID NO: 1634708 - RNA, 19 nt, Artificial Sequence
  Description of Artificial Sequence: Synthetic oligonucleotide
  Antisense strand to SEQ ID NO: 1634707
uaaccaggcaaacagaacc

SEQ ID NO: 1634709 - RNA, 19 nt, Artificial Sequence
  Description of Artificial Sequence: Synthetic oligonucleotide
  Sense strand starting at position 1989 of SEQ ID NO: 1560929
uucuguuugccugguuacu

SEQ ID NO: 1634710 - RNA, 19 nt, Artificial Sequence
  Description of Artificial Sequence: Synthetic oligonucleotide
  Antisense strand to SEQ ID NO: 1634709
aguaaccaggcaaacagaa

SEQ ID NO: 1634711 - RNA, 19 nt, Artificial Sequence
  Description of Artificial Sequence: Synthetic oligonucleotide
  Sense strand starting at position 2452 of SEQ ID NO: 1560929
uggccuugugcuucggcaa

SEQ ID NO: 1634712 - RNA, 19 nt, Artificial Sequence
  Description of Artificial Sequence: Synthetic oligonucleotide
  Antisense strand to SEQ ID NO: 1634711
uugccgaagcacaaggcca

SEQ ID NO: 1634713 - RNA, 19 nt, Artificial Sequence
  Description of Artificial Sequence: Synthetic oligonucleotide
  Sense strand starting at position 2455 of SEQ ID NO: 1560929
ccuugugcuucggcaagaa

SEQ ID NO: 1634714 - RNA, 19 nt, Artificial Sequence
  Description of Artificial Sequence: Synthetic oligonucleotide
  Antisense strand to SEQ ID NO: 1634713
uucuugccgaagcacaagg

SEQ ID NO: 1634715 - RNA, 19 nt, Artificial Sequence
  Description of Artificial Sequence: Synthetic oligonucleotide
  Sense strand starting at position 2500 of SEQ ID NO: 1560929
ggagcaucucgcuguggga

SEQ ID NO: 1634716 - RNA, 19 nt, Artificial Sequence
  Description of Artificial Sequence: Synthetic oligonucleotide
  Antisense strand to SEQ ID NO: 1634715
ucccacagcgagaugcucc

SEQ ID NO: 1634717 - RNA, 19 nt, Artificial Sequence
  Description of Artificial Sequence: Synthetic oligonucleotide
  Sense strand starting at position 2771 of SEQ ID NO: 1560929
aggcuugagucagcucuaa

SEQ ID NO: 1634718 - RNA, 19 nt, Artificial Sequence
  Description of Artificial Sequence: Synthetic oligonucleotide
  Antisense strand to SEQ ID NO: 1634717
uuagagcugacucaagccu

SEQ ID NO: 1634719 - RNA, 19 nt, Artificial Sequence
  Description of Artificial Sequence: Synthetic oligonucleotide
  Sense strand starting at position 2927 of SEQ ID NO: 1560929
ggugaagucccgcaggaug

SEQ ID NO: 1634720 - RNA, 19 nt, Artificial Sequence
  Description of Artificial Sequence: Synthetic oligonucleotide
  Antisense strand to SEQ ID NO: 1634719
cauccugcgggacuucacc

SEQ ID NO: 1634721 - RNA, 19 nt, Artificial Sequence
  Description of Artificial Sequence: Synthetic oligonucleotide
  Sense strand starting at position 2983 of SEQ ID NO: 1560929
gcuccuugaucuccgugaa

SEQ ID NO: 1634722 - RNA, 19 nt, Artificial Sequence
  Description of Artificial Sequence: Synthetic oligonucleotide
  Antisense strand to SEQ ID NO: 1634721
uucacggagaucaaggagc

SEQ ID NO: 1634723 - RNA, 19 nt, Artificial Sequence
  Description of Artificial Sequence: Synthetic oligonucleotide
  Sense strand starting at position 2984 of SEQ ID NO: 1560929
cuccuugaucuccgugaag

SEQ ID NO: 1634724 - RNA, 19 nt, Artificial Sequence
  Description of Artificial Sequence: Synthetic oligonucleotide
  Antisense strand to SEQ ID NO: 1634723
cuucacggagaucaaggag

SEQ ID NO: 1634725 - RNA, 19 nt, Artificial Sequence
  Description of Artificial Sequence: Synthetic oligonucleotide
  Sense strand starting at position 2986 of SEQ ID NO: 1560929
ccuugaucuccgugaagag

SEQ ID NO: 1634726 - RNA, 19 nt, Artificial Sequence
  Description of Artificial Sequence: Synthetic oligonucleotide
  Antisense strand to SEQ ID NO: 1634725
cucuucacggagaucaagg

SEQ ID NO: 1634727 - RNA, 19 nt, Artificial Sequence
  Description of Artificial Sequence: Synthetic oligonucleotide
  Sense strand starting at position 3694 of SEQ ID NO: 1560929
gcacuuaccgggcaaucau

SEQ ID NO: 1634728 - RNA, 19 nt, Artificial Sequence
  Description of Artificial Sequence: Synthetic oligonucleotide
  Antisense strand to SEQ ID NO: 1634727
augauugcccgguaagugc

SEQ ID NO: 1634729 - RNA, 19 nt, Artificial Sequence
  Description of Artificial Sequence: Synthetic oligonucleotide
  Sense strand starting at position 3707 of SEQ ID NO: 1560929
aaucaugaucccggugaca

SEQ ID NO: 1634730 - RNA, 19 nt, Artificial Sequence
  Description of Artificial Sequence: Synthetic oligonucleotide
  Antisense strand to SEQ ID NO: 1634729
ugucaccgggaucaugauu

SEQ ID NO: 1634731 - RNA, 19 nt, Artificial Sequence
  Description of Artificial Sequence: Synthetic oligonucleotide
  Sense strand starting at position 3739 of SEQ ID NO: 1560929
cgcgguuggcauccucaaa

SEQ ID NO: 1634732 - RNA, 19 nt, Artificial Sequence
  Description of Artificial Sequence: Synthetic oligonucleotide
  Antisense strand to SEQ ID NO: 1634731
uuugaggaugccaaccgcg

SEQ ID NO: 1634733 - RNA, 19 nt, Artificial Sequence
  Description of Artificial Sequence: Synthetic oligonucleotide
  Sense strand starting at position 3770 of SEQ ID NO: 1560929
cccauuuccugaggagaca

SEQ ID NO: 1634734 - RNA, 19 nt, Artificial Sequence
  Description of Artificial Sequence: Synthetic oligonucleotide
  Antisense strand to SEQ ID NO: 1634733
ugucuccucaggaaauggg

SEQ ID NO: 1634735 - RNA, 19 nt, Artificial Sequence
  Description of Artificial Sequence: Synthetic oligonucleotide
  Sense strand starting at position 305 of SEQ ID NO: 1560930
cccggaagugucuggagaa

SEQ ID NO: 1634736 - RNA, 19 nt, Artificial Sequence
  Description of Artificial Sequence: Synthetic oligonucleotide
  Antisense strand to SEQ ID NO: 1634735
uucuccagacacuuccggg

SEQ ID NO: 1634737 - RNA, 19 nt, Artificial Sequence
  Description of Artificial Sequence: Synthetic oligonucleotide
  Sense strand starting at position 306 of SEQ ID NO: 1560930
ccggaagugucuggagaaa

SEQ ID NO: 1634738 - RNA, 19 nt, Artificial Sequence
  Description of Artificial Sequence: Synthetic oligonucleotide
  Antisense strand to SEQ ID NO: 1634737
uuucuccagacacuuccgg

SEQ ID NO: 1634739 - RNA, 19 nt, Artificial Sequence
  Description of Artificial Sequence: Synthetic oligonucleotide
  Sense strand starting at position 470 of SEQ ID NO: 1560930
acaguuuccuccgcugaga

SEQ ID NO: 1634740 - RNA, 19 nt, Artificial Sequence
  Description of Artificial Sequence: Synthetic oligonucleotide
  Antisense strand to SEQ ID NO: 1634739
ucucagcggaggaaacugu

SEQ ID NO: 1634741 - RNA, 19 nt, Artificial Sequence
  Description of Artificial Sequence: Synthetic oligonucleotide
  Sense strand starting at position 472 of SEQ ID NO: 1560930
aguuuccuccgcugagauc

SEQ ID NO: 1634742 - RNA, 19 nt, Artificial Sequence
  Description of Artificial Sequence: Synthetic oligonucleotide
  Antisense strand to SEQ ID NO: 1634741
gaucucagcggaggaaacu

SEQ ID NO: 1634743 - RNA, 19 nt, Artificial Sequence
  Description of Artificial Sequence: Synthetic oligonucleotide
  Sense strand starting at position 636 of SEQ ID NO: 1560930
cccaauuugugcccaguga

SEQ ID NO: 1634744 - RNA, 19 nt, Artificial Sequence
  Description of Artificial Sequence: Synthetic oligonucleotide
  Antisense strand to SEQ ID NO: 1634743
ucacugggcacaaauuggg

SEQ ID NO: 1634745 - RNA, 19 nt, Artificial Sequence
  Description of Artificial Sequence: Synthetic oligonucleotide
  Sense strand starting at position 800 of SEQ ID NO: 1560930
gcugguguucuuggcagga

SEQ ID NO: 1634746 - RNA, 19 nt, Artificial Sequence
  Description of Artificial Sequence: Synthetic oligonucleotide
  Antisense strand to SEQ ID NO: 1634745
uccugccaagaacaccagc

SEQ ID NO: 1634747 - RNA, 19 nt, Artificial Sequence
  Description of Artificial Sequence: Synthetic oligonucleotide
  Sense strand starting at position 987 of SEQ ID NO: 1560930
gggaacuugucccagcacu

SEQ ID NO: 1634748 - RNA, 19 nt, Artificial Sequence
  Description of Artificial Sequence: Synthetic oligonucleotide
  Antisense strand to SEQ ID NO: 1634747
agugcugggacaaguuccc

SEQ ID NO: 1634749 - RNA, 19 nt, Artificial Sequence
  Description of Artificial Sequence: Synthetic oligonucleotide
  Sense strand starting at position 1024 of SEQ ID NO: 1560930
gggagcagacucgggaaua

SEQ ID NO: 1634750 - RNA, 19 nt, Artificial Sequence
  Description of Artificial Sequence: Synthetic oligonucleotide
  Antisense strand to SEQ ID NO: 1634749
uauucccgagucugcuccc

SEQ ID NO: 1634751 - RNA, 19 nt, Artificial Sequence
  Description of Artificial Sequence: Synthetic oligonucleotide
  Sense strand starting at position 2366 of SEQ ID NO: 1560930
aguccuucgcgucugcgaa

SEQ ID NO: 1634752 - RNA, 19 nt, Artificial Sequence
  Description of Artificial Sequence: Synthetic oligonucleotide
  Antisense strand to SEQ ID NO: 1634751
uucgcagacgcgaaggacu

SEQ ID NO: 1634753 - RNA, 19 nt, Artificial Sequence
  Description of Artificial Sequence: Synthetic oligonucleotide
  Sense strand starting at position 2367 of SEQ ID NO: 1560930
guccuucgcgucugcgaaa

SEQ ID NO: 1634754 - RNA, 19 nt, Artificial Sequence
  Description of Artificial Sequence: Synthetic oligonucleotide
  Antisense strand to SEQ ID NO: 1634753
uuucgcagacgcgaaggac

SEQ ID NO: 1634755 - RNA, 19 nt, Artificial Sequence
  Description of Artificial Sequence: Synthetic oligonucleotide
  Sense strand starting at position 2499 of SEQ ID NO: 1560930
gaaugcugcccugggaauu

SEQ ID NO: 1634756 - RNA, 19 nt, Artificial Sequence
  Description of Artificial Sequence: Synthetic oligonucleotide
  Antisense strand to SEQ ID NO: 1634755
aauucccagggcagcauuc

SEQ ID NO: 1634757 - RNA, 19 nt, Artificial Sequence
  Description of Artificial Sequence: Synthetic oligonucleotide
  Sense strand starting at position 2588 of SEQ ID NO: 1560930
cacaguauauucugugaga

SEQ ID NO: 1634758 - RNA, 19 nt, Artificial Sequence
  Description of Artificial Sequence: Synthetic oligonucleotide
  Antisense strand to SEQ ID NO: 1634757
ucucacagaauauacugug

SEQ ID NO: 1634759 - RNA, 19 nt, Artificial Sequence
  Description of Artificial Sequence: Synthetic oligonucleotide
  Sense strand starting at position 2589 of SEQ ID NO: 1560930
acaguauauucugugagag

SEQ ID NO: 1634760 - RNA, 19 nt, Artificial Sequence
  Description of Artificial Sequence: Synthetic oligonucleotide
  Antisense strand to SEQ ID NO: 1634759
cucucacagaauauacugu

SEQ ID NO: 1634761 - RNA, 19 nt, Artificial Sequence
  Description of Artificial Sequence: Synthetic oligonucleotide
  Sense strand starting at position 2590 of SEQ ID NO: 1560930
caguauauucugugagagg

SEQ ID NO: 1634762 - RNA, 19 nt, Artificial Sequence
  Description of Artificial Sequence: Synthetic oligonucleotide
  Antisense strand to SEQ ID NO: 1634761
ccucucacagaauauacug

SEQ ID NO: 1634763 - RNA, 19 nt, Artificial Sequence
  Description of Artificial Sequence: Synthetic oligonucleotide
  Sense strand starting at position 2591 of SEQ ID NO: 1560930
aguauauucugugagaggu

SEQ ID NO: 1634764 - RNA, 19 nt, Artificial Sequence
  Description of Artificial Sequence: Synthetic oligonucleotide
  Antisense strand to SEQ ID NO: 1634763
accucucacagaauauacu

SEQ ID NO: 1634765 - RNA, 19 nt, Artificial Sequence
  Description of Artificial Sequence: Synthetic oligonucleotide
  Sense strand starting at position 2593 of SEQ ID NO: 1560930
uauauucugugagagguga

SEQ ID NO: 1634766 - RNA, 19 nt, Artificial Sequence
  Description of Artificial Sequence: Synthetic oligonucleotide
  Antisense strand to SEQ ID NO: 1634765
ucaccucucacagaauaua

SEQ ID NO: 1634767 - RNA, 19 nt, Artificial Sequence
  Description of Artificial Sequence: Synthetic oligonucleotide
  Sense strand starting at position 2726 of SEQ ID NO: 1560930
cgaccuagcaggugucaaa

SEQ ID NO: 1634768 - RNA, 19 nt, Artificial Sequence
  Description of Artificial Sequence: Synthetic oligonucleotide
  Antisense strand to SEQ ID NO: 1634767
uuugacaccugcuaggucg

SEQ ID NO: 1634769 - RNA, 19 nt, Artificial Sequence
  Description of Artificial Sequence: Synthetic oligonucleotide
  Sense strand starting at position 3086 of SEQ ID NO: 1560930
cgcagaagauccuuuacaa

SEQ ID NO: 1634770 - RNA, 19 nt, Artificial Sequence
  Description of Artificial Sequence: Synthetic oligonucleotide
  Antisense strand to SEQ ID NO: 1634769
uuguaaaggaucuucugcg

SEQ ID NO: 1634771 - RNA, 19 nt, Artificial Sequence
  Description of Artificial Sequence: Synthetic oligonucleotide
  Sense strand starting at position 3451 of SEQ ID NO: 1560930
cugaguauggccugaguau

SEQ ID NO: 1634772 - RNA, 19 nt, Artificial Sequence
  Description of Artificial Sequence: Synthetic oligonucleotide
  Antisense strand to SEQ ID NO: 1634771
auacucaggccauacucag

SEQ ID NO: 1634773 - RNA, 19 nt, Artificial Sequence
  Description of Artificial Sequence: Synthetic oligonucleotide
  Sense strand starting at position 3452 of SEQ ID NO: 1560930
ugaguauggccugaguaug

SEQ ID NO: 1634774 - RNA, 19 nt, Artificial Sequence
  Description of Artificial Sequence: Synthetic oligonucleotide
  Antisense strand to SEQ ID NO: 1634773
cauacucaggccauacuca

SEQ ID NO: 1634775 - RNA, 19 nt, Artificial Sequence
  Description of Artificial Sequence: Synthetic oligonucleotide
  Sense strand starting at position 3460 of SEQ ID NO: 1560930
gccugaguauggcugagaa

SEQ ID NO: 1634776 - RNA, 19 nt, Artificial Sequence
  Description of Artificial Sequence: Synthetic oligonucleotide
  Antisense strand to SEQ ID NO: 1634775
uucucagccauacucaggc

SEQ ID NO: 1634777 - RNA, 19 nt, Artificial Sequence
  Description of Artificial Sequence: Synthetic oligonucleotide
  Sense strand starting at position 3462 of SEQ ID NO: 1560930
cugaguauggcugagaaug

SEQ ID NO: 1634778 - RNA, 19 nt, Artificial Sequence
  Description of Artificial Sequence: Synthetic oligonucleotide
  Antisense strand to SEQ ID NO: 1634777
cauucucagccauacucag

SEQ ID NO: 1634779 - RNA, 19 nt, Artificial Sequence
  Description of Artificial Sequence: Synthetic oligonucleotide
  Sense strand starting at position 3635 of SEQ ID NO: 1560930
gagcuuuccgccuggaugu

SEQ ID NO: 1634780 - RNA, 19 nt, Artificial Sequence
  Description of Artificial Sequence: Synthetic oligonucleotide
  Antisense strand to SEQ ID NO: 1634779
acauccaggcggaaagcuc

SEQ ID NO: 1634781 - RNA, 19 nt, Artificial Sequence
  Description of Artificial Sequence: Synthetic oligonucleotide
  Sense strand starting at position 3652 of SEQ ID NO: 1560930
gucgcaucccuccagacuu

SEQ ID NO: 1634782 - RNA, 19 nt, Artificial Sequence
  Description of Artificial Sequence: Synthetic oligonucleotide
  Antisense strand to SEQ ID NO: 1634781
aagucuggagggaugcgac

SEQ ID NO: 1634783 - RNA, 19 nt, Artificial Sequence
  Description of Artificial Sequence: Synthetic oligonucleotide
  Sense strand starting at position 3838 of SEQ ID NO: 1560930
ggacguugcgcccauuuga

SEQ ID NO: 1634784 - RNA, 19 nt, Artificial Sequence
  Description of Artificial Sequence: Synthetic oligonucleotide
  Antisense strand to SEQ ID NO: 1634783
ucaaaugggcgcaacgucc

SEQ ID NO: 1634785 - RNA, 19 nt, Artificial Sequence
  Description of Artificial Sequence: Synthetic oligonucleotide
  Sense strand starting at position 3920 of SEQ ID NO: 1560930
uggaucauccuaggccuua

SEQ ID NO: 1634786 - RNA, 19 nt, Artificial Sequence
  Description of Artificial Sequence: Synthetic oligonucleotide
  Antisense strand to SEQ ID NO: 1634785
uaaggccuaggaugaucca

SEQ ID NO: 1634787 - RNA, 19 nt, Artificial Sequence
  Description of Artificial Sequence: Synthetic oligonucleotide
  Sense strand starting at position 3921 of SEQ ID NO: 1560930
ggaucauccuaggccuuau

SEQ ID NO: 1634788 - RNA, 19 nt, Artificial Sequence
  Description of Artificial Sequence: Synthetic oligonucleotide
  Antisense strand to SEQ ID NO: 1634787
auaaggccuaggaugaucc

SEQ ID NO: 1634789 - RNA, 19 nt, Artificial Sequence
  Description of Artificial Sequence: Synthetic oligonucleotide
  Sense strand starting at position 3945 of SEQ ID NO: 1560930
cccucagucuagcaaugau

SEQ ID NO: 1634790 - RNA, 19 nt, Artificial Sequence
  Description of Artificial Sequence: Synthetic oligonucleotide
  Antisense strand to SEQ ID NO: 1634789
aucauugcuagacugaggg

SEQ ID NO: 1634791 - RNA, 19 nt, Artificial Sequence
  Description of Artificial Sequence: Synthetic oligonucleotide
  Sense strand starting at position 3958 of SEQ ID NO: 1560930
aaugaucacccgugugaac

SEQ ID NO: 1634792 - RNA, 19 nt, Artificial Sequence
  Description of Artificial Sequence: Synthetic oligonucleotide
  Antisense strand to SEQ ID NO: 1634791
guucacacgggugaucauu

SEQ ID NO: 1634793 - RNA, 19 nt, Artificial Sequence
  Description of Artificial Sequence: Synthetic oligonucleotide
  Sense strand starting at position 157 of SEQ ID NO: 1560931
cuuagucccuggguaauga

SEQ ID NO: 1634794 - RNA, 19 nt, Artificial Sequence
  Description of Artificial Sequence: Synthetic oligonucleotide
  Antisense strand to SEQ ID NO: 1634793
ucauuacccagggacuaag

SEQ ID NO: 1634795 - RNA, 19 nt, Artificial Sequence
  Description of Artificial Sequence: Synthetic oligonucleotide
  Sense strand starting at position 252 of SEQ ID NO: 1560931
gccagauacuguuuaccua

SEQ ID NO: 1634796 - RNA, 19 nt, Artificial Sequence
  Description of Artificial Sequence: Synthetic oligonucleotide
  Antisense strand to SEQ ID NO: 1634795
uagguaaacaguaucuggc

SEQ ID NO: 1634797 - RNA, 19 nt, Artificial Sequence
  Description of Artificial Sequence: Synthetic oligonucleotide
  Sense strand starting at position 253 of SEQ ID NO: 1560931
ccagauacuguuuaccuau

SEQ ID NO: 1634798 - RNA, 19 nt, Artificial Sequence
  Description of Artificial Sequence: Synthetic oligonucleotide
  Antisense strand to SEQ ID NO: 1634797
auagguaaacaguaucugg

SEQ ID NO: 1634799 - RNA, 19 nt, Artificial Sequence
  Description of Artificial Sequence: Synthetic oligonucleotide
  Sense strand starting at position 255 of SEQ ID NO: 1560931
agauacuguuuaccuauau

SEQ ID NO: 1634800 - RNA, 19 nt, Artificial Sequence
  Description of Artificial Sequence: Synthetic oligonucleotide
  Antisense strand to SEQ ID NO: 1634799
auauagguaaacaguaucu

SEQ ID NO: 1634801 - RNA, 19 nt, Artificial Sequence
  Description of Artificial Sequence: Synthetic oligonucleotide
  Sense strand starting at position 1490 of SEQ ID NO: 1560931
caguguccgccagagaaga

SEQ ID NO: 1634802 - RNA, 19 nt, Artificial Sequence
  Description of Artificial Sequence: Synthetic oligonucleotide
  Antisense strand to SEQ ID NO: 1634801
ucuucucuggcggacacug

SEQ ID NO: 1634803 - RNA, 19 nt, Artificial Sequence
  Description of Artificial Sequence: Synthetic oligonucleotide
  Sense strand starting at position 1560 of SEQ ID NO: 1560931
ugacacagaugcuuauaaa

SEQ ID NO: 1634804 - RNA, 19 nt, Artificial Sequence
  Description of Artificial Sequence: Synthetic oligonucleotide
  Antisense strand to SEQ ID NO: 1634803
uuuauaagcaucuguguca

SEQ ID NO: 1634805 - RNA, 19 nt, Artificial Sequence
  Description of Artificial Sequence: Synthetic oligonucleotide
  Sense strand starting at position 1576 of SEQ ID NO: 1560931
aaacauguccacuggugau

SEQ ID NO: 1634806 - RNA, 19 nt, Artificial Sequence
  Description of Artificial Sequence: Synthetic oligonucleotide
  Antisense strand to SEQ ID NO: 1634805
aucaccaguggacauguuu

SEQ ID NO: 1634807 - RNA, 19 nt, Artificial Sequence
  Description of Artificial Sequence: Synthetic oligonucleotide
  Sense strand starting at position 1586 of SEQ ID NO: 1560931
acuggugaucuggagucuu

SEQ ID NO: 1634808 - RNA, 19 nt, Artificial Sequence
  Description of Artificial Sequence: Synthetic oligonucleotide
  Antisense strand to SEQ ID NO: 1634807
aagacuccagaucaccagu

SEQ ID NO: 1634809 - RNA, 19 nt, Artificial Sequence
  Description of Artificial Sequence: Synthetic oligonucleotide
  Sense strand starting at position 1823 of SEQ ID NO: 1560931
gcucuuccuccagggacau

SEQ ID NO: 1634810 - RNA, 19 nt, Artificial Sequence
  Description of Artificial Sequence: Synthetic oligonucleotide
  Antisense strand to SEQ ID NO: 1634809
augucccuggaggaagagc

SEQ ID NO: 1634811 - RNA, 19 nt, Artificial Sequence
  Description of Artificial Sequence: Synthetic oligonucleotide
  Sense strand starting at position 1824 of SEQ ID NO: 1560931
cucuuccuccagggacauu

SEQ ID NO: 1634812 - RNA, 19 nt, Artificial Sequence
  Description of Artificial Sequence: Synthetic oligonucleotide
  Antisense strand to SEQ ID NO: 1634811
aaugucccuggaggaagag

SEQ ID NO: 1634813 - RNA, 19 nt, Artificial Sequence
  Description of Artificial Sequence: Synthetic oligonucleotide
  Sense strand starting at position 2092 of SEQ ID NO: 1560931
gccagagcuccaugaggaa

SEQ ID NO: 1634814 - RNA, 19 nt, Artificial Sequence
  Description of Artificial Sequence: Synthetic oligonucleotide
  Antisense strand to SEQ ID NO: 1634813
uuccucauggagcucuggc

SEQ ID NO: 1634815 - RNA, 19 nt, Artificial Sequence
  Description of Artificial Sequence: Synthetic oligonucleotide
  Sense strand starting at position 2118 of SEQ ID NO: 1560931
ugucgaauaccaugggaua

SEQ ID NO: 1634816 - RNA, 19 nt, Artificial Sequence
  Description of Artificial Sequence: Synthetic oligonucleotide
  Antisense strand to SEQ ID NO: 1634815
uaucccaugguauucgaca

SEQ ID NO: 1634817 - RNA, 19 nt, Artificial Sequence
  Description of Artificial Sequence: Synthetic oligonucleotide
  Sense strand starting at position 2231 of SEQ ID NO: 1560931
auaucuaggucucuaggua

SEQ ID NO: 1634818 - RNA, 19 nt, Artificial Sequence
  Description of Artificial Sequence: Synthetic oligonucleotide
  Antisense strand to SEQ ID NO: 1634817
uaccuagagaccuagauau

SEQ ID NO: 1634819 - RNA, 19 nt, Artificial Sequence
  Description of Artificial Sequence: Synthetic oligonucleotide
  Sense strand starting at position 2232 of SEQ ID NO: 1560931
uaucuaggucucuagguau

SEQ ID NO: 1634820 - RNA, 19 nt, Artificial Sequence
  Description of Artificial Sequence: Synthetic oligonucleotide
  Antisense strand to SEQ ID NO: 1634819
auaccuagagaccuagaua

SEQ ID NO: 1634821 - RNA, 19 nt, Artificial Sequence
  Description of Artificial Sequence: Synthetic oligonucleotide
  Sense strand starting at position 2235 of SEQ ID NO: 1560931
cuaggucucuagguaucua

SEQ ID NO: 1634822 - RNA, 19 nt, Artificial Sequence
  Description of Artificial Sequence: Synthetic oligonucleotide
  Antisense strand to SEQ ID NO: 1634821
uagauaccuagagaccuag

SEQ ID NO: 1634823 - RNA, 19 nt, Artificial Sequence
  Description of Artificial Sequence: Synthetic oligonucleotide
  Sense strand starting at position 2239 of SEQ ID NO: 1560931
gucucuagguaucuagaaa

SEQ ID NO: 1634824 - RNA, 19 nt, Artificial Sequence
  Description of Artificial Sequence: Synthetic oligonucleotide
  Antisense strand to SEQ ID NO: 1634823
uuucuagauaccuagagac

SEQ ID NO: 1634825 - RNA, 19 nt, Artificial Sequence
  Description of Artificial Sequence: Synthetic oligonucleotide
  Sense strand starting at position 2308 of SEQ ID NO: 1560931
guaaaucccuguuuccuga

SEQ ID NO: 1634826 - RNA, 19 nt, Artificial Sequence
  Description of Artificial Sequence: Synthetic oligonucleotide
  Antisense strand to SEQ ID NO: 1634825
ucaggaaacagggauuuac

SEQ ID NO: 1634827 - RNA, 19 nt, Artificial Sequence
  Description of Artificial Sequence: Synthetic oligonucleotide
  Sense strand starting at position 2432 of SEQ ID NO: 1560931
gaugauauauuugggaaag

SEQ ID NO: 1634828 - RNA, 19 nt, Artificial Sequence
  Description of Artificial Sequence: Synthetic oligonucleotide
  Antisense strand to SEQ ID NO: 1634827
cuuucccaaauauaucauc

SEQ ID NO: 1634829 - RNA, 19 nt, Artificial Sequence
  Description of Artificial Sequence: Synthetic oligonucleotide
  Sense strand starting at position 2433 of SEQ ID NO: 1560931
augauauauuugggaaagu

SEQ ID NO: 1634830 - RNA, 19 nt, Artificial Sequence
  Description of Artificial Sequence: Synthetic oligonucleotide
  Antisense strand to SEQ ID NO: 1634829
acuuucccaaauauaucau

SEQ ID NO: 1634831 - RNA, 19 nt, Artificial Sequence
  Description of Artificial Sequence: Synthetic oligonucleotide
  Sense strand starting at position 2434 of SEQ ID NO: 1560931
ugauauauuugggaaagug

SEQ ID NO: 1634832 - RNA, 19 nt, Artificial Sequence
  Description of Artificial Sequence: Synthetic oligonucleotide
  Antisense strand to SEQ ID NO: 1634831
cacuuucccaaauauauca

SEQ ID NO: 1634833 - RNA, 19 nt, Artificial Sequence
  Description of Artificial Sequence: Synthetic oligonucleotide
  Sense strand starting at position 2471 of SEQ ID NO: 1560931
ggaagugauuaguccuuaa

SEQ ID NO: 1634834 - RNA, 19 nt, Artificial Sequence
  Description of Artificial Sequence: Synthetic oligonucleotide
  Antisense strand to SEQ ID NO: 1634833
uuaaggacuaaucacuucc

SEQ ID NO: 1634835 - RNA, 19 nt, Artificial Sequence
  Description of Artificial Sequence: Synthetic oligonucleotide
  Sense strand starting at position 2474 of SEQ ID NO: 1560931
agugauuaguccuuaaauu

SEQ ID NO: 1634836 - RNA, 19 nt, Artificial Sequence
  Description of Artificial Sequence: Synthetic oligonucleotide
  Antisense strand to SEQ ID NO: 1634835
aauuuaaggacuaaucacu

SEQ ID NO: 1634837 - RNA, 19 nt, Artificial Sequence
  Description of Artificial Sequence: Synthetic oligonucleotide
  Sense strand starting at position 2534 of SEQ ID NO: 1560931
aaacgaucucccugggaaa

SEQ ID NO: 1634838 - RNA, 19 nt, Artificial Sequence
  Description of Artificial Sequence: Synthetic oligonucleotide
  Antisense strand to SEQ ID NO: 1634837
uuucccagggagaucguuu

SEQ ID NO: 1634839 - RNA, 19 nt, Artificial Sequence
  Description of Artificial Sequence: Synthetic oligonucleotide
  Sense strand starting at position 2535 of SEQ ID NO: 1560931
aacgaucucccugggaaau

SEQ ID NO: 1634840 - RNA, 19 nt, Artificial Sequence
  Description of Artificial Sequence: Synthetic oligonucleotide
  Antisense strand to SEQ ID NO: 1634839
auuucccagggagaucguu

SEQ ID NO: 1634841 - RNA, 19 nt, Artificial Sequence
  Description of Artificial Sequence: Synthetic oligonucleotide
  Sense strand starting at position 2536 of SEQ ID NO: 1560931
acgaucucccugggaaaug

SEQ ID NO: 1634842 - RNA, 19 nt, Artificial Sequence
  Description of Artificial Sequence: Synthetic oligonucleotide
  Antisense strand to SEQ ID NO: 1634841
cauuucccagggagaucgu

SEQ ID NO: 1634843 - RNA, 19 nt, Artificial Sequence
  Description of Artificial Sequence: Synthetic oligonucleotide
  Sense strand starting at position 2603 of SEQ ID NO: 1560931
ggaacuuucgauuagcuac

SEQ ID NO: 1634844 - RNA, 19 nt, Artificial Sequence
  Description of Artificial Sequence: Synthetic oligonucleotide
  Antisense strand to SEQ ID NO: 1634843
guagcuaaucgaaaguucc

SEQ ID NO: 1634845 - RNA, 19 nt, Artificial Sequence
  Description of Artificial Sequence: Synthetic oligonucleotide
  Sense strand starting at position 2836 of SEQ ID NO: 1560931
ggaagaguguugcugggau

SEQ ID NO: 1634846 - RNA, 19 nt, Artificial Sequence
  Description of Artificial Sequence: Synthetic oligonucleotide
  Antisense strand to SEQ ID NO: 1634845
aucccagcaacacucuucc

SEQ ID NO: 1634847 - RNA, 19 nt, Artificial Sequence
  Description of Artificial Sequence: Synthetic oligonucleotide
  Sense strand starting at position 3042 of SEQ ID NO: 1560931
acuauaaacucagucaagu

SEQ ID NO: 1634848 - RNA, 19 nt, Artificial Sequence
  Description of Artificial Sequence: Synthetic oligonucleotide
  Antisense strand to SEQ ID NO: 1634847
acuugacugaguuuauagu

SEQ ID NO: 1634849 - RNA, 19 nt, Artificial Sequence
  Description of Artificial Sequence: Synthetic oligonucleotide
  Sense strand starting at position 3075 of SEQ ID NO: 1560931
gccaguucuccugagaguu

SEQ ID NO: 1634850 - RNA, 19 nt, Artificial Sequence
  Description of Artificial Sequence: Synthetic oligonucleotide
  Antisense strand to SEQ ID NO: 1634849
aacucucaggagaacuggc

SEQ ID NO: 1634851 - RNA, 19 nt, Artificial Sequence
  Description of Artificial Sequence: Synthetic oligonucleotide
  Sense strand starting at position 3094 of SEQ ID NO: 1560931
acaguucugcuguagauga

SEQ ID NO: 1634852 - RNA, 19 nt, Artificial Sequence
  Description of Artificial Sequence: Synthetic oligonucleotide
  Antisense strand to SEQ ID NO: 1634851
ucaucuacagcagaacugu

SEQ ID NO: 1634853 - RNA, 19 nt, Artificial Sequence
  Description of Artificial Sequence: Synthetic oligonucleotide
  Sense strand starting at position 3163 of SEQ ID NO: 1560931
ggucuaaggagugggaguu

SEQ ID NO: 1634854 - RNA, 19 nt, Artificial Sequence
  Description of Artificial Sequence: Synthetic oligonucleotide
  Antisense strand to SEQ ID NO: 1634853
aacucccacuccuuagacc

SEQ ID NO: 1634855 - RNA, 19 nt, Artificial Sequence
  Description of Artificial Sequence: Synthetic oligonucleotide
  Sense strand starting at position 3348 of SEQ ID NO: 1560931
gggucaggcagucauggau

SEQ ID NO: 1634856 - RNA, 19 nt, Artificial Sequence
  Description of Artificial Sequence: Synthetic oligonucleotide
  Antisense strand to SEQ ID NO: 1634855
auccaugacugccugaccc

SEQ ID NO: 1634857 - RNA, 19 nt, Artificial Sequence
  Description of Artificial Sequence: Synthetic oligonucleotide
  Sense strand starting at position 3569 of SEQ ID NO: 1560931
aaucguaggcaucaugaca

SEQ ID NO: 1634858 - RNA, 19 nt, Artificial Sequence
  Description of Artificial Sequence: Synthetic oligonucleotide
  Antisense strand to SEQ ID NO: 1634857
ugucaugaugccuacgauu

SEQ ID NO: 1634859 - RNA, 19 nt, Artificial Sequence
  Description of Artificial Sequence: Synthetic oligonucleotide
  Sense strand starting at position 3618 of SEQ ID NO: 1560931
cacauuuagugagaagauc

SEQ ID NO: 1634860 - RNA, 19 nt, Artificial Sequence
  Description of Artificial Sequence: Synthetic oligonucleotide
  Antisense strand to SEQ ID NO: 1634859
gaucuucucacuaaaugug

SEQ ID NO: 1634861 - RNA, 19 nt, Artificial Sequence
  Description of Artificial Sequence: Synthetic oligonucleotide
  Sense strand starting at position 3629 of SEQ ID NO: 1560931
agaagaucuuaauuggcau

SEQ ID NO: 1634862 - RNA, 19 nt, Artificial Sequence
  Description of Artificial Sequence: Synthetic oligonucleotide
  Antisense strand to SEQ ID NO: 1634861
augccaauuaagaucuucu

SEQ ID NO: 1634863 - RNA, 19 nt, Artificial Sequence
  Description of Artificial Sequence: Synthetic oligonucleotide
  Sense strand starting at position 3640 of SEQ ID NO: 1560931
auuggcauuuauucgugaa

SEQ ID NO: 1634864 - RNA, 19 nt, Artificial Sequence
  Description of Artificial Sequence: Synthetic oligonucleotide
  Antisense strand to SEQ ID NO: 1634863
uucacgaauaaaugccaau

SEQ ID NO: 1634865 - RNA, 19 nt, Artificial Sequence
  Description of Artificial Sequence: Synthetic oligonucleotide
  Sense strand starting at position 3692 of SEQ ID NO: 1560931
agcgugaguguuccgauga

SEQ ID NO: 1634866 - RNA, 19 nt, Artificial Sequence
  Description of Artificial Sequence: Synthetic oligonucleotide
  Antisense strand to SEQ ID NO: 1634865
ucaucggaacacucacgcu

SEQ ID NO: 1634867 - RNA, 19 nt, Artificial Sequence
  Description of Artificial Sequence: Synthetic oligonucleotide
  Sense strand starting at position 3837 of SEQ ID NO: 1560931
ccuuuaucaggugggcuaa

SEQ ID NO: 1634868 - RNA, 19 nt, Artificial Sequence
  Description of Artificial Sequence: Synthetic oligonucleotide
  Antisense strand to SEQ ID NO: 1634867
uuagcccaccugauaaagg

SEQ ID NO: 1634869 - RNA, 19 nt, Artificial Sequence
  Description of Artificial Sequence: Synthetic oligonucleotide
  Sense strand starting at position 3838 of SEQ ID NO: 1560931
cuuuaucaggugggcuaaa

SEQ ID NO: 1634870 - RNA, 19 nt, Artificial Sequence
  Description of Artificial Sequence: Synthetic oligonucleotide
  Antisense strand to SEQ ID NO: 1634869
uuuagcccaccugauaaag

SEQ ID NO: 1634871 - RNA, 19 nt, Artificial Sequence
  Description of Artificial Sequence: Synthetic oligonucleotide
  Sense strand starting at position 3942 of SEQ ID NO: 1560931
ggaacuuuagcaugagugu

SEQ ID NO: 1634872 - RNA, 19 nt, Artificial Sequence
  Description of Artificial Sequence: Synthetic oligonucleotide
  Antisense strand to SEQ ID NO: 1634871
acacucaugcuaaaguucc

SEQ ID NO: 1634873 - RNA, 19 nt, Artificial Sequence
  Description of Artificial Sequence: Synthetic oligonucleotide
  Sense strand starting at position 48 of SEQ ID NO: 1560932
gugauaauauuagguuggu

SEQ ID NO: 1634874 - RNA, 19 nt, Artificial Sequence
  Description of Artificial Sequence: Synthetic oligonucleotide
  Antisense strand to SEQ ID NO: 1634873
accaaccuaauauuaucac

SEQ ID NO: 1634875 - RNA, 19 nt, Artificial Sequence
  Description of Artificial Sequence: Synthetic oligonucleotide
  Sense strand starting at position 2101 of SEQ ID NO: 1560932
ggcgggcguuucugagaaa

SEQ ID NO: 1634876 - RNA, 19 nt, Artificial Sequence
  Description of Artificial Sequence: Synthetic oligonucleotide
  Antisense strand to SEQ ID NO: 1634875
uuucucagaaacgcccgcc

SEQ ID NO: 1634877 - RNA, 19 nt, Artificial Sequence
  Description of Artificial Sequence: Synthetic oligonucleotide
  Sense strand starting at position 2102 of SEQ ID NO: 1560932
gcgggcguuucugagaaau

SEQ ID NO: 1634878 - RNA, 19 nt, Artificial Sequence
  Description of Artificial Sequence: Synthetic oligonucleotide
  Antisense strand to SEQ ID NO: 1634877
auuucucagaaacgcccgc

SEQ ID NO: 1634879 - RNA, 19 nt, Artificial Sequence
  Description of Artificial Sequence: Synthetic oligonucleotide
  Sense strand starting at position 2104 of SEQ ID NO: 1560932
gggcguuucugagaaaucg

SEQ ID NO: 1634880 - RNA, 19 nt, Artificial Sequence
  Description of Artificial Sequence: Synthetic oligonucleotide
  Antisense strand to SEQ ID NO: 1634879
cgauuucucagaaacgccc

SEQ ID NO: 1634881 - RNA, 19 nt, Artificial Sequence
  Description of Artificial Sequence: Synthetic oligonucleotide
  Sense strand starting at position 2112 of SEQ ID NO: 1560932
cugagaaaucgauggucuc

SEQ ID NO: 1634882 - RNA, 19 nt, Artificial Sequence
  Description of Artificial Sequence: Synthetic oligonucleotide
  Antisense strand to SEQ ID NO: 1634881
gagaccaucgauuucucag

SEQ ID NO: 1634883 - RNA, 19 nt, Artificial Sequence
  Description of Artificial Sequence: Synthetic oligonucleotide
  Sense strand starting at position 2113 of SEQ ID NO: 1560932
ugagaaaucgauggucuca

SEQ ID NO: 1634884 - RNA, 19 nt, Artificial Sequence
  Description of Artificial Sequence: Synthetic oligonucleotide
  Antisense strand to SEQ ID NO: 1634883
ugagaccaucgauuucuca

SEQ ID NO: 1634885 - RNA, 19 nt, Artificial Sequence
  Description of Artificial Sequence: Synthetic oligonucleotide
  Sense strand starting at position 2132 of SEQ ID NO: 1560932
ggugguggcugguaauaau

SEQ ID NO: 1634886 - RNA, 19 nt, Artificial Sequence
  Description of Artificial Sequence: Synthetic oligonucleotide
  Antisense strand to SEQ ID NO: 1634885
auuauuaccagccaccacc

SEQ ID NO: 1634887 - RNA, 19 nt, Artificial Sequence
  Description of Artificial Sequence: Synthetic oligonucleotide
  Sense strand starting at position 2135 of SEQ ID NO: 1560932
gguggcugguaauaaucau

SEQ ID NO: 1634888 - RNA, 19 nt, Artificial Sequence
  Description of Artificial Sequence: Synthetic oligonucleotide
  Antisense strand to SEQ ID NO: 1634887
augauuauuaccagccacc

SEQ ID NO: 1634889 - RNA, 19 nt, Artificial Sequence
  Description of Artificial Sequence: Synthetic oligonucleotide
  Sense strand starting at position 2141 of SEQ ID NO: 1560932
ugguaauaaucauguugau

SEQ ID NO: 1634890 - RNA, 19 nt, Artificial Sequence
  Description of Artificial Sequence: Synthetic oligonucleotide
  Antisense strand to SEQ ID NO: 1634889
aucaacaugauuauuacca

SEQ ID NO: 1634891 - RNA, 19 nt, Artificial Sequence
  Description of Artificial Sequence: Synthetic oligonucleotide
  Sense strand starting at position 2293 of SEQ ID NO: 1560932
gagcuuuccgaggaaccga

SEQ ID NO: 1634892 - RNA, 19 nt, Artificial Sequence
  Description of Artificial Sequence: Synthetic oligonucleotide
  Antisense strand to SEQ ID NO: 1634891
ucgguuccucggaaagcuc

SEQ ID NO: 1634893 - RNA, 19 nt, Artificial Sequence
  Description of Artificial Sequence: Synthetic oligonucleotide
  Sense strand starting at position 2435 of SEQ ID NO: 1560932
cugggaagcucugaugauu

SEQ ID NO: 1634894 - RNA, 19 nt, Artificial Sequence
  Description of Artificial Sequence: Synthetic oligonucleotide
  Antisense strand to SEQ ID NO: 1634893
aaucaucagagcuucccag

SEQ ID NO: 1634895 - RNA, 19 nt, Artificial Sequence
  Description of Artificial Sequence: Synthetic oligonucleotide
  Sense strand starting at position 2590 of SEQ ID NO: 1560932
cuggcagauuucugccuuu

SEQ ID NO: 1634896 - RNA, 19 nt, Artificial Sequence
  Description of Artificial Sequence: Synthetic oligonucleotide
  Antisense strand to SEQ ID NO: 1634895
aaaggcagaaaucugccag

SEQ ID NO: 1634897 - RNA, 19 nt, Artificial Sequence
  Description of Artificial Sequence: Synthetic oligonucleotide
  Sense strand starting at position 2593 of SEQ ID NO: 1560932
gcagauuucugccuuuauu

SEQ ID NO: 1634898 - RNA, 19 nt, Artificial Sequence
  Description of Artificial Sequence: Synthetic oligonucleotide
  Antisense strand to SEQ ID NO: 1634897
aauaaaggcagaaaucugc

SEQ ID NO: 1634899 - RNA, 19 nt, Artificial Sequence
  Description of Artificial Sequence: Synthetic oligonucleotide
  Sense strand starting at position 2613 of SEQ ID NO: 1560932
agcaguuauugagugccua

SEQ ID NO: 1634900 - RNA, 19 nt, Artificial Sequence
  Description of Artificial Sequence: Synthetic oligonucleotide
  Antisense strand to SEQ ID NO: 1634899
uaggcacucaauaacugcu

SEQ ID NO: 1634901 - RNA, 19 nt, Artificial Sequence
  Description of Artificial Sequence: Synthetic oligonucleotide
  Sense strand starting at position 2614 of SEQ ID NO: 1560932
gcaguuauugagugccuag

SEQ ID NO: 1634902 - RNA, 19 nt, Artificial Sequence
  Description of Artificial Sequence: Synthetic oligonucleotide
  Antisense strand to SEQ ID NO: 1634901
cuaggcacucaauaacugc

SEQ ID NO: 1634903 - RNA, 19 nt, Artificial Sequence
  Description of Artificial Sequence: Synthetic oligonucleotide
  Sense strand starting at position 2625 of SEQ ID NO: 1560932
gugccuaguguauaccaga

SEQ ID NO: 1634904 - RNA, 19 nt, Artificial Sequence
  Description of Artificial Sequence: Synthetic oligonucleotide
  Antisense strand to SEQ ID NO: 1634903
ucugguauacacuaggcac

SEQ ID NO: 1634905 - RNA, 19 nt, Artificial Sequence
  Description of Artificial Sequence: Synthetic oligonucleotide
  Sense strand starting at position 2694 of SEQ ID NO: 1560932
cacugacguucugugggau

SEQ ID NO: 1634906 - RNA, 19 nt, Artificial Sequence
  Description of Artificial Sequence: Synthetic oligonucleotide
  Antisense strand to SEQ ID NO: 1634905
aucccacagaacgucagug

SEQ ID NO: 1634907 - RNA, 19 nt, Artificial Sequence
  Description of Artificial Sequence: Synthetic oligonucleotide
  Sense strand starting at position 2723 of SEQ ID NO: 1560932
gugggacauggcuguacau

SEQ ID NO: 1634908 - RNA, 19 nt, Artificial Sequence
  Description of Artificial Sequence: Synthetic oligonucleotide
  Antisense strand to SEQ ID NO: 1634907
auguacagccaugucccac

SEQ ID NO: 1634909 - RNA, 19 nt, Artificial Sequence
  Description of Artificial Sequence: Synthetic oligonucleotide
  Sense strand starting at position 2858 of SEQ ID NO: 1560932
guucgagugauucucguuc

SEQ ID NO: 1634910 - RNA, 19 nt, Artificial Sequence
  Description of Artificial Sequence: Synthetic oligonucleotide
  Antisense strand to SEQ ID NO: 1634909
gaacgagaaucacucgaac

SEQ ID NO: 1634911 - RNA, 19 nt, Artificial Sequence
  Description of Artificial Sequence: Synthetic oligonucleotide
  Sense strand starting at position 2860 of SEQ ID NO: 1560932
ucgagugauucucguuccu

SEQ ID NO: 1634912 - RNA, 19 nt, Artificial Sequence
  Description of Artificial Sequence: Synthetic oligonucleotide
  Antisense strand to SEQ ID NO: 1634911
aggaacgagaaucacucga

SEQ ID NO: 1634913 - RNA, 19 nt, Artificial Sequence
  Description of Artificial Sequence: Synthetic oligonucleotide
  Sense strand starting at position 3232 of SEQ ID NO: 1560932
ccgcuaaauuuguguguuu

SEQ ID NO: 1634914 - RNA, 19 nt, Artificial Sequence
  Description of Artificial Sequence: Synthetic oligonucleotide
  Antisense strand to SEQ ID NO: 1634913
aaacacacaaauuuagcgg

SEQ ID NO: 1634915 - RNA, 19 nt, Artificial Sequence
  Description of Artificial Sequence: Synthetic oligonucleotide
  Sense strand starting at position 3233 of SEQ ID NO: 1560932
cgcuaaauuuguguguuua

SEQ ID NO: 1634916 - RNA, 19 nt, Artificial Sequence
  Description of Artificial Sequence: Synthetic oligonucleotide
  Antisense strand to SEQ ID NO: 1634915
uaaacacacaaauuuagcg

SEQ ID NO: 1634917 - RNA, 19 nt, Artificial Sequence
  Description of Artificial Sequence: Synthetic oligonucleotide
  Sense strand starting at position 3234 of SEQ ID NO: 1560932
gcuaaauuuguguguuuag

SEQ ID NO: 1634918 - RNA, 19 nt, Artificial Sequence
  Description of Artificial Sequence: Synthetic oligonucleotide
  Antisense strand to SEQ ID NO: 1634917
cuaaacacacaaauuuagc

SEQ ID NO: 1634919 - RNA, 19 nt, Artificial Sequence
  Description of Artificial Sequence: Synthetic oligonucleotide
  Sense strand starting at position 3235 of SEQ ID NO: 1560932
cuaaauuuguguguuuagu

SEQ ID NO: 1634920 - RNA, 19 nt, Artificial Sequence
  Description of Artificial Sequence: Synthetic oligonucleotide
  Antisense strand to SEQ ID NO: 1634919
acuaaacacacaaauuuag

SEQ ID NO: 1634921 - RNA, 19 nt, Artificial Sequence
  Description of Artificial Sequence: Synthetic oligonucleotide
  Sense strand starting at position 3237 of SEQ ID NO: 1560932
aaauuuguguguuuaguag

SEQ ID NO: 1634922 - RNA, 19 nt, Artificial Sequence
  Description of Artificial Sequence: Synthetic oligonucleotide
  Antisense strand to SEQ ID NO: 1634921
cuacuaaacacacaaauuu

SEQ ID NO: 1634923 - RNA, 19 nt, Artificial Sequence
  Description of Artificial Sequence: Synthetic oligonucleotide
  Sense strand starting at position 3393 of SEQ ID NO: 1560932
gggagcguucuuaguggca

SEQ ID NO: 1634924 - RNA, 19 nt, Artificial Sequence
  Description of Artificial Sequence: Synthetic oligonucleotide
  Antisense strand to SEQ ID NO: 1634923
ugccacuaagaacgcuccc

SEQ ID NO: 1634925 - RNA, 19 nt, Artificial Sequence
  Description of Artificial Sequence: Synthetic oligonucleotide
  Sense strand starting at position 3395 of SEQ ID NO: 1560932
gagcguucuuaguggcaaa

SEQ ID NO: 1634926 - RNA, 19 nt, Artificial Sequence
  Description of Artificial Sequence: Synthetic oligonucleotide
  Antisense strand to SEQ ID NO: 1634925
uuugccacuaagaacgcuc

SEQ ID NO: 1634927 - RNA, 19 nt, Artificial Sequence
  Description of Artificial Sequence: Synthetic oligonucleotide
  Sense strand starting at position 3397 of SEQ ID NO: 1560932
gcguucuuaguggcaaagu

SEQ ID NO: 1634928 - RNA, 19 nt, Artificial Sequence
  Description of Artificial Sequence: Synthetic oligonucleotide
  Antisense strand to SEQ ID NO: 1634927
acuuugccacuaagaacgc

SEQ ID NO: 1634929 - RNA, 19 nt, Artificial Sequence
  Description of Artificial Sequence: Synthetic oligonucleotide
  Sense strand starting at position 3398 of SEQ ID NO: 1560932
cguucuuaguggcaaaguu

SEQ ID NO: 1634930 - RNA, 19 nt, Artificial Sequence
  Description of Artificial Sequence: Synthetic oligonucleotide
  Antisense strand to SEQ ID NO: 1634929
aacuuugccacuaagaacg

SEQ ID NO: 1634931 - RNA, 19 nt, Artificial Sequence
  Description of Artificial Sequence: Synthetic oligonucleotide
  Sense strand starting at position 3407 of SEQ ID NO: 1560932
uggcaaaguucaggucgua

SEQ ID NO: 1634932 - RNA, 19 nt, Artificial Sequence
  Description of Artificial Sequence: Synthetic oligonucleotide
  Antisense strand to SEQ ID NO: 1634931
uacgaccugaacuuugcca

SEQ ID NO: 1634933 - RNA, 19 nt, Artificial Sequence
  Description of Artificial Sequence: Synthetic oligonucleotide
  Sense strand starting at position 3479 of SEQ ID NO: 1560932
ggugcucgucagcgcuuaa

SEQ ID NO: 1634934 - RNA, 19 nt, Artificial Sequence
  Description of Artificial Sequence: Synthetic oligonucleotide
  Antisense strand to SEQ ID NO: 1634933
uuaagcgcugacgagcacc

SEQ ID NO: 1634935 - RNA, 19 nt, Artificial Sequence
  Description of Artificial Sequence: Synthetic oligonucleotide
  Sense strand starting at position 3480 of SEQ ID NO: 1560932
gugcucgucagcgcuuaau

SEQ ID NO: 1634936 - RNA, 19 nt, Artificial Sequence
  Description of Artificial Sequence: Synthetic oligonucleotide
  Antisense strand to SEQ ID NO: 1634935
auuaagcgcugacgagcac

SEQ ID NO: 1634937 - RNA, 19 nt, Artificial Sequence
  Description of Artificial Sequence: Synthetic oligonucleotide
  Sense strand starting at position 3482 of SEQ ID NO: 1560932
gcucgucagcgcuuaauaa

SEQ ID NO: 1634938 - RNA, 19 nt, Artificial Sequence
  Description of Artificial Sequence: Synthetic oligonucleotide
  Antisense strand to SEQ ID NO: 1634937
uuauuaagcgcugacgagc

SEQ ID NO: 1634939 - RNA, 19 nt, Artificial Sequence
  Description of Artificial Sequence: Synthetic oligonucleotide
  Sense strand starting at position 3483 of SEQ ID NO: 1560932
cucgucagcgcuuaauaau

SEQ ID NO: 1634940 - RNA, 19 nt, Artificial Sequence
  Description of Artificial Sequence: Synthetic oligonucleotide
  Antisense strand to SEQ ID NO: 1634939
auuauuaagcgcugacgag

SEQ ID NO: 1634941 - RNA, 19 nt, Artificial Sequence
  Description of Artificial Sequence: Synthetic oligonucleotide
  Sense strand starting at position 3486 of SEQ ID NO: 1560932
gucagcgcuuaauaaugaa

SEQ ID NO: 1634942 - RNA, 19 nt, Artificial Sequence
  Description of Artificial Sequence: Synthetic oligonucleotide
  Antisense strand to SEQ ID NO: 1634941
uucauuauuaagcgcugac

SEQ ID NO: 1634943 - RNA, 19 nt, Artificial Sequence
  Description of Artificial Sequence: Synthetic oligonucleotide
  Sense strand starting at position 3852 of SEQ ID NO: 1560932
uguaaaguguucucaauaa

SEQ ID NO: 1634944 - RNA, 19 nt, Artificial Sequence
  Description of Artificial Sequence: Synthetic oligonucleotide
  Antisense strand to SEQ ID NO: 1634943
uuauugagaacacuuuaca

SEQ ID NO: 1634945 - RNA, 19 nt, Artificial Sequence
  Description of Artificial Sequence: Synthetic oligonucleotide
  Sense strand starting at position 3895 of SEQ ID NO: 1560932
ggaaaugcguggaaaggaa

SEQ ID NO: 1634946 - RNA, 19 nt, Artificial Sequence
  Description of Artificial Sequence: Synthetic oligonucleotide
  Antisense strand to SEQ ID NO: 1634945
uuccuuuccacgcauuucc

SEQ ID NO: 1634947 - RNA, 19 nt, Artificial Sequence
  Description of Artificial Sequence: Synthetic oligonucleotide
  Sense strand starting at position 1614 of SEQ ID NO: 1560933
cugggugcuguccaggaau

SEQ ID NO: 1634948 - RNA, 19 nt, Artificial Sequence
  Description of Artificial Sequence: Synthetic oligonucleotide
  Antisense strand to SEQ ID NO: 1634947
auuccuggacagcacccag

SEQ ID NO: 1634949 - RNA, 19 nt, Artificial Sequence
  Description of Artificial Sequence: Synthetic oligonucleotide
  Sense strand starting at position 1626 of SEQ ID NO: 1560933
caggaauucgccuguuacu

SEQ ID NO: 1634950 - RNA, 19 nt, Artificial Sequence
  Description of Artificial Sequence: Synthetic oligonucleotide
  Antisense strand to SEQ ID NO: 1634949
aguaacaggcgaauuccug

SEQ ID NO: 1634951 - RNA, 19 nt, Artificial Sequence
  Description of Artificial Sequence: Synthetic oligonucleotide
  Sense strand starting at position 1765 of SEQ ID NO: 1560933
cguuggucccgagcaguga

SEQ ID NO: 1634952 - RNA, 19 nt, Artificial Sequence
  Description of Artificial Sequence: Synthetic oligonucleotide
  Antisense strand to SEQ ID NO: 1634951
ucacugcucgggaccaacg

SEQ ID NO: 1634953 - RNA, 19 nt, Artificial Sequence
  Description of Artificial Sequence: Synthetic oligonucleotide
  Sense strand starting at position 1842 of SEQ ID NO: 1560933
ggaccucgugguggauauu

SEQ ID NO: 1634954 - RNA, 19 nt, Artificial Sequence
  Description of Artificial Sequence: Synthetic oligonucleotide
  Antisense strand to SEQ ID NO: 1634953
aauauccaccacgaggucc

SEQ ID NO: 1634955 - RNA, 19 nt, Artificial Sequence
  Description of Artificial Sequence: Synthetic oligonucleotide
  Sense strand starting at position 2000 of SEQ ID NO: 1560933
cggucaagcuccucuuaua

SEQ ID NO: 1634956 - RNA, 19 nt, Artificial Sequence
  Description of Artificial Sequence: Synthetic oligonucleotide
  Antisense strand to SEQ ID NO: 1634955
uauaagaggagcuugaccg

SEQ ID NO: 1634957 - RNA, 19 nt, Artificial Sequence
  Description of Artificial Sequence: Synthetic oligonucleotide
  Sense strand starting at position 2032 of SEQ ID NO: 1560933
ggccguugaguugcccaau

SEQ ID NO: 1634958 - RNA, 19 nt, Artificial Sequence
  Description of Artificial Sequence: Synthetic oligonucleotide
  Antisense strand to SEQ ID NO: 1634957
auugggcaacucaacggcc

SEQ ID NO: 1634959 - RNA, 19 nt, Artificial Sequence
  Description of Artificial Sequence: Synthetic oligonucleotide
  Sense strand starting at position 2488 of SEQ ID NO: 1560933
aggccaggauucucaauca

SEQ ID NO: 1634960 - RNA, 19 nt, Artificial Sequence
  Description of Artificial Sequence: Synthetic oligonucleotide
  Antisense strand to SEQ ID NO: 1634959
ugauugagaauccuggccu

SEQ ID NO: 1634961 - RNA, 19 nt, Artificial Sequence
  Description of Artificial Sequence: Synthetic oligonucleotide
  Sense strand starting at position 2552 of SEQ ID NO: 1560933
accuguggcugucacgaaa

SEQ ID NO: 1634962 - RNA, 19 nt, Artificial Sequence
  Description of Artificial Sequence: Synthetic oligonucleotide
  Antisense strand to SEQ ID NO: 1634961
uuucgugacagccacaggu

SEQ ID NO: 1634963 - RNA, 19 nt, Artificial Sequence
  Description of Artificial Sequence: Synthetic oligonucleotide
  Sense strand starting at position 2685 of SEQ ID NO: 1560933
gggagagaccaguguucau

SEQ ID NO: 1634964 - RNA, 19 nt, Artificial Sequence
  Description of Artificial Sequence: Synthetic oligonucleotide
  Antisense strand to SEQ ID NO: 1634963
augaacacuggucucuccc

SEQ ID NO: 1634965 - RNA, 19 nt, Artificial Sequence
  Description of Artificial Sequence: Synthetic oligonucleotide
  Sense strand starting at position 3230 of SEQ ID NO: 1560933
uguggaauccucuaacccu

SEQ ID NO: 1634966 - RNA, 19 nt, Artificial Sequence
  Description of Artificial Sequence: Synthetic oligonucleotide
  Antisense strand to SEQ ID NO: 1634965
aggguuagaggauuccaca

SEQ ID NO: 1634967 - RNA, 19 nt, Artificial Sequence
  Description of Artificial Sequence: Synthetic oligonucleotide
  Sense strand starting at position 3276 of SEQ ID NO: 1560933
gugugaggccuggagacau

SEQ ID NO: 1634968 - RNA, 19 nt, Artificial Sequence
  Description of Artificial Sequence: Synthetic oligonucleotide
  Antisense strand to SEQ ID NO: 1634967
augucuccaggccucacac

SEQ ID NO: 1634969 - RNA, 19 nt, Artificial Sequence
  Description of Artificial Sequence: Synthetic oligonucleotide
  Sense strand starting at position 3284 of SEQ ID NO: 1560933
ccuggagacauccgugguu

SEQ ID NO: 1634970 - RNA, 19 nt, Artificial Sequence
  Description of Artificial Sequence: Synthetic oligonucleotide
  Antisense strand to SEQ ID NO: 1634969
aaccacggaugucuccagg

SEQ ID NO: 1634971 - RNA, 19 nt, Artificial Sequence
  Description of Artificial Sequence: Synthetic oligonucleotide
  Sense strand starting at position 3286 of SEQ ID NO: 1560933
uggagacauccgugguugu

SEQ ID NO: 1634972 - RNA, 19 nt, Artificial Sequence
  Description of Artificial Sequence: Synthetic oligonucleotide
  Antisense strand to SEQ ID NO: 1634971
acaaccacggaugucucca

SEQ ID NO: 1634973 - RNA, 19 nt, Artificial Sequence
  Description of Artificial Sequence: Synthetic oligonucleotide
  Sense strand starting at position 3436 of SEQ ID NO: 1560933
uuuauaacugaacgguuua

SEQ ID NO: 1634974 - RNA, 19 nt, Artificial Sequence
  Description of Artificial Sequence: Synthetic oligonucleotide
  Antisense strand to SEQ ID NO: 1634973
uaaaccguucaguuauaaa

SEQ ID NO: 1634975 - RNA, 19 nt, Artificial Sequence
  Description of Artificial Sequence: Synthetic oligonucleotide
  Sense strand starting at position 3521 of SEQ ID NO: 1560933
acguuucauuuggaaagga

SEQ ID NO: 1634976 - RNA, 19 nt, Artificial Sequence
  Description of Artificial Sequence: Synthetic oligonucleotide
  Antisense strand to SEQ ID NO: 1634975
uccuuuccaaaugaaacgu

SEQ ID NO: 1634977 - RNA, 19 nt, Artificial Sequence
  Description of Artificial Sequence: Synthetic oligonucleotide
  Sense strand starting at position 3674 of SEQ ID NO: 1560933
cgcgaaaguugauuccaaa

SEQ ID NO: 1634978 - RNA, 19 nt, Artificial Sequence
  Description of Artificial Sequence: Synthetic oligonucleotide
  Antisense strand to SEQ ID NO: 1634977
uuuggaaucaacuuucgcg

SEQ ID NO: 1634979 - RNA, 19 nt, Artificial Sequence
  Description of Artificial Sequence: Synthetic oligonucleotide
  Sense strand starting at position 3967 of SEQ ID NO: 1560933
cggccugucucgugcugau

SEQ ID NO: 1634980 - RNA, 19 nt, Artificial Sequence
  Description of Artificial Sequence: Synthetic oligonucleotide
  Antisense strand to SEQ ID NO: 1634979
aucagcacgagacaggccg

SEQ ID NO: 1634981 - RNA, 19 nt, Artificial Sequence
  Description of Artificial Sequence: Synthetic oligonucleotide
  Sense strand starting at position 3974 of SEQ ID NO: 1560933
ucucgugcugaugguaaua

SEQ ID NO: 1634982 - RNA, 19 nt, Artificial Sequence
  Description of Artificial Sequence: Synthetic oligonucleotide
  Antisense strand to SEQ ID NO: 1634981
uauuaccaucagcacgaga

SEQ ID NO: 1634983 - RNA, 19 nt, Artificial Sequence
  Description of Artificial Sequence: Synthetic oligonucleotide
  Sense strand starting at position 93 of SEQ ID NO: 1560934
ccuuguaggugguaguaga

SEQ ID NO: 1634984 - RNA, 19 nt, Artificial Sequence
  Description of Artificial Sequence: Synthetic oligonucleotide
  Antisense strand to SEQ ID NO: 1634983
ucuacuaccaccuacaagg

SEQ ID NO: 1634985 - RNA, 19 nt, Artificial Sequence
  Description of Artificial Sequence: Synthetic oligonucleotide
  Sense strand starting at position 418 of SEQ ID NO: 1560934
gggucccugccuuguguua

SEQ ID NO: 1634986 - RNA, 19 nt, Artificial Sequence
  Description of Artificial Sequence: Synthetic oligonucleotide
  Antisense strand to SEQ ID NO: 1634985
uaacacaaggcagggaccc

SEQ ID NO: 1634987 - RNA, 19 nt, Artificial Sequence
  Description of Artificial Sequence: Synthetic oligonucleotide
  Sense strand starting at position 427 of SEQ ID NO: 1560934
ccuuguguuagaggcagau

SEQ ID NO: 1634988 - RNA, 19 nt, Artificial Sequence
  Description of Artificial Sequence: Synthetic oligonucleotide
  Antisense strand to SEQ ID NO: 1634987
aucugccucuaacacaagg

SEQ ID NO: 1634989 - RNA, 19 nt, Artificial Sequence
  Description of Artificial Sequence: Synthetic oligonucleotide
  Sense strand starting at position 478 of SEQ ID NO: 1560934
gcagccuauuucuugggua

SEQ ID NO: 1634990 - RNA, 19 nt, Artificial Sequence
  Description of Artificial Sequence: Synthetic oligonucleotide
  Antisense strand to SEQ ID NO: 1634989
uacccaagaaauaggcugc

SEQ ID NO: 1634991 - RNA, 19 nt, Artificial Sequence
  Description of Artificial Sequence: Synthetic oligonucleotide
  Sense strand starting at position 480 of SEQ ID NO: 1560934
agccuauuucuuggguagu

SEQ ID NO: 1634992 - RNA, 19 nt, Artificial Sequence
  Description of Artificial Sequence: Synthetic oligonucleotide
  Antisense strand to SEQ ID NO: 1634991
acuacccaagaaauaggcu

SEQ ID NO: 1634993 - RNA, 19 nt, Artificial Sequence
  Description of Artificial Sequence: Synthetic oligonucleotide
  Sense strand starting at position 481 of SEQ ID NO: 1560934
gccuauuucuuggguaguu

SEQ ID NO: 1634994 - RNA, 19 nt, Artificial Sequence
  Description of Artificial Sequence: Synthetic oligonucleotide
  Antisense strand to SEQ ID NO: 1634993
aacuacccaagaaauaggc

SEQ ID NO: 1634995 - RNA, 19 nt, Artificial Sequence
  Description of Artificial Sequence: Synthetic oligonucleotide
  Sense strand starting at position 503 of SEQ ID NO: 1560934
guggcaugacccuggcaua

SEQ ID NO: 1634996 - RNA, 19 nt, Artificial Sequence
  Description of Artificial Sequence: Synthetic oligonucleotide
  Antisense strand to SEQ ID NO: 1634995
uaugccagggucaugccac

SEQ ID NO: 1634997 - RNA, 19 nt, Artificial Sequence
  Description of Artificial Sequence: Synthetic oligonucleotide
  Sense strand starting at position 504 of SEQ ID NO: 1560934
uggcaugacccuggcauau

SEQ ID NO: 1634998 - RNA, 19 nt, Artificial Sequence
  Description of Artificial Sequence: Synthetic oligonucleotide
  Antisense strand to SEQ ID NO: 1634997
auaugccagggucaugcca

SEQ ID NO: 1634999 - RNA, 19 nt, Artificial Sequence
  Description of Artificial Sequence: Synthetic oligonucleotide
  Sense strand starting at position 515 of SEQ ID NO: 1560934
uggcauaugccagaacuuu

SEQ ID NO: 1635000 - RNA, 19 nt, Artificial Sequence
  Description of Artificial Sequence: Synthetic oligonucleotide
  Antisense strand to SEQ ID NO: 1634999
aaaguucuggcauaugcca

SEQ ID NO: 1635001 - RNA, 19 nt, Artificial Sequence
  Description of Artificial Sequence: Synthetic oligonucleotide
  Sense strand starting at position 565 of SEQ ID NO: 1560934
ccuacugugugcuaagauc

SEQ ID NO: 1635002 - RNA, 19 nt, Artificial Sequence
  Description of Artificial Sequence: Synthetic oligonucleotide
  Antisense strand to SEQ ID NO: 1635001
gaucuuagcacacaguagg

SEQ ID NO: 1635003 - RNA, 19 nt, Artificial Sequence
  Description of Artificial Sequence: Synthetic oligonucleotide
  Sense strand starting at position 573 of SEQ ID NO: 1560934
gugcuaagauccuuccugu

SEQ ID NO: 1635004 - RNA, 19 nt, Artificial Sequence
  Description of Artificial Sequence: Synthetic oligonucleotide
  Antisense strand to SEQ ID NO: 1635003
acaggaaggaucuuagcac

SEQ ID NO: 1635005 - RNA, 19 nt, Artificial Sequence
  Description of Artificial Sequence: Synthetic oligonucleotide
  Sense strand starting at position 589 of SEQ ID NO: 1560934
ugucuuggcuccuuaaauc

SEQ ID NO: 1635006 - RNA, 19 nt, Artificial Sequence
  Description of Artificial Sequence: Synthetic oligonucleotide
  Antisense strand to SEQ ID NO: 1635005
gauuuaaggagccaagaca

SEQ ID NO: 1635007 - RNA, 19 nt, Artificial Sequence
  Description of Artificial Sequence: Synthetic oligonucleotide
  Sense strand starting at position 610 of SEQ ID NO: 1560934
uguaacaucucccuggagu

SEQ ID NO: 1635008 - RNA, 19 nt, Artificial Sequence
  Description of Artificial Sequence: Synthetic oligonucleotide
  Antisense strand to SEQ ID NO: 1635007
acuccagggagauguuaca

SEQ ID NO: 1635009 - RNA, 19 nt, Artificial Sequence
  Description of Artificial Sequence: Synthetic oligonucleotide
  Sense strand starting at position 611 of SEQ ID NO: 1560934
guaacaucucccuggagug

SEQ ID NO: 1635010 - RNA, 19 nt, Artificial Sequence
  Description of Artificial Sequence: Synthetic oligonucleotide
  Antisense strand to SEQ ID NO: 1635009
cacuccagggagauguuac

SEQ ID NO: 1635011 - RNA, 19 nt, Artificial Sequence
  Description of Artificial Sequence: Synthetic oligonucleotide
  Sense strand starting at position 823 of SEQ ID NO: 1560934
cgugaucucucauagcaau

SEQ ID NO: 1635012 - RNA, 19 nt, Artificial Sequence
  Description of Artificial Sequence: Synthetic oligonucleotide
  Antisense strand to SEQ ID NO: 1635011
auugcuaugagagaucacg

SEQ ID NO: 1635013 - RNA, 19 nt, Artificial Sequence
  Description of Artificial Sequence: Synthetic oligonucleotide
  Sense strand starting at position 1038 of SEQ ID NO: 1560934
aagaaaggcuuugaagauu

SEQ ID NO: 1635014 - RNA, 19 nt, Artificial Sequence
  Description of Artificial Sequence: Synthetic oligonucleotide
  Antisense strand to SEQ ID NO: 1635013
aaucuucaaagccuuucuu

SEQ ID NO: 1635015 - RNA, 19 nt, Artificial Sequence
  Description of Artificial Sequence: Synthetic oligonucleotide
  Sense strand starting at position 1047 of SEQ ID NO: 1560934
uuugaagauuugugagaga

SEQ ID NO: 1635016 - RNA, 19 nt, Artificial Sequence
  Description of Artificial Sequence: Synthetic oligonucleotide
  Antisense strand to SEQ ID NO: 1635015
ucucucacaaaucuucaaa

SEQ ID NO: 1635017 - RNA, 19 nt, Artificial Sequence
  Description of Artificial Sequence: Synthetic oligonucleotide
  Sense strand starting at position 1050 of SEQ ID NO: 1560934
gaagauuugugagagaaca

SEQ ID NO: 1635018 - RNA, 19 nt, Artificial Sequence
  Description of Artificial Sequence: Synthetic oligonucleotide
  Antisense strand to SEQ ID NO: 1635017
uguucucucacaaaucuuc

SEQ ID NO: 1635019 - RNA, 19 nt, Artificial Sequence
  Description of Artificial Sequence: Synthetic oligonucleotide
  Sense strand starting at position 1065 of SEQ ID NO: 1560934
aacagcaggugcuuagaau

SEQ ID NO: 1635020 - RNA, 19 nt, Artificial Sequence
  Description of Artificial Sequence: Synthetic oligonucleotide
  Antisense strand to SEQ ID NO: 1635019
auucuaagcaccugcuguu

SEQ ID NO: 1635021 - RNA, 19 nt, Artificial Sequence
  Description of Artificial Sequence: Synthetic oligonucleotide
  Sense strand starting at position 1066 of SEQ ID NO: 1560934
acagcaggugcuuagaaua

SEQ ID NO: 1635022 - RNA, 19 nt, Artificial Sequence
  Description of Artificial Sequence: Synthetic oligonucleotide
  Antisense strand to SEQ ID NO: 1635021
uauucuaagcaccugcugu

SEQ ID NO: 1635023 - RNA, 19 nt, Artificial Sequence
  Description of Artificial Sequence: Synthetic oligonucleotide
  Sense strand starting at position 1082 of SEQ ID NO: 1560934
auaucccuccuguauagua

SEQ ID NO: 1635024 - RNA, 19 nt, Artificial Sequence
  Description of Artificial Sequence: Synthetic oligonucleotide
  Antisense strand to SEQ ID NO: 1635023
uacuauacaggagggauau

SEQ ID NO: 1635025 - RNA, 19 nt, Artificial Sequence
  Description of Artificial Sequence: Synthetic oligonucleotide
  Sense strand starting at position 1084 of SEQ ID NO: 1560934
aucccuccuguauaguaaa

SEQ ID NO: 1635026 - RNA, 19 nt, Artificial Sequence
  Description of Artificial Sequence: Synthetic oligonucleotide
  Antisense strand to SEQ ID NO: 1635025
uuuacuauacaggagggau

SEQ ID NO: 1635027 - RNA, 19 nt, Artificial Sequence
  Description of Artificial Sequence: Synthetic oligonucleotide
  Sense strand starting at position 1234 of SEQ ID NO: 1560934
agcuuuggcugagagacaa

SEQ ID NO: 1635028 - RNA, 19 nt, Artificial Sequence
  Description of Artificial Sequence: Synthetic oligonucleotide
  Antisense strand to SEQ ID NO: 1635027
uugucucucagccaaagcu

SEQ ID NO: 1635029 - RNA, 19 nt, Artificial Sequence
  Description of Artificial Sequence: Synthetic oligonucleotide
  Sense strand starting at position 1711 of SEQ ID NO: 1560934
ugagguggccuccagacau

SEQ ID NO: 1635030 - RNA, 19 nt, Artificial Sequence
  Description of Artificial Sequence: Synthetic oligonucleotide
  Antisense strand to SEQ ID NO: 1635029
augucuggaggccaccuca

SEQ ID NO: 1635031 - RNA, 19 nt, Artificial Sequence
  Description of Artificial Sequence: Synthetic oligonucleotide
  Sense strand starting at position 2211 of SEQ ID NO: 1560934
ggccgagaucucugccaug

SEQ ID NO: 1635032 - RNA, 19 nt, Artificial Sequence
  Description of Artificial Sequence: Synthetic oligonucleotide
  Antisense strand to SEQ ID NO: 1635031
cauggcagagaucucggcc

SEQ ID NO: 1635033 - RNA, 19 nt, Artificial Sequence
  Description of Artificial Sequence: Synthetic oligonucleotide
  Sense strand starting at position 2257 of SEQ ID NO: 1560934
gcuuccucgacuuggagaa

SEQ ID NO: 1635034 - RNA, 19 nt, Artificial Sequence
  Description of Artificial Sequence: Synthetic oligonucleotide
  Antisense strand to SEQ ID NO: 1635033
uucuccaagucgaggaagc

SEQ ID NO: 1635035 - RNA, 19 nt, Artificial Sequence
  Description of Artificial Sequence: Synthetic oligonucleotide
  Sense strand starting at position 2258 of SEQ ID NO: 1560934
cuuccucgacuuggagaau

SEQ ID NO: 1635036 - RNA, 19 nt, Artificial Sequence
  Description of Artificial Sequence: Synthetic oligonucleotide
  Antisense strand to SEQ ID NO: 1635035
auucuccaagucgaggaag

SEQ ID NO: 1635037 - RNA, 19 nt, Artificial Sequence
  Description of Artificial Sequence: Synthetic oligonucleotide
  Sense strand starting at position 2430 of SEQ ID NO: 1560934
cagcuucucuuugcggaua

SEQ ID NO: 1635038 - RNA, 19 nt, Artificial Sequence
  Description of Artificial Sequence: Synthetic oligonucleotide
  Antisense strand to SEQ ID NO: 1635037
uauccgcaaagagaagcug

SEQ ID NO: 1635039 - RNA, 19 nt, Artificial Sequence
  Description of Artificial Sequence: Synthetic oligonucleotide
  Sense strand starting at position 2433 of SEQ ID NO: 1560934
cuucucuuugcggauagua

SEQ ID NO: 1635040 - RNA, 19 nt, Artificial Sequence
  Description of Artificial Sequence: Synthetic oligonucleotide
  Antisense strand to SEQ ID NO: 1635039
uacuauccgcaaagagaag

SEQ ID NO: 1635041 - RNA, 19 nt, Artificial Sequence
  Description of Artificial Sequence: Synthetic oligonucleotide
  Sense strand starting at position 2435 of SEQ ID NO: 1560934
ucucuuugcggauaguaag

SEQ ID NO: 1635042 - RNA, 19 nt, Artificial Sequence
  Description of Artificial Sequence: Synthetic oligonucleotide
  Antisense strand to SEQ ID NO: 1635041
cuuacuauccgcaaagaga

SEQ ID NO: 1635043 - RNA, 19 nt, Artificial Sequence
  Description of Artificial Sequence: Synthetic oligonucleotide
  Sense strand starting at position 2526 of SEQ ID NO: 1560934
gcacauaaugaggguuacu

SEQ ID NO: 1635044 - RNA, 19 nt, Artificial Sequence
  Description of Artificial Sequence: Synthetic oligonucleotide
  Antisense strand to SEQ ID NO: 1635043
aguaacccucauuaugugc

SEQ ID NO: 1635045 - RNA, 19 nt, Artificial Sequence
  Description of Artificial Sequence: Synthetic oligonucleotide
  Sense strand starting at position 2535 of SEQ ID NO: 1560934
gaggguuacuaauaaguau

SEQ ID NO: 1635046 - RNA, 19 nt, Artificial Sequence
  Description of Artificial Sequence: Synthetic oligonucleotide
  Antisense strand to SEQ ID NO: 1635045
auacuuauuaguaacccuc

SEQ ID NO: 1635047 - RNA, 19 nt, Artificial Sequence
  Description of Artificial Sequence: Synthetic oligonucleotide
  Sense strand starting at position 2645 of SEQ ID NO: 1560934
caguucucugucuaaugga

SEQ ID NO: 1635048 - RNA, 19 nt, Artificial Sequence
  Description of Artificial Sequence: Synthetic oligonucleotide
  Antisense strand to SEQ ID NO: 1635047
uccauuagacagagaacug

SEQ ID NO: 1635049 - RNA, 19 nt, Artificial Sequence
  Description of Artificial Sequence: Synthetic oligonucleotide
  Sense strand starting at position 2654 of SEQ ID NO: 1560934
gucuaauggaguuacuguu

SEQ ID NO: 1635050 - RNA, 19 nt, Artificial Sequence
  Description of Artificial Sequence: Synthetic oligonucleotide
  Antisense strand to SEQ ID NO: 1635049
aacaguaacuccauuagac

SEQ ID NO: 1635051 - RNA, 19 nt, Artificial Sequence
  Description of Artificial Sequence: Synthetic oligonucleotide
  Sense strand starting at position 2698 of SEQ ID NO: 1560934
guaccaugcucagugcuga

SEQ ID NO: 1635052 - RNA, 19 nt, Artificial Sequence
  Description of Artificial Sequence: Synthetic oligonucleotide
  Antisense strand to SEQ ID NO: 1635051
ucagcacugagcaugguac

SEQ ID NO: 1635053 - RNA, 19 nt, Artificial Sequence
  Description of Artificial Sequence: Synthetic oligonucleotide
  Sense strand starting at position 2699 of SEQ ID NO: 1560934
uaccaugcucagugcugaa

SEQ ID NO: 1635054 - RNA, 19 nt, Artificial Sequence
  Description of Artificial Sequence: Synthetic oligonucleotide
  Antisense strand to SEQ ID NO: 1635053
uucagcacugagcauggua

SEQ ID NO: 1635055 - RNA, 19 nt, Artificial Sequence
  Description of Artificial Sequence: Synthetic oligonucleotide
  Sense strand starting at position 3189 of SEQ ID NO: 1560934
guaagugacucucccaaua

SEQ ID NO: 1635056 - RNA, 19 nt, Artificial Sequence
  Description of Artificial Sequence: Synthetic oligonucleotide
  Antisense strand to SEQ ID NO: 1635055
uauugggagagucacuuac

SEQ ID NO: 1635057 - RNA, 19 nt, Artificial Sequence
  Description of Artificial Sequence: Synthetic oligonucleotide
  Sense strand starting at position 3739 of SEQ ID NO: 1560934
ugugcugagcucugggaaa

SEQ ID NO: 1635058 - RNA, 19 nt, Artificial Sequence
  Description of Artificial Sequence: Synthetic oligonucleotide
  Antisense strand to SEQ ID NO: 1635057
uuucccagagcucagcaca

SEQ ID NO: 1635059 - RNA, 19 nt, Artificial Sequence
  Description of Artificial Sequence: Synthetic oligonucleotide
  Sense strand starting at position 3741 of SEQ ID NO: 1560934
ugcugagcucugggaaaug

SEQ ID NO: 1635060 - RNA, 19 nt, Artificial Sequence
  Description of Artificial Sequence: Synthetic oligonucleotide
  Antisense strand to SEQ ID NO: 1635059
cauuucccagagcucagca

SEQ ID NO: 1635061 - RNA, 19 nt, Artificial Sequence
  Description of Artificial Sequence: Synthetic oligonucleotide
  Sense strand starting at position 3965 of SEQ ID NO: 1560934
uguuuagugguaggucuuu

SEQ ID NO: 1635062 - RNA, 19 nt, Artificial Sequence
  Description of Artificial Sequence: Synthetic oligonucleotide
  Antisense strand to SEQ ID NO: 1635061
aaagaccuaccacuaaaca

SEQ ID NO: 1635063 - RNA, 19 nt, Artificial Sequence
  Description of Artificial Sequence: Synthetic oligonucleotide
  Sense strand starting at position 6 of SEQ ID NO: 1560935
ggaauaucaagguggugau

SEQ ID NO: 1635064 - RNA, 19 nt, Artificial Sequence
  Description of Artificial Sequence: Synthetic oligonucleotide
  Antisense strand to SEQ ID NO: 1635063
aucaccaccuugauauucc

SEQ ID NO: 1635065 - RNA, 19 nt, Artificial Sequence
  Description of Artificial Sequence: Synthetic oligonucleotide
  Sense strand starting at position 7 of SEQ ID NO: 1560935
gaauaucaagguggugauu

SEQ ID NO: 1635066 - RNA, 19 nt, Artificial Sequence
  Description of Artificial Sequence: Synthetic oligonucleotide
  Antisense strand to SEQ ID NO: 1635065
aaucaccaccuugauauuc

SEQ ID NO: 1635067 - RNA, 19 nt, Artificial Sequence
  Description of Artificial Sequence: Synthetic oligonucleotide
  Sense strand starting at position 53 of SEQ ID NO: 1560935
gaaggauucucugagaaag

SEQ ID NO: 1635068 - RNA, 19 nt, Artificial Sequence
  Description of Artificial Sequence: Synthetic oligonucleotide
  Antisense strand to SEQ ID NO: 1635067
cuuucucagagaauccuuc

SEQ ID NO: 1635069 - RNA, 19 nt, Artificial Sequence
  Description of Artificial Sequence: Synthetic oligonucleotide
  Sense strand starting at position 116 of SEQ ID NO: 1560935
acgggaaacuuccauuugu

SEQ ID NO: 1635070 - RNA, 19 nt, Artificial Sequence
  Description of Artificial Sequence: Synthetic oligonucleotide
  Antisense strand to SEQ ID NO: 1635069
acaaauggaaguuucccgu

SEQ ID NO: 1635071 - RNA, 19 nt, Artificial Sequence
  Description of Artificial Sequence: Synthetic oligonucleotide
  Sense strand starting at position 137 of SEQ ID NO: 1560935
cacgucuugguccagauaa

SEQ ID NO: 1635072 - RNA, 19 nt, Artificial Sequence
  Description of Artificial Sequence: Synthetic oligonucleotide
  Antisense strand to SEQ ID NO: 1635071
uuaucuggaccaagacgug

SEQ ID NO: 1635073 - RNA, 19 nt, Artificial Sequence
  Description of Artificial Sequence: Synthetic oligonucleotide
  Sense strand starting at position 139 of SEQ ID NO: 1560935
cgucuugguccagauaaau

SEQ ID NO: 1635074 - RNA, 19 nt, Artificial Sequence
  Description of Artificial Sequence: Synthetic oligonucleotide
  Antisense strand to SEQ ID NO: 1635073
auuuaucuggaccaagacg

SEQ ID NO: 1635075 - RNA, 19 nt, Artificial Sequence
  Description of Artificial Sequence: Synthetic oligonucleotide
  Sense strand starting at position 148 of SEQ ID NO: 1560935
ccagauaaaucccaggaag

SEQ ID NO: 1635076 - RNA, 19 nt, Artificial Sequence
  Description of Artificial Sequence: Synthetic oligonucleotide
  Antisense strand to SEQ ID NO: 1635075
cuuccugggauuuaucugg

SEQ ID NO: 1635077 - RNA, 19 nt, Artificial Sequence
  Description of Artificial Sequence: Synthetic oligonucleotide
  Sense strand starting at position 399 of SEQ ID NO: 1560935
ucuaauaguuuccugagca

SEQ ID NO: 1635078 - RNA, 19 nt, Artificial Sequence
  Description of Artificial Sequence: Synthetic oligonucleotide
  Antisense strand to SEQ ID NO: 1635077
ugcucaggaaacuauuaga

SEQ ID NO: 1635079 - RNA, 19 nt, Artificial Sequence
  Description of Artificial Sequence: Synthetic oligonucleotide
  Sense strand starting at position 403 of SEQ ID NO: 1560935
auaguuuccugagcaggaa

SEQ ID NO: 1635080 - RNA, 19 nt, Artificial Sequence
  Description of Artificial Sequence: Synthetic oligonucleotide
  Antisense strand to SEQ ID NO: 1635079
uuccugcucaggaaacuau

SEQ ID NO: 1635081 - RNA, 19 nt, Artificial Sequence
  Description of Artificial Sequence: Synthetic oligonucleotide
  Sense strand starting at position 404 of SEQ ID NO: 1560935
uaguuuccugagcaggaaa

SEQ ID NO: 1635082 - RNA, 19 nt, Artificial Sequence
  Description of Artificial Sequence: Synthetic oligonucleotide
  Antisense strand to SEQ ID NO: 1635081
uuuccugcucaggaaacua

SEQ ID NO: 1635083 - RNA, 19 nt, Artificial Sequence
  Description of Artificial Sequence: Synthetic oligonucleotide
  Sense strand starting at position 407 of SEQ ID NO: 1560935
uuuccugagcaggaaaguu

SEQ ID NO: 1635084 - RNA, 19 nt, Artificial Sequence
  Description of Artificial Sequence: Synthetic oligonucleotide
  Antisense strand to SEQ ID NO: 1635083
aacuuuccugcucaggaaa

SEQ ID NO: 1635085 - RNA, 19 nt, Artificial Sequence
  Description of Artificial Sequence: Synthetic oligonucleotide
  Sense strand starting at position 415 of SEQ ID NO: 1560935
gcaggaaaguuccuaguuc

SEQ ID NO: 1635086 - RNA, 19 nt, Artificial Sequence
  Description of Artificial Sequence: Synthetic oligonucleotide
  Antisense strand to SEQ ID NO: 1635085
gaacuaggaacuuuccugc

SEQ ID NO: 1635087 - RNA, 19 nt, Artificial Sequence
  Description of Artificial Sequence: Synthetic oligonucleotide
  Sense strand starting at position 866 of SEQ ID NO: 1560935
gacaucugucaugggaaac

SEQ ID NO: 1635088 - RNA, 19 nt, Artificial Sequence
  Description of Artificial Sequence: Synthetic oligonucleotide
  Antisense strand to SEQ ID NO: 1635087
guuucccaugacagauguc

SEQ ID NO: 1635089 - RNA, 19 nt, Artificial Sequence
  Description of Artificial Sequence: Synthetic oligonucleotide
  Sense strand starting at position 1198 of SEQ ID NO: 1560935
cucauaaggcaaugaagau

SEQ ID NO: 1635090 - RNA, 19 nt, Artificial Sequence
  Description of Artificial Sequence: Synthetic oligonucleotide
  Antisense strand to SEQ ID NO: 1635089
aucuucauugccuuaugag

SEQ ID NO: 1635091 - RNA, 19 nt, Artificial Sequence
  Description of Artificial Sequence: Synthetic oligonucleotide
  Sense strand starting at position 1233 of SEQ ID NO: 1560935
cgagaucuauuuggaagaa

SEQ ID NO: 1635092 - RNA, 19 nt, Artificial Sequence
  Description of Artificial Sequence: Synthetic oligonucleotide
  Antisense strand to SEQ ID NO: 1635091
uucuuccaaauagaucucg

SEQ ID NO: 1635093 - RNA, 19 nt, Artificial Sequence
  Description of Artificial Sequence: Synthetic oligonucleotide
  Sense strand starting at position 1282 of SEQ ID NO: 1560935
uucuguugucagggacuca

SEQ ID NO: 1635094 - RNA, 19 nt, Artificial Sequence
  Description of Artificial Sequence: Synthetic oligonucleotide
  Antisense strand to SEQ ID NO: 1635093
ugagucccugacaacagaa

SEQ ID NO: 1635095 - RNA, 19 nt, Artificial Sequence
  Description of Artificial Sequence: Synthetic oligonucleotide
  Sense strand starting at position 1324 of SEQ ID NO: 1560935
ccaggaaucugauuccuca

SEQ ID NO: 1635096 - RNA, 19 nt, Artificial Sequence
  Description of Artificial Sequence: Synthetic oligonucleotide
  Antisense strand to SEQ ID NO: 1635095
ugaggaaucagauuccugg

SEQ ID NO: 1635097 - RNA, 19 nt, Artificial Sequence
  Description of Artificial Sequence: Synthetic oligonucleotide
  Sense strand starting at position 1771 of SEQ ID NO: 1560935
aaaggucgguuugcugaaa

SEQ ID NO: 1635098 - RNA, 19 nt, Artificial Sequence
  Description of Artificial Sequence: Synthetic oligonucleotide
  Antisense strand to SEQ ID NO: 1635097
uuucagcaaaccgaccuuu

SEQ ID NO: 1635099 - RNA, 19 nt, Artificial Sequence
  Description of Artificial Sequence: Synthetic oligonucleotide
  Sense strand starting at position 1810 of SEQ ID NO: 1560935
cuaguaagcuggcuggauu

SEQ ID NO: 1635100 - RNA, 19 nt, Artificial Sequence
  Description of Artificial Sequence: Synthetic oligonucleotide
  Antisense strand to SEQ ID NO: 1635099
aauccagccagcuuacuag

SEQ ID NO: 1635101 - RNA, 19 nt, Artificial Sequence
  Description of Artificial Sequence: Synthetic oligonucleotide
  Sense strand starting at position 1811 of SEQ ID NO: 1560935
uaguaagcuggcuggauua

SEQ ID NO: 1635102 - RNA, 19 nt, Artificial Sequence
  Description of Artificial Sequence: Synthetic oligonucleotide
  Antisense strand to SEQ ID NO: 1635101
uaauccagccagcuuacua

SEQ ID NO: 1635103 - RNA, 19 nt, Artificial Sequence
  Description of Artificial Sequence: Synthetic oligonucleotide
  Sense strand starting at position 1813 of SEQ ID NO: 1560935
guaagcuggcuggauuaaa

SEQ ID NO: 1635104 - RNA, 19 nt, Artificial Sequence
  Description of Artificial Sequence: Synthetic oligonucleotide
  Antisense strand to SEQ ID NO: 1635103
uuuaauccagccagcuuac

SEQ ID NO: 1635105 - RNA, 19 nt, Artificial Sequence
  Description of Artificial Sequence: Synthetic oligonucleotide
  Sense strand starting at position 2076 of SEQ ID NO: 1560935
guuuccgagcgcuugguaa

SEQ ID NO: 1635106 - RNA, 19 nt, Artificial Sequence
  Description of Artificial Sequence: Synthetic oligonucleotide
  Antisense strand to SEQ ID NO: 1635105
uuaccaagcgcucggaaac

SEQ ID NO: 1635107 - RNA, 19 nt, Artificial Sequence
  Description of Artificial Sequence: Synthetic oligonucleotide
  Sense strand starting at position 2167 of SEQ ID NO: 1560935
ccuggagggcuuggguaaa

SEQ ID NO: 1635108 - RNA, 19 nt, Artificial Sequence
  Description of Artificial Sequence: Synthetic oligonucleotide
  Antisense strand to SEQ ID NO: 1635107
uuuacccaagcccuccagg

SEQ ID NO: 1635109 - RNA, 19 nt, Artificial Sequence
  Description of Artificial Sequence: Synthetic oligonucleotide
  Sense strand starting at position 2190 of SEQ ID NO: 1560935
gcugaauauuuagcuucga

SEQ ID NO: 1635110 - RNA, 19 nt, Artificial Sequence
  Description of Artificial Sequence: Synthetic oligonucleotide
  Antisense strand to SEQ ID NO: 1635109
ucgaagcuaaauauucagc

SEQ ID NO: 1635111 - RNA, 19 nt, Artificial Sequence
  Description of Artificial Sequence: Synthetic oligonucleotide
  Sense strand starting at position 2761 of SEQ ID NO: 1560935
cgccgaugcacucaugaug

SEQ ID NO: 1635112 - RNA, 19 nt, Artificial Sequence
  Description of Artificial Sequence: Synthetic oligonucleotide
  Antisense strand to SEQ ID NO: 1635111
caucaugagugcaucggcg

SEQ ID NO: 1635113 - RNA, 19 nt, Artificial Sequence
  Description of Artificial Sequence: Synthetic oligonucleotide
  Sense strand starting at position 2940 of SEQ ID NO: 1560935
gacggaucacacugugagu

SEQ ID NO: 1635114 - RNA, 19 nt, Artificial Sequence
  Description of Artificial Sequence: Synthetic oligonucleotide
  Antisense strand to SEQ ID NO: 1635113
acucacagugugauccguc

SEQ ID NO: 1635115 - RNA, 19 nt, Artificial Sequence
  Description of Artificial Sequence: Synthetic oligonucleotide
  Sense strand starting at position 2942 of SEQ ID NO: 1560935
cggaucacacugugaguaa

SEQ ID NO: 1635116 - RNA, 19 nt, Artificial Sequence
  Description of Artificial Sequence: Synthetic oligonucleotide
  Antisense strand to SEQ ID NO: 1635115
uuacucacagugugauccg

SEQ ID NO: 1635117 - RNA, 19 nt, Artificial Sequence
  Description of Artificial Sequence: Synthetic oligonucleotide
  Sense strand starting at position 3071 of SEQ ID NO: 1560935
augauagcuucuucgaggu

SEQ ID NO: 1635118 - RNA, 19 nt, Artificial Sequence
  Description of Artificial Sequence: Synthetic oligonucleotide
  Antisense strand to SEQ ID NO: 1635117
accucgaagaagcuaucau

SEQ ID NO: 1635119 - RNA, 19 nt, Artificial Sequence
  Description of Artificial Sequence: Synthetic oligonucleotide
  Sense strand starting at position 3197 of SEQ ID NO: 1560935
aagagaugaaugugugcga

SEQ ID NO: 1635120 - RNA, 19 nt, Artificial Sequence
  Description of Artificial Sequence: Synthetic oligonucleotide
  Antisense strand to SEQ ID NO: 1635119
ucgcacacauucaucucuu

SEQ ID NO: 1635121 - RNA, 19 nt, Artificial Sequence
  Description of Artificial Sequence: Synthetic oligonucleotide
  Sense strand starting at position 3200 of SEQ ID NO: 1560935
agaugaaugugugcgacaa

SEQ ID NO: 1635122 - RNA, 19 nt, Artificial Sequence
  Description of Artificial Sequence: Synthetic oligonucleotide
  Antisense strand to SEQ ID NO: 1635121
uugucgcacacauucaucu

SEQ ID NO: 1635123 - RNA, 19 nt, Artificial Sequence
  Description of Artificial Sequence: Synthetic oligonucleotide
  Sense strand starting at position 3201 of SEQ ID NO: 1560935
gaugaaugugugcgacaac

SEQ ID NO: 1635124 - RNA, 19 nt, Artificial Sequence
  Description of Artificial Sequence: Synthetic oligonucleotide
  Antisense strand to SEQ ID NO: 1635123
guugucgcacacauucauc

SEQ ID NO: 1635125 - RNA, 19 nt, Artificial Sequence
  Description of Artificial Sequence: Synthetic oligonucleotide
  Sense strand starting at position 3204 of SEQ ID NO: 1560935
gaaugugugcgacaaccuu

SEQ ID NO: 1635126 - RNA, 19 nt, Artificial Sequence
  Description of Artificial Sequence: Synthetic oligonucleotide
  Antisense strand to SEQ ID NO: 1635125
aagguugucgcacacauuc

SEQ ID NO: 1635127 - RNA, 19 nt, Artificial Sequence
  Description of Artificial Sequence: Synthetic oligonucleotide
  Sense strand starting at position 3237 of SEQ ID NO: 1560935
gggcaacgucuaugucaag

SEQ ID NO: 1635128 - RNA, 19 nt, Artificial Sequence
  Description of Artificial Sequence: Synthetic oligonucleotide
  Antisense strand to SEQ ID NO: 1635127
cuugacauagacguugccc

SEQ ID NO: 1635129 - RNA, 19 nt, Artificial Sequence
  Description of Artificial Sequence: Synthetic oligonucleotide
  Sense strand starting at position 3322 of SEQ ID NO: 1560935
aggcucucagcuugaauuu

SEQ ID NO: 1635130 - RNA, 19 nt, Artificial Sequence
  Description of Artificial Sequence: Synthetic oligonucleotide
  Antisense strand to SEQ ID NO: 1635129
aaauucaagcugagagccu

SEQ ID NO: 1635131 - RNA, 19 nt, Artificial Sequence
  Description of Artificial Sequence: Synthetic oligonucleotide
  Sense strand starting at position 3525 of SEQ ID NO: 1560935
cacugacuuccgggaguca

SEQ ID NO: 1635132 - RNA, 19 nt, Artificial Sequence
  Description of Artificial Sequence: Synthetic oligonucleotide
  Antisense strand to SEQ ID NO: 1635131
ugacucccggaagucagug

SEQ ID NO: 1635133 - RNA, 19 nt, Artificial Sequence
  Description of Artificial Sequence: Synthetic oligonucleotide
  Sense strand starting at position 3526 of SEQ ID NO: 1560935
acugacuuccgggagucau

SEQ ID NO: 1635134 - RNA, 19 nt, Artificial Sequence
  Description of Artificial Sequence: Synthetic oligonucleotide
  Antisense strand to SEQ ID NO: 1635133
augacucccggaagucagu

SEQ ID NO: 1635135 - RNA, 19 nt, Artificial Sequence
  Description of Artificial Sequence: Synthetic oligonucleotide
  Sense strand starting at position 3539 of SEQ ID NO: 1560935
agucaugcugucgccagua

SEQ ID NO: 1635136 - RNA, 19 nt, Artificial Sequence
  Description of Artificial Sequence: Synthetic oligonucleotide
  Antisense strand to SEQ ID NO: 1635135
uacuggcgacagcaugacu

SEQ ID NO: 1635137 - RNA, 19 nt, Artificial Sequence
  Description of Artificial Sequence: Synthetic oligonucleotide
  Sense strand starting at position 3606 of SEQ ID NO: 1560935
agacuuugaaugcguggua

SEQ ID NO: 1635138 - RNA, 19 nt, Artificial Sequence
  Description of Artificial Sequence: Synthetic oligonucleotide
  Antisense strand to SEQ ID NO: 1635137
uaccacgcauucaaagucu

SEQ ID NO: 1635139 - RNA, 19 nt, Artificial Sequence
  Description of Artificial Sequence: Synthetic oligonucleotide
  Sense strand starting at position 3663 of SEQ ID NO: 1560935
ccucuaugcagggaaugua

SEQ ID NO: 1635140 - RNA, 19 nt, Artificial Sequence
  Description of Artificial Sequence: Synthetic oligonucleotide
  Antisense strand to SEQ ID NO: 1635139
uacauucccugcauagagg

SEQ ID NO: 1635141 - RNA, 19 nt, Artificial Sequence
  Description of Artificial Sequence: Synthetic oligonucleotide
  Sense strand starting at position 3853 of SEQ ID NO: 1560935
ccacguucccaagaaucuu

SEQ ID NO: 1635142 - RNA, 19 nt, Artificial Sequence
  Description of Artificial Sequence: Synthetic oligonucleotide
  Antisense strand to SEQ ID NO: 1635141
aagauucuugggaacgugg

SEQ ID NO: 1635143 - RNA, 19 nt, Artificial Sequence
  Description of Artificial Sequence: Synthetic oligonucleotide
  Sense strand starting at position 83 of SEQ ID NO: 1560936
gacauaacgcagugaguga

SEQ ID NO: 1635144 - RNA, 19 nt, Artificial Sequence
  Description of Artificial Sequence: Synthetic oligonucleotide
  Antisense strand to SEQ ID NO: 1635143
ucacucacugcguuauguc

SEQ ID NO: 1635145 - RNA, 19 nt, Artificial Sequence
  Description of Artificial Sequence: Synthetic oligonucleotide
  Sense strand starting at position 181 of SEQ ID NO: 1560936
uggaaucacuuacggugua

SEQ ID NO: 1635146 - RNA, 19 nt, Artificial Sequence
  Description of Artificial Sequence: Synthetic oligonucleotide
  Antisense strand to SEQ ID NO: 1635145
uacaccguaagugauucca

SEQ ID NO: 1635147 - RNA, 19 nt, Artificial Sequence
  Description of Artificial Sequence: Synthetic oligonucleotide
  Sense strand starting at position 182 of SEQ ID NO: 1560936
ggaaucacuuacgguguaa

SEQ ID NO: 1635148 - RNA, 19 nt, Artificial Sequence
  Description of Artificial Sequence: Synthetic oligonucleotide
  Antisense strand to SEQ ID NO: 1635147
uuacaccguaagugauucc

SEQ ID NO: 1635149 - RNA, 19 nt, Artificial Sequence
  Description of Artificial Sequence: Synthetic oligonucleotide
  Sense strand starting at position 242 of SEQ ID NO: 1560936
cucccuuuaugauguguaa

SEQ ID NO: 1635150 - RNA, 19 nt, Artificial Sequence
  Description of Artificial Sequence: Synthetic oligonucleotide
  Antisense strand to SEQ ID NO: 1635149
uuacacaucauaaagggag

SEQ ID NO: 1635151 - RNA, 19 nt, Artificial Sequence
  Description of Artificial Sequence: Synthetic oligonucleotide
  Sense strand starting at position 245 of SEQ ID NO: 1560936
ccuuuaugauguguaaggu

SEQ ID NO: 1635152 - RNA, 19 nt, Artificial Sequence
  Description of Artificial Sequence: Synthetic oligonucleotide
  Antisense strand to SEQ ID NO: 1635151
accuuacacaucauaaagg

SEQ ID NO: 1635153 - RNA, 19 nt, Artificial Sequence
  Description of Artificial Sequence: Synthetic oligonucleotide
  Sense strand starting at position 423 of SEQ ID NO: 1560936
ccagauguagccgguaaga

SEQ ID NO: 1635154 - RNA, 19 nt, Artificial Sequence
  Description of Artificial Sequence: Synthetic oligonucleotide
  Antisense strand to SEQ ID NO: 1635153
ucuuaccggcuacaucugg

SEQ ID NO: 1635155 - RNA, 19 nt, Artificial Sequence
  Description of Artificial Sequence: Synthetic oligonucleotide
  Sense strand starting at position 425 of SEQ ID NO: 1560936
agauguagccgguaagauu

SEQ ID NO: 1635156 - RNA, 19 nt, Artificial Sequence
  Description of Artificial Sequence: Synthetic oligonucleotide
  Antisense strand to SEQ ID NO: 1635155
aaucuuaccggcuacaucu

SEQ ID NO: 1635157 - RNA, 19 nt, Artificial Sequence
  Description of Artificial Sequence: Synthetic oligonucleotide
  Sense strand starting at position 593 of SEQ ID NO: 1560936
gaccuauguauugguguga

SEQ ID NO: 1635158 - RNA, 19 nt, Artificial Sequence
  Description of Artificial Sequence: Synthetic oligonucleotide
  Antisense strand to SEQ ID NO: 1635157
ucacaccaauacauagguc

SEQ ID NO: 1635159 - RNA, 19 nt, Artificial Sequence
  Description of Artificial Sequence: Synthetic oligonucleotide
  Sense strand starting at position 594 of SEQ ID NO: 1560936
accuauguauuggugugaa

SEQ ID NO: 1635160 - RNA, 19 nt, Artificial Sequence
  Description of Artificial Sequence: Synthetic oligonucleotide
  Antisense strand to SEQ ID NO: 1635159
uucacaccaauacauaggu

SEQ ID NO: 1635161 - RNA, 19 nt, Artificial Sequence
  Description of Artificial Sequence: Synthetic oligonucleotide
  Sense strand starting at position 1045 of SEQ ID NO: 1560936
agcgugagcuccgugaaga

SEQ ID NO: 1635162 - RNA, 19 nt, Artificial Sequence
  Description of Artificial Sequence: Synthetic oligonucleotide
  Antisense strand to SEQ ID NO: 1635161
ucuucacggagcucacgcu

SEQ ID NO: 1635163 - RNA, 19 nt, Artificial Sequence
  Description of Artificial Sequence: Synthetic oligonucleotide
  Sense strand starting at position 1046 of SEQ ID NO: 1560936
gcgugagcuccgugaagac

SEQ ID NO: 1635164 - RNA, 19 nt, Artificial Sequence
  Description of Artificial Sequence: Synthetic oligonucleotide
  Antisense strand to SEQ ID NO: 1635163
gucuucacggagcucacgc

SEQ ID NO: 1635165 - RNA, 19 nt, Artificial Sequence
  Description of Artificial Sequence: Synthetic oligonucleotide
  Sense strand starting at position 1199 of SEQ ID NO: 1560936
caguguuuccugcccuguu

SEQ ID NO: 1635166 - RNA, 19 nt, Artificial Sequence
  Description of Artificial Sequence: Synthetic oligonucleotide
  Antisense strand to SEQ ID NO: 1635165
aacagggcaggaaacacug

SEQ ID NO: 1635167 - RNA, 19 nt, Artificial Sequence
  Description of Artificial Sequence: Synthetic oligonucleotide
  Sense strand starting at position 1201 of SEQ ID NO: 1560936
guguuuccugcccuguuua

SEQ ID NO: 1635168 - RNA, 19 nt, Artificial Sequence
  Description of Artificial Sequence: Synthetic oligonucleotide
  Antisense strand to SEQ ID NO: 1635167
uaaacagggcaggaaacac

SEQ ID NO: 1635169 - RNA, 19 nt, Artificial Sequence
  Description of Artificial Sequence: Synthetic oligonucleotide
  Sense strand starting at position 1230 of SEQ ID NO: 1560936
ugaggugucaucugcuaua

SEQ ID NO: 1635170 - RNA, 19 nt, Artificial Sequence
  Description of Artificial Sequence: Synthetic oligonucleotide
  Antisense strand to SEQ ID NO: 1635169
uauagcagaugacaccuca

SEQ ID NO: 1635171 - RNA, 19 nt, Artificial Sequence
  Description of Artificial Sequence: Synthetic oligonucleotide
  Sense strand starting at position 1233 of SEQ ID NO: 1560936
ggugucaucugcuauaguu

SEQ ID NO: 1635172 - RNA, 19 nt, Artificial Sequence
  Description of Artificial Sequence: Synthetic oligonucleotide
  Antisense strand to SEQ ID NO: 1635171
aacuauagcagaugacacc

SEQ ID NO: 1635173 - RNA, 19 nt, Artificial Sequence
  Description of Artificial Sequence: Synthetic oligonucleotide
  Sense strand starting at position 1235 of SEQ ID NO: 1560936
ugucaucugcuauaguuau

SEQ ID NO: 1635174 - RNA, 19 nt, Artificial Sequence
  Description of Artificial Sequence: Synthetic oligonucleotide
  Antisense strand to SEQ ID NO: 1635173
auaacuauagcagaugaca

SEQ ID NO: 1635175 - RNA, 19 nt, Artificial Sequence
  Description of Artificial Sequence: Synthetic oligonucleotide
  Sense strand starting at position 1492 of SEQ ID NO: 1560936
ggugcuaucucagcuaucu

SEQ ID NO: 1635176 - RNA, 19 nt, Artificial Sequence
  Description of Artificial Sequence: Synthetic oligonucleotide
  Antisense strand to SEQ ID NO: 1635175
agauagcugagauagcacc

SEQ ID NO: 1635177 - RNA, 19 nt, Artificial Sequence
  Description of Artificial Sequence: Synthetic oligonucleotide
  Sense strand starting at position 1565 of SEQ ID NO: 1560936
cuaggauuauaggagcaca

SEQ ID NO: 1635178 - RNA, 19 nt, Artificial Sequence
  Description of Artificial Sequence: Synthetic oligonucleotide
  Antisense strand to SEQ ID NO: 1635177
ugugcuccuauaauccuag

SEQ ID NO: 1635179 - RNA, 19 nt, Artificial Sequence
  Description of Artificial Sequence: Synthetic oligonucleotide
  Sense strand starting at position 1909 of SEQ ID NO: 1560936
uccagaaacucucugagca

SEQ ID NO: 1635180 - RNA, 19 nt, Artificial Sequence
  Description of Artificial Sequence: Synthetic oligonucleotide
  Antisense strand to SEQ ID NO: 1635179
ugcucagagaguuucugga

SEQ ID NO: 1635181 - RNA, 19 nt, Artificial Sequence
  Description of Artificial Sequence: Synthetic oligonucleotide
  Sense strand starting at position 2391 of SEQ ID NO: 1560936
guaccaggucccugucaga

SEQ ID NO: 1635182 - RNA, 19 nt, Artificial Sequence
  Description of Artificial Sequence: Synthetic oligonucleotide
  Antisense strand to SEQ ID NO: 1635181
ucugacagggaccugguac

SEQ ID NO: 1635183 - RNA, 19 nt, Artificial Sequence
  Description of Artificial Sequence: Synthetic oligonucleotide
  Sense strand starting at position 2396 of SEQ ID NO: 1560936
aggucccugucagaaugau

SEQ ID NO: 1635184 - RNA, 19 nt, Artificial Sequence
  Description of Artificial Sequence: Synthetic oligonucleotide
  Antisense strand to SEQ ID NO: 1635183
aucauucugacagggaccu

SEQ ID NO: 1635185 - RNA, 19 nt, Artificial Sequence
  Description of Artificial Sequence: Synthetic oligonucleotide
  Sense strand starting at position 2693 of SEQ ID NO: 1560936
gcucauaguuucucauguu

SEQ ID NO: 1635186 - RNA, 19 nt, Artificial Sequence
  Description of Artificial Sequence: Synthetic oligonucleotide
  Antisense strand to SEQ ID NO: 1635185
aacaugagaaacuaugagc

SEQ ID NO: 1635187 - RNA, 19 nt, Artificial Sequence
  Description of Artificial Sequence: Synthetic oligonucleotide
  Sense strand starting at position 2832 of SEQ ID NO: 1560936
ggcucauugagaugcggga

SEQ ID NO: 1635188 - RNA, 19 nt, Artificial Sequence
  Description of Artificial Sequence: Synthetic oligonucleotide
  Antisense strand to SEQ ID NO: 1635187
ucccgcaucucaaugagcc

SEQ ID NO: 1635189 - RNA, 19 nt, Artificial Sequence
  Description of Artificial Sequence: Synthetic oligonucleotide
  Sense strand starting at position 3023 of SEQ ID NO: 1560936
gccugucuggagggacauu

SEQ ID NO: 1635190 - RNA, 19 nt, Artificial Sequence
  Description of Artificial Sequence: Synthetic oligonucleotide
  Antisense strand to SEQ ID NO: 1635189
aaugucccuccagacaggc

SEQ ID NO: 1635191 - RNA, 19 nt, Artificial Sequence
  Description of Artificial Sequence: Synthetic oligonucleotide
  Sense strand starting at position 3035 of SEQ ID NO: 1560936
ggacauugcucucaccuga

SEQ ID NO: 1635192 - RNA, 19 nt, Artificial Sequence
  Description of Artificial Sequence: Synthetic oligonucleotide
  Antisense strand to SEQ ID NO: 1635191
ucaggugagagcaaugucc

SEQ ID NO: 1635193 - RNA, 19 nt, Artificial Sequence
  Description of Artificial Sequence: Synthetic oligonucleotide
  Sense strand starting at position 3069 of SEQ ID NO: 1560936
ugaguuguguucugagauc

SEQ ID NO: 1635194 - RNA, 19 nt, Artificial Sequence
  Description of Artificial Sequence: Synthetic oligonucleotide
  Antisense strand to SEQ ID NO: 1635193
gaucucagaacacaacuca

SEQ ID NO: 1635195 - RNA, 19 nt, Artificial Sequence
  Description of Artificial Sequence: Synthetic oligonucleotide
  Sense strand starting at position 3797 of SEQ ID NO: 1560936
cgaggucacaccuguguua

SEQ ID NO: 1635196 - RNA, 19 nt, Artificial Sequence
  Description of Artificial Sequence: Synthetic oligonucleotide
  Antisense strand to SEQ ID NO: 1635195
uaacacaggugugaccucg

SEQ ID NO: 1635197 - RNA, 19 nt, Artificial Sequence
  Description of Artificial Sequence: Synthetic oligonucleotide
  Sense strand starting at position 3799 of SEQ ID NO: 1560936
aggucacaccuguguuaug

SEQ ID NO: 1635198 - RNA, 19 nt, Artificial Sequence
  Description of Artificial Sequence: Synthetic oligonucleotide
  Antisense strand to SEQ ID NO: 1635197
cauaacacaggugugaccu

SEQ ID NO: 1635199 - RNA, 19 nt, Artificial Sequence
  Description of Artificial Sequence: Synthetic oligonucleotide
  Sense strand starting at position 3802 of SEQ ID NO: 1560936
ucacaccuguguuauguua

SEQ ID NO: 1635200 - RNA, 19 nt, Artificial Sequence
  Description of Artificial Sequence: Synthetic oligonucleotide
  Antisense strand to SEQ ID NO: 1635199
uaacauaacacagguguga

SEQ ID NO: 1635201 - RNA, 19 nt, Artificial Sequence
  Description of Artificial Sequence: Synthetic oligonucleotide
  Sense strand starting at position 3804 of SEQ ID NO: 1560936
acaccuguguuauguuaca

SEQ ID NO: 1635202 - RNA, 19 nt, Artificial Sequence
  Description of Artificial Sequence: Synthetic oligonucleotide
  Antisense strand to SEQ ID NO: 1635201
uguaacauaacacaggugu

SEQ ID NO: 1635203 - RNA, 19 nt, Artificial Sequence
  Description of Artificial Sequence: Synthetic oligonucleotide
  Sense strand starting at position 135 of SEQ ID NO: 1560937
gacauaacgcagugaguga

SEQ ID NO: 1635204 - RNA, 19 nt, Artificial Sequence
  Description of Artificial Sequence: Synthetic oligonucleotide
  Antisense strand to SEQ ID NO: 1635203
ucacucacugcguuauguc

SEQ ID NO: 1635205 - RNA, 19 nt, Artificial Sequence
  Description of Artificial Sequence: Synthetic oligonucleotide
  Sense strand starting at position 233 of SEQ ID NO: 1560937
uggaaucacuuacggugua

SEQ ID NO: 1635206 - RNA, 19 nt, Artificial Sequence
  Description of Artificial Sequence: Synthetic oligonucleotide
  Antisense strand to SEQ ID NO: 1635205
uacaccguaagugauucca

SEQ ID NO: 1635207 - RNA, 19 nt, Artificial Sequence
  Description of Artificial Sequence: Synthetic oligonucleotide
  Sense strand starting at position 234 of SEQ ID NO: 1560937
ggaaucacuuacgguguaa

SEQ ID NO: 1635208 - RNA, 19 nt, Artificial Sequence
  Description of Artificial Sequence: Synthetic oligonucleotide
  Antisense strand to SEQ ID NO: 1635207
uuacaccguaagugauucc

SEQ ID NO: 1635209 - RNA, 19 nt, Artificial Sequence
  Description of Artificial Sequence: Synthetic oligonucleotide
  Sense strand starting at position 294 of SEQ ID NO: 1560937
cucccuuuaugauguguaa

SEQ ID NO: 1635210 - RNA, 19 nt, Artificial Sequence
  Description of Artificial Sequence: Synthetic oligonucleotide
  Antisense strand to SEQ ID NO: 1635209
uuacacaucauaaagggag

SEQ ID NO: 1635211 - RNA, 19 nt, Artificial Sequence
  Description of Artificial Sequence: Synthetic oligonucleotide
  Sense strand starting at position 297 of SEQ ID NO: 1560937
ccuuuaugauguguaaggu

SEQ ID NO: 1635212 - RNA, 19 nt, Artificial Sequence
  Description of Artificial Sequence: Synthetic oligonucleotide
  Antisense strand to SEQ ID NO: 1635211
accuuacacaucauaaagg

SEQ ID NO: 1635213 - RNA, 19 nt, Artificial Sequence
  Description of Artificial Sequence: Synthetic oligonucleotide
  Sense strand starting at position 475 of SEQ ID NO: 1560937
ccagauguagccgguaaga

SEQ ID NO: 1635214 - RNA, 19 nt, Artificial Sequence
  Description of Artificial Sequence: Synthetic oligonucleotide
  Antisense strand to SEQ ID NO: 1635213
ucuuaccggcuacaucugg

SEQ ID NO: 1635215 - RNA, 19 nt, Artificial Sequence
  Description of Artificial Sequence: Synthetic oligonucleotide
  Sense strand starting at position 477 of SEQ ID NO: 1560937
agauguagccgguaagauu

SEQ ID NO: 1635216 - RNA, 19 nt, Artificial Sequence
  Description of Artificial Sequence: Synthetic oligonucleotide
  Antisense strand to SEQ ID NO: 1635215
aaucuuaccggcuacaucu

SEQ ID NO: 1635217 - RNA, 19 nt, Artificial Sequence
  Description of Artificial Sequence: Synthetic oligonucleotide
  Sense strand starting at position 645 of SEQ ID NO: 1560937
gaccuauguauugguguga

SEQ ID NO: 1635218 - RNA, 19 nt, Artificial Sequence
  Description of Artificial Sequence: Synthetic oligonucleotide
  Antisense strand to SEQ ID NO: 1635217
ucacaccaauacauagguc

SEQ ID NO: 1635219 - RNA, 19 nt, Artificial Sequence
  Description of Artificial Sequence: Synthetic oligonucleotide
  Sense strand starting at position 646 of SEQ ID NO: 1560937
accuauguauuggugugaa

SEQ ID NO: 1635220 - RNA, 19 nt, Artificial Sequence
  Description of Artificial Sequence: Synthetic oligonucleotide
  Antisense strand to SEQ ID NO: 1635219
uucacaccaauacauaggu

SEQ ID NO: 1635221 - RNA, 19 nt, Artificial Sequence
  Description of Artificial Sequence: Synthetic oligonucleotide
  Sense strand starting at position 1097 of SEQ ID NO: 1560937
agcgugagcuccgugaaga

SEQ ID NO: 1635222 - RNA, 19 nt, Artificial Sequence
  Description of Artificial Sequence: Synthetic oligonucleotide
  Antisense strand to SEQ ID NO: 1635221
ucuucacggagcucacgcu

SEQ ID NO: 1635223 - RNA, 19 nt, Artificial Sequence
  Description of Artificial Sequence: Synthetic oligonucleotide
  Sense strand starting at position 1098 of SEQ ID NO: 1560937
gcgugagcuccgugaagac

SEQ ID NO: 1635224 - RNA, 19 nt, Artificial Sequence
  Description of Artificial Sequence: Synthetic oligonucleotide
  Antisense strand to SEQ ID NO: 1635223
gucuucacggagcucacgc

SEQ ID NO: 1635225 - RNA, 19 nt, Artificial Sequence
  Description of Artificial Sequence: Synthetic oligonucleotide
  Sense strand starting at position 1251 of SEQ ID NO: 1560937
caguguuuccugcccuguu

SEQ ID NO: 1635226 - RNA, 19 nt, Artificial Sequence
  Description of Artificial Sequence: Synthetic oligonucleotide
  Antisense strand to SEQ ID NO: 1635225
aacagggcaggaaacacug

SEQ ID NO: 1635227 - RNA, 19 nt, Artificial Sequence
  Description of Artificial Sequence: Synthetic oligonucleotide
  Sense strand starting at position 1253 of SEQ ID NO: 1560937
guguuuccugcccuguuua

SEQ ID NO: 1635228 - RNA, 19 nt, Artificial Sequence
  Description of Artificial Sequence: Synthetic oligonucleotide
  Antisense strand to SEQ ID NO: 1635227
uaaacagggcaggaaacac

SEQ ID NO: 1635229 - RNA, 19 nt, Artificial Sequence
  Description of Artificial Sequence: Synthetic oligonucleotide
  Sense strand starting at position 1282 of SEQ ID NO: 1560937
ugaggugucaucugcuaua

SEQ ID NO: 1635230 - RNA, 19 nt, Artificial Sequence
  Description of Artificial Sequence: Synthetic oligonucleotide
  Antisense strand to SEQ ID NO: 1635229
uauagcagaugacaccuca

SEQ ID NO: 1635231 - RNA, 19 nt, Artificial Sequence
  Description of Artificial Sequence: Synthetic oligonucleotide
  Sense strand starting at position 1285 of SEQ ID NO: 1560937
ggugucaucugcuauaguu

SEQ ID NO: 1635232 - RNA, 19 nt, Artificial Sequence
  Description of Artificial Sequence: Synthetic oligonucleotide
  Antisense strand to SEQ ID NO: 1635231
aacuauagcagaugacacc

SEQ ID NO: 1635233 - RNA, 19 nt, Artificial Sequence
  Description of Artificial Sequence: Synthetic oligonucleotide
  Sense strand starting at position 1287 of SEQ ID NO: 1560937
ugucaucugcuauaguuau

SEQ ID NO: 1635234 - RNA, 19 nt, Artificial Sequence
  Description of Artificial Sequence: Synthetic oligonucleotide
  Antisense strand to SEQ ID NO: 1635233
auaacuauagcagaugaca

SEQ ID NO: 1635235 - RNA, 19 nt, Artificial Sequence
  Description of Artificial Sequence: Synthetic oligonucleotide
  Sense strand starting at position 1544 of SEQ ID NO: 1560937
ggugcuaucucagcuaucu

SEQ ID NO: 1635236 - RNA, 19 nt, Artificial Sequence
  Description of Artificial Sequence: Synthetic oligonucleotide
  Antisense strand to SEQ ID NO: 1635235
agauagcugagauagcacc

SEQ ID NO: 1635237 - RNA, 19 nt, Artificial Sequence
  Description of Artificial Sequence: Synthetic oligonucleotide
  Sense strand starting at position 1617 of SEQ ID NO: 1560937
cuaggauuauaggagcaca

SEQ ID NO: 1635238 - RNA, 19 nt, Artificial Sequence
  Description of Artificial Sequence: Synthetic oligonucleotide
  Antisense strand to SEQ ID NO: 1635237
ugugcuccuauaauccuag

SEQ ID NO: 1635239 - RNA, 19 nt, Artificial Sequence
  Description of Artificial Sequence: Synthetic oligonucleotide
  Sense strand starting at position 1961 of SEQ ID NO: 1560937
uccagaaacucucugagca

SEQ ID NO: 1635240 - RNA, 19 nt, Artificial Sequence
  Description of Artificial Sequence: Synthetic oligonucleotide
  Antisense strand to SEQ ID NO: 1635239
ugcucagagaguuucugga

SEQ ID NO: 1635241 - RNA, 19 nt, Artificial Sequence
  Description of Artificial Sequence: Synthetic oligonucleotide
  Sense strand starting at position 2443 of SEQ ID NO: 1560937
guaccaggucccugucaga

SEQ ID NO: 1635242 - RNA, 19 nt, Artificial Sequence
  Description of Artificial Sequence: Synthetic oligonucleotide
  Antisense strand to SEQ ID NO: 1635241
ucugacagggaccugguac

SEQ ID NO: 1635243 - RNA, 19 nt, Artificial Sequence
  Description of Artificial Sequence: Synthetic oligonucleotide
  Sense strand starting at position 2448 of SEQ ID NO: 1560937
aggucccugucagaaugau

SEQ ID NO: 1635244 - RNA, 19 nt, Artificial Sequence
  Description of Artificial Sequence: Synthetic oligonucleotide
  Antisense strand to SEQ ID NO: 1635243
aucauucugacagggaccu

SEQ ID NO: 1635245 - RNA, 19 nt, Artificial Sequence
  Description of Artificial Sequence: Synthetic oligonucleotide
  Sense strand starting at position 2745 of SEQ ID NO: 1560937
gcucauaguuucucauguu

SEQ ID NO: 1635246 - RNA, 19 nt, Artificial Sequence
  Description of Artificial Sequence: Synthetic oligonucleotide
  Antisense strand to SEQ ID NO: 1635245
aacaugagaaacuaugagc

SEQ ID NO: 1635247 - RNA, 19 nt, Artificial Sequence
  Description of Artificial Sequence: Synthetic oligonucleotide
  Sense strand starting at position 2884 of SEQ ID NO: 1560937
ggcucauugagaugcggga

SEQ ID NO: 1635248 - RNA, 19 nt, Artificial Sequence
  Description of Artificial Sequence: Synthetic oligonucleotide
  Antisense strand to SEQ ID NO: 1635247
ucccgcaucucaaugagcc

SEQ ID NO: 1635249 - RNA, 19 nt, Artificial Sequence
  Description of Artificial Sequence: Synthetic oligonucleotide
  Sense strand starting at position 3075 of SEQ ID NO: 1560937
gccugucuggagggacauu

SEQ ID NO: 1635250 - RNA, 19 nt, Artificial Sequence
  Description of Artificial Sequence: Synthetic oligonucleotide
  Antisense strand to SEQ ID NO: 1635249
aaugucccuccagacaggc

SEQ ID NO: 1635251 - RNA, 19 nt, Artificial Sequence
  Description of Artificial Sequence: Synthetic oligonucleotide
  Sense strand starting at position 3087 of SEQ ID NO: 1560937
ggacauugcucucaccuga

SEQ ID NO: 1635252 - RNA, 19 nt, Artificial Sequence
  Description of Artificial Sequence: Synthetic oligonucleotide
  Antisense strand to SEQ ID NO: 1635251
ucaggugagagcaaugucc

SEQ ID NO: 1635253 - RNA, 19 nt, Artificial Sequence
  Description of Artificial Sequence: Synthetic oligonucleotide
  Sense strand starting at position 3121 of SEQ ID NO: 1560937
ugaguuguguucugagauc

SEQ ID NO: 1635254 - RNA, 19 nt, Artificial Sequence
  Description of Artificial Sequence: Synthetic oligonucleotide
  Antisense strand to SEQ ID NO: 1635253
gaucucagaacacaacuca

SEQ ID NO: 1635255 - RNA, 19 nt, Artificial Sequence
  Description of Artificial Sequence: Synthetic oligonucleotide
  Sense strand starting at position 3849 of SEQ ID NO: 1560937
cgaggucacaccuguguua

SEQ ID NO: 1635256 - RNA, 19 nt, Artificial Sequence
  Description of Artificial Sequence: Synthetic oligonucleotide
  Antisense strand to SEQ ID NO: 1635255
uaacacaggugugaccucg

SEQ ID NO: 1635257 - RNA, 19 nt, Artificial Sequence
  Description of Artificial Sequence: Synthetic oligonucleotide
  Sense strand starting at position 3851 of SEQ ID NO: 1560937
aggucacaccuguguuaug

SEQ ID NO: 1635258 - RNA, 19 nt, Artificial Sequence
  Description of Artificial Sequence: Synthetic oligonucleotide
  Antisense strand to SEQ ID NO: 1635257
cauaacacaggugugaccu

SEQ ID NO: 1635259 - RNA, 19 nt, Artificial Sequence
  Description of Artificial Sequence: Synthetic oligonucleotide
  Sense strand starting at position 3854 of SEQ ID NO: 1560937
ucacaccuguguuauguua

SEQ ID NO: 1635260 - RNA, 19 nt, Artificial Sequence
  Description of Artificial Sequence: Synthetic oligonucleotide
  Antisense strand to SEQ ID NO: 1635259
uaacauaacacagguguga

SEQ ID NO: 1635261 - RNA, 19 nt, Artificial Sequence
  Description of Artificial Sequence: Synthetic oligonucleotide
  Sense strand starting at position 3856 of SEQ ID NO: 1560937
acaccuguguuauguuaca

SEQ ID NO: 1635262 - RNA, 19 nt, Artificial Sequence
  Description of Artificial Sequence: Synthetic oligonucleotide
  Antisense strand to SEQ ID NO: 1635261
uguaacauaacacaggugu

SEQ ID NO: 1635263 - RNA, 19 nt, Artificial Sequence
  Description of Artificial Sequence: Synthetic oligonucleotide
  Sense strand starting at position 151 of SEQ ID NO: 1560938
gugugugauguagaaguga

SEQ ID NO: 1635264 - RNA, 19 nt, Artificial Sequence
  Description of Artificial Sequence: Synthetic oligonucleotide
  Antisense strand to SEQ ID NO: 1635263
ucacuucuacaucacacac

SEQ ID NO: 1635265 - RNA, 19 nt, Artificial Sequence
  Description of Artificial Sequence: Synthetic oligonucleotide
  Sense strand starting at position 358 of SEQ ID NO: 1560938
uaugccgguccauauauaa

SEQ ID NO: 1635266 - RNA, 19 nt, Artificial Sequence
  Description of Artificial Sequence: Synthetic oligonucleotide
  Antisense strand to SEQ ID NO: 1635265
uuauauauggaccggcaua

SEQ ID NO: 1635267 - RNA, 19 nt, Artificial Sequence
  Description of Artificial Sequence: Synthetic oligonucleotide
  Sense strand starting at position 515 of SEQ ID NO: 1560938
guggcugggcuucaaucau

SEQ ID NO: 1635268 - RNA, 19 nt, Artificial Sequence
  Description of Artificial Sequence: Synthetic oligonucleotide
  Antisense strand to SEQ ID NO: 1635267
augauugaagcccagccac

SEQ ID NO: 1635269 - RNA, 19 nt, Artificial Sequence
  Description of Artificial Sequence: Synthetic oligonucleotide
  Sense strand starting at position 527 of SEQ ID NO: 1560938
caaucaugacuugggcagu

SEQ ID NO: 1635270 - RNA, 19 nt, Artificial Sequence
  Description of Artificial Sequence: Synthetic oligonucleotide
  Antisense strand to SEQ ID NO: 1635269
acugcccaagucaugauug

SEQ ID NO: 1635271 - RNA, 19 nt, Artificial Sequence
  Description of Artificial Sequence: Synthetic oligonucleotide
  Sense strand starting at position 638 of SEQ ID NO: 1560938
ggcccugaguccugagaag

SEQ ID NO: 1635272 - RNA, 19 nt, Artificial Sequence
  Description of Artificial Sequence: Synthetic oligonucleotide
  Antisense strand to SEQ ID NO: 1635271
cuucucaggacucagggcc

SEQ ID NO: 1635273 - RNA, 19 nt, Artificial Sequence
  Description of Artificial Sequence: Synthetic oligonucleotide
  Sense strand starting at position 763 of SEQ ID NO: 1560938
guguucuacuguccuacua

SEQ ID NO: 1635274 - RNA, 19 nt, Artificial Sequence
  Description of Artificial Sequence: Synthetic oligonucleotide
  Antisense strand to SEQ ID NO: 1635273
uaguaggacaguagaacac

SEQ ID NO: 1635275 - RNA, 19 nt, Artificial Sequence
  Description of Artificial Sequence: Synthetic oligonucleotide
  Sense strand starting at position 1027 of SEQ ID NO: 1560938
gaucucuuugcaugucuga

SEQ ID NO: 1635276 - RNA, 19 nt, Artificial Sequence
  Description of Artificial Sequence: Synthetic oligonucleotide
  Antisense strand to SEQ ID NO: 1635275
ucagacaugcaaagagauc

SEQ ID NO: 1635277 - RNA, 19 nt, Artificial Sequence
  Description of Artificial Sequence: Synthetic oligonucleotide
  Sense strand starting at position 1246 of SEQ ID NO: 1560938
uuuguagugucaucugaua

SEQ ID NO: 1635278 - RNA, 19 nt, Artificial Sequence
  Description of Artificial Sequence: Synthetic oligonucleotide
  Antisense strand to SEQ ID NO: 1635277
uaucagaugacacuacaaa

SEQ ID NO: 1635279 - RNA, 19 nt, Artificial Sequence
  Description of Artificial Sequence: Synthetic oligonucleotide
  Sense strand starting at position 1248 of SEQ ID NO: 1560938
uguagugucaucugauaua

SEQ ID NO: 1635280 - RNA, 19 nt, Artificial Sequence
  Description of Artificial Sequence: Synthetic oligonucleotide
  Antisense strand to SEQ ID NO: 1635279
uauaucagaugacacuaca

SEQ ID NO: 1635281 - RNA, 19 nt, Artificial Sequence
  Description of Artificial Sequence: Synthetic oligonucleotide
  Sense strand starting at position 1910 of SEQ ID NO: 1560938
auguucuccucuguggaga

SEQ ID NO: 1635282 - RNA, 19 nt, Artificial Sequence
  Description of Artificial Sequence: Synthetic oligonucleotide
  Antisense strand to SEQ ID NO: 1635281
ucuccacagaggagaacau

SEQ ID NO: 1635283 - RNA, 19 nt, Artificial Sequence
  Description of Artificial Sequence: Synthetic oligonucleotide
  Sense strand starting at position 1996 of SEQ ID NO: 1560938
gagacucuucccgguggaa

SEQ ID NO: 1635284 - RNA, 19 nt, Artificial Sequence
  Description of Artificial Sequence: Synthetic oligonucleotide
  Antisense strand to SEQ ID NO: 1635283
uuccaccgggaagagucuc

SEQ ID NO: 1635285 - RNA, 19 nt, Artificial Sequence
  Description of Artificial Sequence: Synthetic oligonucleotide
  Sense strand starting at position 2485 of SEQ ID NO: 1560938
cuccaaucgugucuagcuu

SEQ ID NO: 1635286 - RNA, 19 nt, Artificial Sequence
  Description of Artificial Sequence: Synthetic oligonucleotide
  Antisense strand to SEQ ID NO: 1635285
aagcuagacacgauuggag

SEQ ID NO: 1635287 - RNA, 19 nt, Artificial Sequence
  Description of Artificial Sequence: Synthetic oligonucleotide
  Sense strand starting at position 2707 of SEQ ID NO: 1560938
gcucuugguuucucauguu

SEQ ID NO: 1635288 - RNA, 19 nt, Artificial Sequence
  Description of Artificial Sequence: Synthetic oligonucleotide
  Antisense strand to SEQ ID NO: 1635287
aacaugagaaaccaagagc

SEQ ID NO: 1635289 - RNA, 19 nt, Artificial Sequence
  Description of Artificial Sequence: Synthetic oligonucleotide
  Sense strand starting at position 2710 of SEQ ID NO: 1560938
cuugguuucucauguucuu

SEQ ID NO: 1635290 - RNA, 19 nt, Artificial Sequence
  Description of Artificial Sequence: Synthetic oligonucleotide
  Antisense strand to SEQ ID NO: 1635289
aagaacaugagaaaccaag

SEQ ID NO: 1635291 - RNA, 19 nt, Artificial Sequence
  Description of Artificial Sequence: Synthetic oligonucleotide
  Sense strand starting at position 2728 of SEQ ID NO: 1560938
uccugacaaucuuugaugu

SEQ ID NO: 1635292 - RNA, 19 nt, Artificial Sequence
  Description of Artificial Sequence: Synthetic oligonucleotide
  Antisense strand to SEQ ID NO: 1635291
acaucaaagauugucagga

SEQ ID NO: 1635293 - RNA, 19 nt, Artificial Sequence
  Description of Artificial Sequence: Synthetic oligonucleotide
  Sense strand starting at position 2817 of SEQ ID NO: 1560938
gggaguuacccaggaaucc

SEQ ID NO: 1635294 - RNA, 19 nt, Artificial Sequence
  Description of Artificial Sequence: Synthetic oligonucleotide
  Antisense strand to SEQ ID NO: 1635293
ggauuccuggguaacuccc

SEQ ID NO: 1635295 - RNA, 19 nt, Artificial Sequence
  Description of Artificial Sequence: Synthetic oligonucleotide
  Sense strand starting at position 2826 of SEQ ID NO: 1560938
ccaggaaucccgcgggaca

SEQ ID NO: 1635296 - RNA, 19 nt, Artificial Sequence
  Description of Artificial Sequence: Synthetic oligonucleotide
  Antisense strand to SEQ ID NO: 1635295
ugucccgcgggauuccugg

SEQ ID NO: 1635297 - RNA, 19 nt, Artificial Sequence
  Description of Artificial Sequence: Synthetic oligonucleotide
  Sense strand starting at position 2827 of SEQ ID NO: 1560938
caggaaucccgcgggacau

SEQ ID NO: 1635298 - RNA, 19 nt, Artificial Sequence
  Description of Artificial Sequence: Synthetic oligonucleotide
  Antisense strand to SEQ ID NO: 1635297
augucccgcgggauuccug

SEQ ID NO: 1635299 - RNA, 19 nt, Artificial Sequence
  Description of Artificial Sequence: Synthetic oligonucleotide
  Sense strand starting at position 2846 of SEQ ID NO: 1560938
gacuuauugagacgcagga

SEQ ID NO: 1635300 - RNA, 19 nt, Artificial Sequence
  Description of Artificial Sequence: Synthetic oligonucleotide
  Antisense strand to SEQ ID NO: 1635299
uccugcgucucaauaaguc

SEQ ID NO: 1635301 - RNA, 19 nt, Artificial Sequence
  Description of Artificial Sequence: Synthetic oligonucleotide
  Sense strand starting at position 2943 of SEQ ID NO: 1560938
cccuccaugugcugagaua

SEQ ID NO: 1635302 - RNA, 19 nt, Artificial Sequence
  Description of Artificial Sequence: Synthetic oligonucleotide
  Antisense strand to SEQ ID NO: 1635301
uaucucagcacauggaggg

SEQ ID NO: 1635303 - RNA, 19 nt, Artificial Sequence
  Description of Artificial Sequence: Synthetic oligonucleotide
  Sense strand starting at position 3398 of SEQ ID NO: 1560938
aagaguugauguugaugga

SEQ ID NO: 1635304 - RNA, 19 nt, Artificial Sequence
  Description of Artificial Sequence: Synthetic oligonucleotide
  Antisense strand to SEQ ID NO: 1635303
uccaucaacaucaacucuu

SEQ ID NO: 1635305 - RNA, 19 nt, Artificial Sequence
  Description of Artificial Sequence: Synthetic oligonucleotide
  Sense strand starting at position 3613 of SEQ ID NO: 1560938
aggacuuaguccgaaguga

SEQ ID NO: 1635306 - RNA, 19 nt, Artificial Sequence
  Description of Artificial Sequence: Synthetic oligonucleotide
  Antisense strand to SEQ ID NO: 1635305
ucacuucggacuaaguccu

SEQ ID NO: 1635307 - RNA, 19 nt, Artificial Sequence
  Description of Artificial Sequence: Synthetic oligonucleotide
  Sense strand starting at position 3680 of SEQ ID NO: 1560938
uuggcaucccuugggaaga

SEQ ID NO: 1635308 - RNA, 19 nt, Artificial Sequence
  Description of Artificial Sequence: Synthetic oligonucleotide
  Antisense strand to SEQ ID NO: 1635307
ucuucccaagggaugccaa

SEQ ID NO: 1635309 - RNA, 19 nt, Artificial Sequence
  Description of Artificial Sequence: Synthetic oligonucleotide
  Sense strand starting at position 3923 of SEQ ID NO: 1560938
aacgcagauguuugucacu

SEQ ID NO: 1635310 - RNA, 19 nt, Artificial Sequence
  Description of Artificial Sequence: Synthetic oligonucleotide
  Antisense strand to SEQ ID NO: 1635309
agugacaaacaucugcguu

SEQ ID NO: 1635311 - RNA, 19 nt, Artificial Sequence
  Description of Artificial Sequence: Synthetic oligonucleotide
  Sense strand starting at position 3925 of SEQ ID NO: 1560938
cgcagauguuugucacuuu

SEQ ID NO: 1635312 - RNA, 19 nt, Artificial Sequence
  Description of Artificial Sequence: Synthetic oligonucleotide
  Antisense strand to SEQ ID NO: 1635311
aaagugacaaacaucugcg

SEQ ID NO: 1635313 - RNA, 19 nt, Artificial Sequence
  Description of Artificial Sequence: Synthetic oligonucleotide
  Sense strand starting at position 3926 of SEQ ID NO: 1560938
gcagauguuugucacuuuc

SEQ ID NO: 1635314 - RNA, 19 nt, Artificial Sequence
  Description of Artificial Sequence: Synthetic oligonucleotide
  Antisense strand to SEQ ID NO: 1635313
gaaagugacaaacaucugc

SEQ ID NO: 1635315 - RNA, 19 nt, Artificial Sequence
  Description of Artificial Sequence: Synthetic oligonucleotide
  Sense strand starting at position 3935 of SEQ ID NO: 1560938
ugucacuuucugugaguuu

SEQ ID NO: 1635316 - RNA, 19 nt, Artificial Sequence
  Description of Artificial Sequence: Synthetic oligonucleotide
  Antisense strand to SEQ ID NO: 1635315
aaacucacagaaagugaca

SEQ ID NO: 1635317 - RNA, 19 nt, Artificial Sequence
  Description of Artificial Sequence: Synthetic oligonucleotide
  Sense strand starting at position 55 of SEQ ID NO: 1560939
acagucuaggccugacaau

SEQ ID NO: 1635318 - RNA, 19 nt, Artificial Sequence
  Description of Artificial Sequence: Synthetic oligonucleotide
  Antisense strand to SEQ ID NO: 1635317
auugucaggccuagacugu

SEQ ID NO: 1635319 - RNA, 19 nt, Artificial Sequence
  Description of Artificial Sequence: Synthetic oligonucleotide
  Sense strand starting at position 516 of SEQ ID NO: 1560939
gagagagcaucagacaaua

SEQ ID NO: 1635320 - RNA, 19 nt, Artificial Sequence
  Description of Artificial Sequence: Synthetic oligonucleotide
  Antisense strand to SEQ ID NO: 1635319
uauugucugaugcucucuc

SEQ ID NO: 1635321 - RNA, 19 nt, Artificial Sequence
  Description of Artificial Sequence: Synthetic oligonucleotide
  Sense strand starting at position 527 of SEQ ID NO: 1560939
agacaauauugagaccuau

SEQ ID NO: 1635322 - RNA, 19 nt, Artificial Sequence
  Description of Artificial Sequence: Synthetic oligonucleotide
  Antisense strand to SEQ ID NO: 1635321
auaggucucaauauugucu

SEQ ID NO: 1635323 - RNA, 19 nt, Artificial Sequence
  Description of Artificial Sequence: Synthetic oligonucleotide
  Sense strand starting at position 695 of SEQ ID NO: 1560939
guguacuacuguccuacua

SEQ ID NO: 1635324 - RNA, 19 nt, Artificial Sequence
  Description of Artificial Sequence: Synthetic oligonucleotide
  Antisense strand to SEQ ID NO: 1635323
uaguaggacaguaguacac

SEQ ID NO: 1635325 - RNA, 19 nt, Artificial Sequence
  Description of Artificial Sequence: Synthetic oligonucleotide
  Sense strand starting at position 750 of SEQ ID NO: 1560939
acuugugaccuuggcauuu

SEQ ID NO: 1635326 - RNA, 19 nt, Artificial Sequence
  Description of Artificial Sequence: Synthetic oligonucleotide
  Antisense strand to SEQ ID NO: 1635325
aaaugccaaggucacaagu

SEQ ID NO: 1635327 - RNA, 19 nt, Artificial Sequence
  Description of Artificial Sequence: Synthetic oligonucleotide
  Sense strand starting at position 824 of SEQ ID NO: 1560939
acaucaggguauccuaaga

SEQ ID NO: 1635328 - RNA, 19 nt, Artificial Sequence
  Description of Artificial Sequence: Synthetic oligonucleotide
  Antisense strand to SEQ ID NO: 1635327
ucuuaggauacccugaugu

SEQ ID NO: 1635329 - RNA, 19 nt, Artificial Sequence
  Description of Artificial Sequence: Synthetic oligonucleotide
  Sense strand starting at position 829 of SEQ ID NO: 1560939
aggguauccuaagacuucu

SEQ ID NO: 1635330 - RNA, 19 nt, Artificial Sequence
  Description of Artificial Sequence: Synthetic oligonucleotide
  Antisense strand to SEQ ID NO: 1635329
agaagucuuaggauacccu

SEQ ID NO: 1635331 - RNA, 19 nt, Artificial Sequence
  Description of Artificial Sequence: Synthetic oligonucleotide
  Sense strand starting at position 909 of SEQ ID NO: 1560939
ccuaaaggguucuuguuaa

SEQ ID NO: 1635332 - RNA, 19 nt, Artificial Sequence
  Description of Artificial Sequence: Synthetic oligonucleotide
  Antisense strand to SEQ ID NO: 1635331
uuaacaagaacccuuuagg

SEQ ID NO: 1635333 - RNA, 19 nt, Artificial Sequence
  Description of Artificial Sequence: Synthetic oligonucleotide
  Sense strand starting at position 943 of SEQ ID NO: 1560939
ucuagaucucuuuguaugu

SEQ ID NO: 1635334 - RNA, 19 nt, Artificial Sequence
  Description of Artificial Sequence: Synthetic oligonucleotide
  Antisense strand to SEQ ID NO: 1635333
acauacaaagagaucuaga

SEQ ID NO: 1635335 - RNA, 19 nt, Artificial Sequence
  Description of Artificial Sequence: Synthetic oligonucleotide
  Sense strand starting at position 1053 of SEQ ID NO: 1560939
uccuguagaugugagacuu

SEQ ID NO: 1635336 - RNA, 19 nt, Artificial Sequence
  Description of Artificial Sequence: Synthetic oligonucleotide
  Antisense strand to SEQ ID NO: 1635335
aagucucacaucuacagga

SEQ ID NO: 1635337 - RNA, 19 nt, Artificial Sequence
  Description of Artificial Sequence: Synthetic oligonucleotide
  Sense strand starting at position 1142 of SEQ ID NO: 1560939
guguuucacguccugcuua

SEQ ID NO: 1635338 - RNA, 19 nt, Artificial Sequence
  Description of Artificial Sequence: Synthetic oligonucleotide
  Antisense strand to SEQ ID NO: 1635337
uaagcaggacgugaaacac

SEQ ID NO: 1635339 - RNA, 19 nt, Artificial Sequence
  Description of Artificial Sequence: Synthetic oligonucleotide
  Sense strand starting at position 1147 of SEQ ID NO: 1560939
ucacguccugcuuauauuu

SEQ ID NO: 1635340 - RNA, 19 nt, Artificial Sequence
  Description of Artificial Sequence: Synthetic oligonucleotide
  Antisense strand to SEQ ID NO: 1635339
aaauauaagcaggacguga

SEQ ID NO: 1635341 - RNA, 19 nt, Artificial Sequence
  Description of Artificial Sequence: Synthetic oligonucleotide
  Sense strand starting at position 1309 of SEQ ID NO: 1560939
gucccucucugguauauuu

SEQ ID NO: 1635342 - RNA, 19 nt, Artificial Sequence
  Description of Artificial Sequence: Synthetic oligonucleotide
  Antisense strand to SEQ ID NO: 1635341
aaauauaccagagagggac

SEQ ID NO: 1635343 - RNA, 19 nt, Artificial Sequence
  Description of Artificial Sequence: Synthetic oligonucleotide
  Sense strand starting at position 1549 of SEQ ID NO: 1560939
acgacaauaccugguuaau

SEQ ID NO: 1635344 - RNA, 19 nt, Artificial Sequence
  Description of Artificial Sequence: Synthetic oligonucleotide
  Antisense strand to SEQ ID NO: 1635343
auuaaccagguauugucgu

SEQ ID NO: 1635345 - RNA, 19 nt, Artificial Sequence
  Description of Artificial Sequence: Synthetic oligonucleotide
  Sense strand starting at position 2447 of SEQ ID NO: 1560939
ggcugcagcuuccaagaau

SEQ ID NO: 1635346 - RNA, 19 nt, Artificial Sequence
  Description of Artificial Sequence: Synthetic oligonucleotide
  Antisense strand to SEQ ID NO: 1635345
auucuuggaagcugcagcc

SEQ ID NO: 1635347 - RNA, 19 nt, Artificial Sequence
  Description of Artificial Sequence: Synthetic oligonucleotide
  Sense strand starting at position 2450 of SEQ ID NO: 1560939
ugcagcuuccaagaaugga

SEQ ID NO: 1635348 - RNA, 19 nt, Artificial Sequence
  Description of Artificial Sequence: Synthetic oligonucleotide
  Antisense strand to SEQ ID NO: 1635347
uccauucuuggaagcugca

SEQ ID NO: 1635349 - RNA, 19 nt, Artificial Sequence
  Description of Artificial Sequence: Synthetic oligonucleotide
  Sense strand starting at position 2481 of SEQ ID NO: 1560939
ggguguccuagaggaaacu

SEQ ID NO: 1635350 - RNA, 19 nt, Artificial Sequence
  Description of Artificial Sequence: Synthetic oligonucleotide
  Antisense strand to SEQ ID NO: 1635349
aguuuccucuaggacaccc

SEQ ID NO: 1635351 - RNA, 19 nt, Artificial Sequence
  Description of Artificial Sequence: Synthetic oligonucleotide
  Sense strand starting at position 2577 of SEQ ID NO: 1560939
cugugagucccguagucaa

SEQ ID NO: 1635352 - RNA, 19 nt, Artificial Sequence
  Description of Artificial Sequence: Synthetic oligonucleotide
  Antisense strand to SEQ ID NO: 1635351
uugacuacgggacucacag

SEQ ID NO: 1635353 - RNA, 19 nt, Artificial Sequence
  Description of Artificial Sequence: Synthetic oligonucleotide
  Sense strand starting at position 2991 of SEQ ID NO: 1560939
ggacauugcucacaccuga

SEQ ID NO: 1635354 - RNA, 19 nt, Artificial Sequence
  Description of Artificial Sequence: Synthetic oligonucleotide
  Antisense strand to SEQ ID NO: 1635353
ucaggugugagcaaugucc

SEQ ID NO: 1635355 - RNA, 19 nt, Artificial Sequence
  Description of Artificial Sequence: Synthetic oligonucleotide
  Sense strand starting at position 44 of SEQ ID NO: 1560940
guugaaauuugucucuucu

SEQ ID NO: 1635356 - RNA, 19 nt, Artificial Sequence
  Description of Artificial Sequence: Synthetic oligonucleotide
  Antisense strand to SEQ ID NO: 1635355
agaagagacaaauuucaac

SEQ ID NO: 1635357 - RNA, 19 nt, Artificial Sequence
  Description of Artificial Sequence: Synthetic oligonucleotide
  Sense strand starting at position 46 of SEQ ID NO: 1560940
ugaaauuugucucuucugu

SEQ ID NO: 1635358 - RNA, 19 nt, Artificial Sequence
  Description of Artificial Sequence: Synthetic oligonucleotide
  Antisense strand to SEQ ID NO: 1635357
acagaagagacaaauuuca

SEQ ID NO: 1635359 - RNA, 19 nt, Artificial Sequence
  Description of Artificial Sequence: Synthetic oligonucleotide
  Sense strand starting at position 136 of SEQ ID NO: 1560940
gccugacaauccuuugugu

SEQ ID NO: 1635360 - RNA, 19 nt, Artificial Sequence
  Description of Artificial Sequence: Synthetic oligonucleotide
  Antisense strand to SEQ ID NO: 1635359
acacaaaggauugucaggc

SEQ ID NO: 1635361 - RNA, 19 nt, Artificial Sequence
  Description of Artificial Sequence: Synthetic oligonucleotide
  Sense strand starting at position 138 of SEQ ID NO: 1560940
cugacaauccuuugugugu

SEQ ID NO: 1635362 - RNA, 19 nt, Artificial Sequence
  Description of Artificial Sequence: Synthetic oligonucleotide
  Antisense strand to SEQ ID NO: 1635361
acacacaaaggauugucag

SEQ ID NO: 1635363 - RNA, 19 nt, Artificial Sequence
  Description of Artificial Sequence: Synthetic oligonucleotide
  Sense strand starting at position 184 of SEQ ID NO: 1560940
cagugaucacguggaguca

SEQ ID NO: 1635364 - RNA, 19 nt, Artificial Sequence
  Description of Artificial Sequence: Synthetic oligonucleotide
  Antisense strand to SEQ ID NO: 1635363
ugacuccacgugaucacug

SEQ ID NO: 1635365 - RNA, 19 nt, Artificial Sequence
  Description of Artificial Sequence: Synthetic oligonucleotide
  Sense strand starting at position 193 of SEQ ID NO: 1560940
cguggagucacucacggua

SEQ ID NO: 1635366 - RNA, 19 nt, Artificial Sequence
  Description of Artificial Sequence: Synthetic oligonucleotide
  Antisense strand to SEQ ID NO: 1635365
uaccgugagugacuccacg

SEQ ID NO: 1635367 - RNA, 19 nt, Artificial Sequence
  Description of Artificial Sequence: Synthetic oligonucleotide
  Sense strand starting at position 195 of SEQ ID NO: 1560940
uggagucacucacgguaua

SEQ ID NO: 1635368 - RNA, 19 nt, Artificial Sequence
  Description of Artificial Sequence: Synthetic oligonucleotide
  Antisense strand to SEQ ID NO: 1635367
uauaccgugagugacucca

SEQ ID NO: 1635369 - RNA, 19 nt, Artificial Sequence
  Description of Artificial Sequence: Synthetic oligonucleotide
  Sense strand starting at position 196 of SEQ ID NO: 1560940
ggagucacucacgguauaa

SEQ ID NO: 1635370 - RNA, 19 nt, Artificial Sequence
  Description of Artificial Sequence: Synthetic oligonucleotide
  Antisense strand to SEQ ID NO: 1635369
uuauaccgugagugacucc

SEQ ID NO: 1635371 - RNA, 19 nt, Artificial Sequence
  Description of Artificial Sequence: Synthetic oligonucleotide
  Sense strand starting at position 220 of SEQ ID NO: 1560940
aggugaaauguccaguuuc

SEQ ID NO: 1635372 - RNA, 19 nt, Artificial Sequence
  Description of Artificial Sequence: Synthetic oligonucleotide
  Antisense strand to SEQ ID NO: 1635371
gaaacuggacauuucaccu

SEQ ID NO: 1635373 - RNA, 19 nt, Artificial Sequence
  Description of Artificial Sequence: Synthetic oligonucleotide
  Sense strand starting at position 256 of SEQ ID NO: 1560940
cucgcuuuacgauguguaa

SEQ ID NO: 1635374 - RNA, 19 nt, Artificial Sequence
  Description of Artificial Sequence: Synthetic oligonucleotide
  Antisense strand to SEQ ID NO: 1635373
uuacacaucguaaagcgag

SEQ ID NO: 1635375 - RNA, 19 nt, Artificial Sequence
  Description of Artificial Sequence: Synthetic oligonucleotide
  Sense strand starting at position 262 of SEQ ID NO: 1560940
uuacgauguguaaggugua

SEQ ID NO: 1635376 - RNA, 19 nt, Artificial Sequence
  Description of Artificial Sequence: Synthetic oligonucleotide
  Antisense strand to SEQ ID NO: 1635375
uacaccuuacacaucguaa

SEQ ID NO: 1635377 - RNA, 19 nt, Artificial Sequence
  Description of Artificial Sequence: Synthetic oligonucleotide
  Sense strand starting at position 265 of SEQ ID NO: 1560940
cgauguguaagguguagga

SEQ ID NO: 1635378 - RNA, 19 nt, Artificial Sequence
  Description of Artificial Sequence: Synthetic oligonucleotide
  Antisense strand to SEQ ID NO: 1635377
uccuacaccuuacacaucg

SEQ ID NO: 1635379 - RNA, 19 nt, Artificial Sequence
  Description of Artificial Sequence: Synthetic oligonucleotide
  Sense strand starting at position 383 of SEQ ID NO: 1560940
aucuacuacguaugaugua

SEQ ID NO: 1635380 - RNA, 19 nt, Artificial Sequence
  Description of Artificial Sequence: Synthetic oligonucleotide
  Antisense strand to SEQ ID NO: 1635379
uacaucauacguaguagau

SEQ ID NO: 1635381 - RNA, 19 nt, Artificial Sequence
  Description of Artificial Sequence: Synthetic oligonucleotide
  Sense strand starting at position 384 of SEQ ID NO: 1560940
ucuacuacguaugauguaa

SEQ ID NO: 1635382 - RNA, 19 nt, Artificial Sequence
  Description of Artificial Sequence: Synthetic oligonucleotide
  Antisense strand to SEQ ID NO: 1635381
uuacaucauacguaguaga

SEQ ID NO: 1635383 - RNA, 19 nt, Artificial Sequence
  Description of Artificial Sequence: Synthetic oligonucleotide
  Sense strand starting at position 388 of SEQ ID NO: 1560940
cuacguaugauguaaugua

SEQ ID NO: 1635384 - RNA, 19 nt, Artificial Sequence
  Description of Artificial Sequence: Synthetic oligonucleotide
  Antisense strand to SEQ ID NO: 1635383
uacauuacaucauacguag

SEQ ID NO: 1635385 - RNA, 19 nt, Artificial Sequence
  Description of Artificial Sequence: Synthetic oligonucleotide
  Sense strand starting at position 527 of SEQ ID NO: 1560940
cgugacuugggcaguggua

SEQ ID NO: 1635386 - RNA, 19 nt, Artificial Sequence
  Description of Artificial Sequence: Synthetic oligonucleotide
  Antisense strand to SEQ ID NO: 1635385
uaccacugcccaagucacg

SEQ ID NO: 1635387 - RNA, 19 nt, Artificial Sequence
  Description of Artificial Sequence: Synthetic oligonucleotide
  Sense strand starting at position 662 of SEQ ID NO: 1560940
auccucagcuuugaagaga

SEQ ID NO: 1635388 - RNA, 19 nt, Artificial Sequence
  Description of Artificial Sequence: Synthetic oligonucleotide
  Antisense strand to SEQ ID NO: 1635387
ucucuucaaagcugaggau

SEQ ID NO: 1635389 - RNA, 19 nt, Artificial Sequence
  Description of Artificial Sequence: Synthetic oligonucleotide
  Sense strand starting at position 759 of SEQ ID NO: 1560940
aggugaaggucagcaacau

SEQ ID NO: 1635390 - RNA, 19 nt, Artificial Sequence
  Description of Artificial Sequence: Synthetic oligonucleotide
  Antisense strand to SEQ ID NO: 1635389
auguugcugaccuucaccu

SEQ ID NO: 1635391 - RNA, 19 nt, Artificial Sequence
  Description of Artificial Sequence: Synthetic oligonucleotide
  Sense strand starting at position 1001 of SEQ ID NO: 1560940
ucuagaacucuuugcaugu

SEQ ID NO: 1635392 - RNA, 19 nt, Artificial Sequence
  Description of Artificial Sequence: Synthetic oligonucleotide
  Antisense strand to SEQ ID NO: 1635391
acaugcaaagaguucuaga

SEQ ID NO: 1635393 - RNA, 19 nt, Artificial Sequence
  Description of Artificial Sequence: Synthetic oligonucleotide
  Sense strand starting at position 1916 of SEQ ID NO: 1560940
ccagaaacuuccugagcau

SEQ ID NO: 1635394 - RNA, 19 nt, Artificial Sequence
  Description of Artificial Sequence: Synthetic oligonucleotide
  Antisense strand to SEQ ID NO: 1635393
augcucaggaaguuucugg

SEQ ID NO: 1635395 - RNA, 19 nt, Artificial Sequence
  Description of Artificial Sequence: Synthetic oligonucleotide
  Sense strand starting at position 2424 of SEQ ID NO: 1560940
cuguguguugccugaugag

SEQ ID NO: 1635396 - RNA, 19 nt, Artificial Sequence
  Description of Artificial Sequence: Synthetic oligonucleotide
  Antisense strand to SEQ ID NO: 1635395
cucaucaggcaacacacag

SEQ ID NO: 1635397 - RNA, 19 nt, Artificial Sequence
  Description of Artificial Sequence: Synthetic oligonucleotide
  Sense strand starting at position 2631 of SEQ ID NO: 1560940
acaguucucggucacucua

SEQ ID NO: 1635398 - RNA, 19 nt, Artificial Sequence
  Description of Artificial Sequence: Synthetic oligonucleotide
  Antisense strand to SEQ ID NO: 1635397
uagagugaccgagaacugu

SEQ ID NO: 1635399 - RNA, 19 nt, Artificial Sequence
  Description of Artificial Sequence: Synthetic oligonucleotide
  Sense strand starting at position 2820 of SEQ ID NO: 1560940
ggcucauugagaugcagga

SEQ ID NO: 1635400 - RNA, 19 nt, Artificial Sequence
  Description of Artificial Sequence: Synthetic oligonucleotide
  Antisense strand to SEQ ID NO: 1635399
uccugcaucucaaugagcc

SEQ ID NO: 1635401 - RNA, 19 nt, Artificial Sequence
  Description of Artificial Sequence: Synthetic oligonucleotide
  Sense strand starting at position 2902 of SEQ ID NO: 1560940
ccaugaugggcucagccau

SEQ ID NO: 1635402 - RNA, 19 nt, Artificial Sequence
  Description of Artificial Sequence: Synthetic oligonucleotide
  Antisense strand to SEQ ID NO: 1635401
auggcugagcccaucaugg

SEQ ID NO: 1635403 - RNA, 19 nt, Artificial Sequence
  Description of Artificial Sequence: Synthetic oligonucleotide
  Sense strand starting at position 2917 of SEQ ID NO: 1560940
ccauccaugugccgacaua

SEQ ID NO: 1635404 - RNA, 19 nt, Artificial Sequence
  Description of Artificial Sequence: Synthetic oligonucleotide
  Antisense strand to SEQ ID NO: 1635403
uaugucggcacauggaugg

SEQ ID NO: 1635405 - RNA, 19 nt, Artificial Sequence
  Description of Artificial Sequence: Synthetic oligonucleotide
  Sense strand starting at position 3278 of SEQ ID NO: 1560940
gccacuguucugugucagu

SEQ ID NO: 1635406 - RNA, 19 nt, Artificial Sequence
  Description of Artificial Sequence: Synthetic oligonucleotide
  Antisense strand to SEQ ID NO: 1635405
acugacacagaacaguggc

SEQ ID NO: 1635407 - RNA, 19 nt, Artificial Sequence
  Description of Artificial Sequence: Synthetic oligonucleotide
  Sense strand starting at position 3718 of SEQ ID NO: 1560940
aaaugugaacggcagcaau

SEQ ID NO: 1635408 - RNA, 19 nt, Artificial Sequence
  Description of Artificial Sequence: Synthetic oligonucleotide
  Antisense strand to SEQ ID NO: 1635407
auugcugccguucacauuu

SEQ ID NO: 1635409 - RNA, 19 nt, Artificial Sequence
  Description of Artificial Sequence: Synthetic oligonucleotide
  Sense strand starting at position 27 of SEQ ID NO: 1560941
agaguccaggccugagaau

SEQ ID NO: 1635410 - RNA, 19 nt, Artificial Sequence
  Description of Artificial Sequence: Synthetic oligonucleotide
  Antisense strand to SEQ ID NO: 1635409
auucucaggccuggacucu

SEQ ID NO: 1635411 - RNA, 19 nt, Artificial Sequence
  Description of Artificial Sequence: Synthetic oligonucleotide
  Sense strand starting at position 36 of SEQ ID NO: 1560941
gccugagaauccugugugu

SEQ ID NO: 1635412 - RNA, 19 nt, Artificial Sequence
  Description of Artificial Sequence: Synthetic oligonucleotide
  Antisense strand to SEQ ID NO: 1635411
acacacaggauucucaggc

SEQ ID NO: 1635413 - RNA, 19 nt, Artificial Sequence
  Description of Artificial Sequence: Synthetic oligonucleotide
  Sense strand starting at position 99 of SEQ ID NO: 1560941
uggaaucacucacggugua

SEQ ID NO: 1635414 - RNA, 19 nt, Artificial Sequence
  Description of Artificial Sequence: Synthetic oligonucleotide
  Antisense strand to SEQ ID NO: 1635413
uacaccgugagugauucca

SEQ ID NO: 1635415 - RNA, 19 nt, Artificial Sequence
  Description of Artificial Sequence: Synthetic oligonucleotide
  Sense strand starting at position 100 of SEQ ID NO: 1560941
ggaaucacucacgguguaa

SEQ ID NO: 1635416 - RNA, 19 nt, Artificial Sequence
  Description of Artificial Sequence: Synthetic oligonucleotide
  Antisense strand to SEQ ID NO: 1635415
uuacaccgugagugauucc

SEQ ID NO: 1635417 - RNA, 19 nt, Artificial Sequence
  Description of Artificial Sequence: Synthetic oligonucleotide
  Sense strand starting at position 154 of SEQ ID NO: 1560941
caucgcgucgcuuuaugau

SEQ ID NO: 1635418 - RNA, 19 nt, Artificial Sequence
  Description of Artificial Sequence: Synthetic oligonucleotide
  Antisense strand to SEQ ID NO: 1635417
aucauaaagcgacgcgaug

SEQ ID NO: 1635419 - RNA, 19 nt, Artificial Sequence
  Description of Artificial Sequence: Synthetic oligonucleotide
  Sense strand starting at position 160 of SEQ ID NO: 1560941
gucgcuuuaugauguguaa

SEQ ID NO: 1635420 - RNA, 19 nt, Artificial Sequence
  Description of Artificial Sequence: Synthetic oligonucleotide
  Antisense strand to SEQ ID NO: 1635419
uuacacaucauaaagcgac

SEQ ID NO: 1635421 - RNA, 19 nt, Artificial Sequence
  Description of Artificial Sequence: Synthetic oligonucleotide
  Sense strand starting at position 192 of SEQ ID NO: 1560941
gcauccuccugcgugacau

SEQ ID NO: 1635422 - RNA, 19 nt, Artificial Sequence
  Description of Artificial Sequence: Synthetic oligonucleotide
  Antisense strand to SEQ ID NO: 1635421
augucacgcaggaggaugc

SEQ ID NO: 1635423 - RNA, 19 nt, Artificial Sequence
  Description of Artificial Sequence: Synthetic oligonucleotide
  Sense strand starting at position 193 of SEQ ID NO: 1560941
cauccuccugcgugacauu

SEQ ID NO: 1635424 - RNA, 19 nt, Artificial Sequence
  Description of Artificial Sequence: Synthetic oligonucleotide
  Antisense strand to SEQ ID NO: 1635423
aaugucacgcaggaggaug

SEQ ID NO: 1635425 - RNA, 19 nt, Artificial Sequence
  Description of Artificial Sequence: Synthetic oligonucleotide
  Sense strand starting at position 202 of SEQ ID NO: 1560941
gcgugacauucuggaucag

SEQ ID NO: 1635426 - RNA, 19 nt, Artificial Sequence
  Description of Artificial Sequence: Synthetic oligonucleotide
  Antisense strand to SEQ ID NO: 1635425
cugauccagaaugucacgc

SEQ ID NO: 1635427 - RNA, 19 nt, Artificial Sequence
  Description of Artificial Sequence: Synthetic oligonucleotide
  Sense strand starting at position 273 of SEQ ID NO: 1560941
auaauucuuugaccgucua

SEQ ID NO: 1635428 - RNA, 19 nt, Artificial Sequence
  Description of Artificial Sequence: Synthetic oligonucleotide
  Antisense strand to SEQ ID NO: 1635427
uagacggucaaagaauuau

SEQ ID NO: 1635429 - RNA, 19 nt, Artificial Sequence
  Description of Artificial Sequence: Synthetic oligonucleotide
  Sense strand starting at position 305 of SEQ ID NO: 1560941
aauguaaugguagagguau

SEQ ID NO: 1635430 - RNA, 19 nt, Artificial Sequence
  Description of Artificial Sequence: Synthetic oligonucleotide
  Antisense strand to SEQ ID NO: 1635429
auaccucuaccauuacauu

SEQ ID NO: 1635431 - RNA, 19 nt, Artificial Sequence
  Description of Artificial Sequence: Synthetic oligonucleotide
  Sense strand starting at position 311 of SEQ ID NO: 1560941
augguagagguaugucauu

SEQ ID NO: 1635432 - RNA, 19 nt, Artificial Sequence
  Description of Artificial Sequence: Synthetic oligonucleotide
  Antisense strand to SEQ ID NO: 1635431
aaugacauaccucuaccau

SEQ ID NO: 1635433 - RNA, 19 nt, Artificial Sequence
  Description of Artificial Sequence: Synthetic oligonucleotide
  Sense strand starting at position 330 of SEQ ID NO: 1560941
ugcccuuuguaccaaaugu

SEQ ID NO: 1635434 - RNA, 19 nt, Artificial Sequence
  Description of Artificial Sequence: Synthetic oligonucleotide
  Antisense strand to SEQ ID NO: 1635433
acauuugguacaaagggca

SEQ ID NO: 1635435 - RNA, 19 nt, Artificial Sequence
  Description of Artificial Sequence: Synthetic oligonucleotide
  Sense strand starting at position 343 of SEQ ID NO: 1560941
aaauguagccagcaagauu

SEQ ID NO: 1635436 - RNA, 19 nt, Artificial Sequence
  Description of Artificial Sequence: Synthetic oligonucleotide
  Antisense strand to SEQ ID NO: 1635435
aaucuugcuggcuacauuu

SEQ ID NO: 1635437 - RNA, 19 nt, Artificial Sequence
  Description of Artificial Sequence: Synthetic oligonucleotide
  Sense strand starting at position 488 of SEQ ID NO: 1560941
cagagagcaucaguuaaua

SEQ ID NO: 1635438 - RNA, 19 nt, Artificial Sequence
  Description of Artificial Sequence: Synthetic oligonucleotide
  Antisense strand to SEQ ID NO: 1635437
uauuaacugaugcucucug

SEQ ID NO: 1635439 - RNA, 19 nt, Artificial Sequence
  Description of Artificial Sequence: Synthetic oligonucleotide
  Sense strand starting at position 936 of SEQ ID NO: 1560941
gugugagcuccgugaggac

SEQ ID NO: 1635440 - RNA, 19 nt, Artificial Sequence
  Description of Artificial Sequence: Synthetic oligonucleotide
  Antisense strand to SEQ ID NO: 1635439
guccucacggagcucacac

SEQ ID NO: 1635441 - RNA, 19 nt, Artificial Sequence
  Description of Artificial Sequence: Synthetic oligonucleotide
  Sense strand starting at position 998 of SEQ ID NO: 1560941
gcggcagacuccuguagau

SEQ ID NO: 1635442 - RNA, 19 nt, Artificial Sequence
  Description of Artificial Sequence: Synthetic oligonucleotide
  Antisense strand to SEQ ID NO: 1635441
aucuacaggagucugccgc

SEQ ID NO: 1635443 - RNA, 19 nt, Artificial Sequence
  Description of Artificial Sequence: Synthetic oligonucleotide
  Sense strand starting at position 1000 of SEQ ID NO: 1560941
ggcagacuccuguagaugu

SEQ ID NO: 1635444 - RNA, 19 nt, Artificial Sequence
  Description of Artificial Sequence: Synthetic oligonucleotide
  Antisense strand to SEQ ID NO: 1635443
acaucuacaggagucugcc

SEQ ID NO: 1635445 - RNA, 19 nt, Artificial Sequence
  Description of Artificial Sequence: Synthetic oligonucleotide
  Sense strand starting at position 1015 of SEQ ID NO: 1560941
augugagaguucucagggu

SEQ ID NO: 1635446 - RNA, 19 nt, Artificial Sequence
  Description of Artificial Sequence: Synthetic oligonucleotide
  Antisense strand to SEQ ID NO: 1635445
acccugagaacucucacau

SEQ ID NO: 1635447 - RNA, 19 nt, Artificial Sequence
  Description of Artificial Sequence: Synthetic oligonucleotide
  Sense strand starting at position 1431 of SEQ ID NO: 1560941
gcacgugauucuccugcca

SEQ ID NO: 1635448 - RNA, 19 nt, Artificial Sequence
  Description of Artificial Sequence: Synthetic oligonucleotide
  Antisense strand to SEQ ID NO: 1635447
uggcaggagaaucacgugc

SEQ ID NO: 1635449 - RNA, 19 nt, Artificial Sequence
  Description of Artificial Sequence: Synthetic oligonucleotide
  Sense strand starting at position 1533 of SEQ ID NO: 1560941
caguguuggccagacugau

SEQ ID NO: 1635450 - RNA, 19 nt, Artificial Sequence
  Description of Artificial Sequence: Synthetic oligonucleotide
  Antisense strand to SEQ ID NO: 1635449
aucagucuggccaacacug

SEQ ID NO: 1635451 - RNA, 19 nt, Artificial Sequence
  Description of Artificial Sequence: Synthetic oligonucleotide
  Sense strand starting at position 1809 of SEQ ID NO: 1560941
uccagaagcuuccugagua

SEQ ID NO: 1635452 - RNA, 19 nt, Artificial Sequence
  Description of Artificial Sequence: Synthetic oligonucleotide
  Antisense strand to SEQ ID NO: 1635451
uacucaggaagcuucugga

SEQ ID NO: 1635453 - RNA, 19 nt, Artificial Sequence
  Description of Artificial Sequence: Synthetic oligonucleotide
  Sense strand starting at position 2264 of SEQ ID NO: 1560941
gcacaagguucccgucaca

SEQ ID NO: 1635454 - RNA, 19 nt, Artificial Sequence
  Description of Artificial Sequence: Synthetic oligonucleotide
  Antisense strand to SEQ ID NO: 1635453
ugugacgggaaccuugugc

SEQ ID NO: 1635455 - RNA, 19 nt, Artificial Sequence
  Description of Artificial Sequence: Synthetic oligonucleotide
  Sense strand starting at position 2303 of SEQ ID NO: 1560941
gggugagcucuguguuguc

SEQ ID NO: 1635456 - RNA, 19 nt, Artificial Sequence
  Description of Artificial Sequence: Synthetic oligonucleotide
  Antisense strand to SEQ ID NO: 1635455
gacaacacagagcucaccc

SEQ ID NO: 1635457 - RNA, 19 nt, Artificial Sequence
  Description of Artificial Sequence: Synthetic oligonucleotide
  Sense strand starting at position 2308 of SEQ ID NO: 1560941
agcucuguguugucuggua

SEQ ID NO: 1635458 - RNA, 19 nt, Artificial Sequence
  Description of Artificial Sequence: Synthetic oligonucleotide
  Antisense strand to SEQ ID NO: 1635457
uaccagacaacacagagcu

SEQ ID NO: 1635459 - RNA, 19 nt, Artificial Sequence
  Description of Artificial Sequence: Synthetic oligonucleotide
  Sense strand starting at position 2310 of SEQ ID NO: 1560941
cucuguguugucugguaag

SEQ ID NO: 1635460 - RNA, 19 nt, Artificial Sequence
  Description of Artificial Sequence: Synthetic oligonucleotide
  Antisense strand to SEQ ID NO: 1635459
cuuaccagacaacacagag

SEQ ID NO: 1635461 - RNA, 19 nt, Artificial Sequence
  Description of Artificial Sequence: Synthetic oligonucleotide
  Sense strand starting at position 2313 of SEQ ID NO: 1560941
uguguugucugguaagagg

SEQ ID NO: 1635462 - RNA, 19 nt, Artificial Sequence
  Description of Artificial Sequence: Synthetic oligonucleotide
  Antisense strand to SEQ ID NO: 1635461
ccucuuaccagacaacaca

SEQ ID NO: 1635463 - RNA, 19 nt, Artificial Sequence
  Description of Artificial Sequence: Synthetic oligonucleotide
  Sense strand starting at position 2366 of SEQ ID NO: 1560941
ugcagcuuccaaggaugaa

SEQ ID NO: 1635464 - RNA, 19 nt, Artificial Sequence
  Description of Artificial Sequence: Synthetic oligonucleotide
  Antisense strand to SEQ ID NO: 1635463
uucauccuuggaagcugca

SEQ ID NO: 1635465 - RNA, 19 nt, Artificial Sequence
  Description of Artificial Sequence: Synthetic oligonucleotide
  Sense strand starting at position 2493 of SEQ ID NO: 1560941
cugugaaucccagagucaa

SEQ ID NO: 1635466 - RNA, 19 nt, Artificial Sequence
  Description of Artificial Sequence: Synthetic oligonucleotide
  Antisense strand to SEQ ID NO: 1635465
uugacucugggauucacag

SEQ ID NO: 1635467 - RNA, 19 nt, Artificial Sequence
  Description of Artificial Sequence: Synthetic oligonucleotide
  Sense strand starting at position 2948 of SEQ ID NO: 1560941
guguucugggagcaaagaa

SEQ ID NO: 1635468 - RNA, 19 nt, Artificial Sequence
  Description of Artificial Sequence: Synthetic oligonucleotide
  Antisense strand to SEQ ID NO: 1635467
uucuuugcucccagaacac

SEQ ID NO: 1635469 - RNA, 19 nt, Artificial Sequence
  Description of Artificial Sequence: Synthetic oligonucleotide
  Sense strand starting at position 3470 of SEQ ID NO: 1560941
aagacuugggccgaaguga

SEQ ID NO: 1635470 - RNA, 19 nt, Artificial Sequence
  Description of Artificial Sequence: Synthetic oligonucleotide
  Antisense strand to SEQ ID NO: 1635469
ucacuucggcccaagucuu

SEQ ID NO: 1635471 - RNA, 19 nt, Artificial Sequence
  Description of Artificial Sequence: Synthetic oligonucleotide
  Sense strand starting at position 3649 of SEQ ID NO: 1560941
uguggaucugcacacuuua

SEQ ID NO: 1635472 - RNA, 19 nt, Artificial Sequence
  Description of Artificial Sequence: Synthetic oligonucleotide
  Antisense strand to SEQ ID NO: 1635471
uaaagugugcagauccaca

SEQ ID NO: 1635473 - RNA, 19 nt, Artificial Sequence
  Description of Artificial Sequence: Synthetic oligonucleotide
  Sense strand starting at position 236 of SEQ ID NO: 1560942
aaucacucacgguauaagu

SEQ ID NO: 1635474 - RNA, 19 nt, Artificial Sequence
  Description of Artificial Sequence: Synthetic oligonucleotide
  Antisense strand to SEQ ID NO: 1635473
acuuauaccgugagugauu

SEQ ID NO: 1635475 - RNA, 19 nt, Artificial Sequence
  Description of Artificial Sequence: Synthetic oligonucleotide
  Sense strand starting at position 245 of SEQ ID NO: 1560942
cgguauaaguugaagguga

SEQ ID NO: 1635476 - RNA, 19 nt, Artificial Sequence
  Description of Artificial Sequence: Synthetic oligonucleotide
  Antisense strand to SEQ ID NO: 1635475
ucaccuucaacuuauaccg

SEQ ID NO: 1635477 - RNA, 19 nt, Artificial Sequence
  Description of Artificial Sequence: Synthetic oligonucleotide
  Sense strand starting at position 247 of SEQ ID NO: 1560942
guauaaguugaaggugaaa

SEQ ID NO: 1635478 - RNA, 19 nt, Artificial Sequence
  Description of Artificial Sequence: Synthetic oligonucleotide
  Antisense strand to SEQ ID NO: 1635477
uuucaccuucaacuuauac

SEQ ID NO: 1635479 - RNA, 19 nt, Artificial Sequence
  Description of Artificial Sequence: Synthetic oligonucleotide
  Sense strand starting at position 284 of SEQ ID NO: 1560942
guccuaucaccucgcuuua

SEQ ID NO: 1635480 - RNA, 19 nt, Artificial Sequence
  Description of Artificial Sequence: Synthetic oligonucleotide
  Antisense strand to SEQ ID NO: 1635479
uaaagcgaggugauaggac

SEQ ID NO: 1635481 - RNA, 19 nt, Artificial Sequence
  Description of Artificial Sequence: Synthetic oligonucleotide
  Sense strand starting at position 325 of SEQ ID NO: 1560942
ugcgucuucccgggugaca

SEQ ID NO: 1635482 - RNA, 19 nt, Artificial Sequence
  Description of Artificial Sequence: Synthetic oligonucleotide
  Antisense strand to SEQ ID NO: 1635481
ugucacccgggaagacgca

SEQ ID NO: 1635483 - RNA, 19 nt, Artificial Sequence
  Description of Artificial Sequence: Synthetic oligonucleotide
  Sense strand starting at position 326 of SEQ ID NO: 1560942
gcgucuucccgggugacau

SEQ ID NO: 1635484 - RNA, 19 nt, Artificial Sequence
  Description of Artificial Sequence: Synthetic oligonucleotide
  Antisense strand to SEQ ID NO: 1635483
augucacccgggaagacgc

SEQ ID NO: 1635485 - RNA, 19 nt, Artificial Sequence
  Description of Artificial Sequence: Synthetic oligonucleotide
  Sense strand starting at position 327 of SEQ ID NO: 1560942
cgucuucccgggugacauu

SEQ ID NO: 1635486 - RNA, 19 nt, Artificial Sequence
  Description of Artificial Sequence: Synthetic oligonucleotide
  Antisense strand to SEQ ID NO: 1635485
aaugucacccgggaagacg

SEQ ID NO: 1635487 - RNA, 19 nt, Artificial Sequence
  Description of Artificial Sequence: Synthetic oligonucleotide
  Sense strand starting at position 375 of SEQ ID NO: 1560942
cuguuucucguccagugua

SEQ ID NO: 1635488 - RNA, 19 nt, Artificial Sequence
  Description of Artificial Sequence: Synthetic oligonucleotide
  Antisense strand to SEQ ID NO: 1635487
uacacuggacgagaaacag

SEQ ID NO: 1635489 - RNA, 19 nt, Artificial Sequence
  Description of Artificial Sequence: Synthetic oligonucleotide
  Sense strand starting at position 459 of SEQ ID NO: 1560942
ucaguuguccuuuguacca

SEQ ID NO: 1635490 - RNA, 19 nt, Artificial Sequence
  Description of Artificial Sequence: Synthetic oligonucleotide
  Antisense strand to SEQ ID NO: 1635489
ugguacaaaggacaacuga

SEQ ID NO: 1635491 - RNA, 19 nt, Artificial Sequence
  Description of Artificial Sequence: Synthetic oligonucleotide
  Sense strand starting at position 461 of SEQ ID NO: 1560942
aguuguccuuuguaccaga

SEQ ID NO: 1635492 - RNA, 19 nt, Artificial Sequence
  Description of Artificial Sequence: Synthetic oligonucleotide
  Antisense strand to SEQ ID NO: 1635491
ucugguacaaaggacaacu

SEQ ID NO: 1635493 - RNA, 19 nt, Artificial Sequence
  Description of Artificial Sequence: Synthetic oligonucleotide
  Sense strand starting at position 485 of SEQ ID NO: 1560942
ccagcaagauucugaggca

SEQ ID NO: 1635494 - RNA, 19 nt, Artificial Sequence
  Description of Artificial Sequence: Synthetic oligonucleotide
  Antisense strand to SEQ ID NO: 1635493
ugccucagaaucuugcugg

SEQ ID NO: 1635495 - RNA, 19 nt, Artificial Sequence
  Description of Artificial Sequence: Synthetic oligonucleotide
  Sense strand starting at position 486 of SEQ ID NO: 1560942
cagcaagauucugaggcaa

SEQ ID NO: 1635496 - RNA, 19 nt, Artificial Sequence
  Description of Artificial Sequence: Synthetic oligonucleotide
  Antisense strand to SEQ ID NO: 1635495
uugccucagaaucuugcug

SEQ ID NO: 1635497 - RNA, 19 nt, Artificial Sequence
  Description of Artificial Sequence: Synthetic oligonucleotide
  Sense strand starting at position 488 of SEQ ID NO: 1560942
gcaagauucugaggcaaau

SEQ ID NO: 1635498 - RNA, 19 nt, Artificial Sequence
  Description of Artificial Sequence: Synthetic oligonucleotide
  Antisense strand to SEQ ID NO: 1635497
auuugccucagaaucuugc

SEQ ID NO: 1635499 - RNA, 19 nt, Artificial Sequence
  Description of Artificial Sequence: Synthetic oligonucleotide
  Sense strand starting at position 499 of SEQ ID NO: 1560942
aggcaaauuguggacaagu

SEQ ID NO: 1635500 - RNA, 19 nt, Artificial Sequence
  Description of Artificial Sequence: Synthetic oligonucleotide
  Antisense strand to SEQ ID NO: 1635499
acuuguccacaauuugccu

SEQ ID NO: 1635501 - RNA, 19 nt, Artificial Sequence
  Description of Artificial Sequence: Synthetic oligonucleotide
  Sense strand starting at position 556 of SEQ ID NO: 1560942
ggcuucaaucgugacuuga

SEQ ID NO: 1635502 - RNA, 19 nt, Artificial Sequence
  Description of Artificial Sequence: Synthetic oligonucleotide
  Antisense strand to SEQ ID NO: 1635501
ucaagucacgauugaagcc

SEQ ID NO: 1635503 - RNA, 19 nt, Artificial Sequence
  Description of Artificial Sequence: Synthetic oligonucleotide
  Sense strand starting at position 564 of SEQ ID NO: 1560942
ucgugacuugagcagugau

SEQ ID NO: 1635504 - RNA, 19 nt, Artificial Sequence
  Description of Artificial Sequence: Synthetic oligonucleotide
  Antisense strand to SEQ ID NO: 1635503
aucacugcucaagucacga

SEQ ID NO: 1635505 - RNA, 19 nt, Artificial Sequence
  Description of Artificial Sequence: Synthetic oligonucleotide
  Sense strand starting at position 576 of SEQ ID NO: 1560942
cagugauaggcagguucca

SEQ ID NO: 1635506 - RNA, 19 nt, Artificial Sequence
  Description of Artificial Sequence: Synthetic oligonucleotide
  Antisense strand to SEQ ID NO: 1635505
uggaaccugccuaucacug

SEQ ID NO: 1635507 - RNA, 19 nt, Artificial Sequence
  Description of Artificial Sequence: Synthetic oligonucleotide
  Sense strand starting at position 946 of SEQ ID NO: 1560942
gacuucuuuccugacacgu

SEQ ID NO: 1635508 - RNA, 19 nt, Artificial Sequence
  Description of Artificial Sequence: Synthetic oligonucleotide
  Antisense strand to SEQ ID NO: 1635507
acgugucaggaaagaaguc

SEQ ID NO: 1635509 - RNA, 19 nt, Artificial Sequence
  Description of Artificial Sequence: Synthetic oligonucleotide
  Sense strand starting at position 1087 of SEQ ID NO: 1560942
gcgugagcucugugaggac

SEQ ID NO: 1635510 - RNA, 19 nt, Artificial Sequence
  Description of Artificial Sequence: Synthetic oligonucleotide
  Antisense strand to SEQ ID NO: 1635509
guccucacagagcucacgc

SEQ ID NO: 1635511 - RNA, 19 nt, Artificial Sequence
  Description of Artificial Sequence: Synthetic oligonucleotide
  Sense strand starting at position 1149 of SEQ ID NO: 1560942
gcugcagacuccugcagau

SEQ ID NO: 1635512 - RNA, 19 nt, Artificial Sequence
  Description of Artificial Sequence: Synthetic oligonucleotide
  Antisense strand to SEQ ID NO: 1635511
aucugcaggagucugcagc

SEQ ID NO: 1635513 - RNA, 19 nt, Artificial Sequence
  Description of Artificial Sequence: Synthetic oligonucleotide
  Sense strand starting at position 1247 of SEQ ID NO: 1560942
ucauguccugcuuauacuu

SEQ ID NO: 1635514 - RNA, 19 nt, Artificial Sequence
  Description of Artificial Sequence: Synthetic oligonucleotide
  Antisense strand to SEQ ID NO: 1635513
aaguauaagcaggacauga

SEQ ID NO: 1635515 - RNA, 19 nt, Artificial Sequence
  Description of Artificial Sequence: Synthetic oligonucleotide
  Sense strand starting at position 1269 of SEQ ID NO: 1560942
uuagaagugucaucugaua

SEQ ID NO: 1635516 - RNA, 19 nt, Artificial Sequence
  Description of Artificial Sequence: Synthetic oligonucleotide
  Antisense strand to SEQ ID NO: 1635515
uaucagaugacacuucuaa

SEQ ID NO: 1635517 - RNA, 19 nt, Artificial Sequence
  Description of Artificial Sequence: Synthetic oligonucleotide
  Sense strand starting at position 2597 of SEQ ID NO: 1560942
cugugagucccagagucaa

SEQ ID NO: 1635518 - RNA, 19 nt, Artificial Sequence
  Description of Artificial Sequence: Synthetic oligonucleotide
  Antisense strand to SEQ ID NO: 1635517
uugacucugggacucacag

SEQ ID NO: 1635519 - RNA, 19 nt, Artificial Sequence
  Description of Artificial Sequence: Synthetic oligonucleotide
  Sense strand starting at position 2982 of SEQ ID NO: 1560942
acaggcauuggccagagau

SEQ ID NO: 1635520 - RNA, 19 nt, Artificial Sequence
  Description of Artificial Sequence: Synthetic oligonucleotide
  Antisense strand to SEQ ID NO: 1635519
aucucuggccaaugccugu

SEQ ID NO: 1635521 - RNA, 19 nt, Artificial Sequence
  Description of Artificial Sequence: Synthetic oligonucleotide
  Sense strand starting at position 3046 of SEQ ID NO: 1560942
ugaguuguguucugagagc

SEQ ID NO: 1635522 - RNA, 19 nt, Artificial Sequence
  Description of Artificial Sequence: Synthetic oligonucleotide
  Antisense strand to SEQ ID NO: 1635521
gcucucagaacacaacuca

SEQ ID NO: 1635523 - RNA, 19 nt, Artificial Sequence
  Description of Artificial Sequence: Synthetic oligonucleotide
  Sense strand starting at position 3266 of SEQ ID NO: 1560942
agccacuguucugugucaa

SEQ ID NO: 1635524 - RNA, 19 nt, Artificial Sequence
  Description of Artificial Sequence: Synthetic oligonucleotide
  Antisense strand to SEQ ID NO: 1635523
uugacacagaacaguggcu

SEQ ID NO: 1635525 - RNA, 19 nt, Artificial Sequence
  Description of Artificial Sequence: Synthetic oligonucleotide
  Sense strand starting at position 3267 of SEQ ID NO: 1560942
gccacuguucugugucaac

SEQ ID NO: 1635526 - RNA, 19 nt, Artificial Sequence
  Description of Artificial Sequence: Synthetic oligonucleotide
  Antisense strand to SEQ ID NO: 1635525
guugacacagaacaguggc

SEQ ID NO: 1635527 - RNA, 19 nt, Artificial Sequence
  Description of Artificial Sequence: Synthetic oligonucleotide
  Sense strand starting at position 3270 of SEQ ID NO: 1560942
acuguucugugucaacacu

SEQ ID NO: 1635528 - RNA, 19 nt, Artificial Sequence
  Description of Artificial Sequence: Synthetic oligonucleotide
  Antisense strand to SEQ ID NO: 1635527
aguguugacacagaacagu

SEQ ID NO: 1635529 - RNA, 19 nt, Artificial Sequence
  Description of Artificial Sequence: Synthetic oligonucleotide
  Sense strand starting at position 3576 of SEQ ID NO: 1560942
aggacuugggccgaauuga

SEQ ID NO: 1635530 - RNA, 19 nt, Artificial Sequence
  Description of Artificial Sequence: Synthetic oligonucleotide
  Antisense strand to SEQ ID NO: 1635529
ucaauucggcccaaguccu

SEQ ID NO: 1635531 - RNA, 19 nt, Artificial Sequence
  Description of Artificial Sequence: Synthetic oligonucleotide
  Sense strand starting at position 3619 of SEQ ID NO: 1560942
ggcuguggguucuaaugag

SEQ ID NO: 1635532 - RNA, 19 nt, Artificial Sequence
  Description of Artificial Sequence: Synthetic oligonucleotide
  Antisense strand to SEQ ID NO: 1635531
cucauuagaacccacagcc

SEQ ID NO: 1635533 - RNA, 19 nt, Artificial Sequence
  Description of Artificial Sequence: Synthetic oligonucleotide
  Sense strand starting at position 3626 of SEQ ID NO: 1560942
gguucuaaugagggacguu

SEQ ID NO: 1635534 - RNA, 19 nt, Artificial Sequence
  Description of Artificial Sequence: Synthetic oligonucleotide
  Antisense strand to SEQ ID NO: 1635533
aacgucccucauuagaacc

SEQ ID NO: 1635535 - RNA, 19 nt, Artificial Sequence
  Description of Artificial Sequence: Synthetic oligonucleotide
  Sense strand starting at position 3776 of SEQ ID NO: 1560942
cgaggucacacuuacguua

SEQ ID NO: 1635536 - RNA, 19 nt, Artificial Sequence
  Description of Artificial Sequence: Synthetic oligonucleotide
  Antisense strand to SEQ ID NO: 1635535
uaacguaagugugaccucg

SEQ ID NO: 1635537 - RNA, 19 nt, Artificial Sequence
  Description of Artificial Sequence: Synthetic oligonucleotide
  Sense strand starting at position 3781 of SEQ ID NO: 1560942
ucacacuuacguuauguua

SEQ ID NO: 1635538 - RNA, 19 nt, Artificial Sequence
  Description of Artificial Sequence: Synthetic oligonucleotide
  Antisense strand to SEQ ID NO: 1635537
uaacauaacguaaguguga

SEQ ID NO: 1635539 - RNA, 19 nt, Artificial Sequence
  Description of Artificial Sequence: Synthetic oligonucleotide
  Sense strand starting at position 3783 of SEQ ID NO: 1560942
acacuuacguuauguuaca

SEQ ID NO: 1635540 - RNA, 19 nt, Artificial Sequence
  Description of Artificial Sequence: Synthetic oligonucleotide
  Antisense strand to SEQ ID NO: 1635539
uguaacauaacguaagugu

SEQ ID NO: 1635541 - RNA, 19 nt, Artificial Sequence
  Description of Artificial Sequence: Synthetic oligonucleotide
  Sense strand starting at position 117 of SEQ ID NO: 1560943
gaguccaggccugacaauu

SEQ ID NO: 1635542 - RNA, 19 nt, Artificial Sequence
  Description of Artificial Sequence: Synthetic oligonucleotide
  Antisense strand to SEQ ID NO: 1635541
aauugucaggccuggacuc

SEQ ID NO: 1635543 - RNA, 19 nt, Artificial Sequence
  Description of Artificial Sequence: Synthetic oligonucleotide
  Sense strand starting at position 177 of SEQ ID NO: 1560943
cagggaucaugcggaauca

SEQ ID NO: 1635544 - RNA, 19 nt, Artificial Sequence
  Description of Artificial Sequence: Synthetic oligonucleotide
  Antisense strand to SEQ ID NO: 1635543
ugauuccgcaugaucccug

SEQ ID NO: 1635545 - RNA, 19 nt, Artificial Sequence
  Description of Artificial Sequence: Synthetic oligonucleotide
  Sense strand starting at position 186 of SEQ ID NO: 1560943
ugcggaaucacucacagua

SEQ ID NO: 1635546 - RNA, 19 nt, Artificial Sequence
  Description of Artificial Sequence: Synthetic oligonucleotide
  Antisense strand to SEQ ID NO: 1635545
uacugugagugauuccgca

SEQ ID NO: 1635547 - RNA, 19 nt, Artificial Sequence
  Description of Artificial Sequence: Synthetic oligonucleotide
  Sense strand starting at position 188 of SEQ ID NO: 1560943
cggaaucacucacaguaua

SEQ ID NO: 1635548 - RNA, 19 nt, Artificial Sequence
  Description of Artificial Sequence: Synthetic oligonucleotide
  Antisense strand to SEQ ID NO: 1635547
uauacugugagugauuccg

SEQ ID NO: 1635549 - RNA, 19 nt, Artificial Sequence
  Description of Artificial Sequence: Synthetic oligonucleotide
  Sense strand starting at position 201 of SEQ ID NO: 1560943
aguauaaggugacagugaa

SEQ ID NO: 1635550 - RNA, 19 nt, Artificial Sequence
  Description of Artificial Sequence: Synthetic oligonucleotide
  Antisense strand to SEQ ID NO: 1635549
uucacugucaccuuauacu

SEQ ID NO: 1635551 - RNA, 19 nt, Artificial Sequence
  Description of Artificial Sequence: Synthetic oligonucleotide
  Sense strand starting at position 243 of SEQ ID NO: 1560943
caucgccucgcuuuaugau

SEQ ID NO: 1635552 - RNA, 19 nt, Artificial Sequence
  Description of Artificial Sequence: Synthetic oligonucleotide
  Antisense strand to SEQ ID NO: 1635551
aucauaaagcgaggcgaug

SEQ ID NO: 1635553 - RNA, 19 nt, Artificial Sequence
  Description of Artificial Sequence: Synthetic oligonucleotide
  Sense strand starting at position 278 of SEQ ID NO: 1560943
ccugcauccuccuguguga

SEQ ID NO: 1635554 - RNA, 19 nt, Artificial Sequence
  Description of Artificial Sequence: Synthetic oligonucleotide
  Antisense strand to SEQ ID NO: 1635553
ucacacaggaggaugcagg

SEQ ID NO: 1635555 - RNA, 19 nt, Artificial Sequence
  Description of Artificial Sequence: Synthetic oligonucleotide
  Sense strand starting at position 280 of SEQ ID NO: 1560943
ugcauccuccugugugaca

SEQ ID NO: 1635556 - RNA, 19 nt, Artificial Sequence
  Description of Artificial Sequence: Synthetic oligonucleotide
  Antisense strand to SEQ ID NO: 1635555
ugucacacaggaggaugca

SEQ ID NO: 1635557 - RNA, 19 nt, Artificial Sequence
  Description of Artificial Sequence: Synthetic oligonucleotide
  Sense strand starting at position 281 of SEQ ID NO: 1560943
gcauccuccugugugacau

SEQ ID NO: 1635558 - RNA, 19 nt, Artificial Sequence
  Description of Artificial Sequence: Synthetic oligonucleotide
  Antisense strand to SEQ ID NO: 1635557
augucacacaggaggaugc

SEQ ID NO: 1635559 - RNA, 19 nt, Artificial Sequence
  Description of Artificial Sequence: Synthetic oligonucleotide
  Sense strand starting at position 369 of SEQ ID NO: 1560943
gaccguguacuacauauga

SEQ ID NO: 1635560 - RNA, 19 nt, Artificial Sequence
  Description of Artificial Sequence: Synthetic oligonucleotide
  Antisense strand to SEQ ID NO: 1635559
ucauauguaguacacgguc

SEQ ID NO: 1635561 - RNA, 19 nt, Artificial Sequence
  Description of Artificial Sequence: Synthetic oligonucleotide
  Sense strand starting at position 371 of SEQ ID NO: 1560943
ccguguacuacauaugaug

SEQ ID NO: 1635562 - RNA, 19 nt, Artificial Sequence
  Description of Artificial Sequence: Synthetic oligonucleotide
  Antisense strand to SEQ ID NO: 1635561
caucauauguaguacacgg

SEQ ID NO: 1635563 - RNA, 19 nt, Artificial Sequence
  Description of Artificial Sequence: Synthetic oligonucleotide
  Sense strand starting at position 373 of SEQ ID NO: 1560943
guguacuacauaugaugua

SEQ ID NO: 1635564 - RNA, 19 nt, Artificial Sequence
  Description of Artificial Sequence: Synthetic oligonucleotide
  Antisense strand to SEQ ID NO: 1635563
uacaucauauguaguacac

SEQ ID NO: 1635565 - RNA, 19 nt, Artificial Sequence
  Description of Artificial Sequence: Synthetic oligonucleotide
  Sense strand starting at position 374 of SEQ ID NO: 1560943
uguacuacauaugauguaa

SEQ ID NO: 1635566 - RNA, 19 nt, Artificial Sequence
  Description of Artificial Sequence: Synthetic oligonucleotide
  Antisense strand to SEQ ID NO: 1635565
uuacaucauauguaguaca

SEQ ID NO: 1635567 - RNA, 19 nt, Artificial Sequence
  Description of Artificial Sequence: Synthetic oligonucleotide
  Sense strand starting at position 513 of SEQ ID NO: 1560943
caauuauuacuugggcagu

SEQ ID NO: 1635568 - RNA, 19 nt, Artificial Sequence
  Description of Artificial Sequence: Synthetic oligonucleotide
  Antisense strand to SEQ ID NO: 1635567
acugcccaaguaauaauug

SEQ ID NO: 1635569 - RNA, 19 nt, Artificial Sequence
  Description of Artificial Sequence: Synthetic oligonucleotide
  Sense strand starting at position 585 of SEQ ID NO: 1560943
aguuaauauuuggaccuau

SEQ ID NO: 1635570 - RNA, 19 nt, Artificial Sequence
  Description of Artificial Sequence: Synthetic oligonucleotide
  Antisense strand to SEQ ID NO: 1635569
auagguccaaauauuaacu

SEQ ID NO: 1635571 - RNA, 19 nt, Artificial Sequence
  Description of Artificial Sequence: Synthetic oligonucleotide
  Sense strand starting at position 964 of SEQ ID NO: 1560943
ccucuaggguucuugucaa

SEQ ID NO: 1635572 - RNA, 19 nt, Artificial Sequence
  Description of Artificial Sequence: Synthetic oligonucleotide
  Antisense strand to SEQ ID NO: 1635571
uugacaagaacccuagagg

SEQ ID NO: 1635573 - RNA, 19 nt, Artificial Sequence
  Description of Artificial Sequence: Synthetic oligonucleotide
  Sense strand starting at position 1037 of SEQ ID NO: 1560943
gugugagcucugugaggac

SEQ ID NO: 1635574 - RNA, 19 nt, Artificial Sequence
  Description of Artificial Sequence: Synthetic oligonucleotide
  Antisense strand to SEQ ID NO: 1635573
guccucacagagcucacac

SEQ ID NO: 1635575 - RNA, 19 nt, Artificial Sequence
  Description of Artificial Sequence: Synthetic oligonucleotide
  Sense strand starting at position 1040 of SEQ ID NO: 1560943
ugagcucugugaggacaga

SEQ ID NO: 1635576 - RNA, 19 nt, Artificial Sequence
  Description of Artificial Sequence: Synthetic oligonucleotide
  Antisense strand to SEQ ID NO: 1635575
ucuguccucacagagcuca

SEQ ID NO: 1635577 - RNA, 19 nt, Artificial Sequence
  Description of Artificial Sequence: Synthetic oligonucleotide
  Sense strand starting at position 1099 of SEQ ID NO: 1560943
gaugcagacuccuguagau

SEQ ID NO: 1635578 - RNA, 19 nt, Artificial Sequence
  Description of Artificial Sequence: Synthetic oligonucleotide
  Antisense strand to SEQ ID NO: 1635577
aucuacaggagucugcauc

SEQ ID NO: 1635579 - RNA, 19 nt, Artificial Sequence
  Description of Artificial Sequence: Synthetic oligonucleotide
  Sense strand starting at position 1221 of SEQ ID NO: 1560943
ugaggugucaucugauaua

SEQ ID NO: 1635580 - RNA, 19 nt, Artificial Sequence
  Description of Artificial Sequence: Synthetic oligonucleotide
  Antisense strand to SEQ ID NO: 1635579
uauaucagaugacaccuca

SEQ ID NO: 1635581 - RNA, 19 nt, Artificial Sequence
  Description of Artificial Sequence: Synthetic oligonucleotide
  Sense strand starting at position 1224 of SEQ ID NO: 1560943
ggugucaucugauauaguc

SEQ ID NO: 1635582 - RNA, 19 nt, Artificial Sequence
  Description of Artificial Sequence: Synthetic oligonucleotide
  Antisense strand to SEQ ID NO: 1635581
gacuauaucagaugacacc

SEQ ID NO: 1635583 - RNA, 19 nt, Artificial Sequence
  Description of Artificial Sequence: Synthetic oligonucleotide
  Sense strand starting at position 2626 of SEQ ID NO: 1560943
aaaguucucggucacugua

SEQ ID NO: 1635584 - RNA, 19 nt, Artificial Sequence
  Description of Artificial Sequence: Synthetic oligonucleotide
  Antisense strand to SEQ ID NO: 1635583
uacagugaccgagaacuuu

SEQ ID NO: 1635585 - RNA, 19 nt, Artificial Sequence
  Description of Artificial Sequence: Synthetic oligonucleotide
  Sense strand starting at position 2857 of SEQ ID NO: 1560943
guuucagagcuggagagau

SEQ ID NO: 1635586 - RNA, 19 nt, Artificial Sequence
  Description of Artificial Sequence: Synthetic oligonucleotide
  Antisense strand to SEQ ID NO: 1635585
aucucuccagcucugaaac

SEQ ID NO: 1635587 - RNA, 19 nt, Artificial Sequence
  Description of Artificial Sequence: Synthetic oligonucleotide
  Sense strand starting at position 2882 of SEQ ID NO: 1560943
cgaccaacuccguggcaau

SEQ ID NO: 1635588 - RNA, 19 nt, Artificial Sequence
  Description of Artificial Sequence: Synthetic oligonucleotide
  Antisense strand to SEQ ID NO: 1635587
auugccacggaguuggucg

SEQ ID NO: 1635589 - RNA, 19 nt, Artificial Sequence
  Description of Artificial Sequence: Synthetic oligonucleotide
  Sense strand starting at position 2905 of SEQ ID NO: 1560943
ggcagagccuuucaugugu

SEQ ID NO: 1635590 - RNA, 19 nt, Artificial Sequence
  Description of Artificial Sequence: Synthetic oligonucleotide
  Antisense strand to SEQ ID NO: 1635589
acacaugaaaggcucugcc

SEQ ID NO: 1635591 - RNA, 19 nt, Artificial Sequence
  Description of Artificial Sequence: Synthetic oligonucleotide
  Sense strand starting at position 3784 of SEQ ID NO: 1560943
cgagguaacacguauguua

SEQ ID NO: 1635592 - RNA, 19 nt, Artificial Sequence
  Description of Artificial Sequence: Synthetic oligonucleotide
  Antisense strand to SEQ ID NO: 1635591
uaacauacguguuaccucg

SEQ ID NO: 1635593 - RNA, 19 nt, Artificial Sequence
  Description of Artificial Sequence: Synthetic oligonucleotide
  Sense strand starting at position 3786 of SEQ ID NO: 1560943
agguaacacguauguuaug

SEQ ID NO: 1635594 - RNA, 19 nt, Artificial Sequence
  Description of Artificial Sequence: Synthetic oligonucleotide
  Antisense strand to SEQ ID NO: 1635593
cauaacauacguguuaccu

SEQ ID NO: 1635595 - RNA, 19 nt, Artificial Sequence
  Description of Artificial Sequence: Synthetic oligonucleotide
  Sense strand starting at position 3791 of SEQ ID NO: 1560943
acacguauguuauguuaca

SEQ ID NO: 1635596 - RNA, 19 nt, Artificial Sequence
  Description of Artificial Sequence: Synthetic oligonucleotide
  Antisense strand to SEQ ID NO: 1635595
uguaacauaacauacgugu

SEQ ID NO: 1635597 - RNA, 19 nt, Artificial Sequence
  Description of Artificial Sequence: Synthetic oligonucleotide
  Sense strand starting at position 3837 of SEQ ID NO: 1560943
cccagucuuuguggcugua

SEQ ID NO: 1635598 - RNA, 19 nt, Artificial Sequence
  Description of Artificial Sequence: Synthetic oligonucleotide
  Antisense strand to SEQ ID NO: 1635597
uacagccacaaagacuggg

SEQ ID NO: 1635599 - RNA, 19 nt, Artificial Sequence
  Description of Artificial Sequence: Synthetic oligonucleotide
  Sense strand starting at position 3904 of SEQ ID NO: 1560943
uuugucaccuuugugaguu

SEQ ID NO: 1635600 - RNA, 19 nt, Artificial Sequence
  Description of Artificial Sequence: Synthetic oligonucleotide
  Antisense strand to SEQ ID NO: 1635599
aacucacaaaggugacaaa

SEQ ID NO: 1635601 - RNA, 19 nt, Artificial Sequence
  Description of Artificial Sequence: Synthetic oligonucleotide
  Sense strand starting at position 3905 of SEQ ID NO: 1560943
uugucaccuuugugaguuu

SEQ ID NO: 1635602 - RNA, 19 nt, Artificial Sequence
  Description of Artificial Sequence: Synthetic oligonucleotide
  Antisense strand to SEQ ID NO: 1635601
aaacucacaaaggugacaa

SEQ ID NO: 1635603 - RNA, 19 nt, Artificial Sequence
  Description of Artificial Sequence: Synthetic oligonucleotide
  Sense strand starting at position 24 of SEQ ID NO: 1560944
gcagggucuggaugugaga

SEQ ID NO: 1635604 - RNA, 19 nt, Artificial Sequence
  Description of Artificial Sequence: Synthetic oligonucleotide
  Antisense strand to SEQ ID NO: 1635603
ucucacauccagacccugc

SEQ ID NO: 1635605 - RNA, 19 nt, Artificial Sequence
  Description of Artificial Sequence: Synthetic oligonucleotide
  Sense strand starting at position 26 of SEQ ID NO: 1560944
agggucuggaugugagaaa

SEQ ID NO: 1635606 - RNA, 19 nt, Artificial Sequence
  Description of Artificial Sequence: Synthetic oligonucleotide
  Antisense strand to SEQ ID NO: 1635605
uuucucacauccagacccu

SEQ ID NO: 1635607 - RNA, 19 nt, Artificial Sequence
  Description of Artificial Sequence: Synthetic oligonucleotide
  Sense strand starting at position 73 of SEQ ID NO: 1560944
cucuguguguuuccugcaa

SEQ ID NO: 1635608 - RNA, 19 nt, Artificial Sequence
  Description of Artificial Sequence: Synthetic oligonucleotide
  Antisense strand to SEQ ID NO: 1635607
uugcaggaaacacacagag

SEQ ID NO: 1635609 - RNA, 19 nt, Artificial Sequence
  Description of Artificial Sequence: Synthetic oligonucleotide
  Sense strand starting at position 142 of SEQ ID NO: 1560944
caguccaggccugacaauu

SEQ ID NO: 1635610 - RNA, 19 nt, Artificial Sequence
  Description of Artificial Sequence: Synthetic oligonucleotide
  Antisense strand to SEQ ID NO: 1635609
aauugucaggccuggacug

SEQ ID NO: 1635611 - RNA, 19 nt, Artificial Sequence
  Description of Artificial Sequence: Synthetic oligonucleotide
  Sense strand starting at position 276 of SEQ ID NO: 1560944
cgcuuuaugauguguaaag

SEQ ID NO: 1635612 - RNA, 19 nt, Artificial Sequence
  Description of Artificial Sequence: Synthetic oligonucleotide
  Antisense strand to SEQ ID NO: 1635611
cuuuacacaucauaaagcg

SEQ ID NO: 1635613 - RNA, 19 nt, Artificial Sequence
  Description of Artificial Sequence: Synthetic oligonucleotide
  Sense strand starting at position 277 of SEQ ID NO: 1560944
gcuuuaugauguguaaagu

SEQ ID NO: 1635614 - RNA, 19 nt, Artificial Sequence
  Description of Artificial Sequence: Synthetic oligonucleotide
  Antisense strand to SEQ ID NO: 1635613
acuuuacacaucauaaagc

SEQ ID NO: 1635615 - RNA, 19 nt, Artificial Sequence
  Description of Artificial Sequence: Synthetic oligonucleotide
  Sense strand starting at position 278 of SEQ ID NO: 1560944
cuuuaugauguguaaagug

SEQ ID NO: 1635616 - RNA, 19 nt, Artificial Sequence
  Description of Artificial Sequence: Synthetic oligonucleotide
  Antisense strand to SEQ ID NO: 1635615
cacuuuacacaucauaaag

SEQ ID NO: 1635617 - RNA, 19 nt, Artificial Sequence
  Description of Artificial Sequence: Synthetic oligonucleotide
  Sense strand starting at position 283 of SEQ ID NO: 1560944
ugauguguaaaguguagga

SEQ ID NO: 1635618 - RNA, 19 nt, Artificial Sequence
  Description of Artificial Sequence: Synthetic oligonucleotide
  Antisense strand to SEQ ID NO: 1635617
uccuacacuuuacacauca

SEQ ID NO: 1635619 - RNA, 19 nt, Artificial Sequence
  Description of Artificial Sequence: Synthetic oligonucleotide
  Sense strand starting at position 305 of SEQ ID NO: 1560944
ugugucuuccugggugaca

SEQ ID NO: 1635620 - RNA, 19 nt, Artificial Sequence
  Description of Artificial Sequence: Synthetic oligonucleotide
  Antisense strand to SEQ ID NO: 1635619
ugucacccaggaagacaca

SEQ ID NO: 1635621 - RNA, 19 nt, Artificial Sequence
  Description of Artificial Sequence: Synthetic oligonucleotide
  Sense strand starting at position 306 of SEQ ID NO: 1560944
gugucuuccugggugacau

SEQ ID NO: 1635622 - RNA, 19 nt, Artificial Sequence
  Description of Artificial Sequence: Synthetic oligonucleotide
  Antisense strand to SEQ ID NO: 1635621
augucacccaggaagacac

SEQ ID NO: 1635623 - RNA, 19 nt, Artificial Sequence
  Description of Artificial Sequence: Synthetic oligonucleotide
  Sense strand starting at position 307 of SEQ ID NO: 1560944
ugucuuccugggugacauu

SEQ ID NO: 1635624 - RNA, 19 nt, Artificial Sequence
  Description of Artificial Sequence: Synthetic oligonucleotide
  Antisense strand to SEQ ID NO: 1635623
aaugucacccaggaagaca

SEQ ID NO: 1635625 - RNA, 19 nt, Artificial Sequence
  Description of Artificial Sequence: Synthetic oligonucleotide
  Sense strand starting at position 395 of SEQ ID NO: 1560944
uugaccgucuacuauauau

SEQ ID NO: 1635626 - RNA, 19 nt, Artificial Sequence
  Description of Artificial Sequence: Synthetic oligonucleotide
  Antisense strand to SEQ ID NO: 1635625
auauauaguagacggucaa

SEQ ID NO: 1635627 - RNA, 19 nt, Artificial Sequence
  Description of Artificial Sequence: Synthetic oligonucleotide
  Sense strand starting at position 397 of SEQ ID NO: 1560944
gaccgucuacuauauauga

SEQ ID NO: 1635628 - RNA, 19 nt, Artificial Sequence
  Description of Artificial Sequence: Synthetic oligonucleotide
  Antisense strand to SEQ ID NO: 1635627
ucauauauaguagacgguc

SEQ ID NO: 1635629 - RNA, 19 nt, Artificial Sequence
  Description of Artificial Sequence: Synthetic oligonucleotide
  Sense strand starting at position 414 of SEQ ID NO: 1560944
gauguaacauaaugguaga

SEQ ID NO: 1635630 - RNA, 19 nt, Artificial Sequence
  Description of Artificial Sequence: Synthetic oligonucleotide
  Antisense strand to SEQ ID NO: 1635629
ucuaccauuauguuacauc

SEQ ID NO: 1635631 - RNA, 19 nt, Artificial Sequence
  Description of Artificial Sequence: Synthetic oligonucleotide
  Sense strand starting at position 417 of SEQ ID NO: 1560944
guaacauaaugguagaggu

SEQ ID NO: 1635632 - RNA, 19 nt, Artificial Sequence
  Description of Artificial Sequence: Synthetic oligonucleotide
  Antisense strand to SEQ ID NO: 1635631
accucuaccauuauguuac

SEQ ID NO: 1635633 - RNA, 19 nt, Artificial Sequence
  Description of Artificial Sequence: Synthetic oligonucleotide
  Sense strand starting at position 437 of SEQ ID NO: 1560944
ccugauuuguccuuuguac

SEQ ID NO: 1635634 - RNA, 19 nt, Artificial Sequence
  Description of Artificial Sequence: Synthetic oligonucleotide
  Antisense strand to SEQ ID NO: 1635633
guacaaaggacaaaucagg

SEQ ID NO: 1635635 - RNA, 19 nt, Artificial Sequence
  Description of Artificial Sequence: Synthetic oligonucleotide
  Sense strand starting at position 439 of SEQ ID NO: 1560944
ugauuuguccuuuguacca

SEQ ID NO: 1635636 - RNA, 19 nt, Artificial Sequence
  Description of Artificial Sequence: Synthetic oligonucleotide
  Antisense strand to SEQ ID NO: 1635635
ugguacaaaggacaaauca

SEQ ID NO: 1635637 - RNA, 19 nt, Artificial Sequence
  Description of Artificial Sequence: Synthetic oligonucleotide
  Sense strand starting at position 441 of SEQ ID NO: 1560944
auuuguccuuuguaccaga

SEQ ID NO: 1635638 - RNA, 19 nt, Artificial Sequence
  Description of Artificial Sequence: Synthetic oligonucleotide
  Antisense strand to SEQ ID NO: 1635637
ucugguacaaaggacaaau

SEQ ID NO: 1635639 - RNA, 19 nt, Artificial Sequence
  Description of Artificial Sequence: Synthetic oligonucleotide
  Sense strand starting at position 619 of SEQ ID NO: 1560944
uauugagaccuauguguug

SEQ ID NO: 1635640 - RNA, 19 nt, Artificial Sequence
  Description of Artificial Sequence: Synthetic oligonucleotide
  Antisense strand to SEQ ID NO: 1635639
caacacauaggucucaaua

SEQ ID NO: 1635641 - RNA, 19 nt, Artificial Sequence
  Description of Artificial Sequence: Synthetic oligonucleotide
  Sense strand starting at position 625 of SEQ ID NO: 1560944
gaccuauguguuggguuga

SEQ ID NO: 1635642 - RNA, 19 nt, Artificial Sequence
  Description of Artificial Sequence: Synthetic oligonucleotide
  Antisense strand to SEQ ID NO: 1635641
ucaacccaacacauagguc

SEQ ID NO: 1635643 - RNA, 19 nt, Artificial Sequence
  Description of Artificial Sequence: Synthetic oligonucleotide
  Sense strand starting at position 626 of SEQ ID NO: 1560944
accuauguguuggguugaa

SEQ ID NO: 1635644 - RNA, 19 nt, Artificial Sequence
  Description of Artificial Sequence: Synthetic oligonucleotide
  Antisense strand to SEQ ID NO: 1635643
uucaacccaacacauaggu

SEQ ID NO: 1635645 - RNA, 19 nt, Artificial Sequence
  Description of Artificial Sequence: Synthetic oligonucleotide
  Sense strand starting at position 909 of SEQ ID NO: 1560944
ucagguucugcucacauca

SEQ ID NO: 1635646 - RNA, 19 nt, Artificial Sequence
  Description of Artificial Sequence: Synthetic oligonucleotide
  Antisense strand to SEQ ID NO: 1635645
ugaugugagcagaaccuga

SEQ ID NO: 1635647 - RNA, 19 nt, Artificial Sequence
  Description of Artificial Sequence: Synthetic oligonucleotide
  Sense strand starting at position 1664 of SEQ ID NO: 1560944
cuacauuguguuggccaga

SEQ ID NO: 1635648 - RNA, 19 nt, Artificial Sequence
  Description of Artificial Sequence: Synthetic oligonucleotide
  Antisense strand to SEQ ID NO: 1635647
ucuggccaacacaauguag

SEQ ID NO: 1635649 - RNA, 19 nt, Artificial Sequence
  Description of Artificial Sequence: Synthetic oligonucleotide
  Sense strand starting at position 1845 of SEQ ID NO: 1560944
gagcccuuuccagguuaua

SEQ ID NO: 1635650 - RNA, 19 nt, Artificial Sequence
  Description of Artificial Sequence: Synthetic oligonucleotide
  Antisense strand to SEQ ID NO: 1635649
uauaaccuggaaagggcuc

SEQ ID NO: 1635651 - RNA, 19 nt, Artificial Sequence
  Description of Artificial Sequence: Synthetic oligonucleotide
  Sense strand starting at position 1857 of SEQ ID NO: 1560944
gguuauaugcugugugcag

SEQ ID NO: 1635652 - RNA, 19 nt, Artificial Sequence
  Description of Artificial Sequence: Synthetic oligonucleotide
  Antisense strand to SEQ ID NO: 1635651
cugcacacagcauauaacc

SEQ ID NO: 1635653 - RNA, 19 nt, Artificial Sequence
  Description of Artificial Sequence: Synthetic oligonucleotide
  Sense strand starting at position 1945 of SEQ ID NO: 1560944
uccagaaucuuccugagca

SEQ ID NO: 1635654 - RNA, 19 nt, Artificial Sequence
  Description of Artificial Sequence: Synthetic oligonucleotide
  Antisense strand to SEQ ID NO: 1635653
ugcucaggaagauucugga

SEQ ID NO: 1635655 - RNA, 19 nt, Artificial Sequence
  Description of Artificial Sequence: Synthetic oligonucleotide
  Sense strand starting at position 1946 of SEQ ID NO: 1560944
ccagaaucuuccugagcac

SEQ ID NO: 1635656 - RNA, 19 nt, Artificial Sequence
  Description of Artificial Sequence: Synthetic oligonucleotide
  Antisense strand to SEQ ID NO: 1635655
gugcucaggaagauucugg

SEQ ID NO: 1635657 - RNA, 19 nt, Artificial Sequence
  Description of Artificial Sequence: Synthetic oligonucleotide
  Sense strand starting at position 2480 of SEQ ID NO: 1560944
uguguuuccuggugagagg

SEQ ID NO: 1635658 - RNA, 19 nt, Artificial Sequence
  Description of Artificial Sequence: Synthetic oligonucleotide
  Antisense strand to SEQ ID NO: 1635657
ccucucaccaggaaacaca

SEQ ID NO: 1635659 - RNA, 19 nt, Artificial Sequence
  Description of Artificial Sequence: Synthetic oligonucleotide
  Sense strand starting at position 2511 of SEQ ID NO: 1560944
cucuaaucguaucuagcuu

SEQ ID NO: 1635660 - RNA, 19 nt, Artificial Sequence
  Description of Artificial Sequence: Synthetic oligonucleotide
  Antisense strand to SEQ ID NO: 1635659
aagcuagauacgauuagag

SEQ ID NO: 1635661 - RNA, 19 nt, Artificial Sequence
  Description of Artificial Sequence: Synthetic oligonucleotide
  Sense strand starting at position 2592 of SEQ ID NO: 1560944
agaggugugcagggugaau

SEQ ID NO: 1635662 - RNA, 19 nt, Artificial Sequence
  Description of Artificial Sequence: Synthetic oligonucleotide
  Antisense strand to SEQ ID NO: 1635661
auucacccugcacaccucu

SEQ ID NO: 1635663 - RNA, 19 nt, Artificial Sequence
  Description of Artificial Sequence: Synthetic oligonucleotide
  Sense strand starting at position 2660 of SEQ ID NO: 1560944
cuguaagucccauagucaa

SEQ ID NO: 1635664 - RNA, 19 nt, Artificial Sequence
  Description of Artificial Sequence: Synthetic oligonucleotide
  Antisense strand to SEQ ID NO: 1635663
uugacuaugggacuuacag

SEQ ID NO: 1635665 - RNA, 19 nt, Artificial Sequence
  Description of Artificial Sequence: Synthetic oligonucleotide
  Sense strand starting at position 2680 of SEQ ID NO: 1560944
gagagaguucucggucacu

SEQ ID NO: 1635666 - RNA, 19 nt, Artificial Sequence
  Description of Artificial Sequence: Synthetic oligonucleotide
  Antisense strand to SEQ ID NO: 1635665
agugaccgagaacucucuc

SEQ ID NO: 1635667 - RNA, 19 nt, Artificial Sequence
  Description of Artificial Sequence: Synthetic oligonucleotide
  Sense strand starting at position 2683 of SEQ ID NO: 1560944
agaguucucggucacucuu

SEQ ID NO: 1635668 - RNA, 19 nt, Artificial Sequence
  Description of Artificial Sequence: Synthetic oligonucleotide
  Antisense strand to SEQ ID NO: 1635667
aagagugaccgagaacucu

SEQ ID NO: 1635669 - RNA, 19 nt, Artificial Sequence
  Description of Artificial Sequence: Synthetic oligonucleotide
  Sense strand starting at position 2736 of SEQ ID NO: 1560944
caggauuucucguguucuu

SEQ ID NO: 1635670 - RNA, 19 nt, Artificial Sequence
  Description of Artificial Sequence: Synthetic oligonucleotide
  Antisense strand to SEQ ID NO: 1635669
aagaacacgagaaauccug

SEQ ID NO: 1635671 - RNA, 19 nt, Artificial Sequence
  Description of Artificial Sequence: Synthetic oligonucleotide
  Sense strand starting at position 3078 of SEQ ID NO: 1560944
cguugcucacgccugagau

SEQ ID NO: 1635672 - RNA, 19 nt, Artificial Sequence
  Description of Artificial Sequence: Synthetic oligonucleotide
  Antisense strand to SEQ ID NO: 1635671
aucucaggcgugagcaacg

SEQ ID NO: 1635673 - RNA, 19 nt, Artificial Sequence
  Description of Artificial Sequence: Synthetic oligonucleotide
  Sense strand starting at position 3079 of SEQ ID NO: 1560944
guugcucacgccugagaug

SEQ ID NO: 1635674 - RNA, 19 nt, Artificial Sequence
  Description of Artificial Sequence: Synthetic oligonucleotide
  Antisense strand to SEQ ID NO: 1635673
caucucaggcgugagcaac

SEQ ID NO: 1635675 - RNA, 19 nt, Artificial Sequence
  Description of Artificial Sequence: Synthetic oligonucleotide
  Sense strand starting at position 3110 of SEQ ID NO: 1560944
ggguuguguucugugugca

SEQ ID NO: 1635676 - RNA, 19 nt, Artificial Sequence
  Description of Artificial Sequence: Synthetic oligonucleotide
  Antisense strand to SEQ ID NO: 1635675
ugcacacagaacacaaccc

SEQ ID NO: 1635677 - RNA, 19 nt, Artificial Sequence
  Description of Artificial Sequence: Synthetic oligonucleotide
  Sense strand starting at position 3111 of SEQ ID NO: 1560944
gguuguguucugugugcaa

SEQ ID NO: 1635678 - RNA, 19 nt, Artificial Sequence
  Description of Artificial Sequence: Synthetic oligonucleotide
  Antisense strand to SEQ ID NO: 1635677
uugcacacagaacacaacc

SEQ ID NO: 1635679 - RNA, 19 nt, Artificial Sequence
  Description of Artificial Sequence: Synthetic oligonucleotide
  Sense strand starting at position 3168 of SEQ ID NO: 1560944
agaggacugucuucccaag

SEQ ID NO: 1635680 - RNA, 19 nt, Artificial Sequence
  Description of Artificial Sequence: Synthetic oligonucleotide
  Antisense strand to SEQ ID NO: 1635679
cuugggaagacaguccucu

SEQ ID NO: 1635681 - RNA, 19 nt, Artificial Sequence
  Description of Artificial Sequence: Synthetic oligonucleotide
  Sense strand starting at position 3639 of SEQ ID NO: 1560944
aggacuugagccgaaguga

SEQ ID NO: 1635682 - RNA, 19 nt, Artificial Sequence
  Description of Artificial Sequence: Synthetic oligonucleotide
  Antisense strand to SEQ ID NO: 1635681
ucacuucggcucaaguccu

SEQ ID NO: 1635683 - RNA, 19 nt, Artificial Sequence
  Description of Artificial Sequence: Synthetic oligonucleotide
  Sense strand starting at position 222 of SEQ ID NO: 1560945
uguggaaucacucacgaua

SEQ ID NO: 1635684 - RNA, 19 nt, Artificial Sequence
  Description of Artificial Sequence: Synthetic oligonucleotide
  Antisense strand to SEQ ID NO: 1635683
uaucgugagugauuccaca

SEQ ID NO: 1635685 - RNA, 19 nt, Artificial Sequence
  Description of Artificial Sequence: Synthetic oligonucleotide
  Sense strand starting at position 224 of SEQ ID NO: 1560945
uggaaucacucacgauaua

SEQ ID NO: 1635686 - RNA, 19 nt, Artificial Sequence
  Description of Artificial Sequence: Synthetic oligonucleotide
  Antisense strand to SEQ ID NO: 1635685
uauaucgugagugauucca

SEQ ID NO: 1635687 - RNA, 19 nt, Artificial Sequence
  Description of Artificial Sequence: Synthetic oligonucleotide
  Sense strand starting at position 285 of SEQ ID NO: 1560945
cucccauuaugauguguaa

SEQ ID NO: 1635688 - RNA, 19 nt, Artificial Sequence
  Description of Artificial Sequence: Synthetic oligonucleotide
  Antisense strand to SEQ ID NO: 1635687
uuacacaucauaaugggag

SEQ ID NO: 1635689 - RNA, 19 nt, Artificial Sequence
  Description of Artificial Sequence: Synthetic oligonucleotide
  Sense strand starting at position 288 of SEQ ID NO: 1560945
ccauuaugauguguaaggu

SEQ ID NO: 1635690 - RNA, 19 nt, Artificial Sequence
  Description of Artificial Sequence: Synthetic oligonucleotide
  Antisense strand to SEQ ID NO: 1635689
accuuacacaucauaaugg

SEQ ID NO: 1635691 - RNA, 19 nt, Artificial Sequence
  Description of Artificial Sequence: Synthetic oligonucleotide
  Sense strand starting at position 317 of SEQ ID NO: 1560945
gcgucuuccugggugacau

SEQ ID NO: 1635692 - RNA, 19 nt, Artificial Sequence
  Description of Artificial Sequence: Synthetic oligonucleotide
  Antisense strand to SEQ ID NO: 1635691
augucacccaggaagacgc

SEQ ID NO: 1635693 - RNA, 19 nt, Artificial Sequence
  Description of Artificial Sequence: Synthetic oligonucleotide
  Sense strand starting at position 318 of SEQ ID NO: 1560945
cgucuuccugggugacauu

SEQ ID NO: 1635694 - RNA, 19 nt, Artificial Sequence
  Description of Artificial Sequence: Synthetic oligonucleotide
  Antisense strand to SEQ ID NO: 1635693
aaugucacccaggaagacg

SEQ ID NO: 1635695 - RNA, 19 nt, Artificial Sequence
  Description of Artificial Sequence: Synthetic oligonucleotide
  Sense strand starting at position 358 of SEQ ID NO: 1560945
ggaauauauuguuucucgu

SEQ ID NO: 1635696 - RNA, 19 nt, Artificial Sequence
  Description of Artificial Sequence: Synthetic oligonucleotide
  Antisense strand to SEQ ID NO: 1635695
acgagaaacaauauauucc

SEQ ID NO: 1635697 - RNA, 19 nt, Artificial Sequence
  Description of Artificial Sequence: Synthetic oligonucleotide
  Sense strand starting at position 572 of SEQ ID NO: 1560945
guggguggguuccagaagu

SEQ ID NO: 1635698 - RNA, 19 nt, Artificial Sequence
  Description of Artificial Sequence: Synthetic oligonucleotide
  Antisense strand to SEQ ID NO: 1635697
acuucuggaacccacccac

SEQ ID NO: 1635699 - RNA, 19 nt, Artificial Sequence
  Description of Artificial Sequence: Synthetic oligonucleotide
  Sense strand starting at position 624 of SEQ ID NO: 1560945
agucaauauugagagcuau

SEQ ID NO: 1635700 - RNA, 19 nt, Artificial Sequence
  Description of Artificial Sequence: Synthetic oligonucleotide
  Antisense strand to SEQ ID NO: 1635699
auagcucucaauauugacu

SEQ ID NO: 1635701 - RNA, 19 nt, Artificial Sequence
  Description of Artificial Sequence: Synthetic oligonucleotide
  Sense strand starting at position 630 of SEQ ID NO: 1560945
uauugagagcuauguauug

SEQ ID NO: 1635702 - RNA, 19 nt, Artificial Sequence
  Description of Artificial Sequence: Synthetic oligonucleotide
  Antisense strand to SEQ ID NO: 1635701
caauacauagcucucaaua

SEQ ID NO: 1635703 - RNA, 19 nt, Artificial Sequence
  Description of Artificial Sequence: Synthetic oligonucleotide
  Sense strand starting at position 632 of SEQ ID NO: 1560945
uugagagcuauguauuggu

SEQ ID NO: 1635704 - RNA, 19 nt, Artificial Sequence
  Description of Artificial Sequence: Synthetic oligonucleotide
  Antisense strand to SEQ ID NO: 1635703
accaauacauagcucucaa

SEQ ID NO: 1635705 - RNA, 19 nt, Artificial Sequence
  Description of Artificial Sequence: Synthetic oligonucleotide
  Sense strand starting at position 636 of SEQ ID NO: 1560945
gagcuauguauugguguga

SEQ ID NO: 1635706 - RNA, 19 nt, Artificial Sequence
  Description of Artificial Sequence: Synthetic oligonucleotide
  Antisense strand to SEQ ID NO: 1635705
ucacaccaauacauagcuc

SEQ ID NO: 1635707 - RNA, 19 nt, Artificial Sequence
  Description of Artificial Sequence: Synthetic oligonucleotide
  Sense strand starting at position 637 of SEQ ID NO: 1560945
agcuauguauuggugugaa

SEQ ID NO: 1635708 - RNA, 19 nt, Artificial Sequence
  Description of Artificial Sequence: Synthetic oligonucleotide
  Antisense strand to SEQ ID NO: 1635707
uucacaccaauacauagcu

SEQ ID NO: 1635709 - RNA, 19 nt, Artificial Sequence
  Description of Artificial Sequence: Synthetic oligonucleotide
  Sense strand starting at position 691 of SEQ ID NO: 1560945
guccucagccuugaagaca

SEQ ID NO: 1635710 - RNA, 19 nt, Artificial Sequence
  Description of Artificial Sequence: Synthetic oligonucleotide
  Antisense strand to SEQ ID NO: 1635709
ugucuucaaggcugaggac

SEQ ID NO: 1635711 - RNA, 19 nt, Artificial Sequence
  Description of Artificial Sequence: Synthetic oligonucleotide
  Sense strand starting at position 786 of SEQ ID NO: 1560945
guguccuacuauccuacua

SEQ ID NO: 1635712 - RNA, 19 nt, Artificial Sequence
  Description of Artificial Sequence: Synthetic oligonucleotide
  Antisense strand to SEQ ID NO: 1635711
uaguaggauaguaggacac

SEQ ID NO: 1635713 - RNA, 19 nt, Artificial Sequence
  Description of Artificial Sequence: Synthetic oligonucleotide
  Sense strand starting at position 791 of SEQ ID NO: 1560945
cuacuauccuacuagguca

SEQ ID NO: 1635714 - RNA, 19 nt, Artificial Sequence
  Description of Artificial Sequence: Synthetic oligonucleotide
  Antisense strand to SEQ ID NO: 1635713
ugaccuaguaggauaguag

SEQ ID NO: 1635715 - RNA, 19 nt, Artificial Sequence
  Description of Artificial Sequence: Synthetic oligonucleotide
  Sense strand starting at position 1085 of SEQ ID NO: 1560945
gcgugagcuccaugaggac

SEQ ID NO: 1635716 - RNA, 19 nt, Artificial Sequence
  Description of Artificial Sequence: Synthetic oligonucleotide
  Antisense strand to SEQ ID NO: 1635715
guccucauggagcucacgc

SEQ ID NO: 1635717 - RNA, 19 nt, Artificial Sequence
  Description of Artificial Sequence: Synthetic oligonucleotide
  Sense strand starting at position 1242 of SEQ ID NO: 1560945
guguuucaugcccugugua

SEQ ID NO: 1635718 - RNA, 19 nt, Artificial Sequence
  Description of Artificial Sequence: Synthetic oligonucleotide
  Antisense strand to SEQ ID NO: 1635717
uacacagggcaugaaacac

SEQ ID NO: 1635719 - RNA, 19 nt, Artificial Sequence
  Description of Artificial Sequence: Synthetic oligonucleotide
  Sense strand starting at position 1269 of SEQ ID NO: 1560945
ugugaagugucaucugaua

SEQ ID NO: 1635720 - RNA, 19 nt, Artificial Sequence
  Description of Artificial Sequence: Synthetic oligonucleotide
  Antisense strand to SEQ ID NO: 1635719
uaucagaugacacuucaca

SEQ ID NO: 1635721 - RNA, 19 nt, Artificial Sequence
  Description of Artificial Sequence: Synthetic oligonucleotide
  Sense strand starting at position 1274 of SEQ ID NO: 1560945
agugucaucugauacaguu

SEQ ID NO: 1635722 - RNA, 19 nt, Artificial Sequence
  Description of Artificial Sequence: Synthetic oligonucleotide
  Antisense strand to SEQ ID NO: 1635721
aacuguaucagaugacacu

SEQ ID NO: 1635723 - RNA, 19 nt, Artificial Sequence
  Description of Artificial Sequence: Synthetic oligonucleotide
  Sense strand starting at position 2615 of SEQ ID NO: 1560945
gggugaaucucucaugucu

SEQ ID NO: 1635724 - RNA, 19 nt, Artificial Sequence
  Description of Artificial Sequence: Synthetic oligonucleotide
  Antisense strand to SEQ ID NO: 1635723
agacaugagagauucaccc

SEQ ID NO: 1635725 - RNA, 19 nt, Artificial Sequence
  Description of Artificial Sequence: Synthetic oligonucleotide
  Sense strand starting at position 2617 of SEQ ID NO: 1560945
gugaaucucucaugucucu

SEQ ID NO: 1635726 - RNA, 19 nt, Artificial Sequence
  Description of Artificial Sequence: Synthetic oligonucleotide
  Antisense strand to SEQ ID NO: 1635725
agagacaugagagauucac

SEQ ID NO: 1635727 - RNA, 19 nt, Artificial Sequence
  Description of Artificial Sequence: Synthetic oligonucleotide
  Sense strand starting at position 2627 of SEQ ID NO: 1560945
caugucucuugggaggaga

SEQ ID NO: 1635728 - RNA, 19 nt, Artificial Sequence
  Description of Artificial Sequence: Synthetic oligonucleotide
  Antisense strand to SEQ ID NO: 1635727
ucuccucccaagagacaug

SEQ ID NO: 1635729 - RNA, 19 nt, Artificial Sequence
  Description of Artificial Sequence: Synthetic oligonucleotide
  Sense strand starting at position 2878 of SEQ ID NO: 1560945
ggagauggcucguugagac

SEQ ID NO: 1635730 - RNA, 19 nt, Artificial Sequence
  Description of Artificial Sequence: Synthetic oligonucleotide
  Antisense strand to SEQ ID NO: 1635729
gucucaacgagccaucucc

SEQ ID NO: 1635731 - RNA, 19 nt, Artificial Sequence
  Description of Artificial Sequence: Synthetic oligonucleotide
  Sense strand starting at position 3341 of SEQ ID NO: 1560945
gcugcuguucugugucagu

SEQ ID NO: 1635732 - RNA, 19 nt, Artificial Sequence
  Description of Artificial Sequence: Synthetic oligonucleotide
  Antisense strand to SEQ ID NO: 1635731
acugacacagaacagcagc

SEQ ID NO: 1635733 - RNA, 19 nt, Artificial Sequence
  Description of Artificial Sequence: Synthetic oligonucleotide
  Sense strand starting at position 208 of SEQ ID NO: 1560946
uggaaucacucacaguaua

SEQ ID NO: 1635734 - RNA, 19 nt, Artificial Sequence
  Description of Artificial Sequence: Synthetic oligonucleotide
  Antisense strand to SEQ ID NO: 1635733
uauacugugagugauucca

SEQ ID NO: 1635735 - RNA, 19 nt, Artificial Sequence
  Description of Artificial Sequence: Synthetic oligonucleotide
  Sense strand starting at position 241 of SEQ ID NO: 1560946
ugucgaauuucuucucuag

SEQ ID NO: 1635736 - RNA, 19 nt, Artificial Sequence
  Description of Artificial Sequence: Synthetic oligonucleotide
  Antisense strand to SEQ ID NO: 1635735
cuagagaagaaauucgaca

SEQ ID NO: 1635737 - RNA, 19 nt, Artificial Sequence
  Description of Artificial Sequence: Synthetic oligonucleotide
  Sense strand starting at position 243 of SEQ ID NO: 1560946
ucgaauuucuucucuaguc

SEQ ID NO: 1635738 - RNA, 19 nt, Artificial Sequence
  Description of Artificial Sequence: Synthetic oligonucleotide
  Antisense strand to SEQ ID NO: 1635737
gacuagagaagaaauucga

SEQ ID NO: 1635739 - RNA, 19 nt, Artificial Sequence
  Description of Artificial Sequence: Synthetic oligonucleotide
  Sense strand starting at position 244 of SEQ ID NO: 1560946
cgaauuucuucucuagucu

SEQ ID NO: 1635740 - RNA, 19 nt, Artificial Sequence
  Description of Artificial Sequence: Synthetic oligonucleotide
  Antisense strand to SEQ ID NO: 1635739
agacuagagaagaaauucg

SEQ ID NO: 1635741 - RNA, 19 nt, Artificial Sequence
  Description of Artificial Sequence: Synthetic oligonucleotide
  Sense strand starting at position 259 of SEQ ID NO: 1560946
gucucaucaccucgcuuua

SEQ ID NO: 1635742 - RNA, 19 nt, Artificial Sequence
  Description of Artificial Sequence: Synthetic oligonucleotide
  Antisense strand to SEQ ID NO: 1635741
uaaagcgaggugaugagac

SEQ ID NO: 1635743 - RNA, 19 nt, Artificial Sequence
  Description of Artificial Sequence: Synthetic oligonucleotide
  Sense strand starting at position 302 of SEQ ID NO: 1560946
cauccuuccgggugacauu

SEQ ID NO: 1635744 - RNA, 19 nt, Artificial Sequence
  Description of Artificial Sequence: Synthetic oligonucleotide
  Antisense strand to SEQ ID NO: 1635743
aaugucacccggaaggaug

SEQ ID NO: 1635745 - RNA, 19 nt, Artificial Sequence
  Description of Artificial Sequence: Synthetic oligonucleotide
  Sense strand starting at position 330 of SEQ ID NO: 1560946
cagggaugcguuggaauau

SEQ ID NO: 1635746 - RNA, 19 nt, Artificial Sequence
  Description of Artificial Sequence: Synthetic oligonucleotide
  Antisense strand to SEQ ID NO: 1635745
auauuccaacgcaucccug

SEQ ID NO: 1635747 - RNA, 19 nt, Artificial Sequence
  Description of Artificial Sequence: Synthetic oligonucleotide
  Sense strand starting at position 331 of SEQ ID NO: 1560946
agggaugcguuggaauaua

SEQ ID NO: 1635748 - RNA, 19 nt, Artificial Sequence
  Description of Artificial Sequence: Synthetic oligonucleotide
  Antisense strand to SEQ ID NO: 1635747
uauauuccaacgcaucccu

SEQ ID NO: 1635749 - RNA, 19 nt, Artificial Sequence
  Description of Artificial Sequence: Synthetic oligonucleotide
  Sense strand starting at position 339 of SEQ ID NO: 1560946
guuggaauauacuguuucu

SEQ ID NO: 1635750 - RNA, 19 nt, Artificial Sequence
  Description of Artificial Sequence: Synthetic oligonucleotide
  Antisense strand to SEQ ID NO: 1635749
agaaacaguauauuccaac

SEQ ID NO: 1635751 - RNA, 19 nt, Artificial Sequence
  Description of Artificial Sequence: Synthetic oligonucleotide
  Sense strand starting at position 342 of SEQ ID NO: 1560946
ggaauauacuguuucucuu

SEQ ID NO: 1635752 - RNA, 19 nt, Artificial Sequence
  Description of Artificial Sequence: Synthetic oligonucleotide
  Antisense strand to SEQ ID NO: 1635751
aagagaaacaguauauucc

SEQ ID NO: 1635753 - RNA, 19 nt, Artificial Sequence
  Description of Artificial Sequence: Synthetic oligonucleotide
  Sense strand starting at position 409 of SEQ ID NO: 1560946
gauauaauguaaugguaga

SEQ ID NO: 1635754 - RNA, 19 nt, Artificial Sequence
  Description of Artificial Sequence: Synthetic oligonucleotide
  Antisense strand to SEQ ID NO: 1635753
ucuaccauuacauuauauc

SEQ ID NO: 1635755 - RNA, 19 nt, Artificial Sequence
  Description of Artificial Sequence: Synthetic oligonucleotide
  Sense strand starting at position 530 of SEQ ID NO: 1560946
gggcuucaaucgugacuuc

SEQ ID NO: 1635756 - RNA, 19 nt, Artificial Sequence
  Description of Artificial Sequence: Synthetic oligonucleotide
  Antisense strand to SEQ ID NO: 1635755
gaagucacgauugaagccc

SEQ ID NO: 1635757 - RNA, 19 nt, Artificial Sequence
  Description of Artificial Sequence: Synthetic oligonucleotide
  Sense strand starting at position 621 of SEQ ID NO: 1560946
accuauguauuguggugaa

SEQ ID NO: 1635758 - RNA, 19 nt, Artificial Sequence
  Description of Artificial Sequence: Synthetic oligonucleotide
  Antisense strand to SEQ ID NO: 1635757
uucaccacaauacauaggu

SEQ ID NO: 1635759 - RNA, 19 nt, Artificial Sequence
  Description of Artificial Sequence: Synthetic oligonucleotide
  Sense strand starting at position 658 of SEQ ID NO: 1560946
cugagaaggucucuuccau

SEQ ID NO: 1635760 - RNA, 19 nt, Artificial Sequence
  Description of Artificial Sequence: Synthetic oligonucleotide
  Antisense strand to SEQ ID NO: 1635759
auggaagagaccuucucag

SEQ ID NO: 1635761 - RNA, 19 nt, Artificial Sequence
  Description of Artificial Sequence: Synthetic oligonucleotide
  Sense strand starting at position 675 of SEQ ID NO: 1560946
auccucagccuugaagaua

SEQ ID NO: 1635762 - RNA, 19 nt, Artificial Sequence
  Description of Artificial Sequence: Synthetic oligonucleotide
  Antisense strand to SEQ ID NO: 1635761
uaucuucaaggcugaggau

SEQ ID NO: 1635763 - RNA, 19 nt, Artificial Sequence
  Description of Artificial Sequence: Synthetic oligonucleotide
  Sense strand starting at position 1208 of SEQ ID NO: 1560946
ugcugaggauaguguuuca

SEQ ID NO: 1635764 - RNA, 19 nt, Artificial Sequence
  Description of Artificial Sequence: Synthetic oligonucleotide
  Antisense strand to SEQ ID NO: 1635763
ugaaacacuauccucagca

SEQ ID NO: 1635765 - RNA, 19 nt, Artificial Sequence
  Description of Artificial Sequence: Synthetic oligonucleotide
  Sense strand starting at position 1211 of SEQ ID NO: 1560946
ugaggauaguguuucaugu

SEQ ID NO: 1635766 - RNA, 19 nt, Artificial Sequence
  Description of Artificial Sequence: Synthetic oligonucleotide
  Antisense strand to SEQ ID NO: 1635765
acaugaaacacuauccuca

SEQ ID NO: 1635767 - RNA, 19 nt, Artificial Sequence
  Description of Artificial Sequence: Synthetic oligonucleotide
  Sense strand starting at position 1641 of SEQ ID NO: 1560946
cugcauuggccggacugau

SEQ ID NO: 1635768 - RNA, 19 nt, Artificial Sequence
  Description of Artificial Sequence: Synthetic oligonucleotide
  Antisense strand to SEQ ID NO: 1635767
aucaguccggccaaugcag

SEQ ID NO: 1635769 - RNA, 19 nt, Artificial Sequence
  Description of Artificial Sequence: Synthetic oligonucleotide
  Sense strand starting at position 2097 of SEQ ID NO: 1560946
guuucaggucccugggagu

SEQ ID NO: 1635770 - RNA, 19 nt, Artificial Sequence
  Description of Artificial Sequence: Synthetic oligonucleotide
  Antisense strand to SEQ ID NO: 1635769
acucccagggaccugaaac

SEQ ID NO: 1635771 - RNA, 19 nt, Artificial Sequence
  Description of Artificial Sequence: Synthetic oligonucleotide
  Sense strand starting at position 2470 of SEQ ID NO: 1560946
uuucucuaaucgugucaag

SEQ ID NO: 1635772 - RNA, 19 nt, Artificial Sequence
  Description of Artificial Sequence: Synthetic oligonucleotide
  Antisense strand to SEQ ID NO: 1635771
cuugacacgauuagagaaa

SEQ ID NO: 1635773 - RNA, 19 nt, Artificial Sequence
  Description of Artificial Sequence: Synthetic oligonucleotide
  Sense strand starting at position 2473 of SEQ ID NO: 1560946
cucuaaucgugucaagcuu

SEQ ID NO: 1635774 - RNA, 19 nt, Artificial Sequence
  Description of Artificial Sequence: Synthetic oligonucleotide
  Antisense strand to SEQ ID NO: 1635773
aagcuugacacgauuagag

SEQ ID NO: 1635775 - RNA, 19 nt, Artificial Sequence
  Description of Artificial Sequence: Synthetic oligonucleotide
  Sense strand starting at position 3168 of SEQ ID NO: 1560946
ggccacaucccggauggua

SEQ ID NO: 1635776 - RNA, 19 nt, Artificial Sequence
  Description of Artificial Sequence: Synthetic oligonucleotide
  Antisense strand to SEQ ID NO: 1635775
uaccauccgggauguggcc

SEQ ID NO: 1635777 - RNA, 19 nt, Artificial Sequence
  Description of Artificial Sequence: Synthetic oligonucleotide
  Sense strand starting at position 3176 of SEQ ID NO: 1560946
cccggaugguaccugugaa

SEQ ID NO: 1635778 - RNA, 19 nt, Artificial Sequence
  Description of Artificial Sequence: Synthetic oligonucleotide
  Antisense strand to SEQ ID NO: 1635777
uucacagguaccauccggg

SEQ ID NO: 1635779 - RNA, 19 nt, Artificial Sequence
  Description of Artificial Sequence: Synthetic oligonucleotide
  Sense strand starting at position 3177 of SEQ ID NO: 1560946
ccggaugguaccugugaau

SEQ ID NO: 1635780 - RNA, 19 nt, Artificial Sequence
  Description of Artificial Sequence: Synthetic oligonucleotide
  Antisense strand to SEQ ID NO: 1635779
auucacagguaccauccgg

SEQ ID NO: 1635781 - RNA, 19 nt, Artificial Sequence
  Description of Artificial Sequence: Synthetic oligonucleotide
  Sense strand starting at position 3180 of SEQ ID NO: 1560946
gaugguaccugugaaugac

SEQ ID NO: 1635782 - RNA, 19 nt, Artificial Sequence
  Description of Artificial Sequence: Synthetic oligonucleotide
  Antisense strand to SEQ ID NO: 1635781
gucauucacagguaccauc

SEQ ID NO: 1635783 - RNA, 19 nt, Artificial Sequence
  Description of Artificial Sequence: Synthetic oligonucleotide
  Sense strand starting at position 3930 of SEQ ID NO: 1560946
guuugugugcaguaggcaa

SEQ ID NO: 1635784 - RNA, 19 nt, Artificial Sequence
  Description of Artificial Sequence: Synthetic oligonucleotide
  Antisense strand to SEQ ID NO: 1635783
uugccuacugcacacaaac

SEQ ID NO: 1635785 - RNA, 19 nt, Artificial Sequence
  Description of Artificial Sequence: Synthetic oligonucleotide
  Sense strand starting at position 97 of SEQ ID NO: 1560947
gccagacuuggugguccau

SEQ ID NO: 1635786 - RNA, 19 nt, Artificial Sequence
  Description of Artificial Sequence: Synthetic oligonucleotide
  Antisense strand to SEQ ID NO: 1635785
auggaccaccaagucuggc

SEQ ID NO: 1635787 - RNA, 19 nt, Artificial Sequence
  Description of Artificial Sequence: Synthetic oligonucleotide
  Sense strand starting at position 318 of SEQ ID NO: 1560947
cuaccuuucgaucagucaa

SEQ ID NO: 1635788 - RNA, 19 nt, Artificial Sequence
  Description of Artificial Sequence: Synthetic oligonucleotide
  Antisense strand to SEQ ID NO: 1635787
uugacugaucgaaagguag

SEQ ID NO: 1635789 - RNA, 19 nt, Artificial Sequence
  Description of Artificial Sequence: Synthetic oligonucleotide
  Sense strand starting at position 397 of SEQ ID NO: 1560947
guaggaaauaguuguuaag

SEQ ID NO: 1635790 - RNA, 19 nt, Artificial Sequence
  Description of Artificial Sequence: Synthetic oligonucleotide
  Antisense strand to SEQ ID NO: 1635789
cuuaacaacuauuuccuac

SEQ ID NO: 1635791 - RNA, 19 nt, Artificial Sequence
  Description of Artificial Sequence: Synthetic oligonucleotide
  Sense strand starting at position 399 of SEQ ID NO: 1560947
aggaaauaguuguuaagug

SEQ ID NO: 1635792 - RNA, 19 nt, Artificial Sequence
  Description of Artificial Sequence: Synthetic oligonucleotide
  Antisense strand to SEQ ID NO: 1635791
cacuuaacaacuauuuccu

SEQ ID NO: 1635793 - RNA, 19 nt, Artificial Sequence
  Description of Artificial Sequence: Synthetic oligonucleotide
  Sense strand starting at position 403 of SEQ ID NO: 1560947
aauaguuguuaaguggaca

SEQ ID NO: 1635794 - RNA, 19 nt, Artificial Sequence
  Description of Artificial Sequence: Synthetic oligonucleotide
  Antisense strand to SEQ ID NO: 1635793
uguccacuuaacaacuauu

SEQ ID NO: 1635795 - RNA, 19 nt, Artificial Sequence
  Description of Artificial Sequence: Synthetic oligonucleotide
  Sense strand starting at position 406 of SEQ ID NO: 1560947
aguuguuaaguggacagau

SEQ ID NO: 1635796 - RNA, 19 nt, Artificial Sequence
  Description of Artificial Sequence: Synthetic oligonucleotide
  Antisense strand to SEQ ID NO: 1635795
aucuguccacuuaacaacu

SEQ ID NO: 1635797 - RNA, 19 nt, Artificial Sequence
  Description of Artificial Sequence: Synthetic oligonucleotide
  Sense strand starting at position 706 of SEQ ID NO: 1560947
ggaagaguaugagauguca

SEQ ID NO: 1635798 - RNA, 19 nt, Artificial Sequence
  Description of Artificial Sequence: Synthetic oligonucleotide
  Antisense strand to SEQ ID NO: 1635797
ugacaucucauacucuucc

SEQ ID NO: 1635799 - RNA, 19 nt, Artificial Sequence
  Description of Artificial Sequence: Synthetic oligonucleotide
  Sense strand starting at position 718 of SEQ ID NO: 1560947
gaugucagguccugugcaa

SEQ ID NO: 1635800 - RNA, 19 nt, Artificial Sequence
  Description of Artificial Sequence: Synthetic oligonucleotide
  Antisense strand to SEQ ID NO: 1635799
uugcacaggaccugacauc

SEQ ID NO: 1635801 - RNA, 19 nt, Artificial Sequence
  Description of Artificial Sequence: Synthetic oligonucleotide
  Sense strand starting at position 850 of SEQ ID NO: 1560947
gggaucucauccuagacga

SEQ ID NO: 1635802 - RNA, 19 nt, Artificial Sequence
  Description of Artificial Sequence: Synthetic oligonucleotide
  Antisense strand to SEQ ID NO: 1635801
ucgucuaggaugagauccc

SEQ ID NO: 1635803 - RNA, 19 nt, Artificial Sequence
  Description of Artificial Sequence: Synthetic oligonucleotide
  Sense strand starting at position 890 of SEQ ID NO: 1560947
agaagacaguccucucaug

SEQ ID NO: 1635804 - RNA, 19 nt, Artificial Sequence
  Description of Artificial Sequence: Synthetic oligonucleotide
  Antisense strand to SEQ ID NO: 1635803
caugagaggacugucuucu

SEQ ID NO: 1635805 - RNA, 19 nt, Artificial Sequence
  Description of Artificial Sequence: Synthetic oligonucleotide
  Sense strand starting at position 1001 of SEQ ID NO: 1560947
cuaaauagauccuggaaac

SEQ ID NO: 1635806 - RNA, 19 nt, Artificial Sequence
  Description of Artificial Sequence: Synthetic oligonucleotide
  Antisense strand to SEQ ID NO: 1635805
guuuccaggaucuauuuag

SEQ ID NO: 1635807 - RNA, 19 nt, Artificial Sequence
  Description of Artificial Sequence: Synthetic oligonucleotide
  Sense strand starting at position 1128 of SEQ ID NO: 1560947
ggaucuaaacgucacauca

SEQ ID NO: 1635808 - RNA, 19 nt, Artificial Sequence
  Description of Artificial Sequence: Synthetic oligonucleotide
  Antisense strand to SEQ ID NO: 1635807
ugaugugacguuuagaucc

SEQ ID NO: 1635809 - RNA, 19 nt, Artificial Sequence
  Description of Artificial Sequence: Synthetic oligonucleotide
  Sense strand starting at position 1182 of SEQ ID NO: 1560947
ucaagagguuccuaauguc

SEQ ID NO: 1635810 - RNA, 19 nt, Artificial Sequence
  Description of Artificial Sequence: Synthetic oligonucleotide
  Antisense strand to SEQ ID NO: 1635809
gacauuaggaaccucuuga

SEQ ID NO: 1635811 - RNA, 19 nt, Artificial Sequence
  Description of Artificial Sequence: Synthetic oligonucleotide
  Sense strand starting at position 1185 of SEQ ID NO: 1560947
agagguuccuaaugucaca

SEQ ID NO: 1635812 - RNA, 19 nt, Artificial Sequence
  Description of Artificial Sequence: Synthetic oligonucleotide
  Antisense strand to SEQ ID NO: 1635811
ugugacauuaggaaccucu

SEQ ID NO: 1635813 - RNA, 19 nt, Artificial Sequence
  Description of Artificial Sequence: Synthetic oligonucleotide
  Sense strand starting at position 1199 of SEQ ID NO: 1560947
ucacauggcucuccuagau

SEQ ID NO: 1635814 - RNA, 19 nt, Artificial Sequence
  Description of Artificial Sequence: Synthetic oligonucleotide
  Antisense strand to SEQ ID NO: 1635813
aucuaggagagccauguga

SEQ ID NO: 1635815 - RNA, 19 nt, Artificial Sequence
  Description of Artificial Sequence: Synthetic oligonucleotide
  Sense strand starting at position 1213 of SEQ ID NO: 1560947
uagauaggcuguuaaagug

SEQ ID NO: 1635816 - RNA, 19 nt, Artificial Sequence
  Description of Artificial Sequence: Synthetic oligonucleotide
  Antisense strand to SEQ ID NO: 1635815
cacuuuaacagccuaucua

SEQ ID NO: 1635817 - RNA, 19 nt, Artificial Sequence
  Description of Artificial Sequence: Synthetic oligonucleotide
  Sense strand starting at position 1229 of SEQ ID NO: 1560947
gugacugcgccuucaacga

SEQ ID NO: 1635818 - RNA, 19 nt, Artificial Sequence
  Description of Artificial Sequence: Synthetic oligonucleotide
  Antisense strand to SEQ ID NO: 1635817
ucguugaaggcgcagucac

SEQ ID NO: 1635819 - RNA, 19 nt, Artificial Sequence
  Description of Artificial Sequence: Synthetic oligonucleotide
  Sense strand starting at position 1372 of SEQ ID NO: 1560947
ucagcaaagcccugaacau

SEQ ID NO: 1635820 - RNA, 19 nt, Artificial Sequence
  Description of Artificial Sequence: Synthetic oligonucleotide
  Antisense strand to SEQ ID NO: 1635819
auguucagggcuuugcuga

SEQ ID NO: 1635821 - RNA, 19 nt, Artificial Sequence
  Description of Artificial Sequence: Synthetic oligonucleotide
  Sense strand starting at position 1517 of SEQ ID NO: 1560947
cgaaaucaauccgucucaa

SEQ ID NO: 1635822 - RNA, 19 nt, Artificial Sequence
  Description of Artificial Sequence: Synthetic oligonucleotide
  Antisense strand to SEQ ID NO: 1635821
uugagacggauugauuucg

SEQ ID NO: 1635823 - RNA, 19 nt, Artificial Sequence
  Description of Artificial Sequence: Synthetic oligonucleotide
  Sense strand starting at position 2124 of SEQ ID NO: 1560947
ggaguaaguucgcagagcu

SEQ ID NO: 1635824 - RNA, 19 nt, Artificial Sequence
  Description of Artificial Sequence: Synthetic oligonucleotide
  Antisense strand to SEQ ID NO: 1635823
agcucugcgaacuuacucc

SEQ ID NO: 1635825 - RNA, 19 nt, Artificial Sequence
  Description of Artificial Sequence: Synthetic oligonucleotide
  Sense strand starting at position 2464 of SEQ ID NO: 1560947
accuuaguucuguauccca

SEQ ID NO: 1635826 - RNA, 19 nt, Artificial Sequence
  Description of Artificial Sequence: Synthetic oligonucleotide
  Antisense strand to SEQ ID NO: 1635825
ugggauacagaacuaaggu

SEQ ID NO: 1635827 - RNA, 19 nt, Artificial Sequence
  Description of Artificial Sequence: Synthetic oligonucleotide
  Sense strand starting at position 2469 of SEQ ID NO: 1560947
aguucuguaucccagguuu

SEQ ID NO: 1635828 - RNA, 19 nt, Artificial Sequence
  Description of Artificial Sequence: Synthetic oligonucleotide
  Antisense strand to SEQ ID NO: 1635827
aaaccugggauacagaacu

SEQ ID NO: 1635829 - RNA, 19 nt, Artificial Sequence
  Description of Artificial Sequence: Synthetic oligonucleotide
  Sense strand starting at position 2482 of SEQ ID NO: 1560947
agguuuccgccuuacagau

SEQ ID NO: 1635830 - RNA, 19 nt, Artificial Sequence
  Description of Artificial Sequence: Synthetic oligonucleotide
  Antisense strand to SEQ ID NO: 1635829
aucuguaaggcggaaaccu

SEQ ID NO: 1635831 - RNA, 19 nt, Artificial Sequence
  Description of Artificial Sequence: Synthetic oligonucleotide
  Sense strand starting at position 2517 of SEQ ID NO: 1560947
gcuuaagcuuuacaggcau

SEQ ID NO: 1635832 - RNA, 19 nt, Artificial Sequence
  Description of Artificial Sequence: Synthetic oligonucleotide
  Antisense strand to SEQ ID NO: 1635831
augccuguaaagcuuaagc

SEQ ID NO: 1635833 - RNA, 19 nt, Artificial Sequence
  Description of Artificial Sequence: Synthetic oligonucleotide
  Sense strand starting at position 2530 of SEQ ID NO: 1560947
aggcaucaucgucgcaagu

SEQ ID NO: 1635834 - RNA, 19 nt, Artificial Sequence
  Description of Artificial Sequence: Synthetic oligonucleotide
  Antisense strand to SEQ ID NO: 1635833
acuugcgacgaugaugccu

SEQ ID NO: 1635835 - RNA, 19 nt, Artificial Sequence
  Description of Artificial Sequence: Synthetic oligonucleotide
  Sense strand starting at position 2531 of SEQ ID NO: 1560947
ggcaucaucgucgcaagua

SEQ ID NO: 1635836 - RNA, 19 nt, Artificial Sequence
  Description of Artificial Sequence: Synthetic oligonucleotide
  Antisense strand to SEQ ID NO: 1635835
uacuugcgacgaugaugcc

SEQ ID NO: 1635837 - RNA, 19 nt, Artificial Sequence
  Description of Artificial Sequence: Synthetic oligonucleotide
  Sense strand starting at position 2546 of SEQ ID NO: 1560947
aguauuauguuuccucauu

SEQ ID NO: 1635838 - RNA, 19 nt, Artificial Sequence
  Description of Artificial Sequence: Synthetic oligonucleotide
  Antisense strand to SEQ ID NO: 1635837
aaugaggaaacauaauacu

SEQ ID NO: 1635839 - RNA, 19 nt, Artificial Sequence
  Description of Artificial Sequence: Synthetic oligonucleotide
  Sense strand starting at position 2547 of SEQ ID NO: 1560947
guauuauguuuccucauuu

SEQ ID NO: 1635840 - RNA, 19 nt, Artificial Sequence
  Description of Artificial Sequence: Synthetic oligonucleotide
  Antisense strand to SEQ ID NO: 1635839
aaaugaggaaacauaauac

SEQ ID NO: 1635841 - RNA, 19 nt, Artificial Sequence
  Description of Artificial Sequence: Synthetic oligonucleotide
  Sense strand starting at position 2772 of SEQ ID NO: 1560947
aucauuacagcucgacaaa

SEQ ID NO: 1635842 - RNA, 19 nt, Artificial Sequence
  Description of Artificial Sequence: Synthetic oligonucleotide
  Antisense strand to SEQ ID NO: 1635841
uuugucgagcuguaaugau

SEQ ID NO: 1635843 - RNA, 19 nt, Artificial Sequence
  Description of Artificial Sequence: Synthetic oligonucleotide
  Sense strand starting at position 2800 of SEQ ID NO: 1560947
agugaacaugcccauacaa

SEQ ID NO: 1635844 - RNA, 19 nt, Artificial Sequence
  Description of Artificial Sequence: Synthetic oligonucleotide
  Antisense strand to SEQ ID NO: 1635843
uuguaugggcauguucacu

SEQ ID NO: 1635845 - RNA, 19 nt, Artificial Sequence
  Description of Artificial Sequence: Synthetic oligonucleotide
  Sense strand starting at position 3166 of SEQ ID NO: 1560947
acgaucauagcucacuaga

SEQ ID NO: 1635846 - RNA, 19 nt, Artificial Sequence
  Description of Artificial Sequence: Synthetic oligonucleotide
  Antisense strand to SEQ ID NO: 1635845
ucuagugagcuaugaucgu

SEQ ID NO: 1635847 - RNA, 19 nt, Artificial Sequence
  Description of Artificial Sequence: Synthetic oligonucleotide
  Sense strand starting at position 3168 of SEQ ID NO: 1560947
gaucauagcucacuagagu

SEQ ID NO: 1635848 - RNA, 19 nt, Artificial Sequence
  Description of Artificial Sequence: Synthetic oligonucleotide
  Antisense strand to SEQ ID NO: 1635847
acucuagugagcuaugauc

SEQ ID NO: 1635849 - RNA, 19 nt, Artificial Sequence
  Description of Artificial Sequence: Synthetic oligonucleotide
  Sense strand starting at position 3288 of SEQ ID NO: 1560947
gaaagagauucuugcucug

SEQ ID NO: 1635850 - RNA, 19 nt, Artificial Sequence
  Description of Artificial Sequence: Synthetic oligonucleotide
  Antisense strand to SEQ ID NO: 1635849
cagagcaagaaucucuuuc

SEQ ID NO: 1635851 - RNA, 19 nt, Artificial Sequence
  Description of Artificial Sequence: Synthetic oligonucleotide
  Sense strand starting at position 3290 of SEQ ID NO: 1560947
aagagauucuugcucuguu

SEQ ID NO: 1635852 - RNA, 19 nt, Artificial Sequence
  Description of Artificial Sequence: Synthetic oligonucleotide
  Antisense strand to SEQ ID NO: 1635851
aacagagcaagaaucucuu

SEQ ID NO: 1635853 - RNA, 19 nt, Artificial Sequence
  Description of Artificial Sequence: Synthetic oligonucleotide
  Sense strand starting at position 3583 of SEQ ID NO: 1560947
acuuguaacagcuggguua

SEQ ID NO: 1635854 - RNA, 19 nt, Artificial Sequence
  Description of Artificial Sequence: Synthetic oligonucleotide
  Antisense strand to SEQ ID NO: 1635853
uaacccagcuguuacaagu

SEQ ID NO: 1635855 - RNA, 19 nt, Artificial Sequence
  Description of Artificial Sequence: Synthetic oligonucleotide
  Sense strand starting at position 3694 of SEQ ID NO: 1560947
augcauaccguguguagaa

SEQ ID NO: 1635856 - RNA, 19 nt, Artificial Sequence
  Description of Artificial Sequence: Synthetic oligonucleotide
  Antisense strand to SEQ ID NO: 1635855
uucuacacacgguaugcau

SEQ ID NO: 1635857 - RNA, 19 nt, Artificial Sequence
  Description of Artificial Sequence: Synthetic oligonucleotide
  Sense strand starting at position 3695 of SEQ ID NO: 1560947
ugcauaccguguguagaaa

SEQ ID NO: 1635858 - RNA, 19 nt, Artificial Sequence
  Description of Artificial Sequence: Synthetic oligonucleotide
  Antisense strand to SEQ ID NO: 1635857
uuucuacacacgguaugca

SEQ ID NO: 1635859 - RNA, 19 nt, Artificial Sequence
  Description of Artificial Sequence: Synthetic oligonucleotide
  Sense strand starting at position 3696 of SEQ ID NO: 1560947
gcauaccguguguagaaau

SEQ ID NO: 1635860 - RNA, 19 nt, Artificial Sequence
  Description of Artificial Sequence: Synthetic oligonucleotide
  Antisense strand to SEQ ID NO: 1635859
auuucuacacacgguaugc

SEQ ID NO: 1635861 - RNA, 19 nt, Artificial Sequence
  Description of Artificial Sequence: Synthetic oligonucleotide
  Sense strand starting at position 3796 of SEQ ID NO: 1560947
guguuauagugcuauuguu

SEQ ID NO: 1635862 - RNA, 19 nt, Artificial Sequence
  Description of Artificial Sequence: Synthetic oligonucleotide
  Antisense strand to SEQ ID NO: 1635861
aacaauagcacuauaacac

SEQ ID NO: 1635863 - RNA, 19 nt, Artificial Sequence
  Description of Artificial Sequence: Synthetic oligonucleotide
  Sense strand starting at position 3863 of SEQ ID NO: 1560947
ccaagauggcaguaagucu

SEQ ID NO: 1635864 - RNA, 19 nt, Artificial Sequence
  Description of Artificial Sequence: Synthetic oligonucleotide
  Antisense strand to SEQ ID NO: 1635863
agacuuacugccaucuugg

SEQ ID NO: 1635865 - RNA, 19 nt, Artificial Sequence
  Description of Artificial Sequence: Synthetic oligonucleotide
  Sense strand starting at position 27 of SEQ ID NO: 1560948
gccagagcuccagaaauaa

SEQ ID NO: 1635866 - RNA, 19 nt, Artificial Sequence
  Description of Artificial Sequence: Synthetic oligonucleotide
  Antisense strand to SEQ ID NO: 1635865
uuauuucuggagcucuggc

SEQ ID NO: 1635867 - RNA, 19 nt, Artificial Sequence
  Description of Artificial Sequence: Synthetic oligonucleotide
  Sense strand starting at position 84 of SEQ ID NO: 1560948
ggcccauucucacuuguaa

SEQ ID NO: 1635868 - RNA, 19 nt, Artificial Sequence
  Description of Artificial Sequence: Synthetic oligonucleotide
  Antisense strand to SEQ ID NO: 1635867
uuacaagugagaaugggcc

SEQ ID NO: 1635869 - RNA, 19 nt, Artificial Sequence
  Description of Artificial Sequence: Synthetic oligonucleotide
  Sense strand starting at position 91 of SEQ ID NO: 1560948
ucucacuuguaaucaaagu

SEQ ID NO: 1635870 - RNA, 19 nt, Artificial Sequence
  Description of Artificial Sequence: Synthetic oligonucleotide
  Antisense strand to SEQ ID NO: 1635869
acuuugauuacaagugaga

SEQ ID NO: 1635871 - RNA, 19 nt, Artificial Sequence
  Description of Artificial Sequence: Synthetic oligonucleotide
  Sense strand starting at position 191 of SEQ ID NO: 1560948
guaugucaccuguggguga

SEQ ID NO: 1635872 - RNA, 19 nt, Artificial Sequence
  Description of Artificial Sequence: Synthetic oligonucleotide
  Antisense strand to SEQ ID NO: 1635871
ucacccacaggugacauac

SEQ ID NO: 1635873 - RNA, 19 nt, Artificial Sequence
  Description of Artificial Sequence: Synthetic oligonucleotide
  Sense strand starting at position 513 of SEQ ID NO: 1560948
aggaaugcuuucucauaaa

SEQ ID NO: 1635874 - RNA, 19 nt, Artificial Sequence
  Description of Artificial Sequence: Synthetic oligonucleotide
  Antisense strand to SEQ ID NO: 1635873
uuuaugagaaagcauuccu

SEQ ID NO: 1635875 - RNA, 19 nt, Artificial Sequence
  Description of Artificial Sequence: Synthetic oligonucleotide
  Sense strand starting at position 669 of SEQ ID NO: 1560948
aggaguacauuccauucuu

SEQ ID NO: 1635876 - RNA, 19 nt, Artificial Sequence
  Description of Artificial Sequence: Synthetic oligonucleotide
  Antisense strand to SEQ ID NO: 1635875
aagaauggaauguacuccu

SEQ ID NO: 1635877 - RNA, 19 nt, Artificial Sequence
  Description of Artificial Sequence: Synthetic oligonucleotide
  Sense strand starting at position 852 of SEQ ID NO: 1560948
aacagauguuuggucugaa

SEQ ID NO: 1635878 - RNA, 19 nt, Artificial Sequence
  Description of Artificial Sequence: Synthetic oligonucleotide
  Antisense strand to SEQ ID NO: 1635877
uucagaccaaacaucuguu

SEQ ID NO: 1635879 - RNA, 19 nt, Artificial Sequence
  Description of Artificial Sequence: Synthetic oligonucleotide
  Sense strand starting at position 853 of SEQ ID NO: 1560948
acagauguuuggucugaag

SEQ ID NO: 1635880 - RNA, 19 nt, Artificial Sequence
  Description of Artificial Sequence: Synthetic oligonucleotide
  Antisense strand to SEQ ID NO: 1635879
cuucagaccaaacaucugu

SEQ ID NO: 1635881 - RNA, 19 nt, Artificial Sequence
  Description of Artificial Sequence: Synthetic oligonucleotide
  Sense strand starting at position 855 of SEQ ID NO: 1560948
agauguuuggucugaagca

SEQ ID NO: 1635882 - RNA, 19 nt, Artificial Sequence
  Description of Artificial Sequence: Synthetic oligonucleotide
  Antisense strand to SEQ ID NO: 1635881
ugcuucagaccaaacaucu

SEQ ID NO: 1635883 - RNA, 19 nt, Artificial Sequence
  Description of Artificial Sequence: Synthetic oligonucleotide
  Sense strand starting at position 856 of SEQ ID NO: 1560948
gauguuuggucugaagcac

SEQ ID NO: 1635884 - RNA, 19 nt, Artificial Sequence
  Description of Artificial Sequence: Synthetic oligonucleotide
  Antisense strand to SEQ ID NO: 1635883
gugcuucagaccaaacauc

SEQ ID NO: 1635885 - RNA, 19 nt, Artificial Sequence
  Description of Artificial Sequence: Synthetic oligonucleotide
  Sense strand starting at position 882 of SEQ ID NO: 1560948
cccguauucuuguucucua

SEQ ID NO: 1635886 - RNA, 19 nt, Artificial Sequence
  Description of Artificial Sequence: Synthetic oligonucleotide
  Antisense strand to SEQ ID NO: 1635885
uagagaacaagaauacggg

SEQ ID NO: 1635887 - RNA, 19 nt, Artificial Sequence
  Description of Artificial Sequence: Synthetic oligonucleotide
  Sense strand starting at position 885 of SEQ ID NO: 1560948
guauucuuguucucuacuu

SEQ ID NO: 1635888 - RNA, 19 nt, Artificial Sequence
  Description of Artificial Sequence: Synthetic oligonucleotide
  Antisense strand to SEQ ID NO: 1635887
aaguagagaacaagaauac

SEQ ID NO: 1635889 - RNA, 19 nt, Artificial Sequence
  Description of Artificial Sequence: Synthetic oligonucleotide
  Sense strand starting at position 890 of SEQ ID NO: 1560948
cuuguucucuacuuguaag

SEQ ID NO: 1635890 - RNA, 19 nt, Artificial Sequence
  Description of Artificial Sequence: Synthetic oligonucleotide
  Antisense strand to SEQ ID NO: 1635889
cuuacaaguagagaacaag

SEQ ID NO: 1635891 - RNA, 19 nt, Artificial Sequence
  Description of Artificial Sequence: Synthetic oligonucleotide
  Sense strand starting at position 893 of SEQ ID NO: 1560948
guucucuacuuguaagaau

SEQ ID NO: 1635892 - RNA, 19 nt, Artificial Sequence
  Description of Artificial Sequence: Synthetic oligonucleotide
  Antisense strand to SEQ ID NO: 1635891
auucuuacaaguagagaac

SEQ ID NO: 1635893 - RNA, 19 nt, Artificial Sequence
  Description of Artificial Sequence: Synthetic oligonucleotide
  Sense strand starting at position 1089 of SEQ ID NO: 1560948
cuuggucuugccuggaauc

SEQ ID NO: 1635894 - RNA, 19 nt, Artificial Sequence
  Description of Artificial Sequence: Synthetic oligonucleotide
  Antisense strand to SEQ ID NO: 1635893
gauuccaggcaagaccaag

SEQ ID NO: 1635895 - RNA, 19 nt, Artificial Sequence
  Description of Artificial Sequence: Synthetic oligonucleotide
  Sense strand starting at position 1183 of SEQ ID NO: 1560948
cucacucaguucugccaua

SEQ ID NO: 1635896 - RNA, 19 nt, Artificial Sequence
  Description of Artificial Sequence: Synthetic oligonucleotide
  Antisense strand to SEQ ID NO: 1635895
uauggcagaacugagugag

SEQ ID NO: 1635897 - RNA, 19 nt, Artificial Sequence
  Description of Artificial Sequence: Synthetic oligonucleotide
  Sense strand starting at position 1188 of SEQ ID NO: 1560948
ucaguucugccauaagucu

SEQ ID NO: 1635898 - RNA, 19 nt, Artificial Sequence
  Description of Artificial Sequence: Synthetic oligonucleotide
  Antisense strand to SEQ ID NO: 1635897
agacuuauggcagaacuga

SEQ ID NO: 1635899 - RNA, 19 nt, Artificial Sequence
  Description of Artificial Sequence: Synthetic oligonucleotide
  Sense strand starting at position 1362 of SEQ ID NO: 1560948
cgauuacaggcgugaccau

SEQ ID NO: 1635900 - RNA, 19 nt, Artificial Sequence
  Description of Artificial Sequence: Synthetic oligonucleotide
  Antisense strand to SEQ ID NO: 1635899
auggucacgccuguaaucg

SEQ ID NO: 1635901 - RNA, 19 nt, Artificial Sequence
  Description of Artificial Sequence: Synthetic oligonucleotide
  Sense strand starting at position 1581 of SEQ ID NO: 1560948
cgacuuuaccuugagucga

SEQ ID NO: 1635902 - RNA, 19 nt, Artificial Sequence
  Description of Artificial Sequence: Synthetic oligonucleotide
  Antisense strand to SEQ ID NO: 1635901
ucgacucaagguaaagucg

SEQ ID NO: 1635903 - RNA, 19 nt, Artificial Sequence
  Description of Artificial Sequence: Synthetic oligonucleotide
  Sense strand starting at position 2053 of SEQ ID NO: 1560948
accucacgguuccaauaau

SEQ ID NO: 1635904 - RNA, 19 nt, Artificial Sequence
  Description of Artificial Sequence: Synthetic oligonucleotide
  Antisense strand to SEQ ID NO: 1635903
auuauuggaaccgugaggu

SEQ ID NO: 1635905 - RNA, 19 nt, Artificial Sequence
  Description of Artificial Sequence: Synthetic oligonucleotide
  Sense strand starting at position 2096 of SEQ ID NO: 1560948
cugagugcucgggacgcua

SEQ ID NO: 1635906 - RNA, 19 nt, Artificial Sequence
  Description of Artificial Sequence: Synthetic oligonucleotide
  Antisense strand to SEQ ID NO: 1635905
uagcgucccgagcacucag

SEQ ID NO: 1635907 - RNA, 19 nt, Artificial Sequence
  Description of Artificial Sequence: Synthetic oligonucleotide
  Sense strand starting at position 2115 of SEQ ID NO: 1560948
cguagcuguccuggagguu

SEQ ID NO: 1635908 - RNA, 19 nt, Artificial Sequence
  Description of Artificial Sequence: Synthetic oligonucleotide
  Antisense strand to SEQ ID NO: 1635907
aaccuccaggacagcuacg

SEQ ID NO: 1635909 - RNA, 19 nt, Artificial Sequence
  Description of Artificial Sequence: Synthetic oligonucleotide
  Sense strand starting at position 2184 of SEQ ID NO: 1560948
uuuggagagcuguguuauu

SEQ ID NO: 1635910 - RNA, 19 nt, Artificial Sequence
  Description of Artificial Sequence: Synthetic oligonucleotide
  Antisense strand to SEQ ID NO: 1635909
aauaacacagcucuccaaa

SEQ ID NO: 1635911 - RNA, 19 nt, Artificial Sequence
  Description of Artificial Sequence: Synthetic oligonucleotide
  Sense strand starting at position 2189 of SEQ ID NO: 1560948
agagcuguguuauucucau

SEQ ID NO: 1635912 - RNA, 19 nt, Artificial Sequence
  Description of Artificial Sequence: Synthetic oligonucleotide
  Antisense strand to SEQ ID NO: 1635911
augagaauaacacagcucu

SEQ ID NO: 1635913 - RNA, 19 nt, Artificial Sequence
  Description of Artificial Sequence: Synthetic oligonucleotide
  Sense strand starting at position 2229 of SEQ ID NO: 1560948
uggguaaccuuccaaagga

SEQ ID NO: 1635914 - RNA, 19 nt, Artificial Sequence
  Description of Artificial Sequence: Synthetic oligonucleotide
  Antisense strand to SEQ ID NO: 1635913
uccuuuggaagguuaccca

SEQ ID NO: 1635915 - RNA, 19 nt, Artificial Sequence
  Description of Artificial Sequence: Synthetic oligonucleotide
  Sense strand starting at position 2375 of SEQ ID NO: 1560948
ucauguguaaguggaggau

SEQ ID NO: 1635916 - RNA, 19 nt, Artificial Sequence
  Description of Artificial Sequence: Synthetic oligonucleotide
  Antisense strand to SEQ ID NO: 1635915
auccuccacuuacacauga

SEQ ID NO: 1635917 - RNA, 19 nt, Artificial Sequence
  Description of Artificial Sequence: Synthetic oligonucleotide
  Sense strand starting at position 2378 of SEQ ID NO: 1560948
uguguaaguggaggauuca

SEQ ID NO: 1635918 - RNA, 19 nt, Artificial Sequence
  Description of Artificial Sequence: Synthetic oligonucleotide
  Antisense strand to SEQ ID NO: 1635917
ugaauccuccacuuacaca

SEQ ID NO: 1635919 - RNA, 19 nt, Artificial Sequence
  Description of Artificial Sequence: Synthetic oligonucleotide
  Sense strand starting at position 2601 of SEQ ID NO: 1560948
aguagauguuggucaggcu

SEQ ID NO: 1635920 - RNA, 19 nt, Artificial Sequence
  Description of Artificial Sequence: Synthetic oligonucleotide
  Antisense strand to SEQ ID NO: 1635919
agccugaccaacaucuacu

SEQ ID NO: 1635921 - RNA, 19 nt, Artificial Sequence
  Description of Artificial Sequence: Synthetic oligonucleotide
  Sense strand starting at position 3029 of SEQ ID NO: 1560948
guaucucagugcuuggcaa

SEQ ID NO: 1635922 - RNA, 19 nt, Artificial Sequence
  Description of Artificial Sequence: Synthetic oligonucleotide
  Antisense strand to SEQ ID NO: 1635921
uugccaagcacugagauac

SEQ ID NO: 1635923 - RNA, 19 nt, Artificial Sequence
  Description of Artificial Sequence: Synthetic oligonucleotide
  Sense strand starting at position 3030 of SEQ ID NO: 1560948
uaucucagugcuuggcaaa

SEQ ID NO: 1635924 - RNA, 19 nt, Artificial Sequence
  Description of Artificial Sequence: Synthetic oligonucleotide
  Antisense strand to SEQ ID NO: 1635923
uuugccaagcacugagaua

SEQ ID NO: 1635925 - RNA, 19 nt, Artificial Sequence
  Description of Artificial Sequence: Synthetic oligonucleotide
  Sense strand starting at position 3031 of SEQ ID NO: 1560948
aucucagugcuuggcaaau

SEQ ID NO: 1635926 - RNA, 19 nt, Artificial Sequence
  Description of Artificial Sequence: Synthetic oligonucleotide
  Antisense strand to SEQ ID NO: 1635925
auuugccaagcacugagau

SEQ ID NO: 1635927 - RNA, 19 nt, Artificial Sequence
  Description of Artificial Sequence: Synthetic oligonucleotide
  Sense strand starting at position 3037 of SEQ ID NO: 1560948
gugcuuggcaaauauuagu

SEQ ID NO: 1635928 - RNA, 19 nt, Artificial Sequence
  Description of Artificial Sequence: Synthetic oligonucleotide
  Antisense strand to SEQ ID NO: 1635927
acuaauauuugccaagcac

SEQ ID NO: 1635929 - RNA, 19 nt, Artificial Sequence
  Description of Artificial Sequence: Synthetic oligonucleotide
  Sense strand starting at position 3042 of SEQ ID NO: 1560948
uggcaaauauuaguagaca

SEQ ID NO: 1635930 - RNA, 19 nt, Artificial Sequence
  Description of Artificial Sequence: Synthetic oligonucleotide
  Antisense strand to SEQ ID NO: 1635929
ugucuacuaauauuugcca

SEQ ID NO: 1635931 - RNA, 19 nt, Artificial Sequence
  Description of Artificial Sequence: Synthetic oligonucleotide
  Sense strand starting at position 3043 of SEQ ID NO: 1560948
ggcaaauauuaguagacag

SEQ ID NO: 1635932 - RNA, 19 nt, Artificial Sequence
  Description of Artificial Sequence: Synthetic oligonucleotide
  Antisense strand to SEQ ID NO: 1635931
cugucuacuaauauuugcc

SEQ ID NO: 1635933 - RNA, 19 nt, Artificial Sequence
  Description of Artificial Sequence: Synthetic oligonucleotide
  Sense strand starting at position 3502 of SEQ ID NO: 1560948
gugaacugagaucgccauu

SEQ ID NO: 1635934 - RNA, 19 nt, Artificial Sequence
  Description of Artificial Sequence: Synthetic oligonucleotide
  Antisense strand to SEQ ID NO: 1635933
aauggcgaucucaguucac

SEQ ID NO: 1635935 - RNA, 19 nt, Artificial Sequence
  Description of Artificial Sequence: Synthetic oligonucleotide
  Sense strand starting at position 3505 of SEQ ID NO: 1560948
aacugagaucgccauugca

SEQ ID NO: 1635936 - RNA, 19 nt, Artificial Sequence
  Description of Artificial Sequence: Synthetic oligonucleotide
  Antisense strand to SEQ ID NO: 1635935
ugcaauggcgaucucaguu

SEQ ID NO: 1635937 - RNA, 19 nt, Artificial Sequence
  Description of Artificial Sequence: Synthetic oligonucleotide
  Sense strand starting at position 3541 of SEQ ID NO: 1560948
gagcgagacugugcucaaa

SEQ ID NO: 1635938 - RNA, 19 nt, Artificial Sequence
  Description of Artificial Sequence: Synthetic oligonucleotide
  Antisense strand to SEQ ID NO: 1635937
uuugagcacagucucgcuc

SEQ ID NO: 1635939 - RNA, 19 nt, Artificial Sequence
  Description of Artificial Sequence: Synthetic oligonucleotide
  Sense strand starting at position 3636 of SEQ ID NO: 1560948
gaaagaaguugugguggua

SEQ ID NO: 1635940 - RNA, 19 nt, Artificial Sequence
  Description of Artificial Sequence: Synthetic oligonucleotide
  Antisense strand to SEQ ID NO: 1635939
uaccaccacaacuucuuuc

SEQ ID NO: 1635941 - RNA, 19 nt, Artificial Sequence
  Description of Artificial Sequence: Synthetic oligonucleotide
  Sense strand starting at position 44 of SEQ ID NO: 1560949
uguggagccagaugauguu

SEQ ID NO: 1635942 - RNA, 19 nt, Artificial Sequence
  Description of Artificial Sequence: Synthetic oligonucleotide
  Antisense strand to SEQ ID NO: 1635941
aacaucaucuggcuccaca

SEQ ID NO: 1635943 - RNA, 19 nt, Artificial Sequence
  Description of Artificial Sequence: Synthetic oligonucleotide
  Sense strand starting at position 50 of SEQ ID NO: 1560949
gccagaugauguugagaga

SEQ ID NO: 1635944 - RNA, 19 nt, Artificial Sequence
  Description of Artificial Sequence: Synthetic oligonucleotide
  Antisense strand to SEQ ID NO: 1635943
ucucucaacaucaucuggc

SEQ ID NO: 1635945 - RNA, 19 nt, Artificial Sequence
  Description of Artificial Sequence: Synthetic oligonucleotide
  Sense strand starting at position 90 of SEQ ID NO: 1560949
gggucaaguuguagggaga

SEQ ID NO: 1635946 - RNA, 19 nt, Artificial Sequence
  Description of Artificial Sequence: Synthetic oligonucleotide
  Antisense strand to SEQ ID NO: 1635945
ucucccuacaacuugaccc

SEQ ID NO: 1635947 - RNA, 19 nt, Artificial Sequence
  Description of Artificial Sequence: Synthetic oligonucleotide
  Sense strand starting at position 91 of SEQ ID NO: 1560949
ggucaaguuguagggagau

SEQ ID NO: 1635948 - RNA, 19 nt, Artificial Sequence
  Description of Artificial Sequence: Synthetic oligonucleotide
  Antisense strand to SEQ ID NO: 1635947
aucucccuacaacuugacc

SEQ ID NO: 1635949 - RNA, 19 nt, Artificial Sequence
  Description of Artificial Sequence: Synthetic oligonucleotide
  Sense strand starting at position 161 of SEQ ID NO: 1560949
gccucagggugaguacuaa

SEQ ID NO: 1635950 - RNA, 19 nt, Artificial Sequence
  Description of Artificial Sequence: Synthetic oligonucleotide
  Antisense strand to SEQ ID NO: 1635949
uuaguacucacccugaggc

SEQ ID NO: 1635951 - RNA, 19 nt, Artificial Sequence
  Description of Artificial Sequence: Synthetic oligonucleotide
  Sense strand starting at position 577 of SEQ ID NO: 1560949
ccgguuagauccugaccca

SEQ ID NO: 1635952 - RNA, 19 nt, Artificial Sequence
  Description of Artificial Sequence: Synthetic oligonucleotide
  Antisense strand to SEQ ID NO: 1635951
ugggucaggaucuaaccgg

SEQ ID NO: 1635953 - RNA, 19 nt, Artificial Sequence
  Description of Artificial Sequence: Synthetic oligonucleotide
  Sense strand starting at position 578 of SEQ ID NO: 1560949
cgguuagauccugacccau

SEQ ID NO: 1635954 - RNA, 19 nt, Artificial Sequence
  Description of Artificial Sequence: Synthetic oligonucleotide
  Antisense strand to SEQ ID NO: 1635953
augggucaggaucuaaccg

SEQ ID NO: 1635955 - RNA, 19 nt, Artificial Sequence
  Description of Artificial Sequence: Synthetic oligonucleotide
  Sense strand starting at position 725 of SEQ ID NO: 1560949
cccucuacauccuuaggua

SEQ ID NO: 1635956 - RNA, 19 nt, Artificial Sequence
  Description of Artificial Sequence: Synthetic oligonucleotide
  Antisense strand to SEQ ID NO: 1635955
uaccuaaggauguagaggg

SEQ ID NO: 1635957 - RNA, 19 nt, Artificial Sequence
  Description of Artificial Sequence: Synthetic oligonucleotide
  Sense strand starting at position 801 of SEQ ID NO: 1560949
cuggguacuuucccucaau

SEQ ID NO: 1635958 - RNA, 19 nt, Artificial Sequence
  Description of Artificial Sequence: Synthetic oligonucleotide
  Antisense strand to SEQ ID NO: 1635957
auugagggaaaguacccag

SEQ ID NO: 1635959 - RNA, 19 nt, Artificial Sequence
  Description of Artificial Sequence: Synthetic oligonucleotide
  Sense strand starting at position 1876 of SEQ ID NO: 1560949
gccaccuguucagacgaga

SEQ ID NO: 1635960 - RNA, 19 nt, Artificial Sequence
  Description of Artificial Sequence: Synthetic oligonucleotide
  Antisense strand to SEQ ID NO: 1635959
ucucgucugaacagguggc

SEQ ID NO: 1635961 - RNA, 19 nt, Artificial Sequence
  Description of Artificial Sequence: Synthetic oligonucleotide
  Sense strand starting at position 2424 of SEQ ID NO: 1560949
auaugugagugcugggaaa

SEQ ID NO: 1635962 - RNA, 19 nt, Artificial Sequence
  Description of Artificial Sequence: Synthetic oligonucleotide
  Antisense strand to SEQ ID NO: 1635961
uuucccagcacucacauau

SEQ ID NO: 1635963 - RNA, 19 nt, Artificial Sequence
  Description of Artificial Sequence: Synthetic oligonucleotide
  Sense strand starting at position 2658 of SEQ ID NO: 1560949
cugggaucugagcauguca

SEQ ID NO: 1635964 - RNA, 19 nt, Artificial Sequence
  Description of Artificial Sequence: Synthetic oligonucleotide
  Antisense strand to SEQ ID NO: 1635963
ugacaugcucagaucccag

SEQ ID NO: 1635965 - RNA, 19 nt, Artificial Sequence
  Description of Artificial Sequence: Synthetic oligonucleotide
  Sense strand starting at position 2660 of SEQ ID NO: 1560949
gggaucugagcaugucaga

SEQ ID NO: 1635966 - RNA, 19 nt, Artificial Sequence
  Description of Artificial Sequence: Synthetic oligonucleotide
  Antisense strand to SEQ ID NO: 1635965
ucugacaugcucagauccc

SEQ ID NO: 1635967 - RNA, 19 nt, Artificial Sequence
  Description of Artificial Sequence: Synthetic oligonucleotide
  Sense strand starting at position 2722 of SEQ ID NO: 1560949
gcacgaugcagacagauaa

SEQ ID NO: 1635968 - RNA, 19 nt, Artificial Sequence
  Description of Artificial Sequence: Synthetic oligonucleotide
  Antisense strand to SEQ ID NO: 1635967
uuaucugucugcaucgugc

SEQ ID NO: 1635969 - RNA, 19 nt, Artificial Sequence
  Description of Artificial Sequence: Synthetic oligonucleotide
  Sense strand starting at position 2824 of SEQ ID NO: 1560949
ucggcuuggugaggaaaga

SEQ ID NO: 1635970 - RNA, 19 nt, Artificial Sequence
  Description of Artificial Sequence: Synthetic oligonucleotide
  Antisense strand to SEQ ID NO: 1635969
ucuuuccucaccaagccga

SEQ ID NO: 1635971 - RNA, 19 nt, Artificial Sequence
  Description of Artificial Sequence: Synthetic oligonucleotide
  Sense strand starting at position 2848 of SEQ ID NO: 1560949
gcacuuagaguguaaggca

SEQ ID NO: 1635972 - RNA, 19 nt, Artificial Sequence
  Description of Artificial Sequence: Synthetic oligonucleotide
  Antisense strand to SEQ ID NO: 1635971
ugccuuacacucuaagugc

SEQ ID NO: 1635973 - RNA, 19 nt, Artificial Sequence
  Description of Artificial Sequence: Synthetic oligonucleotide
  Sense strand starting at position 2893 of SEQ ID NO: 1560949
aagcaaacagcuugugauu

SEQ ID NO: 1635974 - RNA, 19 nt, Artificial Sequence
  Description of Artificial Sequence: Synthetic oligonucleotide
  Antisense strand to SEQ ID NO: 1635973
aaucacaagcuguuugcuu

SEQ ID NO: 1635975 - RNA, 19 nt, Artificial Sequence
  Description of Artificial Sequence: Synthetic oligonucleotide
  Sense strand starting at position 2895 of SEQ ID NO: 1560949
gcaaacagcuugugauugu

SEQ ID NO: 1635976 - RNA, 19 nt, Artificial Sequence
  Description of Artificial Sequence: Synthetic oligonucleotide
  Antisense strand to SEQ ID NO: 1635975
acaaucacaagcuguuugc

SEQ ID NO: 1635977 - RNA, 19 nt, Artificial Sequence
  Description of Artificial Sequence: Synthetic oligonucleotide
  Sense strand starting at position 3027 of SEQ ID NO: 1560949
cuagcagcucuuuggauga

SEQ ID NO: 1635978 - RNA, 19 nt, Artificial Sequence
  Description of Artificial Sequence: Synthetic oligonucleotide
  Antisense strand to SEQ ID NO: 1635977
ucauccaaagagcugcuag

SEQ ID NO: 1635979 - RNA, 19 nt, Artificial Sequence
  Description of Artificial Sequence: Synthetic oligonucleotide
  Sense strand starting at position 3189 of SEQ ID NO: 1560949
aacuccauccgugagggau

SEQ ID NO: 1635980 - RNA, 19 nt, Artificial Sequence
  Description of Artificial Sequence: Synthetic oligonucleotide
  Antisense strand to SEQ ID NO: 1635979
aucccucacggauggaguu

SEQ ID NO: 1635981 - RNA, 19 nt, Artificial Sequence
  Description of Artificial Sequence: Synthetic oligonucleotide
  Sense strand starting at position 3201 of SEQ ID NO: 1560949
gagggauugcuucgaugau

SEQ ID NO: 1635982 - RNA, 19 nt, Artificial Sequence
  Description of Artificial Sequence: Synthetic oligonucleotide
  Antisense strand to SEQ ID NO: 1635981
aucaucgaagcaaucccuc

SEQ ID NO: 1635983 - RNA, 19 nt, Artificial Sequence
  Description of Artificial Sequence: Synthetic oligonucleotide
  Sense strand starting at position 3202 of SEQ ID NO: 1560949
agggauugcuucgaugauu

SEQ ID NO: 1635984 - RNA, 19 nt, Artificial Sequence
  Description of Artificial Sequence: Synthetic oligonucleotide
  Antisense strand to SEQ ID NO: 1635983
aaucaucgaagcaaucccu

SEQ ID NO: 1635985 - RNA, 19 nt, Artificial Sequence
  Description of Artificial Sequence: Synthetic oligonucleotide
  Sense strand starting at position 3205 of SEQ ID NO: 1560949
gauugcuucgaugauuaug

SEQ ID NO: 1635986 - RNA, 19 nt, Artificial Sequence
  Description of Artificial Sequence: Synthetic oligonucleotide
  Antisense strand to SEQ ID NO: 1635985
cauaaucaucgaagcaauc

SEQ ID NO: 1635987 - RNA, 19 nt, Artificial Sequence
  Description of Artificial Sequence: Synthetic oligonucleotide
  Sense strand starting at position 3213 of SEQ ID NO: 1560949
cgaugauuauguugugguu

SEQ ID NO: 1635988 - RNA, 19 nt, Artificial Sequence
  Description of Artificial Sequence: Synthetic oligonucleotide
  Antisense strand to SEQ ID NO: 1635987
aaccacaacauaaucaucg

SEQ ID NO: 1635989 - RNA, 19 nt, Artificial Sequence
  Description of Artificial Sequence: Synthetic oligonucleotide
  Sense strand starting at position 3240 of SEQ ID NO: 1560949
ugaagugcuuauugagaug

SEQ ID NO: 1635990 - RNA, 19 nt, Artificial Sequence
  Description of Artificial Sequence: Synthetic oligonucleotide
  Antisense strand to SEQ ID NO: 1635989
caucucaauaagcacuuca

SEQ ID NO: 1635991 - RNA, 19 nt, Artificial Sequence
  Description of Artificial Sequence: Synthetic oligonucleotide
  Sense strand starting at position 3243 of SEQ ID NO: 1560949
agugcuuauugagaugaua

SEQ ID NO: 1635992 - RNA, 19 nt, Artificial Sequence
  Description of Artificial Sequence: Synthetic oligonucleotide
  Antisense strand to SEQ ID NO: 1635991
uaucaucucaauaagcacu

SEQ ID NO: 1635993 - RNA, 19 nt, Artificial Sequence
  Description of Artificial Sequence: Synthetic oligonucleotide
  Sense strand starting at position 3662 of SEQ ID NO: 1560949
gugaaucccugucucuaac

SEQ ID NO: 1635994 - RNA, 19 nt, Artificial Sequence
  Description of Artificial Sequence: Synthetic oligonucleotide
  Antisense strand to SEQ ID NO: 1635993
guuagagacagggauucac

SEQ ID NO: 1635995 - RNA, 19 nt, Artificial Sequence
  Description of Artificial Sequence: Synthetic oligonucleotide
  Sense strand starting at position 326 of SEQ ID NO: 1560950
ugcugugugcuuuccagua

SEQ ID NO: 1635996 - RNA, 19 nt, Artificial Sequence
  Description of Artificial Sequence: Synthetic oligonucleotide
  Antisense strand to SEQ ID NO: 1635995
uacuggaaagcacacagca

SEQ ID NO: 1635997 - RNA, 19 nt, Artificial Sequence
  Description of Artificial Sequence: Synthetic oligonucleotide
  Sense strand starting at position 328 of SEQ ID NO: 1560950
cugugugcuuuccaguaag

SEQ ID NO: 1635998 - RNA, 19 nt, Artificial Sequence
  Description of Artificial Sequence: Synthetic oligonucleotide
  Antisense strand to SEQ ID NO: 1635997
cuuacuggaaagcacacag

SEQ ID NO: 1635999 - RNA, 19 nt, Artificial Sequence
  Description of Artificial Sequence: Synthetic oligonucleotide
  Sense strand starting at position 330 of SEQ ID NO: 1560950
gugugcuuuccaguaaguu

SEQ ID NO: 1636000 - RNA, 19 nt, Artificial Sequence
  Description of Artificial Sequence: Synthetic oligonucleotide
  Antisense strand to SEQ ID NO: 1635999
aacuuacuggaaagcacac

SEQ ID NO: 1636001 - RNA, 19 nt, Artificial Sequence
  Description of Artificial Sequence: Synthetic oligonucleotide
  Sense strand starting at position 331 of SEQ ID NO: 1560950
ugugcuuuccaguaaguug

SEQ ID NO: 1636002 - RNA, 19 nt, Artificial Sequence
  Description of Artificial Sequence: Synthetic oligonucleotide
  Antisense strand to SEQ ID NO: 1636001
caacuuacuggaaagcaca

SEQ ID NO: 1636003 - RNA, 19 nt, Artificial Sequence
  Description of Artificial Sequence: Synthetic oligonucleotide
  Sense strand starting at position 485 of SEQ ID NO: 1560950
cguggaaaccgucaauaaa

SEQ ID NO: 1636004 - RNA, 19 nt, Artificial Sequence
  Description of Artificial Sequence: Synthetic oligonucleotide
  Antisense strand to SEQ ID NO: 1636003
uuuauugacgguuuccacg

SEQ ID NO: 1636005 - RNA, 19 nt, Artificial Sequence
  Description of Artificial Sequence: Synthetic oligonucleotide
  Sense strand starting at position 527 of SEQ ID NO: 1560950
agccucaguuacugaucaa

SEQ ID NO: 1636006 - RNA, 19 nt, Artificial Sequence
  Description of Artificial Sequence: Synthetic oligonucleotide
  Antisense strand to SEQ ID NO: 1636005
uugaucaguaacugaggcu

SEQ ID NO: 1636007 - RNA, 19 nt, Artificial Sequence
  Description of Artificial Sequence: Synthetic oligonucleotide
  Sense strand starting at position 978 of SEQ ID NO: 1560950
cggaaagaaugcgaaacau

SEQ ID NO: 1636008 - RNA, 19 nt, Artificial Sequence
  Description of Artificial Sequence: Synthetic oligonucleotide
  Antisense strand to SEQ ID NO: 1636007
auguuucgcauucuuuccg

SEQ ID NO: 1636009 - RNA, 19 nt, Artificial Sequence
  Description of Artificial Sequence: Synthetic oligonucleotide
  Sense strand starting at position 1232 of SEQ ID NO: 1560950
gccgcuucucucccgagau

SEQ ID NO: 1636010 - RNA, 19 nt, Artificial Sequence
  Description of Artificial Sequence: Synthetic oligonucleotide
  Antisense strand to SEQ ID NO: 1636009
aucucgggagagaagcggc

SEQ ID NO: 1636011 - RNA, 19 nt, Artificial Sequence
  Description of Artificial Sequence: Synthetic oligonucleotide
  Sense strand starting at position 1233 of SEQ ID NO: 1560950
ccgcuucucucccgagauc

SEQ ID NO: 1636012 - RNA, 19 nt, Artificial Sequence
  Description of Artificial Sequence: Synthetic oligonucleotide
  Antisense strand to SEQ ID NO: 1636011
gaucucgggagagaagcgg

SEQ ID NO: 1636013 - RNA, 19 nt, Artificial Sequence
  Description of Artificial Sequence: Synthetic oligonucleotide
  Sense strand starting at position 1234 of SEQ ID NO: 1560950
cgcuucucucccgagauca

SEQ ID NO: 1636014 - RNA, 19 nt, Artificial Sequence
  Description of Artificial Sequence: Synthetic oligonucleotide
  Antisense strand to SEQ ID NO: 1636013
ugaucucgggagagaagcg

SEQ ID NO: 1636015 - RNA, 19 nt, Artificial Sequence
  Description of Artificial Sequence: Synthetic oligonucleotide
  Sense strand starting at position 2150 of SEQ ID NO: 1560950
guuauuccucaaggccgaa

SEQ ID NO: 1636016 - RNA, 19 nt, Artificial Sequence
  Description of Artificial Sequence: Synthetic oligonucleotide
  Antisense strand to SEQ ID NO: 1636015
uucggccuugaggaauaac

SEQ ID NO: 1636017 - RNA, 19 nt, Artificial Sequence
  Description of Artificial Sequence: Synthetic oligonucleotide
  Sense strand starting at position 2169 of SEQ ID NO: 1560950
ggcggaaacggcuugugua

SEQ ID NO: 1636018 - RNA, 19 nt, Artificial Sequence
  Description of Artificial Sequence: Synthetic oligonucleotide
  Antisense strand to SEQ ID NO: 1636017
uacacaagccguuuccgcc

SEQ ID NO: 1636019 - RNA, 19 nt, Artificial Sequence
  Description of Artificial Sequence: Synthetic oligonucleotide
  Sense strand starting at position 3549 of SEQ ID NO: 1560950
cgcugaucacaugaagagu

SEQ ID NO: 1636020 - RNA, 19 nt, Artificial Sequence
  Description of Artificial Sequence: Synthetic oligonucleotide
  Antisense strand to SEQ ID NO: 1636019
acucuucaugugaucagcg

SEQ ID NO: 1636021 - RNA, 19 nt, Artificial Sequence
  Description of Artificial Sequence: Synthetic oligonucleotide
  Sense strand starting at position 3560 of SEQ ID NO: 1560950
ugaagagucugacagagcu

SEQ ID NO: 1636022 - RNA, 19 nt, Artificial Sequence
  Description of Artificial Sequence: Synthetic oligonucleotide
  Antisense strand to SEQ ID NO: 1636021
agcucugucagacucuuca

SEQ ID NO: 1636023 - RNA, 19 nt, Artificial Sequence
  Description of Artificial Sequence: Synthetic oligonucleotide
  Sense strand starting at position 3711 of SEQ ID NO: 1560950
aguagacacugcucccuaa

SEQ ID NO: 1636024 - RNA, 19 nt, Artificial Sequence
  Description of Artificial Sequence: Synthetic oligonucleotide
  Antisense strand to SEQ ID NO: 1636023
uuagggagcagugucuacu

SEQ ID NO: 1636025 - RNA, 19 nt, Artificial Sequence
  Description of Artificial Sequence: Synthetic oligonucleotide
  Sense strand starting at position 3931 of SEQ ID NO: 1560950
gcgucuggugccagaggau

SEQ ID NO: 1636026 - RNA, 19 nt, Artificial Sequence
  Description of Artificial Sequence: Synthetic oligonucleotide
  Antisense strand to SEQ ID NO: 1636025
auccucuggcaccagacgc

SEQ ID NO: 1636027 - RNA, 19 nt, Artificial Sequence
  Description of Artificial Sequence: Synthetic oligonucleotide
  Sense strand starting at position 3945 of SEQ ID NO: 1560950
aggauuccagcccggauua

SEQ ID NO: 1636028 - RNA, 19 nt, Artificial Sequence
  Description of Artificial Sequence: Synthetic oligonucleotide
  Antisense strand to SEQ ID NO: 1636027
uaauccgggcuggaauccu

SEQ ID NO: 1636029 - RNA, 19 nt, Artificial Sequence
  Description of Artificial Sequence: Synthetic oligonucleotide
  Sense strand starting at position 38 of SEQ ID NO: 1560951
gcacgacaccaccaugaua

SEQ ID NO: 1636030 - RNA, 19 nt, Artificial Sequence
  Description of Artificial Sequence: Synthetic oligonucleotide
  Antisense strand to SEQ ID NO: 1636029
uaucaugguggugucgugc

SEQ ID NO: 1636031 - RNA, 19 nt, Artificial Sequence
  Description of Artificial Sequence: Synthetic oligonucleotide
  Sense strand starting at position 820 of SEQ ID NO: 1560951
cgcccagcgucauggagaa

SEQ ID NO: 1636032 - RNA, 19 nt, Artificial Sequence
  Description of Artificial Sequence: Synthetic oligonucleotide
  Antisense strand to SEQ ID NO: 1636031
uucuccaugacgcugggcg

SEQ ID NO: 1636033 - RNA, 19 nt, Artificial Sequence
  Description of Artificial Sequence: Synthetic oligonucleotide
  Sense strand starting at position 1236 of SEQ ID NO: 1560951
caugguuuccugcaagauu

SEQ ID NO: 1636034 - RNA, 19 nt, Artificial Sequence
  Description of Artificial Sequence: Synthetic oligonucleotide
  Antisense strand to SEQ ID NO: 1636033
aaucuugcaggaaaccaug

SEQ ID NO: 1636035 - RNA, 19 nt, Artificial Sequence
  Description of Artificial Sequence: Synthetic oligonucleotide
  Sense strand starting at position 1695 of SEQ ID NO: 1560951
cuuugauauccugguggug

SEQ ID NO: 1636036 - RNA, 19 nt, Artificial Sequence
  Description of Artificial Sequence: Synthetic oligonucleotide
  Antisense strand to SEQ ID NO: 1636035
caccaccaggauaucaaag

SEQ ID NO: 1636037 - RNA, 19 nt, Artificial Sequence
  Description of Artificial Sequence: Synthetic oligonucleotide
  Sense strand starting at position 1697 of SEQ ID NO: 1560951
uugauauccugguggugag

SEQ ID NO: 1636038 - RNA, 19 nt, Artificial Sequence
  Description of Artificial Sequence: Synthetic oligonucleotide
  Antisense strand to SEQ ID NO: 1636037
cucaccaccaggauaucaa

SEQ ID NO: 1636039 - RNA, 19 nt, Artificial Sequence
  Description of Artificial Sequence: Synthetic oligonucleotide
  Sense strand starting at position 2159 of SEQ ID NO: 1560951
gagugaggcucccuggagu

SEQ ID NO: 1636040 - RNA, 19 nt, Artificial Sequence
  Description of Artificial Sequence: Synthetic oligonucleotide
  Antisense strand to SEQ ID NO: 1636039
acuccagggagccucacuc

SEQ ID NO: 1636041 - RNA, 19 nt, Artificial Sequence
  Description of Artificial Sequence: Synthetic oligonucleotide
  Sense strand starting at position 2245 of SEQ ID NO: 1560951
ggccucuugccucauuaau

SEQ ID NO: 1636042 - RNA, 19 nt, Artificial Sequence
  Description of Artificial Sequence: Synthetic oligonucleotide
  Antisense strand to SEQ ID NO: 1636041
auuaaugaggcaagaggcc

SEQ ID NO: 1636043 - RNA, 19 nt, Artificial Sequence
  Description of Artificial Sequence: Synthetic oligonucleotide
  Sense strand starting at position 2549 of SEQ ID NO: 1560951
gagucauauccugggagga

SEQ ID NO: 1636044 - RNA, 19 nt, Artificial Sequence
  Description of Artificial Sequence: Synthetic oligonucleotide
  Antisense strand to SEQ ID NO: 1636043
uccucccaggauaugacuc

SEQ ID NO: 1636045 - RNA, 19 nt, Artificial Sequence
  Description of Artificial Sequence: Synthetic oligonucleotide
  Sense strand starting at position 2550 of SEQ ID NO: 1560951
agucauauccugggaggag

SEQ ID NO: 1636046 - RNA, 19 nt, Artificial Sequence
  Description of Artificial Sequence: Synthetic oligonucleotide
  Antisense strand to SEQ ID NO: 1636045
cuccucccaggauaugacu

SEQ ID NO: 1636047 - RNA, 19 nt, Artificial Sequence
  Description of Artificial Sequence: Synthetic oligonucleotide
  Sense strand starting at position 2622 of SEQ ID NO: 1560951
gugacuggcuccuuuaaga

SEQ ID NO: 1636048 - RNA, 19 nt, Artificial Sequence
  Description of Artificial Sequence: Synthetic oligonucleotide
  Antisense strand to SEQ ID NO: 1636047
ucuuaaaggagccagucac

SEQ ID NO: 1636049 - RNA, 19 nt, Artificial Sequence
  Description of Artificial Sequence: Synthetic oligonucleotide
  Sense strand starting at position 2645 of SEQ ID NO: 1560951
cugagugacaccugugaca

SEQ ID NO: 1636050 - RNA, 19 nt, Artificial Sequence
  Description of Artificial Sequence: Synthetic oligonucleotide
  Antisense strand to SEQ ID NO: 1636049
ugucacaggugucacucag

SEQ ID NO: 1636051 - RNA, 19 nt, Artificial Sequence
  Description of Artificial Sequence: Synthetic oligonucleotide
  Sense strand starting at position 2647 of SEQ ID NO: 1560951
gagugacaccugugacaca

SEQ ID NO: 1636052 - RNA, 19 nt, Artificial Sequence
  Description of Artificial Sequence: Synthetic oligonucleotide
  Antisense strand to SEQ ID NO: 1636051
ugugucacaggugucacuc

SEQ ID NO: 1636053 - RNA, 19 nt, Artificial Sequence
  Description of Artificial Sequence: Synthetic oligonucleotide
  Sense strand starting at position 2659 of SEQ ID NO: 1560951
ugacacacguccuaagaca

SEQ ID NO: 1636054 - RNA, 19 nt, Artificial Sequence
  Description of Artificial Sequence: Synthetic oligonucleotide
  Antisense strand to SEQ ID NO: 1636053
ugucuuaggacguguguca

SEQ ID NO: 1636055 - RNA, 19 nt, Artificial Sequence
  Description of Artificial Sequence: Synthetic oligonucleotide
  Sense strand starting at position 2813 of SEQ ID NO: 1560951
cccugaacucagggucuua

SEQ ID NO: 1636056 - RNA, 19 nt, Artificial Sequence
  Description of Artificial Sequence: Synthetic oligonucleotide
  Antisense strand to SEQ ID NO: 1636055
uaagacccugaguucaggg

SEQ ID NO: 1636057 - RNA, 19 nt, Artificial Sequence
  Description of Artificial Sequence: Synthetic oligonucleotide
  Sense strand starting at position 2894 of SEQ ID NO: 1560951
aaugcagcccucugagaug

SEQ ID NO: 1636058 - RNA, 19 nt, Artificial Sequence
  Description of Artificial Sequence: Synthetic oligonucleotide
  Antisense strand to SEQ ID NO: 1636057
caucucagagggcugcauu

SEQ ID NO: 1636059 - RNA, 19 nt, Artificial Sequence
  Description of Artificial Sequence: Synthetic oligonucleotide
  Sense strand starting at position 2927 of SEQ ID NO: 1560951
ccuccuuagugcugggaaa

SEQ ID NO: 1636060 - RNA, 19 nt, Artificial Sequence
  Description of Artificial Sequence: Synthetic oligonucleotide
  Antisense strand to SEQ ID NO: 1636059
uuucccagcacuaaggagg

SEQ ID NO: 1636061 - RNA, 19 nt, Artificial Sequence
  Description of Artificial Sequence: Synthetic oligonucleotide
  Sense strand starting at position 2928 of SEQ ID NO: 1560951
cuccuuagugcugggaaau

SEQ ID NO: 1636062 - RNA, 19 nt, Artificial Sequence
  Description of Artificial Sequence: Synthetic oligonucleotide
  Antisense strand to SEQ ID NO: 1636061
auuucccagcacuaaggag

SEQ ID NO: 1636063 - RNA, 19 nt, Artificial Sequence
  Description of Artificial Sequence: Synthetic oligonucleotide
  Sense strand starting at position 2929 of SEQ ID NO: 1560951
uccuuagugcugggaaaua

SEQ ID NO: 1636064 - RNA, 19 nt, Artificial Sequence
  Description of Artificial Sequence: Synthetic oligonucleotide
  Antisense strand to SEQ ID NO: 1636063
uauuucccagcacuaagga

SEQ ID NO: 1636065 - RNA, 19 nt, Artificial Sequence
  Description of Artificial Sequence: Synthetic oligonucleotide
  Sense strand starting at position 3407 of SEQ ID NO: 1560951
cugcaauugcccuggaaca

SEQ ID NO: 1636066 - RNA, 19 nt, Artificial Sequence
  Description of Artificial Sequence: Synthetic oligonucleotide
  Antisense strand to SEQ ID NO: 1636065
uguuccagggcaauugcag

SEQ ID NO: 1636067 - RNA, 19 nt, Artificial Sequence
  Description of Artificial Sequence: Synthetic oligonucleotide
  Sense strand starting at position 3409 of SEQ ID NO: 1560951
gcaauugcccuggaacaca

SEQ ID NO: 1636068 - RNA, 19 nt, Artificial Sequence
  Description of Artificial Sequence: Synthetic oligonucleotide
  Antisense strand to SEQ ID NO: 1636067
uguguuccagggcaauugc

SEQ ID NO: 1636069 - RNA, 19 nt, Artificial Sequence
  Description of Artificial Sequence: Synthetic oligonucleotide
  Sense strand starting at position 3424 of SEQ ID NO: 1560951
cacagagccgguuaucaca

SEQ ID NO: 1636070 - RNA, 19 nt, Artificial Sequence
  Description of Artificial Sequence: Synthetic oligonucleotide
  Antisense strand to SEQ ID NO: 1636069
ugugauaaccggcucugug

SEQ ID NO: 1636071 - RNA, 19 nt, Artificial Sequence
  Description of Artificial Sequence: Synthetic oligonucleotide
  Sense strand starting at position 3888 of SEQ ID NO: 1560951
acccucaauccucgaagau

SEQ ID NO: 1636072 - RNA, 19 nt, Artificial Sequence
  Description of Artificial Sequence: Synthetic oligonucleotide
  Antisense strand to SEQ ID NO: 1636071
aucuucgaggauugagggu

SEQ ID NO: 1636073 - RNA, 19 nt, Artificial Sequence
  Description of Artificial Sequence: Synthetic oligonucleotide
  Sense strand starting at position 3889 of SEQ ID NO: 1560951
cccucaauccucgaagaug

SEQ ID NO: 1636074 - RNA, 19 nt, Artificial Sequence
  Description of Artificial Sequence: Synthetic oligonucleotide
  Antisense strand to SEQ ID NO: 1636073
caucuucgaggauugaggg

SEQ ID NO: 1636075 - RNA, 19 nt, Artificial Sequence
  Description of Artificial Sequence: Synthetic oligonucleotide
  Sense strand starting at position 3892 of SEQ ID NO: 1560951
ucaauccucgaagaugagu

SEQ ID NO: 1636076 - RNA, 19 nt, Artificial Sequence
  Description of Artificial Sequence: Synthetic oligonucleotide
  Antisense strand to SEQ ID NO: 1636075
acucaucuucgaggauuga

SEQ ID NO: 1636077 - RNA, 19 nt, Artificial Sequence
  Description of Artificial Sequence: Synthetic oligonucleotide
  Sense strand starting at position 3901 of SEQ ID NO: 1560951
gaagaugaguggguuguca

SEQ ID NO: 1636078 - RNA, 19 nt, Artificial Sequence
  Description of Artificial Sequence: Synthetic oligonucleotide
  Antisense strand to SEQ ID NO: 1636077
ugacaacccacucaucuuc

SEQ ID NO: 1636079 - RNA, 19 nt, Artificial Sequence
  Description of Artificial Sequence: Synthetic oligonucleotide
  Sense strand starting at position 3903 of SEQ ID NO: 1560951
agaugaguggguugucaaa

SEQ ID NO: 1636080 - RNA, 19 nt, Artificial Sequence
  Description of Artificial Sequence: Synthetic oligonucleotide
  Antisense strand to SEQ ID NO: 1636079
uuugacaacccacucaucu

SEQ ID NO: 1636081 - RNA, 19 nt, Artificial Sequence
  Description of Artificial Sequence: Synthetic oligonucleotide
  Sense strand starting at position 3922 of SEQ ID NO: 1560951
acaaguaugcuggguuuau

SEQ ID NO: 1636082 - RNA, 19 nt, Artificial Sequence
  Description of Artificial Sequence: Synthetic oligonucleotide
  Antisense strand to SEQ ID NO: 1636081
auaaacccagcauacuugu

SEQ ID NO: 1636083 - RNA, 19 nt, Artificial Sequence
  Description of Artificial Sequence: Synthetic oligonucleotide
  Sense strand starting at position 3923 of SEQ ID NO: 1560951
caaguaugcuggguuuaug

SEQ ID NO: 1636084 - RNA, 19 nt, Artificial Sequence
  Description of Artificial Sequence: Synthetic oligonucleotide
  Antisense strand to SEQ ID NO: 1636083
cauaaacccagcauacuug

SEQ ID NO: 1636085 - RNA, 19 nt, Artificial Sequence
  Description of Artificial Sequence: Synthetic oligonucleotide
  Sense strand starting at position 3932 of SEQ ID NO: 1560951
uggguuuaugucuaggaca

SEQ ID NO: 1636086 - RNA, 19 nt, Artificial Sequence
  Description of Artificial Sequence: Synthetic oligonucleotide
  Antisense strand to SEQ ID NO: 1636085
uguccuagacauaaaccca

SEQ ID NO: 1636087 - RNA, 19 nt, Artificial Sequence
  Description of Artificial Sequence: Synthetic oligonucleotide
  Sense strand starting at position 3934 of SEQ ID NO: 1560951
gguuuaugucuaggacaaa

SEQ ID NO: 1636088 - RNA, 19 nt, Artificial Sequence
  Description of Artificial Sequence: Synthetic oligonucleotide
  Antisense strand to SEQ ID NO: 1636087
uuuguccuagacauaaacc

SEQ ID NO: 1636089 - RNA, 19 nt, Artificial Sequence
  Description of Artificial Sequence: Synthetic oligonucleotide
  Sense strand starting at position 3935 of SEQ ID NO: 1560951
guuuaugucuaggacaaag

SEQ ID NO: 1636090 - RNA, 19 nt, Artificial Sequence
  Description of Artificial Sequence: Synthetic oligonucleotide
  Antisense strand to SEQ ID NO: 1636089
cuuuguccuagacauaaac

SEQ ID NO: 1636091 - RNA, 19 nt, Artificial Sequence
  Description of Artificial Sequence: Synthetic oligonucleotide
  Sense strand starting at position 211 of SEQ ID NO: 1560952
uuucuacaugcugggauua

SEQ ID NO: 1636092 - RNA, 19 nt, Artificial Sequence
  Description of Artificial Sequence: Synthetic oligonucleotide
  Antisense strand to SEQ ID NO: 1636091
uaaucccagcauguagaaa

SEQ ID NO: 1636093 - RNA, 19 nt, Artificial Sequence
  Description of Artificial Sequence: Synthetic oligonucleotide
  Sense strand starting at position 213 of SEQ ID NO: 1560952
ucuacaugcugggauuaca

SEQ ID NO: 1636094 - RNA, 19 nt, Artificial Sequence
  Description of Artificial Sequence: Synthetic oligonucleotide
  Antisense strand to SEQ ID NO: 1636093
uguaaucccagcauguaga

SEQ ID NO: 1636095 - RNA, 19 nt, Artificial Sequence
  Description of Artificial Sequence: Synthetic oligonucleotide
  Sense strand starting at position 822 of SEQ ID NO: 1560952
cgaagaaggucauggcgaa

SEQ ID NO: 1636096 - RNA, 19 nt, Artificial Sequence
  Description of Artificial Sequence: Synthetic oligonucleotide
  Antisense strand to SEQ ID NO: 1636095
uucgccaugaccuucuucg

SEQ ID NO: 1636097 - RNA, 19 nt, Artificial Sequence
  Description of Artificial Sequence: Synthetic oligonucleotide
  Sense strand starting at position 888 of SEQ ID NO: 1560952
gggagcuguugcgcgcaua

SEQ ID NO: 1636098 - RNA, 19 nt, Artificial Sequence
  Description of Artificial Sequence: Synthetic oligonucleotide
  Antisense strand to SEQ ID NO: 1636097
uaugcgcgcaacagcuccc

SEQ ID NO: 1636099 - RNA, 19 nt, Artificial Sequence
  Description of Artificial Sequence: Synthetic oligonucleotide
  Sense strand starting at position 1703 of SEQ ID NO: 1560952
uguuucugccauuaaagag

SEQ ID NO: 1636100 - RNA, 19 nt, Artificial Sequence
  Description of Artificial Sequence: Synthetic oligonucleotide
  Antisense strand to SEQ ID NO: 1636099
cucuuuaauggcagaaaca

SEQ ID NO: 1636101 - RNA, 19 nt, Artificial Sequence
  Description of Artificial Sequence: Synthetic oligonucleotide
  Sense strand starting at position 1723 of SEQ ID NO: 1560952
cagagaacauccgggcauu

SEQ ID NO: 1636102 - RNA, 19 nt, Artificial Sequence
  Description of Artificial Sequence: Synthetic oligonucleotide
  Antisense strand to SEQ ID NO: 1636101
aaugcccggauguucucug

SEQ ID NO: 1636103 - RNA, 19 nt, Artificial Sequence
  Description of Artificial Sequence: Synthetic oligonucleotide
  Sense strand starting at position 1734 of SEQ ID NO: 1560952
cgggcauugccaguucuuu

SEQ ID NO: 1636104 - RNA, 19 nt, Artificial Sequence
  Description of Artificial Sequence: Synthetic oligonucleotide
  Antisense strand to SEQ ID NO: 1636103
aaagaacuggcaaugcccg

SEQ ID NO: 1636105 - RNA, 19 nt, Artificial Sequence
  Description of Artificial Sequence: Synthetic oligonucleotide
  Sense strand starting at position 1765 of SEQ ID NO: 1560952
cucggucucuugcugauau

SEQ ID NO: 1636106 - RNA, 19 nt, Artificial Sequence
  Description of Artificial Sequence: Synthetic oligonucleotide
  Antisense strand to SEQ ID NO: 1636105
auaucagcaagagaccgag

SEQ ID NO: 1636107 - RNA, 19 nt, Artificial Sequence
  Description of Artificial Sequence: Synthetic oligonucleotide
  Sense strand starting at position 1767 of SEQ ID NO: 1560952
cggucucuugcugauaucu

SEQ ID NO: 1636108 - RNA, 19 nt, Artificial Sequence
  Description of Artificial Sequence: Synthetic oligonucleotide
  Antisense strand to SEQ ID NO: 1636107
agauaucagcaagagaccg

SEQ ID NO: 1636109 - RNA, 19 nt, Artificial Sequence
  Description of Artificial Sequence: Synthetic oligonucleotide
  Sense strand starting at position 1777 of SEQ ID NO: 1560952
cugauaucucccugucucu

SEQ ID NO: 1636110 - RNA, 19 nt, Artificial Sequence
  Description of Artificial Sequence: Synthetic oligonucleotide
  Antisense strand to SEQ ID NO: 1636109
agagacagggagauaucag

SEQ ID NO: 1636111 - RNA, 19 nt, Artificial Sequence
  Description of Artificial Sequence: Synthetic oligonucleotide
  Sense strand starting at position 2293 of SEQ ID NO: 1560952
gggaauuccugagucacca

SEQ ID NO: 1636112 - RNA, 19 nt, Artificial Sequence
  Description of Artificial Sequence: Synthetic oligonucleotide
  Antisense strand to SEQ ID NO: 1636111
uggugacucaggaauuccc

SEQ ID NO: 1636113 - RNA, 19 nt, Artificial Sequence
  Description of Artificial Sequence: Synthetic oligonucleotide
  Sense strand starting at position 2419 of SEQ ID NO: 1560952
gguggccucugggaucuau

SEQ ID NO: 1636114 - RNA, 19 nt, Artificial Sequence
  Description of Artificial Sequence: Synthetic oligonucleotide
  Antisense strand to SEQ ID NO: 1636113
auagaucccagaggccacc

SEQ ID NO: 1636115 - RNA, 19 nt, Artificial Sequence
  Description of Artificial Sequence: Synthetic oligonucleotide
  Sense strand starting at position 2430 of SEQ ID NO: 1560952
ggaucuauucugggcucca

SEQ ID NO: 1636116 - RNA, 19 nt, Artificial Sequence
  Description of Artificial Sequence: Synthetic oligonucleotide
  Antisense strand to SEQ ID NO: 1636115
uggagcccagaauagaucc

SEQ ID NO: 1636117 - RNA, 19 nt, Artificial Sequence
  Description of Artificial Sequence: Synthetic oligonucleotide
  Sense strand starting at position 2463 of SEQ ID NO: 1560952
ggacauugcccagggauug

SEQ ID NO: 1636118 - RNA, 19 nt, Artificial Sequence
  Description of Artificial Sequence: Synthetic oligonucleotide
  Antisense strand to SEQ ID NO: 1636117
caaucccugggcaaugucc

SEQ ID NO: 1636119 - RNA, 19 nt, Artificial Sequence
  Description of Artificial Sequence: Synthetic oligonucleotide
  Sense strand starting at position 2464 of SEQ ID NO: 1560952
gacauugcccagggauuga

SEQ ID NO: 1636120 - RNA, 19 nt, Artificial Sequence
  Description of Artificial Sequence: Synthetic oligonucleotide
  Antisense strand to SEQ ID NO: 1636119
ucaaucccugggcaauguc

SEQ ID NO: 1636121 - RNA, 19 nt, Artificial Sequence
  Description of Artificial Sequence: Synthetic oligonucleotide
  Sense strand starting at position 2468 of SEQ ID NO: 1560952
uugcccagggauugagaaa

SEQ ID NO: 1636122 - RNA, 19 nt, Artificial Sequence
  Description of Artificial Sequence: Synthetic oligonucleotide
  Antisense strand to SEQ ID NO: 1636121
uuucucaaucccugggcaa

SEQ ID NO: 1636123 - RNA, 19 nt, Artificial Sequence
  Description of Artificial Sequence: Synthetic oligonucleotide
  Sense strand starting at position 2490 of SEQ ID NO: 1560952
ccaggaaauuccucucuga

SEQ ID NO: 1636124 - RNA, 19 nt, Artificial Sequence
  Description of Artificial Sequence: Synthetic oligonucleotide
  Antisense strand to SEQ ID NO: 1636123
ucagagaggaauuuccugg

SEQ ID NO: 1636125 - RNA, 19 nt, Artificial Sequence
  Description of Artificial Sequence: Synthetic oligonucleotide
  Sense strand starting at position 2493 of SEQ ID NO: 1560952
ggaaauuccucucugaugu

SEQ ID NO: 1636126 - RNA, 19 nt, Artificial Sequence
  Description of Artificial Sequence: Synthetic oligonucleotide
  Antisense strand to SEQ ID NO: 1636125
acaucagagaggaauuucc

SEQ ID NO: 1636127 - RNA, 19 nt, Artificial Sequence
  Description of Artificial Sequence: Synthetic oligonucleotide
  Sense strand starting at position 2534 of SEQ ID NO: 1560952
gaguucuggucccuggaca

SEQ ID NO: 1636128 - RNA, 19 nt, Artificial Sequence
  Description of Artificial Sequence: Synthetic oligonucleotide
  Antisense strand to SEQ ID NO: 1636127
uguccagggaccagaacuc

SEQ ID NO: 1636129 - RNA, 19 nt, Artificial Sequence
  Description of Artificial Sequence: Synthetic oligonucleotide
  Sense strand starting at position 2710 of SEQ ID NO: 1560952
gggagacuuccauggccca

SEQ ID NO: 1636130 - RNA, 19 nt, Artificial Sequence
  Description of Artificial Sequence: Synthetic oligonucleotide
  Antisense strand to SEQ ID NO: 1636129
ugggccauggaagucuccc

SEQ ID NO: 1636131 - RNA, 19 nt, Artificial Sequence
  Description of Artificial Sequence: Synthetic oligonucleotide
  Sense strand starting at position 2711 of SEQ ID NO: 1560952
ggagacuuccauggcccau

SEQ ID NO: 1636132 - RNA, 19 nt, Artificial Sequence
  Description of Artificial Sequence: Synthetic oligonucleotide
  Antisense strand to SEQ ID NO: 1636131
augggccauggaagucucc

SEQ ID NO: 1636133 - RNA, 19 nt, Artificial Sequence
  Description of Artificial Sequence: Synthetic oligonucleotide
  Sense strand starting at position 3135 of SEQ ID NO: 1560952
gcgagauggucccagguga

SEQ ID NO: 1636134 - RNA, 19 nt, Artificial Sequence
  Description of Artificial Sequence: Synthetic oligonucleotide
  Antisense strand to SEQ ID NO: 1636133
ucaccugggaccaucucgc

SEQ ID NO: 1636135 - RNA, 19 nt, Artificial Sequence
  Description of Artificial Sequence: Synthetic oligonucleotide
  Sense strand starting at position 3248 of SEQ ID NO: 1560952
ccagauuggucuuuguaac

SEQ ID NO: 1636136 - RNA, 19 nt, Artificial Sequence
  Description of Artificial Sequence: Synthetic oligonucleotide
  Antisense strand to SEQ ID NO: 1636135
guuacaaagaccaaucugg

SEQ ID NO: 1636137 - RNA, 19 nt, Artificial Sequence
  Description of Artificial Sequence: Synthetic oligonucleotide
  Sense strand starting at position 3249 of SEQ ID NO: 1560952
cagauuggucuuuguaaca

SEQ ID NO: 1636138 - RNA, 19 nt, Artificial Sequence
  Description of Artificial Sequence: Synthetic oligonucleotide
  Antisense strand to SEQ ID NO: 1636137
uguuacaaagaccaaucug

SEQ ID NO: 1636139 - RNA, 19 nt, Artificial Sequence
  Description of Artificial Sequence: Synthetic oligonucleotide
  Sense strand starting at position 3282 of SEQ ID NO: 1560952
gcgggugucucuuguccaa

SEQ ID NO: 1636140 - RNA, 19 nt, Artificial Sequence
  Description of Artificial Sequence: Synthetic oligonucleotide
  Antisense strand to SEQ ID NO: 1636139
uuggacaagagacacccgc

SEQ ID NO: 1636141 - RNA, 19 nt, Artificial Sequence
  Description of Artificial Sequence: Synthetic oligonucleotide
  Sense strand starting at position 3303 of SEQ ID NO: 1560952
ccaggagggauguguccaa

SEQ ID NO: 1636142 - RNA, 19 nt, Artificial Sequence
  Description of Artificial Sequence: Synthetic oligonucleotide
  Antisense strand to SEQ ID NO: 1636141
uuggacacaucccuccugg

SEQ ID NO: 1636143 - RNA, 19 nt, Artificial Sequence
  Description of Artificial Sequence: Synthetic oligonucleotide
  Sense strand starting at position 3307 of SEQ ID NO: 1560952
gagggauguguccaaccca

SEQ ID NO: 1636144 - RNA, 19 nt, Artificial Sequence
  Description of Artificial Sequence: Synthetic oligonucleotide
  Antisense strand to SEQ ID NO: 1636143
uggguuggacacaucccuc

SEQ ID NO: 1636145 - RNA, 19 nt, Artificial Sequence
  Description of Artificial Sequence: Synthetic oligonucleotide
  Sense strand starting at position 163 of SEQ ID NO: 1560953
acugaagucuuaugaagua

SEQ ID NO: 1636146 - RNA, 19 nt, Artificial Sequence
  Description of Artificial Sequence: Synthetic oligonucleotide
  Antisense strand to SEQ ID NO: 1636145
uacuucauaagacuucagu

SEQ ID NO: 1636147 - RNA, 19 nt, Artificial Sequence
  Description of Artificial Sequence: Synthetic oligonucleotide
  Sense strand starting at position 175 of SEQ ID NO: 1560953
ugaaguauaucuuauugga

SEQ ID NO: 1636148 - RNA, 19 nt, Artificial Sequence
  Description of Artificial Sequence: Synthetic oligonucleotide
  Antisense strand to SEQ ID NO: 1636147
uccaauaagauauacuuca

SEQ ID NO: 1636149 - RNA, 19 nt, Artificial Sequence
  Description of Artificial Sequence: Synthetic oligonucleotide
  Sense strand starting at position 188 of SEQ ID NO: 1560953
auuggauccucguaacaga

SEQ ID NO: 1636150 - RNA, 19 nt, Artificial Sequence
  Description of Artificial Sequence: Synthetic oligonucleotide
  Antisense strand to SEQ ID NO: 1636149
ucuguuacgaggauccaau

SEQ ID NO: 1636151 - RNA, 19 nt, Artificial Sequence
  Description of Artificial Sequence: Synthetic oligonucleotide
  Sense strand starting at position 191 of SEQ ID NO: 1560953
ggauccucguaacagauga

SEQ ID NO: 1636152 - RNA, 19 nt, Artificial Sequence
  Description of Artificial Sequence: Synthetic oligonucleotide
  Antisense strand to SEQ ID NO: 1636151
ucaucuguuacgaggaucc

SEQ ID NO: 1636153 - RNA, 19 nt, Artificial Sequence
  Description of Artificial Sequence: Synthetic oligonucleotide
  Sense strand starting at position 195 of SEQ ID NO: 1560953
ccucguaacagaugaagaa

SEQ ID NO: 1636154 - RNA, 19 nt, Artificial Sequence
  Description of Artificial Sequence: Synthetic oligonucleotide
  Antisense strand to SEQ ID NO: 1636153
uucuucaucuguuacgagg

SEQ ID NO: 1636155 - RNA, 19 nt, Artificial Sequence
  Description of Artificial Sequence: Synthetic oligonucleotide
  Sense strand starting at position 252 of SEQ ID NO: 1560953
guacuacgcagcuagauuu

SEQ ID NO: 1636156 - RNA, 19 nt, Artificial Sequence
  Description of Artificial Sequence: Synthetic oligonucleotide
  Antisense strand to SEQ ID NO: 1636155
aaaucuagcugcguaguac

SEQ ID NO: 1636157 - RNA, 19 nt, Artificial Sequence
  Description of Artificial Sequence: Synthetic oligonucleotide
  Sense strand starting at position 339 of SEQ ID NO: 1560953
ggagaagucuggaagugau

SEQ ID NO: 1636158 - RNA, 19 nt, Artificial Sequence
  Description of Artificial Sequence: Synthetic oligonucleotide
  Antisense strand to SEQ ID NO: 1636157
aucacuuccagacuucucc

SEQ ID NO: 1636159 - RNA, 19 nt, Artificial Sequence
  Description of Artificial Sequence: Synthetic oligonucleotide
  Sense strand starting at position 493 of SEQ ID NO: 1560953
ggaagaguuucagaggcag

SEQ ID NO: 1636160 - RNA, 19 nt, Artificial Sequence
  Description of Artificial Sequence: Synthetic oligonucleotide
  Antisense strand to SEQ ID NO: 1636159
cugccucugaaacucuucc

SEQ ID NO: 1636161 - RNA, 19 nt, Artificial Sequence
  Description of Artificial Sequence: Synthetic oligonucleotide
  Sense strand starting at position 531 of SEQ ID NO: 1560953
ggcagagauucccagaaga

SEQ ID NO: 1636162 - RNA, 19 nt, Artificial Sequence
  Description of Artificial Sequence: Synthetic oligonucleotide
  Antisense strand to SEQ ID NO: 1636161
ucuucugggaaucucugcc

SEQ ID NO: 1636163 - RNA, 19 nt, Artificial Sequence
  Description of Artificial Sequence: Synthetic oligonucleotide
  Sense strand starting at position 988 of SEQ ID NO: 1560953
agggcauggucuuuauuaa

SEQ ID NO: 1636164 - RNA, 19 nt, Artificial Sequence
  Description of Artificial Sequence: Synthetic oligonucleotide
  Antisense strand to SEQ ID NO: 1636163
uuaauaaagaccaugcccu

SEQ ID NO: 1636165 - RNA, 19 nt, Artificial Sequence
  Description of Artificial Sequence: Synthetic oligonucleotide
  Sense strand starting at position 989 of SEQ ID NO: 1560953
gggcauggucuuuauuaag

SEQ ID NO: 1636166 - RNA, 19 nt, Artificial Sequence
  Description of Artificial Sequence: Synthetic oligonucleotide
  Antisense strand to SEQ ID NO: 1636165
cuuaauaaagaccaugccc

SEQ ID NO: 1636167 - RNA, 19 nt, Artificial Sequence
  Description of Artificial Sequence: Synthetic oligonucleotide
  Sense strand starting at position 992 of SEQ ID NO: 1560953
cauggucuuuauuaagaug

SEQ ID NO: 1636168 - RNA, 19 nt, Artificial Sequence
  Description of Artificial Sequence: Synthetic oligonucleotide
  Antisense strand to SEQ ID NO: 1636167
caucuuaauaaagaccaug

SEQ ID NO: 1636169 - RNA, 19 nt, Artificial Sequence
  Description of Artificial Sequence: Synthetic oligonucleotide
  Sense strand starting at position 1455 of SEQ ID NO: 1560953
cccaauaaacguugcucaa

SEQ ID NO: 1636170 - RNA, 19 nt, Artificial Sequence
  Description of Artificial Sequence: Synthetic oligonucleotide
  Antisense strand to SEQ ID NO: 1636169
uugagcaacguuuauuggg

SEQ ID NO: 1636171 - RNA, 19 nt, Artificial Sequence
  Description of Artificial Sequence: Synthetic oligonucleotide
  Sense strand starting at position 1459 of SEQ ID NO: 1560953
auaaacguugcucaaagaa

SEQ ID NO: 1636172 - RNA, 19 nt, Artificial Sequence
  Description of Artificial Sequence: Synthetic oligonucleotide
  Antisense strand to SEQ ID NO: 1636171
uucuuugagcaacguuuau

SEQ ID NO: 1636173 - RNA, 19 nt, Artificial Sequence
  Description of Artificial Sequence: Synthetic oligonucleotide
  Sense strand starting at position 1517 of SEQ ID NO: 1560953
cgccuuucucgggaucuau

SEQ ID NO: 1636174 - RNA, 19 nt, Artificial Sequence
  Description of Artificial Sequence: Synthetic oligonucleotide
  Antisense strand to SEQ ID NO: 1636173
auagaucccgagaaaggcg

SEQ ID NO: 1636175 - RNA, 19 nt, Artificial Sequence
  Description of Artificial Sequence: Synthetic oligonucleotide
  Sense strand starting at position 1544 of SEQ ID NO: 1560953
gucucuuucccuugcugau

SEQ ID NO: 1636176 - RNA, 19 nt, Artificial Sequence
  Description of Artificial Sequence: Synthetic oligonucleotide
  Antisense strand to SEQ ID NO: 1636175
aucagcaagggaaagagac

SEQ ID NO: 1636177 - RNA, 19 nt, Artificial Sequence
  Description of Artificial Sequence: Synthetic oligonucleotide
  Sense strand starting at position 1893 of SEQ ID NO: 1560953
cuccaucaccuguggagaa

SEQ ID NO: 1636178 - RNA, 19 nt, Artificial Sequence
  Description of Artificial Sequence: Synthetic oligonucleotide
  Antisense strand to SEQ ID NO: 1636177
uucuccacaggugauggag

SEQ ID NO: 1636179 - RNA, 19 nt, Artificial Sequence
  Description of Artificial Sequence: Synthetic oligonucleotide
  Sense strand starting at position 2185 of SEQ ID NO: 1560953
ccaacuaauugggaccaga

SEQ ID NO: 1636180 - RNA, 19 nt, Artificial Sequence
  Description of Artificial Sequence: Synthetic oligonucleotide
  Antisense strand to SEQ ID NO: 1636179
ucuggucccaauuaguugg

SEQ ID NO: 1636181 - RNA, 19 nt, Artificial Sequence
  Description of Artificial Sequence: Synthetic oligonucleotide
  Sense strand starting at position 2261 of SEQ ID NO: 1560953
gggugugucagagggcuaa

SEQ ID NO: 1636182 - RNA, 19 nt, Artificial Sequence
  Description of Artificial Sequence: Synthetic oligonucleotide
  Antisense strand to SEQ ID NO: 1636181
uuagcccucugacacaccc

SEQ ID NO: 1636183 - RNA, 19 nt, Artificial Sequence
  Description of Artificial Sequence: Synthetic oligonucleotide
  Sense strand starting at position 2436 of SEQ ID NO: 1560953
cgaacagucagauggagau

SEQ ID NO: 1636184 - RNA, 19 nt, Artificial Sequence
  Description of Artificial Sequence: Synthetic oligonucleotide
  Antisense strand to SEQ ID NO: 1636183
aucuccaucugacuguucg

SEQ ID NO: 1636185 - RNA, 19 nt, Artificial Sequence
  Description of Artificial Sequence: Synthetic oligonucleotide
  Sense strand starting at position 2516 of SEQ ID NO: 1560953
gaaggagcugcccagagau

SEQ ID NO: 1636186 - RNA, 19 nt, Artificial Sequence
  Description of Artificial Sequence: Synthetic oligonucleotide
  Antisense strand to SEQ ID NO: 1636185
aucucugggcagcuccuuc

SEQ ID NO: 1636187 - RNA, 19 nt, Artificial Sequence
  Description of Artificial Sequence: Synthetic oligonucleotide
  Sense strand starting at position 2545 of SEQ ID NO: 1560953
gcgagaggcccagaaagau

SEQ ID NO: 1636188 - RNA, 19 nt, Artificial Sequence
  Description of Artificial Sequence: Synthetic oligonucleotide
  Antisense strand to SEQ ID NO: 1636187
aucuuucugggccucucgc

SEQ ID NO: 1636189 - RNA, 19 nt, Artificial Sequence
  Description of Artificial Sequence: Synthetic oligonucleotide
  Sense strand starting at position 2554 of SEQ ID NO: 1560953
ccagaaagaucgaggguga

SEQ ID NO: 1636190 - RNA, 19 nt, Artificial Sequence
  Description of Artificial Sequence: Synthetic oligonucleotide
  Antisense strand to SEQ ID NO: 1636189
ucacccucgaucuuucugg

SEQ ID NO: 1636191 - RNA, 19 nt, Artificial Sequence
  Description of Artificial Sequence: Synthetic oligonucleotide
  Sense strand starting at position 2707 of SEQ ID NO: 1560953
gcccuaaggaugugucuaa

SEQ ID NO: 1636192 - RNA, 19 nt, Artificial Sequence
  Description of Artificial Sequence: Synthetic oligonucleotide
  Antisense strand to SEQ ID NO: 1636191
uuagacacauccuuagggc

SEQ ID NO: 1636193 - RNA, 19 nt, Artificial Sequence
  Description of Artificial Sequence: Synthetic oligonucleotide
  Sense strand starting at position 2714 of SEQ ID NO: 1560953
ggaugugucuaagcccuua

SEQ ID NO: 1636194 - RNA, 19 nt, Artificial Sequence
  Description of Artificial Sequence: Synthetic oligonucleotide
  Antisense strand to SEQ ID NO: 1636193
uaagggcuuagacacaucc

SEQ ID NO: 1636195 - RNA, 19 nt, Artificial Sequence
  Description of Artificial Sequence: Synthetic oligonucleotide
  Sense strand starting at position 2728 of SEQ ID NO: 1560953
ccuuaucugggaggaguuu

SEQ ID NO: 1636196 - RNA, 19 nt, Artificial Sequence
  Description of Artificial Sequence: Synthetic oligonucleotide
  Antisense strand to SEQ ID NO: 1636195
aaacuccucccagauaagg

SEQ ID NO: 1636197 - RNA, 19 nt, Artificial Sequence
  Description of Artificial Sequence: Synthetic oligonucleotide
  Sense strand starting at position 2805 of SEQ ID NO: 1560953
guguuugucuguuugagau

SEQ ID NO: 1636198 - RNA, 19 nt, Artificial Sequence
  Description of Artificial Sequence: Synthetic oligonucleotide
  Antisense strand to SEQ ID NO: 1636197
aucucaaacagacaaacac

SEQ ID NO: 1636199 - RNA, 19 nt, Artificial Sequence
  Description of Artificial Sequence: Synthetic oligonucleotide
  Sense strand starting at position 3255 of SEQ ID NO: 1560953
auaaauuagguguggugua

SEQ ID NO: 1636200 - RNA, 19 nt, Artificial Sequence
  Description of Artificial Sequence: Synthetic oligonucleotide
  Antisense strand to SEQ ID NO: 1636199
uacaccacaccuaauuuau

SEQ ID NO: 1636201 - RNA, 19 nt, Artificial Sequence
  Description of Artificial Sequence: Synthetic oligonucleotide
  Sense strand starting at position 3473 of SEQ ID NO: 1560953
gcaguagaaacuugggaug

SEQ ID NO: 1636202 - RNA, 19 nt, Artificial Sequence
  Description of Artificial Sequence: Synthetic oligonucleotide
  Antisense strand to SEQ ID NO: 1636201
caucccaaguuucuacugc

SEQ ID NO: 1636203 - RNA, 19 nt, Artificial Sequence
  Description of Artificial Sequence: Synthetic oligonucleotide
  Sense strand starting at position 3503 of SEQ ID NO: 1560953
gcuccuaguuuccuaggaa

SEQ ID NO: 1636204 - RNA, 19 nt, Artificial Sequence
  Description of Artificial Sequence: Synthetic oligonucleotide
  Antisense strand to SEQ ID NO: 1636203
uuccuaggaaacuaggagc

SEQ ID NO: 1636205 - RNA, 19 nt, Artificial Sequence
  Description of Artificial Sequence: Synthetic oligonucleotide
  Sense strand starting at position 3504 of SEQ ID NO: 1560953
cuccuaguuuccuaggaag

SEQ ID NO: 1636206 - RNA, 19 nt, Artificial Sequence
  Description of Artificial Sequence: Synthetic oligonucleotide
  Antisense strand to SEQ ID NO: 1636205
cuuccuaggaaacuaggag

SEQ ID NO: 1636207 - RNA, 19 nt, Artificial Sequence
  Description of Artificial Sequence: Synthetic oligonucleotide
  Sense strand starting at position 3506 of SEQ ID NO: 1560953
ccuaguuuccuaggaaggu

SEQ ID NO: 1636208 - RNA, 19 nt, Artificial Sequence
  Description of Artificial Sequence: Synthetic oligonucleotide
  Antisense strand to SEQ ID NO: 1636207
accuuccuaggaaacuagg

SEQ ID NO: 1636209 - RNA, 19 nt, Artificial Sequence
  Description of Artificial Sequence: Synthetic oligonucleotide
  Sense strand starting at position 3540 of SEQ ID NO: 1560953
gacuccugagucuaagagu

SEQ ID NO: 1636210 - RNA, 19 nt, Artificial Sequence
  Description of Artificial Sequence: Synthetic oligonucleotide
  Antisense strand to SEQ ID NO: 1636209
acucuuagacucaggaguc

SEQ ID NO: 1636211 - RNA, 19 nt, Artificial Sequence
  Description of Artificial Sequence: Synthetic oligonucleotide
  Sense strand starting at position 3543 of SEQ ID NO: 1560953
uccugagucuaagagugga

SEQ ID NO: 1636212 - RNA, 19 nt, Artificial Sequence
  Description of Artificial Sequence: Synthetic oligonucleotide
  Antisense strand to SEQ ID NO: 1636211
uccacucuuagacucagga

SEQ ID NO: 1636213 - RNA, 19 nt, Artificial Sequence
  Description of Artificial Sequence: Synthetic oligonucleotide
  Sense strand starting at position 3573 of SEQ ID NO: 1560953
cccagauuccuauguucug

SEQ ID NO: 1636214 - RNA, 19 nt, Artificial Sequence
  Description of Artificial Sequence: Synthetic oligonucleotide
  Antisense strand to SEQ ID NO: 1636213
cagaacauaggaaucuggg

SEQ ID NO: 1636215 - RNA, 19 nt, Artificial Sequence
  Description of Artificial Sequence: Synthetic oligonucleotide
  Sense strand starting at position 3609 of SEQ ID NO: 1560953
ggacuuggauuccugaauc

SEQ ID NO: 1636216 - RNA, 19 nt, Artificial Sequence
  Description of Artificial Sequence: Synthetic oligonucleotide
  Antisense strand to SEQ ID NO: 1636215
gauucaggaauccaagucc

SEQ ID NO: 1636217 - RNA, 19 nt, Artificial Sequence
  Description of Artificial Sequence: Synthetic oligonucleotide
  Sense strand starting at position 3619 of SEQ ID NO: 1560953
uccugaaucugaggaagga

SEQ ID NO: 1636218 - RNA, 19 nt, Artificial Sequence
  Description of Artificial Sequence: Synthetic oligonucleotide
  Antisense strand to SEQ ID NO: 1636217
uccuuccucagauucagga

SEQ ID NO: 1636219 - RNA, 19 nt, Artificial Sequence
  Description of Artificial Sequence: Synthetic oligonucleotide
  Sense strand starting at position 3870 of SEQ ID NO: 1560953
ccuuuaagagucuaagucu

SEQ ID NO: 1636220 - RNA, 19 nt, Artificial Sequence
  Description of Artificial Sequence: Synthetic oligonucleotide
  Antisense strand to SEQ ID NO: 1636219
agacuuagacucuuaaagg

SEQ ID NO: 1636221 - RNA, 19 nt, Artificial Sequence
  Description of Artificial Sequence: Synthetic oligonucleotide
  Sense strand starting at position 3877 of SEQ ID NO: 1560953
gagucuaagucugucgcua

SEQ ID NO: 1636222 - RNA, 19 nt, Artificial Sequence
  Description of Artificial Sequence: Synthetic oligonucleotide
  Antisense strand to SEQ ID NO: 1636221
uagcgacagacuuagacuc

SEQ ID NO: 1636223 - RNA, 19 nt, Artificial Sequence
  Description of Artificial Sequence: Synthetic oligonucleotide
  Sense strand starting at position 3974 of SEQ ID NO: 1560953
agaucuguucugcaacauu

SEQ ID NO: 1636224 - RNA, 19 nt, Artificial Sequence
  Description of Artificial Sequence: Synthetic oligonucleotide
  Antisense strand to SEQ ID NO: 1636223
aauguugcagaacagaucu

SEQ ID NO: 1636225 - RNA, 19 nt, Artificial Sequence
  Description of Artificial Sequence: Synthetic oligonucleotide
  Sense strand starting at position 77 of SEQ ID NO: 1560954
gcaggugauucuccaccca

SEQ ID NO: 1636226 - RNA, 19 nt, Artificial Sequence
  Description of Artificial Sequence: Synthetic oligonucleotide
  Antisense strand to SEQ ID NO: 1636225
uggguggagaaucaccugc

SEQ ID NO: 1636227 - RNA, 19 nt, Artificial Sequence
  Description of Artificial Sequence: Synthetic oligonucleotide
  Sense strand starting at position 134 of SEQ ID NO: 1560954
uugggcagucgucagaaga

SEQ ID NO: 1636228 - RNA, 19 nt, Artificial Sequence
  Description of Artificial Sequence: Synthetic oligonucleotide
  Antisense strand to SEQ ID NO: 1636227
ucuucugacgacugcccaa

SEQ ID NO: 1636229 - RNA, 19 nt, Artificial Sequence
  Description of Artificial Sequence: Synthetic oligonucleotide
  Sense strand starting at position 144 of SEQ ID NO: 1560954
gucagaagaucagauagaa

SEQ ID NO: 1636230 - RNA, 19 nt, Artificial Sequence
  Description of Artificial Sequence: Synthetic oligonucleotide
  Antisense strand to SEQ ID NO: 1636229
uucuaucugaucuucugac

SEQ ID NO: 1636231 - RNA, 19 nt, Artificial Sequence
  Description of Artificial Sequence: Synthetic oligonucleotide
  Sense strand starting at position 170 of SEQ ID NO: 1560954
guaucuuggcguuagaaug

SEQ ID NO: 1636232 - RNA, 19 nt, Artificial Sequence
  Description of Artificial Sequence: Synthetic oligonucleotide
  Antisense strand to SEQ ID NO: 1636231
cauucuaacgccaagauac

SEQ ID NO: 1636233 - RNA, 19 nt, Artificial Sequence
  Description of Artificial Sequence: Synthetic oligonucleotide
  Sense strand starting at position 180 of SEQ ID NO: 1560954
guuagaaugaguuggacag

SEQ ID NO: 1636234 - RNA, 19 nt, Artificial Sequence
  Description of Artificial Sequence: Synthetic oligonucleotide
  Antisense strand to SEQ ID NO: 1636233
cuguccaacucauucuaac

SEQ ID NO: 1636235 - RNA, 19 nt, Artificial Sequence
  Description of Artificial Sequence: Synthetic oligonucleotide
  Sense strand starting at position 277 of SEQ ID NO: 1560954
aggugacuuucgagaugag

SEQ ID NO: 1636236 - RNA, 19 nt, Artificial Sequence
  Description of Artificial Sequence: Synthetic oligonucleotide
  Antisense strand to SEQ ID NO: 1636235
cucaucucgaaagucaccu

SEQ ID NO: 1636237 - RNA, 19 nt, Artificial Sequence
  Description of Artificial Sequence: Synthetic oligonucleotide
  Sense strand starting at position 280 of SEQ ID NO: 1560954
ugacuuucgagaugagggu

SEQ ID NO: 1636238 - RNA, 19 nt, Artificial Sequence
  Description of Artificial Sequence: Synthetic oligonucleotide
  Antisense strand to SEQ ID NO: 1636237
acccucaucucgaaaguca

SEQ ID NO: 1636239 - RNA, 19 nt, Artificial Sequence
  Description of Artificial Sequence: Synthetic oligonucleotide
  Sense strand starting at position 359 of SEQ ID NO: 1560954
cagugacacguaugcauuu

SEQ ID NO: 1636240 - RNA, 19 nt, Artificial Sequence
  Description of Artificial Sequence: Synthetic oligonucleotide
  Antisense strand to SEQ ID NO: 1636239
aaaugcauacgugucacug

SEQ ID NO: 1636241 - RNA, 19 nt, Artificial Sequence
  Description of Artificial Sequence: Synthetic oligonucleotide
  Sense strand starting at position 488 of SEQ ID NO: 1560954
gggaucuggagccauagua

SEQ ID NO: 1636242 - RNA, 19 nt, Artificial Sequence
  Description of Artificial Sequence: Synthetic oligonucleotide
  Antisense strand to SEQ ID NO: 1636241
uacuauggcuccagauccc

SEQ ID NO: 1636243 - RNA, 19 nt, Artificial Sequence
  Description of Artificial Sequence: Synthetic oligonucleotide
  Sense strand starting at position 569 of SEQ ID NO: 1560954
augggacgaucauauuuaa

SEQ ID NO: 1636244 - RNA, 19 nt, Artificial Sequence
  Description of Artificial Sequence: Synthetic oligonucleotide
  Antisense strand to SEQ ID NO: 1636243
uuaaauaugaucgucccau

SEQ ID NO: 1636245 - RNA, 19 nt, Artificial Sequence
  Description of Artificial Sequence: Synthetic oligonucleotide
  Sense strand starting at position 653 of SEQ ID NO: 1560954
gccugacaucccuauugca

SEQ ID NO: 1636246 - RNA, 19 nt, Artificial Sequence
  Description of Artificial Sequence: Synthetic oligonucleotide
  Antisense strand to SEQ ID NO: 1636245
ugcaauagggaugucaggc

SEQ ID NO: 1636247 - RNA, 19 nt, Artificial Sequence
  Description of Artificial Sequence: Synthetic oligonucleotide
  Sense strand starting at position 810 of SEQ ID NO: 1560954
aguugugggaggugaucua

SEQ ID NO: 1636248 - RNA, 19 nt, Artificial Sequence
  Description of Artificial Sequence: Synthetic oligonucleotide
  Antisense strand to SEQ ID NO: 1636247
uagaucaccucccacaacu

SEQ ID NO: 1636249 - RNA, 19 nt, Artificial Sequence
  Description of Artificial Sequence: Synthetic oligonucleotide
  Sense strand starting at position 1405 of SEQ ID NO: 1560954
cggagucagcaguaauaug

SEQ ID NO: 1636250 - RNA, 19 nt, Artificial Sequence
  Description of Artificial Sequence: Synthetic oligonucleotide
  Antisense strand to SEQ ID NO: 1636249
cauauuacugcugacuccg

SEQ ID NO: 1636251 - RNA, 19 nt, Artificial Sequence
  Description of Artificial Sequence: Synthetic oligonucleotide
  Sense strand starting at position 2617 of SEQ ID NO: 1560954
cgcucauucgcucugcuaa

SEQ ID NO: 1636252 - RNA, 19 nt, Artificial Sequence
  Description of Artificial Sequence: Synthetic oligonucleotide
  Antisense strand to SEQ ID NO: 1636251
uuagcagagcgaaugagcg

SEQ ID NO: 1636253 - RNA, 19 nt, Artificial Sequence
  Description of Artificial Sequence: Synthetic oligonucleotide
  Sense strand starting at position 2648 of SEQ ID NO: 1560954
acuuacuaguaguuguaua

SEQ ID NO: 1636254 - RNA, 19 nt, Artificial Sequence
  Description of Artificial Sequence: Synthetic oligonucleotide
  Antisense strand to SEQ ID NO: 1636253
uauacaacuacuaguaagu

SEQ ID NO: 1636255 - RNA, 19 nt, Artificial Sequence
  Description of Artificial Sequence: Synthetic oligonucleotide
  Sense strand starting at position 2653 of SEQ ID NO: 1560954
cuaguaguuguauaagauu

SEQ ID NO: 1636256 - RNA, 19 nt, Artificial Sequence
  Description of Artificial Sequence: Synthetic oligonucleotide
  Antisense strand to SEQ ID NO: 1636255
aaucuuauacaacuacuag

SEQ ID NO: 1636257 - RNA, 19 nt, Artificial Sequence
  Description of Artificial Sequence: Synthetic oligonucleotide
  Sense strand starting at position 2688 of SEQ ID NO: 1560954
uuccuuaaacguggguaau

SEQ ID NO: 1636258 - RNA, 19 nt, Artificial Sequence
  Description of Artificial Sequence: Synthetic oligonucleotide
  Antisense strand to SEQ ID NO: 1636257
auuacccacguuuaaggaa

SEQ ID NO: 1636259 - RNA, 19 nt, Artificial Sequence
  Description of Artificial Sequence: Synthetic oligonucleotide
  Sense strand starting at position 2689 of SEQ ID NO: 1560954
uccuuaaacguggguaaua

SEQ ID NO: 1636260 - RNA, 19 nt, Artificial Sequence
  Description of Artificial Sequence: Synthetic oligonucleotide
  Antisense strand to SEQ ID NO: 1636259
uauuacccacguuuaagga

SEQ ID NO: 1636261 - RNA, 19 nt, Artificial Sequence
  Description of Artificial Sequence: Synthetic oligonucleotide
  Sense strand starting at position 2701 of SEQ ID NO: 1560954
gguaauaccuaacccuaga

SEQ ID NO: 1636262 - RNA, 19 nt, Artificial Sequence
  Description of Artificial Sequence: Synthetic oligonucleotide
  Antisense strand to SEQ ID NO: 1636261
ucuaggguuagguauuacc

SEQ ID NO: 1636263 - RNA, 19 nt, Artificial Sequence
  Description of Artificial Sequence: Synthetic oligonucleotide
  Sense strand starting at position 2765 of SEQ ID NO: 1560954
cgcagucacuacucaaaug

SEQ ID NO: 1636264 - RNA, 19 nt, Artificial Sequence
  Description of Artificial Sequence: Synthetic oligonucleotide
  Antisense strand to SEQ ID NO: 1636263
cauuugaguagugacugcg

SEQ ID NO: 1636265 - RNA, 19 nt, Artificial Sequence
  Description of Artificial Sequence: Synthetic oligonucleotide
  Sense strand starting at position 2963 of SEQ ID NO: 1560954
accauagcgagguaaaguu

SEQ ID NO: 1636266 - RNA, 19 nt, Artificial Sequence
  Description of Artificial Sequence: Synthetic oligonucleotide
  Antisense strand to SEQ ID NO: 1636265
aacuuuaccucgcuauggu

SEQ ID NO: 1636267 - RNA, 19 nt, Artificial Sequence
  Description of Artificial Sequence: Synthetic oligonucleotide
  Sense strand starting at position 3188 of SEQ ID NO: 1560954
uucggauguugacuaaaca

SEQ ID NO: 1636268 - RNA, 19 nt, Artificial Sequence
  Description of Artificial Sequence: Synthetic oligonucleotide
  Antisense strand to SEQ ID NO: 1636267
uguuuagucaacauccgaa

SEQ ID NO: 1636269 - RNA, 19 nt, Artificial Sequence
  Description of Artificial Sequence: Synthetic oligonucleotide
  Sense strand starting at position 3223 of SEQ ID NO: 1560954
augucauagccuggagaga

SEQ ID NO: 1636270 - RNA, 19 nt, Artificial Sequence
  Description of Artificial Sequence: Synthetic oligonucleotide
  Antisense strand to SEQ ID NO: 1636269
ucucuccaggcuaugacau

SEQ ID NO: 1636271 - RNA, 19 nt, Artificial Sequence
  Description of Artificial Sequence: Synthetic oligonucleotide
  Sense strand starting at position 3249 of SEQ ID NO: 1560954
gggagucaucaguguuuga

SEQ ID NO: 1636272 - RNA, 19 nt, Artificial Sequence
  Description of Artificial Sequence: Synthetic oligonucleotide
  Antisense strand to SEQ ID NO: 1636271
ucaaacacugaugacuccc

SEQ ID NO: 1636273 - RNA, 19 nt, Artificial Sequence
  Description of Artificial Sequence: Synthetic oligonucleotide
  Sense strand starting at position 3252 of SEQ ID NO: 1560954
agucaucaguguuugaaug

SEQ ID NO: 1636274 - RNA, 19 nt, Artificial Sequence
  Description of Artificial Sequence: Synthetic oligonucleotide
  Antisense strand to SEQ ID NO: 1636273
cauucaaacacugaugacu

SEQ ID NO: 1636275 - RNA, 19 nt, Artificial Sequence
  Description of Artificial Sequence: Synthetic oligonucleotide
  Sense strand starting at position 3258 of SEQ ID NO: 1560954
caguguuugaauggagacu

SEQ ID NO: 1636276 - RNA, 19 nt, Artificial Sequence
  Description of Artificial Sequence: Synthetic oligonucleotide
  Antisense strand to SEQ ID NO: 1636275
agucuccauucaaacacug

SEQ ID NO: 1636277 - RNA, 19 nt, Artificial Sequence
  Description of Artificial Sequence: Synthetic oligonucleotide
  Sense strand starting at position 3355 of SEQ ID NO: 1560954
aggaguggccagugaaaug

SEQ ID NO: 1636278 - RNA, 19 nt, Artificial Sequence
  Description of Artificial Sequence: Synthetic oligonucleotide
  Antisense strand to SEQ ID NO: 1636277
cauuucacuggccacuccu

SEQ ID NO: 1636279 - RNA, 19 nt, Artificial Sequence
  Description of Artificial Sequence: Synthetic oligonucleotide
  Sense strand starting at position 3503 of SEQ ID NO: 1560954
acugcaaguuaguuaucaa

SEQ ID NO: 1636280 - RNA, 19 nt, Artificial Sequence
  Description of Artificial Sequence: Synthetic oligonucleotide
  Antisense strand to SEQ ID NO: 1636279
uugauaacuaacuugcagu

SEQ ID NO: 1636281 - RNA, 19 nt, Artificial Sequence
  Description of Artificial Sequence: Synthetic oligonucleotide
  Sense strand starting at position 3506 of SEQ ID NO: 1560954
gcaaguuaguuaucaacag

SEQ ID NO: 1636282 - RNA, 19 nt, Artificial Sequence
  Description of Artificial Sequence: Synthetic oligonucleotide
  Antisense strand to SEQ ID NO: 1636281
cuguugauaacuaacuugc

SEQ ID NO: 1636283 - RNA, 19 nt, Artificial Sequence
  Description of Artificial Sequence: Synthetic oligonucleotide
  Sense strand starting at position 3510 of SEQ ID NO: 1560954
guuaguuaucaacagguac

SEQ ID NO: 1636284 - RNA, 19 nt, Artificial Sequence
  Description of Artificial Sequence: Synthetic oligonucleotide
  Antisense strand to SEQ ID NO: 1636283
guaccuguugauaacuaac

SEQ ID NO: 1636285 - RNA, 19 nt, Artificial Sequence
  Description of Artificial Sequence: Synthetic oligonucleotide
  Sense strand starting at position 3626 of SEQ ID NO: 1560954
ccauucuuguugguccaaa

SEQ ID NO: 1636286 - RNA, 19 nt, Artificial Sequence
  Description of Artificial Sequence: Synthetic oligonucleotide
  Antisense strand to SEQ ID NO: 1636285
uuuggaccaacaagaaugg

SEQ ID NO: 1636287 - RNA, 19 nt, Artificial Sequence
  Description of Artificial Sequence: Synthetic oligonucleotide
  Sense strand starting at position 3651 of SEQ ID NO: 1560954
agaucucuugccuggguga

SEQ ID NO: 1636288 - RNA, 19 nt, Artificial Sequence
  Description of Artificial Sequence: Synthetic oligonucleotide
  Antisense strand to SEQ ID NO: 1636287
ucacccaggcaagagaucu

SEQ ID NO: 1636289 - RNA, 19 nt, Artificial Sequence
  Description of Artificial Sequence: Synthetic oligonucleotide
  Sense strand starting at position 3853 of SEQ ID NO: 1560954
ucaggacacacgugaguuu

SEQ ID NO: 1636290 - RNA, 19 nt, Artificial Sequence
  Description of Artificial Sequence: Synthetic oligonucleotide
  Antisense strand to SEQ ID NO: 1636289
aaacucacguguguccuga

SEQ ID NO: 1636291 - RNA, 19 nt, Artificial Sequence
  Description of Artificial Sequence: Synthetic oligonucleotide
  Sense strand starting at position 3856 of SEQ ID NO: 1560954
ggacacacgugaguuugaa

SEQ ID NO: 1636292 - RNA, 19 nt, Artificial Sequence
  Description of Artificial Sequence: Synthetic oligonucleotide
  Antisense strand to SEQ ID NO: 1636291
uucaaacucacgugugucc

SEQ ID NO: 1636293 - RNA, 19 nt, Artificial Sequence
  Description of Artificial Sequence: Synthetic oligonucleotide
  Sense strand starting at position 3866 of SEQ ID NO: 1560954
gaguuugaaugcccugaau

SEQ ID NO: 1636294 - RNA, 19 nt, Artificial Sequence
  Description of Artificial Sequence: Synthetic oligonucleotide
  Antisense strand to SEQ ID NO: 1636293
auucagggcauucaaacuc

SEQ ID NO: 1636295 - RNA, 19 nt, Artificial Sequence
  Description of Artificial Sequence: Synthetic oligonucleotide
  Sense strand starting at position 3868 of SEQ ID NO: 1560954
guuugaaugcccugaauug

SEQ ID NO: 1636296 - RNA, 19 nt, Artificial Sequence
  Description of Artificial Sequence: Synthetic oligonucleotide
  Antisense strand to SEQ ID NO: 1636295
caauucagggcauucaaac

SEQ ID NO: 1636297 - RNA, 19 nt, Artificial Sequence
  Description of Artificial Sequence: Synthetic oligonucleotide
  Sense strand starting at position 3869 of SEQ ID NO: 1560954
uuugaaugcccugaauugu

SEQ ID NO: 1636298 - RNA, 19 nt, Artificial Sequence
  Description of Artificial Sequence: Synthetic oligonucleotide
  Antisense strand to SEQ ID NO: 1636297
acaauucagggcauucaaa

SEQ ID NO: 1636299 - RNA, 19 nt, Artificial Sequence
  Description of Artificial Sequence: Synthetic oligonucleotide
  Sense strand starting at position 3877 of SEQ ID NO: 1560954
cccugaauuguauaagcau

SEQ ID NO: 1636300 - RNA, 19 nt, Artificial Sequence
  Description of Artificial Sequence: Synthetic oligonucleotide
  Antisense strand to SEQ ID NO: 1636299
augcuuauacaauucaggg

SEQ ID NO: 1636301 - RNA, 19 nt, Artificial Sequence
  Description of Artificial Sequence: Synthetic oligonucleotide
  Sense strand starting at position 3880 of SEQ ID NO: 1560954
ugaauuguauaagcaugga

SEQ ID NO: 1636302 - RNA, 19 nt, Artificial Sequence
  Description of Artificial Sequence: Synthetic oligonucleotide
  Antisense strand to SEQ ID NO: 1636301
uccaugcuuauacaauuca

SEQ ID NO: 1636303 - RNA, 19 nt, Artificial Sequence
  Description of Artificial Sequence: Synthetic oligonucleotide
  Sense strand starting at position 3912 of SEQ ID NO: 1560954
ggguguacuccagagugag

SEQ ID NO: 1636304 - RNA, 19 nt, Artificial Sequence
  Description of Artificial Sequence: Synthetic oligonucleotide
  Antisense strand to SEQ ID NO: 1636303
cucacucuggaguacaccc

SEQ ID NO: 1636305 - RNA, 19 nt, Artificial Sequence
  Description of Artificial Sequence: Synthetic oligonucleotide
  Sense strand starting at position 1290 of SEQ ID NO: 1560955
cccugagucugagggaaga

SEQ ID NO: 1636306 - RNA, 19 nt, Artificial Sequence
  Description of Artificial Sequence: Synthetic oligonucleotide
  Antisense strand to SEQ ID NO: 1636305
ucuucccucagacucaggg

SEQ ID NO: 1636307 - RNA, 19 nt, Artificial Sequence
  Description of Artificial Sequence: Synthetic oligonucleotide
  Sense strand starting at position 1505 of SEQ ID NO: 1560955
ggacucuugguuugaggga

SEQ ID NO: 1636308 - RNA, 19 nt, Artificial Sequence
  Description of Artificial Sequence: Synthetic oligonucleotide
  Antisense strand to SEQ ID NO: 1636307
ucccucaaaccaagagucc

SEQ ID NO: 1636309 - RNA, 19 nt, Artificial Sequence
  Description of Artificial Sequence: Synthetic oligonucleotide
  Sense strand starting at position 1529 of SEQ ID NO: 1560955
ggcugcuuccuguccguga

SEQ ID NO: 1636310 - RNA, 19 nt, Artificial Sequence
  Description of Artificial Sequence: Synthetic oligonucleotide
  Antisense strand to SEQ ID NO: 1636309
ucacggacaggaagcagcc

SEQ ID NO: 1636311 - RNA, 19 nt, Artificial Sequence
  Description of Artificial Sequence: Synthetic oligonucleotide
  Sense strand starting at position 1712 of SEQ ID NO: 1560955
guguaagacucuccuacag

SEQ ID NO: 1636312 - RNA, 19 nt, Artificial Sequence
  Description of Artificial Sequence: Synthetic oligonucleotide
  Antisense strand to SEQ ID NO: 1636311
cuguaggagagucuuacac

SEQ ID NO: 1636313 - RNA, 19 nt, Artificial Sequence
  Description of Artificial Sequence: Synthetic oligonucleotide
  Sense strand starting at position 1714 of SEQ ID NO: 1560955
guaagacucuccuacaguc

SEQ ID NO: 1636314 - RNA, 19 nt, Artificial Sequence
  Description of Artificial Sequence: Synthetic oligonucleotide
  Antisense strand to SEQ ID NO: 1636313
gacuguaggagagucuuac

SEQ ID NO: 1636315 - RNA, 19 nt, Artificial Sequence
  Description of Artificial Sequence: Synthetic oligonucleotide
  Sense strand starting at position 2009 of SEQ ID NO: 1560955
uuaccagaucauuggugaa

SEQ ID NO: 1636316 - RNA, 19 nt, Artificial Sequence
  Description of Artificial Sequence: Synthetic oligonucleotide
  Antisense strand to SEQ ID NO: 1636315
uucaccaaugaucugguaa

SEQ ID NO: 1636317 - RNA, 19 nt, Artificial Sequence
  Description of Artificial Sequence: Synthetic oligonucleotide
  Sense strand starting at position 2137 of SEQ ID NO: 1560955
ggagaugccucccauccuu

SEQ ID NO: 1636318 - RNA, 19 nt, Artificial Sequence
  Description of Artificial Sequence: Synthetic oligonucleotide
  Antisense strand to SEQ ID NO: 1636317
aaggaugggaggcaucucc

SEQ ID NO: 1636319 - RNA, 19 nt, Artificial Sequence
  Description of Artificial Sequence: Synthetic oligonucleotide
  Sense strand starting at position 2187 of SEQ ID NO: 1560955
cccgaaaucucccucugca

SEQ ID NO: 1636320 - RNA, 19 nt, Artificial Sequence
  Description of Artificial Sequence: Synthetic oligonucleotide
  Antisense strand to SEQ ID NO: 1636319
ugcagagggagauuucggg

SEQ ID NO: 1636321 - RNA, 19 nt, Artificial Sequence
  Description of Artificial Sequence: Synthetic oligonucleotide
  Sense strand starting at position 2658 of SEQ ID NO: 1560955
aucugugacccugagcaaa

SEQ ID NO: 1636322 - RNA, 19 nt, Artificial Sequence
  Description of Artificial Sequence: Synthetic oligonucleotide
  Antisense strand to SEQ ID NO: 1636321
uuugcucagggucacagau

SEQ ID NO: 1636323 - RNA, 19 nt, Artificial Sequence
  Description of Artificial Sequence: Synthetic oligonucleotide
  Sense strand starting at position 2668 of SEQ ID NO: 1560955
cugagcaaaugacuuaaau

SEQ ID NO: 1636324 - RNA, 19 nt, Artificial Sequence
  Description of Artificial Sequence: Synthetic oligonucleotide
  Antisense strand to SEQ ID NO: 1636323
auuuaagucauuugcucag

SEQ ID NO: 1636325 - RNA, 19 nt, Artificial Sequence
  Description of Artificial Sequence: Synthetic oligonucleotide
  Sense strand starting at position 2720 of SEQ ID NO: 1560955
ugggcacccuuguaaauau

SEQ ID NO: 1636326 - RNA, 19 nt, Artificial Sequence
  Description of Artificial Sequence: Synthetic oligonucleotide
  Antisense strand to SEQ ID NO: 1636325
auauuuacaagggugccca

SEQ ID NO: 1636327 - RNA, 19 nt, Artificial Sequence
  Description of Artificial Sequence: Synthetic oligonucleotide
  Sense strand starting at position 2727 of SEQ ID NO: 1560955
ccuuguaaauaugcuaaga

SEQ ID NO: 1636328 - RNA, 19 nt, Artificial Sequence
  Description of Artificial Sequence: Synthetic oligonucleotide
  Antisense strand to SEQ ID NO: 1636327
ucuuagcauauuuacaagg

SEQ ID NO: 1636329 - RNA, 19 nt, Artificial Sequence
  Description of Artificial Sequence: Synthetic oligonucleotide
  Sense strand starting at position 2729 of SEQ ID NO: 1560955
uuguaaauaugcuaagaga

SEQ ID NO: 1636330 - RNA, 19 nt, Artificial Sequence
  Description of Artificial Sequence: Synthetic oligonucleotide
  Antisense strand to SEQ ID NO: 1636329
ucucuuagcauauuuacaa

SEQ ID NO: 1636331 - RNA, 19 nt, Artificial Sequence
  Description of Artificial Sequence: Synthetic oligonucleotide
  Sense strand starting at position 2753 of SEQ ID NO: 1560955
augaguuacuacguggaaa

SEQ ID NO: 1636332 - RNA, 19 nt, Artificial Sequence
  Description of Artificial Sequence: Synthetic oligonucleotide
  Antisense strand to SEQ ID NO: 1636331
uuuccacguaguaacucau

SEQ ID NO: 1636333 - RNA, 19 nt, Artificial Sequence
  Description of Artificial Sequence: Synthetic oligonucleotide
  Sense strand starting at position 2754 of SEQ ID NO: 1560955
ugaguuacuacguggaaag

SEQ ID NO: 1636334 - RNA, 19 nt, Artificial Sequence
  Description of Artificial Sequence: Synthetic oligonucleotide
  Antisense strand to SEQ ID NO: 1636333
cuuuccacguaguaacuca

SEQ ID NO: 1636335 - RNA, 19 nt, Artificial Sequence
  Description of Artificial Sequence: Synthetic oligonucleotide
  Sense strand starting at position 2755 of SEQ ID NO: 1560955
gaguuacuacguggaaagu

SEQ ID NO: 1636336 - RNA, 19 nt, Artificial Sequence
  Description of Artificial Sequence: Synthetic oligonucleotide
  Antisense strand to SEQ ID NO: 1636335
acuuuccacguaguaacuc

SEQ ID NO: 1636337 - RNA, 19 nt, Artificial Sequence
  Description of Artificial Sequence: Synthetic oligonucleotide
  Sense strand starting at position 2764 of SEQ ID NO: 1560955
cguggaaagucuuggaaca

SEQ ID NO: 1636338 - RNA, 19 nt, Artificial Sequence
  Description of Artificial Sequence: Synthetic oligonucleotide
  Antisense strand to SEQ ID NO: 1636337
uguuccaagacuuuccacg

SEQ ID NO: 1636339 - RNA, 19 nt, Artificial Sequence
  Description of Artificial Sequence: Synthetic oligonucleotide
  Sense strand starting at position 2765 of SEQ ID NO: 1560955
guggaaagucuuggaacaa

SEQ ID NO: 1636340 - RNA, 19 nt, Artificial Sequence
  Description of Artificial Sequence: Synthetic oligonucleotide
  Antisense strand to SEQ ID NO: 1636339
uuguuccaagacuuuccac

SEQ ID NO: 1636341 - RNA, 19 nt, Artificial Sequence
  Description of Artificial Sequence: Synthetic oligonucleotide
  Sense strand starting at position 2766 of SEQ ID NO: 1560955
uggaaagucuuggaacaau

SEQ ID NO: 1636342 - RNA, 19 nt, Artificial Sequence
  Description of Artificial Sequence: Synthetic oligonucleotide
  Antisense strand to SEQ ID NO: 1636341
auuguuccaagacuuucca

SEQ ID NO: 1636343 - RNA, 19 nt, Artificial Sequence
  Description of Artificial Sequence: Synthetic oligonucleotide
  Sense strand starting at position 2935 of SEQ ID NO: 1560955
ucacauauagugcggaaau

SEQ ID NO: 1636344 - RNA, 19 nt, Artificial Sequence
  Description of Artificial Sequence: Synthetic oligonucleotide
  Antisense strand to SEQ ID NO: 1636343
auuuccgcacuauauguga

SEQ ID NO: 1636345 - RNA, 19 nt, Artificial Sequence
  Description of Artificial Sequence: Synthetic oligonucleotide
  Sense strand starting at position 2936 of SEQ ID NO: 1560955
cacauauagugcggaaaug

SEQ ID NO: 1636346 - RNA, 19 nt, Artificial Sequence
  Description of Artificial Sequence: Synthetic oligonucleotide
  Antisense strand to SEQ ID NO: 1636345
cauuuccgcacuauaugug

SEQ ID NO: 1636347 - RNA, 19 nt, Artificial Sequence
  Description of Artificial Sequence: Synthetic oligonucleotide
  Sense strand starting at position 2937 of SEQ ID NO: 1560955
acauauagugcggaaauga

SEQ ID NO: 1636348 - RNA, 19 nt, Artificial Sequence
  Description of Artificial Sequence: Synthetic oligonucleotide
  Antisense strand to SEQ ID NO: 1636347
ucauuuccgcacuauaugu

SEQ ID NO: 1636349 - RNA, 19 nt, Artificial Sequence
  Description of Artificial Sequence: Synthetic oligonucleotide
  Sense strand starting at position 3593 of SEQ ID NO: 1560955
caugguuacucacgccuau

SEQ ID NO: 1636350 - RNA, 19 nt, Artificial Sequence
  Description of Artificial Sequence: Synthetic oligonucleotide
  Antisense strand to SEQ ID NO: 1636349
auaggcgugaguaaccaug

SEQ ID NO: 1636351 - RNA, 19 nt, Artificial Sequence
  Description of Artificial Sequence: Synthetic oligonucleotide
  Sense strand starting at position 3902 of SEQ ID NO: 1560955
ccaccacuuugagaaguca

SEQ ID NO: 1636352 - RNA, 19 nt, Artificial Sequence
  Description of Artificial Sequence: Synthetic oligonucleotide
  Antisense strand to SEQ ID NO: 1636351
ugacuucucaaaguggugg

SEQ ID NO: 1636353 - RNA, 19 nt, Artificial Sequence
  Description of Artificial Sequence: Synthetic oligonucleotide
  Sense strand starting at position 3966 of SEQ ID NO: 1560955
aagguuugguugcgagaag

SEQ ID NO: 1636354 - RNA, 19 nt, Artificial Sequence
  Description of Artificial Sequence: Synthetic oligonucleotide
  Antisense strand to SEQ ID NO: 1636353
cuucucgcaaccaaaccuu

SEQ ID NO: 1636355 - RNA, 19 nt, Artificial Sequence
  Description of Artificial Sequence: Synthetic oligonucleotide
  Sense strand starting at position 3967 of SEQ ID NO: 1560955
agguuugguugcgagaagu

SEQ ID NO: 1636356 - RNA, 19 nt, Artificial Sequence
  Description of Artificial Sequence: Synthetic oligonucleotide
  Antisense strand to SEQ ID NO: 1636355
acuucucgcaaccaaaccu

SEQ ID NO: 1636357 - RNA, 19 nt, Artificial Sequence
  Description of Artificial Sequence: Synthetic oligonucleotide
  Sense strand starting at position 3977 of SEQ ID NO: 1560955
gcgagaaguuuccuuucag

SEQ ID NO: 1636358 - RNA, 19 nt, Artificial Sequence
  Description of Artificial Sequence: Synthetic oligonucleotide
  Antisense strand to SEQ ID NO: 1636357
cugaaaggaaacuucucgc

SEQ ID NO: 1636359 - RNA, 19 nt, Artificial Sequence
  Description of Artificial Sequence: Synthetic oligonucleotide
  Sense strand starting at position 24 of SEQ ID NO: 1560956
uuccuucucccgggcgaaa

SEQ ID NO: 1636360 - RNA, 19 nt, Artificial Sequence
  Description of Artificial Sequence: Synthetic oligonucleotide
  Antisense strand to SEQ ID NO: 1636359
uuucgcccgggagaaggaa

SEQ ID NO: 1636361 - RNA, 19 nt, Artificial Sequence
  Description of Artificial Sequence: Synthetic oligonucleotide
  Sense strand starting at position 237 of SEQ ID NO: 1560956
uccggcuucuagguaucau

SEQ ID NO: 1636362 - RNA, 19 nt, Artificial Sequence
  Description of Artificial Sequence: Synthetic oligonucleotide
  Antisense strand to SEQ ID NO: 1636361
augauaccuagaagccgga

SEQ ID NO: 1636363 - RNA, 19 nt, Artificial Sequence
  Description of Artificial Sequence: Synthetic oligonucleotide
  Sense strand starting at position 645 of SEQ ID NO: 1560956
auucccaguuugugggaaa

SEQ ID NO: 1636364 - RNA, 19 nt, Artificial Sequence
  Description of Artificial Sequence: Synthetic oligonucleotide
  Antisense strand to SEQ ID NO: 1636363
uuucccacaaacugggaau

SEQ ID NO: 1636365 - RNA, 19 nt, Artificial Sequence
  Description of Artificial Sequence: Synthetic oligonucleotide
  Sense strand starting at position 648 of SEQ ID NO: 1560956
cccaguuugugggaaaggu

SEQ ID NO: 1636366 - RNA, 19 nt, Artificial Sequence
  Description of Artificial Sequence: Synthetic oligonucleotide
  Antisense strand to SEQ ID NO: 1636365
accuuucccacaaacuggg

SEQ ID NO: 1636367 - RNA, 19 nt, Artificial Sequence
  Description of Artificial Sequence: Synthetic oligonucleotide
  Sense strand starting at position 657 of SEQ ID NO: 1560956
ugggaaagguucccugauu

SEQ ID NO: 1636368 - RNA, 19 nt, Artificial Sequence
  Description of Artificial Sequence: Synthetic oligonucleotide
  Antisense strand to SEQ ID NO: 1636367
aaucagggaaccuuuccca

SEQ ID NO: 1636369 - RNA, 19 nt, Artificial Sequence
  Description of Artificial Sequence: Synthetic oligonucleotide
  Sense strand starting at position 730 of SEQ ID NO: 1560956
gggaauuggugggaaaugu

SEQ ID NO: 1636370 - RNA, 19 nt, Artificial Sequence
  Description of Artificial Sequence: Synthetic oligonucleotide
  Antisense strand to SEQ ID NO: 1636369
acauuucccaccaauuccc

SEQ ID NO: 1636371 - RNA, 19 nt, Artificial Sequence
  Description of Artificial Sequence: Synthetic oligonucleotide
  Sense strand starting at position 793 of SEQ ID NO: 1560956
aggagagauucccauaaag

SEQ ID NO: 1636372 - RNA, 19 nt, Artificial Sequence
  Description of Artificial Sequence: Synthetic oligonucleotide
  Antisense strand to SEQ ID NO: 1636371
cuuuaugggaaucucuccu

SEQ ID NO: 1636373 - RNA, 19 nt, Artificial Sequence
  Description of Artificial Sequence: Synthetic oligonucleotide
  Sense strand starting at position 2393 of SEQ ID NO: 1560956
cccaguacccuuggaauaa

SEQ ID NO: 1636374 - RNA, 19 nt, Artificial Sequence
  Description of Artificial Sequence: Synthetic oligonucleotide
  Antisense strand to SEQ ID NO: 1636373
uuauuccaaggguacuggg

SEQ ID NO: 1636375 - RNA, 19 nt, Artificial Sequence
  Description of Artificial Sequence: Synthetic oligonucleotide
  Sense strand starting at position 2394 of SEQ ID NO: 1560956
ccaguacccuuggaauaaa

SEQ ID NO: 1636376 - RNA, 19 nt, Artificial Sequence
  Description of Artificial Sequence: Synthetic oligonucleotide
  Antisense strand to SEQ ID NO: 1636375
uuuauuccaaggguacugg

SEQ ID NO: 1636377 - RNA, 19 nt, Artificial Sequence
  Description of Artificial Sequence: Synthetic oligonucleotide
  Sense strand starting at position 2479 of SEQ ID NO: 1560956
ccaugucaaugauccagaa

SEQ ID NO: 1636378 - RNA, 19 nt, Artificial Sequence
  Description of Artificial Sequence: Synthetic oligonucleotide
  Antisense strand to SEQ ID NO: 1636377
uucuggaucauugacaugg

SEQ ID NO: 1636379 - RNA, 19 nt, Artificial Sequence
  Description of Artificial Sequence: Synthetic oligonucleotide
  Sense strand starting at position 2551 of SEQ ID NO: 1560956
ucaguacagugguaugauc

SEQ ID NO: 1636380 - RNA, 19 nt, Artificial Sequence
  Description of Artificial Sequence: Synthetic oligonucleotide
  Antisense strand to SEQ ID NO: 1636379
gaucauaccacuguacuga

SEQ ID NO: 1636381 - RNA, 19 nt, Artificial Sequence
  Description of Artificial Sequence: Synthetic oligonucleotide
  Sense strand starting at position 2630 of SEQ ID NO: 1560956
guaguugggcucgggugau

SEQ ID NO: 1636382 - RNA, 19 nt, Artificial Sequence
  Description of Artificial Sequence: Synthetic oligonucleotide
  Antisense strand to SEQ ID NO: 1636381
aucacccgagcccaacuac

SEQ ID NO: 1636383 - RNA, 19 nt, Artificial Sequence
  Description of Artificial Sequence: Synthetic oligonucleotide
  Sense strand starting at position 3166 of SEQ ID NO: 1560956
uccagagaucccuauugua

SEQ ID NO: 1636384 - RNA, 19 nt, Artificial Sequence
  Description of Artificial Sequence: Synthetic oligonucleotide
  Antisense strand to SEQ ID NO: 1636383
uacaauagggaucucugga

SEQ ID NO: 1636385 - RNA, 19 nt, Artificial Sequence
  Description of Artificial Sequence: Synthetic oligonucleotide
  Sense strand starting at position 3169 of SEQ ID NO: 1560956
agagaucccuauuguaggu

SEQ ID NO: 1636386 - RNA, 19 nt, Artificial Sequence
  Description of Artificial Sequence: Synthetic oligonucleotide
  Antisense strand to SEQ ID NO: 1636385
accuacaauagggaucucu

SEQ ID NO: 1636387 - RNA, 19 nt, Artificial Sequence
  Description of Artificial Sequence: Synthetic oligonucleotide
  Sense strand starting at position 3173 of SEQ ID NO: 1560956
aucccuauuguagguugaa

SEQ ID NO: 1636388 - RNA, 19 nt, Artificial Sequence
  Description of Artificial Sequence: Synthetic oligonucleotide
  Antisense strand to SEQ ID NO: 1636387
uucaaccuacaauagggau

SEQ ID NO: 1636389 - RNA, 19 nt, Artificial Sequence
  Description of Artificial Sequence: Synthetic oligonucleotide
  Sense strand starting at position 3213 of SEQ ID NO: 1560956
gagcacuucuuauagagua

SEQ ID NO: 1636390 - RNA, 19 nt, Artificial Sequence
  Description of Artificial Sequence: Synthetic oligonucleotide
  Antisense strand to SEQ ID NO: 1636389
uacucuauaagaagugcuc

SEQ ID NO: 1636391 - RNA, 19 nt, Artificial Sequence
  Description of Artificial Sequence: Synthetic oligonucleotide
  Sense strand starting at position 3426 of SEQ ID NO: 1560956
aggagggugugaugaugaa

SEQ ID NO: 1636392 - RNA, 19 nt, Artificial Sequence
  Description of Artificial Sequence: Synthetic oligonucleotide
  Antisense strand to SEQ ID NO: 1636391
uucaucaucacacccuccu

SEQ ID NO: 1636393 - RNA, 19 nt, Artificial Sequence
  Description of Artificial Sequence: Synthetic oligonucleotide
  Sense strand starting at position 3439 of SEQ ID NO: 1560956
gaugaauugcuauaaugug

SEQ ID NO: 1636394 - RNA, 19 nt, Artificial Sequence
  Description of Artificial Sequence: Synthetic oligonucleotide
  Antisense strand to SEQ ID NO: 1636393
cacauuauagcaauucauc

SEQ ID NO: 1636395 - RNA, 19 nt, Artificial Sequence
  Description of Artificial Sequence: Synthetic oligonucleotide
  Sense strand starting at position 3468 of SEQ ID NO: 1560956
ugccauuggugccugaaga

SEQ ID NO: 1636396 - RNA, 19 nt, Artificial Sequence
  Description of Artificial Sequence: Synthetic oligonucleotide
  Antisense strand to SEQ ID NO: 1636395
ucuucaggcaccaauggca

SEQ ID NO: 1636397 - RNA, 19 nt, Artificial Sequence
  Description of Artificial Sequence: Synthetic oligonucleotide
  Sense strand starting at position 3469 of SEQ ID NO: 1560956
gccauuggugccugaagau

SEQ ID NO: 1636398 - RNA, 19 nt, Artificial Sequence
  Description of Artificial Sequence: Synthetic oligonucleotide
  Antisense strand to SEQ ID NO: 1636397
aucuucaggcaccaauggc

SEQ ID NO: 1636399 - RNA, 19 nt, Artificial Sequence
  Description of Artificial Sequence: Synthetic oligonucleotide
  Sense strand starting at position 3475 of SEQ ID NO: 1560956
ggugccugaagauggaaua

SEQ ID NO: 1636400 - RNA, 19 nt, Artificial Sequence
  Description of Artificial Sequence: Synthetic oligonucleotide
  Antisense strand to SEQ ID NO: 1636399
uauuccaucuucaggcacc

SEQ ID NO: 1636401 - RNA, 19 nt, Artificial Sequence
  Description of Artificial Sequence: Synthetic oligonucleotide
  Sense strand starting at position 3476 of SEQ ID NO: 1560956
gugccugaagauggaauaa

SEQ ID NO: 1636402 - RNA, 19 nt, Artificial Sequence
  Description of Artificial Sequence: Synthetic oligonucleotide
  Antisense strand to SEQ ID NO: 1636401
uuauuccaucuucaggcac

SEQ ID NO: 1636403 - RNA, 19 nt, Artificial Sequence
  Description of Artificial Sequence: Synthetic oligonucleotide
  Sense strand starting at position 3878 of SEQ ID NO: 1560956
gcacaucaguccuuguguu

SEQ ID NO: 1636404 - RNA, 19 nt, Artificial Sequence
  Description of Artificial Sequence: Synthetic oligonucleotide
  Antisense strand to SEQ ID NO: 1636403
aacacaaggacugaugugc

SEQ ID NO: 1636405 - RNA, 19 nt, Artificial Sequence
  Description of Artificial Sequence: Synthetic oligonucleotide
  Sense strand starting at position 3879 of SEQ ID NO: 1560956
cacaucaguccuuguguuu

SEQ ID NO: 1636406 - RNA, 19 nt, Artificial Sequence
  Description of Artificial Sequence: Synthetic oligonucleotide
  Antisense strand to SEQ ID NO: 1636405
aaacacaaggacugaugug

SEQ ID NO: 1636407 - RNA, 19 nt, Artificial Sequence
  Description of Artificial Sequence: Synthetic oligonucleotide
  Sense strand starting at position 3896 of SEQ ID NO: 1560956
uuugaucaugucgaaagca

SEQ ID NO: 1636408 - RNA, 19 nt, Artificial Sequence
  Description of Artificial Sequence: Synthetic oligonucleotide
  Antisense strand to SEQ ID NO: 1636407
ugcuuucgacaugaucaaa

SEQ ID NO: 1636409 - RNA, 19 nt, Artificial Sequence
  Description of Artificial Sequence: Synthetic oligonucleotide
  Sense strand starting at position 244 of SEQ ID NO: 1560957
ggaagucgaguuugcaaug

SEQ ID NO: 1636410 - RNA, 19 nt, Artificial Sequence
  Description of Artificial Sequence: Synthetic oligonucleotide
  Antisense strand to SEQ ID NO: 1636409
cauugcaaacucgacuucc

SEQ ID NO: 1636411 - RNA, 19 nt, Artificial Sequence
  Description of Artificial Sequence: Synthetic oligonucleotide
  Sense strand starting at position 254 of SEQ ID NO: 1560957
uuugcaaugagccgggauu

SEQ ID NO: 1636412 - RNA, 19 nt, Artificial Sequence
  Description of Artificial Sequence: Synthetic oligonucleotide
  Antisense strand to SEQ ID NO: 1636411
aaucccggcucauugcaaa

SEQ ID NO: 1636413 - RNA, 19 nt, Artificial Sequence
  Description of Artificial Sequence: Synthetic oligonucleotide
  Sense strand starting at position 1136 of SEQ ID NO: 1560957
ggguaauggugucaagugu

SEQ ID NO: 1636414 - RNA, 19 nt, Artificial Sequence
  Description of Artificial Sequence: Synthetic oligonucleotide
  Antisense strand to SEQ ID NO: 1636413
acacuugacaccauuaccc

SEQ ID NO: 1636415 - RNA, 19 nt, Artificial Sequence
  Description of Artificial Sequence: Synthetic oligonucleotide
  Sense strand starting at position 1222 of SEQ ID NO: 1560957
uggguuauggccuggguau

SEQ ID NO: 1636416 - RNA, 19 nt, Artificial Sequence
  Description of Artificial Sequence: Synthetic oligonucleotide
  Antisense strand to SEQ ID NO: 1636415
auacccaggccauaaccca

SEQ ID NO: 1636417 - RNA, 19 nt, Artificial Sequence
  Description of Artificial Sequence: Synthetic oligonucleotide
  Sense strand starting at position 1223 of SEQ ID NO: 1560957
ggguuauggccuggguaug

SEQ ID NO: 1636418 - RNA, 19 nt, Artificial Sequence
  Description of Artificial Sequence: Synthetic oligonucleotide
  Antisense strand to SEQ ID NO: 1636417
cauacccaggccauaaccc

SEQ ID NO: 1636419 - RNA, 19 nt, Artificial Sequence
  Description of Artificial Sequence: Synthetic oligonucleotide
  Sense strand starting at position 1275 of SEQ ID NO: 1560957
gcgucaccaucugcugauu

SEQ ID NO: 1636420 - RNA, 19 nt, Artificial Sequence
  Description of Artificial Sequence: Synthetic oligonucleotide
  Antisense strand to SEQ ID NO: 1636419
aaucagcagauggugacgc

SEQ ID NO: 1636421 - RNA, 19 nt, Artificial Sequence
  Description of Artificial Sequence: Synthetic oligonucleotide
  Sense strand starting at position 1380 of SEQ ID NO: 1560957
acccguguugcugccaauu

SEQ ID NO: 1636422 - RNA, 19 nt, Artificial Sequence
  Description of Artificial Sequence: Synthetic oligonucleotide
  Antisense strand to SEQ ID NO: 1636421
aauuggcagcaacacgggu

SEQ ID NO: 1636423 - RNA, 19 nt, Artificial Sequence
  Description of Artificial Sequence: Synthetic oligonucleotide
  Sense strand starting at position 1389 of SEQ ID NO: 1560957
gcugccaauuucgaggaau

SEQ ID NO: 1636424 - RNA, 19 nt, Artificial Sequence
  Description of Artificial Sequence: Synthetic oligonucleotide
  Antisense strand to SEQ ID NO: 1636423
auuccucgaaauuggcagc

SEQ ID NO: 1636425 - RNA, 19 nt, Artificial Sequence
  Description of Artificial Sequence: Synthetic oligonucleotide
  Sense strand starting at position 2021 of SEQ ID NO: 1560957
gucggugcccacuagaaga

SEQ ID NO: 1636426 - RNA, 19 nt, Artificial Sequence
  Description of Artificial Sequence: Synthetic oligonucleotide
  Antisense strand to SEQ ID NO: 1636425
ucuucuagugggcaccgac

SEQ ID NO: 1636427 - RNA, 19 nt, Artificial Sequence
  Description of Artificial Sequence: Synthetic oligonucleotide
  Sense strand starting at position 2145 of SEQ ID NO: 1560957
gagguuccaacucgugaug

SEQ ID NO: 1636428 - RNA, 19 nt, Artificial Sequence
  Description of Artificial Sequence: Synthetic oligonucleotide
  Antisense strand to SEQ ID NO: 1636427
caucacgaguuggaaccuc

SEQ ID NO: 1636429 - RNA, 19 nt, Artificial Sequence
  Description of Artificial Sequence: Synthetic oligonucleotide
  Sense strand starting at position 2148 of SEQ ID NO: 1560957
guuccaacucgugauggga

SEQ ID NO: 1636430 - RNA, 19 nt, Artificial Sequence
  Description of Artificial Sequence: Synthetic oligonucleotide
  Antisense strand to SEQ ID NO: 1636429
ucccaucacgaguuggaac

SEQ ID NO: 1636431 - RNA, 19 nt, Artificial Sequence
  Description of Artificial Sequence: Synthetic oligonucleotide
  Sense strand starting at position 2254 of SEQ ID NO: 1560957
gcaagugguuucuccucga

SEQ ID NO: 1636432 - RNA, 19 nt, Artificial Sequence
  Description of Artificial Sequence: Synthetic oligonucleotide
  Antisense strand to SEQ ID NO: 1636431
ucgaggagaaaccacuugc

SEQ ID NO: 1636433 - RNA, 19 nt, Artificial Sequence
  Description of Artificial Sequence: Synthetic oligonucleotide
  Sense strand starting at position 2357 of SEQ ID NO: 1560957
gcaggaggacugugugaac

SEQ ID NO: 1636434 - RNA, 19 nt, Artificial Sequence
  Description of Artificial Sequence: Synthetic oligonucleotide
  Antisense strand to SEQ ID NO: 1636433
guucacacaguccuccugc

SEQ ID NO: 1636435 - RNA, 19 nt, Artificial Sequence
  Description of Artificial Sequence: Synthetic oligonucleotide
  Sense strand starting at position 2802 of SEQ ID NO: 1560957
cucacagcguggucuguaa

SEQ ID NO: 1636436 - RNA, 19 nt, Artificial Sequence
  Description of Artificial Sequence: Synthetic oligonucleotide
  Antisense strand to SEQ ID NO: 1636435
uuacagaccacgcugugag

SEQ ID NO: 1636437 - RNA, 19 nt, Artificial Sequence
  Description of Artificial Sequence: Synthetic oligonucleotide
  Sense strand starting at position 2854 of SEQ ID NO: 1560957
gggauauaguuuguacuaa

SEQ ID NO: 1636438 - RNA, 19 nt, Artificial Sequence
  Description of Artificial Sequence: Synthetic oligonucleotide
  Antisense strand to SEQ ID NO: 1636437
uuaguacaaacuauauccc

SEQ ID NO: 1636439 - RNA, 19 nt, Artificial Sequence
  Description of Artificial Sequence: Synthetic oligonucleotide
  Sense strand starting at position 2855 of SEQ ID NO: 1560957
ggauauaguuuguacuaaa

SEQ ID NO: 1636440 - RNA, 19 nt, Artificial Sequence
  Description of Artificial Sequence: Synthetic oligonucleotide
  Antisense strand to SEQ ID NO: 1636439
uuuaguacaaacuauaucc

SEQ ID NO: 1636441 - RNA, 19 nt, Artificial Sequence
  Description of Artificial Sequence: Synthetic oligonucleotide
  Sense strand starting at position 2900 of SEQ ID NO: 1560957
agcaguggcagugacaauu

SEQ ID NO: 1636442 - RNA, 19 nt, Artificial Sequence
  Description of Artificial Sequence: Synthetic oligonucleotide
  Antisense strand to SEQ ID NO: 1636441
aauugucacugccacugcu

SEQ ID NO: 1636443 - RNA, 19 nt, Artificial Sequence
  Description of Artificial Sequence: Synthetic oligonucleotide
  Sense strand starting at position 2931 of SEQ ID NO: 1560957
gcuuuacaguuggcaucaa

SEQ ID NO: 1636444 - RNA, 19 nt, Artificial Sequence
  Description of Artificial Sequence: Synthetic oligonucleotide
  Antisense strand to SEQ ID NO: 1636443
uugaugccaacuguaaagc

SEQ ID NO: 1636445 - RNA, 19 nt, Artificial Sequence
  Description of Artificial Sequence: Synthetic oligonucleotide
  Sense strand starting at position 2932 of SEQ ID NO: 1560957
cuuuacaguuggcaucaaa

SEQ ID NO: 1636446 - RNA, 19 nt, Artificial Sequence
  Description of Artificial Sequence: Synthetic oligonucleotide
  Antisense strand to SEQ ID NO: 1636445
uuugaugccaacuguaaag

SEQ ID NO: 1636447 - RNA, 19 nt, Artificial Sequence
  Description of Artificial Sequence: Synthetic oligonucleotide
  Sense strand starting at position 3073 of SEQ ID NO: 1560957
uaaugaagaccguguucua

SEQ ID NO: 1636448 - RNA, 19 nt, Artificial Sequence
  Description of Artificial Sequence: Synthetic oligonucleotide
  Antisense strand to SEQ ID NO: 1636447
uagaacacggucuucauua

SEQ ID NO: 1636449 - RNA, 19 nt, Artificial Sequence
  Description of Artificial Sequence: Synthetic oligonucleotide
  Sense strand starting at position 3082 of SEQ ID NO: 1560957
ccguguucuaguggaggga

SEQ ID NO: 1636450 - RNA, 19 nt, Artificial Sequence
  Description of Artificial Sequence: Synthetic oligonucleotide
  Antisense strand to SEQ ID NO: 1636449
ucccuccacuagaacacgg

SEQ ID NO: 1636451 - RNA, 19 nt, Artificial Sequence
  Description of Artificial Sequence: Synthetic oligonucleotide
  Sense strand starting at position 3083 of SEQ ID NO: 1560957
cguguucuaguggagggaa

SEQ ID NO: 1636452 - RNA, 19 nt, Artificial Sequence
  Description of Artificial Sequence: Synthetic oligonucleotide
  Antisense strand to SEQ ID NO: 1636451
uucccuccacuagaacacg

SEQ ID NO: 1636453 - RNA, 19 nt, Artificial Sequence
  Description of Artificial Sequence: Synthetic oligonucleotide
  Sense strand starting at position 3084 of SEQ ID NO: 1560957
guguucuaguggagggaaa

SEQ ID NO: 1636454 - RNA, 19 nt, Artificial Sequence
  Description of Artificial Sequence: Synthetic oligonucleotide
  Antisense strand to SEQ ID NO: 1636453
uuucccuccacuagaacac

SEQ ID NO: 1636455 - RNA, 19 nt, Artificial Sequence
  Description of Artificial Sequence: Synthetic oligonucleotide
  Sense strand starting at position 3403 of SEQ ID NO: 1560957
gacagaaacugagagacuu

SEQ ID NO: 1636456 - RNA, 19 nt, Artificial Sequence
  Description of Artificial Sequence: Synthetic oligonucleotide
  Antisense strand to SEQ ID NO: 1636455
aagucucucaguuucuguc

SEQ ID NO: 1636457 - RNA, 19 nt, Artificial Sequence
  Description of Artificial Sequence: Synthetic oligonucleotide
  Sense strand starting at position 3491 of SEQ ID NO: 1560957
cucugacaucuuuauaugu

SEQ ID NO: 1636458 - RNA, 19 nt, Artificial Sequence
  Description of Artificial Sequence: Synthetic oligonucleotide
  Antisense strand to SEQ ID NO: 1636457
acauauaaagaugucagag

SEQ ID NO: 1636459 - RNA, 19 nt, Artificial Sequence
  Description of Artificial Sequence: Synthetic oligonucleotide
  Sense strand starting at position 3493 of SEQ ID NO: 1560957
cugacaucuuuauauguuu

SEQ ID NO: 1636460 - RNA, 19 nt, Artificial Sequence
  Description of Artificial Sequence: Synthetic oligonucleotide
  Antisense strand to SEQ ID NO: 1636459
aaacauauaaagaugucag

SEQ ID NO: 1636461 - RNA, 19 nt, Artificial Sequence
  Description of Artificial Sequence: Synthetic oligonucleotide
  Sense strand starting at position 3647 of SEQ ID NO: 1560957
acaggcauaugugaucaca

SEQ ID NO: 1636462 - RNA, 19 nt, Artificial Sequence
  Description of Artificial Sequence: Synthetic oligonucleotide
  Antisense strand to SEQ ID NO: 1636461
ugugaucacauaugccugu

SEQ ID NO: 1636463 - RNA, 19 nt, Artificial Sequence
  Description of Artificial Sequence: Synthetic oligonucleotide
  Sense strand starting at position 3724 of SEQ ID NO: 1560957
ccuugaauuccuggccgca

SEQ ID NO: 1636464 - RNA, 19 nt, Artificial Sequence
  Description of Artificial Sequence: Synthetic oligonucleotide
  Antisense strand to SEQ ID NO: 1636463
ugcggccaggaauucaagg

SEQ ID NO: 1636465 - RNA, 19 nt, Artificial Sequence
  Description of Artificial Sequence: Synthetic oligonucleotide
  Sense strand starting at position 3812 of SEQ ID NO: 1560957
auuccuguaucuuucugua

SEQ ID NO: 1636466 - RNA, 19 nt, Artificial Sequence
  Description of Artificial Sequence: Synthetic oligonucleotide
  Antisense strand to SEQ ID NO: 1636465
uacagaaagauacaggaau

SEQ ID NO: 1636467 - RNA, 19 nt, Artificial Sequence
  Description of Artificial Sequence: Synthetic oligonucleotide
  Sense strand starting at position 3814 of SEQ ID NO: 1560957
uccuguaucuuucuguaaa

SEQ ID NO: 1636468 - RNA, 19 nt, Artificial Sequence
  Description of Artificial Sequence: Synthetic oligonucleotide
  Antisense strand to SEQ ID NO: 1636467
uuuacagaaagauacagga

SEQ ID NO: 1636469 - RNA, 19 nt, Artificial Sequence
  Description of Artificial Sequence: Synthetic oligonucleotide
  Sense strand starting at position 3893 of SEQ ID NO: 1560957
uggaucugaugcuugugua

SEQ ID NO: 1636470 - RNA, 19 nt, Artificial Sequence
  Description of Artificial Sequence: Synthetic oligonucleotide
  Antisense strand to SEQ ID NO: 1636469
uacacaagcaucagaucca

SEQ ID NO: 1636471 - RNA, 19 nt, Artificial Sequence
  Description of Artificial Sequence: Synthetic oligonucleotide
  Sense strand starting at position 3894 of SEQ ID NO: 1560957
ggaucugaugcuuguguau

SEQ ID NO: 1636472 - RNA, 19 nt, Artificial Sequence
  Description of Artificial Sequence: Synthetic oligonucleotide
  Antisense strand to SEQ ID NO: 1636471
auacacaagcaucagaucc

SEQ ID NO: 1636473 - RNA, 19 nt, Artificial Sequence
  Description of Artificial Sequence: Synthetic oligonucleotide
  Sense strand starting at position 3896 of SEQ ID NO: 1560957
aucugaugcuuguguauga

SEQ ID NO: 1636474 - RNA, 19 nt, Artificial Sequence
  Description of Artificial Sequence: Synthetic oligonucleotide
  Antisense strand to SEQ ID NO: 1636473
ucauacacaagcaucagau

SEQ ID NO: 1636475 - RNA, 19 nt, Artificial Sequence
  Description of Artificial Sequence: Synthetic oligonucleotide
  Sense strand starting at position 3900 of SEQ ID NO: 1560957
gaugcuuguguaugacaca

SEQ ID NO: 1636476 - RNA, 19 nt, Artificial Sequence
  Description of Artificial Sequence: Synthetic oligonucleotide
  Antisense strand to SEQ ID NO: 1636475
ugugucauacacaagcauc

SEQ ID NO: 1636477 - RNA, 19 nt, Artificial Sequence
  Description of Artificial Sequence: Synthetic oligonucleotide
  Sense strand starting at position 3901 of SEQ ID NO: 1560957
augcuuguguaugacacau

SEQ ID NO: 1636478 - RNA, 19 nt, Artificial Sequence
  Description of Artificial Sequence: Synthetic oligonucleotide
  Antisense strand to SEQ ID NO: 1636477
augugucauacacaagcau

SEQ ID NO: 1636479 - RNA, 19 nt, Artificial Sequence
  Description of Artificial Sequence: Synthetic oligonucleotide
  Sense strand starting at position 3932 of SEQ ID NO: 1560957
gucucucacccuggaugua

SEQ ID NO: 1636480 - RNA, 19 nt, Artificial Sequence
  Description of Artificial Sequence: Synthetic oligonucleotide
  Antisense strand to SEQ ID NO: 1636479
uacauccagggugagagac

SEQ ID NO: 1636481 - RNA, 19 nt, Artificial Sequence
  Description of Artificial Sequence: Synthetic oligonucleotide
  Sense strand starting at position 3944 of SEQ ID NO: 1560957
ggauguauguaggugaauu

SEQ ID NO: 1636482 - RNA, 19 nt, Artificial Sequence
  Description of Artificial Sequence: Synthetic oligonucleotide
  Antisense strand to SEQ ID NO: 1636481
aauucaccuacauacaucc

SEQ ID NO: 1636483 - RNA, 19 nt, Artificial Sequence
  Description of Artificial Sequence: Synthetic oligonucleotide
  Sense strand starting at position 3978 of SEQ ID NO: 1560957
ggaggcuagucucuuggaa

SEQ ID NO: 1636484 - RNA, 19 nt, Artificial Sequence
  Description of Artificial Sequence: Synthetic oligonucleotide
  Antisense strand to SEQ ID NO: 1636483
uuccaagagacuagccucc

SEQ ID NO: 1636485 - RNA, 19 nt, Artificial Sequence
  Description of Artificial Sequence: Synthetic oligonucleotide
  Sense strand starting at position 3980 of SEQ ID NO: 1560957
aggcuagucucuuggaaau

SEQ ID NO: 1636486 - RNA, 19 nt, Artificial Sequence
  Description of Artificial Sequence: Synthetic oligonucleotide
  Antisense strand to SEQ ID NO: 1636485
auuuccaagagacuagccu

SEQ ID NO: 1636487 - RNA, 19 nt, Artificial Sequence
  Description of Artificial Sequence: Synthetic oligonucleotide
  Sense strand starting at position 3982 of SEQ ID NO: 1560957
gcuagucucuuggaaaucu

SEQ ID NO: 1636488 - RNA, 19 nt, Artificial Sequence
  Description of Artificial Sequence: Synthetic oligonucleotide
  Antisense strand to SEQ ID NO: 1636487
agauuuccaagagacuagc

SEQ ID NO: 1636489 - RNA, 19 nt, Artificial Sequence
  Description of Artificial Sequence: Synthetic oligonucleotide
  Sense strand starting at position 74 of SEQ ID NO: 1560958
gagcucucuucugcgcaaa

SEQ ID NO: 1636490 - RNA, 19 nt, Artificial Sequence
  Description of Artificial Sequence: Synthetic oligonucleotide
  Antisense strand to SEQ ID NO: 1636489
uuugcgcagaagagagcuc

SEQ ID NO: 1636491 - RNA, 19 nt, Artificial Sequence
  Description of Artificial Sequence: Synthetic oligonucleotide
  Sense strand starting at position 85 of SEQ ID NO: 1560958
ugcgcaaacccucgggaaa

SEQ ID NO: 1636492 - RNA, 19 nt, Artificial Sequence
  Description of Artificial Sequence: Synthetic oligonucleotide
  Antisense strand to SEQ ID NO: 1636491
uuucccgaggguuugcgca

SEQ ID NO: 1636493 - RNA, 19 nt, Artificial Sequence
  Description of Artificial Sequence: Synthetic oligonucleotide
  Sense strand starting at position 115 of SEQ ID NO: 1560958
cagaguuugucgcugggaa

SEQ ID NO: 1636494 - RNA, 19 nt, Artificial Sequence
  Description of Artificial Sequence: Synthetic oligonucleotide
  Antisense strand to SEQ ID NO: 1636493
uucccagcgacaaacucug

SEQ ID NO: 1636495 - RNA, 19 nt, Artificial Sequence
  Description of Artificial Sequence: Synthetic oligonucleotide
  Sense strand starting at position 116 of SEQ ID NO: 1560958
agaguuugucgcugggaau

SEQ ID NO: 1636496 - RNA, 19 nt, Artificial Sequence
  Description of Artificial Sequence: Synthetic oligonucleotide
  Antisense strand to SEQ ID NO: 1636495
auucccagcgacaaacucu

SEQ ID NO: 1636497 - RNA, 19 nt, Artificial Sequence
  Description of Artificial Sequence: Synthetic oligonucleotide
  Sense strand starting at position 117 of SEQ ID NO: 1560958
gaguuugucgcugggaaua

SEQ ID NO: 1636498 - RNA, 19 nt, Artificial Sequence
  Description of Artificial Sequence: Synthetic oligonucleotide
  Antisense strand to SEQ ID NO: 1636497
uauucccagcgacaaacuc

SEQ ID NO: 1636499 - RNA, 19 nt, Artificial Sequence
  Description of Artificial Sequence: Synthetic oligonucleotide
  Sense strand starting at position 319 of SEQ ID NO: 1560958
cugcuauggcucugaggac

SEQ ID NO: 1636500 - RNA, 19 nt, Artificial Sequence
  Description of Artificial Sequence: Synthetic oligonucleotide
  Antisense strand to SEQ ID NO: 1636499
guccucagagccauagcag

SEQ ID NO: 1636501 - RNA, 19 nt, Artificial Sequence
  Description of Artificial Sequence: Synthetic oligonucleotide
  Sense strand starting at position 342 of SEQ ID NO: 1560958
gcgcuaccagaggauagau

SEQ ID NO: 1636502 - RNA, 19 nt, Artificial Sequence
  Description of Artificial Sequence: Synthetic oligonucleotide
  Antisense strand to SEQ ID NO: 1636501
aucuauccucugguagcgc

SEQ ID NO: 1636503 - RNA, 19 nt, Artificial Sequence
  Description of Artificial Sequence: Synthetic oligonucleotide
  Sense strand starting at position 530 of SEQ ID NO: 1560958
ccguucuaucugggacuca

SEQ ID NO: 1636504 - RNA, 19 nt, Artificial Sequence
  Description of Artificial Sequence: Synthetic oligonucleotide
  Antisense strand to SEQ ID NO: 1636503
ugagucccagauagaacgg

SEQ ID NO: 1636505 - RNA, 19 nt, Artificial Sequence
  Description of Artificial Sequence: Synthetic oligonucleotide
  Sense strand starting at position 578 of SEQ ID NO: 1560958
gccuucgacccuugaucau

SEQ ID NO: 1636506 - RNA, 19 nt, Artificial Sequence
  Description of Artificial Sequence: Synthetic oligonucleotide
  Antisense strand to SEQ ID NO: 1636505
augaucaagggucgaaggc

SEQ ID NO: 1636507 - RNA, 19 nt, Artificial Sequence
  Description of Artificial Sequence: Synthetic oligonucleotide
  Sense strand starting at position 635 of SEQ ID NO: 1560958
cuguuuggaucucagaaga

SEQ ID NO: 1636508 - RNA, 19 nt, Artificial Sequence
  Description of Artificial Sequence: Synthetic oligonucleotide
  Antisense strand to SEQ ID NO: 1636507
ucuucugagauccaaacag

SEQ ID NO: 1636509 - RNA, 19 nt, Artificial Sequence
  Description of Artificial Sequence: Synthetic oligonucleotide
  Sense strand starting at position 654 of SEQ ID NO: 1560958
cguuccucugccuacaauu

SEQ ID NO: 1636510 - RNA, 19 nt, Artificial Sequence
  Description of Artificial Sequence: Synthetic oligonucleotide
  Antisense strand to SEQ ID NO: 1636509
aauuguaggcagaggaacg

SEQ ID NO: 1636511 - RNA, 19 nt, Artificial Sequence
  Description of Artificial Sequence: Synthetic oligonucleotide
  Sense strand starting at position 1081 of SEQ ID NO: 1560958
ccucuuccucgagaccuua

SEQ ID NO: 1636512 - RNA, 19 nt, Artificial Sequence
  Description of Artificial Sequence: Synthetic oligonucleotide
  Antisense strand to SEQ ID NO: 1636511
uaaggucucgaggaagagg

SEQ ID NO: 1636513 - RNA, 19 nt, Artificial Sequence
  Description of Artificial Sequence: Synthetic oligonucleotide
  Sense strand starting at position 1158 of SEQ ID NO: 1560958
cccagauccgggugaacua

SEQ ID NO: 1636514 - RNA, 19 nt, Artificial Sequence
  Description of Artificial Sequence: Synthetic oligonucleotide
  Antisense strand to SEQ ID NO: 1636513
uaguucacccggaucuggg

SEQ ID NO: 1636515 - RNA, 19 nt, Artificial Sequence
  Description of Artificial Sequence: Synthetic oligonucleotide
  Sense strand starting at position 1204 of SEQ ID NO: 1560958
aggccuuccugggauuuaa

SEQ ID NO: 1636516 - RNA, 19 nt, Artificial Sequence
  Description of Artificial Sequence: Synthetic oligonucleotide
  Antisense strand to SEQ ID NO: 1636515
uuaaaucccaggaaggccu

SEQ ID NO: 1636517 - RNA, 19 nt, Artificial Sequence
  Description of Artificial Sequence: Synthetic oligonucleotide
  Sense strand starting at position 1233 of SEQ ID NO: 1560958
gcgggaauccgagaaaugg

SEQ ID NO: 1636518 - RNA, 19 nt, Artificial Sequence
  Description of Artificial Sequence: Synthetic oligonucleotide
  Antisense strand to SEQ ID NO: 1636517
ccauuucucggauucccgc

SEQ ID NO: 1636519 - RNA, 19 nt, Artificial Sequence
  Description of Artificial Sequence: Synthetic oligonucleotide
  Sense strand starting at position 1337 of SEQ ID NO: 1560958
gucagagucuccucgagag

SEQ ID NO: 1636520 - RNA, 19 nt, Artificial Sequence
  Description of Artificial Sequence: Synthetic oligonucleotide
  Antisense strand to SEQ ID NO: 1636519
cucucgaggagacucugac

SEQ ID NO: 1636521 - RNA, 19 nt, Artificial Sequence
  Description of Artificial Sequence: Synthetic oligonucleotide
  Sense strand starting at position 1341 of SEQ ID NO: 1560958
gagucuccucgagagaauc

SEQ ID NO: 1636522 - RNA, 19 nt, Artificial Sequence
  Description of Artificial Sequence: Synthetic oligonucleotide
  Antisense strand to SEQ ID NO: 1636521
gauucucucgaggagacuc

SEQ ID NO: 1636523 - RNA, 19 nt, Artificial Sequence
  Description of Artificial Sequence: Synthetic oligonucleotide
  Sense strand starting at position 1351 of SEQ ID NO: 1560958
gagagaaucggacguguag

SEQ ID NO: 1636524 - RNA, 19 nt, Artificial Sequence
  Description of Artificial Sequence: Synthetic oligonucleotide
  Antisense strand to SEQ ID NO: 1636523
cuacacguccgauucucuc

SEQ ID NO: 1636525 - RNA, 19 nt, Artificial Sequence
  Description of Artificial Sequence: Synthetic oligonucleotide
  Sense strand starting at position 2053 of SEQ ID NO: 1560958
cccucugcucccgaguagu

SEQ ID NO: 1636526 - RNA, 19 nt, Artificial Sequence
  Description of Artificial Sequence: Synthetic oligonucleotide
  Antisense strand to SEQ ID NO: 1636525
acuacucgggagcagaggg

SEQ ID NO: 1636527 - RNA, 19 nt, Artificial Sequence
  Description of Artificial Sequence: Synthetic oligonucleotide
  Sense strand starting at position 2193 of SEQ ID NO: 1560958
gccggaguucucucggucu

SEQ ID NO: 1636528 - RNA, 19 nt, Artificial Sequence
  Description of Artificial Sequence: Synthetic oligonucleotide
  Antisense strand to SEQ ID NO: 1636527
agaccgagagaacuccggc

SEQ ID NO: 1636529 - RNA, 19 nt, Artificial Sequence
  Description of Artificial Sequence: Synthetic oligonucleotide
  Sense strand starting at position 2196 of SEQ ID NO: 1560958
ggaguucucucggucucuu

SEQ ID NO: 1636530 - RNA, 19 nt, Artificial Sequence
  Description of Artificial Sequence: Synthetic oligonucleotide
  Antisense strand to SEQ ID NO: 1636529
aagagaccgagagaacucc

SEQ ID NO: 1636531 - RNA, 19 nt, Artificial Sequence
  Description of Artificial Sequence: Synthetic oligonucleotide
  Sense strand starting at position 2394 of SEQ ID NO: 1560958
uacccucgugcguuucuaa

SEQ ID NO: 1636532 - RNA, 19 nt, Artificial Sequence
  Description of Artificial Sequence: Synthetic oligonucleotide
  Antisense strand to SEQ ID NO: 1636531
uuagaaacgcacgagggua

SEQ ID NO: 1636533 - RNA, 19 nt, Artificial Sequence
  Description of Artificial Sequence: Synthetic oligonucleotide
  Sense strand starting at position 2395 of SEQ ID NO: 1560958
acccucgugcguuucuaau

SEQ ID NO: 1636534 - RNA, 19 nt, Artificial Sequence
  Description of Artificial Sequence: Synthetic oligonucleotide
  Antisense strand to SEQ ID NO: 1636533
auuagaaacgcacgagggu

SEQ ID NO: 1636535 - RNA, 19 nt, Artificial Sequence
  Description of Artificial Sequence: Synthetic oligonucleotide
  Sense strand starting at position 2442 of SEQ ID NO: 1560958
acucguuucuuucuggauu

SEQ ID NO: 1636536 - RNA, 19 nt, Artificial Sequence
  Description of Artificial Sequence: Synthetic oligonucleotide
  Antisense strand to SEQ ID NO: 1636535
aauccagaaagaaacgagu

SEQ ID NO: 1636537 - RNA, 19 nt, Artificial Sequence
  Description of Artificial Sequence: Synthetic oligonucleotide
  Sense strand starting at position 2456 of SEQ ID NO: 1560958
ggauuucucugucucucuu

SEQ ID NO: 1636538 - RNA, 19 nt, Artificial Sequence
  Description of Artificial Sequence: Synthetic oligonucleotide
  Antisense strand to SEQ ID NO: 1636537
aagagagacagagaaaucc

SEQ ID NO: 1636539 - RNA, 19 nt, Artificial Sequence
  Description of Artificial Sequence: Synthetic oligonucleotide
  Sense strand starting at position 2512 of SEQ ID NO: 1560958
ccucucugucccuguauuu

SEQ ID NO: 1636540 - RNA, 19 nt, Artificial Sequence
  Description of Artificial Sequence: Synthetic oligonucleotide
  Antisense strand to SEQ ID NO: 1636539
aaauacagggacagagagg

SEQ ID NO: 1636541 - RNA, 19 nt, Artificial Sequence
  Description of Artificial Sequence: Synthetic oligonucleotide
  Sense strand starting at position 2579 of SEQ ID NO: 1560958
cuggucuuccuuugucagu

SEQ ID NO: 1636542 - RNA, 19 nt, Artificial Sequence
  Description of Artificial Sequence: Synthetic oligonucleotide
  Antisense strand to SEQ ID NO: 1636541
acugacaaaggaagaccag

SEQ ID NO: 1636543 - RNA, 19 nt, Artificial Sequence
  Description of Artificial Sequence: Synthetic oligonucleotide
  Sense strand starting at position 2581 of SEQ ID NO: 1560958
ggucuuccuuugucaguca

SEQ ID NO: 1636544 - RNA, 19 nt, Artificial Sequence
  Description of Artificial Sequence: Synthetic oligonucleotide
  Antisense strand to SEQ ID NO: 1636543
ugacugacaaaggaagacc

SEQ ID NO: 1636545 - RNA, 19 nt, Artificial Sequence
  Description of Artificial Sequence: Synthetic oligonucleotide
  Sense strand starting at position 2592 of SEQ ID NO: 1560958
gucagucacuguuucuuua

SEQ ID NO: 1636546 - RNA, 19 nt, Artificial Sequence
  Description of Artificial Sequence: Synthetic oligonucleotide
  Antisense strand to SEQ ID NO: 1636545
uaaagaaacagugacugac

SEQ ID NO: 1636547 - RNA, 19 nt, Artificial Sequence
  Description of Artificial Sequence: Synthetic oligonucleotide
  Sense strand starting at position 2595 of SEQ ID NO: 1560958
agucacuguuucuuuauuu

SEQ ID NO: 1636548 - RNA, 19 nt, Artificial Sequence
  Description of Artificial Sequence: Synthetic oligonucleotide
  Antisense strand to SEQ ID NO: 1636547
aaauaaagaaacagugacu

SEQ ID NO: 1636549 - RNA, 19 nt, Artificial Sequence
  Description of Artificial Sequence: Synthetic oligonucleotide
  Sense strand starting at position 2843 of SEQ ID NO: 1560958
ucucuauuucuguguaucu

SEQ ID NO: 1636550 - RNA, 19 nt, Artificial Sequence
  Description of Artificial Sequence: Synthetic oligonucleotide
  Antisense strand to SEQ ID NO: 1636549
agauacacagaaauagaga

SEQ ID NO: 1636551 - RNA, 19 nt, Artificial Sequence
  Description of Artificial Sequence: Synthetic oligonucleotide
  Sense strand starting at position 2852 of SEQ ID NO: 1560958
cuguguaucucugucucua

SEQ ID NO: 1636552 - RNA, 19 nt, Artificial Sequence
  Description of Artificial Sequence: Synthetic oligonucleotide
  Antisense strand to SEQ ID NO: 1636551
uagagacagagauacacag

SEQ ID NO: 1636553 - RNA, 19 nt, Artificial Sequence
  Description of Artificial Sequence: Synthetic oligonucleotide
  Sense strand starting at position 2916 of SEQ ID NO: 1560958
cuguguuucucugucucua

SEQ ID NO: 1636554 - RNA, 19 nt, Artificial Sequence
  Description of Artificial Sequence: Synthetic oligonucleotide
  Antisense strand to SEQ ID NO: 1636553
uagagacagagaaacacag

SEQ ID NO: 1636555 - RNA, 19 nt, Artificial Sequence
  Description of Artificial Sequence: Synthetic oligonucleotide
  Sense strand starting at position 3680 of SEQ ID NO: 1560958
ggcuguuaucccuccgcau

SEQ ID NO: 1636556 - RNA, 19 nt, Artificial Sequence
  Description of Artificial Sequence: Synthetic oligonucleotide
  Antisense strand to SEQ ID NO: 1636555
augcggagggauaacagcc

SEQ ID NO: 1636557 - RNA, 19 nt, Artificial Sequence
  Description of Artificial Sequence: Synthetic oligonucleotide
  Sense strand starting at position 3681 of SEQ ID NO: 1560958
gcuguuaucccuccgcauu

SEQ ID NO: 1636558 - RNA, 19 nt, Artificial Sequence
  Description of Artificial Sequence: Synthetic oligonucleotide
  Antisense strand to SEQ ID NO: 1636557
aaugcggagggauaacagc

SEQ ID NO: 1636559 - RNA, 19 nt, Artificial Sequence
  Description of Artificial Sequence: Synthetic oligonucleotide
  Sense strand starting at position 3692 of SEQ ID NO: 1560958
uccgcauucgagucuuagu

SEQ ID NO: 1636560 - RNA, 19 nt, Artificial Sequence
  Description of Artificial Sequence: Synthetic oligonucleotide
  Antisense strand to SEQ ID NO: 1636559
acuaagacucgaaugcgga

SEQ ID NO: 1636561 - RNA, 19 nt, Artificial Sequence
  Description of Artificial Sequence: Synthetic oligonucleotide
  Sense strand starting at position 3693 of SEQ ID NO: 1560958
ccgcauucgagucuuaguu

SEQ ID NO: 1636562 - RNA, 19 nt, Artificial Sequence
  Description of Artificial Sequence: Synthetic oligonucleotide
  Antisense strand to SEQ ID NO: 1636561
aacuaagacucgaaugcgg

SEQ ID NO: 1636563 - RNA, 19 nt, Artificial Sequence
  Description of Artificial Sequence: Synthetic oligonucleotide
  Sense strand starting at position 3694 of SEQ ID NO: 1560958
cgcauucgagucuuaguua

SEQ ID NO: 1636564 - RNA, 19 nt, Artificial Sequence
  Description of Artificial Sequence: Synthetic oligonucleotide
  Antisense strand to SEQ ID NO: 1636563
uaacuaagacucgaaugcg

SEQ ID NO: 1636565 - RNA, 19 nt, Artificial Sequence
  Description of Artificial Sequence: Synthetic oligonucleotide
  Sense strand starting at position 3697 of SEQ ID NO: 1560958
auucgagucuuaguuauga

SEQ ID NO: 1636566 - RNA, 19 nt, Artificial Sequence
  Description of Artificial Sequence: Synthetic oligonucleotide
  Antisense strand to SEQ ID NO: 1636565
ucauaacuaagacucgaau

SEQ ID NO: 1636567 - RNA, 19 nt, Artificial Sequence
  Description of Artificial Sequence: Synthetic oligonucleotide
  Sense strand starting at position 3699 of SEQ ID NO: 1560958
ucgagucuuaguuaugauc

SEQ ID NO: 1636568 - RNA, 19 nt, Artificial Sequence
  Description of Artificial Sequence: Synthetic oligonucleotide
  Antisense strand to SEQ ID NO: 1636567
gaucauaacuaagacucga

SEQ ID NO: 1636569 - RNA, 19 nt, Artificial Sequence
  Description of Artificial Sequence: Synthetic oligonucleotide
  Sense strand starting at position 46 of SEQ ID NO: 1560959
aaucuaaguggaugaggua

SEQ ID NO: 1636570 - RNA, 19 nt, Artificial Sequence
  Description of Artificial Sequence: Synthetic oligonucleotide
  Antisense strand to SEQ ID NO: 1636569
uaccucauccacuuagauu

SEQ ID NO: 1636571 - RNA, 19 nt, Artificial Sequence
  Description of Artificial Sequence: Synthetic oligonucleotide
  Sense strand starting at position 68 of SEQ ID NO: 1560959
uugggacucaggcaguauu

SEQ ID NO: 1636572 - RNA, 19 nt, Artificial Sequence
  Description of Artificial Sequence: Synthetic oligonucleotide
  Antisense strand to SEQ ID NO: 1636571
aauacugccugagucccaa

SEQ ID NO: 1636573 - RNA, 19 nt, Artificial Sequence
  Description of Artificial Sequence: Synthetic oligonucleotide
  Sense strand starting at position 377 of SEQ ID NO: 1560959
gcgccuggccuuuaaauga

SEQ ID NO: 1636574 - RNA, 19 nt, Artificial Sequence
  Description of Artificial Sequence: Synthetic oligonucleotide
  Antisense strand to SEQ ID NO: 1636573
ucauuuaaaggccaggcgc

SEQ ID NO: 1636575 - RNA, 19 nt, Artificial Sequence
  Description of Artificial Sequence: Synthetic oligonucleotide
  Sense strand starting at position 400 of SEQ ID NO: 1560959
ucaugcuuucuggaagaca

SEQ ID NO: 1636576 - RNA, 19 nt, Artificial Sequence
  Description of Artificial Sequence: Synthetic oligonucleotide
  Antisense strand to SEQ ID NO: 1636575
ugucuuccagaaagcauga

SEQ ID NO: 1636577 - RNA, 19 nt, Artificial Sequence
  Description of Artificial Sequence: Synthetic oligonucleotide
  Sense strand starting at position 521 of SEQ ID NO: 1560959
ucaaacuucucaggugauu

SEQ ID NO: 1636578 - RNA, 19 nt, Artificial Sequence
  Description of Artificial Sequence: Synthetic oligonucleotide
  Antisense strand to SEQ ID NO: 1636577
aaucaccugagaaguuuga

SEQ ID NO: 1636579 - RNA, 19 nt, Artificial Sequence
  Description of Artificial Sequence: Synthetic oligonucleotide
  Sense strand starting at position 608 of SEQ ID NO: 1560959
acuuauuaucuguaggauu

SEQ ID NO: 1636580 - RNA, 19 nt, Artificial Sequence
  Description of Artificial Sequence: Synthetic oligonucleotide
  Antisense strand to SEQ ID NO: 1636579
aauccuacagauaauaagu

SEQ ID NO: 1636581 - RNA, 19 nt, Artificial Sequence
  Description of Artificial Sequence: Synthetic oligonucleotide
  Sense strand starting at position 616 of SEQ ID NO: 1560959
ucuguaggauuugugcaau

SEQ ID NO: 1636582 - RNA, 19 nt, Artificial Sequence
  Description of Artificial Sequence: Synthetic oligonucleotide
  Antisense strand to SEQ ID NO: 1636581
auugcacaaauccuacaga

SEQ ID NO: 1636583 - RNA, 19 nt, Artificial Sequence
  Description of Artificial Sequence: Synthetic oligonucleotide
  Sense strand starting at position 622 of SEQ ID NO: 1560959
ggauuugugcaauguguau

SEQ ID NO: 1636584 - RNA, 19 nt, Artificial Sequence
  Description of Artificial Sequence: Synthetic oligonucleotide
  Antisense strand to SEQ ID NO: 1636583
auacacauugcacaaaucc

SEQ ID NO: 1636585 - RNA, 19 nt, Artificial Sequence
  Description of Artificial Sequence: Synthetic oligonucleotide
  Sense strand starting at position 664 of SEQ ID NO: 1560959
ccaucugcauaaugaagau

SEQ ID NO: 1636586 - RNA, 19 nt, Artificial Sequence
  Description of Artificial Sequence: Synthetic oligonucleotide
  Antisense strand to SEQ ID NO: 1636585
aucuucauuaugcagaugg

SEQ ID NO: 1636587 - RNA, 19 nt, Artificial Sequence
  Description of Artificial Sequence: Synthetic oligonucleotide
  Sense strand starting at position 673 of SEQ ID NO: 1560959
uaaugaagaucauauuggu

SEQ ID NO: 1636588 - RNA, 19 nt, Artificial Sequence
  Description of Artificial Sequence: Synthetic oligonucleotide
  Antisense strand to SEQ ID NO: 1636587
accaauaugaucuucauua

SEQ ID NO: 1636589 - RNA, 19 nt, Artificial Sequence
  Description of Artificial Sequence: Synthetic oligonucleotide
  Sense strand starting at position 775 of SEQ ID NO: 1560959
ggugguuuguuaccagcau

SEQ ID NO: 1636590 - RNA, 19 nt, Artificial Sequence
  Description of Artificial Sequence: Synthetic oligonucleotide
  Antisense strand to SEQ ID NO: 1636589
augcugguaacaaaccacc

SEQ ID NO: 1636591 - RNA, 19 nt, Artificial Sequence
  Description of Artificial Sequence: Synthetic oligonucleotide
  Sense strand starting at position 795 of SEQ ID NO: 1560959
gagucuagaguccgauuaa

SEQ ID NO: 1636592 - RNA, 19 nt, Artificial Sequence
  Description of Artificial Sequence: Synthetic oligonucleotide
  Antisense strand to SEQ ID NO: 1636591
uuaaucggacucuagacuc

SEQ ID NO: 1636593 - RNA, 19 nt, Artificial Sequence
  Description of Artificial Sequence: Synthetic oligonucleotide
  Sense strand starting at position 796 of SEQ ID NO: 1560959
agucuagaguccgauuaac

SEQ ID NO: 1636594 - RNA, 19 nt, Artificial Sequence
  Description of Artificial Sequence: Synthetic oligonucleotide
  Antisense strand to SEQ ID NO: 1636593
guuaaucggacucuagacu

SEQ ID NO: 1636595 - RNA, 19 nt, Artificial Sequence
  Description of Artificial Sequence: Synthetic oligonucleotide
  Sense strand starting at position 837 of SEQ ID NO: 1560959
ccucuuagcuucuuuggga

SEQ ID NO: 1636596 - RNA, 19 nt, Artificial Sequence
  Description of Artificial Sequence: Synthetic oligonucleotide
  Antisense strand to SEQ ID NO: 1636595
ucccaaagaagcuaagagg

SEQ ID NO: 1636597 - RNA, 19 nt, Artificial Sequence
  Description of Artificial Sequence: Synthetic oligonucleotide
  Sense strand starting at position 838 of SEQ ID NO: 1560959
cucuuagcuucuuugggau

SEQ ID NO: 1636598 - RNA, 19 nt, Artificial Sequence
  Description of Artificial Sequence: Synthetic oligonucleotide
  Antisense strand to SEQ ID NO: 1636597
aucccaaagaagcuaagag

SEQ ID NO: 1636599 - RNA, 19 nt, Artificial Sequence
  Description of Artificial Sequence: Synthetic oligonucleotide
  Sense strand starting at position 1193 of SEQ ID NO: 1560959
aucggagacuucuaggaua

SEQ ID NO: 1636600 - RNA, 19 nt, Artificial Sequence
  Description of Artificial Sequence: Synthetic oligonucleotide
  Antisense strand to SEQ ID NO: 1636599
uauccuagaagucuccgau

SEQ ID NO: 1636601 - RNA, 19 nt, Artificial Sequence
  Description of Artificial Sequence: Synthetic oligonucleotide
  Sense strand starting at position 1196 of SEQ ID NO: 1560959
ggagacuucuaggauaaau

SEQ ID NO: 1636602 - RNA, 19 nt, Artificial Sequence
  Description of Artificial Sequence: Synthetic oligonucleotide
  Antisense strand to SEQ ID NO: 1636601
auuuauccuagaagucucc

SEQ ID NO: 1636603 - RNA, 19 nt, Artificial Sequence
  Description of Artificial Sequence: Synthetic oligonucleotide
  Sense strand starting at position 1207 of SEQ ID NO: 1560959
ggauaaauccaaggcucag

SEQ ID NO: 1636604 - RNA, 19 nt, Artificial Sequence
  Description of Artificial Sequence: Synthetic oligonucleotide
  Antisense strand to SEQ ID NO: 1636603
cugagccuuggauuuaucc

SEQ ID NO: 1636605 - RNA, 19 nt, Artificial Sequence
  Description of Artificial Sequence: Synthetic oligonucleotide
  Sense strand starting at position 1395 of SEQ ID NO: 1560959
ggaagcuacuguugcagaa

SEQ ID NO: 1636606 - RNA, 19 nt, Artificial Sequence
  Description of Artificial Sequence: Synthetic oligonucleotide
  Antisense strand to SEQ ID NO: 1636605
uucugcaacaguagcuucc

SEQ ID NO: 1636607 - RNA, 19 nt, Artificial Sequence
  Description of Artificial Sequence: Synthetic oligonucleotide
  Sense strand starting at position 1424 of SEQ ID NO: 1560959
gccuuauuccuuugguaag

SEQ ID NO: 1636608 - RNA, 19 nt, Artificial Sequence
  Description of Artificial Sequence: Synthetic oligonucleotide
  Antisense strand to SEQ ID NO: 1636607
cuuaccaaaggaauaaggc

SEQ ID NO: 1636609 - RNA, 19 nt, Artificial Sequence
  Description of Artificial Sequence: Synthetic oligonucleotide
  Sense strand starting at position 1442 of SEQ ID NO: 1560959
gggucaugcgcucagauga

SEQ ID NO: 1636610 - RNA, 19 nt, Artificial Sequence
  Description of Artificial Sequence: Synthetic oligonucleotide
  Antisense strand to SEQ ID NO: 1636609
ucaucugagcgcaugaccc

SEQ ID NO: 1636611 - RNA, 19 nt, Artificial Sequence
  Description of Artificial Sequence: Synthetic oligonucleotide
  Sense strand starting at position 1503 of SEQ ID NO: 1560959
acgucaacccuggguaaca

SEQ ID NO: 1636612 - RNA, 19 nt, Artificial Sequence
  Description of Artificial Sequence: Synthetic oligonucleotide
  Antisense strand to SEQ ID NO: 1636611
uguuacccaggguugacgu

SEQ ID NO: 1636613 - RNA, 19 nt, Artificial Sequence
  Description of Artificial Sequence: Synthetic oligonucleotide
  Sense strand starting at position 2049 of SEQ ID NO: 1560959
augaacagcguuugaucau

SEQ ID NO: 1636614 - RNA, 19 nt, Artificial Sequence
  Description of Artificial Sequence: Synthetic oligonucleotide
  Antisense strand to SEQ ID NO: 1636613
augaucaaacgcuguucau

SEQ ID NO: 1636615 - RNA, 19 nt, Artificial Sequence
  Description of Artificial Sequence: Synthetic oligonucleotide
  Sense strand starting at position 2140 of SEQ ID NO: 1560959
ucggaaagaucaguagaua

SEQ ID NO: 1636616 - RNA, 19 nt, Artificial Sequence
  Description of Artificial Sequence: Synthetic oligonucleotide
  Antisense strand to SEQ ID NO: 1636615
uaucuacugaucuuuccga

SEQ ID NO: 1636617 - RNA, 19 nt, Artificial Sequence
  Description of Artificial Sequence: Synthetic oligonucleotide
  Sense strand starting at position 2148 of SEQ ID NO: 1560959
aucaguagauacgucagua

SEQ ID NO: 1636618 - RNA, 19 nt, Artificial Sequence
  Description of Artificial Sequence: Synthetic oligonucleotide
  Antisense strand to SEQ ID NO: 1636617
uacugacguaucuacugau

SEQ ID NO: 1636619 - RNA, 19 nt, Artificial Sequence
  Description of Artificial Sequence: Synthetic oligonucleotide
  Sense strand starting at position 2160 of SEQ ID NO: 1560959
gucaguaacgcgucccaga

SEQ ID NO: 1636620 - RNA, 19 nt, Artificial Sequence
  Description of Artificial Sequence: Synthetic oligonucleotide
  Antisense strand to SEQ ID NO: 1636619
ucugggacgcguuacugac

SEQ ID NO: 1636621 - RNA, 19 nt, Artificial Sequence
  Description of Artificial Sequence: Synthetic oligonucleotide
  Sense strand starting at position 2265 of SEQ ID NO: 1560959
uuggaaauagcuugucauu

SEQ ID NO: 1636622 - RNA, 19 nt, Artificial Sequence
  Description of Artificial Sequence: Synthetic oligonucleotide
  Antisense strand to SEQ ID NO: 1636621
aaugacaagcuauuuccaa

SEQ ID NO: 1636623 - RNA, 19 nt, Artificial Sequence
  Description of Artificial Sequence: Synthetic oligonucleotide
  Sense strand starting at position 2310 of SEQ ID NO: 1560959
caagaaacgguuugaauca

SEQ ID NO: 1636624 - RNA, 19 nt, Artificial Sequence
  Description of Artificial Sequence: Synthetic oligonucleotide
  Antisense strand to SEQ ID NO: 1636623
ugauucaaaccguuucuug

SEQ ID NO: 1636625 - RNA, 19 nt, Artificial Sequence
  Description of Artificial Sequence: Synthetic oligonucleotide
  Sense strand starting at position 2583 of SEQ ID NO: 1560959
cguagugaccaucauguga

SEQ ID NO: 1636626 - RNA, 19 nt, Artificial Sequence
  Description of Artificial Sequence: Synthetic oligonucleotide
  Antisense strand to SEQ ID NO: 1636625
ucacaugauggucacuacg

SEQ ID NO: 1636627 - RNA, 19 nt, Artificial Sequence
  Description of Artificial Sequence: Synthetic oligonucleotide
  Sense strand starting at position 2630 of SEQ ID NO: 1560959
gagguugaggguggauauu

SEQ ID NO: 1636628 - RNA, 19 nt, Artificial Sequence
  Description of Artificial Sequence: Synthetic oligonucleotide
  Antisense strand to SEQ ID NO: 1636627
aauauccacccucaaccuc

SEQ ID NO: 1636629 - RNA, 19 nt, Artificial Sequence
  Description of Artificial Sequence: Synthetic oligonucleotide
  Sense strand starting at position 2730 of SEQ ID NO: 1560959
uccugaugaguuugagaac

SEQ ID NO: 1636630 - RNA, 19 nt, Artificial Sequence
  Description of Artificial Sequence: Synthetic oligonucleotide
  Antisense strand to SEQ ID NO: 1636629
guucucaaacucaucagga

SEQ ID NO: 1636631 - RNA, 19 nt, Artificial Sequence
  Description of Artificial Sequence: Synthetic oligonucleotide
  Sense strand starting at position 2787 of SEQ ID NO: 1560959
gggacagcuuuaucagaua

SEQ ID NO: 1636632 - RNA, 19 nt, Artificial Sequence
  Description of Artificial Sequence: Synthetic oligonucleotide
  Antisense strand to SEQ ID NO: 1636631
uaucugauaaagcuguccc

SEQ ID NO: 1636633 - RNA, 19 nt, Artificial Sequence
  Description of Artificial Sequence: Synthetic oligonucleotide
  Sense strand starting at position 3064 of SEQ ID NO: 1560959
guggcucagguuuguaaau

SEQ ID NO: 1636634 - RNA, 19 nt, Artificial Sequence
  Description of Artificial Sequence: Synthetic oligonucleotide
  Antisense strand to SEQ ID NO: 1636633
auuuacaaaccugagccac

SEQ ID NO: 1636635 - RNA, 19 nt, Artificial Sequence
  Description of Artificial Sequence: Synthetic oligonucleotide
  Sense strand starting at position 3475 of SEQ ID NO: 1560959
cggauaacgaacgagucau

SEQ ID NO: 1636636 - RNA, 19 nt, Artificial Sequence
  Description of Artificial Sequence: Synthetic oligonucleotide
  Antisense strand to SEQ ID NO: 1636635
augacucguucguuauccg

SEQ ID NO: 1636637 - RNA, 19 nt, Artificial Sequence
  Description of Artificial Sequence: Synthetic oligonucleotide
  Sense strand starting at position 3481 of SEQ ID NO: 1560959
acgaacgagucauugacau

SEQ ID NO: 1636638 - RNA, 19 nt, Artificial Sequence
  Description of Artificial Sequence: Synthetic oligonucleotide
  Antisense strand to SEQ ID NO: 1636637
augucaaugacucguucgu

SEQ ID NO: 1636639 - RNA, 19 nt, Artificial Sequence
  Description of Artificial Sequence: Synthetic oligonucleotide
  Sense strand starting at position 3485 of SEQ ID NO: 1560959
acgagucauugacaugauu

SEQ ID NO: 1636640 - RNA, 19 nt, Artificial Sequence
  Description of Artificial Sequence: Synthetic oligonucleotide
  Antisense strand to SEQ ID NO: 1636639
aaucaugucaaugacucgu

SEQ ID NO: 1636641 - RNA, 19 nt, Artificial Sequence
  Description of Artificial Sequence: Synthetic oligonucleotide
  Sense strand starting at position 3512 of SEQ ID NO: 1560959
uuauuagugcagcagauau

SEQ ID NO: 1636642 - RNA, 19 nt, Artificial Sequence
  Description of Artificial Sequence: Synthetic oligonucleotide
  Antisense strand to SEQ ID NO: 1636641
auaucugcugcacuaauaa

SEQ ID NO: 1636643 - RNA, 19 nt, Artificial Sequence
  Description of Artificial Sequence: Synthetic oligonucleotide
  Sense strand starting at position 3514 of SEQ ID NO: 1560959
auuagugcagcagauauua

SEQ ID NO: 1636644 - RNA, 19 nt, Artificial Sequence
  Description of Artificial Sequence: Synthetic oligonucleotide
  Antisense strand to SEQ ID NO: 1636643
uaauaucugcugcacuaau

SEQ ID NO: 1636645 - RNA, 19 nt, Artificial Sequence
  Description of Artificial Sequence: Synthetic oligonucleotide
  Sense strand starting at position 3534 of SEQ ID NO: 1560959
auugaaugcuuauguauca

SEQ ID NO: 1636646 - RNA, 19 nt, Artificial Sequence
  Description of Artificial Sequence: Synthetic oligonucleotide
  Antisense strand to SEQ ID NO: 1636645
ugauacauaagcauucaau

SEQ ID NO: 1636647 - RNA, 19 nt, Artificial Sequence
  Description of Artificial Sequence: Synthetic oligonucleotide
  Sense strand starting at position 3546 of SEQ ID NO: 1560959
uguaucagacacugcuuaa

SEQ ID NO: 1636648 - RNA, 19 nt, Artificial Sequence
  Description of Artificial Sequence: Synthetic oligonucleotide
  Antisense strand to SEQ ID NO: 1636647
uuaagcagugucugauaca

SEQ ID NO: 1636649 - RNA, 19 nt, Artificial Sequence
  Description of Artificial Sequence: Synthetic oligonucleotide
  Sense strand starting at position 41 of SEQ ID NO: 1560960
uugccaugguucuuuauca

SEQ ID NO: 1636650 - RNA, 19 nt, Artificial Sequence
  Description of Artificial Sequence: Synthetic oligonucleotide
  Antisense strand to SEQ ID NO: 1636649
ugauaaagaaccauggcaa

SEQ ID NO: 1636651 - RNA, 19 nt, Artificial Sequence
  Description of Artificial Sequence: Synthetic oligonucleotide
  Sense strand starting at position 42 of SEQ ID NO: 1560960
ugccaugguucuuuaucaa

SEQ ID NO: 1636652 - RNA, 19 nt, Artificial Sequence
  Description of Artificial Sequence: Synthetic oligonucleotide
  Antisense strand to SEQ ID NO: 1636651
uugauaaagaaccauggca

SEQ ID NO: 1636653 - RNA, 19 nt, Artificial Sequence
  Description of Artificial Sequence: Synthetic oligonucleotide
  Sense strand starting at position 46 of SEQ ID NO: 1560960
augguucuuuaucaagaaa

SEQ ID NO: 1636654 - RNA, 19 nt, Artificial Sequence
  Description of Artificial Sequence: Synthetic oligonucleotide
  Antisense strand to SEQ ID NO: 1636653
uuucuugauaaagaaccau

SEQ ID NO: 1636655 - RNA, 19 nt, Artificial Sequence
  Description of Artificial Sequence: Synthetic oligonucleotide
  Sense strand starting at position 221 of SEQ ID NO: 1560960
guggcaagcaguuguaauc

SEQ ID NO: 1636656 - RNA, 19 nt, Artificial Sequence
  Description of Artificial Sequence: Synthetic oligonucleotide
  Antisense strand to SEQ ID NO: 1636655
gauuacaacugcuugccac

SEQ ID NO: 1636657 - RNA, 19 nt, Artificial Sequence
  Description of Artificial Sequence: Synthetic oligonucleotide
  Sense strand starting at position 292 of SEQ ID NO: 1560960
gguugcagugacuggauau

SEQ ID NO: 1636658 - RNA, 19 nt, Artificial Sequence
  Description of Artificial Sequence: Synthetic oligonucleotide
  Antisense strand to SEQ ID NO: 1636657
auauccagucacugcaacc

SEQ ID NO: 1636659 - RNA, 19 nt, Artificial Sequence
  Description of Artificial Sequence: Synthetic oligonucleotide
  Sense strand starting at position 293 of SEQ ID NO: 1560960
guugcagugacuggauauc

SEQ ID NO: 1636660 - RNA, 19 nt, Artificial Sequence
  Description of Artificial Sequence: Synthetic oligonucleotide
  Antisense strand to SEQ ID NO: 1636659
gauauccagucacugcaac

SEQ ID NO: 1636661 - RNA, 19 nt, Artificial Sequence
  Description of Artificial Sequence: Synthetic oligonucleotide
  Sense strand starting at position 447 of SEQ ID NO: 1560960
uugagaguagccuaaccaa

SEQ ID NO: 1636662 - RNA, 19 nt, Artificial Sequence
  Description of Artificial Sequence: Synthetic oligonucleotide
  Antisense strand to SEQ ID NO: 1636661
uugguuaggcuacucucaa

SEQ ID NO: 1636663 - RNA, 19 nt, Artificial Sequence
  Description of Artificial Sequence: Synthetic oligonucleotide
  Sense strand starting at position 675 of SEQ ID NO: 1560960
aaagaaggauauugaggau

SEQ ID NO: 1636664 - RNA, 19 nt, Artificial Sequence
  Description of Artificial Sequence: Synthetic oligonucleotide
  Antisense strand to SEQ ID NO: 1636663
auccucaauauccuucuuu

SEQ ID NO: 1636665 - RNA, 19 nt, Artificial Sequence
  Description of Artificial Sequence: Synthetic oligonucleotide
  Sense strand starting at position 678 of SEQ ID NO: 1560960
gaaggauauugaggauaug

SEQ ID NO: 1636666 - RNA, 19 nt, Artificial Sequence
  Description of Artificial Sequence: Synthetic oligonucleotide
  Antisense strand to SEQ ID NO: 1636665
cauauccucaauauccuuc

SEQ ID NO: 1636667 - RNA, 19 nt, Artificial Sequence
  Description of Artificial Sequence: Synthetic oligonucleotide
  Sense strand starting at position 723 of SEQ ID NO: 1560960
ucuuguugccaccauuauu

SEQ ID NO: 1636668 - RNA, 19 nt, Artificial Sequence
  Description of Artificial Sequence: Synthetic oligonucleotide
  Antisense strand to SEQ ID NO: 1636667
aauaaugguggcaacaaga

SEQ ID NO: 1636669 - RNA, 19 nt, Artificial Sequence
  Description of Artificial Sequence: Synthetic oligonucleotide
  Sense strand starting at position 913 of SEQ ID NO: 1560960
gucuuaauuugcuaaugag

SEQ ID NO: 1636670 - RNA, 19 nt, Artificial Sequence
  Description of Artificial Sequence: Synthetic oligonucleotide
  Antisense strand to SEQ ID NO: 1636669
cucauuagcaaauuaagac

SEQ ID NO: 1636671 - RNA, 19 nt, Artificial Sequence
  Description of Artificial Sequence: Synthetic oligonucleotide
  Sense strand starting at position 916 of SEQ ID NO: 1560960
uuaauuugcuaaugagaga

SEQ ID NO: 1636672 - RNA, 19 nt, Artificial Sequence
  Description of Artificial Sequence: Synthetic oligonucleotide
  Antisense strand to SEQ ID NO: 1636671
ucucucauuagcaaauuaa

SEQ ID NO: 1636673 - RNA, 19 nt, Artificial Sequence
  Description of Artificial Sequence: Synthetic oligonucleotide
  Sense strand starting at position 986 of SEQ ID NO: 1560960
cugacaucaucucauaugu

SEQ ID NO: 1636674 - RNA, 19 nt, Artificial Sequence
  Description of Artificial Sequence: Synthetic oligonucleotide
  Antisense strand to SEQ ID NO: 1636673
acauaugagaugaugucag

SEQ ID NO: 1636675 - RNA, 19 nt, Artificial Sequence
  Description of Artificial Sequence: Synthetic oligonucleotide
  Sense strand starting at position 995 of SEQ ID NO: 1560960
ucucauauguacuugucaa

SEQ ID NO: 1636676 - RNA, 19 nt, Artificial Sequence
  Description of Artificial Sequence: Synthetic oligonucleotide
  Antisense strand to SEQ ID NO: 1636675
uugacaaguacauaugaga

SEQ ID NO: 1636677 - RNA, 19 nt, Artificial Sequence
  Description of Artificial Sequence: Synthetic oligonucleotide
  Sense strand starting at position 999 of SEQ ID NO: 1560960
auauguacuugucaacaau

SEQ ID NO: 1636678 - RNA, 19 nt, Artificial Sequence
  Description of Artificial Sequence: Synthetic oligonucleotide
  Antisense strand to SEQ ID NO: 1636677
auuguugacaaguacauau

SEQ ID NO: 1636679 - RNA, 19 nt, Artificial Sequence
  Description of Artificial Sequence: Synthetic oligonucleotide
  Sense strand starting at position 1002 of SEQ ID NO: 1560960
uguacuugucaacaauucu

SEQ ID NO: 1636680 - RNA, 19 nt, Artificial Sequence
  Description of Artificial Sequence: Synthetic oligonucleotide
  Antisense strand to SEQ ID NO: 1636679
agaauuguugacaaguaca

SEQ ID NO: 1636681 - RNA, 19 nt, Artificial Sequence
  Description of Artificial Sequence: Synthetic oligonucleotide
  Sense strand starting at position 1046 of SEQ ID NO: 1560960
ccgcuuugaguugguucaa

SEQ ID NO: 1636682 - RNA, 19 nt, Artificial Sequence
  Description of Artificial Sequence: Synthetic oligonucleotide
  Antisense strand to SEQ ID NO: 1636681
uugaaccaacucaaagcgg

SEQ ID NO: 1636683 - RNA, 19 nt, Artificial Sequence
  Description of Artificial Sequence: Synthetic oligonucleotide
  Sense strand starting at position 1076 of SEQ ID NO: 1560960
cgaggagugaccugcucaa

SEQ ID NO: 1636684 - RNA, 19 nt, Artificial Sequence
  Description of Artificial Sequence: Synthetic oligonucleotide
  Antisense strand to SEQ ID NO: 1636683
uugagcaggucacuccucg

SEQ ID NO: 1636685 - RNA, 19 nt, Artificial Sequence
  Description of Artificial Sequence: Synthetic oligonucleotide
  Sense strand starting at position 1498 of SEQ ID NO: 1560960
ggaagaaagugucagguua

SEQ ID NO: 1636686 - RNA, 19 nt, Artificial Sequence
  Description of Artificial Sequence: Synthetic oligonucleotide
  Antisense strand to SEQ ID NO: 1636685
uaaccugacacuuucuucc

SEQ ID NO: 1636687 - RNA, 19 nt, Artificial Sequence
  Description of Artificial Sequence: Synthetic oligonucleotide
  Sense strand starting at position 1536 of SEQ ID NO: 1560960
gggcccuucuugggagaca

SEQ ID NO: 1636688 - RNA, 19 nt, Artificial Sequence
  Description of Artificial Sequence: Synthetic oligonucleotide
  Antisense strand to SEQ ID NO: 1636687
ugucucccaagaagggccc

SEQ ID NO: 1636689 - RNA, 19 nt, Artificial Sequence
  Description of Artificial Sequence: Synthetic oligonucleotide
  Sense strand starting at position 1551 of SEQ ID NO: 1560960
gacagaucuggccagcuuu

SEQ ID NO: 1636690 - RNA, 19 nt, Artificial Sequence
  Description of Artificial Sequence: Synthetic oligonucleotide
  Antisense strand to SEQ ID NO: 1636689
aaagcuggccagaucuguc

SEQ ID NO: 1636691 - RNA, 19 nt, Artificial Sequence
  Description of Artificial Sequence: Synthetic oligonucleotide
  Sense strand starting at position 1594 of SEQ ID NO: 1560960
aguacaaggccuggucauu

SEQ ID NO: 1636692 - RNA, 19 nt, Artificial Sequence
  Description of Artificial Sequence: Synthetic oligonucleotide
  Antisense strand to SEQ ID NO: 1636691
aaugaccaggccuuguacu

SEQ ID NO: 1636693 - RNA, 19 nt, Artificial Sequence
  Description of Artificial Sequence: Synthetic oligonucleotide
  Sense strand starting at position 1634 of SEQ ID NO: 1560960
ucgauugacuuugggagga

SEQ ID NO: 1636694 - RNA, 19 nt, Artificial Sequence
  Description of Artificial Sequence: Synthetic oligonucleotide
  Antisense strand to SEQ ID NO: 1636693
uccucccaaagucaaucga

SEQ ID NO: 1636695 - RNA, 19 nt, Artificial Sequence
  Description of Artificial Sequence: Synthetic oligonucleotide
  Sense strand starting at position 1636 of SEQ ID NO: 1560960
gauugacuuugggaggagu

SEQ ID NO: 1636696 - RNA, 19 nt, Artificial Sequence
  Description of Artificial Sequence: Synthetic oligonucleotide
  Antisense strand to SEQ ID NO: 1636695
acuccucccaaagucaauc

SEQ ID NO: 1636697 - RNA, 19 nt, Artificial Sequence
  Description of Artificial Sequence: Synthetic oligonucleotide
  Sense strand starting at position 2145 of SEQ ID NO: 1560960
acacgcuaaagcgaagaau

SEQ ID NO: 1636698 - RNA, 19 nt, Artificial Sequence
  Description of Artificial Sequence: Synthetic oligonucleotide
  Antisense strand to SEQ ID NO: 1636697
auucuucgcuuuagcgugu

SEQ ID NO: 1636699 - RNA, 19 nt, Artificial Sequence
  Description of Artificial Sequence: Synthetic oligonucleotide
  Sense strand starting at position 2154 of SEQ ID NO: 1560960
agcgaagaaucagaauuga

SEQ ID NO: 1636700 - RNA, 19 nt, Artificial Sequence
  Description of Artificial Sequence: Synthetic oligonucleotide
  Antisense strand to SEQ ID NO: 1636699
ucaauucugauucuucgcu

SEQ ID NO: 1636701 - RNA, 19 nt, Artificial Sequence
  Description of Artificial Sequence: Synthetic oligonucleotide
  Sense strand starting at position 2274 of SEQ ID NO: 1560960
gcauaaagacuuuguaaag

SEQ ID NO: 1636702 - RNA, 19 nt, Artificial Sequence
  Description of Artificial Sequence: Synthetic oligonucleotide
  Antisense strand to SEQ ID NO: 1636701
cuuuacaaagucuuuaugc

SEQ ID NO: 1636703 - RNA, 19 nt, Artificial Sequence
  Description of Artificial Sequence: Synthetic oligonucleotide
  Sense strand starting at position 3355 of SEQ ID NO: 1560960
cuaugauugggcuacugua

SEQ ID NO: 1636704 - RNA, 19 nt, Artificial Sequence
  Description of Artificial Sequence: Synthetic oligonucleotide
  Antisense strand to SEQ ID NO: 1636703
uacaguagcccaaucauag

SEQ ID NO: 1636705 - RNA, 19 nt, Artificial Sequence
  Description of Artificial Sequence: Synthetic oligonucleotide
  Sense strand starting at position 3494 of SEQ ID NO: 1560960
gagcgcuauugucccagaa

SEQ ID NO: 1636706 - RNA, 19 nt, Artificial Sequence
  Description of Artificial Sequence: Synthetic oligonucleotide
  Antisense strand to SEQ ID NO: 1636705
uucugggacaauagcgcuc

SEQ ID NO: 1636707 - RNA, 19 nt, Artificial Sequence
  Description of Artificial Sequence: Synthetic oligonucleotide
  Sense strand starting at position 3496 of SEQ ID NO: 1560960
gcgcuauugucccagaaga

SEQ ID NO: 1636708 - RNA, 19 nt, Artificial Sequence
  Description of Artificial Sequence: Synthetic oligonucleotide
  Antisense strand to SEQ ID NO: 1636707
ucuucugggacaauagcgc

SEQ ID NO: 1636709 - RNA, 19 nt, Artificial Sequence
  Description of Artificial Sequence: Synthetic oligonucleotide
  Sense strand starting at position 3498 of SEQ ID NO: 1560960
gcuauugucccagaagaug

SEQ ID NO: 1636710 - RNA, 19 nt, Artificial Sequence
  Description of Artificial Sequence: Synthetic oligonucleotide
  Antisense strand to SEQ ID NO: 1636709
caucuucugggacaauagc

SEQ ID NO: 1636711 - RNA, 19 nt, Artificial Sequence
  Description of Artificial Sequence: Synthetic oligonucleotide
  Sense strand starting at position 259 of SEQ ID NO: 1560961
gauaauuaguaaugagaca

SEQ ID NO: 1636712 - RNA, 19 nt, Artificial Sequence
  Description of Artificial Sequence: Synthetic oligonucleotide
  Antisense strand to SEQ ID NO: 1636711
ugucucauuacuaauuauc

SEQ ID NO: 1636713 - RNA, 19 nt, Artificial Sequence
  Description of Artificial Sequence: Synthetic oligonucleotide
  Sense strand starting at position 616 of SEQ ID NO: 1560961
ccacaaggguuguagggau

SEQ ID NO: 1636714 - RNA, 19 nt, Artificial Sequence
  Description of Artificial Sequence: Synthetic oligonucleotide
  Antisense strand to SEQ ID NO: 1636713
aucccuacaacccuugugg

SEQ ID NO: 1636715 - RNA, 19 nt, Artificial Sequence
  Description of Artificial Sequence: Synthetic oligonucleotide
  Sense strand starting at position 2455 of SEQ ID NO: 1560961
gaaacuaaggccugagcau

SEQ ID NO: 1636716 - RNA, 19 nt, Artificial Sequence
  Description of Artificial Sequence: Synthetic oligonucleotide
  Antisense strand to SEQ ID NO: 1636715
augcucaggccuuaguuuc

SEQ ID NO: 1636717 - RNA, 19 nt, Artificial Sequence
  Description of Artificial Sequence: Synthetic oligonucleotide
  Sense strand starting at position 2590 of SEQ ID NO: 1560961
ccugcuuagccucaguuua

SEQ ID NO: 1636718 - RNA, 19 nt, Artificial Sequence
  Description of Artificial Sequence: Synthetic oligonucleotide
  Antisense strand to SEQ ID NO: 1636717
uaaacugaggcuaagcagg

SEQ ID NO: 1636719 - RNA, 19 nt, Artificial Sequence
  Description of Artificial Sequence: Synthetic oligonucleotide
  Sense strand starting at position 2592 of SEQ ID NO: 1560961
ugcuuagccucaguuuacu

SEQ ID NO: 1636720 - RNA, 19 nt, Artificial Sequence
  Description of Artificial Sequence: Synthetic oligonucleotide
  Antisense strand to SEQ ID NO: 1636719
aguaaacugaggcuaagca

SEQ ID NO: 1636721 - RNA, 19 nt, Artificial Sequence
  Description of Artificial Sequence: Synthetic oligonucleotide
  Sense strand starting at position 3338 of SEQ ID NO: 1560961
gaguaagacuacucugucu

SEQ ID NO: 1636722 - RNA, 19 nt, Artificial Sequence
  Description of Artificial Sequence: Synthetic oligonucleotide
  Antisense strand to SEQ ID NO: 1636721
agacagaguagucuuacuc

SEQ ID NO: 1636723 - RNA, 19 nt, Artificial Sequence
  Description of Artificial Sequence: Synthetic oligonucleotide
  Sense strand starting at position 3340 of SEQ ID NO: 1560961
guaagacuacucugucuca

SEQ ID NO: 1636724 - RNA, 19 nt, Artificial Sequence
  Description of Artificial Sequence: Synthetic oligonucleotide
  Antisense strand to SEQ ID NO: 1636723
ugagacagaguagucuuac

SEQ ID NO: 1636725 - RNA, 19 nt, Artificial Sequence
  Description of Artificial Sequence: Synthetic oligonucleotide
  Sense strand starting at position 3726 of SEQ ID NO: 1560961
augagaaacuguggaugga

SEQ ID NO: 1636726 - RNA, 19 nt, Artificial Sequence
  Description of Artificial Sequence: Synthetic oligonucleotide
  Antisense strand to SEQ ID NO: 1636725
uccauccacaguuucucau

SEQ ID NO: 1636727 - RNA, 19 nt, Artificial Sequence
  Description of Artificial Sequence: Synthetic oligonucleotide
  Sense strand starting at position 3752 of SEQ ID NO: 1560961
aagcgugcacugugagauu

SEQ ID NO: 1636728 - RNA, 19 nt, Artificial Sequence
  Description of Artificial Sequence: Synthetic oligonucleotide
  Antisense strand to SEQ ID NO: 1636727
aaucucacagugcacgcuu

SEQ ID NO: 1636729 - RNA, 19 nt, Artificial Sequence
  Description of Artificial Sequence: Synthetic oligonucleotide
  Sense strand starting at position 3761 of SEQ ID NO: 1560961
cugugagauuccuguagau

SEQ ID NO: 1636730 - RNA, 19 nt, Artificial Sequence
  Description of Artificial Sequence: Synthetic oligonucleotide
  Antisense strand to SEQ ID NO: 1636729
aucuacaggaaucucacag

SEQ ID NO: 1636731 - RNA, 19 nt, Artificial Sequence
  Description of Artificial Sequence: Synthetic oligonucleotide
  Sense strand starting at position 3774 of SEQ ID NO: 1560961
guagauaaaugugcaaaga

SEQ ID NO: 1636732 - RNA, 19 nt, Artificial Sequence
  Description of Artificial Sequence: Synthetic oligonucleotide
  Antisense strand to SEQ ID NO: 1636731
ucuuugcacauuuaucuac

SEQ ID NO: 1636733 - RNA, 19 nt, Artificial Sequence
  Description of Artificial Sequence: Synthetic oligonucleotide
  Sense strand starting at position 3811 of SEQ ID NO: 1560961
agagauguaucaggaguga

SEQ ID NO: 1636734 - RNA, 19 nt, Artificial Sequence
  Description of Artificial Sequence: Synthetic oligonucleotide
  Antisense strand to SEQ ID NO: 1636733
ucacuccugauacaucucu

SEQ ID NO: 1636735 - RNA, 19 nt, Artificial Sequence
  Description of Artificial Sequence: Synthetic oligonucleotide
  Sense strand starting at position 3888 of SEQ ID NO: 1560961
aaggguagaugcucaaaga

SEQ ID NO: 1636736 - RNA, 19 nt, Artificial Sequence
  Description of Artificial Sequence: Synthetic oligonucleotide
  Antisense strand to SEQ ID NO: 1636735
ucuuugagcaucuacccuu

SEQ ID NO: 1636737 - RNA, 19 nt, Artificial Sequence
  Description of Artificial Sequence: Synthetic oligonucleotide
  Sense strand starting at position 3916 of SEQ ID NO: 1560961
aacauuuauucgugagaga

SEQ ID NO: 1636738 - RNA, 19 nt, Artificial Sequence
  Description of Artificial Sequence: Synthetic oligonucleotide
  Antisense strand to SEQ ID NO: 1636737
ucucucacgaauaaauguu

SEQ ID NO: 1636739 - RNA, 19 nt, Artificial Sequence
  Description of Artificial Sequence: Synthetic oligonucleotide
  Sense strand starting at position 3948 of SEQ ID NO: 1560961
agagaacuuccugggccuu

SEQ ID NO: 1636740 - RNA, 19 nt, Artificial Sequence
  Description of Artificial Sequence: Synthetic oligonucleotide
  Antisense strand to SEQ ID NO: 1636739
aaggcccaggaaguucucu

SEQ ID NO: 1636741 - RNA, 19 nt, Artificial Sequence
  Description of Artificial Sequence: Synthetic oligonucleotide
  Sense strand starting at position 845 of SEQ ID NO: 1560962
cuaccuaggccuuauguga

SEQ ID NO: 1636742 - RNA, 19 nt, Artificial Sequence
  Description of Artificial Sequence: Synthetic oligonucleotide
  Antisense strand to SEQ ID NO: 1636741
ucacauaaggccuagguag

SEQ ID NO: 1636743 - RNA, 19 nt, Artificial Sequence
  Description of Artificial Sequence: Synthetic oligonucleotide
  Sense strand starting at position 940 of SEQ ID NO: 1560962
gcacguguuggaagaaguu

SEQ ID NO: 1636744 - RNA, 19 nt, Artificial Sequence
  Description of Artificial Sequence: Synthetic oligonucleotide
  Antisense strand to SEQ ID NO: 1636743
aacuucuuccaacacgugc

SEQ ID NO: 1636745 - RNA, 19 nt, Artificial Sequence
  Description of Artificial Sequence: Synthetic oligonucleotide
  Sense strand starting at position 949 of SEQ ID NO: 1560962
ggaagaaguugguccaaca

SEQ ID NO: 1636746 - RNA, 19 nt, Artificial Sequence
  Description of Artificial Sequence: Synthetic oligonucleotide
  Antisense strand to SEQ ID NO: 1636745
uguuggaccaacuucuucc

SEQ ID NO: 1636747 - RNA, 19 nt, Artificial Sequence
  Description of Artificial Sequence: Synthetic oligonucleotide
  Sense strand starting at position 1006 of SEQ ID NO: 1560962
cacgcuuccuaagugguaa

SEQ ID NO: 1636748 - RNA, 19 nt, Artificial Sequence
  Description of Artificial Sequence: Synthetic oligonucleotide
  Antisense strand to SEQ ID NO: 1636747
uuaccacuuaggaagcgug

SEQ ID NO: 1636749 - RNA, 19 nt, Artificial Sequence
  Description of Artificial Sequence: Synthetic oligonucleotide
  Sense strand starting at position 1061 of SEQ ID NO: 1560962
acuuauaaacugugucuuu

SEQ ID NO: 1636750 - RNA, 19 nt, Artificial Sequence
  Description of Artificial Sequence: Synthetic oligonucleotide
  Antisense strand to SEQ ID NO: 1636749
aaagacacaguuuauaagu

SEQ ID NO: 1636751 - RNA, 19 nt, Artificial Sequence
  Description of Artificial Sequence: Synthetic oligonucleotide
  Sense strand starting at position 1093 of SEQ ID NO: 1560962
ucaguuucccaacguguaa

SEQ ID NO: 1636752 - RNA, 19 nt, Artificial Sequence
  Description of Artificial Sequence: Synthetic oligonucleotide
  Antisense strand to SEQ ID NO: 1636751
uuacacguugggaaacuga

SEQ ID NO: 1636753 - RNA, 19 nt, Artificial Sequence
  Description of Artificial Sequence: Synthetic oligonucleotide
  Sense strand starting at position 1113 of SEQ ID NO: 1560962
aagagaggcugguuaguau

SEQ ID NO: 1636754 - RNA, 19 nt, Artificial Sequence
  Description of Artificial Sequence: Synthetic oligonucleotide
  Antisense strand to SEQ ID NO: 1636753
auacuaaccagccucucuu

SEQ ID NO: 1636755 - RNA, 19 nt, Artificial Sequence
  Description of Artificial Sequence: Synthetic oligonucleotide
  Sense strand starting at position 1158 of SEQ ID NO: 1560962
uuuaguuaauucggguaaa

SEQ ID NO: 1636756 - RNA, 19 nt, Artificial Sequence
  Description of Artificial Sequence: Synthetic oligonucleotide
  Antisense strand to SEQ ID NO: 1636755
uuuacccgaauuaacuaaa

SEQ ID NO: 1636757 - RNA, 19 nt, Artificial Sequence
  Description of Artificial Sequence: Synthetic oligonucleotide
  Sense strand starting at position 1159 of SEQ ID NO: 1560962
uuaguuaauucggguaaag

SEQ ID NO: 1636758 - RNA, 19 nt, Artificial Sequence
  Description of Artificial Sequence: Synthetic oligonucleotide
  Antisense strand to SEQ ID NO: 1636757
cuuuacccgaauuaacuaa

SEQ ID NO: 1636759 - RNA, 19 nt, Artificial Sequence
  Description of Artificial Sequence: Synthetic oligonucleotide
  Sense strand starting at position 1161 of SEQ ID NO: 1560962
aguuaauucggguaaagug

SEQ ID NO: 1636760 - RNA, 19 nt, Artificial Sequence
  Description of Artificial Sequence: Synthetic oligonucleotide
  Antisense strand to SEQ ID NO: 1636759
cacuuuacccgaauuaacu

SEQ ID NO: 1636761 - RNA, 19 nt, Artificial Sequence
  Description of Artificial Sequence: Synthetic oligonucleotide
  Sense strand starting at position 1169 of SEQ ID NO: 1560962
cggguaaagugcucagaaa

SEQ ID NO: 1636762 - RNA, 19 nt, Artificial Sequence
  Description of Artificial Sequence: Synthetic oligonucleotide
  Antisense strand to SEQ ID NO: 1636761
uuucugagcacuuuacccg

SEQ ID NO: 1636763 - RNA, 19 nt, Artificial Sequence
  Description of Artificial Sequence: Synthetic oligonucleotide
  Sense strand starting at position 1202 of SEQ ID NO: 1560962
cuuagcacuguugagaguu

SEQ ID NO: 1636764 - RNA, 19 nt, Artificial Sequence
  Description of Artificial Sequence: Synthetic oligonucleotide
  Antisense strand to SEQ ID NO: 1636763
aacucucaacagugcuaag

SEQ ID NO: 1636765 - RNA, 19 nt, Artificial Sequence
  Description of Artificial Sequence: Synthetic oligonucleotide
  Sense strand starting at position 1210 of SEQ ID NO: 1560962
uguugagaguucugaguga

SEQ ID NO: 1636766 - RNA, 19 nt, Artificial Sequence
  Description of Artificial Sequence: Synthetic oligonucleotide
  Antisense strand to SEQ ID NO: 1636765
ucacucagaacucucaaca

SEQ ID NO: 1636767 - RNA, 19 nt, Artificial Sequence
  Description of Artificial Sequence: Synthetic oligonucleotide
  Sense strand starting at position 1233 of SEQ ID NO: 1560962
auggaauucuugcugcaca

SEQ ID NO: 1636768 - RNA, 19 nt, Artificial Sequence
  Description of Artificial Sequence: Synthetic oligonucleotide
  Antisense strand to SEQ ID NO: 1636767
ugugcagcaagaauuccau

SEQ ID NO: 1636769 - RNA, 19 nt, Artificial Sequence
  Description of Artificial Sequence: Synthetic oligonucleotide
  Sense strand starting at position 1401 of SEQ ID NO: 1560962
caggacaagccucgugaga

SEQ ID NO: 1636770 - RNA, 19 nt, Artificial Sequence
  Description of Artificial Sequence: Synthetic oligonucleotide
  Antisense strand to SEQ ID NO: 1636769
ucucacgaggcuuguccug

SEQ ID NO: 1636771 - RNA, 19 nt, Artificial Sequence
  Description of Artificial Sequence: Synthetic oligonucleotide
  Sense strand starting at position 1534 of SEQ ID NO: 1560962
cccgccaaaucuugggaaa

SEQ ID NO: 1636772 - RNA, 19 nt, Artificial Sequence
  Description of Artificial Sequence: Synthetic oligonucleotide
  Antisense strand to SEQ ID NO: 1636771
uuucccaagauuuggcggg

SEQ ID NO: 1636773 - RNA, 19 nt, Artificial Sequence
  Description of Artificial Sequence: Synthetic oligonucleotide
  Sense strand starting at position 1535 of SEQ ID NO: 1560962
ccgccaaaucuugggaaag

SEQ ID NO: 1636774 - RNA, 19 nt, Artificial Sequence
  Description of Artificial Sequence: Synthetic oligonucleotide
  Antisense strand to SEQ ID NO: 1636773
cuuucccaagauuuggcgg

SEQ ID NO: 1636775 - RNA, 19 nt, Artificial Sequence
  Description of Artificial Sequence: Synthetic oligonucleotide
  Sense strand starting at position 2038 of SEQ ID NO: 1560962
agcgaagccaaucagagau

SEQ ID NO: 1636776 - RNA, 19 nt, Artificial Sequence
  Description of Artificial Sequence: Synthetic oligonucleotide
  Antisense strand to SEQ ID NO: 1636775
aucucugauuggcuucgcu

SEQ ID NO: 1636777 - RNA, 19 nt, Artificial Sequence
  Description of Artificial Sequence: Synthetic oligonucleotide
  Sense strand starting at position 2044 of SEQ ID NO: 1560962
gccaaucagagauggaagu

SEQ ID NO: 1636778 - RNA, 19 nt, Artificial Sequence
  Description of Artificial Sequence: Synthetic oligonucleotide
  Antisense strand to SEQ ID NO: 1636777
acuuccaucucugauuggc

SEQ ID NO: 1636779 - RNA, 19 nt, Artificial Sequence
  Description of Artificial Sequence: Synthetic oligonucleotide
  Sense strand starting at position 2058 of SEQ ID NO: 1560962
gaaguagugcucugagggu

SEQ ID NO: 1636780 - RNA, 19 nt, Artificial Sequence
  Description of Artificial Sequence: Synthetic oligonucleotide
  Antisense strand to SEQ ID NO: 1636779
acccucagagcacuacuuc

SEQ ID NO: 1636781 - RNA, 19 nt, Artificial Sequence
  Description of Artificial Sequence: Synthetic oligonucleotide
  Sense strand starting at position 2106 of SEQ ID NO: 1560962
cucgguguccuggagaaag

SEQ ID NO: 1636782 - RNA, 19 nt, Artificial Sequence
  Description of Artificial Sequence: Synthetic oligonucleotide
  Antisense strand to SEQ ID NO: 1636781
cuuucuccaggacaccgag

SEQ ID NO: 1636783 - RNA, 19 nt, Artificial Sequence
  Description of Artificial Sequence: Synthetic oligonucleotide
  Sense strand starting at position 2239 of SEQ ID NO: 1560962
uaaugagaggcuugauuga

SEQ ID NO: 1636784 - RNA, 19 nt, Artificial Sequence
  Description of Artificial Sequence: Synthetic oligonucleotide
  Antisense strand to SEQ ID NO: 1636783
ucaaucaagccucucauua

SEQ ID NO: 1636785 - RNA, 19 nt, Artificial Sequence
  Description of Artificial Sequence: Synthetic oligonucleotide
  Sense strand starting at position 2246 of SEQ ID NO: 1560962
aggcuugauugagaaccua

SEQ ID NO: 1636786 - RNA, 19 nt, Artificial Sequence
  Description of Artificial Sequence: Synthetic oligonucleotide
  Antisense strand to SEQ ID NO: 1636785
uagguucucaaucaagccu

SEQ ID NO: 1636787 - RNA, 19 nt, Artificial Sequence
  Description of Artificial Sequence: Synthetic oligonucleotide
  Sense strand starting at position 2301 of SEQ ID NO: 1560962
gggcuacguccagguaaug

SEQ ID NO: 1636788 - RNA, 19 nt, Artificial Sequence
  Description of Artificial Sequence: Synthetic oligonucleotide
  Antisense strand to SEQ ID NO: 1636787
cauuaccuggacguagccc

SEQ ID NO: 1636789 - RNA, 19 nt, Artificial Sequence
  Description of Artificial Sequence: Synthetic oligonucleotide
  Sense strand starting at position 2454 of SEQ ID NO: 1560962
uugggacucacuggguuau

SEQ ID NO: 1636790 - RNA, 19 nt, Artificial Sequence
  Description of Artificial Sequence: Synthetic oligonucleotide
  Antisense strand to SEQ ID NO: 1636789
auaacccagugagucccaa

SEQ ID NO: 1636791 - RNA, 19 nt, Artificial Sequence
  Description of Artificial Sequence: Synthetic oligonucleotide
  Sense strand starting at position 2458 of SEQ ID NO: 1560962
gacucacuggguuauccuu

SEQ ID NO: 1636792 - RNA, 19 nt, Artificial Sequence
  Description of Artificial Sequence: Synthetic oligonucleotide
  Antisense strand to SEQ ID NO: 1636791
aaggauaacccagugaguc

SEQ ID NO: 1636793 - RNA, 19 nt, Artificial Sequence
  Description of Artificial Sequence: Synthetic oligonucleotide
  Sense strand starting at position 2691 of SEQ ID NO: 1560962
ggucgcuggugccuguaaa

SEQ ID NO: 1636794 - RNA, 19 nt, Artificial Sequence
  Description of Artificial Sequence: Synthetic oligonucleotide
  Antisense strand to SEQ ID NO: 1636793
uuuacaggcaccagcgacc

SEQ ID NO: 1636795 - RNA, 19 nt, Artificial Sequence
  Description of Artificial Sequence: Synthetic oligonucleotide
  Sense strand starting at position 2775 of SEQ ID NO: 1560962
ccgagauugcaccaagugu

SEQ ID NO: 1636796 - RNA, 19 nt, Artificial Sequence
  Description of Artificial Sequence: Synthetic oligonucleotide
  Antisense strand to SEQ ID NO: 1636795
acacuuggugcaaucucgg

SEQ ID NO: 1636797 - RNA, 19 nt, Artificial Sequence
  Description of Artificial Sequence: Synthetic oligonucleotide
  Sense strand starting at position 2960 of SEQ ID NO: 1560962
acugcuguauugucaggua

SEQ ID NO: 1636798 - RNA, 19 nt, Artificial Sequence
  Description of Artificial Sequence: Synthetic oligonucleotide
  Antisense strand to SEQ ID NO: 1636797
uaccugacaauacagcagu

SEQ ID NO: 1636799 - RNA, 19 nt, Artificial Sequence
  Description of Artificial Sequence: Synthetic oligonucleotide
  Sense strand starting at position 3001 of SEQ ID NO: 1560962
gacaauacaguauguguuu

SEQ ID NO: 1636800 - RNA, 19 nt, Artificial Sequence
  Description of Artificial Sequence: Synthetic oligonucleotide
  Antisense strand to SEQ ID NO: 1636799
aaacacauacuguauuguc

SEQ ID NO: 1636801 - RNA, 19 nt, Artificial Sequence
  Description of Artificial Sequence: Synthetic oligonucleotide
  Sense strand starting at position 3059 of SEQ ID NO: 1560962
acauguacccagugaaaua

SEQ ID NO: 1636802 - RNA, 19 nt, Artificial Sequence
  Description of Artificial Sequence: Synthetic oligonucleotide
  Antisense strand to SEQ ID NO: 1636801
uauuucacuggguacaugu

SEQ ID NO: 1636803 - RNA, 19 nt, Artificial Sequence
  Description of Artificial Sequence: Synthetic oligonucleotide
  Sense strand starting at position 3388 of SEQ ID NO: 1560962
ggccaauuaugagaguuaa

SEQ ID NO: 1636804 - RNA, 19 nt, Artificial Sequence
  Description of Artificial Sequence: Synthetic oligonucleotide
  Antisense strand to SEQ ID NO: 1636803
uuaacucucauaauuggcc

SEQ ID NO: 1636805 - RNA, 19 nt, Artificial Sequence
  Description of Artificial Sequence: Synthetic oligonucleotide
  Sense strand starting at position 3444 of SEQ ID NO: 1560962
guguguagugagaguaucu

SEQ ID NO: 1636806 - RNA, 19 nt, Artificial Sequence
  Description of Artificial Sequence: Synthetic oligonucleotide
  Antisense strand to SEQ ID NO: 1636805
agauacucucacuacacac

SEQ ID NO: 1636807 - RNA, 19 nt, Artificial Sequence
  Description of Artificial Sequence: Synthetic oligonucleotide
  Sense strand starting at position 3468 of SEQ ID NO: 1560962
guacuuucuuggcaaauuu

SEQ ID NO: 1636808 - RNA, 19 nt, Artificial Sequence
  Description of Artificial Sequence: Synthetic oligonucleotide
  Antisense strand to SEQ ID NO: 1636807
aaauuugccaagaaaguac

SEQ ID NO: 1636809 - RNA, 19 nt, Artificial Sequence
  Description of Artificial Sequence: Synthetic oligonucleotide
  Sense strand starting at position 3799 of SEQ ID NO: 1560962
aucauucgagccugggaaa

SEQ ID NO: 1636810 - RNA, 19 nt, Artificial Sequence
  Description of Artificial Sequence: Synthetic oligonucleotide
  Antisense strand to SEQ ID NO: 1636809
uuucccaggcucgaaugau

SEQ ID NO: 1636811 - RNA, 19 nt, Artificial Sequence
  Description of Artificial Sequence: Synthetic oligonucleotide
  Sense strand starting at position 3800 of SEQ ID NO: 1560962
ucauucgagccugggaaau

SEQ ID NO: 1636812 - RNA, 19 nt, Artificial Sequence
  Description of Artificial Sequence: Synthetic oligonucleotide
  Antisense strand to SEQ ID NO: 1636811
auuucccaggcucgaauga

SEQ ID NO: 1636813 - RNA, 19 nt, Artificial Sequence
  Description of Artificial Sequence: Synthetic oligonucleotide
  Sense strand starting at position 3913 of SEQ ID NO: 1560962
acccauugaucuguuuguu

SEQ ID NO: 1636814 - RNA, 19 nt, Artificial Sequence
  Description of Artificial Sequence: Synthetic oligonucleotide
  Antisense strand to SEQ ID NO: 1636813
aacaaacagaucaaugggu

SEQ ID NO: 1636815 - RNA, 19 nt, Artificial Sequence
  Description of Artificial Sequence: Synthetic oligonucleotide
  Sense strand starting at position 3949 of SEQ ID NO: 1560962
agcauaucagccugaugac

SEQ ID NO: 1636816 - RNA, 19 nt, Artificial Sequence
  Description of Artificial Sequence: Synthetic oligonucleotide
  Antisense strand to SEQ ID NO: 1636815
gucaucaggcugauaugcu

SEQ ID NO: 1636817 - RNA, 19 nt, Artificial Sequence
  Description of Artificial Sequence: Synthetic oligonucleotide
  Sense strand starting at position 3950 of SEQ ID NO: 1560962
gcauaucagccugaugaca

SEQ ID NO: 1636818 - RNA, 19 nt, Artificial Sequence
  Description of Artificial Sequence: Synthetic oligonucleotide
  Antisense strand to SEQ ID NO: 1636817
ugucaucaggcugauaugc

SEQ ID NO: 1636819 - RNA, 19 nt, Artificial Sequence
  Description of Artificial Sequence: Synthetic oligonucleotide
  Sense strand starting at position 3952 of SEQ ID NO: 1560962
auaucagccugaugacauc

SEQ ID NO: 1636820 - RNA, 19 nt, Artificial Sequence
  Description of Artificial Sequence: Synthetic oligonucleotide
  Antisense strand to SEQ ID NO: 1636819
gaugucaucaggcugauau

SEQ ID NO: 1636821 - RNA, 19 nt, Artificial Sequence
  Description of Artificial Sequence: Synthetic oligonucleotide
  Sense strand starting at position 75 of SEQ ID NO: 1560963
ggaagaaugguuugagccu

SEQ ID NO: 1636822 - RNA, 19 nt, Artificial Sequence
  Description of Artificial Sequence: Synthetic oligonucleotide
  Antisense strand to SEQ ID NO: 1636821
aggcucaaaccauucuucc

SEQ ID NO: 1636823 - RNA, 19 nt, Artificial Sequence
  Description of Artificial Sequence: Synthetic oligonucleotide
  Sense strand starting at position 262 of SEQ ID NO: 1560963
ggauuaggugcuuauggga

SEQ ID NO: 1636824 - RNA, 19 nt, Artificial Sequence
  Description of Artificial Sequence: Synthetic oligonucleotide
  Antisense strand to SEQ ID NO: 1636823
ucccauaagcaccuaaucc

SEQ ID NO: 1636825 - RNA, 19 nt, Artificial Sequence
  Description of Artificial Sequence: Synthetic oligonucleotide
  Sense strand starting at position 267 of SEQ ID NO: 1560963
aggugcuuaugggagaaca

SEQ ID NO: 1636826 - RNA, 19 nt, Artificial Sequence
  Description of Artificial Sequence: Synthetic oligonucleotide
  Antisense strand to SEQ ID NO: 1636825
uguucucccauaagcaccu

SEQ ID NO: 1636827 - RNA, 19 nt, Artificial Sequence
  Description of Artificial Sequence: Synthetic oligonucleotide
  Sense strand starting at position 313 of SEQ ID NO: 1560963
gugggcaccuuacugauaa

SEQ ID NO: 1636828 - RNA, 19 nt, Artificial Sequence
  Description of Artificial Sequence: Synthetic oligonucleotide
  Antisense strand to SEQ ID NO: 1636827
uuaucaguaaggugcccac

SEQ ID NO: 1636829 - RNA, 19 nt, Artificial Sequence
  Description of Artificial Sequence: Synthetic oligonucleotide
  Sense strand starting at position 314 of SEQ ID NO: 1560963
ugggcaccuuacugauaaa

SEQ ID NO: 1636830 - RNA, 19 nt, Artificial Sequence
  Description of Artificial Sequence: Synthetic oligonucleotide
  Antisense strand to SEQ ID NO: 1636829
uuuaucaguaaggugccca

SEQ ID NO: 1636831 - RNA, 19 nt, Artificial Sequence
  Description of Artificial Sequence: Synthetic oligonucleotide
  Sense strand starting at position 328 of SEQ ID NO: 1560963
auaaaugcccaguguguaa

SEQ ID NO: 1636832 - RNA, 19 nt, Artificial Sequence
  Description of Artificial Sequence: Synthetic oligonucleotide
  Antisense strand to SEQ ID NO: 1636831
uuacacacugggcauuuau

SEQ ID NO: 1636833 - RNA, 19 nt, Artificial Sequence
  Description of Artificial Sequence: Synthetic oligonucleotide
  Sense strand starting at position 472 of SEQ ID NO: 1560963
ugucguugcgauagauggu

SEQ ID NO: 1636834 - RNA, 19 nt, Artificial Sequence
  Description of Artificial Sequence: Synthetic oligonucleotide
  Antisense strand to SEQ ID NO: 1636833
accaucuaucgcaacgaca

SEQ ID NO: 1636835 - RNA, 19 nt, Artificial Sequence
  Description of Artificial Sequence: Synthetic oligonucleotide
  Sense strand starting at position 534 of SEQ ID NO: 1560963
gugaacgagucgucagcau

SEQ ID NO: 1636836 - RNA, 19 nt, Artificial Sequence
  Description of Artificial Sequence: Synthetic oligonucleotide
  Antisense strand to SEQ ID NO: 1636835
augcugacgacucguucac

SEQ ID NO: 1636837 - RNA, 19 nt, Artificial Sequence
  Description of Artificial Sequence: Synthetic oligonucleotide
  Sense strand starting at position 584 of SEQ ID NO: 1560963
gcuguugccgaugaugaga

SEQ ID NO: 1636838 - RNA, 19 nt, Artificial Sequence
  Description of Artificial Sequence: Synthetic oligonucleotide
  Antisense strand to SEQ ID NO: 1636837
ucucaucaucggcaacagc

SEQ ID NO: 1636839 - RNA, 19 nt, Artificial Sequence
  Description of Artificial Sequence: Synthetic oligonucleotide
  Sense strand starting at position 589 of SEQ ID NO: 1560963
ugccgaugaugagaaucuu

SEQ ID NO: 1636840 - RNA, 19 nt, Artificial Sequence
  Description of Artificial Sequence: Synthetic oligonucleotide
  Antisense strand to SEQ ID NO: 1636839
aagauucucaucaucggca

SEQ ID NO: 1636841 - RNA, 19 nt, Artificial Sequence
  Description of Artificial Sequence: Synthetic oligonucleotide
  Sense strand starting at position 595 of SEQ ID NO: 1560963
ugaugagaaucuugaacau

SEQ ID NO: 1636842 - RNA, 19 nt, Artificial Sequence
  Description of Artificial Sequence: Synthetic oligonucleotide
  Antisense strand to SEQ ID NO: 1636841
auguucaagauucucauca

SEQ ID NO: 1636843 - RNA, 19 nt, Artificial Sequence
  Description of Artificial Sequence: Synthetic oligonucleotide
  Sense strand starting at position 607 of SEQ ID NO: 1560963
ugaacauguagucgaaguu

SEQ ID NO: 1636844 - RNA, 19 nt, Artificial Sequence
  Description of Artificial Sequence: Synthetic oligonucleotide
  Antisense strand to SEQ ID NO: 1636843
aacuucgacuacauguuca

SEQ ID NO: 1636845 - RNA, 19 nt, Artificial Sequence
  Description of Artificial Sequence: Synthetic oligonucleotide
  Sense strand starting at position 620 of SEQ ID NO: 1560963
gaaguucugauccgaggac

SEQ ID NO: 1636846 - RNA, 19 nt, Artificial Sequence
  Description of Artificial Sequence: Synthetic oligonucleotide
  Antisense strand to SEQ ID NO: 1636845
guccucggaucagaacuuc

SEQ ID NO: 1636847 - RNA, 19 nt, Artificial Sequence
  Description of Artificial Sequence: Synthetic oligonucleotide
  Sense strand starting at position 621 of SEQ ID NO: 1560963
aaguucugauccgaggacu

SEQ ID NO: 1636848 - RNA, 19 nt, Artificial Sequence
  Description of Artificial Sequence: Synthetic oligonucleotide
  Antisense strand to SEQ ID NO: 1636847
aguccucggaucagaacuu

SEQ ID NO: 1636849 - RNA, 19 nt, Artificial Sequence
  Description of Artificial Sequence: Synthetic oligonucleotide
  Sense strand starting at position 634 of SEQ ID NO: 1560963
aggacuccuucugcccaua

SEQ ID NO: 1636850 - RNA, 19 nt, Artificial Sequence
  Description of Artificial Sequence: Synthetic oligonucleotide
  Antisense strand to SEQ ID NO: 1636849
uaugggcagaaggaguccu

SEQ ID NO: 1636851 - RNA, 19 nt, Artificial Sequence
  Description of Artificial Sequence: Synthetic oligonucleotide
  Sense strand starting at position 853 of SEQ ID NO: 1560963
ccuugaaauccugggcguu

SEQ ID NO: 1636852 - RNA, 19 nt, Artificial Sequence
  Description of Artificial Sequence: Synthetic oligonucleotide
  Antisense strand to SEQ ID NO: 1636851
aacgcccaggauuucaagg

SEQ ID NO: 1636853 - RNA, 19 nt, Artificial Sequence
  Description of Artificial Sequence: Synthetic oligonucleotide
  Sense strand starting at position 854 of SEQ ID NO: 1560963
cuugaaauccugggcguuu

SEQ ID NO: 1636854 - RNA, 19 nt, Artificial Sequence
  Description of Artificial Sequence: Synthetic oligonucleotide
  Antisense strand to SEQ ID NO: 1636853
aaacgcccaggauuucaag

SEQ ID NO: 1636855 - RNA, 19 nt, Artificial Sequence
  Description of Artificial Sequence: Synthetic oligonucleotide
  Sense strand starting at position 856 of SEQ ID NO: 1560963
ugaaauccugggcguuuca

SEQ ID NO: 1636856 - RNA, 19 nt, Artificial Sequence
  Description of Artificial Sequence: Synthetic oligonucleotide
  Antisense strand to SEQ ID NO: 1636855
ugaaacgcccaggauuuca

SEQ ID NO: 1636857 - RNA, 19 nt, Artificial Sequence
  Description of Artificial Sequence: Synthetic oligonucleotide
  Sense strand starting at position 1196 of SEQ ID NO: 1560963
acacgcucauccguacaua

SEQ ID NO: 1636858 - RNA, 19 nt, Artificial Sequence
  Description of Artificial Sequence: Synthetic oligonucleotide
  Antisense strand to SEQ ID NO: 1636857
uauguacggaugagcgugu

SEQ ID NO: 1636859 - RNA, 19 nt, Artificial Sequence
  Description of Artificial Sequence: Synthetic oligonucleotide
  Sense strand starting at position 1272 of SEQ ID NO: 1560963
caccgacucgccuauagaa

SEQ ID NO: 1636860 - RNA, 19 nt, Artificial Sequence
  Description of Artificial Sequence: Synthetic oligonucleotide
  Antisense strand to SEQ ID NO: 1636859
uucuauaggcgagucggug

SEQ ID NO: 1636861 - RNA, 19 nt, Artificial Sequence
  Description of Artificial Sequence: Synthetic oligonucleotide
  Sense strand starting at position 1274 of SEQ ID NO: 1560963
ccgacucgccuauagaaau

SEQ ID NO: 1636862 - RNA, 19 nt, Artificial Sequence
  Description of Artificial Sequence: Synthetic oligonucleotide
  Antisense strand to SEQ ID NO: 1636861
auuucuauaggcgagucgg

SEQ ID NO: 1636863 - RNA, 19 nt, Artificial Sequence
  Description of Artificial Sequence: Synthetic oligonucleotide
  Sense strand starting at position 1280 of SEQ ID NO: 1560963
cgccuauagaaaugugcaa

SEQ ID NO: 1636864 - RNA, 19 nt, Artificial Sequence
  Description of Artificial Sequence: Synthetic oligonucleotide
  Antisense strand to SEQ ID NO: 1636863
uugcacauuucuauaggcg

SEQ ID NO: 1636865 - RNA, 19 nt, Artificial Sequence
  Description of Artificial Sequence: Synthetic oligonucleotide
  Sense strand starting at position 1963 of SEQ ID NO: 1560963
cuccgugacguccugcaaa

SEQ ID NO: 1636866 - RNA, 19 nt, Artificial Sequence
  Description of Artificial Sequence: Synthetic oligonucleotide
  Antisense strand to SEQ ID NO: 1636865
uuugcaggacgucacggag

SEQ ID NO: 1636867 - RNA, 19 nt, Artificial Sequence
  Description of Artificial Sequence: Synthetic oligonucleotide
  Sense strand starting at position 1990 of SEQ ID NO: 1560963
cggagccucacauguagau

SEQ ID NO: 1636868 - RNA, 19 nt, Artificial Sequence
  Description of Artificial Sequence: Synthetic oligonucleotide
  Antisense strand to SEQ ID NO: 1636867
aucuacaugugaggcuccg

SEQ ID NO: 1636869 - RNA, 19 nt, Artificial Sequence
  Description of Artificial Sequence: Synthetic oligonucleotide
  Sense strand starting at position 1994 of SEQ ID NO: 1560963
gccucacauguagauaagu

SEQ ID NO: 1636870 - RNA, 19 nt, Artificial Sequence
  Description of Artificial Sequence: Synthetic oligonucleotide
  Antisense strand to SEQ ID NO: 1636869
acuuaucuacaugugaggc

SEQ ID NO: 1636871 - RNA, 19 nt, Artificial Sequence
  Description of Artificial Sequence: Synthetic oligonucleotide
  Sense strand starting at position 2045 of SEQ ID NO: 1560963
agagauguggcccauugac

SEQ ID NO: 1636872 - RNA, 19 nt, Artificial Sequence
  Description of Artificial Sequence: Synthetic oligonucleotide
  Antisense strand to SEQ ID NO: 1636871
gucaaugggccacaucucu

SEQ ID NO: 1636873 - RNA, 19 nt, Artificial Sequence
  Description of Artificial Sequence: Synthetic oligonucleotide
  Sense strand starting at position 2084 of SEQ ID NO: 1560963
cagggcuccugagcagauu

SEQ ID NO: 1636874 - RNA, 19 nt, Artificial Sequence
  Description of Artificial Sequence: Synthetic oligonucleotide
  Antisense strand to SEQ ID NO: 1636873
aaucugcucaggagcccug

SEQ ID NO: 1636875 - RNA, 19 nt, Artificial Sequence
  Description of Artificial Sequence: Synthetic oligonucleotide
  Sense strand starting at position 2095 of SEQ ID NO: 1560963
agcagauugacgugcaaau

SEQ ID NO: 1636876 - RNA, 19 nt, Artificial Sequence
  Description of Artificial Sequence: Synthetic oligonucleotide
  Antisense strand to SEQ ID NO: 1636875
auuugcacgucaaucugcu

SEQ ID NO: 1636877 - RNA, 19 nt, Artificial Sequence
  Description of Artificial Sequence: Synthetic oligonucleotide
  Sense strand starting at position 2218 of SEQ ID NO: 1560963
gcguucucucacuggcuua

SEQ ID NO: 1636878 - RNA, 19 nt, Artificial Sequence
  Description of Artificial Sequence: Synthetic oligonucleotide
  Antisense strand to SEQ ID NO: 1636877
uaagccagugagagaacgc

SEQ ID NO: 1636879 - RNA, 19 nt, Artificial Sequence
  Description of Artificial Sequence: Synthetic oligonucleotide
  Sense strand starting at position 2570 of SEQ ID NO: 1560963
ucccauucccgaggcguaa

SEQ ID NO: 1636880 - RNA, 19 nt, Artificial Sequence
  Description of Artificial Sequence: Synthetic oligonucleotide
  Antisense strand to SEQ ID NO: 1636879
uuacgccucgggaauggga

SEQ ID NO: 1636881 - RNA, 19 nt, Artificial Sequence
  Description of Artificial Sequence: Synthetic oligonucleotide
  Sense strand starting at position 2781 of SEQ ID NO: 1560963
aagguuuagcagggacaga

SEQ ID NO: 1636882 - RNA, 19 nt, Artificial Sequence
  Description of Artificial Sequence: Synthetic oligonucleotide
  Antisense strand to SEQ ID NO: 1636881
ucugucccugcuaaaccuu

SEQ ID NO: 1636883 - RNA, 19 nt, Artificial Sequence
  Description of Artificial Sequence: Synthetic oligonucleotide
  Sense strand starting at position 2822 of SEQ ID NO: 1560963
ccuuaaagccugcgguaaa

SEQ ID NO: 1636884 - RNA, 19 nt, Artificial Sequence
  Description of Artificial Sequence: Synthetic oligonucleotide
  Antisense strand to SEQ ID NO: 1636883
uuuaccgcaggcuuuaagg

SEQ ID NO: 1636885 - RNA, 19 nt, Artificial Sequence
  Description of Artificial Sequence: Synthetic oligonucleotide
  Sense strand starting at position 2972 of SEQ ID NO: 1560963
gagcuaagaugguccaucu

SEQ ID NO: 1636886 - RNA, 19 nt, Artificial Sequence
  Description of Artificial Sequence: Synthetic oligonucleotide
  Antisense strand to SEQ ID NO: 1636885
agauggaccaucuuagcuc

SEQ ID NO: 1636887 - RNA, 19 nt, Artificial Sequence
  Description of Artificial Sequence: Synthetic oligonucleotide
  Sense strand starting at position 3000 of SEQ ID NO: 1560963
ccaaaucuuuagggaagga

SEQ ID NO: 1636888 - RNA, 19 nt, Artificial Sequence
  Description of Artificial Sequence: Synthetic oligonucleotide
  Antisense strand to SEQ ID NO: 1636887
uccuucccuaaagauuugg

SEQ ID NO: 1636889 - RNA, 19 nt, Artificial Sequence
  Description of Artificial Sequence: Synthetic oligonucleotide
  Sense strand starting at position 3356 of SEQ ID NO: 1560963
ccguuuacauuugggaaau

SEQ ID NO: 1636890 - RNA, 19 nt, Artificial Sequence
  Description of Artificial Sequence: Synthetic oligonucleotide
  Antisense strand to SEQ ID NO: 1636889
auuucccaaauguaaacgg

SEQ ID NO: 1636891 - RNA, 19 nt, Artificial Sequence
  Description of Artificial Sequence: Synthetic oligonucleotide
  Sense strand starting at position 3357 of SEQ ID NO: 1560963
cguuuacauuugggaaauu

SEQ ID NO: 1636892 - RNA, 19 nt, Artificial Sequence
  Description of Artificial Sequence: Synthetic oligonucleotide
  Antisense strand to SEQ ID NO: 1636891
aauuucccaaauguaaacg

SEQ ID NO: 1636893 - RNA, 19 nt, Artificial Sequence
  Description of Artificial Sequence: Synthetic oligonucleotide
  Sense strand starting at position 3655 of SEQ ID NO: 1560963
gguggcucucucggaaaua

SEQ ID NO: 1636894 - RNA, 19 nt, Artificial Sequence
  Description of Artificial Sequence: Synthetic oligonucleotide
  Antisense strand to SEQ ID NO: 1636893
uauuuccgagagagccacc

SEQ ID NO: 1636895 - RNA, 19 nt, Artificial Sequence
  Description of Artificial Sequence: Synthetic oligonucleotide
  Sense strand starting at position 3713 of SEQ ID NO: 1560963
cgagaaugugcggaagcuu

SEQ ID NO: 1636896 - RNA, 19 nt, Artificial Sequence
  Description of Artificial Sequence: Synthetic oligonucleotide
  Antisense strand to SEQ ID NO: 1636895
aagcuuccgcacauucucg

SEQ ID NO: 1636897 - RNA, 19 nt, Artificial Sequence
  Description of Artificial Sequence: Synthetic oligonucleotide
  Sense strand starting at position 3730 of SEQ ID NO: 1560963
uuccgucacugacuuagua

SEQ ID NO: 1636898 - RNA, 19 nt, Artificial Sequence
  Description of Artificial Sequence: Synthetic oligonucleotide
  Antisense strand to SEQ ID NO: 1636897
uacuaagucagugacggaa

SEQ ID NO: 1636899 - RNA, 19 nt, Artificial Sequence
  Description of Artificial Sequence: Synthetic oligonucleotide
  Sense strand starting at position 3842 of SEQ ID NO: 1560963
uggaaaccagccugaguaa

SEQ ID NO: 1636900 - RNA, 19 nt, Artificial Sequence
  Description of Artificial Sequence: Synthetic oligonucleotide
  Antisense strand to SEQ ID NO: 1636899
uuacucaggcugguuucca

SEQ ID NO: 1636901 - RNA, 19 nt, Artificial Sequence
  Description of Artificial Sequence: Synthetic oligonucleotide
  Sense strand starting at position 351 of SEQ ID NO: 1560964
ggcccuguucucuguggaa

SEQ ID NO: 1636902 - RNA, 19 nt, Artificial Sequence
  Description of Artificial Sequence: Synthetic oligonucleotide
  Antisense strand to SEQ ID NO: 1636901
uuccacagagaacagggcc

SEQ ID NO: 1636903 - RNA, 19 nt, Artificial Sequence
  Description of Artificial Sequence: Synthetic oligonucleotide
  Sense strand starting at position 353 of SEQ ID NO: 1560964
cccuguucucuguggaaau

SEQ ID NO: 1636904 - RNA, 19 nt, Artificial Sequence
  Description of Artificial Sequence: Synthetic oligonucleotide
  Antisense strand to SEQ ID NO: 1636903
auuuccacagagaacaggg

SEQ ID NO: 1636905 - RNA, 19 nt, Artificial Sequence
  Description of Artificial Sequence: Synthetic oligonucleotide
  Sense strand starting at position 427 of SEQ ID NO: 1560964
gugggaagguauuaacaca

SEQ ID NO: 1636906 - RNA, 19 nt, Artificial Sequence
  Description of Artificial Sequence: Synthetic oligonucleotide
  Antisense strand to SEQ ID NO: 1636905
uguguuaauaccuucccac

SEQ ID NO: 1636907 - RNA, 19 nt, Artificial Sequence
  Description of Artificial Sequence: Synthetic oligonucleotide
  Sense strand starting at position 443 of SEQ ID NO: 1560964
acacguaacggucauuaga

SEQ ID NO: 1636908 - RNA, 19 nt, Artificial Sequence
  Description of Artificial Sequence: Synthetic oligonucleotide
  Antisense strand to SEQ ID NO: 1636907
ucuaaugaccguuacgugu

SEQ ID NO: 1636909 - RNA, 19 nt, Artificial Sequence
  Description of Artificial Sequence: Synthetic oligonucleotide
  Sense strand starting at position 445 of SEQ ID NO: 1560964
acguaacggucauuagaca

SEQ ID NO: 1636910 - RNA, 19 nt, Artificial Sequence
  Description of Artificial Sequence: Synthetic oligonucleotide
  Antisense strand to SEQ ID NO: 1636909
ugucuaaugaccguuacgu

SEQ ID NO: 1636911 - RNA, 19 nt, Artificial Sequence
  Description of Artificial Sequence: Synthetic oligonucleotide
  Sense strand starting at position 457 of SEQ ID NO: 1560964
uuagacagugccugguaua

SEQ ID NO: 1636912 - RNA, 19 nt, Artificial Sequence
  Description of Artificial Sequence: Synthetic oligonucleotide
  Antisense strand to SEQ ID NO: 1636911
uauaccaggcacugucuaa

SEQ ID NO: 1636913 - RNA, 19 nt, Artificial Sequence
  Description of Artificial Sequence: Synthetic oligonucleotide
  Sense strand starting at position 494 of SEQ ID NO: 1560964
ugugacugcuguuuaaucu

SEQ ID NO: 1636914 - RNA, 19 nt, Artificial Sequence
  Description of Artificial Sequence: Synthetic oligonucleotide
  Antisense strand to SEQ ID NO: 1636913
agauuaaacagcagucaca

SEQ ID NO: 1636915 - RNA, 19 nt, Artificial Sequence
  Description of Artificial Sequence: Synthetic oligonucleotide
  Sense strand starting at position 495 of SEQ ID NO: 1560964
gugacugcuguuuaaucuu

SEQ ID NO: 1636916 - RNA, 19 nt, Artificial Sequence
  Description of Artificial Sequence: Synthetic oligonucleotide
  Antisense strand to SEQ ID NO: 1636915
aagauuaaacagcagucac

SEQ ID NO: 1636917 - RNA, 19 nt, Artificial Sequence
  Description of Artificial Sequence: Synthetic oligonucleotide
  Sense strand starting at position 523 of SEQ ID NO: 1560964
uggcguaacugagucugua

SEQ ID NO: 1636918 - RNA, 19 nt, Artificial Sequence
  Description of Artificial Sequence: Synthetic oligonucleotide
  Antisense strand to SEQ ID NO: 1636917
uacagacucaguuacgcca

SEQ ID NO: 1636919 - RNA, 19 nt, Artificial Sequence
  Description of Artificial Sequence: Synthetic oligonucleotide
  Sense strand starting at position 640 of SEQ ID NO: 1560964
agaacuagauucuggagaa

SEQ ID NO: 1636920 - RNA, 19 nt, Artificial Sequence
  Description of Artificial Sequence: Synthetic oligonucleotide
  Antisense strand to SEQ ID NO: 1636919
uucuccagaaucuaguucu

SEQ ID NO: 1636921 - RNA, 19 nt, Artificial Sequence
  Description of Artificial Sequence: Synthetic oligonucleotide
  Sense strand starting at position 641 of SEQ ID NO: 1560964
gaacuagauucuggagaag

SEQ ID NO: 1636922 - RNA, 19 nt, Artificial Sequence
  Description of Artificial Sequence: Synthetic oligonucleotide
  Antisense strand to SEQ ID NO: 1636921
cuucuccagaaucuaguuc

SEQ ID NO: 1636923 - RNA, 19 nt, Artificial Sequence
  Description of Artificial Sequence: Synthetic oligonucleotide
  Sense strand starting at position 694 of SEQ ID NO: 1560964
cgguguggcccagguguaa

SEQ ID NO: 1636924 - RNA, 19 nt, Artificial Sequence
  Description of Artificial Sequence: Synthetic oligonucleotide
  Antisense strand to SEQ ID NO: 1636923
uuacaccugggccacaccg

SEQ ID NO: 1636925 - RNA, 19 nt, Artificial Sequence
  Description of Artificial Sequence: Synthetic oligonucleotide
  Sense strand starting at position 733 of SEQ ID NO: 1560964
ggaccugccagcuggauaa

SEQ ID NO: 1636926 - RNA, 19 nt, Artificial Sequence
  Description of Artificial Sequence: Synthetic oligonucleotide
  Antisense strand to SEQ ID NO: 1636925
uuauccagcuggcaggucc

SEQ ID NO: 1636927 - RNA, 19 nt, Artificial Sequence
  Description of Artificial Sequence: Synthetic oligonucleotide
  Sense strand starting at position 743 of SEQ ID NO: 1560964
gcuggauaagcuggauaga

SEQ ID NO: 1636928 - RNA, 19 nt, Artificial Sequence
  Description of Artificial Sequence: Synthetic oligonucleotide
  Antisense strand to SEQ ID NO: 1636927
ucuauccagcuuauccagc

SEQ ID NO: 1636929 - RNA, 19 nt, Artificial Sequence
  Description of Artificial Sequence: Synthetic oligonucleotide
  Sense strand starting at position 767 of SEQ ID NO: 1560964
ugauuaaggcuuggguguu

SEQ ID NO: 1636930 - RNA, 19 nt, Artificial Sequence
  Description of Artificial Sequence: Synthetic oligonucleotide
  Antisense strand to SEQ ID NO: 1636929
aacacccaagccuuaauca

SEQ ID NO: 1636931 - RNA, 19 nt, Artificial Sequence
  Description of Artificial Sequence: Synthetic oligonucleotide
  Sense strand starting at position 1014 of SEQ ID NO: 1560964
gagugagaguccuuauacc

SEQ ID NO: 1636932 - RNA, 19 nt, Artificial Sequence
  Description of Artificial Sequence: Synthetic oligonucleotide
  Antisense strand to SEQ ID NO: 1636931
gguauaaggacucucacuc

SEQ ID NO: 1636933 - RNA, 19 nt, Artificial Sequence
  Description of Artificial Sequence: Synthetic oligonucleotide
  Sense strand starting at position 1020 of SEQ ID NO: 1560964
gaguccuuauacccaagga

SEQ ID NO: 1636934 - RNA, 19 nt, Artificial Sequence
  Description of Artificial Sequence: Synthetic oligonucleotide
  Antisense strand to SEQ ID NO: 1636933
uccuuggguauaaggacuc

SEQ ID NO: 1636935 - RNA, 19 nt, Artificial Sequence
  Description of Artificial Sequence: Synthetic oligonucleotide
  Sense strand starting at position 1123 of SEQ ID NO: 1560964
cggcuaggcuccuugaauc

SEQ ID NO: 1636936 - RNA, 19 nt, Artificial Sequence
  Description of Artificial Sequence: Synthetic oligonucleotide
  Antisense strand to SEQ ID NO: 1636935
gauucaaggagccuagccg

SEQ ID NO: 1636937 - RNA, 19 nt, Artificial Sequence
  Description of Artificial Sequence: Synthetic oligonucleotide
  Sense strand starting at position 2290 of SEQ ID NO: 1560964
guagcucauagcgagagua

SEQ ID NO: 1636938 - RNA, 19 nt, Artificial Sequence
  Description of Artificial Sequence: Synthetic oligonucleotide
  Antisense strand to SEQ ID NO: 1636937
uacucucgcuaugagcuac

SEQ ID NO: 1636939 - RNA, 19 nt, Artificial Sequence
  Description of Artificial Sequence: Synthetic oligonucleotide
  Sense strand starting at position 2317 of SEQ ID NO: 1560964
cacagaguugugggaggau

SEQ ID NO: 1636940 - RNA, 19 nt, Artificial Sequence
  Description of Artificial Sequence: Synthetic oligonucleotide
  Antisense strand to SEQ ID NO: 1636939
auccucccacaacucugug

SEQ ID NO: 1636941 - RNA, 19 nt, Artificial Sequence
  Description of Artificial Sequence: Synthetic oligonucleotide
  Sense strand starting at position 2329 of SEQ ID NO: 1560964
ggaggauucugaucugagu

SEQ ID NO: 1636942 - RNA, 19 nt, Artificial Sequence
  Description of Artificial Sequence: Synthetic oligonucleotide
  Antisense strand to SEQ ID NO: 1636941
acucagaucagaauccucc

SEQ ID NO: 1636943 - RNA, 19 nt, Artificial Sequence
  Description of Artificial Sequence: Synthetic oligonucleotide
  Sense strand starting at position 2331 of SEQ ID NO: 1560964
aggauucugaucugaguua

SEQ ID NO: 1636944 - RNA, 19 nt, Artificial Sequence
  Description of Artificial Sequence: Synthetic oligonucleotide
  Antisense strand to SEQ ID NO: 1636943
uaacucagaucagaauccu

SEQ ID NO: 1636945 - RNA, 19 nt, Artificial Sequence
  Description of Artificial Sequence: Synthetic oligonucleotide
  Sense strand starting at position 2332 of SEQ ID NO: 1560964
ggauucugaucugaguuag

SEQ ID NO: 1636946 - RNA, 19 nt, Artificial Sequence
  Description of Artificial Sequence: Synthetic oligonucleotide
  Antisense strand to SEQ ID NO: 1636945
cuaacucagaucagaaucc

SEQ ID NO: 1636947 - RNA, 19 nt, Artificial Sequence
  Description of Artificial Sequence: Synthetic oligonucleotide
  Sense strand starting at position 2336 of SEQ ID NO: 1560964
ucugaucugaguuaguguu

SEQ ID NO: 1636948 - RNA, 19 nt, Artificial Sequence
  Description of Artificial Sequence: Synthetic oligonucleotide
  Antisense strand to SEQ ID NO: 1636947
aacacuaacucagaucaga

SEQ ID NO: 1636949 - RNA, 19 nt, Artificial Sequence
  Description of Artificial Sequence: Synthetic oligonucleotide
  Sense strand starting at position 2342 of SEQ ID NO: 1560964
cugaguuaguguuugucaa

SEQ ID NO: 1636950 - RNA, 19 nt, Artificial Sequence
  Description of Artificial Sequence: Synthetic oligonucleotide
  Antisense strand to SEQ ID NO: 1636949
uugacaaacacuaacucag

SEQ ID NO: 1636951 - RNA, 19 nt, Artificial Sequence
  Description of Artificial Sequence: Synthetic oligonucleotide
  Sense strand starting at position 2343 of SEQ ID NO: 1560964
ugaguuaguguuugucaag

SEQ ID NO: 1636952 - RNA, 19 nt, Artificial Sequence
  Description of Artificial Sequence: Synthetic oligonucleotide
  Antisense strand to SEQ ID NO: 1636951
cuugacaaacacuaacuca

SEQ ID NO: 1636953 - RNA, 19 nt, Artificial Sequence
  Description of Artificial Sequence: Synthetic oligonucleotide
  Sense strand starting at position 2344 of SEQ ID NO: 1560964
gaguuaguguuugucaagu

SEQ ID NO: 1636954 - RNA, 19 nt, Artificial Sequence
  Description of Artificial Sequence: Synthetic oligonucleotide
  Antisense strand to SEQ ID NO: 1636953
acuugacaaacacuaacuc

SEQ ID NO: 1636955 - RNA, 19 nt, Artificial Sequence
  Description of Artificial Sequence: Synthetic oligonucleotide
  Sense strand starting at position 2349 of SEQ ID NO: 1560964
aguguuugucaagugcagu

SEQ ID NO: 1636956 - RNA, 19 nt, Artificial Sequence
  Description of Artificial Sequence: Synthetic oligonucleotide
  Antisense strand to SEQ ID NO: 1636955
acugcacuugacaaacacu

SEQ ID NO: 1636957 - RNA, 19 nt, Artificial Sequence
  Description of Artificial Sequence: Synthetic oligonucleotide
  Sense strand starting at position 2394 of SEQ ID NO: 1560964
gcgcgguggccuguaauua

SEQ ID NO: 1636958 - RNA, 19 nt, Artificial Sequence
  Description of Artificial Sequence: Synthetic oligonucleotide
  Antisense strand to SEQ ID NO: 1636957
uaauuacaggccaccgcgc

SEQ ID NO: 1636959 - RNA, 19 nt, Artificial Sequence
  Description of Artificial Sequence: Synthetic oligonucleotide
  Sense strand starting at position 3609 of SEQ ID NO: 1560964
aggcuucaguagguuauga

SEQ ID NO: 1636960 - RNA, 19 nt, Artificial Sequence
  Description of Artificial Sequence: Synthetic oligonucleotide
  Antisense strand to SEQ ID NO: 1636959
ucauaaccuacugaagccu

SEQ ID NO: 1636961 - RNA, 19 nt, Artificial Sequence
  Description of Artificial Sequence: Synthetic oligonucleotide
  Sense strand starting at position 3617 of SEQ ID NO: 1560964
guagguuaugacugugcca

SEQ ID NO: 1636962 - RNA, 19 nt, Artificial Sequence
  Description of Artificial Sequence: Synthetic oligonucleotide
  Antisense strand to SEQ ID NO: 1636961
uggcacagucauaaccuac

SEQ ID NO: 1636963 - RNA, 19 nt, Artificial Sequence
  Description of Artificial Sequence: Synthetic oligonucleotide
  Sense strand starting at position 3619 of SEQ ID NO: 1560964
agguuaugacugugccacu

SEQ ID NO: 1636964 - RNA, 19 nt, Artificial Sequence
  Description of Artificial Sequence: Synthetic oligonucleotide
  Antisense strand to SEQ ID NO: 1636963
aguggcacagucauaaccu

SEQ ID NO: 1636965 - RNA, 19 nt, Artificial Sequence
  Description of Artificial Sequence: Synthetic oligonucleotide
  Sense strand starting at position 3685 of SEQ ID NO: 1560964
aaguuaaaguggguuggau

SEQ ID NO: 1636966 - RNA, 19 nt, Artificial Sequence
  Description of Artificial Sequence: Synthetic oligonucleotide
  Antisense strand to SEQ ID NO: 1636965
auccaacccacuuuaacuu

SEQ ID NO: 1636967 - RNA, 19 nt, Artificial Sequence
  Description of Artificial Sequence: Synthetic oligonucleotide
  Sense strand starting at position 3697 of SEQ ID NO: 1560964
guuggaucccuuugugaaa

SEQ ID NO: 1636968 - RNA, 19 nt, Artificial Sequence
  Description of Artificial Sequence: Synthetic oligonucleotide
  Antisense strand to SEQ ID NO: 1636967
uuucacaaagggauccaac

SEQ ID NO: 1636969 - RNA, 19 nt, Artificial Sequence
  Description of Artificial Sequence: Synthetic oligonucleotide
  Sense strand starting at position 3698 of SEQ ID NO: 1560964
uuggaucccuuugugaaau

SEQ ID NO: 1636970 - RNA, 19 nt, Artificial Sequence
  Description of Artificial Sequence: Synthetic oligonucleotide
  Antisense strand to SEQ ID NO: 1636969
auuucacaaagggauccaa

SEQ ID NO: 1636971 - RNA, 19 nt, Artificial Sequence
  Description of Artificial Sequence: Synthetic oligonucleotide
  Sense strand starting at position 3845 of SEQ ID NO: 1560964
gaugaagugcauuaguuag

SEQ ID NO: 1636972 - RNA, 19 nt, Artificial Sequence
  Description of Artificial Sequence: Synthetic oligonucleotide
  Antisense strand to SEQ ID NO: 1636971
cuaacuaaugcacuucauc

SEQ ID NO: 1636973 - RNA, 19 nt, Artificial Sequence
  Description of Artificial Sequence: Synthetic oligonucleotide
  Sense strand starting at position 3870 of SEQ ID NO: 1560964
cuggguuaugcuuaguaac

SEQ ID NO: 1636974 - RNA, 19 nt, Artificial Sequence
  Description of Artificial Sequence: Synthetic oligonucleotide
  Antisense strand to SEQ ID NO: 1636973
guuacuaagcauaacccag

SEQ ID NO: 1636975 - RNA, 19 nt, Artificial Sequence
  Description of Artificial Sequence: Synthetic oligonucleotide
  Sense strand starting at position 3872 of SEQ ID NO: 1560964
ggguuaugcuuaguaacaa

SEQ ID NO: 1636976 - RNA, 19 nt, Artificial Sequence
  Description of Artificial Sequence: Synthetic oligonucleotide
  Antisense strand to SEQ ID NO: 1636975
uuguuacuaagcauaaccc

SEQ ID NO: 1636977 - RNA, 19 nt, Artificial Sequence
  Description of Artificial Sequence: Synthetic oligonucleotide
  Sense strand starting at position 3923 of SEQ ID NO: 1560964
aagguuugguucccaugau

SEQ ID NO: 1636978 - RNA, 19 nt, Artificial Sequence
  Description of Artificial Sequence: Synthetic oligonucleotide
  Antisense strand to SEQ ID NO: 1636977
aucaugggaaccaaaccuu

SEQ ID NO: 1636979 - RNA, 19 nt, Artificial Sequence
  Description of Artificial Sequence: Synthetic oligonucleotide
  Sense strand starting at position 3927 of SEQ ID NO: 1560964
uuugguucccaugaugguu

SEQ ID NO: 1636980 - RNA, 19 nt, Artificial Sequence
  Description of Artificial Sequence: Synthetic oligonucleotide
  Antisense strand to SEQ ID NO: 1636979
aaccaucaugggaaccaaa

SEQ ID NO: 1636981 - RNA, 19 nt, Artificial Sequence
  Description of Artificial Sequence: Synthetic oligonucleotide
  Sense strand starting at position 108 of SEQ ID NO: 1560965
gcgggaaacucacacuuau

SEQ ID NO: 1636982 - RNA, 19 nt, Artificial Sequence
  Description of Artificial Sequence: Synthetic oligonucleotide
  Antisense strand to SEQ ID NO: 1636981
auaagugugaguuucccgc

SEQ ID NO: 1636983 - RNA, 19 nt, Artificial Sequence
  Description of Artificial Sequence: Synthetic oligonucleotide
  Sense strand starting at position 352 of SEQ ID NO: 1560965
acagauaacucuuauguag

SEQ ID NO: 1636984 - RNA, 19 nt, Artificial Sequence
  Description of Artificial Sequence: Synthetic oligonucleotide
  Antisense strand to SEQ ID NO: 1636983
cuacauaagaguuaucugu

SEQ ID NO: 1636985 - RNA, 19 nt, Artificial Sequence
  Description of Artificial Sequence: Synthetic oligonucleotide
  Sense strand starting at position 354 of SEQ ID NO: 1560965
agauaacucuuauguagua

SEQ ID NO: 1636986 - RNA, 19 nt, Artificial Sequence
  Description of Artificial Sequence: Synthetic oligonucleotide
  Antisense strand to SEQ ID NO: 1636985
uacuacauaagaguuaucu

SEQ ID NO: 1636987 - RNA, 19 nt, Artificial Sequence
  Description of Artificial Sequence: Synthetic oligonucleotide
  Sense strand starting at position 781 of SEQ ID NO: 1560965
gggucaauuguguguuguu

SEQ ID NO: 1636988 - RNA, 19 nt, Artificial Sequence
  Description of Artificial Sequence: Synthetic oligonucleotide
  Antisense strand to SEQ ID NO: 1636987
aacaacacacaauugaccc

SEQ ID NO: 1636989 - RNA, 19 nt, Artificial Sequence
  Description of Artificial Sequence: Synthetic oligonucleotide
  Sense strand starting at position 782 of SEQ ID NO: 1560965
ggucaauuguguguuguug

SEQ ID NO: 1636990 - RNA, 19 nt, Artificial Sequence
  Description of Artificial Sequence: Synthetic oligonucleotide
  Antisense strand to SEQ ID NO: 1636989
caacaacacacaauugacc

SEQ ID NO: 1636991 - RNA, 19 nt, Artificial Sequence
  Description of Artificial Sequence: Synthetic oligonucleotide
  Sense strand starting at position 806 of SEQ ID NO: 1560965
caggaacaguucuaaaggu

SEQ ID NO: 1636992 - RNA, 19 nt, Artificial Sequence
  Description of Artificial Sequence: Synthetic oligonucleotide
  Antisense strand to SEQ ID NO: 1636991
accuuuagaacuguuccug

SEQ ID NO: 1636993 - RNA, 19 nt, Artificial Sequence
  Description of Artificial Sequence: Synthetic oligonucleotide
  Sense strand starting at position 991 of SEQ ID NO: 1560965
uccagagucccagaucuua

SEQ ID NO: 1636994 - RNA, 19 nt, Artificial Sequence
  Description of Artificial Sequence: Synthetic oligonucleotide
  Antisense strand to SEQ ID NO: 1636993
uaagaucugggacucugga

SEQ ID NO: 1636995 - RNA, 19 nt, Artificial Sequence
  Description of Artificial Sequence: Synthetic oligonucleotide
  Sense strand starting at position 996 of SEQ ID NO: 1560965
agucccagaucuuagcuau

SEQ ID NO: 1636996 - RNA, 19 nt, Artificial Sequence
  Description of Artificial Sequence: Synthetic oligonucleotide
  Antisense strand to SEQ ID NO: 1636995
auagcuaagaucugggacu

SEQ ID NO: 1636997 - RNA, 19 nt, Artificial Sequence
  Description of Artificial Sequence: Synthetic oligonucleotide
  Sense strand starting at position 1019 of SEQ ID NO: 1560965
ucgcuaaagucucuugaaa

SEQ ID NO: 1636998 - RNA, 19 nt, Artificial Sequence
  Description of Artificial Sequence: Synthetic oligonucleotide
  Antisense strand to SEQ ID NO: 1636997
uuucaagagacuuuagcga

SEQ ID NO: 1636999 - RNA, 19 nt, Artificial Sequence
  Description of Artificial Sequence: Synthetic oligonucleotide
  Sense strand starting at position 1195 of SEQ ID NO: 1560965
uucuauauuuguugaguga

SEQ ID NO: 1637000 - RNA, 19 nt, Artificial Sequence
  Description of Artificial Sequence: Synthetic oligonucleotide
  Antisense strand to SEQ ID NO: 1636999
ucacucaacaaauauagaa

SEQ ID NO: 1637001 - RNA, 19 nt, Artificial Sequence
  Description of Artificial Sequence: Synthetic oligonucleotide
  Sense strand starting at position 2082 of SEQ ID NO: 1560965
ggauugguggcgugagaag

SEQ ID NO: 1637002 - RNA, 19 nt, Artificial Sequence
  Description of Artificial Sequence: Synthetic oligonucleotide
  Antisense strand to SEQ ID NO: 1637001
cuucucacgccaccaaucc

SEQ ID NO: 1637003 - RNA, 19 nt, Artificial Sequence
  Description of Artificial Sequence: Synthetic oligonucleotide
  Sense strand starting at position 2131 of SEQ ID NO: 1560965
agcgauuggcugagcaagu

SEQ ID NO: 1637004 - RNA, 19 nt, Artificial Sequence
  Description of Artificial Sequence: Synthetic oligonucleotide
  Antisense strand to SEQ ID NO: 1637003
acuugcucagccaaucgcu

SEQ ID NO: 1637005 - RNA, 19 nt, Artificial Sequence
  Description of Artificial Sequence: Synthetic oligonucleotide
  Sense strand starting at position 2189 of SEQ ID NO: 1560965
cggauuuagucuggaguac

SEQ ID NO: 1637006 - RNA, 19 nt, Artificial Sequence
  Description of Artificial Sequence: Synthetic oligonucleotide
  Antisense strand to SEQ ID NO: 1637005
guacuccagacuaaauccg

SEQ ID NO: 1637007 - RNA, 19 nt, Artificial Sequence
  Description of Artificial Sequence: Synthetic oligonucleotide
  Sense strand starting at position 2215 of SEQ ID NO: 1560965
agagucgagucuccggauu

SEQ ID NO: 1637008 - RNA, 19 nt, Artificial Sequence
  Description of Artificial Sequence: Synthetic oligonucleotide
  Antisense strand to SEQ ID NO: 1637007
aauccggagacucgacucu

SEQ ID NO: 1637009 - RNA, 19 nt, Artificial Sequence
  Description of Artificial Sequence: Synthetic oligonucleotide
  Sense strand starting at position 2218 of SEQ ID NO: 1560965
gucgagucuccggauugga

SEQ ID NO: 1637010 - RNA, 19 nt, Artificial Sequence
  Description of Artificial Sequence: Synthetic oligonucleotide
  Antisense strand to SEQ ID NO: 1637009
uccaauccggagacucgac

SEQ ID NO: 1637011 - RNA, 19 nt, Artificial Sequence
  Description of Artificial Sequence: Synthetic oligonucleotide
  Sense strand starting at position 2337 of SEQ ID NO: 1560965
agcgauuacuguucucaaa

SEQ ID NO: 1637012 - RNA, 19 nt, Artificial Sequence
  Description of Artificial Sequence: Synthetic oligonucleotide
  Antisense strand to SEQ ID NO: 1637011
uuugagaacaguaaucgcu

SEQ ID NO: 1637013 - RNA, 19 nt, Artificial Sequence
  Description of Artificial Sequence: Synthetic oligonucleotide
  Sense strand starting at position 2339 of SEQ ID NO: 1560965
cgauuacuguucucaaagg

SEQ ID NO: 1637014 - RNA, 19 nt, Artificial Sequence
  Description of Artificial Sequence: Synthetic oligonucleotide
  Antisense strand to SEQ ID NO: 1637013
ccuuugagaacaguaaucg

SEQ ID NO: 1637015 - RNA, 19 nt, Artificial Sequence
  Description of Artificial Sequence: Synthetic oligonucleotide
  Sense strand starting at position 2344 of SEQ ID NO: 1560965
acuguucucaaaggcgaaa

SEQ ID NO: 1637016 - RNA, 19 nt, Artificial Sequence
  Description of Artificial Sequence: Synthetic oligonucleotide
  Antisense strand to SEQ ID NO: 1637015
uuucgccuuugagaacagu

SEQ ID NO: 1637017 - RNA, 19 nt, Artificial Sequence
  Description of Artificial Sequence: Synthetic oligonucleotide
  Sense strand starting at position 2429 of SEQ ID NO: 1560965
aaaccuuuacugugcgauu

SEQ ID NO: 1637018 - RNA, 19 nt, Artificial Sequence
  Description of Artificial Sequence: Synthetic oligonucleotide
  Antisense strand to SEQ ID NO: 1637017
aaucgcacaguaaagguuu

SEQ ID NO: 1637019 - RNA, 19 nt, Artificial Sequence
  Description of Artificial Sequence: Synthetic oligonucleotide
  Sense strand starting at position 2430 of SEQ ID NO: 1560965
aaccuuuacugugcgauuu

SEQ ID NO: 1637020 - RNA, 19 nt, Artificial Sequence
  Description of Artificial Sequence: Synthetic oligonucleotide
  Antisense strand to SEQ ID NO: 1637019
aaaucgcacaguaaagguu

SEQ ID NO: 1637021 - RNA, 19 nt, Artificial Sequence
  Description of Artificial Sequence: Synthetic oligonucleotide
  Sense strand starting at position 2431 of SEQ ID NO: 1560965
accuuuacugugcgauuua

SEQ ID NO: 1637022 - RNA, 19 nt, Artificial Sequence
  Description of Artificial Sequence: Synthetic oligonucleotide
  Antisense strand to SEQ ID NO: 1637021
uaaaucgcacaguaaaggu

SEQ ID NO: 1637023 - RNA, 19 nt, Artificial Sequence
  Description of Artificial Sequence: Synthetic oligonucleotide
  Sense strand starting at position 2432 of SEQ ID NO: 1560965
ccuuuacugugcgauuuau

SEQ ID NO: 1637024 - RNA, 19 nt, Artificial Sequence
  Description of Artificial Sequence: Synthetic oligonucleotide
  Antisense strand to SEQ ID NO: 1637023
auaaaucgcacaguaaagg

SEQ ID NO: 1637025 - RNA, 19 nt, Artificial Sequence
  Description of Artificial Sequence: Synthetic oligonucleotide
  Sense strand starting at position 2443 of SEQ ID NO: 1560965
cgauuuauauccuccgcgu

SEQ ID NO: 1637026 - RNA, 19 nt, Artificial Sequence
  Description of Artificial Sequence: Synthetic oligonucleotide
  Antisense strand to SEQ ID NO: 1637025
acgcggaggauauaaaucg

SEQ ID NO: 1637027 - RNA, 19 nt, Artificial Sequence
  Description of Artificial Sequence: Synthetic oligonucleotide
  Sense strand starting at position 2446 of SEQ ID NO: 1560965
uuuauauccuccgcguagu

SEQ ID NO: 1637028 - RNA, 19 nt, Artificial Sequence
  Description of Artificial Sequence: Synthetic oligonucleotide
  Antisense strand to SEQ ID NO: 1637027
acuacgcggaggauauaaa

SEQ ID NO: 1637029 - RNA, 19 nt, Artificial Sequence
  Description of Artificial Sequence: Synthetic oligonucleotide
  Sense strand starting at position 2592 of SEQ ID NO: 1560965
gugaaacucugccuagcaa

SEQ ID NO: 1637030 - RNA, 19 nt, Artificial Sequence
  Description of Artificial Sequence: Synthetic oligonucleotide
  Antisense strand to SEQ ID NO: 1637029
uugcuaggcagaguuucac

SEQ ID NO: 1637031 - RNA, 19 nt, Artificial Sequence
  Description of Artificial Sequence: Synthetic oligonucleotide
  Sense strand starting at position 2632 of SEQ ID NO: 1560965
gcggguuaauugguuagau

SEQ ID NO: 1637032 - RNA, 19 nt, Artificial Sequence
  Description of Artificial Sequence: Synthetic oligonucleotide
  Antisense strand to SEQ ID NO: 1637031
aucuaaccaauuaacccgc

SEQ ID NO: 1637033 - RNA, 19 nt, Artificial Sequence
  Description of Artificial Sequence: Synthetic oligonucleotide
  Sense strand starting at position 2633 of SEQ ID NO: 1560965
cggguuaauugguuagauu

SEQ ID NO: 1637034 - RNA, 19 nt, Artificial Sequence
  Description of Artificial Sequence: Synthetic oligonucleotide
  Antisense strand to SEQ ID NO: 1637033
aaucuaaccaauuaacccg

SEQ ID NO: 1637035 - RNA, 19 nt, Artificial Sequence
  Description of Artificial Sequence: Synthetic oligonucleotide
  Sense strand starting at position 2634 of SEQ ID NO: 1560965
ggguuaauugguuagauuc

SEQ ID NO: 1637036 - RNA, 19 nt, Artificial Sequence
  Description of Artificial Sequence: Synthetic oligonucleotide
  Antisense strand to SEQ ID NO: 1637035
gaaucuaaccaauuaaccc

SEQ ID NO: 1637037 - RNA, 19 nt, Artificial Sequence
  Description of Artificial Sequence: Synthetic oligonucleotide
  Sense strand starting at position 2928 of SEQ ID NO: 1560965
acacaagugcuaugcaaau

SEQ ID NO: 1637038 - RNA, 19 nt, Artificial Sequence
  Description of Artificial Sequence: Synthetic oligonucleotide
  Antisense strand to SEQ ID NO: 1637037
auuugcauagcacuugugu

SEQ ID NO: 1637039 - RNA, 19 nt, Artificial Sequence
  Description of Artificial Sequence: Synthetic oligonucleotide
  Sense strand starting at position 3292 of SEQ ID NO: 1560965
caagcuugugccugcugaa

SEQ ID NO: 1637040 - RNA, 19 nt, Artificial Sequence
  Description of Artificial Sequence: Synthetic oligonucleotide
  Antisense strand to SEQ ID NO: 1637039
uucagcaggcacaagcuug

SEQ ID NO: 1637041 - RNA, 19 nt, Artificial Sequence
  Description of Artificial Sequence: Synthetic oligonucleotide
  Sense strand starting at position 3349 of SEQ ID NO: 1560965
cugcuccauccuugucaua

SEQ ID NO: 1637042 - RNA, 19 nt, Artificial Sequence
  Description of Artificial Sequence: Synthetic oligonucleotide
  Antisense strand to SEQ ID NO: 1637041
uaugacaaggauggagcag

SEQ ID NO: 1637043 - RNA, 19 nt, Artificial Sequence
  Description of Artificial Sequence: Synthetic oligonucleotide
  Sense strand starting at position 3351 of SEQ ID NO: 1560965
gcuccauccuugucauaug

SEQ ID NO: 1637044 - RNA, 19 nt, Artificial Sequence
  Description of Artificial Sequence: Synthetic oligonucleotide
  Antisense strand to SEQ ID NO: 1637043
cauaugacaaggauggagc

SEQ ID NO: 1637045 - RNA, 19 nt, Artificial Sequence
  Description of Artificial Sequence: Synthetic oligonucleotide
  Sense strand starting at position 3352 of SEQ ID NO: 1560965
cuccauccuugucauauga

SEQ ID NO: 1637046 - RNA, 19 nt, Artificial Sequence
  Description of Artificial Sequence: Synthetic oligonucleotide
  Antisense strand to SEQ ID NO: 1637045
ucauaugacaaggauggag

SEQ ID NO: 1637047 - RNA, 19 nt, Artificial Sequence
  Description of Artificial Sequence: Synthetic oligonucleotide
  Sense strand starting at position 3415 of SEQ ID NO: 1560965
ccaaguaagucucuguuaa

SEQ ID NO: 1637048 - RNA, 19 nt, Artificial Sequence
  Description of Artificial Sequence: Synthetic oligonucleotide
  Antisense strand to SEQ ID NO: 1637047
uuaacagagacuuacuugg

SEQ ID NO: 1637049 - RNA, 19 nt, Artificial Sequence
  Description of Artificial Sequence: Synthetic oligonucleotide
  Sense strand starting at position 3715 of SEQ ID NO: 1560965
ggccuuacuugggauuaca

SEQ ID NO: 1637050 - RNA, 19 nt, Artificial Sequence
  Description of Artificial Sequence: Synthetic oligonucleotide
  Antisense strand to SEQ ID NO: 1637049
uguaaucccaaguaaggcc

SEQ ID NO: 1637051 - RNA, 19 nt, Artificial Sequence
  Description of Artificial Sequence: Synthetic oligonucleotide
  Sense strand starting at position 3810 of SEQ ID NO: 1560965
aggaucauuuguuguugua

SEQ ID NO: 1637052 - RNA, 19 nt, Artificial Sequence
  Description of Artificial Sequence: Synthetic oligonucleotide
  Antisense strand to SEQ ID NO: 1637051
uacaacaacaaaugauccu

SEQ ID NO: 1637053 - RNA, 19 nt, Artificial Sequence
  Description of Artificial Sequence: Synthetic oligonucleotide
  Sense strand starting at position 3812 of SEQ ID NO: 1560965
gaucauuuguuguuguauc

SEQ ID NO: 1637054 - RNA, 19 nt, Artificial Sequence
  Description of Artificial Sequence: Synthetic oligonucleotide
  Antisense strand to SEQ ID NO: 1637053
gauacaacaacaaaugauc

SEQ ID NO: 1637055 - RNA, 19 nt, Artificial Sequence
  Description of Artificial Sequence: Synthetic oligonucleotide
  Sense strand starting at position 3822 of SEQ ID NO: 1560965
uguuguaucuuggugucua

SEQ ID NO: 1637056 - RNA, 19 nt, Artificial Sequence
  Description of Artificial Sequence: Synthetic oligonucleotide
  Antisense strand to SEQ ID NO: 1637055
uagacaccaagauacaaca

SEQ ID NO: 1637057 - RNA, 19 nt, Artificial Sequence
  Description of Artificial Sequence: Synthetic oligonucleotide
  Sense strand starting at position 3826 of SEQ ID NO: 1560965
guaucuuggugucuagaac

SEQ ID NO: 1637058 - RNA, 19 nt, Artificial Sequence
  Description of Artificial Sequence: Synthetic oligonucleotide
  Antisense strand to SEQ ID NO: 1637057
guucuagacaccaagauac

SEQ ID NO: 1637059 - RNA, 19 nt, Artificial Sequence
  Description of Artificial Sequence: Synthetic oligonucleotide
  Sense strand starting at position 3827 of SEQ ID NO: 1560965
uaucuuggugucuagaaca

SEQ ID NO: 1637060 - RNA, 19 nt, Artificial Sequence
  Description of Artificial Sequence: Synthetic oligonucleotide
  Antisense strand to SEQ ID NO: 1637059
uguucuagacaccaagaua

SEQ ID NO: 1637061 - RNA, 19 nt, Artificial Sequence
  Description of Artificial Sequence: Synthetic oligonucleotide
  Sense strand starting at position 350 of SEQ ID NO: 1560966
auaacacgauucugucaaa

SEQ ID NO: 1637062 - RNA, 19 nt, Artificial Sequence
  Description of Artificial Sequence: Synthetic oligonucleotide
  Antisense strand to SEQ ID NO: 1637061
uuugacagaaucguguuau

SEQ ID NO: 1637063 - RNA, 19 nt, Artificial Sequence
  Description of Artificial Sequence: Synthetic oligonucleotide
  Sense strand starting at position 353 of SEQ ID NO: 1560966
acacgauucugucaaagug

SEQ ID NO: 1637064 - RNA, 19 nt, Artificial Sequence
  Description of Artificial Sequence: Synthetic oligonucleotide
  Antisense strand to SEQ ID NO: 1637063
cacuuugacagaaucgugu

SEQ ID NO: 1637065 - RNA, 19 nt, Artificial Sequence
  Description of Artificial Sequence: Synthetic oligonucleotide
  Sense strand starting at position 402 of SEQ ID NO: 1560966
uuucuugagucggaauaaa

SEQ ID NO: 1637066 - RNA, 19 nt, Artificial Sequence
  Description of Artificial Sequence: Synthetic oligonucleotide
  Antisense strand to SEQ ID NO: 1637065
uuuauuccgacucaagaaa

SEQ ID NO: 1637067 - RNA, 19 nt, Artificial Sequence
  Description of Artificial Sequence: Synthetic oligonucleotide
  Sense strand starting at position 413 of SEQ ID NO: 1560966
ggaauaaacuccuggacuu

SEQ ID NO: 1637068 - RNA, 19 nt, Artificial Sequence
  Description of Artificial Sequence: Synthetic oligonucleotide
  Antisense strand to SEQ ID NO: 1637067
aaguccaggaguuuauucc

SEQ ID NO: 1637069 - RNA, 19 nt, Artificial Sequence
  Description of Artificial Sequence: Synthetic oligonucleotide
  Sense strand starting at position 495 of SEQ ID NO: 1560966
agguguuacuccuggguca

SEQ ID NO: 1637070 - RNA, 19 nt, Artificial Sequence
  Description of Artificial Sequence: Synthetic oligonucleotide
  Antisense strand to SEQ ID NO: 1637069
ugacccaggaguaacaccu

SEQ ID NO: 1637071 - RNA, 19 nt, Artificial Sequence
  Description of Artificial Sequence: Synthetic oligonucleotide
  Sense strand starting at position 496 of SEQ ID NO: 1560966
gguguuacuccugggucaa

SEQ ID NO: 1637072 - RNA, 19 nt, Artificial Sequence
  Description of Artificial Sequence: Synthetic oligonucleotide
  Antisense strand to SEQ ID NO: 1637071
uugacccaggaguaacacc

SEQ ID NO: 1637073 - RNA, 19 nt, Artificial Sequence
  Description of Artificial Sequence: Synthetic oligonucleotide
  Sense strand starting at position 497 of SEQ ID NO: 1560966
guguuacuccugggucaaa

SEQ ID NO: 1637074 - RNA, 19 nt, Artificial Sequence
  Description of Artificial Sequence: Synthetic oligonucleotide
  Antisense strand to SEQ ID NO: 1637073
uuugacccaggaguaacac

SEQ ID NO: 1637075 - RNA, 19 nt, Artificial Sequence
  Description of Artificial Sequence: Synthetic oligonucleotide
  Sense strand starting at position 675 of SEQ ID NO: 1560966
ggcccuuugauagggaagu

SEQ ID NO: 1637076 - RNA, 19 nt, Artificial Sequence
  Description of Artificial Sequence: Synthetic oligonucleotide
  Antisense strand to SEQ ID NO: 1637075
acuucccuaucaaagggcc

SEQ ID NO: 1637077 - RNA, 19 nt, Artificial Sequence
  Description of Artificial Sequence: Synthetic oligonucleotide
  Sense strand starting at position 704 of SEQ ID NO: 1560966
uguggcaguggcugauuua

SEQ ID NO: 1637078 - RNA, 19 nt, Artificial Sequence
  Description of Artificial Sequence: Synthetic oligonucleotide
  Antisense strand to SEQ ID NO: 1637077
uaaaucagccacugccaca

SEQ ID NO: 1637079 - RNA, 19 nt, Artificial Sequence
  Description of Artificial Sequence: Synthetic oligonucleotide
  Sense strand starting at position 707 of SEQ ID NO: 1560966
ggcaguggcugauuuaguu

SEQ ID NO: 1637080 - RNA, 19 nt, Artificial Sequence
  Description of Artificial Sequence: Synthetic oligonucleotide
  Antisense strand to SEQ ID NO: 1637079
aacuaaaucagccacugcc

SEQ ID NO: 1637081 - RNA, 19 nt, Artificial Sequence
  Description of Artificial Sequence: Synthetic oligonucleotide
  Sense strand starting at position 716 of SEQ ID NO: 1560966
ugauuuaguuucucgcuga

SEQ ID NO: 1637082 - RNA, 19 nt, Artificial Sequence
  Description of Artificial Sequence: Synthetic oligonucleotide
  Antisense strand to SEQ ID NO: 1637081
ucagcgagaaacuaaauca

SEQ ID NO: 1637083 - RNA, 19 nt, Artificial Sequence
  Description of Artificial Sequence: Synthetic oligonucleotide
  Sense strand starting at position 717 of SEQ ID NO: 1560966
gauuuaguuucucgcugag

SEQ ID NO: 1637084 - RNA, 19 nt, Artificial Sequence
  Description of Artificial Sequence: Synthetic oligonucleotide
  Antisense strand to SEQ ID NO: 1637083
cucagcgagaaacuaaauc

SEQ ID NO: 1637085 - RNA, 19 nt, Artificial Sequence
  Description of Artificial Sequence: Synthetic oligonucleotide
  Sense strand starting at position 800 of SEQ ID NO: 1560966
ugcugucauuccuggagca

SEQ ID NO: 1637086 - RNA, 19 nt, Artificial Sequence
  Description of Artificial Sequence: Synthetic oligonucleotide
  Antisense strand to SEQ ID NO: 1637085
ugcuccaggaaugacagca

SEQ ID NO: 1637087 - RNA, 19 nt, Artificial Sequence
  Description of Artificial Sequence: Synthetic oligonucleotide
  Sense strand starting at position 842 of SEQ ID NO: 1560966
gguccugacucuucuuauc

SEQ ID NO: 1637088 - RNA, 19 nt, Artificial Sequence
  Description of Artificial Sequence: Synthetic oligonucleotide
  Antisense strand to SEQ ID NO: 1637087
gauaagaagagucaggacc

SEQ ID NO: 1637089 - RNA, 19 nt, Artificial Sequence
  Description of Artificial Sequence: Synthetic oligonucleotide
  Sense strand starting at position 921 of SEQ ID NO: 1560966
cucugaacgcuccagagaa

SEQ ID NO: 1637090 - RNA, 19 nt, Artificial Sequence
  Description of Artificial Sequence: Synthetic oligonucleotide
  Antisense strand to SEQ ID NO: 1637089
uucucuggagcguucagag

SEQ ID NO: 1637091 - RNA, 19 nt, Artificial Sequence
  Description of Artificial Sequence: Synthetic oligonucleotide
  Sense strand starting at position 944 of SEQ ID NO: 1560966
gcaggaaugguguggguua

SEQ ID NO: 1637092 - RNA, 19 nt, Artificial Sequence
  Description of Artificial Sequence: Synthetic oligonucleotide
  Antisense strand to SEQ ID NO: 1637091
uaacccacaccauuccugc

SEQ ID NO: 1637093 - RNA, 19 nt, Artificial Sequence
  Description of Artificial Sequence: Synthetic oligonucleotide
  Sense strand starting at position 946 of SEQ ID NO: 1560966
aggaaugguguggguuaga

SEQ ID NO: 1637094 - RNA, 19 nt, Artificial Sequence
  Description of Artificial Sequence: Synthetic oligonucleotide
  Antisense strand to SEQ ID NO: 1637093
ucuaacccacaccauuccu

SEQ ID NO: 1637095 - RNA, 19 nt, Artificial Sequence
  Description of Artificial Sequence: Synthetic oligonucleotide
  Sense strand starting at position 1033 of SEQ ID NO: 1560966
agagcuaagccucgaguuu

SEQ ID NO: 1637096 - RNA, 19 nt, Artificial Sequence
  Description of Artificial Sequence: Synthetic oligonucleotide
  Antisense strand to SEQ ID NO: 1637095
aaacucgaggcuuagcucu

SEQ ID NO: 1637097 - RNA, 19 nt, Artificial Sequence
  Description of Artificial Sequence: Synthetic oligonucleotide
  Sense strand starting at position 1241 of SEQ ID NO: 1560966
guaaaugcucauuaaggug

SEQ ID NO: 1637098 - RNA, 19 nt, Artificial Sequence
  Description of Artificial Sequence: Synthetic oligonucleotide
  Antisense strand to SEQ ID NO: 1637097
caccuuaaugagcauuuac

SEQ ID NO: 1637099 - RNA, 19 nt, Artificial Sequence
  Description of Artificial Sequence: Synthetic oligonucleotide
  Sense strand starting at position 1244 of SEQ ID NO: 1560966
aaugcucauuaaggugaga

SEQ ID NO: 1637100 - RNA, 19 nt, Artificial Sequence
  Description of Artificial Sequence: Synthetic oligonucleotide
  Antisense strand to SEQ ID NO: 1637099
ucucaccuuaaugagcauu

SEQ ID NO: 1637101 - RNA, 19 nt, Artificial Sequence
  Description of Artificial Sequence: Synthetic oligonucleotide
  Sense strand starting at position 1246 of SEQ ID NO: 1560966
ugcucauuaaggugagaug

SEQ ID NO: 1637102 - RNA, 19 nt, Artificial Sequence
  Description of Artificial Sequence: Synthetic oligonucleotide
  Antisense strand to SEQ ID NO: 1637101
caucucaccuuaaugagca

SEQ ID NO: 1637103 - RNA, 19 nt, Artificial Sequence
  Description of Artificial Sequence: Synthetic oligonucleotide
  Sense strand starting at position 1257 of SEQ ID NO: 1560966
gugagaugccacugucuuu

SEQ ID NO: 1637104 - RNA, 19 nt, Artificial Sequence
  Description of Artificial Sequence: Synthetic oligonucleotide
  Antisense strand to SEQ ID NO: 1637103
aaagacaguggcaucucac

SEQ ID NO: 1637105 - RNA, 19 nt, Artificial Sequence
  Description of Artificial Sequence: Synthetic oligonucleotide
  Sense strand starting at position 1307 of SEQ ID NO: 1560966
ccacuucuguaaggcaaga

SEQ ID NO: 1637106 - RNA, 19 nt, Artificial Sequence
  Description of Artificial Sequence: Synthetic oligonucleotide
  Antisense strand to SEQ ID NO: 1637105
ucuugccuuacagaagugg

SEQ ID NO: 1637107 - RNA, 19 nt, Artificial Sequence
  Description of Artificial Sequence: Synthetic oligonucleotide
  Sense strand starting at position 1647 of SEQ ID NO: 1560966
ucccguuaccuauggugga

SEQ ID NO: 1637108 - RNA, 19 nt, Artificial Sequence
  Description of Artificial Sequence: Synthetic oligonucleotide
  Antisense strand to SEQ ID NO: 1637107
uccaccauagguaacggga

SEQ ID NO: 1637109 - RNA, 19 nt, Artificial Sequence
  Description of Artificial Sequence: Synthetic oligonucleotide
  Sense strand starting at position 1651 of SEQ ID NO: 1560966
guuaccuaugguggagaua

SEQ ID NO: 1637110 - RNA, 19 nt, Artificial Sequence
  Description of Artificial Sequence: Synthetic oligonucleotide
  Antisense strand to SEQ ID NO: 1637109
uaucuccaccauagguaac

SEQ ID NO: 1637111 - RNA, 19 nt, Artificial Sequence
  Description of Artificial Sequence: Synthetic oligonucleotide
  Sense strand starting at position 2019 of SEQ ID NO: 1560966
cugauugaccagcagugaa

SEQ ID NO: 1637112 - RNA, 19 nt, Artificial Sequence
  Description of Artificial Sequence: Synthetic oligonucleotide
  Antisense strand to SEQ ID NO: 1637111
uucacugcuggucaaucag

SEQ ID NO: 1637113 - RNA, 19 nt, Artificial Sequence
  Description of Artificial Sequence: Synthetic oligonucleotide
  Sense strand starting at position 2763 of SEQ ID NO: 1560966
cggccuagcgaucugcuua

SEQ ID NO: 1637114 - RNA, 19 nt, Artificial Sequence
  Description of Artificial Sequence: Synthetic oligonucleotide
  Antisense strand to SEQ ID NO: 1637113
uaagcagaucgcuaggccg

SEQ ID NO: 1637115 - RNA, 19 nt, Artificial Sequence
  Description of Artificial Sequence: Synthetic oligonucleotide
  Sense strand starting at position 2768 of SEQ ID NO: 1560966
uagcgaucugcuuagagau

SEQ ID NO: 1637116 - RNA, 19 nt, Artificial Sequence
  Description of Artificial Sequence: Synthetic oligonucleotide
  Antisense strand to SEQ ID NO: 1637115
aucucuaagcagaucgcua

SEQ ID NO: 1637117 - RNA, 19 nt, Artificial Sequence
  Description of Artificial Sequence: Synthetic oligonucleotide
  Sense strand starting at position 2770 of SEQ ID NO: 1560966
gcgaucugcuuagagauac

SEQ ID NO: 1637118 - RNA, 19 nt, Artificial Sequence
  Description of Artificial Sequence: Synthetic oligonucleotide
  Antisense strand to SEQ ID NO: 1637117
guaucucuaagcagaucgc

SEQ ID NO: 1637119 - RNA, 19 nt, Artificial Sequence
  Description of Artificial Sequence: Synthetic oligonucleotide
  Sense strand starting at position 2920 of SEQ ID NO: 1560966
ggguuagagcagugaggau

SEQ ID NO: 1637120 - RNA, 19 nt, Artificial Sequence
  Description of Artificial Sequence: Synthetic oligonucleotide
  Antisense strand to SEQ ID NO: 1637119
auccucacugcucuaaccc

SEQ ID NO: 1637121 - RNA, 19 nt, Artificial Sequence
  Description of Artificial Sequence: Synthetic oligonucleotide
  Sense strand starting at position 2932 of SEQ ID NO: 1560966
ugaggaugcuggguccuau

SEQ ID NO: 1637122 - RNA, 19 nt, Artificial Sequence
  Description of Artificial Sequence: Synthetic oligonucleotide
  Antisense strand to SEQ ID NO: 1637121
auaggacccagcauccuca

SEQ ID NO: 1637123 - RNA, 19 nt, Artificial Sequence
  Description of Artificial Sequence: Synthetic oligonucleotide
  Sense strand starting at position 2959 of SEQ ID NO: 1560966
cagggcucucaacguugaa

SEQ ID NO: 1637124 - RNA, 19 nt, Artificial Sequence
  Description of Artificial Sequence: Synthetic oligonucleotide
  Antisense strand to SEQ ID NO: 1637123
uucaacguugagagcccug

SEQ ID NO: 1637125 - RNA, 19 nt, Artificial Sequence
  Description of Artificial Sequence: Synthetic oligonucleotide
  Sense strand starting at position 88 of SEQ ID NO: 1560967
aaaucugaccuguggaugu

SEQ ID NO: 1637126 - RNA, 19 nt, Artificial Sequence
  Description of Artificial Sequence: Synthetic oligonucleotide
  Antisense strand to SEQ ID NO: 1637125
acauccacaggucagauuu

SEQ ID NO: 1637127 - RNA, 19 nt, Artificial Sequence
  Description of Artificial Sequence: Synthetic oligonucleotide
  Sense strand starting at position 132 of SEQ ID NO: 1560967
gugauuuguggcuggcaaa

SEQ ID NO: 1637128 - RNA, 19 nt, Artificial Sequence
  Description of Artificial Sequence: Synthetic oligonucleotide
  Antisense strand to SEQ ID NO: 1637127
uuugccagccacaaaucac

SEQ ID NO: 1637129 - RNA, 19 nt, Artificial Sequence
  Description of Artificial Sequence: Synthetic oligonucleotide
  Sense strand starting at position 133 of SEQ ID NO: 1560967
ugauuuguggcuggcaaag

SEQ ID NO: 1637130 - RNA, 19 nt, Artificial Sequence
  Description of Artificial Sequence: Synthetic oligonucleotide
  Antisense strand to SEQ ID NO: 1637129
cuuugccagccacaaauca

SEQ ID NO: 1637131 - RNA, 19 nt, Artificial Sequence
  Description of Artificial Sequence: Synthetic oligonucleotide
  Sense strand starting at position 180 of SEQ ID NO: 1560967
ucaggcuucucauagaagu

SEQ ID NO: 1637132 - RNA, 19 nt, Artificial Sequence
  Description of Artificial Sequence: Synthetic oligonucleotide
  Antisense strand to SEQ ID NO: 1637131
acuucuaugagaagccuga

SEQ ID NO: 1637133 - RNA, 19 nt, Artificial Sequence
  Description of Artificial Sequence: Synthetic oligonucleotide
  Sense strand starting at position 420 of SEQ ID NO: 1560967
cccagugguccuugguacu

SEQ ID NO: 1637134 - RNA, 19 nt, Artificial Sequence
  Description of Artificial Sequence: Synthetic oligonucleotide
  Antisense strand to SEQ ID NO: 1637133
aguaccaaggaccacuggg

SEQ ID NO: 1637135 - RNA, 19 nt, Artificial Sequence
  Description of Artificial Sequence: Synthetic oligonucleotide
  Sense strand starting at position 434 of SEQ ID NO: 1560967
guacuacuagucugggaac

SEQ ID NO: 1637136 - RNA, 19 nt, Artificial Sequence
  Description of Artificial Sequence: Synthetic oligonucleotide
  Antisense strand to SEQ ID NO: 1637135
guucccagacuaguaguac

SEQ ID NO: 1637137 - RNA, 19 nt, Artificial Sequence
  Description of Artificial Sequence: Synthetic oligonucleotide
  Sense strand starting at position 436 of SEQ ID NO: 1560967
acuacuagucugggaacca

SEQ ID NO: 1637138 - RNA, 19 nt, Artificial Sequence
  Description of Artificial Sequence: Synthetic oligonucleotide
  Antisense strand to SEQ ID NO: 1637137
ugguucccagacuaguagu

SEQ ID NO: 1637139 - RNA, 19 nt, Artificial Sequence
  Description of Artificial Sequence: Synthetic oligonucleotide
  Sense strand starting at position 471 of SEQ ID NO: 1560967
cggcuucccucucuaaguu

SEQ ID NO: 1637140 - RNA, 19 nt, Artificial Sequence
  Description of Artificial Sequence: Synthetic oligonucleotide
  Antisense strand to SEQ ID NO: 1637139
aacuuagagagggaagccg

SEQ ID NO: 1637141 - RNA, 19 nt, Artificial Sequence
  Description of Artificial Sequence: Synthetic oligonucleotide
  Sense strand starting at position 634 of SEQ ID NO: 1560967
ggaggagucaugugguuug

SEQ ID NO: 1637142 - RNA, 19 nt, Artificial Sequence
  Description of Artificial Sequence: Synthetic oligonucleotide
  Antisense strand to SEQ ID NO: 1637141
caaaccacaugacuccucc

SEQ ID NO: 1637143 - RNA, 19 nt, Artificial Sequence
  Description of Artificial Sequence: Synthetic oligonucleotide
  Sense strand starting at position 637 of SEQ ID NO: 1560967
ggagucaugugguuugaaa

SEQ ID NO: 1637144 - RNA, 19 nt, Artificial Sequence
  Description of Artificial Sequence: Synthetic oligonucleotide
  Antisense strand to SEQ ID NO: 1637143
uuucaaaccacaugacucc

SEQ ID NO: 1637145 - RNA, 19 nt, Artificial Sequence
  Description of Artificial Sequence: Synthetic oligonucleotide
  Sense strand starting at position 686 of SEQ ID NO: 1560967
ggauccuggguuugaggaa

SEQ ID NO: 1637146 - RNA, 19 nt, Artificial Sequence
  Description of Artificial Sequence: Synthetic oligonucleotide
  Antisense strand to SEQ ID NO: 1637145
uuccucaaacccaggaucc

SEQ ID NO: 1637147 - RNA, 19 nt, Artificial Sequence
  Description of Artificial Sequence: Synthetic oligonucleotide
  Sense strand starting at position 687 of SEQ ID NO: 1560967
gauccuggguuugaggaau

SEQ ID NO: 1637148 - RNA, 19 nt, Artificial Sequence
  Description of Artificial Sequence: Synthetic oligonucleotide
  Antisense strand to SEQ ID NO: 1637147
auuccucaaacccaggauc

SEQ ID NO: 1637149 - RNA, 19 nt, Artificial Sequence
  Description of Artificial Sequence: Synthetic oligonucleotide
  Sense strand starting at position 733 of SEQ ID NO: 1560967
ggaaggaucgguugugucu

SEQ ID NO: 1637150 - RNA, 19 nt, Artificial Sequence
  Description of Artificial Sequence: Synthetic oligonucleotide
  Antisense strand to SEQ ID NO: 1637149
agacacaaccgauccuucc

SEQ ID NO: 1637151 - RNA, 19 nt, Artificial Sequence
  Description of Artificial Sequence: Synthetic oligonucleotide
  Sense strand starting at position 739 of SEQ ID NO: 1560967
aucgguugugucugagauu

SEQ ID NO: 1637152 - RNA, 19 nt, Artificial Sequence
  Description of Artificial Sequence: Synthetic oligonucleotide
  Antisense strand to SEQ ID NO: 1637151
aaucucagacacaaccgau

SEQ ID NO: 1637153 - RNA, 19 nt, Artificial Sequence
  Description of Artificial Sequence: Synthetic oligonucleotide
  Sense strand starting at position 740 of SEQ ID NO: 1560967
ucgguugugucugagauuu

SEQ ID NO: 1637154 - RNA, 19 nt, Artificial Sequence
  Description of Artificial Sequence: Synthetic oligonucleotide
  Antisense strand to SEQ ID NO: 1637153
aaaucucagacacaaccga

SEQ ID NO: 1637155 - RNA, 19 nt, Artificial Sequence
  Description of Artificial Sequence: Synthetic oligonucleotide
  Sense strand starting at position 940 of SEQ ID NO: 1560967
gcagauagagaauguaaca

SEQ ID NO: 1637156 - RNA, 19 nt, Artificial Sequence
  Description of Artificial Sequence: Synthetic oligonucleotide
  Antisense strand to SEQ ID NO: 1637155
uguuacauucucuaucugc

SEQ ID NO: 1637157 - RNA, 19 nt, Artificial Sequence
  Description of Artificial Sequence: Synthetic oligonucleotide
  Sense strand starting at position 1391 of SEQ ID NO: 1560967
acacauaguugcucuggua

SEQ ID NO: 1637158 - RNA, 19 nt, Artificial Sequence
  Description of Artificial Sequence: Synthetic oligonucleotide
  Antisense strand to SEQ ID NO: 1637157
uaccagagcaacuaugugu

SEQ ID NO: 1637159 - RNA, 19 nt, Artificial Sequence
  Description of Artificial Sequence: Synthetic oligonucleotide
  Sense strand starting at position 1670 of SEQ ID NO: 1560967
cccagauuccuguacagca

SEQ ID NO: 1637160 - RNA, 19 nt, Artificial Sequence
  Description of Artificial Sequence: Synthetic oligonucleotide
  Antisense strand to SEQ ID NO: 1637159
ugcuguacaggaaucuggg

SEQ ID NO: 1637161 - RNA, 19 nt, Artificial Sequence
  Description of Artificial Sequence: Synthetic oligonucleotide
  Sense strand starting at position 2041 of SEQ ID NO: 1560967
uguaguucugccgccgagu

SEQ ID NO: 1637162 - RNA, 19 nt, Artificial Sequence
  Description of Artificial Sequence: Synthetic oligonucleotide
  Antisense strand to SEQ ID NO: 1637161
acucggcggcagaacuaca

SEQ ID NO: 1637163 - RNA, 19 nt, Artificial Sequence
  Description of Artificial Sequence: Synthetic oligonucleotide
  Sense strand starting at position 2042 of SEQ ID NO: 1560967
guaguucugccgccgagua

SEQ ID NO: 1637164 - RNA, 19 nt, Artificial Sequence
  Description of Artificial Sequence: Synthetic oligonucleotide
  Antisense strand to SEQ ID NO: 1637163
uacucggcggcagaacuac

SEQ ID NO: 1637165 - RNA, 19 nt, Artificial Sequence
  Description of Artificial Sequence: Synthetic oligonucleotide
  Sense strand starting at position 2044 of SEQ ID NO: 1560967
aguucugccgccgaguauu

SEQ ID NO: 1637166 - RNA, 19 nt, Artificial Sequence
  Description of Artificial Sequence: Synthetic oligonucleotide
  Antisense strand to SEQ ID NO: 1637165
aauacucggcggcagaacu

SEQ ID NO: 1637167 - RNA, 19 nt, Artificial Sequence
  Description of Artificial Sequence: Synthetic oligonucleotide
  Sense strand starting at position 2054 of SEQ ID NO: 1560967
ccgaguauugugggaguug

SEQ ID NO: 1637168 - RNA, 19 nt, Artificial Sequence
  Description of Artificial Sequence: Synthetic oligonucleotide
  Antisense strand to SEQ ID NO: 1637167
caacucccacaauacucgg

SEQ ID NO: 1637169 - RNA, 19 nt, Artificial Sequence
  Description of Artificial Sequence: Synthetic oligonucleotide
  Sense strand starting at position 2073 of SEQ ID NO: 1560967
uaguccugacggugacuaa

SEQ ID NO: 1637170 - RNA, 19 nt, Artificial Sequence
  Description of Artificial Sequence: Synthetic oligonucleotide
  Antisense strand to SEQ ID NO: 1637169
uuagucaccgucaggacua

SEQ ID NO: 1637171 - RNA, 19 nt, Artificial Sequence
  Description of Artificial Sequence: Synthetic oligonucleotide
  Sense strand starting at position 2164 of SEQ ID NO: 1560967
cgcgccucuggguauuaua

SEQ ID NO: 1637172 - RNA, 19 nt, Artificial Sequence
  Description of Artificial Sequence: Synthetic oligonucleotide
  Antisense strand to SEQ ID NO: 1637171
uauaauacccagaggcgcg

SEQ ID NO: 1637173 - RNA, 19 nt, Artificial Sequence
  Description of Artificial Sequence: Synthetic oligonucleotide
  Sense strand starting at position 2167 of SEQ ID NO: 1560967
gccucuggguauuauagga

SEQ ID NO: 1637174 - RNA, 19 nt, Artificial Sequence
  Description of Artificial Sequence: Synthetic oligonucleotide
  Antisense strand to SEQ ID NO: 1637173
uccuauaauacccagaggc

SEQ ID NO: 1637175 - RNA, 19 nt, Artificial Sequence
  Description of Artificial Sequence: Synthetic oligonucleotide
  Sense strand starting at position 2263 of SEQ ID NO: 1560967
uguguacucucccagggaa

SEQ ID NO: 1637176 - RNA, 19 nt, Artificial Sequence
  Description of Artificial Sequence: Synthetic oligonucleotide
  Antisense strand to SEQ ID NO: 1637175
uucccugggagaguacaca

SEQ ID NO: 1637177 - RNA, 19 nt, Artificial Sequence
  Description of Artificial Sequence: Synthetic oligonucleotide
  Sense strand starting at position 2305 of SEQ ID NO: 1560967
cuguccuucugacucuaga

SEQ ID NO: 1637178 - RNA, 19 nt, Artificial Sequence
  Description of Artificial Sequence: Synthetic oligonucleotide
  Antisense strand to SEQ ID NO: 1637177
ucuagagucagaaggacag

SEQ ID NO: 1637179 - RNA, 19 nt, Artificial Sequence
  Description of Artificial Sequence: Synthetic oligonucleotide
  Sense strand starting at position 2368 of SEQ ID NO: 1560967
ggcccuagcccagauguuu

SEQ ID NO: 1637180 - RNA, 19 nt, Artificial Sequence
  Description of Artificial Sequence: Synthetic oligonucleotide
  Antisense strand to SEQ ID NO: 1637179
aaacaucugggcuagggcc

SEQ ID NO: 1637181 - RNA, 19 nt, Artificial Sequence
  Description of Artificial Sequence: Synthetic oligonucleotide
  Sense strand starting at position 2487 of SEQ ID NO: 1560967
uuagauaauuugugggaau

SEQ ID NO: 1637182 - RNA, 19 nt, Artificial Sequence
  Description of Artificial Sequence: Synthetic oligonucleotide
  Antisense strand to SEQ ID NO: 1637181
auucccacaaauuaucuaa

SEQ ID NO: 1637183 - RNA, 19 nt, Artificial Sequence
  Description of Artificial Sequence: Synthetic oligonucleotide
  Sense strand starting at position 2488 of SEQ ID NO: 1560967
uagauaauuugugggaauu

SEQ ID NO: 1637184 - RNA, 19 nt, Artificial Sequence
  Description of Artificial Sequence: Synthetic oligonucleotide
  Antisense strand to SEQ ID NO: 1637183
aauucccacaaauuaucua

SEQ ID NO: 1637185 - RNA, 19 nt, Artificial Sequence
  Description of Artificial Sequence: Synthetic oligonucleotide
  Sense strand starting at position 2490 of SEQ ID NO: 1560967
gauaauuugugggaauuga

SEQ ID NO: 1637186 - RNA, 19 nt, Artificial Sequence
  Description of Artificial Sequence: Synthetic oligonucleotide
  Antisense strand to SEQ ID NO: 1637185
ucaauucccacaaauuauc

SEQ ID NO: 1637187 - RNA, 19 nt, Artificial Sequence
  Description of Artificial Sequence: Synthetic oligonucleotide
  Sense strand starting at position 2501 of SEQ ID NO: 1560967
ggaauugauuccuuccuca

SEQ ID NO: 1637188 - RNA, 19 nt, Artificial Sequence
  Description of Artificial Sequence: Synthetic oligonucleotide
  Antisense strand to SEQ ID NO: 1637187
ugaggaaggaaucaauucc

SEQ ID NO: 1637189 - RNA, 19 nt, Artificial Sequence
  Description of Artificial Sequence: Synthetic oligonucleotide
  Sense strand starting at position 2505 of SEQ ID NO: 1560967
uugauuccuuccucaagag

SEQ ID NO: 1637190 - RNA, 19 nt, Artificial Sequence
  Description of Artificial Sequence: Synthetic oligonucleotide
  Antisense strand to SEQ ID NO: 1637189
cucuugaggaaggaaucaa

SEQ ID NO: 1637191 - RNA, 19 nt, Artificial Sequence
  Description of Artificial Sequence: Synthetic oligonucleotide
  Sense strand starting at position 3153 of SEQ ID NO: 1560967
gggauaaccaggugaccuu

SEQ ID NO: 1637192 - RNA, 19 nt, Artificial Sequence
  Description of Artificial Sequence: Synthetic oligonucleotide
  Antisense strand to SEQ ID NO: 1637191
aaggucaccugguuauccc

SEQ ID NO: 1637193 - RNA, 19 nt, Artificial Sequence
  Description of Artificial Sequence: Synthetic oligonucleotide
  Sense strand starting at position 3720 of SEQ ID NO: 1560967
ggaagauggcccugucuga

SEQ ID NO: 1637194 - RNA, 19 nt, Artificial Sequence
  Description of Artificial Sequence: Synthetic oligonucleotide
  Antisense strand to SEQ ID NO: 1637193
ucagacagggccaucuucc

SEQ ID NO: 1637195 - RNA, 19 nt, Artificial Sequence
  Description of Artificial Sequence: Synthetic oligonucleotide
  Sense strand starting at position 3798 of SEQ ID NO: 1560967
agaguuacacuuugaagau

SEQ ID NO: 1637196 - RNA, 19 nt, Artificial Sequence
  Description of Artificial Sequence: Synthetic oligonucleotide
  Antisense strand to SEQ ID NO: 1637195
aucuucaaaguguaacucu

SEQ ID NO: 1637197 - RNA, 19 nt, Artificial Sequence
  Description of Artificial Sequence: Synthetic oligonucleotide
  Sense strand starting at position 3799 of SEQ ID NO: 1560967
gaguuacacuuugaagauc

SEQ ID NO: 1637198 - RNA, 19 nt, Artificial Sequence
  Description of Artificial Sequence: Synthetic oligonucleotide
  Antisense strand to SEQ ID NO: 1637197
gaucuucaaaguguaacuc

SEQ ID NO: 1637199 - RNA, 19 nt, Artificial Sequence
  Description of Artificial Sequence: Synthetic oligonucleotide
  Sense strand starting at position 3813 of SEQ ID NO: 1560967
agaucagauuggcuaguua

SEQ ID NO: 1637200 - RNA, 19 nt, Artificial Sequence
  Description of Artificial Sequence: Synthetic oligonucleotide
  Antisense strand to SEQ ID NO: 1637199
uaacuagccaaucugaucu

SEQ ID NO: 1637201 - RNA, 19 nt, Artificial Sequence
  Description of Artificial Sequence: Synthetic oligonucleotide
  Sense strand starting at position 3824 of SEQ ID NO: 1560967
gcuaguuacuguuuauuuc

SEQ ID NO: 1637202 - RNA, 19 nt, Artificial Sequence
  Description of Artificial Sequence: Synthetic oligonucleotide
  Antisense strand to SEQ ID NO: 1637201
gaaauaaacaguaacuagc

SEQ ID NO: 1637203 - RNA, 19 nt, Artificial Sequence
  Description of Artificial Sequence: Synthetic oligonucleotide
  Sense strand starting at position 3832 of SEQ ID NO: 1560967
cuguuuauuuccucuuugu

SEQ ID NO: 1637204 - RNA, 19 nt, Artificial Sequence
  Description of Artificial Sequence: Synthetic oligonucleotide
  Antisense strand to SEQ ID NO: 1637203
acaaagaggaaauaaacag

SEQ ID NO: 1637205 - RNA, 19 nt, Artificial Sequence
  Description of Artificial Sequence: Synthetic oligonucleotide
  Sense strand starting at position 95 of SEQ ID NO: 1560968
gcaucuaaagcaugcuaga

SEQ ID NO: 1637206 - RNA, 19 nt, Artificial Sequence
  Description of Artificial Sequence: Synthetic oligonucleotide
  Antisense strand to SEQ ID NO: 1637205
ucuagcaugcuuuagaugc

SEQ ID NO: 1637207 - RNA, 19 nt, Artificial Sequence
  Description of Artificial Sequence: Synthetic oligonucleotide
  Sense strand starting at position 98 of SEQ ID NO: 1560968
ucuaaagcaugcuagauuu

SEQ ID NO: 1637208 - RNA, 19 nt, Artificial Sequence
  Description of Artificial Sequence: Synthetic oligonucleotide
  Antisense strand to SEQ ID NO: 1637207
aaaucuagcaugcuuuaga

SEQ ID NO: 1637209 - RNA, 19 nt, Artificial Sequence
  Description of Artificial Sequence: Synthetic oligonucleotide
  Sense strand starting at position 232 of SEQ ID NO: 1560968
guaagucccugcucucaau

SEQ ID NO: 1637210 - RNA, 19 nt, Artificial Sequence
  Description of Artificial Sequence: Synthetic oligonucleotide
  Antisense strand to SEQ ID NO: 1637209
auugagagcagggacuuac

SEQ ID NO: 1637211 - RNA, 19 nt, Artificial Sequence
  Description of Artificial Sequence: Synthetic oligonucleotide
  Sense strand starting at position 238 of SEQ ID NO: 1560968
cccugcucucaaugagaga

SEQ ID NO: 1637212 - RNA, 19 nt, Artificial Sequence
  Description of Artificial Sequence: Synthetic oligonucleotide
  Antisense strand to SEQ ID NO: 1637211
ucucucauugagagcaggg

SEQ ID NO: 1637213 - RNA, 19 nt, Artificial Sequence
  Description of Artificial Sequence: Synthetic oligonucleotide
  Sense strand starting at position 252 of SEQ ID NO: 1560968
agagaacacuaaugugaag

SEQ ID NO: 1637214 - RNA, 19 nt, Artificial Sequence
  Description of Artificial Sequence: Synthetic oligonucleotide
  Antisense strand to SEQ ID NO: 1637213
cuucacauuaguguucucu

SEQ ID NO: 1637215 - RNA, 19 nt, Artificial Sequence
  Description of Artificial Sequence: Synthetic oligonucleotide
  Sense strand starting at position 422 of SEQ ID NO: 1560968
auugauguggcacgaucau

SEQ ID NO: 1637216 - RNA, 19 nt, Artificial Sequence
  Description of Artificial Sequence: Synthetic oligonucleotide
  Antisense strand to SEQ ID NO: 1637215
augaucgugccacaucaau

SEQ ID NO: 1637217 - RNA, 19 nt, Artificial Sequence
  Description of Artificial Sequence: Synthetic oligonucleotide
  Sense strand starting at position 494 of SEQ ID NO: 1560968
gggaguagcuaggacuaaa

SEQ ID NO: 1637218 - RNA, 19 nt, Artificial Sequence
  Description of Artificial Sequence: Synthetic oligonucleotide
  Antisense strand to SEQ ID NO: 1637217
uuuaguccuagcuacuccc

SEQ ID NO: 1637219 - RNA, 19 nt, Artificial Sequence
  Description of Artificial Sequence: Synthetic oligonucleotide
  Sense strand starting at position 564 of SEQ ID NO: 1560968
agagucucccuauguuaga

SEQ ID NO: 1637220 - RNA, 19 nt, Artificial Sequence
  Description of Artificial Sequence: Synthetic oligonucleotide
  Antisense strand to SEQ ID NO: 1637219
ucuaacauagggagacucu

SEQ ID NO: 1637221 - RNA, 19 nt, Artificial Sequence
  Description of Artificial Sequence: Synthetic oligonucleotide
  Sense strand starting at position 579 of SEQ ID NO: 1560968
uagacuggcuggucucaaa

SEQ ID NO: 1637222 - RNA, 19 nt, Artificial Sequence
  Description of Artificial Sequence: Synthetic oligonucleotide
  Antisense strand to SEQ ID NO: 1637221
uuugagaccagccagucua

SEQ ID NO: 1637223 - RNA, 19 nt, Artificial Sequence
  Description of Artificial Sequence: Synthetic oligonucleotide
  Sense strand starting at position 632 of SEQ ID NO: 1560968
cccaaaucaucaggauuag

SEQ ID NO: 1637224 - RNA, 19 nt, Artificial Sequence
  Description of Artificial Sequence: Synthetic oligonucleotide
  Antisense strand to SEQ ID NO: 1637223
cuaauccugaugauuuggg

SEQ ID NO: 1637225 - RNA, 19 nt, Artificial Sequence
  Description of Artificial Sequence: Synthetic oligonucleotide
  Sense strand starting at position 686 of SEQ ID NO: 1560968
uguaaauguauauguguca

SEQ ID NO: 1637226 - RNA, 19 nt, Artificial Sequence
  Description of Artificial Sequence: Synthetic oligonucleotide
  Antisense strand to SEQ ID NO: 1637225
ugacacauauacauuuaca

SEQ ID NO: 1637227 - RNA, 19 nt, Artificial Sequence
  Description of Artificial Sequence: Synthetic oligonucleotide
  Sense strand starting at position 687 of SEQ ID NO: 1560968
guaaauguauaugugucau

SEQ ID NO: 1637228 - RNA, 19 nt, Artificial Sequence
  Description of Artificial Sequence: Synthetic oligonucleotide
  Antisense strand to SEQ ID NO: 1637227
augacacauauacauuuac

SEQ ID NO: 1637229 - RNA, 19 nt, Artificial Sequence
  Description of Artificial Sequence: Synthetic oligonucleotide
  Sense strand starting at position 728 of SEQ ID NO: 1560968
uacguuuaauuggucucau

SEQ ID NO: 1637230 - RNA, 19 nt, Artificial Sequence
  Description of Artificial Sequence: Synthetic oligonucleotide
  Antisense strand to SEQ ID NO: 1637229
augagaccaauuaaacgua

SEQ ID NO: 1637231 - RNA, 19 nt, Artificial Sequence
  Description of Artificial Sequence: Synthetic oligonucleotide
  Sense strand starting at position 729 of SEQ ID NO: 1560968
acguuuaauuggucucauu

SEQ ID NO: 1637232 - RNA, 19 nt, Artificial Sequence
  Description of Artificial Sequence: Synthetic oligonucleotide
  Antisense strand to SEQ ID NO: 1637231
aaugagaccaauuaaacgu

SEQ ID NO: 1637233 - RNA, 19 nt, Artificial Sequence
  Description of Artificial Sequence: Synthetic oligonucleotide
  Sense strand starting at position 795 of SEQ ID NO: 1560968
cuguguugccaggaugauc

SEQ ID NO: 1637234 - RNA, 19 nt, Artificial Sequence
  Description of Artificial Sequence: Synthetic oligonucleotide
  Antisense strand to SEQ ID NO: 1637233
gaucauccuggcaacacag

SEQ ID NO: 1637235 - RNA, 19 nt, Artificial Sequence
  Description of Artificial Sequence: Synthetic oligonucleotide
  Sense strand starting at position 888 of SEQ ID NO: 1560968
gcgaccgguucauuugaua

SEQ ID NO: 1637236 - RNA, 19 nt, Artificial Sequence
  Description of Artificial Sequence: Synthetic oligonucleotide
  Antisense strand to SEQ ID NO: 1637235
uaucaaaugaaccggucgc

SEQ ID NO: 1637237 - RNA, 19 nt, Artificial Sequence
  Description of Artificial Sequence: Synthetic oligonucleotide
  Sense strand starting at position 1108 of SEQ ID NO: 1560968
gcauaauauuuauaucgug

SEQ ID NO: 1637238 - RNA, 19 nt, Artificial Sequence
  Description of Artificial Sequence: Synthetic oligonucleotide
  Antisense strand to SEQ ID NO: 1637237
cacgauauaaauauuaugc

SEQ ID NO: 1637239 - RNA, 19 nt, Artificial Sequence
  Description of Artificial Sequence: Synthetic oligonucleotide
  Sense strand starting at position 1114 of SEQ ID NO: 1560968
uauuuauaucguggacgcu

SEQ ID NO: 1637240 - RNA, 19 nt, Artificial Sequence
  Description of Artificial Sequence: Synthetic oligonucleotide
  Antisense strand to SEQ ID NO: 1637239
agcguccacgauauaaaua

SEQ ID NO: 1637241 - RNA, 19 nt, Artificial Sequence
  Description of Artificial Sequence: Synthetic oligonucleotide
  Sense strand starting at position 1188 of SEQ ID NO: 1560968
guggcaaaguuccucaauc

SEQ ID NO: 1637242 - RNA, 19 nt, Artificial Sequence
  Description of Artificial Sequence: Synthetic oligonucleotide
  Antisense strand to SEQ ID NO: 1637241
gauugaggaacuuugccac

SEQ ID NO: 1637243 - RNA, 19 nt, Artificial Sequence
  Description of Artificial Sequence: Synthetic oligonucleotide
  Sense strand starting at position 1285 of SEQ ID NO: 1560968
aacacucggugacugauaa

SEQ ID NO: 1637244 - RNA, 19 nt, Artificial Sequence
  Description of Artificial Sequence: Synthetic oligonucleotide
  Antisense strand to SEQ ID NO: 1637243
uuaucagucaccgaguguu

SEQ ID NO: 1637245 - RNA, 19 nt, Artificial Sequence
  Description of Artificial Sequence: Synthetic oligonucleotide
  Sense strand starting at position 1286 of SEQ ID NO: 1560968
acacucggugacugauaaa

SEQ ID NO: 1637246 - RNA, 19 nt, Artificial Sequence
  Description of Artificial Sequence: Synthetic oligonucleotide
  Antisense strand to SEQ ID NO: 1637245
uuuaucagucaccgagugu

SEQ ID NO: 1637247 - RNA, 19 nt, Artificial Sequence
  Description of Artificial Sequence: Synthetic oligonucleotide
  Sense strand starting at position 1347 of SEQ ID NO: 1560968
cugagacccguuuauuauc

SEQ ID NO: 1637248 - RNA, 19 nt, Artificial Sequence
  Description of Artificial Sequence: Synthetic oligonucleotide
  Antisense strand to SEQ ID NO: 1637247
gauaauaaacgggucucag

SEQ ID NO: 1637249 - RNA, 19 nt, Artificial Sequence
  Description of Artificial Sequence: Synthetic oligonucleotide
  Sense strand starting at position 1364 of SEQ ID NO: 1560968
ucauuaacaucguuguugu

SEQ ID NO: 1637250 - RNA, 19 nt, Artificial Sequence
  Description of Artificial Sequence: Synthetic oligonucleotide
  Antisense strand to SEQ ID NO: 1637249
acaacaacgauguuaauga

SEQ ID NO: 1637251 - RNA, 19 nt, Artificial Sequence
  Description of Artificial Sequence: Synthetic oligonucleotide
  Sense strand starting at position 1380 of SEQ ID NO: 1560968
ugucgucacuacucaguau

SEQ ID NO: 1637252 - RNA, 19 nt, Artificial Sequence
  Description of Artificial Sequence: Synthetic oligonucleotide
  Antisense strand to SEQ ID NO: 1637251
auacugaguagugacgaca

SEQ ID NO: 1637253 - RNA, 19 nt, Artificial Sequence
  Description of Artificial Sequence: Synthetic oligonucleotide
  Sense strand starting at position 1392 of SEQ ID NO: 1560968
ucaguaucuccuggucauu

SEQ ID NO: 1637254 - RNA, 19 nt, Artificial Sequence
  Description of Artificial Sequence: Synthetic oligonucleotide
  Antisense strand to SEQ ID NO: 1637253
aaugaccaggagauacuga

SEQ ID NO: 1637255 - RNA, 19 nt, Artificial Sequence
  Description of Artificial Sequence: Synthetic oligonucleotide
  Sense strand starting at position 1395 of SEQ ID NO: 1560968
guaucuccuggucauuacu

SEQ ID NO: 1637256 - RNA, 19 nt, Artificial Sequence
  Description of Artificial Sequence: Synthetic oligonucleotide
  Antisense strand to SEQ ID NO: 1637255
aguaaugaccaggagauac

SEQ ID NO: 1637257 - RNA, 19 nt, Artificial Sequence
  Description of Artificial Sequence: Synthetic oligonucleotide
  Sense strand starting at position 1401 of SEQ ID NO: 1560968
ccuggucauuacuccuaga

SEQ ID NO: 1637258 - RNA, 19 nt, Artificial Sequence
  Description of Artificial Sequence: Synthetic oligonucleotide
  Antisense strand to SEQ ID NO: 1637257
ucuaggaguaaugaccagg

SEQ ID NO: 1637259 - RNA, 19 nt, Artificial Sequence
  Description of Artificial Sequence: Synthetic oligonucleotide
  Sense strand starting at position 1406 of SEQ ID NO: 1560968
ucauuacuccuagauucga

SEQ ID NO: 1637260 - RNA, 19 nt, Artificial Sequence
  Description of Artificial Sequence: Synthetic oligonucleotide
  Antisense strand to SEQ ID NO: 1637259
ucgaaucuaggaguaauga

SEQ ID NO: 1637261 - RNA, 19 nt, Artificial Sequence
  Description of Artificial Sequence: Synthetic oligonucleotide
  Sense strand starting at position 1414 of SEQ ID NO: 1560968
ccuagauucgaccaccagu

SEQ ID NO: 1637262 - RNA, 19 nt, Artificial Sequence
  Description of Artificial Sequence: Synthetic oligonucleotide
  Antisense strand to SEQ ID NO: 1637261
acugguggucgaaucuagg

SEQ ID NO: 1637263 - RNA, 19 nt, Artificial Sequence
  Description of Artificial Sequence: Synthetic oligonucleotide
  Sense strand starting at position 2592 of SEQ ID NO: 1560968
uuuauucuggucuggguau

SEQ ID NO: 1637264 - RNA, 19 nt, Artificial Sequence
  Description of Artificial Sequence: Synthetic oligonucleotide
  Antisense strand to SEQ ID NO: 1637263
auacccagaccagaauaaa

SEQ ID NO: 1637265 - RNA, 19 nt, Artificial Sequence
  Description of Artificial Sequence: Synthetic oligonucleotide
  Sense strand starting at position 2631 of SEQ ID NO: 1560968
agcagucaaagugaaaguu

SEQ ID NO: 1637266 - RNA, 19 nt, Artificial Sequence
  Description of Artificial Sequence: Synthetic oligonucleotide
  Antisense strand to SEQ ID NO: 1637265
aacuuucacuuugacugcu

SEQ ID NO: 1637267 - RNA, 19 nt, Artificial Sequence
  Description of Artificial Sequence: Synthetic oligonucleotide
  Sense strand starting at position 2745 of SEQ ID NO: 1560968
ucuuuagggaucuggaguu

SEQ ID NO: 1637268 - RNA, 19 nt, Artificial Sequence
  Description of Artificial Sequence: Synthetic oligonucleotide
  Antisense strand to SEQ ID NO: 1637267
aacuccagaucccuaaaga

SEQ ID NO: 1637269 - RNA, 19 nt, Artificial Sequence
  Description of Artificial Sequence: Synthetic oligonucleotide
  Sense strand starting at position 2802 of SEQ ID NO: 1560968
gcaggaguacuuuguugua

SEQ ID NO: 1637270 - RNA, 19 nt, Artificial Sequence
  Description of Artificial Sequence: Synthetic oligonucleotide
  Antisense strand to SEQ ID NO: 1637269
uacaacaaaguacuccugc

SEQ ID NO: 1637271 - RNA, 19 nt, Artificial Sequence
  Description of Artificial Sequence: Synthetic oligonucleotide
  Sense strand starting at position 2804 of SEQ ID NO: 1560968
aggaguacuuuguuguacu

SEQ ID NO: 1637272 - RNA, 19 nt, Artificial Sequence
  Description of Artificial Sequence: Synthetic oligonucleotide
  Antisense strand to SEQ ID NO: 1637271
aguacaacaaaguacuccu

SEQ ID NO: 1637273 - RNA, 19 nt, Artificial Sequence
  Description of Artificial Sequence: Synthetic oligonucleotide
  Sense strand starting at position 2812 of SEQ ID NO: 1560968
uuuguuguacuauaccuaa

SEQ ID NO: 1637274 - RNA, 19 nt, Artificial Sequence
  Description of Artificial Sequence: Synthetic oligonucleotide
  Antisense strand to SEQ ID NO: 1637273
uuagguauaguacaacaaa

SEQ ID NO: 1637275 - RNA, 19 nt, Artificial Sequence
  Description of Artificial Sequence: Synthetic oligonucleotide
  Sense strand starting at position 2886 of SEQ ID NO: 1560968
acagaauucucccuuggau

SEQ ID NO: 1637276 - RNA, 19 nt, Artificial Sequence
  Description of Artificial Sequence: Synthetic oligonucleotide
  Antisense strand to SEQ ID NO: 1637275
auccaagggagaauucugu

SEQ ID NO: 1637277 - RNA, 19 nt, Artificial Sequence
  Description of Artificial Sequence: Synthetic oligonucleotide
  Sense strand starting at position 2888 of SEQ ID NO: 1560968
agaauucucccuuggaucu

SEQ ID NO: 1637278 - RNA, 19 nt, Artificial Sequence
  Description of Artificial Sequence: Synthetic oligonucleotide
  Antisense strand to SEQ ID NO: 1637277
agauccaagggagaauucu

SEQ ID NO: 1637279 - RNA, 19 nt, Artificial Sequence
  Description of Artificial Sequence: Synthetic oligonucleotide
  Sense strand starting at position 2905 of SEQ ID NO: 1560968
cuaccaguccuggaggcau

SEQ ID NO: 1637280 - RNA, 19 nt, Artificial Sequence
  Description of Artificial Sequence: Synthetic oligonucleotide
  Antisense strand to SEQ ID NO: 1637279
augccuccaggacugguag

SEQ ID NO: 1637281 - RNA, 19 nt, Artificial Sequence
  Description of Artificial Sequence: Synthetic oligonucleotide
  Sense strand starting at position 3107 of SEQ ID NO: 1560968
guaaguuaguauguggagu

SEQ ID NO: 1637282 - RNA, 19 nt, Artificial Sequence
  Description of Artificial Sequence: Synthetic oligonucleotide
  Antisense strand to SEQ ID NO: 1637281
acuccacauacuaacuuac

SEQ ID NO: 1637283 - RNA, 19 nt, Artificial Sequence
  Description of Artificial Sequence: Synthetic oligonucleotide
  Sense strand starting at position 3108 of SEQ ID NO: 1560968
uaaguuaguauguggagua

SEQ ID NO: 1637284 - RNA, 19 nt, Artificial Sequence
  Description of Artificial Sequence: Synthetic oligonucleotide
  Antisense strand to SEQ ID NO: 1637283
uacuccacauacuaacuua

SEQ ID NO: 1637285 - RNA, 19 nt, Artificial Sequence
  Description of Artificial Sequence: Synthetic oligonucleotide
  Sense strand starting at position 21 of SEQ ID NO: 1560969
gugggcucaggauguaaau

SEQ ID NO: 1637286 - RNA, 19 nt, Artificial Sequence
  Description of Artificial Sequence: Synthetic oligonucleotide
  Antisense strand to SEQ ID NO: 1637285
auuuacauccugagcccac

SEQ ID NO: 1637287 - RNA, 19 nt, Artificial Sequence
  Description of Artificial Sequence: Synthetic oligonucleotide
  Sense strand starting at position 71 of SEQ ID NO: 1560969
cccagucccucuguaacua

SEQ ID NO: 1637288 - RNA, 19 nt, Artificial Sequence
  Description of Artificial Sequence: Synthetic oligonucleotide
  Antisense strand to SEQ ID NO: 1637287
uaguuacagagggacuggg

SEQ ID NO: 1637289 - RNA, 19 nt, Artificial Sequence
  Description of Artificial Sequence: Synthetic oligonucleotide
  Sense strand starting at position 83 of SEQ ID NO: 1560969
guaacuagaucucaugagu

SEQ ID NO: 1637290 - RNA, 19 nt, Artificial Sequence
  Description of Artificial Sequence: Synthetic oligonucleotide
  Antisense strand to SEQ ID NO: 1637289
acucaugagaucuaguuac

SEQ ID NO: 1637291 - RNA, 19 nt, Artificial Sequence
  Description of Artificial Sequence: Synthetic oligonucleotide
  Sense strand starting at position 88 of SEQ ID NO: 1560969
uagaucucaugaguuggaa

SEQ ID NO: 1637292 - RNA, 19 nt, Artificial Sequence
  Description of Artificial Sequence: Synthetic oligonucleotide
  Antisense strand to SEQ ID NO: 1637291
uuccaacucaugagaucua

SEQ ID NO: 1637293 - RNA, 19 nt, Artificial Sequence
  Description of Artificial Sequence: Synthetic oligonucleotide
  Sense strand starting at position 122 of SEQ ID NO: 1560969
ugggcuccuuuaucuuaaa

SEQ ID NO: 1637294 - RNA, 19 nt, Artificial Sequence
  Description of Artificial Sequence: Synthetic oligonucleotide
  Antisense strand to SEQ ID NO: 1637293
uuuaagauaaaggagccca

SEQ ID NO: 1637295 - RNA, 19 nt, Artificial Sequence
  Description of Artificial Sequence: Synthetic oligonucleotide
  Sense strand starting at position 481 of SEQ ID NO: 1560969
ugcugcugccuguacagau

SEQ ID NO: 1637296 - RNA, 19 nt, Artificial Sequence
  Description of Artificial Sequence: Synthetic oligonucleotide
  Antisense strand to SEQ ID NO: 1637295
aucuguacaggcagcagca

SEQ ID NO: 1637297 - RNA, 19 nt, Artificial Sequence
  Description of Artificial Sequence: Synthetic oligonucleotide
  Sense strand starting at position 613 of SEQ ID NO: 1560969
ugugacacgccuuggauaa

SEQ ID NO: 1637298 - RNA, 19 nt, Artificial Sequence
  Description of Artificial Sequence: Synthetic oligonucleotide
  Antisense strand to SEQ ID NO: 1637297
uuauccaaggcgugucaca

SEQ ID NO: 1637299 - RNA, 19 nt, Artificial Sequence
  Description of Artificial Sequence: Synthetic oligonucleotide
  Sense strand starting at position 794 of SEQ ID NO: 1560969
acugcaauucgguagggaa

SEQ ID NO: 1637300 - RNA, 19 nt, Artificial Sequence
  Description of Artificial Sequence: Synthetic oligonucleotide
  Antisense strand to SEQ ID NO: 1637299
uucccuaccgaauugcagu

SEQ ID NO: 1637301 - RNA, 19 nt, Artificial Sequence
  Description of Artificial Sequence: Synthetic oligonucleotide
  Sense strand starting at position 863 of SEQ ID NO: 1560969
uagagagcuugccugcauu

SEQ ID NO: 1637302 - RNA, 19 nt, Artificial Sequence
  Description of Artificial Sequence: Synthetic oligonucleotide
  Antisense strand to SEQ ID NO: 1637301
aaugcaggcaagcucucua

SEQ ID NO: 1637303 - RNA, 19 nt, Artificial Sequence
  Description of Artificial Sequence: Synthetic oligonucleotide
  Sense strand starting at position 873 of SEQ ID NO: 1560969
gccugcauuugugcaacua

SEQ ID NO: 1637304 - RNA, 19 nt, Artificial Sequence
  Description of Artificial Sequence: Synthetic oligonucleotide
  Antisense strand to SEQ ID NO: 1637303
uaguugcacaaaugcaggc

SEQ ID NO: 1637305 - RNA, 19 nt, Artificial Sequence
  Description of Artificial Sequence: Synthetic oligonucleotide
  Sense strand starting at position 918 of SEQ ID NO: 1560969
cucagaagucuugaagcua

SEQ ID NO: 1637306 - RNA, 19 nt, Artificial Sequence
  Description of Artificial Sequence: Synthetic oligonucleotide
  Antisense strand to SEQ ID NO: 1637305
uagcuucaagacuucugag

SEQ ID NO: 1637307 - RNA, 19 nt, Artificial Sequence
  Description of Artificial Sequence: Synthetic oligonucleotide
  Sense strand starting at position 1066 of SEQ ID NO: 1560969
cacggucucuugucuggaa

SEQ ID NO: 1637308 - RNA, 19 nt, Artificial Sequence
  Description of Artificial Sequence: Synthetic oligonucleotide
  Antisense strand to SEQ ID NO: 1637307
uuccagacaagagaccgug

SEQ ID NO: 1637309 - RNA, 19 nt, Artificial Sequence
  Description of Artificial Sequence: Synthetic oligonucleotide
  Sense strand starting at position 1068 of SEQ ID NO: 1560969
cggucucuugucuggaagu

SEQ ID NO: 1637310 - RNA, 19 nt, Artificial Sequence
  Description of Artificial Sequence: Synthetic oligonucleotide
  Antisense strand to SEQ ID NO: 1637309
acuuccagacaagagaccg

SEQ ID NO: 1637311 - RNA, 19 nt, Artificial Sequence
  Description of Artificial Sequence: Synthetic oligonucleotide
  Sense strand starting at position 1822 of SEQ ID NO: 1560969
ccugcuuucugccagaaac

SEQ ID NO: 1637312 - RNA, 19 nt, Artificial Sequence
  Description of Artificial Sequence: Synthetic oligonucleotide
  Antisense strand to SEQ ID NO: 1637311
guuucuggcagaaagcagg

SEQ ID NO: 1637313 - RNA, 19 nt, Artificial Sequence
  Description of Artificial Sequence: Synthetic oligonucleotide
  Sense strand starting at position 1824 of SEQ ID NO: 1560969
ugcuuucugccagaaacuc

SEQ ID NO: 1637314 - RNA, 19 nt, Artificial Sequence
  Description of Artificial Sequence: Synthetic oligonucleotide
  Antisense strand to SEQ ID NO: 1637313
gaguuucuggcagaaagca

SEQ ID NO: 1637315 - RNA, 19 nt, Artificial Sequence
  Description of Artificial Sequence: Synthetic oligonucleotide
  Sense strand starting at position 1845 of SEQ ID NO: 1560969
gcgcgugcgcacuuaacaa

SEQ ID NO: 1637316 - RNA, 19 nt, Artificial Sequence
  Description of Artificial Sequence: Synthetic oligonucleotide
  Antisense strand to SEQ ID NO: 1637315
uuguuaagugcgcacgcgc

SEQ ID NO: 1637317 - RNA, 19 nt, Artificial Sequence
  Description of Artificial Sequence: Synthetic oligonucleotide
  Sense strand starting at position 2193 of SEQ ID NO: 1560969
ggccuuccuccagguaaau

SEQ ID NO: 1637318 - RNA, 19 nt, Artificial Sequence
  Description of Artificial Sequence: Synthetic oligonucleotide
  Antisense strand to SEQ ID NO: 1637317
auuuaccuggaggaaggcc

SEQ ID NO: 1637319 - RNA, 19 nt, Artificial Sequence
  Description of Artificial Sequence: Synthetic oligonucleotide
  Sense strand starting at position 2301 of SEQ ID NO: 1560969
ggcaaacgcuuuccugaaa

SEQ ID NO: 1637320 - RNA, 19 nt, Artificial Sequence
  Description of Artificial Sequence: Synthetic oligonucleotide
  Antisense strand to SEQ ID NO: 1637319
uuucaggaaagcguuugcc

SEQ ID NO: 1637321 - RNA, 19 nt, Artificial Sequence
  Description of Artificial Sequence: Synthetic oligonucleotide
  Sense strand starting at position 2611 of SEQ ID NO: 1560969
ggaguuguucucuacucac

SEQ ID NO: 1637322 - RNA, 19 nt, Artificial Sequence
  Description of Artificial Sequence: Synthetic oligonucleotide
  Antisense strand to SEQ ID NO: 1637321
gugaguagagaacaacucc

SEQ ID NO: 1637323 - RNA, 19 nt, Artificial Sequence
  Description of Artificial Sequence: Synthetic oligonucleotide
  Sense strand starting at position 2728 of SEQ ID NO: 1560969
gccacaucguccguaucua

SEQ ID NO: 1637324 - RNA, 19 nt, Artificial Sequence
  Description of Artificial Sequence: Synthetic oligonucleotide
  Antisense strand to SEQ ID NO: 1637323
uagauacggacgauguggc

SEQ ID NO: 1637325 - RNA, 19 nt, Artificial Sequence
  Description of Artificial Sequence: Synthetic oligonucleotide
  Sense strand starting at position 2729 of SEQ ID NO: 1560969
ccacaucguccguaucuau

SEQ ID NO: 1637326 - RNA, 19 nt, Artificial Sequence
  Description of Artificial Sequence: Synthetic oligonucleotide
  Antisense strand to SEQ ID NO: 1637325
auagauacggacgaugugg

SEQ ID NO: 1637327 - RNA, 19 nt, Artificial Sequence
  Description of Artificial Sequence: Synthetic oligonucleotide
  Sense strand starting at position 2738 of SEQ ID NO: 1560969
ccguaucuaucucauggaa

SEQ ID NO: 1637328 - RNA, 19 nt, Artificial Sequence
  Description of Artificial Sequence: Synthetic oligonucleotide
  Antisense strand to SEQ ID NO: 1637327
uuccaugagauagauacgg

SEQ ID NO: 1637329 - RNA, 19 nt, Artificial Sequence
  Description of Artificial Sequence: Synthetic oligonucleotide
  Sense strand starting at position 2740 of SEQ ID NO: 1560969
guaucuaucucauggaaga

SEQ ID NO: 1637330 - RNA, 19 nt, Artificial Sequence
  Description of Artificial Sequence: Synthetic oligonucleotide
  Antisense strand to SEQ ID NO: 1637329
ucuuccaugagauagauac

SEQ ID NO: 1637331 - RNA, 19 nt, Artificial Sequence
  Description of Artificial Sequence: Synthetic oligonucleotide
  Sense strand starting at position 3192 of SEQ ID NO: 1560969
uacauacacgugugcauau

SEQ ID NO: 1637332 - RNA, 19 nt, Artificial Sequence
  Description of Artificial Sequence: Synthetic oligonucleotide
  Antisense strand to SEQ ID NO: 1637331
auaugcacacguguaugua

SEQ ID NO: 1637333 - RNA, 19 nt, Artificial Sequence
  Description of Artificial Sequence: Synthetic oligonucleotide
  Sense strand starting at position 3257 of SEQ ID NO: 1560969
uggaaauaucaaggccacu

SEQ ID NO: 1637334 - RNA, 19 nt, Artificial Sequence
  Description of Artificial Sequence: Synthetic oligonucleotide
  Antisense strand to SEQ ID NO: 1637333
aguggccuugauauuucca

SEQ ID NO: 1637335 - RNA, 19 nt, Artificial Sequence
  Description of Artificial Sequence: Synthetic oligonucleotide
  Sense strand starting at position 3270 of SEQ ID NO: 1560969
gccacucagugcuuccaga

SEQ ID NO: 1637336 - RNA, 19 nt, Artificial Sequence
  Description of Artificial Sequence: Synthetic oligonucleotide
  Antisense strand to SEQ ID NO: 1637335
ucuggaagcacugaguggc

SEQ ID NO: 1637337 - RNA, 19 nt, Artificial Sequence
  Description of Artificial Sequence: Synthetic oligonucleotide
  Sense strand starting at position 3288 of SEQ ID NO: 1560969
agggcucucagcugaacuu

SEQ ID NO: 1637338 - RNA, 19 nt, Artificial Sequence
  Description of Artificial Sequence: Synthetic oligonucleotide
  Antisense strand to SEQ ID NO: 1637337
aaguucagcugagagcccu

SEQ ID NO: 1637339 - RNA, 19 nt, Artificial Sequence
  Description of Artificial Sequence: Synthetic oligonucleotide
  Sense strand starting at position 3295 of SEQ ID NO: 1560969
ucagcugaacuuggaauau

SEQ ID NO: 1637340 - RNA, 19 nt, Artificial Sequence
  Description of Artificial Sequence: Synthetic oligonucleotide
  Antisense strand to SEQ ID NO: 1637339
auauuccaaguucagcuga

SEQ ID NO: 1637341 - RNA, 19 nt, Artificial Sequence
  Description of Artificial Sequence: Synthetic oligonucleotide
  Sense strand starting at position 3491 of SEQ ID NO: 1560969
aggucuuaccuagguugga

SEQ ID NO: 1637342 - RNA, 19 nt, Artificial Sequence
  Description of Artificial Sequence: Synthetic oligonucleotide
  Antisense strand to SEQ ID NO: 1637341
uccaaccuagguaagaccu

SEQ ID NO: 1637343 - RNA, 19 nt, Artificial Sequence
  Description of Artificial Sequence: Synthetic oligonucleotide
  Sense strand starting at position 3560 of SEQ ID NO: 1560969
cuacaaucugugggccaga

SEQ ID NO: 1637344 - RNA, 19 nt, Artificial Sequence
  Description of Artificial Sequence: Synthetic oligonucleotide
  Antisense strand to SEQ ID NO: 1637343
ucuggcccacagauuguag

SEQ ID NO: 1637345 - RNA, 19 nt, Artificial Sequence
  Description of Artificial Sequence: Synthetic oligonucleotide
  Sense strand starting at position 3563 of SEQ ID NO: 1560969
caaucugugggccagauau

SEQ ID NO: 1637346 - RNA, 19 nt, Artificial Sequence
  Description of Artificial Sequence: Synthetic oligonucleotide
  Antisense strand to SEQ ID NO: 1637345
auaucuggcccacagauug

SEQ ID NO: 1637347 - RNA, 19 nt, Artificial Sequence
  Description of Artificial Sequence: Synthetic oligonucleotide
  Sense strand starting at position 3576 of SEQ ID NO: 1560969
agauauagucuaugagcua

SEQ ID NO: 1637348 - RNA, 19 nt, Artificial Sequence
  Description of Artificial Sequence: Synthetic oligonucleotide
  Antisense strand to SEQ ID NO: 1637347
uagcucauagacuauaucu

SEQ ID NO: 1637349 - RNA, 19 nt, Artificial Sequence
  Description of Artificial Sequence: Synthetic oligonucleotide
  Sense strand starting at position 3577 of SEQ ID NO: 1560969
gauauagucuaugagcuaa

SEQ ID NO: 1637350 - RNA, 19 nt, Artificial Sequence
  Description of Artificial Sequence: Synthetic oligonucleotide
  Antisense strand to SEQ ID NO: 1637349
uuagcucauagacuauauc

SEQ ID NO: 1637351 - RNA, 19 nt, Artificial Sequence
  Description of Artificial Sequence: Synthetic oligonucleotide
  Sense strand starting at position 3778 of SEQ ID NO: 1560969
gcauuacagcuguguacua

SEQ ID NO: 1637352 - RNA, 19 nt, Artificial Sequence
  Description of Artificial Sequence: Synthetic oligonucleotide
  Antisense strand to SEQ ID NO: 1637351
uaguacacagcuguaaugc

SEQ ID NO: 1637353 - RNA, 19 nt, Artificial Sequence
  Description of Artificial Sequence: Synthetic oligonucleotide
  Sense strand starting at position 3783 of SEQ ID NO: 1560969
acagcuguguacuacuaua

SEQ ID NO: 1637354 - RNA, 19 nt, Artificial Sequence
  Description of Artificial Sequence: Synthetic oligonucleotide
  Antisense strand to SEQ ID NO: 1637353
uauaguaguacacagcugu

SEQ ID NO: 1637355 - RNA, 19 nt, Artificial Sequence
  Description of Artificial Sequence: Synthetic oligonucleotide
  Sense strand starting at position 62 of SEQ ID NO: 1560970
cgcuuauuaacggaucacu

SEQ ID NO: 1637356 - RNA, 19 nt, Artificial Sequence
  Description of Artificial Sequence: Synthetic oligonucleotide
  Antisense strand to SEQ ID NO: 1637355
agugauccguuaauaagcg

SEQ ID NO: 1637357 - RNA, 19 nt, Artificial Sequence
  Description of Artificial Sequence: Synthetic oligonucleotide
  Sense strand starting at position 405 of SEQ ID NO: 1560970
gcccuaggcuaguguuaca

SEQ ID NO: 1637358 - RNA, 19 nt, Artificial Sequence
  Description of Artificial Sequence: Synthetic oligonucleotide
  Antisense strand to SEQ ID NO: 1637357
uguaacacuagccuagggc

SEQ ID NO: 1637359 - RNA, 19 nt, Artificial Sequence
  Description of Artificial Sequence: Synthetic oligonucleotide
  Sense strand starting at position 429 of SEQ ID NO: 1560970
gagcccuaauucuugugau

SEQ ID NO: 1637360 - RNA, 19 nt, Artificial Sequence
  Description of Artificial Sequence: Synthetic oligonucleotide
  Antisense strand to SEQ ID NO: 1637359
aucacaagaauuagggcuc

SEQ ID NO: 1637361 - RNA, 19 nt, Artificial Sequence
  Description of Artificial Sequence: Synthetic oligonucleotide
  Sense strand starting at position 430 of SEQ ID NO: 1560970
agcccuaauucuugugaua

SEQ ID NO: 1637362 - RNA, 19 nt, Artificial Sequence
  Description of Artificial Sequence: Synthetic oligonucleotide
  Antisense strand to SEQ ID NO: 1637361
uaucacaagaauuagggcu

SEQ ID NO: 1637363 - RNA, 19 nt, Artificial Sequence
  Description of Artificial Sequence: Synthetic oligonucleotide
  Sense strand starting at position 442 of SEQ ID NO: 1560970
ugugauauccauuacucuu

SEQ ID NO: 1637364 - RNA, 19 nt, Artificial Sequence
  Description of Artificial Sequence: Synthetic oligonucleotide
  Antisense strand to SEQ ID NO: 1637363
aagaguaauggauaucaca

SEQ ID NO: 1637365 - RNA, 19 nt, Artificial Sequence
  Description of Artificial Sequence: Synthetic oligonucleotide
  Sense strand starting at position 913 of SEQ ID NO: 1560970
guguguccucagugccuaa

SEQ ID NO: 1637366 - RNA, 19 nt, Artificial Sequence
  Description of Artificial Sequence: Synthetic oligonucleotide
  Antisense strand to SEQ ID NO: 1637365
uuaggcacugaggacacac

SEQ ID NO: 1637367 - RNA, 19 nt, Artificial Sequence
  Description of Artificial Sequence: Synthetic oligonucleotide
  Sense strand starting at position 917 of SEQ ID NO: 1560970
guccucagugccuaaauca

SEQ ID NO: 1637368 - RNA, 19 nt, Artificial Sequence
  Description of Artificial Sequence: Synthetic oligonucleotide
  Antisense strand to SEQ ID NO: 1637367
ugauuuaggcacugaggac

SEQ ID NO: 1637369 - RNA, 19 nt, Artificial Sequence
  Description of Artificial Sequence: Synthetic oligonucleotide
  Sense strand starting at position 936 of SEQ ID NO: 1560970
gggccuggcacauacaaua

SEQ ID NO: 1637370 - RNA, 19 nt, Artificial Sequence
  Description of Artificial Sequence: Synthetic oligonucleotide
  Antisense strand to SEQ ID NO: 1637369
uauuguaugugccaggccc

SEQ ID NO: 1637371 - RNA, 19 nt, Artificial Sequence
  Description of Artificial Sequence: Synthetic oligonucleotide
  Sense strand starting at position 983 of SEQ ID NO: 1560970
augaaugaauaugagcaaa

SEQ ID NO: 1637372 - RNA, 19 nt, Artificial Sequence
  Description of Artificial Sequence: Synthetic oligonucleotide
  Antisense strand to SEQ ID NO: 1637371
uuugcucauauucauucau

SEQ ID NO: 1637373 - RNA, 19 nt, Artificial Sequence
  Description of Artificial Sequence: Synthetic oligonucleotide
  Sense strand starting at position 1025 of SEQ ID NO: 1560970
ggagaucauuauucucacu

SEQ ID NO: 1637374 - RNA, 19 nt, Artificial Sequence
  Description of Artificial Sequence: Synthetic oligonucleotide
  Antisense strand to SEQ ID NO: 1637373
agugagaauaaugaucucc

SEQ ID NO: 1637375 - RNA, 19 nt, Artificial Sequence
  Description of Artificial Sequence: Synthetic oligonucleotide
  Sense strand starting at position 1063 of SEQ ID NO: 1560970
ggcuuaagggcucagaaca

SEQ ID NO: 1637376 - RNA, 19 nt, Artificial Sequence
  Description of Artificial Sequence: Synthetic oligonucleotide
  Antisense strand to SEQ ID NO: 1637375
uguucugagcccuuaagcc

SEQ ID NO: 1637377 - RNA, 19 nt, Artificial Sequence
  Description of Artificial Sequence: Synthetic oligonucleotide
  Sense strand starting at position 1192 of SEQ ID NO: 1560970
ccguuuagccucuggacaa

SEQ ID NO: 1637378 - RNA, 19 nt, Artificial Sequence
  Description of Artificial Sequence: Synthetic oligonucleotide
  Antisense strand to SEQ ID NO: 1637377
uuguccagaggcuaaacgg

SEQ ID NO: 1637379 - RNA, 19 nt, Artificial Sequence
  Description of Artificial Sequence: Synthetic oligonucleotide
  Sense strand starting at position 1193 of SEQ ID NO: 1560970
cguuuagccucuggacaau

SEQ ID NO: 1637380 - RNA, 19 nt, Artificial Sequence
  Description of Artificial Sequence: Synthetic oligonucleotide
  Antisense strand to SEQ ID NO: 1637379
auuguccagaggcuaaacg

SEQ ID NO: 1637381 - RNA, 19 nt, Artificial Sequence
  Description of Artificial Sequence: Synthetic oligonucleotide
  Sense strand starting at position 1207 of SEQ ID NO: 1560970
acaauacuaucacggguuu

SEQ ID NO: 1637382 - RNA, 19 nt, Artificial Sequence
  Description of Artificial Sequence: Synthetic oligonucleotide
  Antisense strand to SEQ ID NO: 1637381
aaacccgugauaguauugu

SEQ ID NO: 1637383 - RNA, 19 nt, Artificial Sequence
  Description of Artificial Sequence: Synthetic oligonucleotide
  Sense strand starting at position 1208 of SEQ ID NO: 1560970
caauacuaucacggguuua

SEQ ID NO: 1637384 - RNA, 19 nt, Artificial Sequence
  Description of Artificial Sequence: Synthetic oligonucleotide
  Antisense strand to SEQ ID NO: 1637383
uaaacccgugauaguauug

SEQ ID NO: 1637385 - RNA, 19 nt, Artificial Sequence
  Description of Artificial Sequence: Synthetic oligonucleotide
  Sense strand starting at position 1379 of SEQ ID NO: 1560970
gguugaugcuccggaggca

SEQ ID NO: 1637386 - RNA, 19 nt, Artificial Sequence
  Description of Artificial Sequence: Synthetic oligonucleotide
  Antisense strand to SEQ ID NO: 1637385
ugccuccggagcaucaacc

SEQ ID NO: 1637387 - RNA, 19 nt, Artificial Sequence
  Description of Artificial Sequence: Synthetic oligonucleotide
  Sense strand starting at position 1834 of SEQ ID NO: 1560970
cccagugucuguccacaua

SEQ ID NO: 1637388 - RNA, 19 nt, Artificial Sequence
  Description of Artificial Sequence: Synthetic oligonucleotide
  Antisense strand to SEQ ID NO: 1637387
uauguggacagacacuggg

SEQ ID NO: 1637389 - RNA, 19 nt, Artificial Sequence
  Description of Artificial Sequence: Synthetic oligonucleotide
  Sense strand starting at position 2219 of SEQ ID NO: 1560970
acaaaugcuggcgagaaua

SEQ ID NO: 1637390 - RNA, 19 nt, Artificial Sequence
  Description of Artificial Sequence: Synthetic oligonucleotide
  Antisense strand to SEQ ID NO: 1637389
uauucucgccagcauuugu

SEQ ID NO: 1637391 - RNA, 19 nt, Artificial Sequence
  Description of Artificial Sequence: Synthetic oligonucleotide
  Sense strand starting at position 2221 of SEQ ID NO: 1560970
aaaugcuggcgagaauaca

SEQ ID NO: 1637392 - RNA, 19 nt, Artificial Sequence
  Description of Artificial Sequence: Synthetic oligonucleotide
  Antisense strand to SEQ ID NO: 1637391
uguauucucgccagcauuu

SEQ ID NO: 1637393 - RNA, 19 nt, Artificial Sequence
  Description of Artificial Sequence: Synthetic oligonucleotide
  Sense strand starting at position 2260 of SEQ ID NO: 1560970
cacaguuggccggagugua

SEQ ID NO: 1637394 - RNA, 19 nt, Artificial Sequence
  Description of Artificial Sequence: Synthetic oligonucleotide
  Antisense strand to SEQ ID NO: 1637393
uacacuccggccaacugug

SEQ ID NO: 1637395 - RNA, 19 nt, Artificial Sequence
  Description of Artificial Sequence: Synthetic oligonucleotide
  Sense strand starting at position 2301 of SEQ ID NO: 1560970
aacgguuuggcaggaucua

SEQ ID NO: 1637396 - RNA, 19 nt, Artificial Sequence
  Description of Artificial Sequence: Synthetic oligonucleotide
  Antisense strand to SEQ ID NO: 1637395
uagauccugccaaaccguu

SEQ ID NO: 1637397 - RNA, 19 nt, Artificial Sequence
  Description of Artificial Sequence: Synthetic oligonucleotide
  Sense strand starting at position 2333 of SEQ ID NO: 1560970
cuggaucuucucugacuca

SEQ ID NO: 1637398 - RNA, 19 nt, Artificial Sequence
  Description of Artificial Sequence: Synthetic oligonucleotide
  Antisense strand to SEQ ID NO: 1637397
ugagucagagaagauccag

SEQ ID NO: 1637399 - RNA, 19 nt, Artificial Sequence
  Description of Artificial Sequence: Synthetic oligonucleotide
  Sense strand starting at position 2365 of SEQ ID NO: 1560970
uagguagacguccaauaga

SEQ ID NO: 1637400 - RNA, 19 nt, Artificial Sequence
  Description of Artificial Sequence: Synthetic oligonucleotide
  Antisense strand to SEQ ID NO: 1637399
ucuauuggacgucuaccua

SEQ ID NO: 1637401 - RNA, 19 nt, Artificial Sequence
  Description of Artificial Sequence: Synthetic oligonucleotide
  Sense strand starting at position 2368 of SEQ ID NO: 1560970
guagacguccaauagauau

SEQ ID NO: 1637402 - RNA, 19 nt, Artificial Sequence
  Description of Artificial Sequence: Synthetic oligonucleotide
  Antisense strand to SEQ ID NO: 1637401
auaucuauuggacgucuac

SEQ ID NO: 1637403 - RNA, 19 nt, Artificial Sequence
  Description of Artificial Sequence: Synthetic oligonucleotide
  Sense strand starting at position 2434 of SEQ ID NO: 1560970
guacccauuagugggagaa

SEQ ID NO: 1637404 - RNA, 19 nt, Artificial Sequence
  Description of Artificial Sequence: Synthetic oligonucleotide
  Antisense strand to SEQ ID NO: 1637403
uucucccacuaauggguac

SEQ ID NO: 1637405 - RNA, 19 nt, Artificial Sequence
  Description of Artificial Sequence: Synthetic oligonucleotide
  Sense strand starting at position 2452 of SEQ ID NO: 1560970
aggaauaaauugugaucuc

SEQ ID NO: 1637406 - RNA, 19 nt, Artificial Sequence
  Description of Artificial Sequence: Synthetic oligonucleotide
  Antisense strand to SEQ ID NO: 1637405
gagaucacaauuuauuccu

SEQ ID NO: 1637407 - RNA, 19 nt, Artificial Sequence
  Description of Artificial Sequence: Synthetic oligonucleotide
  Sense strand starting at position 2453 of SEQ ID NO: 1560970
ggaauaaauugugaucucu

SEQ ID NO: 1637408 - RNA, 19 nt, Artificial Sequence
  Description of Artificial Sequence: Synthetic oligonucleotide
  Antisense strand to SEQ ID NO: 1637407
agagaucacaauuuauucc

SEQ ID NO: 1637409 - RNA, 19 nt, Artificial Sequence
  Description of Artificial Sequence: Synthetic oligonucleotide
  Sense strand starting at position 2461 of SEQ ID NO: 1560970
uugugaucucuucgcacag

SEQ ID NO: 1637410 - RNA, 19 nt, Artificial Sequence
  Description of Artificial Sequence: Synthetic oligonucleotide
  Antisense strand to SEQ ID NO: 1637409
cugugcgaagagaucacaa

SEQ ID NO: 1637411 - RNA, 19 nt, Artificial Sequence
  Description of Artificial Sequence: Synthetic oligonucleotide
  Sense strand starting at position 2463 of SEQ ID NO: 1560970
gugaucucuucgcacagca

SEQ ID NO: 1637412 - RNA, 19 nt, Artificial Sequence
  Description of Artificial Sequence: Synthetic oligonucleotide
  Antisense strand to SEQ ID NO: 1637411
ugcugugcgaagagaucac

SEQ ID NO: 1637413 - RNA, 19 nt, Artificial Sequence
  Description of Artificial Sequence: Synthetic oligonucleotide
  Sense strand starting at position 2465 of SEQ ID NO: 1560970
gaucucuucgcacagcaga

SEQ ID NO: 1637414 - RNA, 19 nt, Artificial Sequence
  Description of Artificial Sequence: Synthetic oligonucleotide
  Antisense strand to SEQ ID NO: 1637413
ucugcugugcgaagagauc

SEQ ID NO: 1637415 - RNA, 19 nt, Artificial Sequence
  Description of Artificial Sequence: Synthetic oligonucleotide
  Sense strand starting at position 2478 of SEQ ID NO: 1560970
agcagaauaucauacagca

SEQ ID NO: 1637416 - RNA, 19 nt, Artificial Sequence
  Description of Artificial Sequence: Synthetic oligonucleotide
  Antisense strand to SEQ ID NO: 1637415
ugcuguaugauauucugcu

SEQ ID NO: 1637417 - RNA, 19 nt, Artificial Sequence
  Description of Artificial Sequence: Synthetic oligonucleotide
  Sense strand starting at position 2579 of SEQ ID NO: 1560970
ccaguaaucugagcuauuc

SEQ ID NO: 1637418 - RNA, 19 nt, Artificial Sequence
  Description of Artificial Sequence: Synthetic oligonucleotide
  Antisense strand to SEQ ID NO: 1637417
gaauagcucagauuacugg

SEQ ID NO: 1637419 - RNA, 19 nt, Artificial Sequence
  Description of Artificial Sequence: Synthetic oligonucleotide
  Sense strand starting at position 2810 of SEQ ID NO: 1560970
gaguauacacuuugugauu

SEQ ID NO: 1637420 - RNA, 19 nt, Artificial Sequence
  Description of Artificial Sequence: Synthetic oligonucleotide
  Antisense strand to SEQ ID NO: 1637419
aaucacaaaguguauacuc

SEQ ID NO: 1637421 - RNA, 19 nt, Artificial Sequence
  Description of Artificial Sequence: Synthetic oligonucleotide
  Sense strand starting at position 2932 of SEQ ID NO: 1560970
ucuggaagauggcaagauu

SEQ ID NO: 1637422 - RNA, 19 nt, Artificial Sequence
  Description of Artificial Sequence: Synthetic oligonucleotide
  Antisense strand to SEQ ID NO: 1637421
aaucuugccaucuuccaga

SEQ ID NO: 1637423 - RNA, 19 nt, Artificial Sequence
  Description of Artificial Sequence: Synthetic oligonucleotide
  Sense strand starting at position 3407 of SEQ ID NO: 1560970
guagaugaggucugucauc

SEQ ID NO: 1637424 - RNA, 19 nt, Artificial Sequence
  Description of Artificial Sequence: Synthetic oligonucleotide
  Antisense strand to SEQ ID NO: 1637423
gaugacagaccucaucuac

SEQ ID NO: 1637425 - RNA, 19 nt, Artificial Sequence
  Description of Artificial Sequence: Synthetic oligonucleotide
  Sense strand starting at position 3650 of SEQ ID NO: 1560970
cccuaaguagcugggauaa

SEQ ID NO: 1637426 - RNA, 19 nt, Artificial Sequence
  Description of Artificial Sequence: Synthetic oligonucleotide
  Antisense strand to SEQ ID NO: 1637425
uuaucccagcuacuuaggg

SEQ ID NO: 1637427 - RNA, 19 nt, Artificial Sequence
  Description of Artificial Sequence: Synthetic oligonucleotide
  Sense strand starting at position 3663 of SEQ ID NO: 1560970
ggauaauaggcacaugcua

SEQ ID NO: 1637428 - RNA, 19 nt, Artificial Sequence
  Description of Artificial Sequence: Synthetic oligonucleotide
  Antisense strand to SEQ ID NO: 1637427
uagcaugugccuauuaucc

SEQ ID NO: 1637429 - RNA, 19 nt, Artificial Sequence
  Description of Artificial Sequence: Synthetic oligonucleotide
  Sense strand starting at position 3896 of SEQ ID NO: 1560970
ggugcaugcuaccugacua

SEQ ID NO: 1637430 - RNA, 19 nt, Artificial Sequence
  Description of Artificial Sequence: Synthetic oligonucleotide
  Antisense strand to SEQ ID NO: 1637429
uagucagguagcaugcacc

SEQ ID NO: 1637431 - RNA, 19 nt, Artificial Sequence
  Description of Artificial Sequence: Synthetic oligonucleotide
  Sense strand starting at position 165 of SEQ ID NO: 1560971
agcacaguugugcaaucaa

SEQ ID NO: 1637432 - RNA, 19 nt, Artificial Sequence
  Description of Artificial Sequence: Synthetic oligonucleotide
  Antisense strand to SEQ ID NO: 1637431
uugauugcacaacugugcu

SEQ ID NO: 1637433 - RNA, 19 nt, Artificial Sequence
  Description of Artificial Sequence: Synthetic oligonucleotide
  Sense strand starting at position 362 of SEQ ID NO: 1560971
ucaaguucuccuugucuua

SEQ ID NO: 1637434 - RNA, 19 nt, Artificial Sequence
  Description of Artificial Sequence: Synthetic oligonucleotide
  Antisense strand to SEQ ID NO: 1637433
uaagacaaggagaacuuga

SEQ ID NO: 1637435 - RNA, 19 nt, Artificial Sequence
  Description of Artificial Sequence: Synthetic oligonucleotide
  Sense strand starting at position 408 of SEQ ID NO: 1560971
augagccaucguuacuaga

SEQ ID NO: 1637436 - RNA, 19 nt, Artificial Sequence
  Description of Artificial Sequence: Synthetic oligonucleotide
  Antisense strand to SEQ ID NO: 1637435
ucuaguaacgauggcucau

SEQ ID NO: 1637437 - RNA, 19 nt, Artificial Sequence
  Description of Artificial Sequence: Synthetic oligonucleotide
  Sense strand starting at position 410 of SEQ ID NO: 1560971
gagccaucguuacuagaag

SEQ ID NO: 1637438 - RNA, 19 nt, Artificial Sequence
  Description of Artificial Sequence: Synthetic oligonucleotide
  Antisense strand to SEQ ID NO: 1637437
cuucuaguaacgauggcuc

SEQ ID NO: 1637439 - RNA, 19 nt, Artificial Sequence
  Description of Artificial Sequence: Synthetic oligonucleotide
  Sense strand starting at position 446 of SEQ ID NO: 1560971
auauauguccuaggcuaag

SEQ ID NO: 1637440 - RNA, 19 nt, Artificial Sequence
  Description of Artificial Sequence: Synthetic oligonucleotide
  Antisense strand to SEQ ID NO: 1637439
cuuagccuaggacauauau

SEQ ID NO: 1637441 - RNA, 19 nt, Artificial Sequence
  Description of Artificial Sequence: Synthetic oligonucleotide
  Sense strand starting at position 468 of SEQ ID NO: 1560971
ggagcauucuaacuaaguc

SEQ ID NO: 1637442 - RNA, 19 nt, Artificial Sequence
  Description of Artificial Sequence: Synthetic oligonucleotide
  Antisense strand to SEQ ID NO: 1637441
gacuuaguuagaaugcucc

SEQ ID NO: 1637443 - RNA, 19 nt, Artificial Sequence
  Description of Artificial Sequence: Synthetic oligonucleotide
  Sense strand starting at position 536 of SEQ ID NO: 1560971
ggaacuggauaucaauaca

SEQ ID NO: 1637444 - RNA, 19 nt, Artificial Sequence
  Description of Artificial Sequence: Synthetic oligonucleotide
  Antisense strand to SEQ ID NO: 1637443
uguauugauauccaguucc

SEQ ID NO: 1637445 - RNA, 19 nt, Artificial Sequence
  Description of Artificial Sequence: Synthetic oligonucleotide
  Sense strand starting at position 995 of SEQ ID NO: 1560971
uagagugucucauugagua

SEQ ID NO: 1637446 - RNA, 19 nt, Artificial Sequence
  Description of Artificial Sequence: Synthetic oligonucleotide
  Antisense strand to SEQ ID NO: 1637445
uacucaaugagacacucua

SEQ ID NO: 1637447 - RNA, 19 nt, Artificial Sequence
  Description of Artificial Sequence: Synthetic oligonucleotide
  Sense strand starting at position 999 of SEQ ID NO: 1560971
gugucucauugaguacuua

SEQ ID NO: 1637448 - RNA, 19 nt, Artificial Sequence
  Description of Artificial Sequence: Synthetic oligonucleotide
  Antisense strand to SEQ ID NO: 1637447
uaaguacucaaugagacac

SEQ ID NO: 1637449 - RNA, 19 nt, Artificial Sequence
  Description of Artificial Sequence: Synthetic oligonucleotide
  Sense strand starting at position 1034 of SEQ ID NO: 1560971
agaggauaugauuguucua

SEQ ID NO: 1637450 - RNA, 19 nt, Artificial Sequence
  Description of Artificial Sequence: Synthetic oligonucleotide
  Antisense strand to SEQ ID NO: 1637449
uagaacaaucauauccucu

SEQ ID NO: 1637451 - RNA, 19 nt, Artificial Sequence
  Description of Artificial Sequence: Synthetic oligonucleotide
  Sense strand starting at position 1036 of SEQ ID NO: 1560971
aggauaugauuguucuacu

SEQ ID NO: 1637452 - RNA, 19 nt, Artificial Sequence
  Description of Artificial Sequence: Synthetic oligonucleotide
  Antisense strand to SEQ ID NO: 1637451
aguagaacaaucauauccu

SEQ ID NO: 1637453 - RNA, 19 nt, Artificial Sequence
  Description of Artificial Sequence: Synthetic oligonucleotide
  Sense strand starting at position 1037 of SEQ ID NO: 1560971
ggauaugauuguucuacug

SEQ ID NO: 1637454 - RNA, 19 nt, Artificial Sequence
  Description of Artificial Sequence: Synthetic oligonucleotide
  Antisense strand to SEQ ID NO: 1637453
caguagaacaaucauaucc

SEQ ID NO: 1637455 - RNA, 19 nt, Artificial Sequence
  Description of Artificial Sequence: Synthetic oligonucleotide
  Sense strand starting at position 1078 of SEQ ID NO: 1560971
agagcaguuaagugacuua

SEQ ID NO: 1637456 - RNA, 19 nt, Artificial Sequence
  Description of Artificial Sequence: Synthetic oligonucleotide
  Antisense strand to SEQ ID NO: 1637455
uaagucacuuaacugcucu

SEQ ID NO: 1637457 - RNA, 19 nt, Artificial Sequence
  Description of Artificial Sequence: Synthetic oligonucleotide
  Sense strand starting at position 1081 of SEQ ID NO: 1560971
gcaguuaagugacuuaccu

SEQ ID NO: 1637458 - RNA, 19 nt, Artificial Sequence
  Description of Artificial Sequence: Synthetic oligonucleotide
  Antisense strand to SEQ ID NO: 1637457
agguaagucacuuaacugc

SEQ ID NO: 1637459 - RNA, 19 nt, Artificial Sequence
  Description of Artificial Sequence: Synthetic oligonucleotide
  Sense strand starting at position 1201 of SEQ ID NO: 1560971
ggaggaguuacccaggcua

SEQ ID NO: 1637460 - RNA, 19 nt, Artificial Sequence
  Description of Artificial Sequence: Synthetic oligonucleotide
  Antisense strand to SEQ ID NO: 1637459
uagccuggguaacuccucc

SEQ ID NO: 1637461 - RNA, 19 nt, Artificial Sequence
  Description of Artificial Sequence: Synthetic oligonucleotide
  Sense strand starting at position 1613 of SEQ ID NO: 1560971
uccagacucccugaagcau

SEQ ID NO: 1637462 - RNA, 19 nt, Artificial Sequence
  Description of Artificial Sequence: Synthetic oligonucleotide
  Antisense strand to SEQ ID NO: 1637461
augcuucagggagucugga

SEQ ID NO: 1637463 - RNA, 19 nt, Artificial Sequence
  Description of Artificial Sequence: Synthetic oligonucleotide
  Sense strand starting at position 2087 of SEQ ID NO: 1560971
gagacccgucacugucaua

SEQ ID NO: 1637464 - RNA, 19 nt, Artificial Sequence
  Description of Artificial Sequence: Synthetic oligonucleotide
  Antisense strand to SEQ ID NO: 1637463
uaugacagugacgggucuc

SEQ ID NO: 1637465 - RNA, 19 nt, Artificial Sequence
  Description of Artificial Sequence: Synthetic oligonucleotide
  Sense strand starting at position 2132 of SEQ ID NO: 1560971
uuuaaagcaugacugauau

SEQ ID NO: 1637466 - RNA, 19 nt, Artificial Sequence
  Description of Artificial Sequence: Synthetic oligonucleotide
  Antisense strand to SEQ ID NO: 1637465
auaucagucaugcuuuaaa

SEQ ID NO: 1637467 - RNA, 19 nt, Artificial Sequence
  Description of Artificial Sequence: Synthetic oligonucleotide
  Sense strand starting at position 2181 of SEQ ID NO: 1560971
agauaagucugucugucua

SEQ ID NO: 1637468 - RNA, 19 nt, Artificial Sequence
  Description of Artificial Sequence: Synthetic oligonucleotide
  Antisense strand to SEQ ID NO: 1637467
uagacagacagacuuaucu

SEQ ID NO: 1637469 - RNA, 19 nt, Artificial Sequence
  Description of Artificial Sequence: Synthetic oligonucleotide
  Sense strand starting at position 2183 of SEQ ID NO: 1560971
auaagucugucugucuaga

SEQ ID NO: 1637470 - RNA, 19 nt, Artificial Sequence
  Description of Artificial Sequence: Synthetic oligonucleotide
  Antisense strand to SEQ ID NO: 1637469
ucuagacagacagacuuau

SEQ ID NO: 1637471 - RNA, 19 nt, Artificial Sequence
  Description of Artificial Sequence: Synthetic oligonucleotide
  Sense strand starting at position 2185 of SEQ ID NO: 1560971
aagucugucugucuagaag

SEQ ID NO: 1637472 - RNA, 19 nt, Artificial Sequence
  Description of Artificial Sequence: Synthetic oligonucleotide
  Antisense strand to SEQ ID NO: 1637471
cuucuagacagacagacuu

SEQ ID NO: 1637473 - RNA, 19 nt, Artificial Sequence
  Description of Artificial Sequence: Synthetic oligonucleotide
  Sense strand starting at position 2191 of SEQ ID NO: 1560971
gucugucuagaaggacaua

SEQ ID NO: 1637474 - RNA, 19 nt, Artificial Sequence
  Description of Artificial Sequence: Synthetic oligonucleotide
  Antisense strand to SEQ ID NO: 1637473
uauguccuucuagacagac

SEQ ID NO: 1637475 - RNA, 19 nt, Artificial Sequence
  Description of Artificial Sequence: Synthetic oligonucleotide
  Sense strand starting at position 2286 of SEQ ID NO: 1560971
ucuuauuccuaguuuaagu

SEQ ID NO: 1637476 - RNA, 19 nt, Artificial Sequence
  Description of Artificial Sequence: Synthetic oligonucleotide
  Antisense strand to SEQ ID NO: 1637475
acuuaaacuaggaauaaga

SEQ ID NO: 1637477 - RNA, 19 nt, Artificial Sequence
  Description of Artificial Sequence: Synthetic oligonucleotide
  Sense strand starting at position 2288 of SEQ ID NO: 1560971
uuauuccuaguuuaaguga

SEQ ID NO: 1637478 - RNA, 19 nt, Artificial Sequence
  Description of Artificial Sequence: Synthetic oligonucleotide
  Antisense strand to SEQ ID NO: 1637477
ucacuuaaacuaggaauaa

SEQ ID NO: 1637479 - RNA, 19 nt, Artificial Sequence
  Description of Artificial Sequence: Synthetic oligonucleotide
  Sense strand starting at position 2291 of SEQ ID NO: 1560971
uuccuaguuuaagugauac

SEQ ID NO: 1637480 - RNA, 19 nt, Artificial Sequence
  Description of Artificial Sequence: Synthetic oligonucleotide
  Antisense strand to SEQ ID NO: 1637479
guaucacuuaaacuaggaa

SEQ ID NO: 1637481 - RNA, 19 nt, Artificial Sequence
  Description of Artificial Sequence: Synthetic oligonucleotide
  Sense strand starting at position 2335 of SEQ ID NO: 1560971
acuuucugacuuuauugua

SEQ ID NO: 1637482 - RNA, 19 nt, Artificial Sequence
  Description of Artificial Sequence: Synthetic oligonucleotide
  Antisense strand to SEQ ID NO: 1637481
uacaauaaagucagaaagu

SEQ ID NO: 1637483 - RNA, 19 nt, Artificial Sequence
  Description of Artificial Sequence: Synthetic oligonucleotide
  Sense strand starting at position 2565 of SEQ ID NO: 1560971
gcuugaacaacgugacaaa

SEQ ID NO: 1637484 - RNA, 19 nt, Artificial Sequence
  Description of Artificial Sequence: Synthetic oligonucleotide
  Antisense strand to SEQ ID NO: 1637483
uuugucacguuguucaagc

SEQ ID NO: 1637485 - RNA, 19 nt, Artificial Sequence
  Description of Artificial Sequence: Synthetic oligonucleotide
  Sense strand starting at position 3189 of SEQ ID NO: 1560971
ucgaguuucguccaaacug

SEQ ID NO: 1637486 - RNA, 19 nt, Artificial Sequence
  Description of Artificial Sequence: Synthetic oligonucleotide
  Antisense strand to SEQ ID NO: 1637485
caguuuggacgaaacucga

SEQ ID NO: 1637487 - RNA, 19 nt, Artificial Sequence
  Description of Artificial Sequence: Synthetic oligonucleotide
  Sense strand starting at position 3208 of SEQ ID NO: 1560971
cugucugugcguuuaagca

SEQ ID NO: 1637488 - RNA, 19 nt, Artificial Sequence
  Description of Artificial Sequence: Synthetic oligonucleotide
  Antisense strand to SEQ ID NO: 1637487
ugcuuaaacgcacagacag

SEQ ID NO: 1637489 - RNA, 19 nt, Artificial Sequence
  Description of Artificial Sequence: Synthetic oligonucleotide
  Sense strand starting at position 3215 of SEQ ID NO: 1560971
ugcguuuaagcacaucaua

SEQ ID NO: 1637490 - RNA, 19 nt, Artificial Sequence
  Description of Artificial Sequence: Synthetic oligonucleotide
  Antisense strand to SEQ ID NO: 1637489
uaugaugugcuuaaacgca

SEQ ID NO: 1637491 - RNA, 19 nt, Artificial Sequence
  Description of Artificial Sequence: Synthetic oligonucleotide
  Sense strand starting at position 3233 of SEQ ID NO: 1560971
auaaacaugugcuccuaga

SEQ ID NO: 1637492 - RNA, 19 nt, Artificial Sequence
  Description of Artificial Sequence: Synthetic oligonucleotide
  Antisense strand to SEQ ID NO: 1637491
ucuaggagcacauguuuau

SEQ ID NO: 1637493 - RNA, 19 nt, Artificial Sequence
  Description of Artificial Sequence: Synthetic oligonucleotide
  Sense strand starting at position 3297 of SEQ ID NO: 1560971
ugugucaugcucgacacuu

SEQ ID NO: 1637494 - RNA, 19 nt, Artificial Sequence
  Description of Artificial Sequence: Synthetic oligonucleotide
  Antisense strand to SEQ ID NO: 1637493
aagugucgagcaugacaca

SEQ ID NO: 1637495 - RNA, 19 nt, Artificial Sequence
  Description of Artificial Sequence: Synthetic oligonucleotide
  Sense strand starting at position 3340 of SEQ ID NO: 1560971
gaucacgaaucauuaagua

SEQ ID NO: 1637496 - RNA, 19 nt, Artificial Sequence
  Description of Artificial Sequence: Synthetic oligonucleotide
  Antisense strand to SEQ ID NO: 1637495
uacuuaaugauucgugauc

SEQ ID NO: 1637497 - RNA, 19 nt, Artificial Sequence
  Description of Artificial Sequence: Synthetic oligonucleotide
  Sense strand starting at position 3357 of SEQ ID NO: 1560971
uauuuagguugaugaaaug

SEQ ID NO: 1637498 - RNA, 19 nt, Artificial Sequence
  Description of Artificial Sequence: Synthetic oligonucleotide
  Antisense strand to SEQ ID NO: 1637497
cauuucaucaaccuaaaua

SEQ ID NO: 1637499 - RNA, 19 nt, Artificial Sequence
  Description of Artificial Sequence: Synthetic oligonucleotide
  Sense strand starting at position 3367 of SEQ ID NO: 1560971
gaugaaaugucaccaacug

SEQ ID NO: 1637500 - RNA, 19 nt, Artificial Sequence
  Description of Artificial Sequence: Synthetic oligonucleotide
  Antisense strand to SEQ ID NO: 1637499
caguuggugacauuucauc

SEQ ID NO: 1637501 - RNA, 19 nt, Artificial Sequence
  Description of Artificial Sequence: Synthetic oligonucleotide
  Sense strand starting at position 3384 of SEQ ID NO: 1560971
ugagcaaaccugugugaca

SEQ ID NO: 1637502 - RNA, 19 nt, Artificial Sequence
  Description of Artificial Sequence: Synthetic oligonucleotide
  Antisense strand to SEQ ID NO: 1637501
ugucacacagguuugcuca

SEQ ID NO: 1637503 - RNA, 19 nt, Artificial Sequence
  Description of Artificial Sequence: Synthetic oligonucleotide
  Sense strand starting at position 3385 of SEQ ID NO: 1560971
gagcaaaccugugugacau

SEQ ID NO: 1637504 - RNA, 19 nt, Artificial Sequence
  Description of Artificial Sequence: Synthetic oligonucleotide
  Antisense strand to SEQ ID NO: 1637503
augucacacagguuugcuc

SEQ ID NO: 1637505 - RNA, 19 nt, Artificial Sequence
  Description of Artificial Sequence: Synthetic oligonucleotide
  Sense strand starting at position 3386 of SEQ ID NO: 1560971
agcaaaccugugugacauu

SEQ ID NO: 1637506 - RNA, 19 nt, Artificial Sequence
  Description of Artificial Sequence: Synthetic oligonucleotide
  Antisense strand to SEQ ID NO: 1637505
aaugucacacagguuugcu

SEQ ID NO: 1637507 - RNA, 19 nt, Artificial Sequence
  Description of Artificial Sequence: Synthetic oligonucleotide
  Sense strand starting at position 3453 of SEQ ID NO: 1560971
cuuucuucccagcacgaau

SEQ ID NO: 1637508 - RNA, 19 nt, Artificial Sequence
  Description of Artificial Sequence: Synthetic oligonucleotide
  Antisense strand to SEQ ID NO: 1637507
auucgugcugggaagaaag

SEQ ID NO: 1637509 - RNA, 19 nt, Artificial Sequence
  Description of Artificial Sequence: Synthetic oligonucleotide
  Sense strand starting at position 3970 of SEQ ID NO: 1560971
gugacaauuccaugacuua

SEQ ID NO: 1637510 - RNA, 19 nt, Artificial Sequence
  Description of Artificial Sequence: Synthetic oligonucleotide
  Antisense strand to SEQ ID NO: 1637509
uaagucauggaauugucac

SEQ ID NO: 1637511 - RNA, 19 nt, Artificial Sequence
  Description of Artificial Sequence: Synthetic oligonucleotide
  Sense strand starting at position 1001 of SEQ ID NO: 1560972
ggcauauuaggagggaagu

SEQ ID NO: 1637512 - RNA, 19 nt, Artificial Sequence
  Description of Artificial Sequence: Synthetic oligonucleotide
  Antisense strand to SEQ ID NO: 1637511
acuucccuccuaauaugcc

SEQ ID NO: 1637513 - RNA, 19 nt, Artificial Sequence
  Description of Artificial Sequence: Synthetic oligonucleotide
  Sense strand starting at position 1405 of SEQ ID NO: 1560972
gcaggaguccugcagagau

SEQ ID NO: 1637514 - RNA, 19 nt, Artificial Sequence
  Description of Artificial Sequence: Synthetic oligonucleotide
  Antisense strand to SEQ ID NO: 1637513
aucucugcaggacuccugc

SEQ ID NO: 1637515 - RNA, 19 nt, Artificial Sequence
  Description of Artificial Sequence: Synthetic oligonucleotide
  Sense strand starting at position 1700 of SEQ ID NO: 1560972
gagggaugguacccuggau

SEQ ID NO: 1637516 - RNA, 19 nt, Artificial Sequence
  Description of Artificial Sequence: Synthetic oligonucleotide
  Antisense strand to SEQ ID NO: 1637515
auccaggguaccaucccuc

SEQ ID NO: 1637517 - RNA, 19 nt, Artificial Sequence
  Description of Artificial Sequence: Synthetic oligonucleotide
  Sense strand starting at position 2011 of SEQ ID NO: 1560972
auuccuugauucuggaauu

SEQ ID NO: 1637518 - RNA, 19 nt, Artificial Sequence
  Description of Artificial Sequence: Synthetic oligonucleotide
  Antisense strand to SEQ ID NO: 1637517
aauuccagaaucaaggaau

SEQ ID NO: 1637519 - RNA, 19 nt, Artificial Sequence
  Description of Artificial Sequence: Synthetic oligonucleotide
  Sense strand starting at position 2012 of SEQ ID NO: 1560972
uuccuugauucuggaauua

SEQ ID NO: 1637520 - RNA, 19 nt, Artificial Sequence
  Description of Artificial Sequence: Synthetic oligonucleotide
  Antisense strand to SEQ ID NO: 1637519
uaauuccagaaucaaggaa

SEQ ID NO: 1637521 - RNA, 19 nt, Artificial Sequence
  Description of Artificial Sequence: Synthetic oligonucleotide
  Sense strand starting at position 2158 of SEQ ID NO: 1560972
gggagugagucagaugcuu

SEQ ID NO: 1637522 - RNA, 19 nt, Artificial Sequence
  Description of Artificial Sequence: Synthetic oligonucleotide
  Antisense strand to SEQ ID NO: 1637521
aagcaucugacucacuccc

SEQ ID NO: 1637523 - RNA, 19 nt, Artificial Sequence
  Description of Artificial Sequence: Synthetic oligonucleotide
  Sense strand starting at position 2160 of SEQ ID NO: 1560972
gagugagucagaugcuuag

SEQ ID NO: 1637524 - RNA, 19 nt, Artificial Sequence
  Description of Artificial Sequence: Synthetic oligonucleotide
  Antisense strand to SEQ ID NO: 1637523
cuaagcaucugacucacuc

SEQ ID NO: 1637525 - RNA, 19 nt, Artificial Sequence
  Description of Artificial Sequence: Synthetic oligonucleotide
  Sense strand starting at position 2163 of SEQ ID NO: 1560972
ugagucagaugcuuagaca

SEQ ID NO: 1637526 - RNA, 19 nt, Artificial Sequence
  Description of Artificial Sequence: Synthetic oligonucleotide
  Antisense strand to SEQ ID NO: 1637525
ugucuaagcaucugacuca

SEQ ID NO: 1637527 - RNA, 19 nt, Artificial Sequence
  Description of Artificial Sequence: Synthetic oligonucleotide
  Sense strand starting at position 2166 of SEQ ID NO: 1560972
gucagaugcuuagacaaca

SEQ ID NO: 1637528 - RNA, 19 nt, Artificial Sequence
  Description of Artificial Sequence: Synthetic oligonucleotide
  Antisense strand to SEQ ID NO: 1637527
uguugucuaagcaucugac

SEQ ID NO: 1637529 - RNA, 19 nt, Artificial Sequence
  Description of Artificial Sequence: Synthetic oligonucleotide
  Sense strand starting at position 2192 of SEQ ID NO: 1560972
ucuuuauuguugccucgaa

SEQ ID NO: 1637530 - RNA, 19 nt, Artificial Sequence
  Description of Artificial Sequence: Synthetic oligonucleotide
  Antisense strand to SEQ ID NO: 1637529
uucgaggcaacaauaaaga

SEQ ID NO: 1637531 - RNA, 19 nt, Artificial Sequence
  Description of Artificial Sequence: Synthetic oligonucleotide
  Sense strand starting at position 2193 of SEQ ID NO: 1560972
cuuuauuguugccucgaau

SEQ ID NO: 1637532 - RNA, 19 nt, Artificial Sequence
  Description of Artificial Sequence: Synthetic oligonucleotide
  Antisense strand to SEQ ID NO: 1637531
auucgaggcaacaauaaag

SEQ ID NO: 1637533 - RNA, 19 nt, Artificial Sequence
  Description of Artificial Sequence: Synthetic oligonucleotide
  Sense strand starting at position 2270 of SEQ ID NO: 1560972
cagugaggauuugaugaaa

SEQ ID NO: 1637534 - RNA, 19 nt, Artificial Sequence
  Description of Artificial Sequence: Synthetic oligonucleotide
  Antisense strand to SEQ ID NO: 1637533
uuucaucaaauccucacug

SEQ ID NO: 1637535 - RNA, 19 nt, Artificial Sequence
  Description of Artificial Sequence: Synthetic oligonucleotide
  Sense strand starting at position 2293 of SEQ ID NO: 1560972
ucaccuuccuucgacgaaa

SEQ ID NO: 1637536 - RNA, 19 nt, Artificial Sequence
  Description of Artificial Sequence: Synthetic oligonucleotide
  Antisense strand to SEQ ID NO: 1637535
uuucgucgaaggaagguga

SEQ ID NO: 1637537 - RNA, 19 nt, Artificial Sequence
  Description of Artificial Sequence: Synthetic oligonucleotide
  Sense strand starting at position 2295 of SEQ ID NO: 1560972
accuuccuucgacgaaaua

SEQ ID NO: 1637538 - RNA, 19 nt, Artificial Sequence
  Description of Artificial Sequence: Synthetic oligonucleotide
  Antisense strand to SEQ ID NO: 1637537
uauuucgucgaaggaaggu

SEQ ID NO: 1637539 - RNA, 19 nt, Artificial Sequence
  Description of Artificial Sequence: Synthetic oligonucleotide
  Sense strand starting at position 2296 of SEQ ID NO: 1560972
ccuuccuucgacgaaauau

SEQ ID NO: 1637540 - RNA, 19 nt, Artificial Sequence
  Description of Artificial Sequence: Synthetic oligonucleotide
  Antisense strand to SEQ ID NO: 1637539
auauuucgucgaaggaagg

SEQ ID NO: 1637541 - RNA, 19 nt, Artificial Sequence
  Description of Artificial Sequence: Synthetic oligonucleotide
  Sense strand starting at position 2399 of SEQ ID NO: 1560972
gugaccuuauucuagcaau

SEQ ID NO: 1637542 - RNA, 19 nt, Artificial Sequence
  Description of Artificial Sequence: Synthetic oligonucleotide
  Antisense strand to SEQ ID NO: 1637541
auugcuagaauaaggucac

SEQ ID NO: 1637543 - RNA, 19 nt, Artificial Sequence
  Description of Artificial Sequence: Synthetic oligonucleotide
  Sense strand starting at position 2602 of SEQ ID NO: 1560972
gguuaucagugcuagggag

SEQ ID NO: 1637544 - RNA, 19 nt, Artificial Sequence
  Description of Artificial Sequence: Synthetic oligonucleotide
  Antisense strand to SEQ ID NO: 1637543
cucccuagcacugauaacc

SEQ ID NO: 1637545 - RNA, 19 nt, Artificial Sequence
  Description of Artificial Sequence: Synthetic oligonucleotide
  Sense strand starting at position 2758 of SEQ ID NO: 1560972
gggcaacacuguuagagaa

SEQ ID NO: 1637546 - RNA, 19 nt, Artificial Sequence
  Description of Artificial Sequence: Synthetic oligonucleotide
  Antisense strand to SEQ ID NO: 1637545
uucucuaacaguguugccc

SEQ ID NO: 1637547 - RNA, 19 nt, Artificial Sequence
  Description of Artificial Sequence: Synthetic oligonucleotide
  Sense strand starting at position 2760 of SEQ ID NO: 1560972
gcaacacuguuagagaaag

SEQ ID NO: 1637548 - RNA, 19 nt, Artificial Sequence
  Description of Artificial Sequence: Synthetic oligonucleotide
  Antisense strand to SEQ ID NO: 1637547
cuuucucuaacaguguugc

SEQ ID NO: 1637549 - RNA, 19 nt, Artificial Sequence
  Description of Artificial Sequence: Synthetic oligonucleotide
  Sense strand starting at position 2806 of SEQ ID NO: 1560972
gaguuccugcccuggcaaa

SEQ ID NO: 1637550 - RNA, 19 nt, Artificial Sequence
  Description of Artificial Sequence: Synthetic oligonucleotide
  Antisense strand to SEQ ID NO: 1637549
uuugccagggcaggaacuc

SEQ ID NO: 1637551 - RNA, 19 nt, Artificial Sequence
  Description of Artificial Sequence: Synthetic oligonucleotide
  Sense strand starting at position 2844 of SEQ ID NO: 1560972
ccggccaucccagagauaa

SEQ ID NO: 1637552 - RNA, 19 nt, Artificial Sequence
  Description of Artificial Sequence: Synthetic oligonucleotide
  Antisense strand to SEQ ID NO: 1637551
uuaucucugggauggccgg

SEQ ID NO: 1637553 - RNA, 19 nt, Artificial Sequence
  Description of Artificial Sequence: Synthetic oligonucleotide
  Sense strand starting at position 3035 of SEQ ID NO: 1560972
ggcccugaauccuacacuu

SEQ ID NO: 1637554 - RNA, 19 nt, Artificial Sequence
  Description of Artificial Sequence: Synthetic oligonucleotide
  Antisense strand to SEQ ID NO: 1637553
aaguguaggauucagggcc

SEQ ID NO: 1637555 - RNA, 19 nt, Artificial Sequence
  Description of Artificial Sequence: Synthetic oligonucleotide
  Sense strand starting at position 3070 of SEQ ID NO: 1560972
acugaccugugacgugaaa

SEQ ID NO: 1637556 - RNA, 19 nt, Artificial Sequence
  Description of Artificial Sequence: Synthetic oligonucleotide
  Antisense strand to SEQ ID NO: 1637555
uuucacgucacaggucagu

SEQ ID NO: 1637557 - RNA, 19 nt, Artificial Sequence
  Description of Artificial Sequence: Synthetic oligonucleotide
  Sense strand starting at position 3199 of SEQ ID NO: 1560972
acaccaaggucuccguauu

SEQ ID NO: 1637558 - RNA, 19 nt, Artificial Sequence
  Description of Artificial Sequence: Synthetic oligonucleotide
  Antisense strand to SEQ ID NO: 1637557
aauacggagaccuuggugu

SEQ ID NO: 1637559 - RNA, 19 nt, Artificial Sequence
  Description of Artificial Sequence: Synthetic oligonucleotide
  Sense strand starting at position 3397 of SEQ ID NO: 1560972
ccuccugggucaugagaau

SEQ ID NO: 1637560 - RNA, 19 nt, Artificial Sequence
  Description of Artificial Sequence: Synthetic oligonucleotide
  Antisense strand to SEQ ID NO: 1637559
auucucaugacccaggagg

SEQ ID NO: 1637561 - RNA, 19 nt, Artificial Sequence
  Description of Artificial Sequence: Synthetic oligonucleotide
  Sense strand starting at position 3442 of SEQ ID NO: 1560972
acacaaguauuguagucua

SEQ ID NO: 1637562 - RNA, 19 nt, Artificial Sequence
  Description of Artificial Sequence: Synthetic oligonucleotide
  Antisense strand to SEQ ID NO: 1637561
uagacuacaauacuugugu

SEQ ID NO: 1637563 - RNA, 19 nt, Artificial Sequence
  Description of Artificial Sequence: Synthetic oligonucleotide
  Sense strand starting at position 3449 of SEQ ID NO: 1560972
uauuguagucuagggaguu

SEQ ID NO: 1637564 - RNA, 19 nt, Artificial Sequence
  Description of Artificial Sequence: Synthetic oligonucleotide
  Antisense strand to SEQ ID NO: 1637563
aacucccuagacuacaaua

SEQ ID NO: 1637565 - RNA, 19 nt, Artificial Sequence
  Description of Artificial Sequence: Synthetic oligonucleotide
  Sense strand starting at position 3465 of SEQ ID NO: 1560972
guucaaggguuacagaagu

SEQ ID NO: 1637566 - RNA, 19 nt, Artificial Sequence
  Description of Artificial Sequence: Synthetic oligonucleotide
  Antisense strand to SEQ ID NO: 1637565
acuucuguaacccuugaac

SEQ ID NO: 1637567 - RNA, 19 nt, Artificial Sequence
  Description of Artificial Sequence: Synthetic oligonucleotide
  Sense strand starting at position 3505 of SEQ ID NO: 1560972
gcuguaaucagugaggccu

SEQ ID NO: 1637568 - RNA, 19 nt, Artificial Sequence
  Description of Artificial Sequence: Synthetic oligonucleotide
  Antisense strand to SEQ ID NO: 1637567
aggccucacugauuacagc

SEQ ID NO: 1637569 - RNA, 19 nt, Artificial Sequence
  Description of Artificial Sequence: Synthetic oligonucleotide
  Sense strand starting at position 3555 of SEQ ID NO: 1560972
ccaggaucaugucuuccau

SEQ ID NO: 1637570 - RNA, 19 nt, Artificial Sequence
  Description of Artificial Sequence: Synthetic oligonucleotide
  Antisense strand to SEQ ID NO: 1637569
auggaagacaugauccugg

SEQ ID NO: 1637571 - RNA, 19 nt, Artificial Sequence
  Description of Artificial Sequence: Synthetic oligonucleotide
  Sense strand starting at position 3616 of SEQ ID NO: 1560972
augggacacucaugauucu

SEQ ID NO: 1637572 - RNA, 19 nt, Artificial Sequence
  Description of Artificial Sequence: Synthetic oligonucleotide
  Antisense strand to SEQ ID NO: 1637571
agaaucaugagugucccau

SEQ ID NO: 1637573 - RNA, 19 nt, Artificial Sequence
  Description of Artificial Sequence: Synthetic oligonucleotide
  Sense strand starting at position 132 of SEQ ID NO: 1560973
ccaacaacucuguaaguga

SEQ ID NO: 1637574 - RNA, 19 nt, Artificial Sequence
  Description of Artificial Sequence: Synthetic oligonucleotide
  Antisense strand to SEQ ID NO: 1637573
ucacuuacagaguuguugg

SEQ ID NO: 1637575 - RNA, 19 nt, Artificial Sequence
  Description of Artificial Sequence: Synthetic oligonucleotide
  Sense strand starting at position 135 of SEQ ID NO: 1560973
acaacucuguaagugaagu

SEQ ID NO: 1637576 - RNA, 19 nt, Artificial Sequence
  Description of Artificial Sequence: Synthetic oligonucleotide
  Antisense strand to SEQ ID NO: 1637575
acuucacuuacagaguugu

SEQ ID NO: 1637577 - RNA, 19 nt, Artificial Sequence
  Description of Artificial Sequence: Synthetic oligonucleotide
  Sense strand starting at position 162 of SEQ ID NO: 1560973
acucauguuguauaugaga

SEQ ID NO: 1637578 - RNA, 19 nt, Artificial Sequence
  Description of Artificial Sequence: Synthetic oligonucleotide
  Antisense strand to SEQ ID NO: 1637577
ucucauauacaacaugagu

SEQ ID NO: 1637579 - RNA, 19 nt, Artificial Sequence
  Description of Artificial Sequence: Synthetic oligonucleotide
  Sense strand starting at position 373 of SEQ ID NO: 1560973
uagagauagugucuuguuc

SEQ ID NO: 1637580 - RNA, 19 nt, Artificial Sequence
  Description of Artificial Sequence: Synthetic oligonucleotide
  Antisense strand to SEQ ID NO: 1637579
gaacaagacacuaucucua

SEQ ID NO: 1637581 - RNA, 19 nt, Artificial Sequence
  Description of Artificial Sequence: Synthetic oligonucleotide
  Sense strand starting at position 714 of SEQ ID NO: 1560973
gugcaucuugcaggagaga

SEQ ID NO: 1637582 - RNA, 19 nt, Artificial Sequence
  Description of Artificial Sequence: Synthetic oligonucleotide
  Antisense strand to SEQ ID NO: 1637581
ucucuccugcaagaugcac

SEQ ID NO: 1637583 - RNA, 19 nt, Artificial Sequence
  Description of Artificial Sequence: Synthetic oligonucleotide
  Sense strand starting at position 965 of SEQ ID NO: 1560973
gccauuucccuggguccaa

SEQ ID NO: 1637584 - RNA, 19 nt, Artificial Sequence
  Description of Artificial Sequence: Synthetic oligonucleotide
  Antisense strand to SEQ ID NO: 1637583
uuggacccagggaaauggc

SEQ ID NO: 1637585 - RNA, 19 nt, Artificial Sequence
  Description of Artificial Sequence: Synthetic oligonucleotide
  Sense strand starting at position 1170 of SEQ ID NO: 1560973
cuguuaacuuccggauuua

SEQ ID NO: 1637586 - RNA, 19 nt, Artificial Sequence
  Description of Artificial Sequence: Synthetic oligonucleotide
  Antisense strand to SEQ ID NO: 1637585
uaaauccggaaguuaacag

SEQ ID NO: 1637587 - RNA, 19 nt, Artificial Sequence
  Description of Artificial Sequence: Synthetic oligonucleotide
  Sense strand starting at position 1182 of SEQ ID NO: 1560973
ggauuuaucucugagagca

SEQ ID NO: 1637588 - RNA, 19 nt, Artificial Sequence
  Description of Artificial Sequence: Synthetic oligonucleotide
  Antisense strand to SEQ ID NO: 1637587
ugcucucagagauaaaucc

SEQ ID NO: 1637589 - RNA, 19 nt, Artificial Sequence
  Description of Artificial Sequence: Synthetic oligonucleotide
  Sense strand starting at position 1184 of SEQ ID NO: 1560973
auuuaucucugagagcagu

SEQ ID NO: 1637590 - RNA, 19 nt, Artificial Sequence
  Description of Artificial Sequence: Synthetic oligonucleotide
  Antisense strand to SEQ ID NO: 1637589
acugcucucagagauaaau

SEQ ID NO: 1637591 - RNA, 19 nt, Artificial Sequence
  Description of Artificial Sequence: Synthetic oligonucleotide
  Sense strand starting at position 1190 of SEQ ID NO: 1560973
cucugagagcagugaauaa

SEQ ID NO: 1637592 - RNA, 19 nt, Artificial Sequence
  Description of Artificial Sequence: Synthetic oligonucleotide
  Antisense strand to SEQ ID NO: 1637591
uuauucacugcucucagag

SEQ ID NO: 1637593 - RNA, 19 nt, Artificial Sequence
  Description of Artificial Sequence: Synthetic oligonucleotide
  Sense strand starting at position 1200 of SEQ ID NO: 1560973
agugaauaaacgcgugaua

SEQ ID NO: 1637594 - RNA, 19 nt, Artificial Sequence
  Description of Artificial Sequence: Synthetic oligonucleotide
  Antisense strand to SEQ ID NO: 1637593
uaucacgcguuuauucacu

SEQ ID NO: 1637595 - RNA, 19 nt, Artificial Sequence
  Description of Artificial Sequence: Synthetic oligonucleotide
  Sense strand starting at position 1202 of SEQ ID NO: 1560973
ugaauaaacgcgugauaug

SEQ ID NO: 1637596 - RNA, 19 nt, Artificial Sequence
  Description of Artificial Sequence: Synthetic oligonucleotide
  Antisense strand to SEQ ID NO: 1637595
cauaucacgcguuuauuca

SEQ ID NO: 1637597 - RNA, 19 nt, Artificial Sequence
  Description of Artificial Sequence: Synthetic oligonucleotide
  Sense strand starting at position 1233 of SEQ ID NO: 1560973
cuccgcaguccugaaacuu

SEQ ID NO: 1637598 - RNA, 19 nt, Artificial Sequence
  Description of Artificial Sequence: Synthetic oligonucleotide
  Antisense strand to SEQ ID NO: 1637597
aaguuucaggacugcggag

SEQ ID NO: 1637599 - RNA, 19 nt, Artificial Sequence
  Description of Artificial Sequence: Synthetic oligonucleotide
  Sense strand starting at position 1943 of SEQ ID NO: 1560973
cgucgauuggcugggagaa

SEQ ID NO: 1637600 - RNA, 19 nt, Artificial Sequence
  Description of Artificial Sequence: Synthetic oligonucleotide
  Antisense strand to SEQ ID NO: 1637599
uucucccagccaaucgacg

SEQ ID NO: 1637601 - RNA, 19 nt, Artificial Sequence
  Description of Artificial Sequence: Synthetic oligonucleotide
  Sense strand starting at position 1944 of SEQ ID NO: 1560973
gucgauuggcugggagaaa

SEQ ID NO: 1637602 - RNA, 19 nt, Artificial Sequence
  Description of Artificial Sequence: Synthetic oligonucleotide
  Antisense strand to SEQ ID NO: 1637601
uuucucccagccaaucgac

SEQ ID NO: 1637603 - RNA, 19 nt, Artificial Sequence
  Description of Artificial Sequence: Synthetic oligonucleotide
  Sense strand starting at position 2145 of SEQ ID NO: 1560973
guuugaaggcuuuauuggu

SEQ ID NO: 1637604 - RNA, 19 nt, Artificial Sequence
  Description of Artificial Sequence: Synthetic oligonucleotide
  Antisense strand to SEQ ID NO: 1637603
accaauaaagccuucaaac

SEQ ID NO: 1637605 - RNA, 19 nt, Artificial Sequence
  Description of Artificial Sequence: Synthetic oligonucleotide
  Sense strand starting at position 2153 of SEQ ID NO: 1560973
gcuuuauuggugcggaauc

SEQ ID NO: 1637606 - RNA, 19 nt, Artificial Sequence
  Description of Artificial Sequence: Synthetic oligonucleotide
  Antisense strand to SEQ ID NO: 1637605
gauuccgcaccaauaaagc

SEQ ID NO: 1637607 - RNA, 19 nt, Artificial Sequence
  Description of Artificial Sequence: Synthetic oligonucleotide
  Sense strand starting at position 2320 of SEQ ID NO: 1560973
guuggugcucccugaagac

SEQ ID NO: 1637608 - RNA, 19 nt, Artificial Sequence
  Description of Artificial Sequence: Synthetic oligonucleotide
  Antisense strand to SEQ ID NO: 1637607
gucuucagggagcaccaac

SEQ ID NO: 1637609 - RNA, 19 nt, Artificial Sequence
  Description of Artificial Sequence: Synthetic oligonucleotide
  Sense strand starting at position 2342 of SEQ ID NO: 1560973
cauuaaggccaguacgaua

SEQ ID NO: 1637610 - RNA, 19 nt, Artificial Sequence
  Description of Artificial Sequence: Synthetic oligonucleotide
  Antisense strand to SEQ ID NO: 1637609
uaucguacuggccuuaaug

SEQ ID NO: 1637611 - RNA, 19 nt, Artificial Sequence
  Description of Artificial Sequence: Synthetic oligonucleotide
  Sense strand starting at position 2427 of SEQ ID NO: 1560973
cagagaaagcgcuaaguca

SEQ ID NO: 1637612 - RNA, 19 nt, Artificial Sequence
  Description of Artificial Sequence: Synthetic oligonucleotide
  Antisense strand to SEQ ID NO: 1637611
ugacuuagcgcuuucucug

SEQ ID NO: 1637613 - RNA, 19 nt, Artificial Sequence
  Description of Artificial Sequence: Synthetic oligonucleotide
  Sense strand starting at position 2435 of SEQ ID NO: 1560973
gcgcuaagucaauaugcgu

SEQ ID NO: 1637614 - RNA, 19 nt, Artificial Sequence
  Description of Artificial Sequence: Synthetic oligonucleotide
  Antisense strand to SEQ ID NO: 1637613
acgcauauugacuuagcgc

SEQ ID NO: 1637615 - RNA, 19 nt, Artificial Sequence
  Description of Artificial Sequence: Synthetic oligonucleotide
  Sense strand starting at position 2509 of SEQ ID NO: 1560973
cguguuagcucacccucaa

SEQ ID NO: 1637616 - RNA, 19 nt, Artificial Sequence
  Description of Artificial Sequence: Synthetic oligonucleotide
  Antisense strand to SEQ ID NO: 1637615
uugagggugagcuaacacg

SEQ ID NO: 1637617 - RNA, 19 nt, Artificial Sequence
  Description of Artificial Sequence: Synthetic oligonucleotide
  Sense strand starting at position 2546 of SEQ ID NO: 1560973
ggguguauuugccucguga

SEQ ID NO: 1637618 - RNA, 19 nt, Artificial Sequence
  Description of Artificial Sequence: Synthetic oligonucleotide
  Antisense strand to SEQ ID NO: 1637617
ucacgaggcaaauacaccc

SEQ ID NO: 1637619 - RNA, 19 nt, Artificial Sequence
  Description of Artificial Sequence: Synthetic oligonucleotide
  Sense strand starting at position 2548 of SEQ ID NO: 1560973
guguauuugccucgugagc

SEQ ID NO: 1637620 - RNA, 19 nt, Artificial Sequence
  Description of Artificial Sequence: Synthetic oligonucleotide
  Antisense strand to SEQ ID NO: 1637619
gcucacgaggcaaauacac

SEQ ID NO: 1637621 - RNA, 19 nt, Artificial Sequence
  Description of Artificial Sequence: Synthetic oligonucleotide
  Sense strand starting at position 2569 of SEQ ID NO: 1560973
gacgcuuggcacugauaag

SEQ ID NO: 1637622 - RNA, 19 nt, Artificial Sequence
  Description of Artificial Sequence: Synthetic oligonucleotide
  Antisense strand to SEQ ID NO: 1637621
cuuaucagugccaagcguc

SEQ ID NO: 1637623 - RNA, 19 nt, Artificial Sequence
  Description of Artificial Sequence: Synthetic oligonucleotide
  Sense strand starting at position 2570 of SEQ ID NO: 1560973
acgcuuggcacugauaagu

SEQ ID NO: 1637624 - RNA, 19 nt, Artificial Sequence
  Description of Artificial Sequence: Synthetic oligonucleotide
  Antisense strand to SEQ ID NO: 1637623
acuuaucagugccaagcgu

SEQ ID NO: 1637625 - RNA, 19 nt, Artificial Sequence
  Description of Artificial Sequence: Synthetic oligonucleotide
  Sense strand starting at position 2587 of SEQ ID NO: 1560973
guaccauuauguguuacgu

SEQ ID NO: 1637626 - RNA, 19 nt, Artificial Sequence
  Description of Artificial Sequence: Synthetic oligonucleotide
  Antisense strand to SEQ ID NO: 1637625
acguaacacauaaugguac

SEQ ID NO: 1637627 - RNA, 19 nt, Artificial Sequence
  Description of Artificial Sequence: Synthetic oligonucleotide
  Sense strand starting at position 2595 of SEQ ID NO: 1560973
auguguuacguugacgaag

SEQ ID NO: 1637628 - RNA, 19 nt, Artificial Sequence
  Description of Artificial Sequence: Synthetic oligonucleotide
  Antisense strand to SEQ ID NO: 1637627
cuucgucaacguaacacau

SEQ ID NO: 1637629 - RNA, 19 nt, Artificial Sequence
  Description of Artificial Sequence: Synthetic oligonucleotide
  Sense strand starting at position 2596 of SEQ ID NO: 1560973
uguguuacguugacgaaga

SEQ ID NO: 1637630 - RNA, 19 nt, Artificial Sequence
  Description of Artificial Sequence: Synthetic oligonucleotide
  Antisense strand to SEQ ID NO: 1637629
ucuucgucaacguaacaca

SEQ ID NO: 1637631 - RNA, 19 nt, Artificial Sequence
  Description of Artificial Sequence: Synthetic oligonucleotide
  Sense strand starting at position 2742 of SEQ ID NO: 1560973
gcauguggcucggucaauu

SEQ ID NO: 1637632 - RNA, 19 nt, Artificial Sequence
  Description of Artificial Sequence: Synthetic oligonucleotide
  Antisense strand to SEQ ID NO: 1637631
aauugaccgagccacaugc

SEQ ID NO: 1637633 - RNA, 19 nt, Artificial Sequence
  Description of Artificial Sequence: Synthetic oligonucleotide
  Sense strand starting at position 2778 of SEQ ID NO: 1560973
accaccaugugugaucaga

SEQ ID NO: 1637634 - RNA, 19 nt, Artificial Sequence
  Description of Artificial Sequence: Synthetic oligonucleotide
  Antisense strand to SEQ ID NO: 1637633
ucugaucacacaugguggu

SEQ ID NO: 1637635 - RNA, 19 nt, Artificial Sequence
  Description of Artificial Sequence: Synthetic oligonucleotide
  Sense strand starting at position 2780 of SEQ ID NO: 1560973
caccaugugugaucagaca

SEQ ID NO: 1637636 - RNA, 19 nt, Artificial Sequence
  Description of Artificial Sequence: Synthetic oligonucleotide
  Antisense strand to SEQ ID NO: 1637635
ugucugaucacacauggug

SEQ ID NO: 1637637 - RNA, 19 nt, Artificial Sequence
  Description of Artificial Sequence: Synthetic oligonucleotide
  Sense strand starting at position 2911 of SEQ ID NO: 1560973
uacuguuccugugcaagaa

SEQ ID NO: 1637638 - RNA, 19 nt, Artificial Sequence
  Description of Artificial Sequence: Synthetic oligonucleotide
  Antisense strand to SEQ ID NO: 1637637
uucuugcacaggaacagua

SEQ ID NO: 1637639 - RNA, 19 nt, Artificial Sequence
  Description of Artificial Sequence: Synthetic oligonucleotide
  Sense strand starting at position 2976 of SEQ ID NO: 1560973
ucgucacucucgguagcau

SEQ ID NO: 1637640 - RNA, 19 nt, Artificial Sequence
  Description of Artificial Sequence: Synthetic oligonucleotide
  Antisense strand to SEQ ID NO: 1637639
augcuaccgagagugacga

SEQ ID NO: 1637641 - RNA, 19 nt, Artificial Sequence
  Description of Artificial Sequence: Synthetic oligonucleotide
  Sense strand starting at position 2977 of SEQ ID NO: 1560973
cgucacucucgguagcauu

SEQ ID NO: 1637642 - RNA, 19 nt, Artificial Sequence
  Description of Artificial Sequence: Synthetic oligonucleotide
  Antisense strand to SEQ ID NO: 1637641
aaugcuaccgagagugacg

SEQ ID NO: 1637643 - RNA, 19 nt, Artificial Sequence
  Description of Artificial Sequence: Synthetic oligonucleotide
  Sense strand starting at position 2987 of SEQ ID NO: 1560973
gguagcauuuagcugaagu

SEQ ID NO: 1637644 - RNA, 19 nt, Artificial Sequence
  Description of Artificial Sequence: Synthetic oligonucleotide
  Antisense strand to SEQ ID NO: 1637643
acuucagcuaaaugcuacc

SEQ ID NO: 1637645 - RNA, 19 nt, Artificial Sequence
  Description of Artificial Sequence: Synthetic oligonucleotide
  Sense strand starting at position 2988 of SEQ ID NO: 1560973
guagcauuuagcugaaguu

SEQ ID NO: 1637646 - RNA, 19 nt, Artificial Sequence
  Description of Artificial Sequence: Synthetic oligonucleotide
  Antisense strand to SEQ ID NO: 1637645
aacuucagcuaaaugcuac

SEQ ID NO: 1637647 - RNA, 19 nt, Artificial Sequence
  Description of Artificial Sequence: Synthetic oligonucleotide
  Sense strand starting at position 3160 of SEQ ID NO: 1560973
ugcccaggagcuuaaugaa

SEQ ID NO: 1637648 - RNA, 19 nt, Artificial Sequence
  Description of Artificial Sequence: Synthetic oligonucleotide
  Antisense strand to SEQ ID NO: 1637647
uucauuaagcuccugggca

SEQ ID NO: 1637649 - RNA, 19 nt, Artificial Sequence
  Description of Artificial Sequence: Synthetic oligonucleotide
  Sense strand starting at position 3218 of SEQ ID NO: 1560973
cccuuuccucucgggauau

SEQ ID NO: 1637650 - RNA, 19 nt, Artificial Sequence
  Description of Artificial Sequence: Synthetic oligonucleotide
  Antisense strand to SEQ ID NO: 1637649
auaucccgagaggaaaggg

SEQ ID NO: 1637651 - RNA, 19 nt, Artificial Sequence
  Description of Artificial Sequence: Synthetic oligonucleotide
  Sense strand starting at position 3720 of SEQ ID NO: 1560973
ggagaaaggugggcauagu

SEQ ID NO: 1637652 - RNA, 19 nt, Artificial Sequence
  Description of Artificial Sequence: Synthetic oligonucleotide
  Antisense strand to SEQ ID NO: 1637651
acuaugcccaccuuucucc

SEQ ID NO: 1637653 - RNA, 19 nt, Artificial Sequence
  Description of Artificial Sequence: Synthetic oligonucleotide
  Sense strand starting at position 129 of SEQ ID NO: 1560974
cgcaccuggccugagaaua

SEQ ID NO: 1637654 - RNA, 19 nt, Artificial Sequence
  Description of Artificial Sequence: Synthetic oligonucleotide
  Antisense strand to SEQ ID NO: 1637653
uauucucaggccaggugcg

SEQ ID NO: 1637655 - RNA, 19 nt, Artificial Sequence
  Description of Artificial Sequence: Synthetic oligonucleotide
  Sense strand starting at position 141 of SEQ ID NO: 1560974
gagaauacuugggucaccu

SEQ ID NO: 1637656 - RNA, 19 nt, Artificial Sequence
  Description of Artificial Sequence: Synthetic oligonucleotide
  Antisense strand to SEQ ID NO: 1637655
aggugacccaaguauucuc

SEQ ID NO: 1637657 - RNA, 19 nt, Artificial Sequence
  Description of Artificial Sequence: Synthetic oligonucleotide
  Sense strand starting at position 1014 of SEQ ID NO: 1560974
cguuguuacccacaccauu

SEQ ID NO: 1637658 - RNA, 19 nt, Artificial Sequence
  Description of Artificial Sequence: Synthetic oligonucleotide
  Antisense strand to SEQ ID NO: 1637657
aaugguguggguaacaacg

SEQ ID NO: 1637659 - RNA, 19 nt, Artificial Sequence
  Description of Artificial Sequence: Synthetic oligonucleotide
  Sense strand starting at position 1062 of SEQ ID NO: 1560974
gggaaacgccuccaacuua

SEQ ID NO: 1637660 - RNA, 19 nt, Artificial Sequence
  Description of Artificial Sequence: Synthetic oligonucleotide
  Antisense strand to SEQ ID NO: 1637659
uaaguuggaggcguuuccc

SEQ ID NO: 1637661 - RNA, 19 nt, Artificial Sequence
  Description of Artificial Sequence: Synthetic oligonucleotide
  Sense strand starting at position 1960 of SEQ ID NO: 1560974
cgucgauuuccacgggaca

SEQ ID NO: 1637662 - RNA, 19 nt, Artificial Sequence
  Description of Artificial Sequence: Synthetic oligonucleotide
  Antisense strand to SEQ ID NO: 1637661
ugucccguggaaaucgacg

SEQ ID NO: 1637663 - RNA, 19 nt, Artificial Sequence
  Description of Artificial Sequence: Synthetic oligonucleotide
  Sense strand starting at position 2059 of SEQ ID NO: 1560974
ggauuagcucaaggugauu

SEQ ID NO: 1637664 - RNA, 19 nt, Artificial Sequence
  Description of Artificial Sequence: Synthetic oligonucleotide
  Antisense strand to SEQ ID NO: 1637663
aaucaccuugagcuaaucc

SEQ ID NO: 1637665 - RNA, 19 nt, Artificial Sequence
  Description of Artificial Sequence: Synthetic oligonucleotide
  Sense strand starting at position 2062 of SEQ ID NO: 1560974
uuagcucaaggugauuaau

SEQ ID NO: 1637666 - RNA, 19 nt, Artificial Sequence
  Description of Artificial Sequence: Synthetic oligonucleotide
  Antisense strand to SEQ ID NO: 1637665
auuaaucaccuugagcuaa

SEQ ID NO: 1637667 - RNA, 19 nt, Artificial Sequence
  Description of Artificial Sequence: Synthetic oligonucleotide
  Sense strand starting at position 2065 of SEQ ID NO: 1560974
gcucaaggugauuaauuga

SEQ ID NO: 1637668 - RNA, 19 nt, Artificial Sequence
  Description of Artificial Sequence: Synthetic oligonucleotide
  Antisense strand to SEQ ID NO: 1637667
ucaauuaaucaccuugagc

SEQ ID NO: 1637669 - RNA, 19 nt, Artificial Sequence
  Description of Artificial Sequence: Synthetic oligonucleotide
  Sense strand starting at position 2301 of SEQ ID NO: 1560974
cagagcaucgcacagaaau

SEQ ID NO: 1637670 - RNA, 19 nt, Artificial Sequence
  Description of Artificial Sequence: Synthetic oligonucleotide
  Antisense strand to SEQ ID NO: 1637669
auuucugugcgaugcucug

SEQ ID NO: 1637671 - RNA, 19 nt, Artificial Sequence
  Description of Artificial Sequence: Synthetic oligonucleotide
  Sense strand starting at position 2340 of SEQ ID NO: 1560974
augaaugcucacuguuaau

SEQ ID NO: 1637672 - RNA, 19 nt, Artificial Sequence
  Description of Artificial Sequence: Synthetic oligonucleotide
  Antisense strand to SEQ ID NO: 1637671
auuaacagugagcauucau

SEQ ID NO: 1637673 - RNA, 19 nt, Artificial Sequence
  Description of Artificial Sequence: Synthetic oligonucleotide
  Sense strand starting at position 2382 of SEQ ID NO: 1560974
aaaggugucuuagaacuca

SEQ ID NO: 1637674 - RNA, 19 nt, Artificial Sequence
  Description of Artificial Sequence: Synthetic oligonucleotide
  Antisense strand to SEQ ID NO: 1637673
ugaguucuaagacaccuuu

SEQ ID NO: 1637675 - RNA, 19 nt, Artificial Sequence
  Description of Artificial Sequence: Synthetic oligonucleotide
  Sense strand starting at position 2400 of SEQ ID NO: 1560974
acagaugucagaggcaguu

SEQ ID NO: 1637676 - RNA, 19 nt, Artificial Sequence
  Description of Artificial Sequence: Synthetic oligonucleotide
  Antisense strand to SEQ ID NO: 1637675
aacugccucugacaucugu

SEQ ID NO: 1637677 - RNA, 19 nt, Artificial Sequence
  Description of Artificial Sequence: Synthetic oligonucleotide
  Sense strand starting at position 2453 of SEQ ID NO: 1560974
guugguuccucuggacaca

SEQ ID NO: 1637678 - RNA, 19 nt, Artificial Sequence
  Description of Artificial Sequence: Synthetic oligonucleotide
  Antisense strand to SEQ ID NO: 1637677
uguguccagaggaaccaac

SEQ ID NO: 1637679 - RNA, 19 nt, Artificial Sequence
  Description of Artificial Sequence: Synthetic oligonucleotide
  Sense strand starting at position 2454 of SEQ ID NO: 1560974
uugguuccucuggacacaa

SEQ ID NO: 1637680 - RNA, 19 nt, Artificial Sequence
  Description of Artificial Sequence: Synthetic oligonucleotide
  Antisense strand to SEQ ID NO: 1637679
uuguguccagaggaaccaa

SEQ ID NO: 1637681 - RNA, 19 nt, Artificial Sequence
  Description of Artificial Sequence: Synthetic oligonucleotide
  Sense strand starting at position 2491 of SEQ ID NO: 1560974
gcugggucuggagguauga

SEQ ID NO: 1637682 - RNA, 19 nt, Artificial Sequence
  Description of Artificial Sequence: Synthetic oligonucleotide
  Antisense strand to SEQ ID NO: 1637681
ucauaccuccagacccagc

SEQ ID NO: 1637683 - RNA, 19 nt, Artificial Sequence
  Description of Artificial Sequence: Synthetic oligonucleotide
  Sense strand starting at position 3650 of SEQ ID NO: 1560974
gcaggaguuccaggcguga

SEQ ID NO: 1637684 - RNA, 19 nt, Artificial Sequence
  Description of Artificial Sequence: Synthetic oligonucleotide
  Antisense strand to SEQ ID NO: 1637683
ucacgccuggaacuccugc

SEQ ID NO: 1637685 - RNA, 19 nt, Artificial Sequence
  Description of Artificial Sequence: Synthetic oligonucleotide
  Sense strand starting at position 3688 of SEQ ID NO: 1560974
uugcuauguuaaggaaggu

SEQ ID NO: 1637686 - RNA, 19 nt, Artificial Sequence
  Description of Artificial Sequence: Synthetic oligonucleotide
  Antisense strand to SEQ ID NO: 1637685
accuuccuuaacauagcaa

SEQ ID NO: 1637687 - RNA, 19 nt, Artificial Sequence
  Description of Artificial Sequence: Synthetic oligonucleotide
  Sense strand starting at position 3697 of SEQ ID NO: 1560974
uaaggaagguggugagaau

SEQ ID NO: 1637688 - RNA, 19 nt, Artificial Sequence
  Description of Artificial Sequence: Synthetic oligonucleotide
  Antisense strand to SEQ ID NO: 1637687
auucucaccaccuuccuua

SEQ ID NO: 1637689 - RNA, 19 nt, Artificial Sequence
  Description of Artificial Sequence: Synthetic oligonucleotide
  Sense strand starting at position 3733 of SEQ ID NO: 1560974
gccgcaaguucuggacaca

SEQ ID NO: 1637690 - RNA, 19 nt, Artificial Sequence
  Description of Artificial Sequence: Synthetic oligonucleotide
  Antisense strand to SEQ ID NO: 1637689
uguguccagaacuugcggc

SEQ ID NO: 1637691 - RNA, 19 nt, Artificial Sequence
  Description of Artificial Sequence: Synthetic oligonucleotide
  Sense strand starting at position 3734 of SEQ ID NO: 1560974
ccgcaaguucuggacacau

SEQ ID NO: 1637692 - RNA, 19 nt, Artificial Sequence
  Description of Artificial Sequence: Synthetic oligonucleotide
  Antisense strand to SEQ ID NO: 1637691
auguguccagaacuugcgg

SEQ ID NO: 1637693 - RNA, 19 nt, Artificial Sequence
  Description of Artificial Sequence: Synthetic oligonucleotide
  Sense strand starting at position 23 of SEQ ID NO: 1560975
ucaugcuuugugcucugua

SEQ ID NO: 1637694 - RNA, 19 nt, Artificial Sequence
  Description of Artificial Sequence: Synthetic oligonucleotide
  Antisense strand to SEQ ID NO: 1637693
uacagagcacaaagcauga

SEQ ID NO: 1637695 - RNA, 19 nt, Artificial Sequence
  Description of Artificial Sequence: Synthetic oligonucleotide
  Sense strand starting at position 24 of SEQ ID NO: 1560975
caugcuuugugcucuguau

SEQ ID NO: 1637696 - RNA, 19 nt, Artificial Sequence
  Description of Artificial Sequence: Synthetic oligonucleotide
  Antisense strand to SEQ ID NO: 1637695
auacagagcacaaagcaug

SEQ ID NO: 1637697 - RNA, 19 nt, Artificial Sequence
  Description of Artificial Sequence: Synthetic oligonucleotide
  Sense strand starting at position 239 of SEQ ID NO: 1560975
uccugucuagauuacugua

SEQ ID NO: 1637698 - RNA, 19 nt, Artificial Sequence
  Description of Artificial Sequence: Synthetic oligonucleotide
  Antisense strand to SEQ ID NO: 1637697
uacaguaaucuagacagga

SEQ ID NO: 1637699 - RNA, 19 nt, Artificial Sequence
  Description of Artificial Sequence: Synthetic oligonucleotide
  Sense strand starting at position 612 of SEQ ID NO: 1560975
gccauaaggcucuacaaga

SEQ ID NO: 1637700 - RNA, 19 nt, Artificial Sequence
  Description of Artificial Sequence: Synthetic oligonucleotide
  Antisense strand to SEQ ID NO: 1637699
ucuuguagagccuuauggc

SEQ ID NO: 1637701 - RNA, 19 nt, Artificial Sequence
  Description of Artificial Sequence: Synthetic oligonucleotide
  Sense strand starting at position 1083 of SEQ ID NO: 1560975
cucuacuagucauauauag

SEQ ID NO: 1637702 - RNA, 19 nt, Artificial Sequence
  Description of Artificial Sequence: Synthetic oligonucleotide
  Antisense strand to SEQ ID NO: 1637701
cuauauaugacuaguagag

SEQ ID NO: 1637703 - RNA, 19 nt, Artificial Sequence
  Description of Artificial Sequence: Synthetic oligonucleotide
  Sense strand starting at position 1090 of SEQ ID NO: 1560975
agucauauauaguuggcua

SEQ ID NO: 1637704 - RNA, 19 nt, Artificial Sequence
  Description of Artificial Sequence: Synthetic oligonucleotide
  Antisense strand to SEQ ID NO: 1637703
uagccaacuauauaugacu

SEQ ID NO: 1637705 - RNA, 19 nt, Artificial Sequence
  Description of Artificial Sequence: Synthetic oligonucleotide
  Sense strand starting at position 1094 of SEQ ID NO: 1560975
auauauaguuggcuacuga

SEQ ID NO: 1637706 - RNA, 19 nt, Artificial Sequence
  Description of Artificial Sequence: Synthetic oligonucleotide
  Antisense strand to SEQ ID NO: 1637705
ucaguagccaacuauauau

SEQ ID NO: 1637707 - RNA, 19 nt, Artificial Sequence
  Description of Artificial Sequence: Synthetic oligonucleotide
  Sense strand starting at position 1116 of SEQ ID NO: 1560975
cuugaaaugugacuaauga

SEQ ID NO: 1637708 - RNA, 19 nt, Artificial Sequence
  Description of Artificial Sequence: Synthetic oligonucleotide
  Antisense strand to SEQ ID NO: 1637707
ucauuagucacauuucaag

SEQ ID NO: 1637709 - RNA, 19 nt, Artificial Sequence
  Description of Artificial Sequence: Synthetic oligonucleotide
  Sense strand starting at position 1175 of SEQ ID NO: 1560975
acagucucgucauugcaga

SEQ ID NO: 1637710 - RNA, 19 nt, Artificial Sequence
  Description of Artificial Sequence: Synthetic oligonucleotide
  Antisense strand to SEQ ID NO: 1637709
ucugcaaugacgagacugu

SEQ ID NO: 1637711 - RNA, 19 nt, Artificial Sequence
  Description of Artificial Sequence: Synthetic oligonucleotide
  Sense strand starting at position 1203 of SEQ ID NO: 1560975
uggacaacauguucuagaa

SEQ ID NO: 1637712 - RNA, 19 nt, Artificial Sequence
  Description of Artificial Sequence: Synthetic oligonucleotide
  Antisense strand to SEQ ID NO: 1637711
uucuagaacauguugucca

SEQ ID NO: 1637713 - RNA, 19 nt, Artificial Sequence
  Description of Artificial Sequence: Synthetic oligonucleotide
  Sense strand starting at position 1255 of SEQ ID NO: 1560975
agucauuacuguguucuca

SEQ ID NO: 1637714 - RNA, 19 nt, Artificial Sequence
  Description of Artificial Sequence: Synthetic oligonucleotide
  Antisense strand to SEQ ID NO: 1637713
ugagaacacaguaaugacu

SEQ ID NO: 1637715 - RNA, 19 nt, Artificial Sequence
  Description of Artificial Sequence: Synthetic oligonucleotide
  Sense strand starting at position 1267 of SEQ ID NO: 1560975
guucucagugccuggcaua

SEQ ID NO: 1637716 - RNA, 19 nt, Artificial Sequence
  Description of Artificial Sequence: Synthetic oligonucleotide
  Antisense strand to SEQ ID NO: 1637715
uaugccaggcacugagaac

SEQ ID NO: 1637717 - RNA, 19 nt, Artificial Sequence
  Description of Artificial Sequence: Synthetic oligonucleotide
  Sense strand starting at position 1294 of SEQ ID NO: 1560975
uugucaugcuaauuaguca

SEQ ID NO: 1637718 - RNA, 19 nt, Artificial Sequence
  Description of Artificial Sequence: Synthetic oligonucleotide
  Antisense strand to SEQ ID NO: 1637717
ugacuaauuagcaugacaa

SEQ ID NO: 1637719 - RNA, 19 nt, Artificial Sequence
  Description of Artificial Sequence: Synthetic oligonucleotide
  Sense strand starting at position 1362 of SEQ ID NO: 1560975
gaggcauuguguucccuga

SEQ ID NO: 1637720 - RNA, 19 nt, Artificial Sequence
  Description of Artificial Sequence: Synthetic oligonucleotide
  Antisense strand to SEQ ID NO: 1637719
ucagggaacacaaugccuc

SEQ ID NO: 1637721 - RNA, 19 nt, Artificial Sequence
  Description of Artificial Sequence: Synthetic oligonucleotide
  Sense strand starting at position 1364 of SEQ ID NO: 1560975
ggcauuguguucccugacu

SEQ ID NO: 1637722 - RNA, 19 nt, Artificial Sequence
  Description of Artificial Sequence: Synthetic oligonucleotide
  Antisense strand to SEQ ID NO: 1637721
agucagggaacacaaugcc

SEQ ID NO: 1637723 - RNA, 19 nt, Artificial Sequence
  Description of Artificial Sequence: Synthetic oligonucleotide
  Sense strand starting at position 1369 of SEQ ID NO: 1560975
uguguucccugacuuacau

SEQ ID NO: 1637724 - RNA, 19 nt, Artificial Sequence
  Description of Artificial Sequence: Synthetic oligonucleotide
  Antisense strand to SEQ ID NO: 1637723
auguaagucagggaacaca

SEQ ID NO: 1637725 - RNA, 19 nt, Artificial Sequence
  Description of Artificial Sequence: Synthetic oligonucleotide
  Sense strand starting at position 1551 of SEQ ID NO: 1560975
ugcucaaaccuggaggagu

SEQ ID NO: 1637726 - RNA, 19 nt, Artificial Sequence
  Description of Artificial Sequence: Synthetic oligonucleotide
  Antisense strand to SEQ ID NO: 1637725
acuccuccagguuugagca

SEQ ID NO: 1637727 - RNA, 19 nt, Artificial Sequence
  Description of Artificial Sequence: Synthetic oligonucleotide
  Sense strand starting at position 1605 of SEQ ID NO: 1560975
uuuggaacuguggguauau

SEQ ID NO: 1637728 - RNA, 19 nt, Artificial Sequence
  Description of Artificial Sequence: Synthetic oligonucleotide
  Antisense strand to SEQ ID NO: 1637727
auauacccacaguuccaaa

SEQ ID NO: 1637729 - RNA, 19 nt, Artificial Sequence
  Description of Artificial Sequence: Synthetic oligonucleotide
  Sense strand starting at position 1695 of SEQ ID NO: 1560975
ccauguuagagccguaucu

SEQ ID NO: 1637730 - RNA, 19 nt, Artificial Sequence
  Description of Artificial Sequence: Synthetic oligonucleotide
  Antisense strand to SEQ ID NO: 1637729
agauacggcucuaacaugg

SEQ ID NO: 1637731 - RNA, 19 nt, Artificial Sequence
  Description of Artificial Sequence: Synthetic oligonucleotide
  Sense strand starting at position 2022 of SEQ ID NO: 1560975
gaggaugacguccagcaaa

SEQ ID NO: 1637732 - RNA, 19 nt, Artificial Sequence
  Description of Artificial Sequence: Synthetic oligonucleotide
  Antisense strand to SEQ ID NO: 1637731
uuugcuggacgucauccuc

SEQ ID NO: 1637733 - RNA, 19 nt, Artificial Sequence
  Description of Artificial Sequence: Synthetic oligonucleotide
  Sense strand starting at position 2054 of SEQ ID NO: 1560975
ggcgcaugacgucauacau

SEQ ID NO: 1637734 - RNA, 19 nt, Artificial Sequence
  Description of Artificial Sequence: Synthetic oligonucleotide
  Antisense strand to SEQ ID NO: 1637733
auguaugacgucaugcgcc

SEQ ID NO: 1637735 - RNA, 19 nt, Artificial Sequence
  Description of Artificial Sequence: Synthetic oligonucleotide
  Sense strand starting at position 2066 of SEQ ID NO: 1560975
cauacauucgggcgcgaga

SEQ ID NO: 1637736 - RNA, 19 nt, Artificial Sequence
  Description of Artificial Sequence: Synthetic oligonucleotide
  Antisense strand to SEQ ID NO: 1637735
ucucgcgcccgaauguaug

SEQ ID NO: 1637737 - RNA, 19 nt, Artificial Sequence
  Description of Artificial Sequence: Synthetic oligonucleotide
  Sense strand starting at position 2122 of SEQ ID NO: 1560975
ggccaaucagagugagaga

SEQ ID NO: 1637738 - RNA, 19 nt, Artificial Sequence
  Description of Artificial Sequence: Synthetic oligonucleotide
  Antisense strand to SEQ ID NO: 1637737
ucucucacucugauuggcc

SEQ ID NO: 1637739 - RNA, 19 nt, Artificial Sequence
  Description of Artificial Sequence: Synthetic oligonucleotide
  Sense strand starting at position 2269 of SEQ ID NO: 1560975
gaccuuugagaucgcagga

SEQ ID NO: 1637740 - RNA, 19 nt, Artificial Sequence
  Description of Artificial Sequence: Synthetic oligonucleotide
  Antisense strand to SEQ ID NO: 1637739
uccugcgaucucaaagguc

SEQ ID NO: 1637741 - RNA, 19 nt, Artificial Sequence
  Description of Artificial Sequence: Synthetic oligonucleotide
  Sense strand starting at position 2274 of SEQ ID NO: 1560975
uugagaucgcaggaaaguu

SEQ ID NO: 1637742 - RNA, 19 nt, Artificial Sequence
  Description of Artificial Sequence: Synthetic oligonucleotide
  Antisense strand to SEQ ID NO: 1637741
aacuuuccugcgaucucaa

SEQ ID NO: 1637743 - RNA, 19 nt, Artificial Sequence
  Description of Artificial Sequence: Synthetic oligonucleotide
  Sense strand starting at position 2343 of SEQ ID NO: 1560975
acgcuaaaguccgugucaa

SEQ ID NO: 1637744 - RNA, 19 nt, Artificial Sequence
  Description of Artificial Sequence: Synthetic oligonucleotide
  Antisense strand to SEQ ID NO: 1637743
uugacacggacuuuagcgu

SEQ ID NO: 1637745 - RNA, 19 nt, Artificial Sequence
  Description of Artificial Sequence: Synthetic oligonucleotide
  Sense strand starting at position 2918 of SEQ ID NO: 1560975
gggauaggcuuauaaagua

SEQ ID NO: 1637746 - RNA, 19 nt, Artificial Sequence
  Description of Artificial Sequence: Synthetic oligonucleotide
  Antisense strand to SEQ ID NO: 1637745
uacuuuauaagccuauccc

SEQ ID NO: 1637747 - RNA, 19 nt, Artificial Sequence
  Description of Artificial Sequence: Synthetic oligonucleotide
  Sense strand starting at position 3198 of SEQ ID NO: 1560975
gcaaacuucugaucucaag

SEQ ID NO: 1637748 - RNA, 19 nt, Artificial Sequence
  Description of Artificial Sequence: Synthetic oligonucleotide
  Antisense strand to SEQ ID NO: 1637747
cuugagaucagaaguuugc

SEQ ID NO: 1637749 - RNA, 19 nt, Artificial Sequence
  Description of Artificial Sequence: Synthetic oligonucleotide
  Sense strand starting at position 3269 of SEQ ID NO: 1560975
ugcgcauggccuuauacuu

SEQ ID NO: 1637750 - RNA, 19 nt, Artificial Sequence
  Description of Artificial Sequence: Synthetic oligonucleotide
  Antisense strand to SEQ ID NO: 1637749
aaguauaaggccaugcgca

SEQ ID NO: 1637751 - RNA, 19 nt, Artificial Sequence
  Description of Artificial Sequence: Synthetic oligonucleotide
  Sense strand starting at position 3306 of SEQ ID NO: 1560975
uuugcuggaguauguuaaa

SEQ ID NO: 1637752 - RNA, 19 nt, Artificial Sequence
  Description of Artificial Sequence: Synthetic oligonucleotide
  Antisense strand to SEQ ID NO: 1637751
uuuaacauacuccagcaaa

SEQ ID NO: 1637753 - RNA, 19 nt, Artificial Sequence
  Description of Artificial Sequence: Synthetic oligonucleotide
  Sense strand starting at position 3346 of SEQ ID NO: 1560975
agucauaaaugcgccauua

SEQ ID NO: 1637754 - RNA, 19 nt, Artificial Sequence
  Description of Artificial Sequence: Synthetic oligonucleotide
  Antisense strand to SEQ ID NO: 1637753
uaauggcgcauuuaugacu

SEQ ID NO: 1637755 - RNA, 19 nt, Artificial Sequence
  Description of Artificial Sequence: Synthetic oligonucleotide
  Sense strand starting at position 3348 of SEQ ID NO: 1560975
ucauaaaugcgccauuaug

SEQ ID NO: 1637756 - RNA, 19 nt, Artificial Sequence
  Description of Artificial Sequence: Synthetic oligonucleotide
  Antisense strand to SEQ ID NO: 1637755
cauaauggcgcauuuauga

SEQ ID NO: 1637757 - RNA, 19 nt, Artificial Sequence
  Description of Artificial Sequence: Synthetic oligonucleotide
  Sense strand starting at position 3356 of SEQ ID NO: 1560975
gcgccauuaugucuccuua

SEQ ID NO: 1637758 - RNA, 19 nt, Artificial Sequence
  Description of Artificial Sequence: Synthetic oligonucleotide
  Antisense strand to SEQ ID NO: 1637757
uaaggagacauaauggcgc

SEQ ID NO: 1637759 - RNA, 19 nt, Artificial Sequence
  Description of Artificial Sequence: Synthetic oligonucleotide
  Sense strand starting at position 3759 of SEQ ID NO: 1560975
agugaaacucagugucaag

SEQ ID NO: 1637760 - RNA, 19 nt, Artificial Sequence
  Description of Artificial Sequence: Synthetic oligonucleotide
  Antisense strand to SEQ ID NO: 1637759
cuugacacugaguuucacu

SEQ ID NO: 1637761 - RNA, 19 nt, Artificial Sequence
  Description of Artificial Sequence: Synthetic oligonucleotide
  Sense strand starting at position 3762 of SEQ ID NO: 1560975
gaaacucagugucaagaaa

SEQ ID NO: 1637762 - RNA, 19 nt, Artificial Sequence
  Description of Artificial Sequence: Synthetic oligonucleotide
  Antisense strand to SEQ ID NO: 1637761
uuucuugacacugaguuuc

SEQ ID NO: 1637763 - RNA, 19 nt, Artificial Sequence
  Description of Artificial Sequence: Synthetic oligonucleotide
  Sense strand starting at position 3846 of SEQ ID NO: 1560975
cccagaccguguucaguuu

SEQ ID NO: 1637764 - RNA, 19 nt, Artificial Sequence
  Description of Artificial Sequence: Synthetic oligonucleotide
  Antisense strand to SEQ ID NO: 1637763
aaacugaacacggucuggg

SEQ ID NO: 1637765 - RNA, 19 nt, Artificial Sequence
  Description of Artificial Sequence: Synthetic oligonucleotide
  Sense strand starting at position 3881 of SEQ ID NO: 1560975
gucuuuauacgauaguaga

SEQ ID NO: 1637766 - RNA, 19 nt, Artificial Sequence
  Description of Artificial Sequence: Synthetic oligonucleotide
  Antisense strand to SEQ ID NO: 1637765
ucuacuaucguauaaagac

SEQ ID NO: 1637767 - RNA, 19 nt, Artificial Sequence
  Description of Artificial Sequence: Synthetic oligonucleotide
  Sense strand starting at position 3892 of SEQ ID NO: 1560975
auaguagaaucaggaucaa

SEQ ID NO: 1637768 - RNA, 19 nt, Artificial Sequence
  Description of Artificial Sequence: Synthetic oligonucleotide
  Antisense strand to SEQ ID NO: 1637767
uugauccugauucuacuau

SEQ ID NO: 1637769 - RNA, 19 nt, Artificial Sequence
  Description of Artificial Sequence: Synthetic oligonucleotide
  Sense strand starting at position 3917 of SEQ ID NO: 1560975
guccaaauauugcauuuga

SEQ ID NO: 1637770 - RNA, 19 nt, Artificial Sequence
  Description of Artificial Sequence: Synthetic oligonucleotide
  Antisense strand to SEQ ID NO: 1637769
ucaaaugcaauauuuggac

SEQ ID NO: 1637771 - RNA, 19 nt, Artificial Sequence
  Description of Artificial Sequence: Synthetic oligonucleotide
  Sense strand starting at position 3925 of SEQ ID NO: 1560975
auugcauuugauugucuuu

SEQ ID NO: 1637772 - RNA, 19 nt, Artificial Sequence
  Description of Artificial Sequence: Synthetic oligonucleotide
  Antisense strand to SEQ ID NO: 1637771
aaagacaaucaaaugcaau

SEQ ID NO: 1637773 - RNA, 19 nt, Artificial Sequence
  Description of Artificial Sequence: Synthetic oligonucleotide
  Sense strand starting at position 35 of SEQ ID NO: 1560976
uguguuagcuguugugacu

SEQ ID NO: 1637774 - RNA, 19 nt, Artificial Sequence
  Description of Artificial Sequence: Synthetic oligonucleotide
  Antisense strand to SEQ ID NO: 1637773
agucacaacagcuaacaca

SEQ ID NO: 1637775 - RNA, 19 nt, Artificial Sequence
  Description of Artificial Sequence: Synthetic oligonucleotide
  Sense strand starting at position 36 of SEQ ID NO: 1560976
guguuagcuguugugacuu

SEQ ID NO: 1637776 - RNA, 19 nt, Artificial Sequence
  Description of Artificial Sequence: Synthetic oligonucleotide
  Antisense strand to SEQ ID NO: 1637775
aagucacaacagcuaacac

SEQ ID NO: 1637777 - RNA, 19 nt, Artificial Sequence
  Description of Artificial Sequence: Synthetic oligonucleotide
  Sense strand starting at position 83 of SEQ ID NO: 1560976
gcaggugcucgauaaaccu

SEQ ID NO: 1637778 - RNA, 19 nt, Artificial Sequence
  Description of Artificial Sequence: Synthetic oligonucleotide
  Antisense strand to SEQ ID NO: 1637777
agguuuaucgagcaccugc

SEQ ID NO: 1637779 - RNA, 19 nt, Artificial Sequence
  Description of Artificial Sequence: Synthetic oligonucleotide
  Sense strand starting at position 111 of SEQ ID NO: 1560976
caaucagugucaggaggau

SEQ ID NO: 1637780 - RNA, 19 nt, Artificial Sequence
  Description of Artificial Sequence: Synthetic oligonucleotide
  Antisense strand to SEQ ID NO: 1637779
auccuccugacacugauug

SEQ ID NO: 1637781 - RNA, 19 nt, Artificial Sequence
  Description of Artificial Sequence: Synthetic oligonucleotide
  Sense strand starting at position 374 of SEQ ID NO: 1560976
ggcagaaucuaacccagau

SEQ ID NO: 1637782 - RNA, 19 nt, Artificial Sequence
  Description of Artificial Sequence: Synthetic oligonucleotide
  Antisense strand to SEQ ID NO: 1637781
aucuggguuagauucugcc

SEQ ID NO: 1637783 - RNA, 19 nt, Artificial Sequence
  Description of Artificial Sequence: Synthetic oligonucleotide
  Sense strand starting at position 718 of SEQ ID NO: 1560976
ucucaaagguccucuuuag

SEQ ID NO: 1637784 - RNA, 19 nt, Artificial Sequence
  Description of Artificial Sequence: Synthetic oligonucleotide
  Antisense strand to SEQ ID NO: 1637783
cuaaagaggaccuuugaga

SEQ ID NO: 1637785 - RNA, 19 nt, Artificial Sequence
  Description of Artificial Sequence: Synthetic oligonucleotide
  Sense strand starting at position 1314 of SEQ ID NO: 1560976
gcgggaugcuuagagguaa

SEQ ID NO: 1637786 - RNA, 19 nt, Artificial Sequence
  Description of Artificial Sequence: Synthetic oligonucleotide
  Antisense strand to SEQ ID NO: 1637785
uuaccucuaagcaucccgc

SEQ ID NO: 1637787 - RNA, 19 nt, Artificial Sequence
  Description of Artificial Sequence: Synthetic oligonucleotide
  Sense strand starting at position 1315 of SEQ ID NO: 1560976
cgggaugcuuagagguaaa

SEQ ID NO: 1637788 - RNA, 19 nt, Artificial Sequence
  Description of Artificial Sequence: Synthetic oligonucleotide
  Antisense strand to SEQ ID NO: 1637787
uuuaccucuaagcaucccg

SEQ ID NO: 1637789 - RNA, 19 nt, Artificial Sequence
  Description of Artificial Sequence: Synthetic oligonucleotide
  Sense strand starting at position 1349 of SEQ ID NO: 1560976
gaccgaaucuucugacgga

SEQ ID NO: 1637790 - RNA, 19 nt, Artificial Sequence
  Description of Artificial Sequence: Synthetic oligonucleotide
  Antisense strand to SEQ ID NO: 1637789
uccgucagaagauucgguc

SEQ ID NO: 1637791 - RNA, 19 nt, Artificial Sequence
  Description of Artificial Sequence: Synthetic oligonucleotide
  Sense strand starting at position 1353 of SEQ ID NO: 1560976
gaaucuucugacggagucu

SEQ ID NO: 1637792 - RNA, 19 nt, Artificial Sequence
  Description of Artificial Sequence: Synthetic oligonucleotide
  Antisense strand to SEQ ID NO: 1637791
agacuccgucagaagauuc

SEQ ID NO: 1637793 - RNA, 19 nt, Artificial Sequence
  Description of Artificial Sequence: Synthetic oligonucleotide
  Sense strand starting at position 1445 of SEQ ID NO: 1560976
auaguuguggccagcgaga

SEQ ID NO: 1637794 - RNA, 19 nt, Artificial Sequence
  Description of Artificial Sequence: Synthetic oligonucleotide
  Antisense strand to SEQ ID NO: 1637793
ucucgcuggccacaacuau

SEQ ID NO: 1637795 - RNA, 19 nt, Artificial Sequence
  Description of Artificial Sequence: Synthetic oligonucleotide
  Sense strand starting at position 2423 of SEQ ID NO: 1560976
ggauucagguggucagaca

SEQ ID NO: 1637796 - RNA, 19 nt, Artificial Sequence
  Description of Artificial Sequence: Synthetic oligonucleotide
  Antisense strand to SEQ ID NO: 1637795
ugucugaccaccugaaucc

SEQ ID NO: 1637797 - RNA, 19 nt, Artificial Sequence
  Description of Artificial Sequence: Synthetic oligonucleotide
  Sense strand starting at position 2474 of SEQ ID NO: 1560976
gcagucauccaguaaauau

SEQ ID NO: 1637798 - RNA, 19 nt, Artificial Sequence
  Description of Artificial Sequence: Synthetic oligonucleotide
  Antisense strand to SEQ ID NO: 1637797
auauuuacuggaugacugc

SEQ ID NO: 1637799 - RNA, 19 nt, Artificial Sequence
  Description of Artificial Sequence: Synthetic oligonucleotide
  Sense strand starting at position 3187 of SEQ ID NO: 1560976
gcauguuaccuguaggaga

SEQ ID NO: 1637800 - RNA, 19 nt, Artificial Sequence
  Description of Artificial Sequence: Synthetic oligonucleotide
  Antisense strand to SEQ ID NO: 1637799
ucuccuacagguaacaugc

SEQ ID NO: 1637801 - RNA, 19 nt, Artificial Sequence
  Description of Artificial Sequence: Synthetic oligonucleotide
  Sense strand starting at position 3189 of SEQ ID NO: 1560976
auguuaccuguaggagaga

SEQ ID NO: 1637802 - RNA, 19 nt, Artificial Sequence
  Description of Artificial Sequence: Synthetic oligonucleotide
  Antisense strand to SEQ ID NO: 1637801
ucucuccuacagguaacau

SEQ ID NO: 1637803 - RNA, 19 nt, Artificial Sequence
  Description of Artificial Sequence: Synthetic oligonucleotide
  Sense strand starting at position 934 of SEQ ID NO: 1560977
gcgagaaccucugacacgu

SEQ ID NO: 1637804 - RNA, 19 nt, Artificial Sequence
  Description of Artificial Sequence: Synthetic oligonucleotide
  Antisense strand to SEQ ID NO: 1637803
acgugucagagguucucgc

SEQ ID NO: 1637805 - RNA, 19 nt, Artificial Sequence
  Description of Artificial Sequence: Synthetic oligonucleotide
  Sense strand starting at position 940 of SEQ ID NO: 1560977
accucugacacgugaggua

SEQ ID NO: 1637806 - RNA, 19 nt, Artificial Sequence
  Description of Artificial Sequence: Synthetic oligonucleotide
  Antisense strand to SEQ ID NO: 1637805
uaccucacgugucagaggu

SEQ ID NO: 1637807 - RNA, 19 nt, Artificial Sequence
  Description of Artificial Sequence: Synthetic oligonucleotide
  Sense strand starting at position 953 of SEQ ID NO: 1560977
gagguaaugucgucacacc

SEQ ID NO: 1637808 - RNA, 19 nt, Artificial Sequence
  Description of Artificial Sequence: Synthetic oligonucleotide
  Antisense strand to SEQ ID NO: 1637807
ggugugacgacauuaccuc

SEQ ID NO: 1637809 - RNA, 19 nt, Artificial Sequence
  Description of Artificial Sequence: Synthetic oligonucleotide
  Sense strand starting at position 954 of SEQ ID NO: 1560977
agguaaugucgucacaccu

SEQ ID NO: 1637810 - RNA, 19 nt, Artificial Sequence
  Description of Artificial Sequence: Synthetic oligonucleotide
  Antisense strand to SEQ ID NO: 1637809
aggugugacgacauuaccu

SEQ ID NO: 1637811 - RNA, 19 nt, Artificial Sequence
  Description of Artificial Sequence: Synthetic oligonucleotide
  Sense strand starting at position 964 of SEQ ID NO: 1560977
gucacaccuuccgaggauu

SEQ ID NO: 1637812 - RNA, 19 nt, Artificial Sequence
  Description of Artificial Sequence: Synthetic oligonucleotide
  Antisense strand to SEQ ID NO: 1637811
aauccucggaaggugugac

SEQ ID NO: 1637813 - RNA, 19 nt, Artificial Sequence
  Description of Artificial Sequence: Synthetic oligonucleotide
  Sense strand starting at position 1055 of SEQ ID NO: 1560977
acaagauaguguccagcaa

SEQ ID NO: 1637814 - RNA, 19 nt, Artificial Sequence
  Description of Artificial Sequence: Synthetic oligonucleotide
  Antisense strand to SEQ ID NO: 1637813
uugcuggacacuaucuugu

SEQ ID NO: 1637815 - RNA, 19 nt, Artificial Sequence
  Description of Artificial Sequence: Synthetic oligonucleotide
  Sense strand starting at position 1446 of SEQ ID NO: 1560977
gagccagauucugccuuua

SEQ ID NO: 1637816 - RNA, 19 nt, Artificial Sequence
  Description of Artificial Sequence: Synthetic oligonucleotide
  Antisense strand to SEQ ID NO: 1637815
uaaaggcagaaucuggcuc

SEQ ID NO: 1637817 - RNA, 19 nt, Artificial Sequence
  Description of Artificial Sequence: Synthetic oligonucleotide
  Sense strand starting at position 1448 of SEQ ID NO: 1560977
gccagauucugccuuuaaa

SEQ ID NO: 1637818 - RNA, 19 nt, Artificial Sequence
  Description of Artificial Sequence: Synthetic oligonucleotide
  Antisense strand to SEQ ID NO: 1637817
uuuaaaggcagaaucuggc

SEQ ID NO: 1637819 - RNA, 19 nt, Artificial Sequence
  Description of Artificial Sequence: Synthetic oligonucleotide
  Sense strand starting at position 1735 of SEQ ID NO: 1560977
gcuagaauguacucacuug

SEQ ID NO: 1637820 - RNA, 19 nt, Artificial Sequence
  Description of Artificial Sequence: Synthetic oligonucleotide
  Antisense strand to SEQ ID NO: 1637819
caagugaguacauucuagc

SEQ ID NO: 1637821 - RNA, 19 nt, Artificial Sequence
  Description of Artificial Sequence: Synthetic oligonucleotide
  Sense strand starting at position 2025 of SEQ ID NO: 1560977
gguccugagcgcugucaca

SEQ ID NO: 1637822 - RNA, 19 nt, Artificial Sequence
  Description of Artificial Sequence: Synthetic oligonucleotide
  Antisense strand to SEQ ID NO: 1637821
ugugacagcgcucaggacc

SEQ ID NO: 1637823 - RNA, 19 nt, Artificial Sequence
  Description of Artificial Sequence: Synthetic oligonucleotide
  Sense strand starting at position 2034 of SEQ ID NO: 1560977
cgcugucacagcugggauu

SEQ ID NO: 1637824 - RNA, 19 nt, Artificial Sequence
  Description of Artificial Sequence: Synthetic oligonucleotide
  Antisense strand to SEQ ID NO: 1637823
aaucccagcugugacagcg

SEQ ID NO: 1637825 - RNA, 19 nt, Artificial Sequence
  Description of Artificial Sequence: Synthetic oligonucleotide
  Sense strand starting at position 2094 of SEQ ID NO: 1560977
gggccuaugguuuguucga

SEQ ID NO: 1637826 - RNA, 19 nt, Artificial Sequence
  Description of Artificial Sequence: Synthetic oligonucleotide
  Antisense strand to SEQ ID NO: 1637825
ucgaacaaaccauaggccc

SEQ ID NO: 1637827 - RNA, 19 nt, Artificial Sequence
  Description of Artificial Sequence: Synthetic oligonucleotide
  Sense strand starting at position 2095 of SEQ ID NO: 1560977
ggccuaugguuuguucgaa

SEQ ID NO: 1637828 - RNA, 19 nt, Artificial Sequence
  Description of Artificial Sequence: Synthetic oligonucleotide
  Antisense strand to SEQ ID NO: 1637827
uucgaacaaaccauaggcc

SEQ ID NO: 1637829 - RNA, 19 nt, Artificial Sequence
  Description of Artificial Sequence: Synthetic oligonucleotide
  Sense strand starting at position 2096 of SEQ ID NO: 1560977
gccuaugguuuguucgaau

SEQ ID NO: 1637830 - RNA, 19 nt, Artificial Sequence
  Description of Artificial Sequence: Synthetic oligonucleotide
  Antisense strand to SEQ ID NO: 1637829
auucgaacaaaccauaggc

SEQ ID NO: 1637831 - RNA, 19 nt, Artificial Sequence
  Description of Artificial Sequence: Synthetic oligonucleotide
  Sense strand starting at position 2099 of SEQ ID NO: 1560977
uaugguuuguucgaaugac

SEQ ID NO: 1637832 - RNA, 19 nt, Artificial Sequence
  Description of Artificial Sequence: Synthetic oligonucleotide
  Antisense strand to SEQ ID NO: 1637831
gucauucgaacaaaccaua

SEQ ID NO: 1637833 - RNA, 19 nt, Artificial Sequence
  Description of Artificial Sequence: Synthetic oligonucleotide
  Sense strand starting at position 2103 of SEQ ID NO: 1560977
guuuguucgaaugacguca

SEQ ID NO: 1637834 - RNA, 19 nt, Artificial Sequence
  Description of Artificial Sequence: Synthetic oligonucleotide
  Antisense strand to SEQ ID NO: 1637833
ugacgucauucgaacaaac

SEQ ID NO: 1637835 - RNA, 19 nt, Artificial Sequence
  Description of Artificial Sequence: Synthetic oligonucleotide
  Sense strand starting at position 2145 of SEQ ID NO: 1560977
cuacgcaguucuggaguga

SEQ ID NO: 1637836 - RNA, 19 nt, Artificial Sequence
  Description of Artificial Sequence: Synthetic oligonucleotide
  Antisense strand to SEQ ID NO: 1637835
ucacuccagaacugcguag

SEQ ID NO: 1637837 - RNA, 19 nt, Artificial Sequence
  Description of Artificial Sequence: Synthetic oligonucleotide
  Sense strand starting at position 2146 of SEQ ID NO: 1560977
uacgcaguucuggagugaa

SEQ ID NO: 1637838 - RNA, 19 nt, Artificial Sequence
  Description of Artificial Sequence: Synthetic oligonucleotide
  Antisense strand to SEQ ID NO: 1637837
uucacuccagaacugcgua

SEQ ID NO: 1637839 - RNA, 19 nt, Artificial Sequence
  Description of Artificial Sequence: Synthetic oligonucleotide
  Sense strand starting at position 2149 of SEQ ID NO: 1560977
gcaguucuggagugaaaua

SEQ ID NO: 1637840 - RNA, 19 nt, Artificial Sequence
  Description of Artificial Sequence: Synthetic oligonucleotide
  Antisense strand to SEQ ID NO: 1637839
uauuucacuccagaacugc

SEQ ID NO: 1637841 - RNA, 19 nt, Artificial Sequence
  Description of Artificial Sequence: Synthetic oligonucleotide
  Sense strand starting at position 2244 of SEQ ID NO: 1560977
ucuggaaauguguguuuac

SEQ ID NO: 1637842 - RNA, 19 nt, Artificial Sequence
  Description of Artificial Sequence: Synthetic oligonucleotide
  Antisense strand to SEQ ID NO: 1637841
guaaacacacauuuccaga

SEQ ID NO: 1637843 - RNA, 19 nt, Artificial Sequence
  Description of Artificial Sequence: Synthetic oligonucleotide
  Sense strand starting at position 2247 of SEQ ID NO: 1560977
ggaaauguguguuuaccuu

SEQ ID NO: 1637844 - RNA, 19 nt, Artificial Sequence
  Description of Artificial Sequence: Synthetic oligonucleotide
  Antisense strand to SEQ ID NO: 1637843
aagguaaacacacauuucc

SEQ ID NO: 1637845 - RNA, 19 nt, Artificial Sequence
  Description of Artificial Sequence: Synthetic oligonucleotide
  Sense strand starting at position 2587 of SEQ ID NO: 1560977
ccugaacucugccugaacu

SEQ ID NO: 1637846 - RNA, 19 nt, Artificial Sequence
  Description of Artificial Sequence: Synthetic oligonucleotide
  Antisense strand to SEQ ID NO: 1637845
aguucaggcagaguucagg

SEQ ID NO: 1637847 - RNA, 19 nt, Artificial Sequence
  Description of Artificial Sequence: Synthetic oligonucleotide
  Sense strand starting at position 2588 of SEQ ID NO: 1560977
cugaacucugccugaacua

SEQ ID NO: 1637848 - RNA, 19 nt, Artificial Sequence
  Description of Artificial Sequence: Synthetic oligonucleotide
  Antisense strand to SEQ ID NO: 1637847
uaguucaggcagaguucag

SEQ ID NO: 1637849 - RNA, 19 nt, Artificial Sequence
  Description of Artificial Sequence: Synthetic oligonucleotide
  Sense strand starting at position 2604 of SEQ ID NO: 1560977
cuaccuuucuuagauugag

SEQ ID NO: 1637850 - RNA, 19 nt, Artificial Sequence
  Description of Artificial Sequence: Synthetic oligonucleotide
  Antisense strand to SEQ ID NO: 1637849
cucaaucuaagaaagguag

SEQ ID NO: 1637851 - RNA, 19 nt, Artificial Sequence
  Description of Artificial Sequence: Synthetic oligonucleotide
  Sense strand starting at position 2607 of SEQ ID NO: 1560977
ccuuucuuagauugaguau

SEQ ID NO: 1637852 - RNA, 19 nt, Artificial Sequence
  Description of Artificial Sequence: Synthetic oligonucleotide
  Antisense strand to SEQ ID NO: 1637851
auacucaaucuaagaaagg

SEQ ID NO: 1637853 - RNA, 19 nt, Artificial Sequence
  Description of Artificial Sequence: Synthetic oligonucleotide
  Sense strand starting at position 2639 of SEQ ID NO: 1560977
gcacuuaccuguccauguu

SEQ ID NO: 1637854 - RNA, 19 nt, Artificial Sequence
  Description of Artificial Sequence: Synthetic oligonucleotide
  Antisense strand to SEQ ID NO: 1637853
aacauggacagguaagugc

SEQ ID NO: 1637855 - RNA, 19 nt, Artificial Sequence
  Description of Artificial Sequence: Synthetic oligonucleotide
  Sense strand starting at position 2717 of SEQ ID NO: 1560977
cagcgaguguaucugauca

SEQ ID NO: 1637856 - RNA, 19 nt, Artificial Sequence
  Description of Artificial Sequence: Synthetic oligonucleotide
  Antisense strand to SEQ ID NO: 1637855
ugaucagauacacucgcug

SEQ ID NO: 1637857 - RNA, 19 nt, Artificial Sequence
  Description of Artificial Sequence: Synthetic oligonucleotide
  Sense strand starting at position 2721 of SEQ ID NO: 1560977
gaguguaucugaucaccac

SEQ ID NO: 1637858 - RNA, 19 nt, Artificial Sequence
  Description of Artificial Sequence: Synthetic oligonucleotide
  Antisense strand to SEQ ID NO: 1637857
guggugaucagauacacuc

SEQ ID NO: 1637859 - RNA, 19 nt, Artificial Sequence
  Description of Artificial Sequence: Synthetic oligonucleotide
  Sense strand starting at position 2810 of SEQ ID NO: 1560977
ucuaacuaggaguaaguuu

SEQ ID NO: 1637860 - RNA, 19 nt, Artificial Sequence
  Description of Artificial Sequence: Synthetic oligonucleotide
  Antisense strand to SEQ ID NO: 1637859
aaacuuacuccuaguuaga

SEQ ID NO: 1637861 - RNA, 19 nt, Artificial Sequence
  Description of Artificial Sequence: Synthetic oligonucleotide
  Sense strand starting at position 2846 of SEQ ID NO: 1560977
acugucaucuucuuauaug

SEQ ID NO: 1637862 - RNA, 19 nt, Artificial Sequence
  Description of Artificial Sequence: Synthetic oligonucleotide
  Antisense strand to SEQ ID NO: 1637861
cauauaagaagaugacagu

SEQ ID NO: 1637863 - RNA, 19 nt, Artificial Sequence
  Description of Artificial Sequence: Synthetic oligonucleotide
  Sense strand starting at position 2858 of SEQ ID NO: 1560977
uuauaugagcccugccaua

SEQ ID NO: 1637864 - RNA, 19 nt, Artificial Sequence
  Description of Artificial Sequence: Synthetic oligonucleotide
  Antisense strand to SEQ ID NO: 1637863
uauggcagggcucauauaa

SEQ ID NO: 1637865 - RNA, 19 nt, Artificial Sequence
  Description of Artificial Sequence: Synthetic oligonucleotide
  Sense strand starting at position 3353 of SEQ ID NO: 1560977
agaugagauugggaaguca

SEQ ID NO: 1637866 - RNA, 19 nt, Artificial Sequence
  Description of Artificial Sequence: Synthetic oligonucleotide
  Antisense strand to SEQ ID NO: 1637865
ugacuucccaaucucaucu

SEQ ID NO: 1637867 - RNA, 19 nt, Artificial Sequence
  Description of Artificial Sequence: Synthetic oligonucleotide
  Sense strand starting at position 3931 of SEQ ID NO: 1560977
ggccaaaguggagaauagu

SEQ ID NO: 1637868 - RNA, 19 nt, Artificial Sequence
  Description of Artificial Sequence: Synthetic oligonucleotide
  Antisense strand to SEQ ID NO: 1637867
acuauucuccacuuuggcc

SEQ ID NO: 1637869 - RNA, 19 nt, Artificial Sequence
  Description of Artificial Sequence: Synthetic oligonucleotide
  Sense strand starting at position 71 of SEQ ID NO: 1560978
cuggguaccgcugaagagu

SEQ ID NO: 1637870 - RNA, 19 nt, Artificial Sequence
  Description of Artificial Sequence: Synthetic oligonucleotide
  Antisense strand to SEQ ID NO: 1637869
acucuucagcgguacccag

SEQ ID NO: 1637871 - RNA, 19 nt, Artificial Sequence
  Description of Artificial Sequence: Synthetic oligonucleotide
  Sense strand starting at position 103 of SEQ ID NO: 1560978
gggucaugucacgggcaga

SEQ ID NO: 1637872 - RNA, 19 nt, Artificial Sequence
  Description of Artificial Sequence: Synthetic oligonucleotide
  Antisense strand to SEQ ID NO: 1637871
ucugcccgugacaugaccc

SEQ ID NO: 1637873 - RNA, 19 nt, Artificial Sequence
  Description of Artificial Sequence: Synthetic oligonucleotide
  Sense strand starting at position 147 of SEQ ID NO: 1560978
cuggcugagauguagagua

SEQ ID NO: 1637874 - RNA, 19 nt, Artificial Sequence
  Description of Artificial Sequence: Synthetic oligonucleotide
  Antisense strand to SEQ ID NO: 1637873
uacucuacaucucagccag

SEQ ID NO: 1637875 - RNA, 19 nt, Artificial Sequence
  Description of Artificial Sequence: Synthetic oligonucleotide
  Sense strand starting at position 149 of SEQ ID NO: 1560978
ggcugagauguagaguaug

SEQ ID NO: 1637876 - RNA, 19 nt, Artificial Sequence
  Description of Artificial Sequence: Synthetic oligonucleotide
  Antisense strand to SEQ ID NO: 1637875
cauacucuacaucucagcc

SEQ ID NO: 1637877 - RNA, 19 nt, Artificial Sequence
  Description of Artificial Sequence: Synthetic oligonucleotide
  Sense strand starting at position 192 of SEQ ID NO: 1560978
uaggaaagguaguucuaga

SEQ ID NO: 1637878 - RNA, 19 nt, Artificial Sequence
  Description of Artificial Sequence: Synthetic oligonucleotide
  Antisense strand to SEQ ID NO: 1637877
ucuagaacuaccuuuccua

SEQ ID NO: 1637879 - RNA, 19 nt, Artificial Sequence
  Description of Artificial Sequence: Synthetic oligonucleotide
  Sense strand starting at position 668 of SEQ ID NO: 1560978
gagagaccucagcagugua

SEQ ID NO: 1637880 - RNA, 19 nt, Artificial Sequence
  Description of Artificial Sequence: Synthetic oligonucleotide
  Antisense strand to SEQ ID NO: 1637879
uacacugcugaggucucuc

SEQ ID NO: 1637881 - RNA, 19 nt, Artificial Sequence
  Description of Artificial Sequence: Synthetic oligonucleotide
  Sense strand starting at position 671 of SEQ ID NO: 1560978
agaccucagcaguguaaga

SEQ ID NO: 1637882 - RNA, 19 nt, Artificial Sequence
  Description of Artificial Sequence: Synthetic oligonucleotide
  Antisense strand to SEQ ID NO: 1637881
ucuuacacugcugaggucu

SEQ ID NO: 1637883 - RNA, 19 nt, Artificial Sequence
  Description of Artificial Sequence: Synthetic oligonucleotide
  Sense strand starting at position 678 of SEQ ID NO: 1560978
agcaguguaagauaaguuu

SEQ ID NO: 1637884 - RNA, 19 nt, Artificial Sequence
  Description of Artificial Sequence: Synthetic oligonucleotide
  Antisense strand to SEQ ID NO: 1637883
aaacuuaucuuacacugcu

SEQ ID NO: 1637885 - RNA, 19 nt, Artificial Sequence
  Description of Artificial Sequence: Synthetic oligonucleotide
  Sense strand starting at position 684 of SEQ ID NO: 1560978
guaagauaaguuuagcuac

SEQ ID NO: 1637886 - RNA, 19 nt, Artificial Sequence
  Description of Artificial Sequence: Synthetic oligonucleotide
  Antisense strand to SEQ ID NO: 1637885
guagcuaaacuuaucuuac

SEQ ID NO: 1637887 - RNA, 19 nt, Artificial Sequence
  Description of Artificial Sequence: Synthetic oligonucleotide
  Sense strand starting at position 1913 of SEQ ID NO: 1560978
gggccagcccauuagagua

SEQ ID NO: 1637888 - RNA, 19 nt, Artificial Sequence
  Description of Artificial Sequence: Synthetic oligonucleotide
  Antisense strand to SEQ ID NO: 1637887
uacucuaaugggcuggccc

SEQ ID NO: 1637889 - RNA, 19 nt, Artificial Sequence
  Description of Artificial Sequence: Synthetic oligonucleotide
  Sense strand starting at position 1918 of SEQ ID NO: 1560978
agcccauuagaguaagcau

SEQ ID NO: 1637890 - RNA, 19 nt, Artificial Sequence
  Description of Artificial Sequence: Synthetic oligonucleotide
  Antisense strand to SEQ ID NO: 1637889
augcuuacucuaaugggcu

SEQ ID NO: 1637891 - RNA, 19 nt, Artificial Sequence
  Description of Artificial Sequence: Synthetic oligonucleotide
  Sense strand starting at position 2051 of SEQ ID NO: 1560978
uaagguuuccucugccuga

SEQ ID NO: 1637892 - RNA, 19 nt, Artificial Sequence
  Description of Artificial Sequence: Synthetic oligonucleotide
  Antisense strand to SEQ ID NO: 1637891
ucaggcagaggaaaccuua

SEQ ID NO: 1637893 - RNA, 19 nt, Artificial Sequence
  Description of Artificial Sequence: Synthetic oligonucleotide
  Sense strand starting at position 2054 of SEQ ID NO: 1560978
gguuuccucugccugaaau

SEQ ID NO: 1637894 - RNA, 19 nt, Artificial Sequence
  Description of Artificial Sequence: Synthetic oligonucleotide
  Antisense strand to SEQ ID NO: 1637893
auuucaggcagaggaaacc

SEQ ID NO: 1637895 - RNA, 19 nt, Artificial Sequence
  Description of Artificial Sequence: Synthetic oligonucleotide
  Sense strand starting at position 2085 of SEQ ID NO: 1560978
ccuggcucauucucgaaau

SEQ ID NO: 1637896 - RNA, 19 nt, Artificial Sequence
  Description of Artificial Sequence: Synthetic oligonucleotide
  Antisense strand to SEQ ID NO: 1637895
auuucgagaaugagccagg

SEQ ID NO: 1637897 - RNA, 19 nt, Artificial Sequence
  Description of Artificial Sequence: Synthetic oligonucleotide
  Sense strand starting at position 2087 of SEQ ID NO: 1560978
uggcucauucucgaaauug

SEQ ID NO: 1637898 - RNA, 19 nt, Artificial Sequence
  Description of Artificial Sequence: Synthetic oligonucleotide
  Antisense strand to SEQ ID NO: 1637897
caauuucgagaaugagcca

SEQ ID NO: 1637899 - RNA, 19 nt, Artificial Sequence
  Description of Artificial Sequence: Synthetic oligonucleotide
  Sense strand starting at position 2098 of SEQ ID NO: 1560978
cgaaauugaggucaaagcu

SEQ ID NO: 1637900 - RNA, 19 nt, Artificial Sequence
  Description of Artificial Sequence: Synthetic oligonucleotide
  Antisense strand to SEQ ID NO: 1637899
agcuuugaccucaauuucg

SEQ ID NO: 1637901 - RNA, 19 nt, Artificial Sequence
  Description of Artificial Sequence: Synthetic oligonucleotide
  Sense strand starting at position 2332 of SEQ ID NO: 1560978
guaucuccagcacaugaaa

SEQ ID NO: 1637902 - RNA, 19 nt, Artificial Sequence
  Description of Artificial Sequence: Synthetic oligonucleotide
  Antisense strand to SEQ ID NO: 1637901
uuucaugugcuggagauac

SEQ ID NO: 1637903 - RNA, 19 nt, Artificial Sequence
  Description of Artificial Sequence: Synthetic oligonucleotide
  Sense strand starting at position 2345 of SEQ ID NO: 1560978
augaaacaugcuuggcaca

SEQ ID NO: 1637904 - RNA, 19 nt, Artificial Sequence
  Description of Artificial Sequence: Synthetic oligonucleotide
  Antisense strand to SEQ ID NO: 1637903
ugugccaagcauguuucau

SEQ ID NO: 1637905 - RNA, 19 nt, Artificial Sequence
  Description of Artificial Sequence: Synthetic oligonucleotide
  Sense strand starting at position 2363 of SEQ ID NO: 1560978
acuguaggugcuuaaguau

SEQ ID NO: 1637906 - RNA, 19 nt, Artificial Sequence
  Description of Artificial Sequence: Synthetic oligonucleotide
  Antisense strand to SEQ ID NO: 1637905
auacuuaagcaccuacagu

SEQ ID NO: 1637907 - RNA, 19 nt, Artificial Sequence
  Description of Artificial Sequence: Synthetic oligonucleotide
  Sense strand starting at position 2372 of SEQ ID NO: 1560978
gcuuaaguauuugcuacua

SEQ ID NO: 1637908 - RNA, 19 nt, Artificial Sequence
  Description of Artificial Sequence: Synthetic oligonucleotide
  Antisense strand to SEQ ID NO: 1637907
uaguagcaaauacuuaagc

SEQ ID NO: 1637909 - RNA, 19 nt, Artificial Sequence
  Description of Artificial Sequence: Synthetic oligonucleotide
  Sense strand starting at position 2387 of SEQ ID NO: 1560978
acuacaucacuuugggauu

SEQ ID NO: 1637910 - RNA, 19 nt, Artificial Sequence
  Description of Artificial Sequence: Synthetic oligonucleotide
  Antisense strand to SEQ ID NO: 1637909
aaucccaaagugauguagu

SEQ ID NO: 1637911 - RNA, 19 nt, Artificial Sequence
  Description of Artificial Sequence: Synthetic oligonucleotide
  Sense strand starting at position 2388 of SEQ ID NO: 1560978
cuacaucacuuugggauuu

SEQ ID NO: 1637912 - RNA, 19 nt, Artificial Sequence
  Description of Artificial Sequence: Synthetic oligonucleotide
  Antisense strand to SEQ ID NO: 1637911
aaaucccaaagugauguag

SEQ ID NO: 1637913 - RNA, 19 nt, Artificial Sequence
  Description of Artificial Sequence: Synthetic oligonucleotide
  Sense strand starting at position 2515 of SEQ ID NO: 1560978
gcuucugugccucauacaa

SEQ ID NO: 1637914 - RNA, 19 nt, Artificial Sequence
  Description of Artificial Sequence: Synthetic oligonucleotide
  Antisense strand to SEQ ID NO: 1637913
uuguaugaggcacagaagc

SEQ ID NO: 1637915 - RNA, 19 nt, Artificial Sequence
  Description of Artificial Sequence: Synthetic oligonucleotide
  Sense strand starting at position 2590 of SEQ ID NO: 1560978
cuuccauuagcgcacauau

SEQ ID NO: 1637916 - RNA, 19 nt, Artificial Sequence
  Description of Artificial Sequence: Synthetic oligonucleotide
  Antisense strand to SEQ ID NO: 1637915
auaugugcgcuaauggaag

SEQ ID NO: 1637917 - RNA, 19 nt, Artificial Sequence
  Description of Artificial Sequence: Synthetic oligonucleotide
  Sense strand starting at position 2612 of SEQ ID NO: 1560978
ccaugaauugugcacacca

SEQ ID NO: 1637918 - RNA, 19 nt, Artificial Sequence
  Description of Artificial Sequence: Synthetic oligonucleotide
  Antisense strand to SEQ ID NO: 1637917
uggugugcacaauucaugg

SEQ ID NO: 1637919 - RNA, 19 nt, Artificial Sequence
  Description of Artificial Sequence: Synthetic oligonucleotide
  Sense strand starting at position 2662 of SEQ ID NO: 1560978
ucaggagcuacguauugaa

SEQ ID NO: 1637920 - RNA, 19 nt, Artificial Sequence
  Description of Artificial Sequence: Synthetic oligonucleotide
  Antisense strand to SEQ ID NO: 1637919
uucaauacguagcuccuga

SEQ ID NO: 1637921 - RNA, 19 nt, Artificial Sequence
  Description of Artificial Sequence: Synthetic oligonucleotide
  Sense strand starting at position 3009 of SEQ ID NO: 1560978
agcuauaucucucugagac

SEQ ID NO: 1637922 - RNA, 19 nt, Artificial Sequence
  Description of Artificial Sequence: Synthetic oligonucleotide
  Antisense strand to SEQ ID NO: 1637921
gucucagagagauauagcu

SEQ ID NO: 1637923 - RNA, 19 nt, Artificial Sequence
  Description of Artificial Sequence: Synthetic oligonucleotide
  Sense strand starting at position 3010 of SEQ ID NO: 1560978
gcuauaucucucugagacc

SEQ ID NO: 1637924 - RNA, 19 nt, Artificial Sequence
  Description of Artificial Sequence: Synthetic oligonucleotide
  Antisense strand to SEQ ID NO: 1637923
ggucucagagagauauagc

SEQ ID NO: 1637925 - RNA, 19 nt, Artificial Sequence
  Description of Artificial Sequence: Synthetic oligonucleotide
  Sense strand starting at position 3097 of SEQ ID NO: 1560978
ugaccuuucuccuugucau

SEQ ID NO: 1637926 - RNA, 19 nt, Artificial Sequence
  Description of Artificial Sequence: Synthetic oligonucleotide
  Antisense strand to SEQ ID NO: 1637925
augacaaggagaaagguca

SEQ ID NO: 1637927 - RNA, 19 nt, Artificial Sequence
  Description of Artificial Sequence: Synthetic oligonucleotide
  Sense strand starting at position 3137 of SEQ ID NO: 1560978
gucagaaucucagucaguc

SEQ ID NO: 1637928 - RNA, 19 nt, Artificial Sequence
  Description of Artificial Sequence: Synthetic oligonucleotide
  Antisense strand to SEQ ID NO: 1637927
gacugacugagauucugac

SEQ ID NO: 1637929 - RNA, 19 nt, Artificial Sequence
  Description of Artificial Sequence: Synthetic oligonucleotide
  Sense strand starting at position 3175 of SEQ ID NO: 1560978
gcgcaauggcucgcugcaa

SEQ ID NO: 1637930 - RNA, 19 nt, Artificial Sequence
  Description of Artificial Sequence: Synthetic oligonucleotide
  Antisense strand to SEQ ID NO: 1637929
uugcagcgagccauugcgc

SEQ ID NO: 1637931 - RNA, 19 nt, Artificial Sequence
  Description of Artificial Sequence: Synthetic oligonucleotide
  Sense strand starting at position 3385 of SEQ ID NO: 1560978
ccggcugucauaggaauuu

SEQ ID NO: 1637932 - RNA, 19 nt, Artificial Sequence
  Description of Artificial Sequence: Synthetic oligonucleotide
  Antisense strand to SEQ ID NO: 1637931
aaauuccuaugacagccgg

SEQ ID NO: 1637933 - RNA, 19 nt, Artificial Sequence
  Description of Artificial Sequence: Synthetic oligonucleotide
  Sense strand starting at position 3517 of SEQ ID NO: 1560978
ugggacaucccaggugaga

SEQ ID NO: 1637934 - RNA, 19 nt, Artificial Sequence
  Description of Artificial Sequence: Synthetic oligonucleotide
  Antisense strand to SEQ ID NO: 1637933
ucucaccugggauguccca

SEQ ID NO: 1637935 - RNA, 19 nt, Artificial Sequence
  Description of Artificial Sequence: Synthetic oligonucleotide
  Sense strand starting at position 3664 of SEQ ID NO: 1560978
aggugcuucggugauggau

SEQ ID NO: 1637936 - RNA, 19 nt, Artificial Sequence
  Description of Artificial Sequence: Synthetic oligonucleotide
  Antisense strand to SEQ ID NO: 1637935
auccaucaccgaagcaccu

SEQ ID NO: 1637937 - RNA, 19 nt, Artificial Sequence
  Description of Artificial Sequence: Synthetic oligonucleotide
  Sense strand starting at position 3755 of SEQ ID NO: 1560978
uggacacuuugacugguau

SEQ ID NO: 1637938 - RNA, 19 nt, Artificial Sequence
  Description of Artificial Sequence: Synthetic oligonucleotide
  Antisense strand to SEQ ID NO: 1637937
auaccagucaaagugucca

SEQ ID NO: 1637939 - RNA, 19 nt, Artificial Sequence
  Description of Artificial Sequence: Synthetic oligonucleotide
  Sense strand starting at position 3756 of SEQ ID NO: 1560978
ggacacuuugacugguauu

SEQ ID NO: 1637940 - RNA, 19 nt, Artificial Sequence
  Description of Artificial Sequence: Synthetic oligonucleotide
  Antisense strand to SEQ ID NO: 1637939
aauaccagucaaagugucc

SEQ ID NO: 1637941 - RNA, 19 nt, Artificial Sequence
  Description of Artificial Sequence: Synthetic oligonucleotide
  Sense strand starting at position 3766 of SEQ ID NO: 1560978
acugguauuugggaggcau

SEQ ID NO: 1637942 - RNA, 19 nt, Artificial Sequence
  Description of Artificial Sequence: Synthetic oligonucleotide
  Antisense strand to SEQ ID NO: 1637941
augccucccaaauaccagu

SEQ ID NO: 1637943 - RNA, 19 nt, Artificial Sequence
  Description of Artificial Sequence: Synthetic oligonucleotide
  Sense strand starting at position 3779 of SEQ ID NO: 1560978
aggcauuugcuguggguua

SEQ ID NO: 1637944 - RNA, 19 nt, Artificial Sequence
  Description of Artificial Sequence: Synthetic oligonucleotide
  Antisense strand to SEQ ID NO: 1637943
uaacccacagcaaaugccu

SEQ ID NO: 1637945 - RNA, 19 nt, Artificial Sequence
  Description of Artificial Sequence: Synthetic oligonucleotide
  Sense strand starting at position 3781 of SEQ ID NO: 1560978
gcauuugcuguggguuaca

SEQ ID NO: 1637946 - RNA, 19 nt, Artificial Sequence
  Description of Artificial Sequence: Synthetic oligonucleotide
  Antisense strand to SEQ ID NO: 1637945
uguaacccacagcaaaugc

SEQ ID NO: 1637947 - RNA, 19 nt, Artificial Sequence
  Description of Artificial Sequence: Synthetic oligonucleotide
  Sense strand starting at position 3813 of SEQ ID NO: 1560978
cuccuuugcggccagagaa

SEQ ID NO: 1637948 - RNA, 19 nt, Artificial Sequence
  Description of Artificial Sequence: Synthetic oligonucleotide
  Antisense strand to SEQ ID NO: 1637947
uucucuggccgcaaaggag

SEQ ID NO: 1637949 - RNA, 19 nt, Artificial Sequence
  Description of Artificial Sequence: Synthetic oligonucleotide
  Sense strand starting at position 114 of SEQ ID NO: 1560979
auguacuaugucugcacau

SEQ ID NO: 1637950 - RNA, 19 nt, Artificial Sequence
  Description of Artificial Sequence: Synthetic oligonucleotide
  Antisense strand to SEQ ID NO: 1637949
augugcagacauaguacau

SEQ ID NO: 1637951 - RNA, 19 nt, Artificial Sequence
  Description of Artificial Sequence: Synthetic oligonucleotide
  Sense strand starting at position 137 of SEQ ID NO: 1560979
cagcauacguguuugauau

SEQ ID NO: 1637952 - RNA, 19 nt, Artificial Sequence
  Description of Artificial Sequence: Synthetic oligonucleotide
  Antisense strand to SEQ ID NO: 1637951
auaucaaacacguaugcug

SEQ ID NO: 1637953 - RNA, 19 nt, Artificial Sequence
  Description of Artificial Sequence: Synthetic oligonucleotide
  Sense strand starting at position 225 of SEQ ID NO: 1560979
gugugauuuguggguagca

SEQ ID NO: 1637954 - RNA, 19 nt, Artificial Sequence
  Description of Artificial Sequence: Synthetic oligonucleotide
  Antisense strand to SEQ ID NO: 1637953
ugcuacccacaaaucacac

SEQ ID NO: 1637955 - RNA, 19 nt, Artificial Sequence
  Description of Artificial Sequence: Synthetic oligonucleotide
  Sense strand starting at position 273 of SEQ ID NO: 1560979
augugauauagugggaaac

SEQ ID NO: 1637956 - RNA, 19 nt, Artificial Sequence
  Description of Artificial Sequence: Synthetic oligonucleotide
  Antisense strand to SEQ ID NO: 1637955
guuucccacuauaucacau

SEQ ID NO: 1637957 - RNA, 19 nt, Artificial Sequence
  Description of Artificial Sequence: Synthetic oligonucleotide
  Sense strand starting at position 274 of SEQ ID NO: 1560979
ugugauauagugggaaaca

SEQ ID NO: 1637958 - RNA, 19 nt, Artificial Sequence
  Description of Artificial Sequence: Synthetic oligonucleotide
  Antisense strand to SEQ ID NO: 1637957
uguuucccacuauaucaca

SEQ ID NO: 1637959 - RNA, 19 nt, Artificial Sequence
  Description of Artificial Sequence: Synthetic oligonucleotide
  Sense strand starting at position 306 of SEQ ID NO: 1560979
ugggcugccugaguucaaa

SEQ ID NO: 1637960 - RNA, 19 nt, Artificial Sequence
  Description of Artificial Sequence: Synthetic oligonucleotide
  Antisense strand to SEQ ID NO: 1637959
uuugaacucaggcagccca

SEQ ID NO: 1637961 - RNA, 19 nt, Artificial Sequence
  Description of Artificial Sequence: Synthetic oligonucleotide
  Sense strand starting at position 336 of SEQ ID NO: 1560979
cuacuuugcagcugggaga

SEQ ID NO: 1637962 - RNA, 19 nt, Artificial Sequence
  Description of Artificial Sequence: Synthetic oligonucleotide
  Antisense strand to SEQ ID NO: 1637961
ucucccagcugcaaaguag

SEQ ID NO: 1637963 - RNA, 19 nt, Artificial Sequence
  Description of Artificial Sequence: Synthetic oligonucleotide
  Sense strand starting at position 514 of SEQ ID NO: 1560979
ggugaaaccuugucuauua

SEQ ID NO: 1637964 - RNA, 19 nt, Artificial Sequence
  Description of Artificial Sequence: Synthetic oligonucleotide
  Antisense strand to SEQ ID NO: 1637963
uaauagacaagguuucacc

SEQ ID NO: 1637965 - RNA, 19 nt, Artificial Sequence
  Description of Artificial Sequence: Synthetic oligonucleotide
  Sense strand starting at position 515 of SEQ ID NO: 1560979
gugaaaccuugucuauuaa

SEQ ID NO: 1637966 - RNA, 19 nt, Artificial Sequence
  Description of Artificial Sequence: Synthetic oligonucleotide
  Antisense strand to SEQ ID NO: 1637965
uuaauagacaagguuucac

SEQ ID NO: 1637967 - RNA, 19 nt, Artificial Sequence
  Description of Artificial Sequence: Synthetic oligonucleotide
  Sense strand starting at position 748 of SEQ ID NO: 1560979
acgggugugaugugaggau

SEQ ID NO: 1637968 - RNA, 19 nt, Artificial Sequence
  Description of Artificial Sequence: Synthetic oligonucleotide
  Antisense strand to SEQ ID NO: 1637967
auccucacaucacacccgu

SEQ ID NO: 1637969 - RNA, 19 nt, Artificial Sequence
  Description of Artificial Sequence: Synthetic oligonucleotide
  Sense strand starting at position 752 of SEQ ID NO: 1560979
gugugaugugaggauuaaa

SEQ ID NO: 1637970 - RNA, 19 nt, Artificial Sequence
  Description of Artificial Sequence: Synthetic oligonucleotide
  Antisense strand to SEQ ID NO: 1637969
uuuaauccucacaucacac

SEQ ID NO: 1637971 - RNA, 19 nt, Artificial Sequence
  Description of Artificial Sequence: Synthetic oligonucleotide
  Sense strand starting at position 879 of SEQ ID NO: 1560979
acacguuauucccugcaca

SEQ ID NO: 1637972 - RNA, 19 nt, Artificial Sequence
  Description of Artificial Sequence: Synthetic oligonucleotide
  Antisense strand to SEQ ID NO: 1637971
ugugcagggaauaacgugu

SEQ ID NO: 1637973 - RNA, 19 nt, Artificial Sequence
  Description of Artificial Sequence: Synthetic oligonucleotide
  Sense strand starting at position 908 of SEQ ID NO: 1560979
ggcugucaugcucaaagcu

SEQ ID NO: 1637974 - RNA, 19 nt, Artificial Sequence
  Description of Artificial Sequence: Synthetic oligonucleotide
  Antisense strand to SEQ ID NO: 1637973
agcuuugagcaugacagcc

SEQ ID NO: 1637975 - RNA, 19 nt, Artificial Sequence
  Description of Artificial Sequence: Synthetic oligonucleotide
  Sense strand starting at position 923 of SEQ ID NO: 1560979
agcugugugcgucucuaaa

SEQ ID NO: 1637976 - RNA, 19 nt, Artificial Sequence
  Description of Artificial Sequence: Synthetic oligonucleotide
  Antisense strand to SEQ ID NO: 1637975
uuuagagacgcacacagcu

SEQ ID NO: 1637977 - RNA, 19 nt, Artificial Sequence
  Description of Artificial Sequence: Synthetic oligonucleotide
  Sense strand starting at position 1005 of SEQ ID NO: 1560979
gccucuuuguaaguaacaa

SEQ ID NO: 1637978 - RNA, 19 nt, Artificial Sequence
  Description of Artificial Sequence: Synthetic oligonucleotide
  Antisense strand to SEQ ID NO: 1637977
uuguuacuuacaaagaggc

SEQ ID NO: 1637979 - RNA, 19 nt, Artificial Sequence
  Description of Artificial Sequence: Synthetic oligonucleotide
  Sense strand starting at position 1098 of SEQ ID NO: 1560979
agggauuuauucuagaggu

SEQ ID NO: 1637980 - RNA, 19 nt, Artificial Sequence
  Description of Artificial Sequence: Synthetic oligonucleotide
  Antisense strand to SEQ ID NO: 1637979
accucuagaauaaaucccu

SEQ ID NO: 1637981 - RNA, 19 nt, Artificial Sequence
  Description of Artificial Sequence: Synthetic oligonucleotide
  Sense strand starting at position 1104 of SEQ ID NO: 1560979
uuauucuagaggugcagaa

SEQ ID NO: 1637982 - RNA, 19 nt, Artificial Sequence
  Description of Artificial Sequence: Synthetic oligonucleotide
  Antisense strand to SEQ ID NO: 1637981
uucugcaccucuagaauaa

SEQ ID NO: 1637983 - RNA, 19 nt, Artificial Sequence
  Description of Artificial Sequence: Synthetic oligonucleotide
  Sense strand starting at position 1178 of SEQ ID NO: 1560979
uuaagaagcuuaucucagu

SEQ ID NO: 1637984 - RNA, 19 nt, Artificial Sequence
  Description of Artificial Sequence: Synthetic oligonucleotide
  Antisense strand to SEQ ID NO: 1637983
acugagauaagcuucuuaa

SEQ ID NO: 1637985 - RNA, 19 nt, Artificial Sequence
  Description of Artificial Sequence: Synthetic oligonucleotide
  Sense strand starting at position 1228 of SEQ ID NO: 1560979
ugagcaucaggguagugau

SEQ ID NO: 1637986 - RNA, 19 nt, Artificial Sequence
  Description of Artificial Sequence: Synthetic oligonucleotide
  Antisense strand to SEQ ID NO: 1637985
aucacuacccugaugcuca

SEQ ID NO: 1637987 - RNA, 19 nt, Artificial Sequence
  Description of Artificial Sequence: Synthetic oligonucleotide
  Sense strand starting at position 1235 of SEQ ID NO: 1560979
caggguagugauuauucca

SEQ ID NO: 1637988 - RNA, 19 nt, Artificial Sequence
  Description of Artificial Sequence: Synthetic oligonucleotide
  Antisense strand to SEQ ID NO: 1637987
uggaauaaucacuacccug

SEQ ID NO: 1637989 - RNA, 19 nt, Artificial Sequence
  Description of Artificial Sequence: Synthetic oligonucleotide
  Sense strand starting at position 1238 of SEQ ID NO: 1560979
gguagugauuauuccaauc

SEQ ID NO: 1637990 - RNA, 19 nt, Artificial Sequence
  Description of Artificial Sequence: Synthetic oligonucleotide
  Antisense strand to SEQ ID NO: 1637989
gauuggaauaaucacuacc

SEQ ID NO: 1637991 - RNA, 19 nt, Artificial Sequence
  Description of Artificial Sequence: Synthetic oligonucleotide
  Sense strand starting at position 1421 of SEQ ID NO: 1560979
cguccugagggcugagauu

SEQ ID NO: 1637992 - RNA, 19 nt, Artificial Sequence
  Description of Artificial Sequence: Synthetic oligonucleotide
  Antisense strand to SEQ ID NO: 1637991
aaucucagcccucaggacg

SEQ ID NO: 1637993 - RNA, 19 nt, Artificial Sequence
  Description of Artificial Sequence: Synthetic oligonucleotide
  Sense strand starting at position 2387 of SEQ ID NO: 1560979
cucagcuuuccaggguaaa

SEQ ID NO: 1637994 - RNA, 19 nt, Artificial Sequence
  Description of Artificial Sequence: Synthetic oligonucleotide
  Antisense strand to SEQ ID NO: 1637993
uuuacccuggaaagcugag

SEQ ID NO: 1637995 - RNA, 19 nt, Artificial Sequence
  Description of Artificial Sequence: Synthetic oligonucleotide
  Sense strand starting at position 2627 of SEQ ID NO: 1560979
gggagaguuucugugaaag

SEQ ID NO: 1637996 - RNA, 19 nt, Artificial Sequence
  Description of Artificial Sequence: Synthetic oligonucleotide
  Antisense strand to SEQ ID NO: 1637995
cuuucacagaaacucuccc

SEQ ID NO: 1637997 - RNA, 19 nt, Artificial Sequence
  Description of Artificial Sequence: Synthetic oligonucleotide
  Sense strand starting at position 2651 of SEQ ID NO: 1560979
gggaauuagugucuguauu

SEQ ID NO: 1637998 - RNA, 19 nt, Artificial Sequence
  Description of Artificial Sequence: Synthetic oligonucleotide
  Antisense strand to SEQ ID NO: 1637997
aauacagacacuaauuccc

SEQ ID NO: 1637999 - RNA, 19 nt, Artificial Sequence
  Description of Artificial Sequence: Synthetic oligonucleotide
  Sense strand starting at position 2652 of SEQ ID NO: 1560979
ggaauuagugucuguauuc

SEQ ID NO: 1638000 - RNA, 19 nt, Artificial Sequence
  Description of Artificial Sequence: Synthetic oligonucleotide
  Antisense strand to SEQ ID NO: 1637999
gaauacagacacuaauucc

SEQ ID NO: 1638001 - RNA, 19 nt, Artificial Sequence
  Description of Artificial Sequence: Synthetic oligonucleotide
  Sense strand starting at position 2653 of SEQ ID NO: 1560979
gaauuagugucuguauucu

SEQ ID NO: 1638002 - RNA, 19 nt, Artificial Sequence
  Description of Artificial Sequence: Synthetic oligonucleotide
  Antisense strand to SEQ ID NO: 1638001
agaauacagacacuaauuc

SEQ ID NO: 1638003 - RNA, 19 nt, Artificial Sequence
  Description of Artificial Sequence: Synthetic oligonucleotide
  Sense strand starting at position 2661 of SEQ ID NO: 1560979
gucuguauucugggugaag

SEQ ID NO: 1638004 - RNA, 19 nt, Artificial Sequence
  Description of Artificial Sequence: Synthetic oligonucleotide
  Antisense strand to SEQ ID NO: 1638003
cuucacccagaauacagac

SEQ ID NO: 1638005 - RNA, 19 nt, Artificial Sequence
  Description of Artificial Sequence: Synthetic oligonucleotide
  Sense strand starting at position 2662 of SEQ ID NO: 1560979
ucuguauucugggugaaga

SEQ ID NO: 1638006 - RNA, 19 nt, Artificial Sequence
  Description of Artificial Sequence: Synthetic oligonucleotide
  Antisense strand to SEQ ID NO: 1638005
ucuucacccagaauacaga

SEQ ID NO: 1638007 - RNA, 19 nt, Artificial Sequence
  Description of Artificial Sequence: Synthetic oligonucleotide
  Sense strand starting at position 2663 of SEQ ID NO: 1560979
cuguauucugggugaagaa

SEQ ID NO: 1638008 - RNA, 19 nt, Artificial Sequence
  Description of Artificial Sequence: Synthetic oligonucleotide
  Antisense strand to SEQ ID NO: 1638007
uucuucacccagaauacag

SEQ ID NO: 1638009 - RNA, 19 nt, Artificial Sequence
  Description of Artificial Sequence: Synthetic oligonucleotide
  Sense strand starting at position 2664 of SEQ ID NO: 1560979
uguauucugggugaagaau

SEQ ID NO: 1638010 - RNA, 19 nt, Artificial Sequence
  Description of Artificial Sequence: Synthetic oligonucleotide
  Antisense strand to SEQ ID NO: 1638009
auucuucacccagaauaca

SEQ ID NO: 1638011 - RNA, 19 nt, Artificial Sequence
  Description of Artificial Sequence: Synthetic oligonucleotide
  Sense strand starting at position 2673 of SEQ ID NO: 1560979
ggugaagaaucucugauug

SEQ ID NO: 1638012 - RNA, 19 nt, Artificial Sequence
  Description of Artificial Sequence: Synthetic oligonucleotide
  Antisense strand to SEQ ID NO: 1638011
caaucagagauucuucacc

SEQ ID NO: 1638013 - RNA, 19 nt, Artificial Sequence
  Description of Artificial Sequence: Synthetic oligonucleotide
  Sense strand starting at position 2675 of SEQ ID NO: 1560979
ugaagaaucucugauugaa

SEQ ID NO: 1638014 - RNA, 19 nt, Artificial Sequence
  Description of Artificial Sequence: Synthetic oligonucleotide
  Antisense strand to SEQ ID NO: 1638013
uucaaucagagauucuuca

SEQ ID NO: 1638015 - RNA, 19 nt, Artificial Sequence
  Description of Artificial Sequence: Synthetic oligonucleotide
  Sense strand starting at position 2846 of SEQ ID NO: 1560979
ggagaagucucagccucag

SEQ ID NO: 1638016 - RNA, 19 nt, Artificial Sequence
  Description of Artificial Sequence: Synthetic oligonucleotide
  Antisense strand to SEQ ID NO: 1638015
cugaggcugagacuucucc

SEQ ID NO: 1638017 - RNA, 19 nt, Artificial Sequence
  Description of Artificial Sequence: Synthetic oligonucleotide
  Sense strand starting at position 3150 of SEQ ID NO: 1560979
gugucugcgcuuguccaau

SEQ ID NO: 1638018 - RNA, 19 nt, Artificial Sequence
  Description of Artificial Sequence: Synthetic oligonucleotide
  Antisense strand to SEQ ID NO: 1638017
auuggacaagcgcagacac

SEQ ID NO: 1638019 - RNA, 19 nt, Artificial Sequence
  Description of Artificial Sequence: Synthetic oligonucleotide
  Sense strand starting at position 3156 of SEQ ID NO: 1560979
gcgcuuguccaauugcaua

SEQ ID NO: 1638020 - RNA, 19 nt, Artificial Sequence
  Description of Artificial Sequence: Synthetic oligonucleotide
  Antisense strand to SEQ ID NO: 1638019
uaugcaauuggacaagcgc

SEQ ID NO: 1638021 - RNA, 19 nt, Artificial Sequence
  Description of Artificial Sequence: Synthetic oligonucleotide
  Sense strand starting at position 3254 of SEQ ID NO: 1560979
ucccaagaauggcaagaau

SEQ ID NO: 1638022 - RNA, 19 nt, Artificial Sequence
  Description of Artificial Sequence: Synthetic oligonucleotide
  Antisense strand to SEQ ID NO: 1638021
auucuugccauucuuggga

SEQ ID NO: 1638023 - RNA, 19 nt, Artificial Sequence
  Description of Artificial Sequence: Synthetic oligonucleotide
  Sense strand starting at position 3747 of SEQ ID NO: 1560979
cccuuuauuugaggaauca

SEQ ID NO: 1638024 - RNA, 19 nt, Artificial Sequence
  Description of Artificial Sequence: Synthetic oligonucleotide
  Antisense strand to SEQ ID NO: 1638023
ugauuccucaaauaaaggg

SEQ ID NO: 1638025 - RNA, 19 nt, Artificial Sequence
  Description of Artificial Sequence: Synthetic oligonucleotide
  Sense strand starting at position 3825 of SEQ ID NO: 1560979
acacgugacuuagggauuu

SEQ ID NO: 1638026 - RNA, 19 nt, Artificial Sequence
  Description of Artificial Sequence: Synthetic oligonucleotide
  Antisense strand to SEQ ID NO: 1638025
aaaucccuaagucacgugu

SEQ ID NO: 1638027 - RNA, 19 nt, Artificial Sequence
  Description of Artificial Sequence: Synthetic oligonucleotide
  Sense strand starting at position 3856 of SEQ ID NO: 1560979
gaagguuuggaguaaggcu

SEQ ID NO: 1638028 - RNA, 19 nt, Artificial Sequence
  Description of Artificial Sequence: Synthetic oligonucleotide
  Antisense strand to SEQ ID NO: 1638027
agccuuacuccaaaccuuc

SEQ ID NO: 1638029 - RNA, 19 nt, Artificial Sequence
  Description of Artificial Sequence: Synthetic oligonucleotide
  Sense strand starting at position 80 of SEQ ID NO: 1560980
gguggaggacuguaugcuu

SEQ ID NO: 1638030 - RNA, 19 nt, Artificial Sequence
  Description of Artificial Sequence: Synthetic oligonucleotide
  Antisense strand to SEQ ID NO: 1638029
aagcauacaguccuccacc

SEQ ID NO: 1638031 - RNA, 19 nt, Artificial Sequence
  Description of Artificial Sequence: Synthetic oligonucleotide
  Sense strand starting at position 141 of SEQ ID NO: 1560980
ucaguuucgucucugguga

SEQ ID NO: 1638032 - RNA, 19 nt, Artificial Sequence
  Description of Artificial Sequence: Synthetic oligonucleotide
  Antisense strand to SEQ ID NO: 1638031
ucaccagagacgaaacuga

SEQ ID NO: 1638033 - RNA, 19 nt, Artificial Sequence
  Description of Artificial Sequence: Synthetic oligonucleotide
  Sense strand starting at position 143 of SEQ ID NO: 1560980
aguuucgucucuggugaca

SEQ ID NO: 1638034 - RNA, 19 nt, Artificial Sequence
  Description of Artificial Sequence: Synthetic oligonucleotide
  Antisense strand to SEQ ID NO: 1638033
ugucaccagagacgaaacu

SEQ ID NO: 1638035 - RNA, 19 nt, Artificial Sequence
  Description of Artificial Sequence: Synthetic oligonucleotide
  Sense strand starting at position 441 of SEQ ID NO: 1560980
cugggauccaccugcagaa

SEQ ID NO: 1638036 - RNA, 19 nt, Artificial Sequence
  Description of Artificial Sequence: Synthetic oligonucleotide
  Antisense strand to SEQ ID NO: 1638035
uucugcagguggaucccag

SEQ ID NO: 1638037 - RNA, 19 nt, Artificial Sequence
  Description of Artificial Sequence: Synthetic oligonucleotide
  Sense strand starting at position 508 of SEQ ID NO: 1560980
agagcaaguccuugugagu

SEQ ID NO: 1638038 - RNA, 19 nt, Artificial Sequence
  Description of Artificial Sequence: Synthetic oligonucleotide
  Antisense strand to SEQ ID NO: 1638037
acucacaaggacuugcucu

SEQ ID NO: 1638039 - RNA, 19 nt, Artificial Sequence
  Description of Artificial Sequence: Synthetic oligonucleotide
  Sense strand starting at position 511 of SEQ ID NO: 1560980
gcaaguccuugugagucau

SEQ ID NO: 1638040 - RNA, 19 nt, Artificial Sequence
  Description of Artificial Sequence: Synthetic oligonucleotide
  Antisense strand to SEQ ID NO: 1638039
augacucacaaggacuugc

SEQ ID NO: 1638041 - RNA, 19 nt, Artificial Sequence
  Description of Artificial Sequence: Synthetic oligonucleotide
  Sense strand starting at position 532 of SEQ ID NO: 1560980
ugcggagcuuccuggaaga

SEQ ID NO: 1638042 - RNA, 19 nt, Artificial Sequence
  Description of Artificial Sequence: Synthetic oligonucleotide
  Antisense strand to SEQ ID NO: 1638041
ucuuccaggaagcuccgca

SEQ ID NO: 1638043 - RNA, 19 nt, Artificial Sequence
  Description of Artificial Sequence: Synthetic oligonucleotide
  Sense strand starting at position 534 of SEQ ID NO: 1560980
cggagcuuccuggaagaga

SEQ ID NO: 1638044 - RNA, 19 nt, Artificial Sequence
  Description of Artificial Sequence: Synthetic oligonucleotide
  Antisense strand to SEQ ID NO: 1638043
ucucuuccaggaagcuccg

SEQ ID NO: 1638045 - RNA, 19 nt, Artificial Sequence
  Description of Artificial Sequence: Synthetic oligonucleotide
  Sense strand starting at position 667 of SEQ ID NO: 1560980
ccagaaguuuaagacuagu

SEQ ID NO: 1638046 - RNA, 19 nt, Artificial Sequence
  Description of Artificial Sequence: Synthetic oligonucleotide
  Antisense strand to SEQ ID NO: 1638045
acuagucuuaaacuucugg

SEQ ID NO: 1638047 - RNA, 19 nt, Artificial Sequence
  Description of Artificial Sequence: Synthetic oligonucleotide
  Sense strand starting at position 675 of SEQ ID NO: 1560980
uuaagacuagucuggguaa

SEQ ID NO: 1638048 - RNA, 19 nt, Artificial Sequence
  Description of Artificial Sequence: Synthetic oligonucleotide
  Antisense strand to SEQ ID NO: 1638047
uuacccagacuagucuuaa

SEQ ID NO: 1638049 - RNA, 19 nt, Artificial Sequence
  Description of Artificial Sequence: Synthetic oligonucleotide
  Sense strand starting at position 1081 of SEQ ID NO: 1560980
acuacaugcucuugcuaga

SEQ ID NO: 1638050 - RNA, 19 nt, Artificial Sequence
  Description of Artificial Sequence: Synthetic oligonucleotide
  Antisense strand to SEQ ID NO: 1638049
ucuagcaagagcauguagu

SEQ ID NO: 1638051 - RNA, 19 nt, Artificial Sequence
  Description of Artificial Sequence: Synthetic oligonucleotide
  Sense strand starting at position 1084 of SEQ ID NO: 1560980
acaugcucuugcuagagau

SEQ ID NO: 1638052 - RNA, 19 nt, Artificial Sequence
  Description of Artificial Sequence: Synthetic oligonucleotide
  Antisense strand to SEQ ID NO: 1638051
aucucuagcaagagcaugu

SEQ ID NO: 1638053 - RNA, 19 nt, Artificial Sequence
  Description of Artificial Sequence: Synthetic oligonucleotide
  Sense strand starting at position 1136 of SEQ ID NO: 1560980
gggugaaagucacggaaga

SEQ ID NO: 1638054 - RNA, 19 nt, Artificial Sequence
  Description of Artificial Sequence: Synthetic oligonucleotide
  Antisense strand to SEQ ID NO: 1638053
ucuuccgugacuuucaccc

SEQ ID NO: 1638055 - RNA, 19 nt, Artificial Sequence
  Description of Artificial Sequence: Synthetic oligonucleotide
  Sense strand starting at position 1137 of SEQ ID NO: 1560980
ggugaaagucacggaagaa

SEQ ID NO: 1638056 - RNA, 19 nt, Artificial Sequence
  Description of Artificial Sequence: Synthetic oligonucleotide
  Antisense strand to SEQ ID NO: 1638055
uucuuccgugacuuucacc

SEQ ID NO: 1638057 - RNA, 19 nt, Artificial Sequence
  Description of Artificial Sequence: Synthetic oligonucleotide
  Sense strand starting at position 1401 of SEQ ID NO: 1560980
acgggaagaucucuacugu

SEQ ID NO: 1638058 - RNA, 19 nt, Artificial Sequence
  Description of Artificial Sequence: Synthetic oligonucleotide
  Antisense strand to SEQ ID NO: 1638057
acaguagagaucuucccgu

SEQ ID NO: 1638059 - RNA, 19 nt, Artificial Sequence
  Description of Artificial Sequence: Synthetic oligonucleotide
  Sense strand starting at position 1402 of SEQ ID NO: 1560980
cgggaagaucucuacuguu

SEQ ID NO: 1638060 - RNA, 19 nt, Artificial Sequence
  Description of Artificial Sequence: Synthetic oligonucleotide
  Antisense strand to SEQ ID NO: 1638059
aacaguagagaucuucccg

SEQ ID NO: 1638061 - RNA, 19 nt, Artificial Sequence
  Description of Artificial Sequence: Synthetic oligonucleotide
  Sense strand starting at position 1405 of SEQ ID NO: 1560980
gaagaucucuacuguugca

SEQ ID NO: 1638062 - RNA, 19 nt, Artificial Sequence
  Description of Artificial Sequence: Synthetic oligonucleotide
  Antisense strand to SEQ ID NO: 1638061
ugcaacaguagagaucuuc

SEQ ID NO: 1638063 - RNA, 19 nt, Artificial Sequence
  Description of Artificial Sequence: Synthetic oligonucleotide
  Sense strand starting at position 2212 of SEQ ID NO: 1560980
gugucagaggaugggauua

SEQ ID NO: 1638064 - RNA, 19 nt, Artificial Sequence
  Description of Artificial Sequence: Synthetic oligonucleotide
  Antisense strand to SEQ ID NO: 1638063
uaaucccauccucugacac

SEQ ID NO: 1638065 - RNA, 19 nt, Artificial Sequence
  Description of Artificial Sequence: Synthetic oligonucleotide
  Sense strand starting at position 2214 of SEQ ID NO: 1560980
gucagaggaugggauuauu

SEQ ID NO: 1638066 - RNA, 19 nt, Artificial Sequence
  Description of Artificial Sequence: Synthetic oligonucleotide
  Antisense strand to SEQ ID NO: 1638065
aauaaucccauccucugac

SEQ ID NO: 1638067 - RNA, 19 nt, Artificial Sequence
  Description of Artificial Sequence: Synthetic oligonucleotide
  Sense strand starting at position 2222 of SEQ ID NO: 1560980
augggauuauuggcugaag

SEQ ID NO: 1638068 - RNA, 19 nt, Artificial Sequence
  Description of Artificial Sequence: Synthetic oligonucleotide
  Antisense strand to SEQ ID NO: 1638067
cuucagccaauaaucccau

SEQ ID NO: 1638069 - RNA, 19 nt, Artificial Sequence
  Description of Artificial Sequence: Synthetic oligonucleotide
  Sense strand starting at position 2225 of SEQ ID NO: 1560980
ggauuauuggcugaagggu

SEQ ID NO: 1638070 - RNA, 19 nt, Artificial Sequence
  Description of Artificial Sequence: Synthetic oligonucleotide
  Antisense strand to SEQ ID NO: 1638069
acccuucagccaauaaucc

SEQ ID NO: 1638071 - RNA, 19 nt, Artificial Sequence
  Description of Artificial Sequence: Synthetic oligonucleotide
  Sense strand starting at position 2326 of SEQ ID NO: 1560980
acgcgauucauuggcgaga

SEQ ID NO: 1638072 - RNA, 19 nt, Artificial Sequence
  Description of Artificial Sequence: Synthetic oligonucleotide
  Antisense strand to SEQ ID NO: 1638071
ucucgccaaugaaucgcgu

SEQ ID NO: 1638073 - RNA, 19 nt, Artificial Sequence
  Description of Artificial Sequence: Synthetic oligonucleotide
  Sense strand starting at position 2329 of SEQ ID NO: 1560980
cgauucauuggcgagacca

SEQ ID NO: 1638074 - RNA, 19 nt, Artificial Sequence
  Description of Artificial Sequence: Synthetic oligonucleotide
  Antisense strand to SEQ ID NO: 1638073
uggucucgccaaugaaucg

SEQ ID NO: 1638075 - RNA, 19 nt, Artificial Sequence
  Description of Artificial Sequence: Synthetic oligonucleotide
  Sense strand starting at position 2331 of SEQ ID NO: 1560980
auucauuggcgagaccagu

SEQ ID NO: 1638076 - RNA, 19 nt, Artificial Sequence
  Description of Artificial Sequence: Synthetic oligonucleotide
  Antisense strand to SEQ ID NO: 1638075
acuggucucgccaaugaau

SEQ ID NO: 1638077 - RNA, 19 nt, Artificial Sequence
  Description of Artificial Sequence: Synthetic oligonucleotide
  Sense strand starting at position 2441 of SEQ ID NO: 1560980
gaaugauucugauuaggcc

SEQ ID NO: 1638078 - RNA, 19 nt, Artificial Sequence
  Description of Artificial Sequence: Synthetic oligonucleotide
  Antisense strand to SEQ ID NO: 1638077
ggccuaaucagaaucauuc

SEQ ID NO: 1638079 - RNA, 19 nt, Artificial Sequence
  Description of Artificial Sequence: Synthetic oligonucleotide
  Sense strand starting at position 2471 of SEQ ID NO: 1560980
cgggcugauucucgaagga

SEQ ID NO: 1638080 - RNA, 19 nt, Artificial Sequence
  Description of Artificial Sequence: Synthetic oligonucleotide
  Antisense strand to SEQ ID NO: 1638079
uccuucgagaaucagcccg

SEQ ID NO: 1638081 - RNA, 19 nt, Artificial Sequence
  Description of Artificial Sequence: Synthetic oligonucleotide
  Sense strand starting at position 2473 of SEQ ID NO: 1560980
ggcugauucucgaaggagg

SEQ ID NO: 1638082 - RNA, 19 nt, Artificial Sequence
  Description of Artificial Sequence: Synthetic oligonucleotide
  Antisense strand to SEQ ID NO: 1638081
ccuccuucgagaaucagcc

SEQ ID NO: 1638083 - RNA, 19 nt, Artificial Sequence
  Description of Artificial Sequence: Synthetic oligonucleotide
  Sense strand starting at position 2525 of SEQ ID NO: 1560980
gguaggacgcguuaucgca

SEQ ID NO: 1638084 - RNA, 19 nt, Artificial Sequence
  Description of Artificial Sequence: Synthetic oligonucleotide
  Antisense strand to SEQ ID NO: 1638083
ugcgauaacgcguccuacc

SEQ ID NO: 1638085 - RNA, 19 nt, Artificial Sequence
  Description of Artificial Sequence: Synthetic oligonucleotide
  Sense strand starting at position 2531 of SEQ ID NO: 1560980
acgcguuaucgcaacagug

SEQ ID NO: 1638086 - RNA, 19 nt, Artificial Sequence
  Description of Artificial Sequence: Synthetic oligonucleotide
  Antisense strand to SEQ ID NO: 1638085
cacuguugcgauaacgcgu

SEQ ID NO: 1638087 - RNA, 19 nt, Artificial Sequence
  Description of Artificial Sequence: Synthetic oligonucleotide
  Sense strand starting at position 2533 of SEQ ID NO: 1560980
gcguuaucgcaacagugaa

SEQ ID NO: 1638088 - RNA, 19 nt, Artificial Sequence
  Description of Artificial Sequence: Synthetic oligonucleotide
  Antisense strand to SEQ ID NO: 1638087
uucacuguugcgauaacgc

SEQ ID NO: 1638089 - RNA, 19 nt, Artificial Sequence
  Description of Artificial Sequence: Synthetic oligonucleotide
  Sense strand starting at position 2563 of SEQ ID NO: 1560980
ggguuagucuugucguugu

SEQ ID NO: 1638090 - RNA, 19 nt, Artificial Sequence
  Description of Artificial Sequence: Synthetic oligonucleotide
  Antisense strand to SEQ ID NO: 1638089
acaacgacaagacuaaccc

SEQ ID NO: 1638091 - RNA, 19 nt, Artificial Sequence
  Description of Artificial Sequence: Synthetic oligonucleotide
  Sense strand starting at position 2566 of SEQ ID NO: 1560980
uuagucuugucguuguaca

SEQ ID NO: 1638092 - RNA, 19 nt, Artificial Sequence
  Description of Artificial Sequence: Synthetic oligonucleotide
  Antisense strand to SEQ ID NO: 1638091
uguacaacgacaagacuaa

SEQ ID NO: 1638093 - RNA, 19 nt, Artificial Sequence
  Description of Artificial Sequence: Synthetic oligonucleotide
  Sense strand starting at position 2567 of SEQ ID NO: 1560980
uagucuugucguuguacaa

SEQ ID NO: 1638094 - RNA, 19 nt, Artificial Sequence
  Description of Artificial Sequence: Synthetic oligonucleotide
  Antisense strand to SEQ ID NO: 1638093
uuguacaacgacaagacua

SEQ ID NO: 1638095 - RNA, 19 nt, Artificial Sequence
  Description of Artificial Sequence: Synthetic oligonucleotide
  Sense strand starting at position 2648 of SEQ ID NO: 1560980
ucccgcuucuguuagaucu

SEQ ID NO: 1638096 - RNA, 19 nt, Artificial Sequence
  Description of Artificial Sequence: Synthetic oligonucleotide
  Antisense strand to SEQ ID NO: 1638095
agaucuaacagaagcggga

SEQ ID NO: 1638097 - RNA, 19 nt, Artificial Sequence
  Description of Artificial Sequence: Synthetic oligonucleotide
  Sense strand starting at position 2711 of SEQ ID NO: 1560980
gaagccuucugcguugcua

SEQ ID NO: 1638098 - RNA, 19 nt, Artificial Sequence
  Description of Artificial Sequence: Synthetic oligonucleotide
  Antisense strand to SEQ ID NO: 1638097
uagcaacgcagaaggcuuc

SEQ ID NO: 1638099 - RNA, 19 nt, Artificial Sequence
  Description of Artificial Sequence: Synthetic oligonucleotide
  Sense strand starting at position 2712 of SEQ ID NO: 1560980
aagccuucugcguugcuau

SEQ ID NO: 1638100 - RNA, 19 nt, Artificial Sequence
  Description of Artificial Sequence: Synthetic oligonucleotide
  Antisense strand to SEQ ID NO: 1638099
auagcaacgcagaaggcuu

SEQ ID NO: 1638101 - RNA, 19 nt, Artificial Sequence
  Description of Artificial Sequence: Synthetic oligonucleotide
  Sense strand starting at position 2980 of SEQ ID NO: 1560980
cgcaaauucggcuucguca

SEQ ID NO: 1638102 - RNA, 19 nt, Artificial Sequence
  Description of Artificial Sequence: Synthetic oligonucleotide
  Antisense strand to SEQ ID NO: 1638101
ugacgaagccgaauuugcg

SEQ ID NO: 1638103 - RNA, 19 nt, Artificial Sequence
  Description of Artificial Sequence: Synthetic oligonucleotide
  Sense strand starting at position 2981 of SEQ ID NO: 1560980
gcaaauucggcuucgucaa

SEQ ID NO: 1638104 - RNA, 19 nt, Artificial Sequence
  Description of Artificial Sequence: Synthetic oligonucleotide
  Antisense strand to SEQ ID NO: 1638103
uugacgaagccgaauuugc

SEQ ID NO: 1638105 - RNA, 19 nt, Artificial Sequence
  Description of Artificial Sequence: Synthetic oligonucleotide
  Sense strand starting at position 3446 of SEQ ID NO: 1560980
gugguucucgugguuguua

SEQ ID NO: 1638106 - RNA, 19 nt, Artificial Sequence
  Description of Artificial Sequence: Synthetic oligonucleotide
  Antisense strand to SEQ ID NO: 1638105
uaacaaccacgagaaccac

SEQ ID NO: 1638107 - RNA, 19 nt, Artificial Sequence
  Description of Artificial Sequence: Synthetic oligonucleotide
  Sense strand starting at position 3447 of SEQ ID NO: 1560980
ugguucucgugguuguuau

SEQ ID NO: 1638108 - RNA, 19 nt, Artificial Sequence
  Description of Artificial Sequence: Synthetic oligonucleotide
  Antisense strand to SEQ ID NO: 1638107
auaacaaccacgagaacca

SEQ ID NO: 1638109 - RNA, 19 nt, Artificial Sequence
  Description of Artificial Sequence: Synthetic oligonucleotide
  Sense strand starting at position 263 of SEQ ID NO: 1560981
cugucacgcucuuaacagu

SEQ ID NO: 1638110 - RNA, 19 nt, Artificial Sequence
  Description of Artificial Sequence: Synthetic oligonucleotide
  Antisense strand to SEQ ID NO: 1638109
acuguuaagagcgugacag

SEQ ID NO: 1638111 - RNA, 19 nt, Artificial Sequence
  Description of Artificial Sequence: Synthetic oligonucleotide
  Sense strand starting at position 378 of SEQ ID NO: 1560981
cagagacaucucuguggag

SEQ ID NO: 1638112 - RNA, 19 nt, Artificial Sequence
  Description of Artificial Sequence: Synthetic oligonucleotide
  Antisense strand to SEQ ID NO: 1638111
cuccacagagaugucucug

SEQ ID NO: 1638113 - RNA, 19 nt, Artificial Sequence
  Description of Artificial Sequence: Synthetic oligonucleotide
  Sense strand starting at position 379 of SEQ ID NO: 1560981
agagacaucucuguggagu

SEQ ID NO: 1638114 - RNA, 19 nt, Artificial Sequence
  Description of Artificial Sequence: Synthetic oligonucleotide
  Antisense strand to SEQ ID NO: 1638113
acuccacagagaugucucu

SEQ ID NO: 1638115 - RNA, 19 nt, Artificial Sequence
  Description of Artificial Sequence: Synthetic oligonucleotide
  Sense strand starting at position 380 of SEQ ID NO: 1560981
gagacaucucuguggaguc

SEQ ID NO: 1638116 - RNA, 19 nt, Artificial Sequence
  Description of Artificial Sequence: Synthetic oligonucleotide
  Antisense strand to SEQ ID NO: 1638115
gacuccacagagaugucuc

SEQ ID NO: 1638117 - RNA, 19 nt, Artificial Sequence
  Description of Artificial Sequence: Synthetic oligonucleotide
  Sense strand starting at position 1616 of SEQ ID NO: 1560981
gcccuaauacagugucuca

SEQ ID NO: 1638118 - RNA, 19 nt, Artificial Sequence
  Description of Artificial Sequence: Synthetic oligonucleotide
  Antisense strand to SEQ ID NO: 1638117
ugagacacuguauuagggc

SEQ ID NO: 1638119 - RNA, 19 nt, Artificial Sequence
  Description of Artificial Sequence: Synthetic oligonucleotide
  Sense strand starting at position 2197 of SEQ ID NO: 1560981
ugcccauugcucuggacga

SEQ ID NO: 1638120 - RNA, 19 nt, Artificial Sequence
  Description of Artificial Sequence: Synthetic oligonucleotide
  Antisense strand to SEQ ID NO: 1638119
ucguccagagcaaugggca

SEQ ID NO: 1638121 - RNA, 19 nt, Artificial Sequence
  Description of Artificial Sequence: Synthetic oligonucleotide
  Sense strand starting at position 2199 of SEQ ID NO: 1560981
cccauugcucuggacgaga

SEQ ID NO: 1638122 - RNA, 19 nt, Artificial Sequence
  Description of Artificial Sequence: Synthetic oligonucleotide
  Antisense strand to SEQ ID NO: 1638121
ucucguccagagcaauggg

SEQ ID NO: 1638123 - RNA, 19 nt, Artificial Sequence
  Description of Artificial Sequence: Synthetic oligonucleotide
  Sense strand starting at position 2201 of SEQ ID NO: 1560981
cauugcucuggacgagaca

SEQ ID NO: 1638124 - RNA, 19 nt, Artificial Sequence
  Description of Artificial Sequence: Synthetic oligonucleotide
  Antisense strand to SEQ ID NO: 1638123
ugucucguccagagcaaug

SEQ ID NO: 1638125 - RNA, 19 nt, Artificial Sequence
  Description of Artificial Sequence: Synthetic oligonucleotide
  Sense strand starting at position 2244 of SEQ ID NO: 1560981
cgccuuacccauugagcaa

SEQ ID NO: 1638126 - RNA, 19 nt, Artificial Sequence
  Description of Artificial Sequence: Synthetic oligonucleotide
  Antisense strand to SEQ ID NO: 1638125
uugcucaauggguaaggcg

SEQ ID NO: 1638127 - RNA, 19 nt, Artificial Sequence
  Description of Artificial Sequence: Synthetic oligonucleotide
  Sense strand starting at position 2433 of SEQ ID NO: 1560981
accguaaauugaggaugaa

SEQ ID NO: 1638128 - RNA, 19 nt, Artificial Sequence
  Description of Artificial Sequence: Synthetic oligonucleotide
  Antisense strand to SEQ ID NO: 1638127
uucauccucaauuuacggu

SEQ ID NO: 1638129 - RNA, 19 nt, Artificial Sequence
  Description of Artificial Sequence: Synthetic oligonucleotide
  Sense strand starting at position 2449 of SEQ ID NO: 1560981
gaagauauuuaaggaacgu

SEQ ID NO: 1638130 - RNA, 19 nt, Artificial Sequence
  Description of Artificial Sequence: Synthetic oligonucleotide
  Antisense strand to SEQ ID NO: 1638129
acguuccuuaaauaucuuc

SEQ ID NO: 1638131 - RNA, 19 nt, Artificial Sequence
  Description of Artificial Sequence: Synthetic oligonucleotide
  Sense strand starting at position 2477 of SEQ ID NO: 1560981
gcgugucagcuucagaauu

SEQ ID NO: 1638132 - RNA, 19 nt, Artificial Sequence
  Description of Artificial Sequence: Synthetic oligonucleotide
  Antisense strand to SEQ ID NO: 1638131
aauucugaagcugacacgc

SEQ ID NO: 1638133 - RNA, 19 nt, Artificial Sequence
  Description of Artificial Sequence: Synthetic oligonucleotide
  Sense strand starting at position 2546 of SEQ ID NO: 1560981
accguaggugcccaauaaa

SEQ ID NO: 1638134 - RNA, 19 nt, Artificial Sequence
  Description of Artificial Sequence: Synthetic oligonucleotide
  Antisense strand to SEQ ID NO: 1638133
uuuauugggcaccuacggu

SEQ ID NO: 1638135 - RNA, 19 nt, Artificial Sequence
  Description of Artificial Sequence: Synthetic oligonucleotide
  Sense strand starting at position 2868 of SEQ ID NO: 1560981
aguuuauuggaugaaugca

SEQ ID NO: 1638136 - RNA, 19 nt, Artificial Sequence
  Description of Artificial Sequence: Synthetic oligonucleotide
  Antisense strand to SEQ ID NO: 1638135
ugcauucauccaauaaacu

SEQ ID NO: 1638137 - RNA, 19 nt, Artificial Sequence
  Description of Artificial Sequence: Synthetic oligonucleotide
  Sense strand starting at position 2876 of SEQ ID NO: 1560981
ggaugaaugcauggauguu

SEQ ID NO: 1638138 - RNA, 19 nt, Artificial Sequence
  Description of Artificial Sequence: Synthetic oligonucleotide
  Antisense strand to SEQ ID NO: 1638137
aacauccaugcauucaucc

SEQ ID NO: 1638139 - RNA, 19 nt, Artificial Sequence
  Description of Artificial Sequence: Synthetic oligonucleotide
  Sense strand starting at position 2950 of SEQ ID NO: 1560981
agaccacuuugagcucaaa

SEQ ID NO: 1638140 - RNA, 19 nt, Artificial Sequence
  Description of Artificial Sequence: Synthetic oligonucleotide
  Antisense strand to SEQ ID NO: 1638139
uuugagcucaaaguggucu

SEQ ID NO: 1638141 - RNA, 19 nt, Artificial Sequence
  Description of Artificial Sequence: Synthetic oligonucleotide
  Sense strand starting at position 2975 of SEQ ID NO: 1560981
guuauucagucugcgaaug

SEQ ID NO: 1638142 - RNA, 19 nt, Artificial Sequence
  Description of Artificial Sequence: Synthetic oligonucleotide
  Antisense strand to SEQ ID NO: 1638141
cauucgcagacugaauaac

SEQ ID NO: 1638143 - RNA, 19 nt, Artificial Sequence
  Description of Artificial Sequence: Synthetic oligonucleotide
  Sense strand starting at position 2999 of SEQ ID NO: 1560981
aguguagccuccguauaca

SEQ ID NO: 1638144 - RNA, 19 nt, Artificial Sequence
  Description of Artificial Sequence: Synthetic oligonucleotide
  Antisense strand to SEQ ID NO: 1638143
uguauacggaggcuacacu

SEQ ID NO: 1638145 - RNA, 19 nt, Artificial Sequence
  Description of Artificial Sequence: Synthetic oligonucleotide
  Sense strand starting at position 3010 of SEQ ID NO: 1560981
cguauacauccugagcugu

SEQ ID NO: 1638146 - RNA, 19 nt, Artificial Sequence
  Description of Artificial Sequence: Synthetic oligonucleotide
  Antisense strand to SEQ ID NO: 1638145
acagcucaggauguauacg

SEQ ID NO: 1638147 - RNA, 19 nt, Artificial Sequence
  Description of Artificial Sequence: Synthetic oligonucleotide
  Sense strand starting at position 3061 of SEQ ID NO: 1560981
gcgccagaagcauaugaua

SEQ ID NO: 1638148 - RNA, 19 nt, Artificial Sequence
  Description of Artificial Sequence: Synthetic oligonucleotide
  Antisense strand to SEQ ID NO: 1638147
uaucauaugcuucuggcgc

SEQ ID NO: 1638149 - RNA, 19 nt, Artificial Sequence
  Description of Artificial Sequence: Synthetic oligonucleotide
  Sense strand starting at position 3066 of SEQ ID NO: 1560981
agaagcauaugauaggauu

SEQ ID NO: 1638150 - RNA, 19 nt, Artificial Sequence
  Description of Artificial Sequence: Synthetic oligonucleotide
  Antisense strand to SEQ ID NO: 1638149
aauccuaucauaugcuucu

SEQ ID NO: 1638151 - RNA, 19 nt, Artificial Sequence
  Description of Artificial Sequence: Synthetic oligonucleotide
  Sense strand starting at position 3069 of SEQ ID NO: 1560981
agcauaugauaggauuauu

SEQ ID NO: 1638152 - RNA, 19 nt, Artificial Sequence
  Description of Artificial Sequence: Synthetic oligonucleotide
  Antisense strand to SEQ ID NO: 1638151
aauaauccuaucauaugcu

SEQ ID NO: 1638153 - RNA, 19 nt, Artificial Sequence
  Description of Artificial Sequence: Synthetic oligonucleotide
  Sense strand starting at position 3074 of SEQ ID NO: 1560981
augauaggauuauugcaga

SEQ ID NO: 1638154 - RNA, 19 nt, Artificial Sequence
  Description of Artificial Sequence: Synthetic oligonucleotide
  Antisense strand to SEQ ID NO: 1638153
ucugcaauaauccuaucau

SEQ ID NO: 1638155 - RNA, 19 nt, Artificial Sequence
  Description of Artificial Sequence: Synthetic oligonucleotide
  Sense strand starting at position 3147 of SEQ ID NO: 1560981
ucucauauuccugagaacg

SEQ ID NO: 1638156 - RNA, 19 nt, Artificial Sequence
  Description of Artificial Sequence: Synthetic oligonucleotide
  Antisense strand to SEQ ID NO: 1638155
cguucucaggaauaugaga

SEQ ID NO: 1638157 - RNA, 19 nt, Artificial Sequence
  Description of Artificial Sequence: Synthetic oligonucleotide
  Sense strand starting at position 3149 of SEQ ID NO: 1560981
ucauauuccugagaacgac

SEQ ID NO: 1638158 - RNA, 19 nt, Artificial Sequence
  Description of Artificial Sequence: Synthetic oligonucleotide
  Antisense strand to SEQ ID NO: 1638157
gucguucucaggaauauga

SEQ ID NO: 1638159 - RNA, 19 nt, Artificial Sequence
  Description of Artificial Sequence: Synthetic oligonucleotide
  Sense strand starting at position 3163 of SEQ ID NO: 1560981
acgacuaggugaucuauua

SEQ ID NO: 1638160 - RNA, 19 nt, Artificial Sequence
  Description of Artificial Sequence: Synthetic oligonucleotide
  Antisense strand to SEQ ID NO: 1638159
uaauagaucaccuagucgu

SEQ ID NO: 1638161 - RNA, 19 nt, Artificial Sequence
  Description of Artificial Sequence: Synthetic oligonucleotide
  Sense strand starting at position 3170 of SEQ ID NO: 1560981
ggugaucuauuagguucua

SEQ ID NO: 1638162 - RNA, 19 nt, Artificial Sequence
  Description of Artificial Sequence: Synthetic oligonucleotide
  Antisense strand to SEQ ID NO: 1638161
uagaaccuaauagaucacc

SEQ ID NO: 1638163 - RNA, 19 nt, Artificial Sequence
  Description of Artificial Sequence: Synthetic oligonucleotide
  Sense strand starting at position 3171 of SEQ ID NO: 1560981
gugaucuauuagguucuaa

SEQ ID NO: 1638164 - RNA, 19 nt, Artificial Sequence
  Description of Artificial Sequence: Synthetic oligonucleotide
  Antisense strand to SEQ ID NO: 1638163
uuagaaccuaauagaucac

SEQ ID NO: 1638165 - RNA, 19 nt, Artificial Sequence
  Description of Artificial Sequence: Synthetic oligonucleotide
  Sense strand starting at position 3362 of SEQ ID NO: 1560981
cugugaugacgcuauugca

SEQ ID NO: 1638166 - RNA, 19 nt, Artificial Sequence
  Description of Artificial Sequence: Synthetic oligonucleotide
  Antisense strand to SEQ ID NO: 1638165
ugcaauagcgucaucacag

SEQ ID NO: 1638167 - RNA, 19 nt, Artificial Sequence
  Description of Artificial Sequence: Synthetic oligonucleotide
  Sense strand starting at position 3425 of SEQ ID NO: 1560981
agaaauaacucuguaaguu

SEQ ID NO: 1638168 - RNA, 19 nt, Artificial Sequence
  Description of Artificial Sequence: Synthetic oligonucleotide
  Antisense strand to SEQ ID NO: 1638167
aacuuacagaguuauuucu

SEQ ID NO: 1638169 - RNA, 19 nt, Artificial Sequence
  Description of Artificial Sequence: Synthetic oligonucleotide
  Sense strand starting at position 3429 of SEQ ID NO: 1560981
auaacucuguaaguugaau

SEQ ID NO: 1638170 - RNA, 19 nt, Artificial Sequence
  Description of Artificial Sequence: Synthetic oligonucleotide
  Antisense strand to SEQ ID NO: 1638169
auucaacuuacagaguuau

SEQ ID NO: 1638171 - RNA, 19 nt, Artificial Sequence
  Description of Artificial Sequence: Synthetic oligonucleotide
  Sense strand starting at position 3452 of SEQ ID NO: 1560981
acaacaauugugugaagua

SEQ ID NO: 1638172 - RNA, 19 nt, Artificial Sequence
  Description of Artificial Sequence: Synthetic oligonucleotide
  Antisense strand to SEQ ID NO: 1638171
uacuucacacaauuguugu

SEQ ID NO: 1638173 - RNA, 19 nt, Artificial Sequence
  Description of Artificial Sequence: Synthetic oligonucleotide
  Sense strand starting at position 3453 of SEQ ID NO: 1560981
caacaauugugugaaguau

SEQ ID NO: 1638174 - RNA, 19 nt, Artificial Sequence
  Description of Artificial Sequence: Synthetic oligonucleotide
  Antisense strand to SEQ ID NO: 1638173
auacuucacacaauuguug

SEQ ID NO: 1638175 - RNA, 19 nt, Artificial Sequence
  Description of Artificial Sequence: Synthetic oligonucleotide
  Sense strand starting at position 3461 of SEQ ID NO: 1560981
gugugaaguauaugguguu

SEQ ID NO: 1638176 - RNA, 19 nt, Artificial Sequence
  Description of Artificial Sequence: Synthetic oligonucleotide
  Antisense strand to SEQ ID NO: 1638175
aacaccauauacuucacac

SEQ ID NO: 1638177 - RNA, 19 nt, Artificial Sequence
  Description of Artificial Sequence: Synthetic oligonucleotide
  Sense strand starting at position 3462 of SEQ ID NO: 1560981
ugugaaguauaugguguua

SEQ ID NO: 1638178 - RNA, 19 nt, Artificial Sequence
  Description of Artificial Sequence: Synthetic oligonucleotide
  Antisense strand to SEQ ID NO: 1638177
uaacaccauauacuucaca

SEQ ID NO: 1638179 - RNA, 19 nt, Artificial Sequence
  Description of Artificial Sequence: Synthetic oligonucleotide
  Sense strand starting at position 3464 of SEQ ID NO: 1560981
ugaaguauaugguguuauu

SEQ ID NO: 1638180 - RNA, 19 nt, Artificial Sequence
  Description of Artificial Sequence: Synthetic oligonucleotide
  Antisense strand to SEQ ID NO: 1638179
aauaacaccauauacuuca

SEQ ID NO: 1638181 - RNA, 19 nt, Artificial Sequence
  Description of Artificial Sequence: Synthetic oligonucleotide
  Sense strand starting at position 3467 of SEQ ID NO: 1560981
aguauaugguguuauugau

SEQ ID NO: 1638182 - RNA, 19 nt, Artificial Sequence
  Description of Artificial Sequence: Synthetic oligonucleotide
  Antisense strand to SEQ ID NO: 1638181
aucaauaacaccauauacu

SEQ ID NO: 1638183 - RNA, 19 nt, Artificial Sequence
  Description of Artificial Sequence: Synthetic oligonucleotide
  Sense strand starting at position 3595 of SEQ ID NO: 1560981
ggcacaugugggugcuaua

SEQ ID NO: 1638184 - RNA, 19 nt, Artificial Sequence
  Description of Artificial Sequence: Synthetic oligonucleotide
  Antisense strand to SEQ ID NO: 1638183
uauagcacccacaugugcc

SEQ ID NO: 1638185 - RNA, 19 nt, Artificial Sequence
  Description of Artificial Sequence: Synthetic oligonucleotide
  Sense strand starting at position 3602 of SEQ ID NO: 1560981
gugggugcuauauacaaau

SEQ ID NO: 1638186 - RNA, 19 nt, Artificial Sequence
  Description of Artificial Sequence: Synthetic oligonucleotide
  Antisense strand to SEQ ID NO: 1638185
auuuguauauagcacccac

SEQ ID NO: 1638187 - RNA, 19 nt, Artificial Sequence
  Description of Artificial Sequence: Synthetic oligonucleotide
  Sense strand starting at position 3604 of SEQ ID NO: 1560981
gggugcuauauacaaaugu

SEQ ID NO: 1638188 - RNA, 19 nt, Artificial Sequence
  Description of Artificial Sequence: Synthetic oligonucleotide
  Antisense strand to SEQ ID NO: 1638187
acauuuguauauagcaccc

SEQ ID NO: 1638189 - RNA, 19 nt, Artificial Sequence
  Description of Artificial Sequence: Synthetic oligonucleotide
  Sense strand starting at position 17 of SEQ ID NO: 1560982
cugcguguaucugguugua

SEQ ID NO: 1638190 - RNA, 19 nt, Artificial Sequence
  Description of Artificial Sequence: Synthetic oligonucleotide
  Antisense strand to SEQ ID NO: 1638189
uacaaccagauacacgcag

SEQ ID NO: 1638191 - RNA, 19 nt, Artificial Sequence
  Description of Artificial Sequence: Synthetic oligonucleotide
  Sense strand starting at position 19 of SEQ ID NO: 1560982
gcguguaucugguuguaac

SEQ ID NO: 1638192 - RNA, 19 nt, Artificial Sequence
  Description of Artificial Sequence: Synthetic oligonucleotide
  Antisense strand to SEQ ID NO: 1638191
guuacaaccagauacacgc

SEQ ID NO: 1638193 - RNA, 19 nt, Artificial Sequence
  Description of Artificial Sequence: Synthetic oligonucleotide
  Sense strand starting at position 20 of SEQ ID NO: 1560982
cguguaucugguuguaacu

SEQ ID NO: 1638194 - RNA, 19 nt, Artificial Sequence
  Description of Artificial Sequence: Synthetic oligonucleotide
  Antisense strand to SEQ ID NO: 1638193
aguuacaaccagauacacg

SEQ ID NO: 1638195 - RNA, 19 nt, Artificial Sequence
  Description of Artificial Sequence: Synthetic oligonucleotide
  Sense strand starting at position 22 of SEQ ID NO: 1560982
uguaucugguuguaacuaa

SEQ ID NO: 1638196 - RNA, 19 nt, Artificial Sequence
  Description of Artificial Sequence: Synthetic oligonucleotide
  Antisense strand to SEQ ID NO: 1638195
uuaguuacaaccagauaca

SEQ ID NO: 1638197 - RNA, 19 nt, Artificial Sequence
  Description of Artificial Sequence: Synthetic oligonucleotide
  Sense strand starting at position 29 of SEQ ID NO: 1560982
gguuguaacuaacuacuca

SEQ ID NO: 1638198 - RNA, 19 nt, Artificial Sequence
  Description of Artificial Sequence: Synthetic oligonucleotide
  Antisense strand to SEQ ID NO: 1638197
ugaguaguuaguuacaacc

SEQ ID NO: 1638199 - RNA, 19 nt, Artificial Sequence
  Description of Artificial Sequence: Synthetic oligonucleotide
  Sense strand starting at position 52 of SEQ ID NO: 1560982
ugcacuugccugugugaaa

SEQ ID NO: 1638200 - RNA, 19 nt, Artificial Sequence
  Description of Artificial Sequence: Synthetic oligonucleotide
  Antisense strand to SEQ ID NO: 1638199
uuucacacaggcaagugca

SEQ ID NO: 1638201 - RNA, 19 nt, Artificial Sequence
  Description of Artificial Sequence: Synthetic oligonucleotide
  Sense strand starting at position 71 of SEQ ID NO: 1560982
acgugagcuugugaugaug

SEQ ID NO: 1638202 - RNA, 19 nt, Artificial Sequence
  Description of Artificial Sequence: Synthetic oligonucleotide
  Antisense strand to SEQ ID NO: 1638201
caucaucacaagcucacgu

SEQ ID NO: 1638203 - RNA, 19 nt, Artificial Sequence
  Description of Artificial Sequence: Synthetic oligonucleotide
  Sense strand starting at position 81 of SEQ ID NO: 1560982
gugaugaugcgugacguca

SEQ ID NO: 1638204 - RNA, 19 nt, Artificial Sequence
  Description of Artificial Sequence: Synthetic oligonucleotide
  Antisense strand to SEQ ID NO: 1638203
ugacgucacgcaucaucac

SEQ ID NO: 1638205 - RNA, 19 nt, Artificial Sequence
  Description of Artificial Sequence: Synthetic oligonucleotide
  Sense strand starting at position 85 of SEQ ID NO: 1560982
ugaugcgugacgucaggua

SEQ ID NO: 1638206 - RNA, 19 nt, Artificial Sequence
  Description of Artificial Sequence: Synthetic oligonucleotide
  Antisense strand to SEQ ID NO: 1638205
uaccugacgucacgcauca

SEQ ID NO: 1638207 - RNA, 19 nt, Artificial Sequence
  Description of Artificial Sequence: Synthetic oligonucleotide
  Sense strand starting at position 146 of SEQ ID NO: 1560982
gggauuccuccuugcaggu

SEQ ID NO: 1638208 - RNA, 19 nt, Artificial Sequence
  Description of Artificial Sequence: Synthetic oligonucleotide
  Antisense strand to SEQ ID NO: 1638207
accugcaaggaggaauccc

SEQ ID NO: 1638209 - RNA, 19 nt, Artificial Sequence
  Description of Artificial Sequence: Synthetic oligonucleotide
  Sense strand starting at position 280 of SEQ ID NO: 1560982
gacccagguccucgaugaa

SEQ ID NO: 1638210 - RNA, 19 nt, Artificial Sequence
  Description of Artificial Sequence: Synthetic oligonucleotide
  Antisense strand to SEQ ID NO: 1638209
uucaucgaggaccuggguc

SEQ ID NO: 1638211 - RNA, 19 nt, Artificial Sequence
  Description of Artificial Sequence: Synthetic oligonucleotide
  Sense strand starting at position 293 of SEQ ID NO: 1560982
gaugaagccucauuaugag

SEQ ID NO: 1638212 - RNA, 19 nt, Artificial Sequence
  Description of Artificial Sequence: Synthetic oligonucleotide
  Antisense strand to SEQ ID NO: 1638211
cucauaaugaggcuucauc

SEQ ID NO: 1638213 - RNA, 19 nt, Artificial Sequence
  Description of Artificial Sequence: Synthetic oligonucleotide
  Sense strand starting at position 429 of SEQ ID NO: 1560982
ggacgucacuagaggaagu

SEQ ID NO: 1638214 - RNA, 19 nt, Artificial Sequence
  Description of Artificial Sequence: Synthetic oligonucleotide
  Antisense strand to SEQ ID NO: 1638213
acuuccucuagugacgucc

SEQ ID NO: 1638215 - RNA, 19 nt, Artificial Sequence
  Description of Artificial Sequence: Synthetic oligonucleotide
  Sense strand starting at position 1452 of SEQ ID NO: 1560982
gguuuggagccguggauaa

SEQ ID NO: 1638216 - RNA, 19 nt, Artificial Sequence
  Description of Artificial Sequence: Synthetic oligonucleotide
  Antisense strand to SEQ ID NO: 1638215
uuauccacggcuccaaacc

SEQ ID NO: 1638217 - RNA, 19 nt, Artificial Sequence
  Description of Artificial Sequence: Synthetic oligonucleotide
  Sense strand starting at position 1512 of SEQ ID NO: 1560982
aauuuaugaucugguugga

SEQ ID NO: 1638218 - RNA, 19 nt, Artificial Sequence
  Description of Artificial Sequence: Synthetic oligonucleotide
  Antisense strand to SEQ ID NO: 1638217
uccaaccagaucauaaauu

SEQ ID NO: 1638219 - RNA, 19 nt, Artificial Sequence
  Description of Artificial Sequence: Synthetic oligonucleotide
  Sense strand starting at position 1572 of SEQ ID NO: 1560982
ucaggucugugccagggau

SEQ ID NO: 1638220 - RNA, 19 nt, Artificial Sequence
  Description of Artificial Sequence: Synthetic oligonucleotide
  Antisense strand to SEQ ID NO: 1638219
aucccuggcacagaccuga

SEQ ID NO: 1638221 - RNA, 19 nt, Artificial Sequence
  Description of Artificial Sequence: Synthetic oligonucleotide
  Sense strand starting at position 1574 of SEQ ID NO: 1560982
aggucugugccagggauca

SEQ ID NO: 1638222 - RNA, 19 nt, Artificial Sequence
  Description of Artificial Sequence: Synthetic oligonucleotide
  Antisense strand to SEQ ID NO: 1638221
ugaucccuggcacagaccu

SEQ ID NO: 1638223 - RNA, 19 nt, Artificial Sequence
  Description of Artificial Sequence: Synthetic oligonucleotide
  Sense strand starting at position 2048 of SEQ ID NO: 1560982
cuuccuggcuuggcuaaua

SEQ ID NO: 1638224 - RNA, 19 nt, Artificial Sequence
  Description of Artificial Sequence: Synthetic oligonucleotide
  Antisense strand to SEQ ID NO: 1638223
uauuagccaagccaggaag

SEQ ID NO: 1638225 - RNA, 19 nt, Artificial Sequence
  Description of Artificial Sequence: Synthetic oligonucleotide
  Sense strand starting at position 2283 of SEQ ID NO: 1560982
ggcugaugcaaacaugaca

SEQ ID NO: 1638226 - RNA, 19 nt, Artificial Sequence
  Description of Artificial Sequence: Synthetic oligonucleotide
  Antisense strand to SEQ ID NO: 1638225
ugucauguuugcaucagcc

SEQ ID NO: 1638227 - RNA, 19 nt, Artificial Sequence
  Description of Artificial Sequence: Synthetic oligonucleotide
  Sense strand starting at position 2408 of SEQ ID NO: 1560982
gugacuuaugaucacagca

SEQ ID NO: 1638228 - RNA, 19 nt, Artificial Sequence
  Description of Artificial Sequence: Synthetic oligonucleotide
  Antisense strand to SEQ ID NO: 1638227
ugcugugaucauaagucac

SEQ ID NO: 1638229 - RNA, 19 nt, Artificial Sequence
  Description of Artificial Sequence: Synthetic oligonucleotide
  Sense strand starting at position 2480 of SEQ ID NO: 1560982
uaauuaugucucuggguga

SEQ ID NO: 1638230 - RNA, 19 nt, Artificial Sequence
  Description of Artificial Sequence: Synthetic oligonucleotide
  Antisense strand to SEQ ID NO: 1638229
ucacccagagacauaauua

SEQ ID NO: 1638231 - RNA, 19 nt, Artificial Sequence
  Description of Artificial Sequence: Synthetic oligonucleotide
  Sense strand starting at position 2484 of SEQ ID NO: 1560982
uaugucucugggugagaau

SEQ ID NO: 1638232 - RNA, 19 nt, Artificial Sequence
  Description of Artificial Sequence: Synthetic oligonucleotide
  Antisense strand to SEQ ID NO: 1638231
auucucacccagagacaua

SEQ ID NO: 1638233 - RNA, 19 nt, Artificial Sequence
  Description of Artificial Sequence: Synthetic oligonucleotide
  Sense strand starting at position 2520 of SEQ ID NO: 1560982
cccaaaugcccaugagcaa

SEQ ID NO: 1638234 - RNA, 19 nt, Artificial Sequence
  Description of Artificial Sequence: Synthetic oligonucleotide
  Antisense strand to SEQ ID NO: 1638233
uugcucaugggcauuuggg

SEQ ID NO: 1638235 - RNA, 19 nt, Artificial Sequence
  Description of Artificial Sequence: Synthetic oligonucleotide
  Sense strand starting at position 2521 of SEQ ID NO: 1560982
ccaaaugcccaugagcaau

SEQ ID NO: 1638236 - RNA, 19 nt, Artificial Sequence
  Description of Artificial Sequence: Synthetic oligonucleotide
  Antisense strand to SEQ ID NO: 1638235
auugcucaugggcauuugg

SEQ ID NO: 1638237 - RNA, 19 nt, Artificial Sequence
  Description of Artificial Sequence: Synthetic oligonucleotide
  Sense strand starting at position 2527 of SEQ ID NO: 1560982
gcccaugagcaauagaacu

SEQ ID NO: 1638238 - RNA, 19 nt, Artificial Sequence
  Description of Artificial Sequence: Synthetic oligonucleotide
  Antisense strand to SEQ ID NO: 1638237
aguucuauugcucaugggc

SEQ ID NO: 1638239 - RNA, 19 nt, Artificial Sequence
  Description of Artificial Sequence: Synthetic oligonucleotide
  Sense strand starting at position 2915 of SEQ ID NO: 1560982
uuggaaagccauugcucau

SEQ ID NO: 1638240 - RNA, 19 nt, Artificial Sequence
  Description of Artificial Sequence: Synthetic oligonucleotide
  Antisense strand to SEQ ID NO: 1638239
augagcaauggcuuuccaa

SEQ ID NO: 1638241 - RNA, 19 nt, Artificial Sequence
  Description of Artificial Sequence: Synthetic oligonucleotide
  Sense strand starting at position 2947 of SEQ ID NO: 1560982
gcucauguuucuucuugga

SEQ ID NO: 1638242 - RNA, 19 nt, Artificial Sequence
  Description of Artificial Sequence: Synthetic oligonucleotide
  Antisense strand to SEQ ID NO: 1638241
uccaagaagaaacaugagc

SEQ ID NO: 1638243 - RNA, 19 nt, Artificial Sequence
  Description of Artificial Sequence: Synthetic oligonucleotide
  Sense strand starting at position 2972 of SEQ ID NO: 1560982
augagcuuggaaugguuau

SEQ ID NO: 1638244 - RNA, 19 nt, Artificial Sequence
  Description of Artificial Sequence: Synthetic oligonucleotide
  Antisense strand to SEQ ID NO: 1638243
auaaccauuccaagcucau

SEQ ID NO: 1638245 - RNA, 19 nt, Artificial Sequence
  Description of Artificial Sequence: Synthetic oligonucleotide
  Sense strand starting at position 2973 of SEQ ID NO: 1560982
ugagcuuggaaugguuauu

SEQ ID NO: 1638246 - RNA, 19 nt, Artificial Sequence
  Description of Artificial Sequence: Synthetic oligonucleotide
  Antisense strand to SEQ ID NO: 1638245
aauaaccauuccaagcuca

SEQ ID NO: 1638247 - RNA, 19 nt, Artificial Sequence
  Description of Artificial Sequence: Synthetic oligonucleotide
  Sense strand starting at position 2978 of SEQ ID NO: 1560982
uuggaaugguuauuacauu

SEQ ID NO: 1638248 - RNA, 19 nt, Artificial Sequence
  Description of Artificial Sequence: Synthetic oligonucleotide
  Antisense strand to SEQ ID NO: 1638247
aauguaauaaccauuccaa

SEQ ID NO: 1638249 - RNA, 19 nt, Artificial Sequence
  Description of Artificial Sequence: Synthetic oligonucleotide
  Sense strand starting at position 2979 of SEQ ID NO: 1560982
uggaaugguuauuacauuu

SEQ ID NO: 1638250 - RNA, 19 nt, Artificial Sequence
  Description of Artificial Sequence: Synthetic oligonucleotide
  Antisense strand to SEQ ID NO: 1638249
aaauguaauaaccauucca

SEQ ID NO: 1638251 - RNA, 19 nt, Artificial Sequence
  Description of Artificial Sequence: Synthetic oligonucleotide
  Sense strand starting at position 3004 of SEQ ID NO: 1560982
guucuuuguuuccaguaca

SEQ ID NO: 1638252 - RNA, 19 nt, Artificial Sequence
  Description of Artificial Sequence: Synthetic oligonucleotide
  Antisense strand to SEQ ID NO: 1638251
uguacuggaaacaaagaac

SEQ ID NO: 1638253 - RNA, 19 nt, Artificial Sequence
  Description of Artificial Sequence: Synthetic oligonucleotide
  Sense strand starting at position 3417 of SEQ ID NO: 1560982
ugcccaagcuagugucaga

SEQ ID NO: 1638254 - RNA, 19 nt, Artificial Sequence
  Description of Artificial Sequence: Synthetic oligonucleotide
  Antisense strand to SEQ ID NO: 1638253
ucugacacuagcuugggca

SEQ ID NO: 1638255 - RNA, 19 nt, Artificial Sequence
  Description of Artificial Sequence: Synthetic oligonucleotide
  Sense strand starting at position 3495 of SEQ ID NO: 1560982
gcaccaucuuguuccauuu

SEQ ID NO: 1638256 - RNA, 19 nt, Artificial Sequence
  Description of Artificial Sequence: Synthetic oligonucleotide
  Antisense strand to SEQ ID NO: 1638255
aaauggaacaagauggugc

SEQ ID NO: 1638257 - RNA, 19 nt, Artificial Sequence
  Description of Artificial Sequence: Synthetic oligonucleotide
  Sense strand starting at position 3841 of SEQ ID NO: 1560982
gagcacaauucuguggcaa

SEQ ID NO: 1638258 - RNA, 19 nt, Artificial Sequence
  Description of Artificial Sequence: Synthetic oligonucleotide
  Antisense strand to SEQ ID NO: 1638257
uugccacagaauugugcuc

SEQ ID NO: 1638259 - RNA, 19 nt, Artificial Sequence
  Description of Artificial Sequence: Synthetic oligonucleotide
  Sense strand starting at position 3842 of SEQ ID NO: 1560982
agcacaauucuguggcaau

SEQ ID NO: 1638260 - RNA, 19 nt, Artificial Sequence
  Description of Artificial Sequence: Synthetic oligonucleotide
  Antisense strand to SEQ ID NO: 1638259
auugccacagaauugugcu

SEQ ID NO: 1638261 - RNA, 19 nt, Artificial Sequence
  Description of Artificial Sequence: Synthetic oligonucleotide
  Sense strand starting at position 3843 of SEQ ID NO: 1560982
gcacaauucuguggcaaua

SEQ ID NO: 1638262 - RNA, 19 nt, Artificial Sequence
  Description of Artificial Sequence: Synthetic oligonucleotide
  Antisense strand to SEQ ID NO: 1638261
uauugccacagaauugugc

SEQ ID NO: 1638263 - RNA, 19 nt, Artificial Sequence
  Description of Artificial Sequence: Synthetic oligonucleotide
  Sense strand starting at position 3845 of SEQ ID NO: 1560982
acaauucuguggcaauaag

SEQ ID NO: 1638264 - RNA, 19 nt, Artificial Sequence
  Description of Artificial Sequence: Synthetic oligonucleotide
  Antisense strand to SEQ ID NO: 1638263
cuuauugccacagaauugu

SEQ ID NO: 1638265 - RNA, 19 nt, Artificial Sequence
  Description of Artificial Sequence: Synthetic oligonucleotide
  Sense strand starting at position 628 of SEQ ID NO: 1560983
aucguacgcagcucugaau

SEQ ID NO: 1638266 - RNA, 19 nt, Artificial Sequence
  Description of Artificial Sequence: Synthetic oligonucleotide
  Antisense strand to SEQ ID NO: 1638265
auucagagcugcguacgau

SEQ ID NO: 1638267 - RNA, 19 nt, Artificial Sequence
  Description of Artificial Sequence: Synthetic oligonucleotide
  Sense strand starting at position 691 of SEQ ID NO: 1560983
acaagugauugcuugcauc

SEQ ID NO: 1638268 - RNA, 19 nt, Artificial Sequence
  Description of Artificial Sequence: Synthetic oligonucleotide
  Antisense strand to SEQ ID NO: 1638267
gaugcaagcaaucacuugu

SEQ ID NO: 1638269 - RNA, 19 nt, Artificial Sequence
  Description of Artificial Sequence: Synthetic oligonucleotide
  Sense strand starting at position 752 of SEQ ID NO: 1560983
gcacacuuaucagggaaau

SEQ ID NO: 1638270 - RNA, 19 nt, Artificial Sequence
  Description of Artificial Sequence: Synthetic oligonucleotide
  Antisense strand to SEQ ID NO: 1638269
auuucccugauaagugugc

SEQ ID NO: 1638271 - RNA, 19 nt, Artificial Sequence
  Description of Artificial Sequence: Synthetic oligonucleotide
  Sense strand starting at position 828 of SEQ ID NO: 1560983
uagagaagauguuucucuu

SEQ ID NO: 1638272 - RNA, 19 nt, Artificial Sequence
  Description of Artificial Sequence: Synthetic oligonucleotide
  Antisense strand to SEQ ID NO: 1638271
aagagaaacaucuucucua

SEQ ID NO: 1638273 - RNA, 19 nt, Artificial Sequence
  Description of Artificial Sequence: Synthetic oligonucleotide
  Sense strand starting at position 966 of SEQ ID NO: 1560983
gccacuaucaagggacaga

SEQ ID NO: 1638274 - RNA, 19 nt, Artificial Sequence
  Description of Artificial Sequence: Synthetic oligonucleotide
  Antisense strand to SEQ ID NO: 1638273
ucugucccuugauaguggc

SEQ ID NO: 1638275 - RNA, 19 nt, Artificial Sequence
  Description of Artificial Sequence: Synthetic oligonucleotide
  Sense strand starting at position 995 of SEQ ID NO: 1560983
gagucugaaugacaucaca

SEQ ID NO: 1638276 - RNA, 19 nt, Artificial Sequence
  Description of Artificial Sequence: Synthetic oligonucleotide
  Antisense strand to SEQ ID NO: 1638275
ugugaugucauucagacuc

SEQ ID NO: 1638277 - RNA, 19 nt, Artificial Sequence
  Description of Artificial Sequence: Synthetic oligonucleotide
  Sense strand starting at position 1030 of SEQ ID NO: 1560983
ccacgacuuuccuugcgau

SEQ ID NO: 1638278 - RNA, 19 nt, Artificial Sequence
  Description of Artificial Sequence: Synthetic oligonucleotide
  Antisense strand to SEQ ID NO: 1638277
aucgcaaggaaagucgugg

SEQ ID NO: 1638279 - RNA, 19 nt, Artificial Sequence
  Description of Artificial Sequence: Synthetic oligonucleotide
  Sense strand starting at position 1182 of SEQ ID NO: 1560983
agcccacucgaguaagcuu

SEQ ID NO: 1638280 - RNA, 19 nt, Artificial Sequence
  Description of Artificial Sequence: Synthetic oligonucleotide
  Antisense strand to SEQ ID NO: 1638279
aagcuuacucgagugggcu

SEQ ID NO: 1638281 - RNA, 19 nt, Artificial Sequence
  Description of Artificial Sequence: Synthetic oligonucleotide
  Sense strand starting at position 1189 of SEQ ID NO: 1560983
ucgaguaagcuuugacuuc

SEQ ID NO: 1638282 - RNA, 19 nt, Artificial Sequence
  Description of Artificial Sequence: Synthetic oligonucleotide
  Antisense strand to SEQ ID NO: 1638281
gaagucaaagcuuacucga

SEQ ID NO: 1638283 - RNA, 19 nt, Artificial Sequence
  Description of Artificial Sequence: Synthetic oligonucleotide
  Sense strand starting at position 1214 of SEQ ID NO: 1560983
gccagucaugcuggacaca

SEQ ID NO: 1638284 - RNA, 19 nt, Artificial Sequence
  Description of Artificial Sequence: Synthetic oligonucleotide
  Antisense strand to SEQ ID NO: 1638283
uguguccagcaugacuggc

SEQ ID NO: 1638285 - RNA, 19 nt, Artificial Sequence
  Description of Artificial Sequence: Synthetic oligonucleotide
  Sense strand starting at position 1319 of SEQ ID NO: 1560983
gaggaaacgucauggaaau

SEQ ID NO: 1638286 - RNA, 19 nt, Artificial Sequence
  Description of Artificial Sequence: Synthetic oligonucleotide
  Antisense strand to SEQ ID NO: 1638285
auuuccaugacguuuccuc

SEQ ID NO: 1638287 - RNA, 19 nt, Artificial Sequence
  Description of Artificial Sequence: Synthetic oligonucleotide
  Sense strand starting at position 1519 of SEQ ID NO: 1560983
gcguccuccuaguugacau

SEQ ID NO: 1638288 - RNA, 19 nt, Artificial Sequence
  Description of Artificial Sequence: Synthetic oligonucleotide
  Antisense strand to SEQ ID NO: 1638287
augucaacuaggaggacgc

SEQ ID NO: 1638289 - RNA, 19 nt, Artificial Sequence
  Description of Artificial Sequence: Synthetic oligonucleotide
  Sense strand starting at position 1869 of SEQ ID NO: 1560983
agucaauggcccggaagaa

SEQ ID NO: 1638290 - RNA, 19 nt, Artificial Sequence
  Description of Artificial Sequence: Synthetic oligonucleotide
  Antisense strand to SEQ ID NO: 1638289
uucuuccgggccauugacu

SEQ ID NO: 1638291 - RNA, 19 nt, Artificial Sequence
  Description of Artificial Sequence: Synthetic oligonucleotide
  Sense strand starting at position 2323 of SEQ ID NO: 1560983
cgcuauuacucauuugcau

SEQ ID NO: 1638292 - RNA, 19 nt, Artificial Sequence
  Description of Artificial Sequence: Synthetic oligonucleotide
  Antisense strand to SEQ ID NO: 1638291
augcaaaugaguaauagcg

SEQ ID NO: 1638293 - RNA, 19 nt, Artificial Sequence
  Description of Artificial Sequence: Synthetic oligonucleotide
  Sense strand starting at position 2345 of SEQ ID NO: 1560983
auuuccuuucguuagcaua

SEQ ID NO: 1638294 - RNA, 19 nt, Artificial Sequence
  Description of Artificial Sequence: Synthetic oligonucleotide
  Antisense strand to SEQ ID NO: 1638293
uaugcuaacgaaaggaaau

SEQ ID NO: 1638295 - RNA, 19 nt, Artificial Sequence
  Description of Artificial Sequence: Synthetic oligonucleotide
  Sense strand starting at position 2427 of SEQ ID NO: 1560983
ccaggugaaacucaugguu

SEQ ID NO: 1638296 - RNA, 19 nt, Artificial Sequence
  Description of Artificial Sequence: Synthetic oligonucleotide
  Antisense strand to SEQ ID NO: 1638295
aaccaugaguuucaccugg

SEQ ID NO: 1638297 - RNA, 19 nt, Artificial Sequence
  Description of Artificial Sequence: Synthetic oligonucleotide
  Sense strand starting at position 2430 of SEQ ID NO: 1560983
ggugaaacucaugguugaa

SEQ ID NO: 1638298 - RNA, 19 nt, Artificial Sequence
  Description of Artificial Sequence: Synthetic oligonucleotide
  Antisense strand to SEQ ID NO: 1638297
uucaaccaugaguuucacc

SEQ ID NO: 1638299 - RNA, 19 nt, Artificial Sequence
  Description of Artificial Sequence: Synthetic oligonucleotide
  Sense strand starting at position 2433 of SEQ ID NO: 1560983
gaaacucaugguugaauua

SEQ ID NO: 1638300 - RNA, 19 nt, Artificial Sequence
  Description of Artificial Sequence: Synthetic oligonucleotide
  Antisense strand to SEQ ID NO: 1638299
uaauucaaccaugaguuuc

SEQ ID NO: 1638301 - RNA, 19 nt, Artificial Sequence
  Description of Artificial Sequence: Synthetic oligonucleotide
  Sense strand starting at position 2530 of SEQ ID NO: 1560983
cgacucuugucaucagucu

SEQ ID NO: 1638302 - RNA, 19 nt, Artificial Sequence
  Description of Artificial Sequence: Synthetic oligonucleotide
  Antisense strand to SEQ ID NO: 1638301
agacugaugacaagagucg

SEQ ID NO: 1638303 - RNA, 19 nt, Artificial Sequence
  Description of Artificial Sequence: Synthetic oligonucleotide
  Sense strand starting at position 2536 of SEQ ID NO: 1560983
uugucaucagucuaaugac

SEQ ID NO: 1638304 - RNA, 19 nt, Artificial Sequence
  Description of Artificial Sequence: Synthetic oligonucleotide
  Antisense strand to SEQ ID NO: 1638303
gucauuagacugaugacaa

SEQ ID NO: 1638305 - RNA, 19 nt, Artificial Sequence
  Description of Artificial Sequence: Synthetic oligonucleotide
  Sense strand starting at position 2676 of SEQ ID NO: 1560983
ggaguaggcccacgucuua

SEQ ID NO: 1638306 - RNA, 19 nt, Artificial Sequence
  Description of Artificial Sequence: Synthetic oligonucleotide
  Antisense strand to SEQ ID NO: 1638305
uaagacgugggccuacucc

SEQ ID NO: 1638307 - RNA, 19 nt, Artificial Sequence
  Description of Artificial Sequence: Synthetic oligonucleotide
  Sense strand starting at position 2685 of SEQ ID NO: 1560983
ccacgucuuaaugggaagu

SEQ ID NO: 1638308 - RNA, 19 nt, Artificial Sequence
  Description of Artificial Sequence: Synthetic oligonucleotide
  Antisense strand to SEQ ID NO: 1638307
acuucccauuaagacgugg

SEQ ID NO: 1638309 - RNA, 19 nt, Artificial Sequence
  Description of Artificial Sequence: Synthetic oligonucleotide
  Sense strand starting at position 2698 of SEQ ID NO: 1560983
ggaaguuuaaccuggugca

SEQ ID NO: 1638310 - RNA, 19 nt, Artificial Sequence
  Description of Artificial Sequence: Synthetic oligonucleotide
  Antisense strand to SEQ ID NO: 1638309
ugcaccagguuaaacuucc

SEQ ID NO: 1638311 - RNA, 19 nt, Artificial Sequence
  Description of Artificial Sequence: Synthetic oligonucleotide
  Sense strand starting at position 2699 of SEQ ID NO: 1560983
gaaguuuaaccuggugcau

SEQ ID NO: 1638312 - RNA, 19 nt, Artificial Sequence
  Description of Artificial Sequence: Synthetic oligonucleotide
  Antisense strand to SEQ ID NO: 1638311
augcaccagguuaaacuuc

SEQ ID NO: 1638313 - RNA, 19 nt, Artificial Sequence
  Description of Artificial Sequence: Synthetic oligonucleotide
  Sense strand starting at position 2970 of SEQ ID NO: 1560983
agaauuacccuaugagcaa

SEQ ID NO: 1638314 - RNA, 19 nt, Artificial Sequence
  Description of Artificial Sequence: Synthetic oligonucleotide
  Antisense strand to SEQ ID NO: 1638313
uugcucauaggguaauucu

SEQ ID NO: 1638315 - RNA, 19 nt, Artificial Sequence
  Description of Artificial Sequence: Synthetic oligonucleotide
  Sense strand starting at position 2988 of SEQ ID NO: 1560983
acucuauuccuggguauac

SEQ ID NO: 1638316 - RNA, 19 nt, Artificial Sequence
  Description of Artificial Sequence: Synthetic oligonucleotide
  Antisense strand to SEQ ID NO: 1638315
guauacccaggaauagagu

SEQ ID NO: 1638317 - RNA, 19 nt, Artificial Sequence
  Description of Artificial Sequence: Synthetic oligonucleotide
  Sense strand starting at position 2989 of SEQ ID NO: 1560983
cucuauuccuggguauaca

SEQ ID NO: 1638318 - RNA, 19 nt, Artificial Sequence
  Description of Artificial Sequence: Synthetic oligonucleotide
  Antisense strand to SEQ ID NO: 1638317
uguauacccaggaauagag

SEQ ID NO: 1638319 - RNA, 19 nt, Artificial Sequence
  Description of Artificial Sequence: Synthetic oligonucleotide
  Sense strand starting at position 3484 of SEQ ID NO: 1560983
uuauguuaugugcauguga

SEQ ID NO: 1638320 - RNA, 19 nt, Artificial Sequence
  Description of Artificial Sequence: Synthetic oligonucleotide
  Antisense strand to SEQ ID NO: 1638319
ucacaugcacauaacauaa

SEQ ID NO: 1638321 - RNA, 19 nt, Artificial Sequence
  Description of Artificial Sequence: Synthetic oligonucleotide
  Sense strand starting at position 3486 of SEQ ID NO: 1560983
auguuaugugcaugugauu

SEQ ID NO: 1638322 - RNA, 19 nt, Artificial Sequence
  Description of Artificial Sequence: Synthetic oligonucleotide
  Antisense strand to SEQ ID NO: 1638321
aaucacaugcacauaacau

SEQ ID NO: 1638323 - RNA, 19 nt, Artificial Sequence
  Description of Artificial Sequence: Synthetic oligonucleotide
  Sense strand starting at position 3627 of SEQ ID NO: 1560983
ggcguagacucccugucau

SEQ ID NO: 1638324 - RNA, 19 nt, Artificial Sequence
  Description of Artificial Sequence: Synthetic oligonucleotide
  Antisense strand to SEQ ID NO: 1638323
augacagggagucuacgcc

SEQ ID NO: 1638325 - RNA, 19 nt, Artificial Sequence
  Description of Artificial Sequence: Synthetic oligonucleotide
  Sense strand starting at position 3650 of SEQ ID NO: 1560983
ccugaugaugcgugagaga

SEQ ID NO: 1638326 - RNA, 19 nt, Artificial Sequence
  Description of Artificial Sequence: Synthetic oligonucleotide
  Antisense strand to SEQ ID NO: 1638325
ucucucacgcaucaucagg

SEQ ID NO: 1638327 - RNA, 19 nt, Artificial Sequence
  Description of Artificial Sequence: Synthetic oligonucleotide
  Sense strand starting at position 3653 of SEQ ID NO: 1560983
gaugaugcgugagagauga

SEQ ID NO: 1638328 - RNA, 19 nt, Artificial Sequence
  Description of Artificial Sequence: Synthetic oligonucleotide
  Antisense strand to SEQ ID NO: 1638327
ucaucucucacgcaucauc

SEQ ID NO: 1638329 - RNA, 19 nt, Artificial Sequence
  Description of Artificial Sequence: Synthetic oligonucleotide
  Sense strand starting at position 3677 of SEQ ID NO: 1560983
cauuuaugcgauugcucca

SEQ ID NO: 1638330 - RNA, 19 nt, Artificial Sequence
  Description of Artificial Sequence: Synthetic oligonucleotide
  Antisense strand to SEQ ID NO: 1638329
uggagcaaucgcauaaaug

SEQ ID NO: 1638331 - RNA, 19 nt, Artificial Sequence
  Description of Artificial Sequence: Synthetic oligonucleotide
  Sense strand starting at position 3682 of SEQ ID NO: 1560983
augcgauugcuccauccgu

SEQ ID NO: 1638332 - RNA, 19 nt, Artificial Sequence
  Description of Artificial Sequence: Synthetic oligonucleotide
  Antisense strand to SEQ ID NO: 1638331
acggauggagcaaucgcau

SEQ ID NO: 1638333 - RNA, 19 nt, Artificial Sequence
  Description of Artificial Sequence: Synthetic oligonucleotide
  Sense strand starting at position 3705 of SEQ ID NO: 1560983
gcuggugucggucauucau

SEQ ID NO: 1638334 - RNA, 19 nt, Artificial Sequence
  Description of Artificial Sequence: Synthetic oligonucleotide
  Antisense strand to SEQ ID NO: 1638333
augaaugaccgacaccagc

SEQ ID NO: 1638335 - RNA, 19 nt, Artificial Sequence
  Description of Artificial Sequence: Synthetic oligonucleotide
  Sense strand starting at position 3873 of SEQ ID NO: 1560983
gguggaaagugcuuugaga

SEQ ID NO: 1638336 - RNA, 19 nt, Artificial Sequence
  Description of Artificial Sequence: Synthetic oligonucleotide
  Antisense strand to SEQ ID NO: 1638335
ucucaaagcacuuuccacc

SEQ ID NO: 1638337 - RNA, 19 nt, Artificial Sequence
  Description of Artificial Sequence: Synthetic oligonucleotide
  Sense strand starting at position 3875 of SEQ ID NO: 1560983
uggaaagugcuuugagaac

SEQ ID NO: 1638338 - RNA, 19 nt, Artificial Sequence
  Description of Artificial Sequence: Synthetic oligonucleotide
  Antisense strand to SEQ ID NO: 1638337
guucucaaagcacuuucca

SEQ ID NO: 1638339 - RNA, 19 nt, Artificial Sequence
  Description of Artificial Sequence: Synthetic oligonucleotide
  Sense strand starting at position 3924 of SEQ ID NO: 1560983
agggcuggucugggugauu

SEQ ID NO: 1638340 - RNA, 19 nt, Artificial Sequence
  Description of Artificial Sequence: Synthetic oligonucleotide
  Antisense strand to SEQ ID NO: 1638339
aaucacccagaccagcccu

SEQ ID NO: 1638341 - RNA, 19 nt, Artificial Sequence
  Description of Artificial Sequence: Synthetic oligonucleotide
  Sense strand starting at position 3927 of SEQ ID NO: 1560983
gcuggucugggugauucua

SEQ ID NO: 1638342 - RNA, 19 nt, Artificial Sequence
  Description of Artificial Sequence: Synthetic oligonucleotide
  Antisense strand to SEQ ID NO: 1638341
uagaaucacccagaccagc

SEQ ID NO: 1638343 - RNA, 19 nt, Artificial Sequence
  Description of Artificial Sequence: Synthetic oligonucleotide
  Sense strand starting at position 3953 of SEQ ID NO: 1560983
ggcgggauuugugcgguuu

SEQ ID NO: 1638344 - RNA, 19 nt, Artificial Sequence
  Description of Artificial Sequence: Synthetic oligonucleotide
  Antisense strand to SEQ ID NO: 1638343
aaaccgcacaaaucccgcc

SEQ ID NO: 1638345 - RNA, 19 nt, Artificial Sequence
  Description of Artificial Sequence: Synthetic oligonucleotide
  Sense strand starting at position 302 of SEQ ID NO: 1560984
caggaauacugugugguca

SEQ ID NO: 1638346 - RNA, 19 nt, Artificial Sequence
  Description of Artificial Sequence: Synthetic oligonucleotide
  Antisense strand to SEQ ID NO: 1638345
ugaccacacaguauuccug

SEQ ID NO: 1638347 - RNA, 19 nt, Artificial Sequence
  Description of Artificial Sequence: Synthetic oligonucleotide
  Sense strand starting at position 306 of SEQ ID NO: 1560984
aauacuguguggucacaag

SEQ ID NO: 1638348 - RNA, 19 nt, Artificial Sequence
  Description of Artificial Sequence: Synthetic oligonucleotide
  Antisense strand to SEQ ID NO: 1638347
cuugugaccacacaguauu

SEQ ID NO: 1638349 - RNA, 19 nt, Artificial Sequence
  Description of Artificial Sequence: Synthetic oligonucleotide
  Sense strand starting at position 333 of SEQ ID NO: 1560984
gaacguauccagugacauu

SEQ ID NO: 1638350 - RNA, 19 nt, Artificial Sequence
  Description of Artificial Sequence: Synthetic oligonucleotide
  Antisense strand to SEQ ID NO: 1638349
aaugucacuggauacguuc

SEQ ID NO: 1638351 - RNA, 19 nt, Artificial Sequence
  Description of Artificial Sequence: Synthetic oligonucleotide
  Sense strand starting at position 426 of SEQ ID NO: 1560984
gggcucaugaggugauaaa

SEQ ID NO: 1638352 - RNA, 19 nt, Artificial Sequence
  Description of Artificial Sequence: Synthetic oligonucleotide
  Antisense strand to SEQ ID NO: 1638351
uuuaucaccucaugagccc

SEQ ID NO: 1638353 - RNA, 19 nt, Artificial Sequence
  Description of Artificial Sequence: Synthetic oligonucleotide
  Sense strand starting at position 485 of SEQ ID NO: 1560984
uaaugaccguggucauuau

SEQ ID NO: 1638354 - RNA, 19 nt, Artificial Sequence
  Description of Artificial Sequence: Synthetic oligonucleotide
  Antisense strand to SEQ ID NO: 1638353
auaaugaccacggucauua

SEQ ID NO: 1638355 - RNA, 19 nt, Artificial Sequence
  Description of Artificial Sequence: Synthetic oligonucleotide
  Sense strand starting at position 489 of SEQ ID NO: 1560984
gaccguggucauuaucaca

SEQ ID NO: 1638356 - RNA, 19 nt, Artificial Sequence
  Description of Artificial Sequence: Synthetic oligonucleotide
  Antisense strand to SEQ ID NO: 1638355
ugugauaaugaccacgguc

SEQ ID NO: 1638357 - RNA, 19 nt, Artificial Sequence
  Description of Artificial Sequence: Synthetic oligonucleotide
  Sense strand starting at position 1048 of SEQ ID NO: 1560984
gauagaacugccuguguuc

SEQ ID NO: 1638358 - RNA, 19 nt, Artificial Sequence
  Description of Artificial Sequence: Synthetic oligonucleotide
  Antisense strand to SEQ ID NO: 1638357
gaacacaggcaguucuauc

SEQ ID NO: 1638359 - RNA, 19 nt, Artificial Sequence
  Description of Artificial Sequence: Synthetic oligonucleotide
  Sense strand starting at position 1081 of SEQ ID NO: 1560984
ccguguuucuacgugaaag

SEQ ID NO: 1638360 - RNA, 19 nt, Artificial Sequence
  Description of Artificial Sequence: Synthetic oligonucleotide
  Antisense strand to SEQ ID NO: 1638359
cuuucacguagaaacacgg

SEQ ID NO: 1638361 - RNA, 19 nt, Artificial Sequence
  Description of Artificial Sequence: Synthetic oligonucleotide
  Sense strand starting at position 1082 of SEQ ID NO: 1560984
cguguuucuacgugaaaga

SEQ ID NO: 1638362 - RNA, 19 nt, Artificial Sequence
  Description of Artificial Sequence: Synthetic oligonucleotide
  Antisense strand to SEQ ID NO: 1638361
ucuuucacguagaaacacg

SEQ ID NO: 1638363 - RNA, 19 nt, Artificial Sequence
  Description of Artificial Sequence: Synthetic oligonucleotide
  Sense strand starting at position 1083 of SEQ ID NO: 1560984
guguuucuacgugaaagaa

SEQ ID NO: 1638364 - RNA, 19 nt, Artificial Sequence
  Description of Artificial Sequence: Synthetic oligonucleotide
  Antisense strand to SEQ ID NO: 1638363
uucuuucacguagaaacac

SEQ ID NO: 1638365 - RNA, 19 nt, Artificial Sequence
  Description of Artificial Sequence: Synthetic oligonucleotide
  Sense strand starting at position 1099 of SEQ ID NO: 1560984
gaaagaagucagcauguca

SEQ ID NO: 1638366 - RNA, 19 nt, Artificial Sequence
  Description of Artificial Sequence: Synthetic oligonucleotide
  Antisense strand to SEQ ID NO: 1638365
ugacaugcugacuucuuuc

SEQ ID NO: 1638367 - RNA, 19 nt, Artificial Sequence
  Description of Artificial Sequence: Synthetic oligonucleotide
  Sense strand starting at position 1138 of SEQ ID NO: 1560984
gguucucugcagcguuauu

SEQ ID NO: 1638368 - RNA, 19 nt, Artificial Sequence
  Description of Artificial Sequence: Synthetic oligonucleotide
  Antisense strand to SEQ ID NO: 1638367
aauaacgcugcagagaacc

SEQ ID NO: 1638369 - RNA, 19 nt, Artificial Sequence
  Description of Artificial Sequence: Synthetic oligonucleotide
  Sense strand starting at position 1178 of SEQ ID NO: 1560984
cccagagucuaugagagaa

SEQ ID NO: 1638370 - RNA, 19 nt, Artificial Sequence
  Description of Artificial Sequence: Synthetic oligonucleotide
  Antisense strand to SEQ ID NO: 1638369
uucucucauagacucuggg

SEQ ID NO: 1638371 - RNA, 19 nt, Artificial Sequence
  Description of Artificial Sequence: Synthetic oligonucleotide
  Sense strand starting at position 1206 of SEQ ID NO: 1560984
aggaaauggugguauauac

SEQ ID NO: 1638372 - RNA, 19 nt, Artificial Sequence
  Description of Artificial Sequence: Synthetic oligonucleotide
  Antisense strand to SEQ ID NO: 1638371
guauauaccaccauuuccu

SEQ ID NO: 1638373 - RNA, 19 nt, Artificial Sequence
  Description of Artificial Sequence: Synthetic oligonucleotide
  Sense strand starting at position 1215 of SEQ ID NO: 1560984
ugguauauacauuggauua

SEQ ID NO: 1638374 - RNA, 19 nt, Artificial Sequence
  Description of Artificial Sequence: Synthetic oligonucleotide
  Antisense strand to SEQ ID NO: 1638373
uaauccaauguauauacca

SEQ ID NO: 1638375 - RNA, 19 nt, Artificial Sequence
  Description of Artificial Sequence: Synthetic oligonucleotide
  Sense strand starting at position 1771 of SEQ ID NO: 1560984
agucucucgccuugguauu

SEQ ID NO: 1638376 - RNA, 19 nt, Artificial Sequence
  Description of Artificial Sequence: Synthetic oligonucleotide
  Antisense strand to SEQ ID NO: 1638375
aauaccaaggcgagagacu

SEQ ID NO: 1638377 - RNA, 19 nt, Artificial Sequence
  Description of Artificial Sequence: Synthetic oligonucleotide
  Sense strand starting at position 1864 of SEQ ID NO: 1560984
uggccuuggccucagacaa

SEQ ID NO: 1638378 - RNA, 19 nt, Artificial Sequence
  Description of Artificial Sequence: Synthetic oligonucleotide
  Antisense strand to SEQ ID NO: 1638377
uugucugaggccaaggcca

SEQ ID NO: 1638379 - RNA, 19 nt, Artificial Sequence
  Description of Artificial Sequence: Synthetic oligonucleotide
  Sense strand starting at position 2607 of SEQ ID NO: 1560984
aaaguuaaacguuacuguu

SEQ ID NO: 1638380 - RNA, 19 nt, Artificial Sequence
  Description of Artificial Sequence: Synthetic oligonucleotide
  Antisense strand to SEQ ID NO: 1638379
aacaguaacguuuaacuuu

SEQ ID NO: 1638381 - RNA, 19 nt, Artificial Sequence
  Description of Artificial Sequence: Synthetic oligonucleotide
  Sense strand starting at position 2840 of SEQ ID NO: 1560984
aguaaucauucucuaguga

SEQ ID NO: 1638382 - RNA, 19 nt, Artificial Sequence
  Description of Artificial Sequence: Synthetic oligonucleotide
  Antisense strand to SEQ ID NO: 1638381
ucacuagagaaugauuacu

SEQ ID NO: 1638383 - RNA, 19 nt, Artificial Sequence
  Description of Artificial Sequence: Synthetic oligonucleotide
  Sense strand starting at position 2841 of SEQ ID NO: 1560984
guaaucauucucuagugau

SEQ ID NO: 1638384 - RNA, 19 nt, Artificial Sequence
  Description of Artificial Sequence: Synthetic oligonucleotide
  Antisense strand to SEQ ID NO: 1638383
aucacuagagaaugauuac

SEQ ID NO: 1638385 - RNA, 19 nt, Artificial Sequence
  Description of Artificial Sequence: Synthetic oligonucleotide
  Sense strand starting at position 2851 of SEQ ID NO: 1560984
ucuagugauugcuagauuc

SEQ ID NO: 1638386 - RNA, 19 nt, Artificial Sequence
  Description of Artificial Sequence: Synthetic oligonucleotide
  Antisense strand to SEQ ID NO: 1638385
gaaucuagcaaucacuaga

SEQ ID NO: 1638387 - RNA, 19 nt, Artificial Sequence
  Description of Artificial Sequence: Synthetic oligonucleotide
  Sense strand starting at position 2853 of SEQ ID NO: 1560984
uagugauugcuagauucuc

SEQ ID NO: 1638388 - RNA, 19 nt, Artificial Sequence
  Description of Artificial Sequence: Synthetic oligonucleotide
  Antisense strand to SEQ ID NO: 1638387
gagaaucuagcaaucacua

SEQ ID NO: 1638389 - RNA, 19 nt, Artificial Sequence
  Description of Artificial Sequence: Synthetic oligonucleotide
  Sense strand starting at position 2967 of SEQ ID NO: 1560984
agaugaaauccuugcacau

SEQ ID NO: 1638390 - RNA, 19 nt, Artificial Sequence
  Description of Artificial Sequence: Synthetic oligonucleotide
  Antisense strand to SEQ ID NO: 1638389
augugcaaggauuucaucu

SEQ ID NO: 1638391 - RNA, 19 nt, Artificial Sequence
  Description of Artificial Sequence: Synthetic oligonucleotide
  Sense strand starting at position 2969 of SEQ ID NO: 1560984
augaaauccuugcacauug

SEQ ID NO: 1638392 - RNA, 19 nt, Artificial Sequence
  Description of Artificial Sequence: Synthetic oligonucleotide
  Antisense strand to SEQ ID NO: 1638391
caaugugcaaggauuucau

SEQ ID NO: 1638393 - RNA, 19 nt, Artificial Sequence
  Description of Artificial Sequence: Synthetic oligonucleotide
  Sense strand starting at position 3235 of SEQ ID NO: 1560984
uuuaucugcuucccguaaa

SEQ ID NO: 1638394 - RNA, 19 nt, Artificial Sequence
  Description of Artificial Sequence: Synthetic oligonucleotide
  Antisense strand to SEQ ID NO: 1638393
uuuacgggaagcagauaaa

SEQ ID NO: 1638395 - RNA, 19 nt, Artificial Sequence
  Description of Artificial Sequence: Synthetic oligonucleotide
  Sense strand starting at position 3238 of SEQ ID NO: 1560984
aucugcuucccguaaagcu

SEQ ID NO: 1638396 - RNA, 19 nt, Artificial Sequence
  Description of Artificial Sequence: Synthetic oligonucleotide
  Antisense strand to SEQ ID NO: 1638395
agcuuuacgggaagcagau

SEQ ID NO: 1638397 - RNA, 19 nt, Artificial Sequence
  Description of Artificial Sequence: Synthetic oligonucleotide
  Sense strand starting at position 3245 of SEQ ID NO: 1560984
ucccguaaagcuugaacga

SEQ ID NO: 1638398 - RNA, 19 nt, Artificial Sequence
  Description of Artificial Sequence: Synthetic oligonucleotide
  Antisense strand to SEQ ID NO: 1638397
ucguucaagcuuuacggga

SEQ ID NO: 1638399 - RNA, 19 nt, Artificial Sequence
  Description of Artificial Sequence: Synthetic oligonucleotide
  Sense strand starting at position 3246 of SEQ ID NO: 1560984
cccguaaagcuugaacgaa

SEQ ID NO: 1638400 - RNA, 19 nt, Artificial Sequence
  Description of Artificial Sequence: Synthetic oligonucleotide
  Antisense strand to SEQ ID NO: 1638399
uucguucaagcuuuacggg

SEQ ID NO: 1638401 - RNA, 19 nt, Artificial Sequence
  Description of Artificial Sequence: Synthetic oligonucleotide
  Sense strand starting at position 3258 of SEQ ID NO: 1560984
gaacgaaauuucuguucuc

SEQ ID NO: 1638402 - RNA, 19 nt, Artificial Sequence
  Description of Artificial Sequence: Synthetic oligonucleotide
  Antisense strand to SEQ ID NO: 1638401
gagaacagaaauuucguuc

SEQ ID NO: 1638403 - RNA, 19 nt, Artificial Sequence
  Description of Artificial Sequence: Synthetic oligonucleotide
  Sense strand starting at position 3261 of SEQ ID NO: 1560984
cgaaauuucuguucucuuu

SEQ ID NO: 1638404 - RNA, 19 nt, Artificial Sequence
  Description of Artificial Sequence: Synthetic oligonucleotide
  Antisense strand to SEQ ID NO: 1638403
aaagagaacagaaauuucg

SEQ ID NO: 1638405 - RNA, 19 nt, Artificial Sequence
  Description of Artificial Sequence: Synthetic oligonucleotide
  Sense strand starting at position 3267 of SEQ ID NO: 1560984
uucuguucucuuugggaau

SEQ ID NO: 1638406 - RNA, 19 nt, Artificial Sequence
  Description of Artificial Sequence: Synthetic oligonucleotide
  Antisense strand to SEQ ID NO: 1638405
auucccaaagagaacagaa

SEQ ID NO: 1638407 - RNA, 19 nt, Artificial Sequence
  Description of Artificial Sequence: Synthetic oligonucleotide
  Sense strand starting at position 3400 of SEQ ID NO: 1560984
aggaguucuuccguucaga

SEQ ID NO: 1638408 - RNA, 19 nt, Artificial Sequence
  Description of Artificial Sequence: Synthetic oligonucleotide
  Antisense strand to SEQ ID NO: 1638407
ucugaacggaagaacuccu

SEQ ID NO: 1638409 - RNA, 19 nt, Artificial Sequence
  Description of Artificial Sequence: Synthetic oligonucleotide
  Sense strand starting at position 3459 of SEQ ID NO: 1560984
gguugguuuggguguuaga

SEQ ID NO: 1638410 - RNA, 19 nt, Artificial Sequence
  Description of Artificial Sequence: Synthetic oligonucleotide
  Antisense strand to SEQ ID NO: 1638409
ucuaacacccaaaccaacc

SEQ ID NO: 1638411 - RNA, 19 nt, Artificial Sequence
  Description of Artificial Sequence: Synthetic oligonucleotide
  Sense strand starting at position 3462 of SEQ ID NO: 1560984
ugguuuggguguuagauac

SEQ ID NO: 1638412 - RNA, 19 nt, Artificial Sequence
  Description of Artificial Sequence: Synthetic oligonucleotide
  Antisense strand to SEQ ID NO: 1638411
guaucuaacacccaaacca

SEQ ID NO: 1638413 - RNA, 19 nt, Artificial Sequence
  Description of Artificial Sequence: Synthetic oligonucleotide
  Sense strand starting at position 3547 of SEQ ID NO: 1560984
gguaaaguuuccuugccca

SEQ ID NO: 1638414 - RNA, 19 nt, Artificial Sequence
  Description of Artificial Sequence: Synthetic oligonucleotide
  Antisense strand to SEQ ID NO: 1638413
ugggcaaggaaacuuuacc

SEQ ID NO: 1638415 - RNA, 19 nt, Artificial Sequence
  Description of Artificial Sequence: Synthetic oligonucleotide
  Sense strand starting at position 3594 of SEQ ID NO: 1560984
gucuucuguguuugaauaa

SEQ ID NO: 1638416 - RNA, 19 nt, Artificial Sequence
  Description of Artificial Sequence: Synthetic oligonucleotide
  Antisense strand to SEQ ID NO: 1638415
uuauucaaacacagaagac

SEQ ID NO: 1638417 - RNA, 19 nt, Artificial Sequence
  Description of Artificial Sequence: Synthetic oligonucleotide
  Sense strand starting at position 3595 of SEQ ID NO: 1560984
ucuucuguguuugaauaaa

SEQ ID NO: 1638418 - RNA, 19 nt, Artificial Sequence
  Description of Artificial Sequence: Synthetic oligonucleotide
  Antisense strand to SEQ ID NO: 1638417
uuuauucaaacacagaaga

SEQ ID NO: 1638419 - RNA, 19 nt, Artificial Sequence
  Description of Artificial Sequence: Synthetic oligonucleotide
  Sense strand starting at position 3640 of SEQ ID NO: 1560984
cgaggucuguauucuccau

SEQ ID NO: 1638420 - RNA, 19 nt, Artificial Sequence
  Description of Artificial Sequence: Synthetic oligonucleotide
  Antisense strand to SEQ ID NO: 1638419
auggagaauacagaccucg

SEQ ID NO: 1638421 - RNA, 19 nt, Artificial Sequence
  Description of Artificial Sequence: Synthetic oligonucleotide
  Sense strand starting at position 3859 of SEQ ID NO: 1560984
acccgucaccugcauuaga

SEQ ID NO: 1638422 - RNA, 19 nt, Artificial Sequence
  Description of Artificial Sequence: Synthetic oligonucleotide
  Antisense strand to SEQ ID NO: 1638421
ucuaaugcaggugacgggu

SEQ ID NO: 1638423 - RNA, 19 nt, Artificial Sequence
  Description of Artificial Sequence: Synthetic oligonucleotide
  Sense strand starting at position 3862 of SEQ ID NO: 1560984
cgucaccugcauuagauau

SEQ ID NO: 1638424 - RNA, 19 nt, Artificial Sequence
  Description of Artificial Sequence: Synthetic oligonucleotide
  Antisense strand to SEQ ID NO: 1638423
auaucuaaugcaggugacg

SEQ ID NO: 1638425 - RNA, 19 nt, Artificial Sequence
  Description of Artificial Sequence: Synthetic oligonucleotide
  Sense strand starting at position 1509 of SEQ ID NO: 1560985
acaguagcuugcucuccaa

SEQ ID NO: 1638426 - RNA, 19 nt, Artificial Sequence
  Description of Artificial Sequence: Synthetic oligonucleotide
  Antisense strand to SEQ ID NO: 1638425
uuggagagcaagcuacugu

SEQ ID NO: 1638427 - RNA, 19 nt, Artificial Sequence
  Description of Artificial Sequence: Synthetic oligonucleotide
  Sense strand starting at position 1512 of SEQ ID NO: 1560985
guagcuugcucuccaaagu

SEQ ID NO: 1638428 - RNA, 19 nt, Artificial Sequence
  Description of Artificial Sequence: Synthetic oligonucleotide
  Antisense strand to SEQ ID NO: 1638427
acuuuggagagcaagcuac

SEQ ID NO: 1638429 - RNA, 19 nt, Artificial Sequence
  Description of Artificial Sequence: Synthetic oligonucleotide
  Sense strand starting at position 1646 of SEQ ID NO: 1560985
ugaagaaauguuugaaagu

SEQ ID NO: 1638430 - RNA, 19 nt, Artificial Sequence
  Description of Artificial Sequence: Synthetic oligonucleotide
  Antisense strand to SEQ ID NO: 1638429
acuuucaaacauuucuuca

SEQ ID NO: 1638431 - RNA, 19 nt, Artificial Sequence
  Description of Artificial Sequence: Synthetic oligonucleotide
  Sense strand starting at position 1647 of SEQ ID NO: 1560985
gaagaaauguuugaaaguc

SEQ ID NO: 1638432 - RNA, 19 nt, Artificial Sequence
  Description of Artificial Sequence: Synthetic oligonucleotide
  Antisense strand to SEQ ID NO: 1638431
gacuuucaaacauuucuuc

SEQ ID NO: 1638433 - RNA, 19 nt, Artificial Sequence
  Description of Artificial Sequence: Synthetic oligonucleotide
  Sense strand starting at position 2000 of SEQ ID NO: 1560985
auggcaaaugucuguagaa

SEQ ID NO: 1638434 - RNA, 19 nt, Artificial Sequence
  Description of Artificial Sequence: Synthetic oligonucleotide
  Antisense strand to SEQ ID NO: 1638433
uucuacagacauuugccau

SEQ ID NO: 1638435 - RNA, 19 nt, Artificial Sequence
  Description of Artificial Sequence: Synthetic oligonucleotide
  Sense strand starting at position 2001 of SEQ ID NO: 1560985
uggcaaaugucuguagaaa

SEQ ID NO: 1638436 - RNA, 19 nt, Artificial Sequence
  Description of Artificial Sequence: Synthetic oligonucleotide
  Antisense strand to SEQ ID NO: 1638435
uuucuacagacauuugcca

SEQ ID NO: 1638437 - RNA, 19 nt, Artificial Sequence
  Description of Artificial Sequence: Synthetic oligonucleotide
  Sense strand starting at position 2101 of SEQ ID NO: 1560985
gagcuaucauggcaccaua

SEQ ID NO: 1638438 - RNA, 19 nt, Artificial Sequence
  Description of Artificial Sequence: Synthetic oligonucleotide
  Antisense strand to SEQ ID NO: 1638437
uauggugccaugauagcuc

SEQ ID NO: 1638439 - RNA, 19 nt, Artificial Sequence
  Description of Artificial Sequence: Synthetic oligonucleotide
  Sense strand starting at position 2128 of SEQ ID NO: 1560985
cacuacugcuagugaugaa

SEQ ID NO: 1638440 - RNA, 19 nt, Artificial Sequence
  Description of Artificial Sequence: Synthetic oligonucleotide
  Antisense strand to SEQ ID NO: 1638439
uucaucacuagcaguagug

SEQ ID NO: 1638441 - RNA, 19 nt, Artificial Sequence
  Description of Artificial Sequence: Synthetic oligonucleotide
  Sense strand starting at position 2273 of SEQ ID NO: 1560985
ugggcuguuucauauggua

SEQ ID NO: 1638442 - RNA, 19 nt, Artificial Sequence
  Description of Artificial Sequence: Synthetic oligonucleotide
  Antisense strand to SEQ ID NO: 1638441
uaccauaugaaacagccca

SEQ ID NO: 1638443 - RNA, 19 nt, Artificial Sequence
  Description of Artificial Sequence: Synthetic oligonucleotide
  Sense strand starting at position 2329 of SEQ ID NO: 1560985
ggcguaucugaauggagau

SEQ ID NO: 1638444 - RNA, 19 nt, Artificial Sequence
  Description of Artificial Sequence: Synthetic oligonucleotide
  Antisense strand to SEQ ID NO: 1638443
aucuccauucagauacgcc

SEQ ID NO: 1638445 - RNA, 19 nt, Artificial Sequence
  Description of Artificial Sequence: Synthetic oligonucleotide
  Sense strand starting at position 2330 of SEQ ID NO: 1560985
gcguaucugaauggagaug

SEQ ID NO: 1638446 - RNA, 19 nt, Artificial Sequence
  Description of Artificial Sequence: Synthetic oligonucleotide
  Antisense strand to SEQ ID NO: 1638445
caucuccauucagauacgc

SEQ ID NO: 1638447 - RNA, 19 nt, Artificial Sequence
  Description of Artificial Sequence: Synthetic oligonucleotide
  Sense strand starting at position 2364 of SEQ ID NO: 1560985
acacuccucuuugugaaga

SEQ ID NO: 1638448 - RNA, 19 nt, Artificial Sequence
  Description of Artificial Sequence: Synthetic oligonucleotide
  Antisense strand to SEQ ID NO: 1638447
ucuucacaaagaggagugu

SEQ ID NO: 1638449 - RNA, 19 nt, Artificial Sequence
  Description of Artificial Sequence: Synthetic oligonucleotide
  Sense strand starting at position 2369 of SEQ ID NO: 1560985
ccucuuugugaagacguaa

SEQ ID NO: 1638450 - RNA, 19 nt, Artificial Sequence
  Description of Artificial Sequence: Synthetic oligonucleotide
  Antisense strand to SEQ ID NO: 1638449
uuacgucuucacaaagagg

SEQ ID NO: 1638451 - RNA, 19 nt, Artificial Sequence
  Description of Artificial Sequence: Synthetic oligonucleotide
  Sense strand starting at position 2408 of SEQ ID NO: 1560985
cuaucugcuugagaagguu

SEQ ID NO: 1638452 - RNA, 19 nt, Artificial Sequence
  Description of Artificial Sequence: Synthetic oligonucleotide
  Antisense strand to SEQ ID NO: 1638451
aaccuucucaagcagauag

SEQ ID NO: 1638453 - RNA, 19 nt, Artificial Sequence
  Description of Artificial Sequence: Synthetic oligonucleotide
  Sense strand starting at position 2416 of SEQ ID NO: 1560985
uugagaagguuucaaguug

SEQ ID NO: 1638454 - RNA, 19 nt, Artificial Sequence
  Description of Artificial Sequence: Synthetic oligonucleotide
  Antisense strand to SEQ ID NO: 1638453
caacuugaaaccuucucaa

SEQ ID NO: 1638455 - RNA, 19 nt, Artificial Sequence
  Description of Artificial Sequence: Synthetic oligonucleotide
  Sense strand starting at position 2528 of SEQ ID NO: 1560985
auauauggguuaucuuaag

SEQ ID NO: 1638456 - RNA, 19 nt, Artificial Sequence
  Description of Artificial Sequence: Synthetic oligonucleotide
  Antisense strand to SEQ ID NO: 1638455
cuuaagauaacccauauau

SEQ ID NO: 1638457 - RNA, 19 nt, Artificial Sequence
  Description of Artificial Sequence: Synthetic oligonucleotide
  Sense strand starting at position 2534 of SEQ ID NO: 1560985
ggguuaucuuaagauucua

SEQ ID NO: 1638458 - RNA, 19 nt, Artificial Sequence
  Description of Artificial Sequence: Synthetic oligonucleotide
  Antisense strand to SEQ ID NO: 1638457
uagaaucuuaagauaaccc

SEQ ID NO: 1638459 - RNA, 19 nt, Artificial Sequence
  Description of Artificial Sequence: Synthetic oligonucleotide
  Sense strand starting at position 2539 of SEQ ID NO: 1560985
aucuuaagauucuauugga

SEQ ID NO: 1638460 - RNA, 19 nt, Artificial Sequence
  Description of Artificial Sequence: Synthetic oligonucleotide
  Antisense strand to SEQ ID NO: 1638459
uccaauagaaucuuaagau

SEQ ID NO: 1638461 - RNA, 19 nt, Artificial Sequence
  Description of Artificial Sequence: Synthetic oligonucleotide
  Sense strand starting at position 2542 of SEQ ID NO: 1560985
uuaagauucuauuggacag

SEQ ID NO: 1638462 - RNA, 19 nt, Artificial Sequence
  Description of Artificial Sequence: Synthetic oligonucleotide
  Antisense strand to SEQ ID NO: 1638461
cuguccaauagaaucuuaa

SEQ ID NO: 1638463 - RNA, 19 nt, Artificial Sequence
  Description of Artificial Sequence: Synthetic oligonucleotide
  Sense strand starting at position 2966 of SEQ ID NO: 1560985
ggaauacuguguggucgca

SEQ ID NO: 1638464 - RNA, 19 nt, Artificial Sequence
  Description of Artificial Sequence: Synthetic oligonucleotide
  Antisense strand to SEQ ID NO: 1638463
ugcgaccacacaguauucc

SEQ ID NO: 1638465 - RNA, 19 nt, Artificial Sequence
  Description of Artificial Sequence: Synthetic oligonucleotide
  Sense strand starting at position 2995 of SEQ ID NO: 1560985
gaacguauccagugacaau

SEQ ID NO: 1638466 - RNA, 19 nt, Artificial Sequence
  Description of Artificial Sequence: Synthetic oligonucleotide
  Antisense strand to SEQ ID NO: 1638465
auugucacuggauacguuc

SEQ ID NO: 1638467 - RNA, 19 nt, Artificial Sequence
  Description of Artificial Sequence: Synthetic oligonucleotide
  Sense strand starting at position 3088 of SEQ ID NO: 1560985
gggcucaugaggugcuaaa

SEQ ID NO: 1638468 - RNA, 19 nt, Artificial Sequence
  Description of Artificial Sequence: Synthetic oligonucleotide
  Antisense strand to SEQ ID NO: 1638467
uuuagcaccucaugagccc

SEQ ID NO: 1638469 - RNA, 19 nt, Artificial Sequence
  Description of Artificial Sequence: Synthetic oligonucleotide
  Sense strand starting at position 3151 of SEQ ID NO: 1560985
gaccguggucauuaccaca

SEQ ID NO: 1638470 - RNA, 19 nt, Artificial Sequence
  Description of Artificial Sequence: Synthetic oligonucleotide
  Antisense strand to SEQ ID NO: 1638469
ugugguaaugaccacgguc

SEQ ID NO: 1638471 - RNA, 19 nt, Artificial Sequence
  Description of Artificial Sequence: Synthetic oligonucleotide
  Sense strand starting at position 3523 of SEQ ID NO: 1560985
ugagcccuccagcaauaaa

SEQ ID NO: 1638472 - RNA, 19 nt, Artificial Sequence
  Description of Artificial Sequence: Synthetic oligonucleotide
  Antisense strand to SEQ ID NO: 1638471
uuuauugcuggagggcuca

SEQ ID NO: 1638473 - RNA, 19 nt, Artificial Sequence
  Description of Artificial Sequence: Synthetic oligonucleotide
  Sense strand starting at position 3712 of SEQ ID NO: 1560985
aauagaacugccuguguuc

SEQ ID NO: 1638474 - RNA, 19 nt, Artificial Sequence
  Description of Artificial Sequence: Synthetic oligonucleotide
  Antisense strand to SEQ ID NO: 1638473
gaacacaggcaguucuauu

SEQ ID NO: 1638475 - RNA, 19 nt, Artificial Sequence
  Description of Artificial Sequence: Synthetic oligonucleotide
  Sense strand starting at position 3737 of SEQ ID NO: 1560985
cccuacuucuguguuucua

SEQ ID NO: 1638476 - RNA, 19 nt, Artificial Sequence
  Description of Artificial Sequence: Synthetic oligonucleotide
  Antisense strand to SEQ ID NO: 1638475
uagaaacacagaaguaggg

SEQ ID NO: 1638477 - RNA, 19 nt, Artificial Sequence
  Description of Artificial Sequence: Synthetic oligonucleotide
  Sense strand starting at position 3745 of SEQ ID NO: 1560985
cuguguuucuaugugaaag

SEQ ID NO: 1638478 - RNA, 19 nt, Artificial Sequence
  Description of Artificial Sequence: Synthetic oligonucleotide
  Antisense strand to SEQ ID NO: 1638477
cuuucacauagaaacacag

SEQ ID NO: 1638479 - RNA, 19 nt, Artificial Sequence
  Description of Artificial Sequence: Synthetic oligonucleotide
  Sense strand starting at position 3746 of SEQ ID NO: 1560985
uguguuucuaugugaaaga

SEQ ID NO: 1638480 - RNA, 19 nt, Artificial Sequence
  Description of Artificial Sequence: Synthetic oligonucleotide
  Antisense strand to SEQ ID NO: 1638479
ucuuucacauagaaacaca

SEQ ID NO: 1638481 - RNA, 19 nt, Artificial Sequence
  Description of Artificial Sequence: Synthetic oligonucleotide
  Sense strand starting at position 3747 of SEQ ID NO: 1560985
guguuucuaugugaaagaa

SEQ ID NO: 1638482 - RNA, 19 nt, Artificial Sequence
  Description of Artificial Sequence: Synthetic oligonucleotide
  Antisense strand to SEQ ID NO: 1638481
uucuuucacauagaaacac

SEQ ID NO: 1638483 - RNA, 19 nt, Artificial Sequence
  Description of Artificial Sequence: Synthetic oligonucleotide
  Sense strand starting at position 3799 of SEQ ID NO: 1560985
uuagguucucugcagcauu

SEQ ID NO: 1638484 - RNA, 19 nt, Artificial Sequence
  Description of Artificial Sequence: Synthetic oligonucleotide
  Antisense strand to SEQ ID NO: 1638483
aaugcugcagagaaccuaa

SEQ ID NO: 1638485 - RNA, 19 nt, Artificial Sequence
  Description of Artificial Sequence: Synthetic oligonucleotide
  Sense strand starting at position 3802 of SEQ ID NO: 1560985
gguucucugcagcauuauu

SEQ ID NO: 1638486 - RNA, 19 nt, Artificial Sequence
  Description of Artificial Sequence: Synthetic oligonucleotide
  Antisense strand to SEQ ID NO: 1638485
aauaaugcugcagagaacc

SEQ ID NO: 1638487 - RNA, 19 nt, Artificial Sequence
  Description of Artificial Sequence: Synthetic oligonucleotide
  Sense strand starting at position 3870 of SEQ ID NO: 1560985
aggaaauggugauauauac

SEQ ID NO: 1638488 - RNA, 19 nt, Artificial Sequence
  Description of Artificial Sequence: Synthetic oligonucleotide
  Antisense strand to SEQ ID NO: 1638487
guauauaucaccauuuccu

SEQ ID NO: 1638489 - RNA, 19 nt, Artificial Sequence
  Description of Artificial Sequence: Synthetic oligonucleotide
  Sense strand starting at position 200 of SEQ ID NO: 1560986
ugaugauccgucuagcaac

SEQ ID NO: 1638490 - RNA, 19 nt, Artificial Sequence
  Description of Artificial Sequence: Synthetic oligonucleotide
  Antisense strand to SEQ ID NO: 1638489
guugcuagacggaucauca

SEQ ID NO: 1638491 - RNA, 19 nt, Artificial Sequence
  Description of Artificial Sequence: Synthetic oligonucleotide
  Sense strand starting at position 544 of SEQ ID NO: 1560986
aggauauugucacccuaaa

SEQ ID NO: 1638492 - RNA, 19 nt, Artificial Sequence
  Description of Artificial Sequence: Synthetic oligonucleotide
  Antisense strand to SEQ ID NO: 1638491
uuuagggugacaauauccu

SEQ ID NO: 1638493 - RNA, 19 nt, Artificial Sequence
  Description of Artificial Sequence: Synthetic oligonucleotide
  Sense strand starting at position 570 of SEQ ID NO: 1560986
ggcaaagauucuccucuca

SEQ ID NO: 1638494 - RNA, 19 nt, Artificial Sequence
  Description of Artificial Sequence: Synthetic oligonucleotide
  Antisense strand to SEQ ID NO: 1638493
ugagaggagaaucuuugcc

SEQ ID NO: 1638495 - RNA, 19 nt, Artificial Sequence
  Description of Artificial Sequence: Synthetic oligonucleotide
  Sense strand starting at position 648 of SEQ ID NO: 1560986
gggaccuugucagugacau

SEQ ID NO: 1638496 - RNA, 19 nt, Artificial Sequence
  Description of Artificial Sequence: Synthetic oligonucleotide
  Antisense strand to SEQ ID NO: 1638495
augucacugacaagguccc

SEQ ID NO: 1638497 - RNA, 19 nt, Artificial Sequence
  Description of Artificial Sequence: Synthetic oligonucleotide
  Sense strand starting at position 649 of SEQ ID NO: 1560986
ggaccuugucagugacaug

SEQ ID NO: 1638498 - RNA, 19 nt, Artificial Sequence
  Description of Artificial Sequence: Synthetic oligonucleotide
  Antisense strand to SEQ ID NO: 1638497
caugucacugacaaggucc

SEQ ID NO: 1638499 - RNA, 19 nt, Artificial Sequence
  Description of Artificial Sequence: Synthetic oligonucleotide
  Sense strand starting at position 654 of SEQ ID NO: 1560986
uugucagugacaugugacu

SEQ ID NO: 1638500 - RNA, 19 nt, Artificial Sequence
  Description of Artificial Sequence: Synthetic oligonucleotide
  Antisense strand to SEQ ID NO: 1638499
agucacaugucacugacaa

SEQ ID NO: 1638501 - RNA, 19 nt, Artificial Sequence
  Description of Artificial Sequence: Synthetic oligonucleotide
  Sense strand starting at position 661 of SEQ ID NO: 1560986
ugacaugugacucgguuga

SEQ ID NO: 1638502 - RNA, 19 nt, Artificial Sequence
  Description of Artificial Sequence: Synthetic oligonucleotide
  Antisense strand to SEQ ID NO: 1638501
ucaaccgagucacauguca

SEQ ID NO: 1638503 - RNA, 19 nt, Artificial Sequence
  Description of Artificial Sequence: Synthetic oligonucleotide
  Sense strand starting at position 663 of SEQ ID NO: 1560986
acaugugacucgguugaca

SEQ ID NO: 1638504 - RNA, 19 nt, Artificial Sequence
  Description of Artificial Sequence: Synthetic oligonucleotide
  Antisense strand to SEQ ID NO: 1638503
ugucaaccgagucacaugu

SEQ ID NO: 1638505 - RNA, 19 nt, Artificial Sequence
  Description of Artificial Sequence: Synthetic oligonucleotide
  Sense strand starting at position 665 of SEQ ID NO: 1560986
augugacucgguugacacu

SEQ ID NO: 1638506 - RNA, 19 nt, Artificial Sequence
  Description of Artificial Sequence: Synthetic oligonucleotide
  Antisense strand to SEQ ID NO: 1638505
agugucaaccgagucacau

SEQ ID NO: 1638507 - RNA, 19 nt, Artificial Sequence
  Description of Artificial Sequence: Synthetic oligonucleotide
  Sense strand starting at position 674 of SEQ ID NO: 1560986
gguugacacucguuugaca

SEQ ID NO: 1638508 - RNA, 19 nt, Artificial Sequence
  Description of Artificial Sequence: Synthetic oligonucleotide
  Antisense strand to SEQ ID NO: 1638507
ugucaaacgagugucaacc

SEQ ID NO: 1638509 - RNA, 19 nt, Artificial Sequence
  Description of Artificial Sequence: Synthetic oligonucleotide
  Sense strand starting at position 676 of SEQ ID NO: 1560986
uugacacucguuugacaca

SEQ ID NO: 1638510 - RNA, 19 nt, Artificial Sequence
  Description of Artificial Sequence: Synthetic oligonucleotide
  Antisense strand to SEQ ID NO: 1638509
ugugucaaacgagugucaa

SEQ ID NO: 1638511 - RNA, 19 nt, Artificial Sequence
  Description of Artificial Sequence: Synthetic oligonucleotide
  Sense strand starting at position 698 of SEQ ID NO: 1560986
acaugugucuggccaagag

SEQ ID NO: 1638512 - RNA, 19 nt, Artificial Sequence
  Description of Artificial Sequence: Synthetic oligonucleotide
  Antisense strand to SEQ ID NO: 1638511
cucuuggccagacacaugu

SEQ ID NO: 1638513 - RNA, 19 nt, Artificial Sequence
  Description of Artificial Sequence: Synthetic oligonucleotide
  Sense strand starting at position 710 of SEQ ID NO: 1560986
ccaagagaagcggguuuaa

SEQ ID NO: 1638514 - RNA, 19 nt, Artificial Sequence
  Description of Artificial Sequence: Synthetic oligonucleotide
  Antisense strand to SEQ ID NO: 1638513
uuaaacccgcuucucuugg

SEQ ID NO: 1638515 - RNA, 19 nt, Artificial Sequence
  Description of Artificial Sequence: Synthetic oligonucleotide
  Sense strand starting at position 809 of SEQ ID NO: 1560986
guuccaucuccaggaacaa

SEQ ID NO: 1638516 - RNA, 19 nt, Artificial Sequence
  Description of Artificial Sequence: Synthetic oligonucleotide
  Antisense strand to SEQ ID NO: 1638515
uuguuccuggagauggaac

SEQ ID NO: 1638517 - RNA, 19 nt, Artificial Sequence
  Description of Artificial Sequence: Synthetic oligonucleotide
  Sense strand starting at position 888 of SEQ ID NO: 1560986
ucagguuucuguuccucua

SEQ ID NO: 1638518 - RNA, 19 nt, Artificial Sequence
  Description of Artificial Sequence: Synthetic oligonucleotide
  Antisense strand to SEQ ID NO: 1638517
uagaggaacagaaaccuga

SEQ ID NO: 1638519 - RNA, 19 nt, Artificial Sequence
  Description of Artificial Sequence: Synthetic oligonucleotide
  Sense strand starting at position 890 of SEQ ID NO: 1560986
agguuucuguuccucuaaa

SEQ ID NO: 1638520 - RNA, 19 nt, Artificial Sequence
  Description of Artificial Sequence: Synthetic oligonucleotide
  Antisense strand to SEQ ID NO: 1638519
uuuagaggaacagaaaccu

SEQ ID NO: 1638521 - RNA, 19 nt, Artificial Sequence
  Description of Artificial Sequence: Synthetic oligonucleotide
  Sense strand starting at position 891 of SEQ ID NO: 1560986
gguuucuguuccucuaaag

SEQ ID NO: 1638522 - RNA, 19 nt, Artificial Sequence
  Description of Artificial Sequence: Synthetic oligonucleotide
  Antisense strand to SEQ ID NO: 1638521
cuuuagaggaacagaaacc

SEQ ID NO: 1638523 - RNA, 19 nt, Artificial Sequence
  Description of Artificial Sequence: Synthetic oligonucleotide
  Sense strand starting at position 959 of SEQ ID NO: 1560986
ccagauccuccacgcuaaa

SEQ ID NO: 1638524 - RNA, 19 nt, Artificial Sequence
  Description of Artificial Sequence: Synthetic oligonucleotide
  Antisense strand to SEQ ID NO: 1638523
uuuagcguggaggaucugg

SEQ ID NO: 1638525 - RNA, 19 nt, Artificial Sequence
  Description of Artificial Sequence: Synthetic oligonucleotide
  Sense strand starting at position 1022 of SEQ ID NO: 1560986
ugcuuccucccagagagaa

SEQ ID NO: 1638526 - RNA, 19 nt, Artificial Sequence
  Description of Artificial Sequence: Synthetic oligonucleotide
  Antisense strand to SEQ ID NO: 1638525
uucucucugggaggaagca

SEQ ID NO: 1638527 - RNA, 19 nt, Artificial Sequence
  Description of Artificial Sequence: Synthetic oligonucleotide
  Sense strand starting at position 1060 of SEQ ID NO: 1560986
ggcugcaguguugaaauca

SEQ ID NO: 1638528 - RNA, 19 nt, Artificial Sequence
  Description of Artificial Sequence: Synthetic oligonucleotide
  Antisense strand to SEQ ID NO: 1638527
ugauuucaacacugcagcc

SEQ ID NO: 1638529 - RNA, 19 nt, Artificial Sequence
  Description of Artificial Sequence: Synthetic oligonucleotide
  Sense strand starting at position 1142 of SEQ ID NO: 1560986
aaagauaagccguaaguaa

SEQ ID NO: 1638530 - RNA, 19 nt, Artificial Sequence
  Description of Artificial Sequence: Synthetic oligonucleotide
  Antisense strand to SEQ ID NO: 1638529
uuacuuacggcuuaucuuu

SEQ ID NO: 1638531 - RNA, 19 nt, Artificial Sequence
  Description of Artificial Sequence: Synthetic oligonucleotide
  Sense strand starting at position 1202 of SEQ ID NO: 1560986
gggcgaugucaaugauucu

SEQ ID NO: 1638532 - RNA, 19 nt, Artificial Sequence
  Description of Artificial Sequence: Synthetic oligonucleotide
  Antisense strand to SEQ ID NO: 1638531
agaaucauugacaucgccc

SEQ ID NO: 1638533 - RNA, 19 nt, Artificial Sequence
  Description of Artificial Sequence: Synthetic oligonucleotide
  Sense strand starting at position 1276 of SEQ ID NO: 1560986
uucugaguccugggacaac

SEQ ID NO: 1638534 - RNA, 19 nt, Artificial Sequence
  Description of Artificial Sequence: Synthetic oligonucleotide
  Antisense strand to SEQ ID NO: 1638533
guugucccaggacucagaa

SEQ ID NO: 1638535 - RNA, 19 nt, Artificial Sequence
  Description of Artificial Sequence: Synthetic oligonucleotide
  Sense strand starting at position 1314 of SEQ ID NO: 1560986
aagggagucgcuuaaggau

SEQ ID NO: 1638536 - RNA, 19 nt, Artificial Sequence
  Description of Artificial Sequence: Synthetic oligonucleotide
  Antisense strand to SEQ ID NO: 1638535
auccuuaagcgacucccuu

SEQ ID NO: 1638537 - RNA, 19 nt, Artificial Sequence
  Description of Artificial Sequence: Synthetic oligonucleotide
  Sense strand starting at position 1694 of SEQ ID NO: 1560986
cccggacugugauuacaga

SEQ ID NO: 1638538 - RNA, 19 nt, Artificial Sequence
  Description of Artificial Sequence: Synthetic oligonucleotide
  Antisense strand to SEQ ID NO: 1638537
ucuguaaucacaguccggg

SEQ ID NO: 1638539 - RNA, 19 nt, Artificial Sequence
  Description of Artificial Sequence: Synthetic oligonucleotide
  Sense strand starting at position 1793 of SEQ ID NO: 1560986
ccacuucugucugcggaaa

SEQ ID NO: 1638540 - RNA, 19 nt, Artificial Sequence
  Description of Artificial Sequence: Synthetic oligonucleotide
  Antisense strand to SEQ ID NO: 1638539
uuuccgcagacagaagugg

SEQ ID NO: 1638541 - RNA, 19 nt, Artificial Sequence
  Description of Artificial Sequence: Synthetic oligonucleotide
  Sense strand starting at position 2222 of SEQ ID NO: 1560986
ggaagcagcugguuaagaa

SEQ ID NO: 1638542 - RNA, 19 nt, Artificial Sequence
  Description of Artificial Sequence: Synthetic oligonucleotide
  Antisense strand to SEQ ID NO: 1638541
uucuuaaccagcugcuucc

SEQ ID NO: 1638543 - RNA, 19 nt, Artificial Sequence
  Description of Artificial Sequence: Synthetic oligonucleotide
  Sense strand starting at position 2223 of SEQ ID NO: 1560986
gaagcagcugguuaagaau

SEQ ID NO: 1638544 - RNA, 19 nt, Artificial Sequence
  Description of Artificial Sequence: Synthetic oligonucleotide
  Antisense strand to SEQ ID NO: 1638543
auucuuaaccagcugcuuc

SEQ ID NO: 1638545 - RNA, 19 nt, Artificial Sequence
  Description of Artificial Sequence: Synthetic oligonucleotide
  Sense strand starting at position 2302 of SEQ ID NO: 1560986
cgacuaaagggacgucaau

SEQ ID NO: 1638546 - RNA, 19 nt, Artificial Sequence
  Description of Artificial Sequence: Synthetic oligonucleotide
  Antisense strand to SEQ ID NO: 1638545
auugacgucccuuuagucg

SEQ ID NO: 1638547 - RNA, 19 nt, Artificial Sequence
  Description of Artificial Sequence: Synthetic oligonucleotide
  Sense strand starting at position 2574 of SEQ ID NO: 1560986
ucgggauucgaugacguca

SEQ ID NO: 1638548 - RNA, 19 nt, Artificial Sequence
  Description of Artificial Sequence: Synthetic oligonucleotide
  Antisense strand to SEQ ID NO: 1638547
ugacgucaucgaaucccga

SEQ ID NO: 1638549 - RNA, 19 nt, Artificial Sequence
  Description of Artificial Sequence: Synthetic oligonucleotide
  Sense strand starting at position 2873 of SEQ ID NO: 1560986
cuucaaccgcgguagauaa

SEQ ID NO: 1638550 - RNA, 19 nt, Artificial Sequence
  Description of Artificial Sequence: Synthetic oligonucleotide
  Antisense strand to SEQ ID NO: 1638549
uuaucuaccgcgguugaag

SEQ ID NO: 1638551 - RNA, 19 nt, Artificial Sequence
  Description of Artificial Sequence: Synthetic oligonucleotide
  Sense strand starting at position 3247 of SEQ ID NO: 1560986
gucagaucuuguguuuaaa

SEQ ID NO: 1638552 - RNA, 19 nt, Artificial Sequence
  Description of Artificial Sequence: Synthetic oligonucleotide
  Antisense strand to SEQ ID NO: 1638551
uuuaaacacaagaucugac

SEQ ID NO: 1638553 - RNA, 19 nt, Artificial Sequence
  Description of Artificial Sequence: Synthetic oligonucleotide
  Sense strand starting at position 3598 of SEQ ID NO: 1560986
ucuuaugacugagcucuuu

SEQ ID NO: 1638554 - RNA, 19 nt, Artificial Sequence
  Description of Artificial Sequence: Synthetic oligonucleotide
  Antisense strand to SEQ ID NO: 1638553
aaagagcucagucauaaga

SEQ ID NO: 1638555 - RNA, 19 nt, Artificial Sequence
  Description of Artificial Sequence: Synthetic oligonucleotide
  Sense strand starting at position 3604 of SEQ ID NO: 1560986
gacugagcucuuuggccuu

SEQ ID NO: 1638556 - RNA, 19 nt, Artificial Sequence
  Description of Artificial Sequence: Synthetic oligonucleotide
  Antisense strand to SEQ ID NO: 1638555
aaggccaaagagcucaguc

SEQ ID NO: 1638557 - RNA, 19 nt, Artificial Sequence
  Description of Artificial Sequence: Synthetic oligonucleotide
  Sense strand starting at position 3745 of SEQ ID NO: 1560986
accuaaguuuguuuccuaa

SEQ ID NO: 1638558 - RNA, 19 nt, Artificial Sequence
  Description of Artificial Sequence: Synthetic oligonucleotide
  Antisense strand to SEQ ID NO: 1638557
uuaggaaacaaacuuaggu

SEQ ID NO: 1638559 - RNA, 19 nt, Artificial Sequence
  Description of Artificial Sequence: Synthetic oligonucleotide
  Sense strand starting at position 3747 of SEQ ID NO: 1560986
cuaaguuuguuuccuaauu

SEQ ID NO: 1638560 - RNA, 19 nt, Artificial Sequence
  Description of Artificial Sequence: Synthetic oligonucleotide
  Antisense strand to SEQ ID NO: 1638559
aauuaggaaacaaacuuag

SEQ ID NO: 1638561 - RNA, 19 nt, Artificial Sequence
  Description of Artificial Sequence: Synthetic oligonucleotide
  Sense strand starting at position 3774 of SEQ ID NO: 1560986
auuauauuuccucggugca

SEQ ID NO: 1638562 - RNA, 19 nt, Artificial Sequence
  Description of Artificial Sequence: Synthetic oligonucleotide
  Antisense strand to SEQ ID NO: 1638561
ugcaccgaggaaauauaau

SEQ ID NO: 1638563 - RNA, 19 nt, Artificial Sequence
  Description of Artificial Sequence: Synthetic oligonucleotide
  Sense strand starting at position 3775 of SEQ ID NO: 1560986
uuauauuuccucggugcaa

SEQ ID NO: 1638564 - RNA, 19 nt, Artificial Sequence
  Description of Artificial Sequence: Synthetic oligonucleotide
  Antisense strand to SEQ ID NO: 1638563
uugcaccgaggaaauauaa

SEQ ID NO: 1638565 - RNA, 19 nt, Artificial Sequence
  Description of Artificial Sequence: Synthetic oligonucleotide
  Sense strand starting at position 3776 of SEQ ID NO: 1560986
uauauuuccucggugcaag

SEQ ID NO: 1638566 - RNA, 19 nt, Artificial Sequence
  Description of Artificial Sequence: Synthetic oligonucleotide
  Antisense strand to SEQ ID NO: 1638565
cuugcaccgaggaaauaua

SEQ ID NO: 1638567 - RNA, 19 nt, Artificial Sequence
  Description of Artificial Sequence: Synthetic oligonucleotide
  Sense strand starting at position 3800 of SEQ ID NO: 1560986
gggcuauacaagugaagaa

SEQ ID NO: 1638568 - RNA, 19 nt, Artificial Sequence
  Description of Artificial Sequence: Synthetic oligonucleotide
  Antisense strand to SEQ ID NO: 1638567
uucuucacuuguauagccc

SEQ ID NO: 1638569 - RNA, 19 nt, Artificial Sequence
  Description of Artificial Sequence: Synthetic oligonucleotide
  Sense strand starting at position 217 of SEQ ID NO: 1560987
gccacuaggaucgggaaau

SEQ ID NO: 1638570 - RNA, 19 nt, Artificial Sequence
  Description of Artificial Sequence: Synthetic oligonucleotide
  Antisense strand to SEQ ID NO: 1638569
auuucccgauccuaguggc

SEQ ID NO: 1638571 - RNA, 19 nt, Artificial Sequence
  Description of Artificial Sequence: Synthetic oligonucleotide
  Sense strand starting at position 456 of SEQ ID NO: 1560987
ucgcacuaccucggagaaa

SEQ ID NO: 1638572 - RNA, 19 nt, Artificial Sequence
  Description of Artificial Sequence: Synthetic oligonucleotide
  Antisense strand to SEQ ID NO: 1638571
uuucuccgagguagugcga

SEQ ID NO: 1638573 - RNA, 19 nt, Artificial Sequence
  Description of Artificial Sequence: Synthetic oligonucleotide
  Sense strand starting at position 486 of SEQ ID NO: 1560987
aguuuagguucuuuaacaa

SEQ ID NO: 1638574 - RNA, 19 nt, Artificial Sequence
  Description of Artificial Sequence: Synthetic oligonucleotide
  Antisense strand to SEQ ID NO: 1638573
uuguuaaagaaccuaaacu

SEQ ID NO: 1638575 - RNA, 19 nt, Artificial Sequence
  Description of Artificial Sequence: Synthetic oligonucleotide
  Sense strand starting at position 699 of SEQ ID NO: 1560987
cgaccugaacgcgaggauu

SEQ ID NO: 1638576 - RNA, 19 nt, Artificial Sequence
  Description of Artificial Sequence: Synthetic oligonucleotide
  Antisense strand to SEQ ID NO: 1638575
aauccucgcguucaggucg

SEQ ID NO: 1638577 - RNA, 19 nt, Artificial Sequence
  Description of Artificial Sequence: Synthetic oligonucleotide
  Sense strand starting at position 974 of SEQ ID NO: 1560987
gaaguuugcgacuaagagu

SEQ ID NO: 1638578 - RNA, 19 nt, Artificial Sequence
  Description of Artificial Sequence: Synthetic oligonucleotide
  Antisense strand to SEQ ID NO: 1638577
acucuuagucgcaaacuuc

SEQ ID NO: 1638579 - RNA, 19 nt, Artificial Sequence
  Description of Artificial Sequence: Synthetic oligonucleotide
  Sense strand starting at position 1073 of SEQ ID NO: 1560987
agggaguuugaggguauga

SEQ ID NO: 1638580 - RNA, 19 nt, Artificial Sequence
  Description of Artificial Sequence: Synthetic oligonucleotide
  Antisense strand to SEQ ID NO: 1638579
ucauacccucaaacucccu

SEQ ID NO: 1638581 - RNA, 19 nt, Artificial Sequence
  Description of Artificial Sequence: Synthetic oligonucleotide
  Sense strand starting at position 1075 of SEQ ID NO: 1560987
ggaguuugaggguaugagu

SEQ ID NO: 1638582 - RNA, 19 nt, Artificial Sequence
  Description of Artificial Sequence: Synthetic oligonucleotide
  Antisense strand to SEQ ID NO: 1638581
acucauacccucaaacucc

SEQ ID NO: 1638583 - RNA, 19 nt, Artificial Sequence
  Description of Artificial Sequence: Synthetic oligonucleotide
  Sense strand starting at position 1174 of SEQ ID NO: 1560987
cagagaauucgaggguuug

SEQ ID NO: 1638584 - RNA, 19 nt, Artificial Sequence
  Description of Artificial Sequence: Synthetic oligonucleotide
  Antisense strand to SEQ ID NO: 1638583
caaacccucgaauucucug

SEQ ID NO: 1638585 - RNA, 19 nt, Artificial Sequence
  Description of Artificial Sequence: Synthetic oligonucleotide
  Sense strand starting at position 1175 of SEQ ID NO: 1560987
agagaauucgaggguuuga

SEQ ID NO: 1638586 - RNA, 19 nt, Artificial Sequence
  Description of Artificial Sequence: Synthetic oligonucleotide
  Antisense strand to SEQ ID NO: 1638585
ucaaacccucgaauucucu

SEQ ID NO: 1638587 - RNA, 19 nt, Artificial Sequence
  Description of Artificial Sequence: Synthetic oligonucleotide
  Sense strand starting at position 1384 of SEQ ID NO: 1560987
guuugaggaguuugagaga

SEQ ID NO: 1638588 - RNA, 19 nt, Artificial Sequence
  Description of Artificial Sequence: Synthetic oligonucleotide
  Antisense strand to SEQ ID NO: 1638587
ucucucaaacuccucaaac

SEQ ID NO: 1638589 - RNA, 19 nt, Artificial Sequence
  Description of Artificial Sequence: Synthetic oligonucleotide
  Sense strand starting at position 1435 of SEQ ID NO: 1560987
gaagguaagcgugagaaag

SEQ ID NO: 1638590 - RNA, 19 nt, Artificial Sequence
  Description of Artificial Sequence: Synthetic oligonucleotide
  Antisense strand to SEQ ID NO: 1638589
cuuucucacgcuuaccuuc

SEQ ID NO: 1638591 - RNA, 19 nt, Artificial Sequence
  Description of Artificial Sequence: Synthetic oligonucleotide
  Sense strand starting at position 1521 of SEQ ID NO: 1560987
gcguucagucaauaaggaa

SEQ ID NO: 1638592 - RNA, 19 nt, Artificial Sequence
  Description of Artificial Sequence: Synthetic oligonucleotide
  Antisense strand to SEQ ID NO: 1638591
uuccuuauugacugaacgc

SEQ ID NO: 1638593 - RNA, 19 nt, Artificial Sequence
  Description of Artificial Sequence: Synthetic oligonucleotide
  Sense strand starting at position 2767 of SEQ ID NO: 1560987
uuguauugggcccaguauu

SEQ ID NO: 1638594 - RNA, 19 nt, Artificial Sequence
  Description of Artificial Sequence: Synthetic oligonucleotide
  Antisense strand to SEQ ID NO: 1638593
aauacugggcccaauacaa

SEQ ID NO: 1638595 - RNA, 19 nt, Artificial Sequence
  Description of Artificial Sequence: Synthetic oligonucleotide
  Sense strand starting at position 2792 of SEQ ID NO: 1560987
uaguuuaaagauuggcaaa

SEQ ID NO: 1638596 - RNA, 19 nt, Artificial Sequence
  Description of Artificial Sequence: Synthetic oligonucleotide
  Antisense strand to SEQ ID NO: 1638595
uuugccaaucuuuaaacua

SEQ ID NO: 1638597 - RNA, 19 nt, Artificial Sequence
  Description of Artificial Sequence: Synthetic oligonucleotide
  Sense strand starting at position 2794 of SEQ ID NO: 1560987
guuuaaagauuggcaaacu

SEQ ID NO: 1638598 - RNA, 19 nt, Artificial Sequence
  Description of Artificial Sequence: Synthetic oligonucleotide
  Antisense strand to SEQ ID NO: 1638597
aguuugccaaucuuuaaac

SEQ ID NO: 1638599 - RNA, 19 nt, Artificial Sequence
  Description of Artificial Sequence: Synthetic oligonucleotide
  Sense strand starting at position 2813 of SEQ ID NO: 1560987
gcggccugcgggucaaauu

SEQ ID NO: 1638600 - RNA, 19 nt, Artificial Sequence
  Description of Artificial Sequence: Synthetic oligonucleotide
  Antisense strand to SEQ ID NO: 1638599
aauuugacccgcaggccgc

SEQ ID NO: 1638601 - RNA, 19 nt, Artificial Sequence
  Description of Artificial Sequence: Synthetic oligonucleotide
  Sense strand starting at position 2877 of SEQ ID NO: 1560987
cgcccauuuccuugaacag

SEQ ID NO: 1638602 - RNA, 19 nt, Artificial Sequence
  Description of Artificial Sequence: Synthetic oligonucleotide
  Antisense strand to SEQ ID NO: 1638601
cuguucaaggaaaugggcg

SEQ ID NO: 1638603 - RNA, 19 nt, Artificial Sequence
  Description of Artificial Sequence: Synthetic oligonucleotide
  Sense strand starting at position 2897 of SEQ ID NO: 1560987
uuggaaggcugcuuugaca

SEQ ID NO: 1638604 - RNA, 19 nt, Artificial Sequence
  Description of Artificial Sequence: Synthetic oligonucleotide
  Antisense strand to SEQ ID NO: 1638603
ugucaaagcagccuuccaa

SEQ ID NO: 1638605 - RNA, 19 nt, Artificial Sequence
  Description of Artificial Sequence: Synthetic oligonucleotide
  Sense strand starting at position 2931 of SEQ ID NO: 1560987
ggaguaguugcgcaaagac

SEQ ID NO: 1638606 - RNA, 19 nt, Artificial Sequence
  Description of Artificial Sequence: Synthetic oligonucleotide
  Antisense strand to SEQ ID NO: 1638605
gucuuugcgcaacuacucc

SEQ ID NO: 1638607 - RNA, 19 nt, Artificial Sequence
  Description of Artificial Sequence: Synthetic oligonucleotide
  Sense strand starting at position 2958 of SEQ ID NO: 1560987
ccacgcgaagccuaagaua

SEQ ID NO: 1638608 - RNA, 19 nt, Artificial Sequence
  Description of Artificial Sequence: Synthetic oligonucleotide
  Antisense strand to SEQ ID NO: 1638607
uaucuuaggcuucgcgugg

SEQ ID NO: 1638609 - RNA, 19 nt, Artificial Sequence
  Description of Artificial Sequence: Synthetic oligonucleotide
  Sense strand starting at position 3035 of SEQ ID NO: 1560987
cugguagauucagcuacga

SEQ ID NO: 1638610 - RNA, 19 nt, Artificial Sequence
  Description of Artificial Sequence: Synthetic oligonucleotide
  Antisense strand to SEQ ID NO: 1638609
ucguagcugaaucuaccag

SEQ ID NO: 1638611 - RNA, 19 nt, Artificial Sequence
  Description of Artificial Sequence: Synthetic oligonucleotide
  Sense strand starting at position 3089 of SEQ ID NO: 1560987
uauucuagugagggaacau

SEQ ID NO: 1638612 - RNA, 19 nt, Artificial Sequence
  Description of Artificial Sequence: Synthetic oligonucleotide
  Antisense strand to SEQ ID NO: 1638611
auguucccucacuagaaua

SEQ ID NO: 1638613 - RNA, 19 nt, Artificial Sequence
  Description of Artificial Sequence: Synthetic oligonucleotide
  Sense strand starting at position 3133 of SEQ ID NO: 1560987
aacauauaguuauucgaga

SEQ ID NO: 1638614 - RNA, 19 nt, Artificial Sequence
  Description of Artificial Sequence: Synthetic oligonucleotide
  Antisense strand to SEQ ID NO: 1638613
ucucgaauaacuauauguu

SEQ ID NO: 1638615 - RNA, 19 nt, Artificial Sequence
  Description of Artificial Sequence: Synthetic oligonucleotide
  Sense strand starting at position 3134 of SEQ ID NO: 1560987
acauauaguuauucgagac

SEQ ID NO: 1638616 - RNA, 19 nt, Artificial Sequence
  Description of Artificial Sequence: Synthetic oligonucleotide
  Antisense strand to SEQ ID NO: 1638615
gucucgaauaacuauaugu

SEQ ID NO: 1638617 - RNA, 19 nt, Artificial Sequence
  Description of Artificial Sequence: Synthetic oligonucleotide
  Sense strand starting at position 3241 of SEQ ID NO: 1560987
ucauauuagugagcacuga

SEQ ID NO: 1638618 - RNA, 19 nt, Artificial Sequence
  Description of Artificial Sequence: Synthetic oligonucleotide
  Antisense strand to SEQ ID NO: 1638617
ucagugcucacuaauauga

SEQ ID NO: 1638619 - RNA, 19 nt, Artificial Sequence
  Description of Artificial Sequence: Synthetic oligonucleotide
  Sense strand starting at position 3242 of SEQ ID NO: 1560987
cauauuagugagcacugau

SEQ ID NO: 1638620 - RNA, 19 nt, Artificial Sequence
  Description of Artificial Sequence: Synthetic oligonucleotide
  Antisense strand to SEQ ID NO: 1638619
aucagugcucacuaauaug

SEQ ID NO: 1638621 - RNA, 19 nt, Artificial Sequence
  Description of Artificial Sequence: Synthetic oligonucleotide
  Sense strand starting at position 3245 of SEQ ID NO: 1560987
auuagugagcacugauuaa

SEQ ID NO: 1638622 - RNA, 19 nt, Artificial Sequence
  Description of Artificial Sequence: Synthetic oligonucleotide
  Antisense strand to SEQ ID NO: 1638621
uuaaucagugcucacuaau

SEQ ID NO: 1638623 - RNA, 19 nt, Artificial Sequence
  Description of Artificial Sequence: Synthetic oligonucleotide
  Sense strand starting at position 3271 of SEQ ID NO: 1560987
ugugccugaaagugaucua

SEQ ID NO: 1638624 - RNA, 19 nt, Artificial Sequence
  Description of Artificial Sequence: Synthetic oligonucleotide
  Antisense strand to SEQ ID NO: 1638623
uagaucacuuucaggcaca

SEQ ID NO: 1638625 - RNA, 19 nt, Artificial Sequence
  Description of Artificial Sequence: Synthetic oligonucleotide
  Sense strand starting at position 3272 of SEQ ID NO: 1560987
gugccugaaagugaucuaa

SEQ ID NO: 1638626 - RNA, 19 nt, Artificial Sequence
  Description of Artificial Sequence: Synthetic oligonucleotide
  Antisense strand to SEQ ID NO: 1638625
uuagaucacuuucaggcac

SEQ ID NO: 1638627 - RNA, 19 nt, Artificial Sequence
  Description of Artificial Sequence: Synthetic oligonucleotide
  Sense strand starting at position 3274 of SEQ ID NO: 1560987
gccugaaagugaucuaagc

SEQ ID NO: 1638628 - RNA, 19 nt, Artificial Sequence
  Description of Artificial Sequence: Synthetic oligonucleotide
  Antisense strand to SEQ ID NO: 1638627
gcuuagaucacuuucaggc

SEQ ID NO: 1638629 - RNA, 19 nt, Artificial Sequence
  Description of Artificial Sequence: Synthetic oligonucleotide
  Sense strand starting at position 3324 of SEQ ID NO: 1560987
acaaucgcaucuuuagaaa

SEQ ID NO: 1638630 - RNA, 19 nt, Artificial Sequence
  Description of Artificial Sequence: Synthetic oligonucleotide
  Antisense strand to SEQ ID NO: 1638629
uuucuaaagaugcgauugu

SEQ ID NO: 1638631 - RNA, 19 nt, Artificial Sequence
  Description of Artificial Sequence: Synthetic oligonucleotide
  Sense strand starting at position 3339 of SEQ ID NO: 1560987
gaaagaugcuaggcauuau

SEQ ID NO: 1638632 - RNA, 19 nt, Artificial Sequence
  Description of Artificial Sequence: Synthetic oligonucleotide
  Antisense strand to SEQ ID NO: 1638631
auaaugccuagcaucuuuc

SEQ ID NO: 1638633 - RNA, 19 nt, Artificial Sequence
  Description of Artificial Sequence: Synthetic oligonucleotide
  Sense strand starting at position 3439 of SEQ ID NO: 1560987
gugcgaucuggcucgcuca

SEQ ID NO: 1638634 - RNA, 19 nt, Artificial Sequence
  Description of Artificial Sequence: Synthetic oligonucleotide
  Antisense strand to SEQ ID NO: 1638633
ugagcgagccagaucgcac

SEQ ID NO: 1638635 - RNA, 19 nt, Artificial Sequence
  Description of Artificial Sequence: Synthetic oligonucleotide
  Sense strand starting at position 3726 of SEQ ID NO: 1560987
gagugaauuugcccagugu

SEQ ID NO: 1638636 - RNA, 19 nt, Artificial Sequence
  Description of Artificial Sequence: Synthetic oligonucleotide
  Antisense strand to SEQ ID NO: 1638635
acacugggcaaauucacuc

SEQ ID NO: 1638637 - RNA, 19 nt, Artificial Sequence
  Description of Artificial Sequence: Synthetic oligonucleotide
  Sense strand starting at position 3727 of SEQ ID NO: 1560987
agugaauuugcccaguguc

SEQ ID NO: 1638638 - RNA, 19 nt, Artificial Sequence
  Description of Artificial Sequence: Synthetic oligonucleotide
  Antisense strand to SEQ ID NO: 1638637
gacacugggcaaauucacu

SEQ ID NO: 1638639 - RNA, 19 nt, Artificial Sequence
  Description of Artificial Sequence: Synthetic oligonucleotide
  Sense strand starting at position 3795 of SEQ ID NO: 1560987
ugcucuugaucacuagaug

SEQ ID NO: 1638640 - RNA, 19 nt, Artificial Sequence
  Description of Artificial Sequence: Synthetic oligonucleotide
  Antisense strand to SEQ ID NO: 1638639
caucuagugaucaagagca

SEQ ID NO: 1638641 - RNA, 19 nt, Artificial Sequence
  Description of Artificial Sequence: Synthetic oligonucleotide
  Sense strand starting at position 3908 of SEQ ID NO: 1560987
augauacuguaacuaaagu

SEQ ID NO: 1638642 - RNA, 19 nt, Artificial Sequence
  Description of Artificial Sequence: Synthetic oligonucleotide
  Antisense strand to SEQ ID NO: 1638641
acuuuaguuacaguaucau

SEQ ID NO: 1638643 - RNA, 19 nt, Artificial Sequence
  Description of Artificial Sequence: Synthetic oligonucleotide
  Sense strand starting at position 3919 of SEQ ID NO: 1560987
acuaaaguaccgugaaaug

SEQ ID NO: 1638644 - RNA, 19 nt, Artificial Sequence
  Description of Artificial Sequence: Synthetic oligonucleotide
  Antisense strand to SEQ ID NO: 1638643
cauuucacgguacuuuagu

SEQ ID NO: 1638645 - RNA, 19 nt, Artificial Sequence
  Description of Artificial Sequence: Synthetic oligonucleotide
  Sense strand starting at position 3930 of SEQ ID NO: 1560987
gugaaaugauacuuuaacg

SEQ ID NO: 1638646 - RNA, 19 nt, Artificial Sequence
  Description of Artificial Sequence: Synthetic oligonucleotide
  Antisense strand to SEQ ID NO: 1638645
cguuaaaguaucauuucac

SEQ ID NO: 1638647 - RNA, 19 nt, Artificial Sequence
  Description of Artificial Sequence: Synthetic oligonucleotide
  Sense strand starting at position 3942 of SEQ ID NO: 1560987
uuuaacgcacucugauauu

SEQ ID NO: 1638648 - RNA, 19 nt, Artificial Sequence
  Description of Artificial Sequence: Synthetic oligonucleotide
  Antisense strand to SEQ ID NO: 1638647
aauaucagagugcguuaaa

SEQ ID NO: 1638649 - RNA, 19 nt, Artificial Sequence
  Description of Artificial Sequence: Synthetic oligonucleotide
  Sense strand starting at position 42 of SEQ ID NO: 1560988
gcuaaucccagaggaggua

SEQ ID NO: 1638650 - RNA, 19 nt, Artificial Sequence
  Description of Artificial Sequence: Synthetic oligonucleotide
  Antisense strand to SEQ ID NO: 1638649
uaccuccucugggauuagc

SEQ ID NO: 1638651 - RNA, 19 nt, Artificial Sequence
  Description of Artificial Sequence: Synthetic oligonucleotide
  Sense strand starting at position 363 of SEQ ID NO: 1560988
aacugagguccagguuaau

SEQ ID NO: 1638652 - RNA, 19 nt, Artificial Sequence
  Description of Artificial Sequence: Synthetic oligonucleotide
  Antisense strand to SEQ ID NO: 1638651
auuaaccuggaccucaguu

SEQ ID NO: 1638653 - RNA, 19 nt, Artificial Sequence
  Description of Artificial Sequence: Synthetic oligonucleotide
  Sense strand starting at position 418 of SEQ ID NO: 1560988
gcuuucgaggucuaccauu

SEQ ID NO: 1638654 - RNA, 19 nt, Artificial Sequence
  Description of Artificial Sequence: Synthetic oligonucleotide
  Antisense strand to SEQ ID NO: 1638653
aaugguagaccucgaaagc

SEQ ID NO: 1638655 - RNA, 19 nt, Artificial Sequence
  Description of Artificial Sequence: Synthetic oligonucleotide
  Sense strand starting at position 817 of SEQ ID NO: 1560988
ucagcugucuggguucgaa

SEQ ID NO: 1638656 - RNA, 19 nt, Artificial Sequence
  Description of Artificial Sequence: Synthetic oligonucleotide
  Antisense strand to SEQ ID NO: 1638655
uucgaacccagacagcuga

SEQ ID NO: 1638657 - RNA, 19 nt, Artificial Sequence
  Description of Artificial Sequence: Synthetic oligonucleotide
  Sense strand starting at position 827 of SEQ ID NO: 1560988
ggguucgaaucccucaauu

SEQ ID NO: 1638658 - RNA, 19 nt, Artificial Sequence
  Description of Artificial Sequence: Synthetic oligonucleotide
  Antisense strand to SEQ ID NO: 1638657
aauugagggauucgaaccc

SEQ ID NO: 1638659 - RNA, 19 nt, Artificial Sequence
  Description of Artificial Sequence: Synthetic oligonucleotide
  Sense strand starting at position 844 of SEQ ID NO: 1560988
uuuauaggccgugagaacu

SEQ ID NO: 1638660 - RNA, 19 nt, Artificial Sequence
  Description of Artificial Sequence: Synthetic oligonucleotide
  Antisense strand to SEQ ID NO: 1638659
aguucucacggccuauaaa

SEQ ID NO: 1638661 - RNA, 19 nt, Artificial Sequence
  Description of Artificial Sequence: Synthetic oligonucleotide
  Sense strand starting at position 864 of SEQ ID NO: 1560988
gggcacgugacuuaaccuu

SEQ ID NO: 1638662 - RNA, 19 nt, Artificial Sequence
  Description of Artificial Sequence: Synthetic oligonucleotide
  Antisense strand to SEQ ID NO: 1638661
aagguuaagucacgugccc

SEQ ID NO: 1638663 - RNA, 19 nt, Artificial Sequence
  Description of Artificial Sequence: Synthetic oligonucleotide
  Sense strand starting at position 871 of SEQ ID NO: 1560988
ugacuuaaccuuugagccu

SEQ ID NO: 1638664 - RNA, 19 nt, Artificial Sequence
  Description of Artificial Sequence: Synthetic oligonucleotide
  Antisense strand to SEQ ID NO: 1638663
aggcucaaagguuaaguca

SEQ ID NO: 1638665 - RNA, 19 nt, Artificial Sequence
  Description of Artificial Sequence: Synthetic oligonucleotide
  Sense strand starting at position 928 of SEQ ID NO: 1560988
aacgaauuaugucuguaca

SEQ ID NO: 1638666 - RNA, 19 nt, Artificial Sequence
  Description of Artificial Sequence: Synthetic oligonucleotide
  Antisense strand to SEQ ID NO: 1638665
uguacagacauaauucguu

SEQ ID NO: 1638667 - RNA, 19 nt, Artificial Sequence
  Description of Artificial Sequence: Synthetic oligonucleotide
  Sense strand starting at position 929 of SEQ ID NO: 1560988
acgaauuaugucuguacau

SEQ ID NO: 1638668 - RNA, 19 nt, Artificial Sequence
  Description of Artificial Sequence: Synthetic oligonucleotide
  Antisense strand to SEQ ID NO: 1638667
auguacagacauaauucgu

SEQ ID NO: 1638669 - RNA, 19 nt, Artificial Sequence
  Description of Artificial Sequence: Synthetic oligonucleotide
  Sense strand starting at position 930 of SEQ ID NO: 1560988
cgaauuaugucuguacaua

SEQ ID NO: 1638670 - RNA, 19 nt, Artificial Sequence
  Description of Artificial Sequence: Synthetic oligonucleotide
  Antisense strand to SEQ ID NO: 1638669
uauguacagacauaauucg

SEQ ID NO: 1638671 - RNA, 19 nt, Artificial Sequence
  Description of Artificial Sequence: Synthetic oligonucleotide
  Sense strand starting at position 931 of SEQ ID NO: 1560988
gaauuaugucuguacauag

SEQ ID NO: 1638672 - RNA, 19 nt, Artificial Sequence
  Description of Artificial Sequence: Synthetic oligonucleotide
  Antisense strand to SEQ ID NO: 1638671
cuauguacagacauaauuc

SEQ ID NO: 1638673 - RNA, 19 nt, Artificial Sequence
  Description of Artificial Sequence: Synthetic oligonucleotide
  Sense strand starting at position 968 of SEQ ID NO: 1560988
aagcguggagcucaauaaa

SEQ ID NO: 1638674 - RNA, 19 nt, Artificial Sequence
  Description of Artificial Sequence: Synthetic oligonucleotide
  Antisense strand to SEQ ID NO: 1638673
uuuauugagcuccacgcuu

SEQ ID NO: 1638675 - RNA, 19 nt, Artificial Sequence
  Description of Artificial Sequence: Synthetic oligonucleotide
  Sense strand starting at position 971 of SEQ ID NO: 1560988
cguggagcucaauaaauau

SEQ ID NO: 1638676 - RNA, 19 nt, Artificial Sequence
  Description of Artificial Sequence: Synthetic oligonucleotide
  Antisense strand to SEQ ID NO: 1638675
auauuuauugagcuccacg

SEQ ID NO: 1638677 - RNA, 19 nt, Artificial Sequence
  Description of Artificial Sequence: Synthetic oligonucleotide
  Sense strand starting at position 981 of SEQ ID NO: 1560988
aauaaauauucgcuauggu

SEQ ID NO: 1638678 - RNA, 19 nt, Artificial Sequence
  Description of Artificial Sequence: Synthetic oligonucleotide
  Antisense strand to SEQ ID NO: 1638677
accauagcgaauauuuauu

SEQ ID NO: 1638679 - RNA, 19 nt, Artificial Sequence
  Description of Artificial Sequence: Synthetic oligonucleotide
  Sense strand starting at position 982 of SEQ ID NO: 1560988
auaaauauucgcuaugguu

SEQ ID NO: 1638680 - RNA, 19 nt, Artificial Sequence
  Description of Artificial Sequence: Synthetic oligonucleotide
  Antisense strand to SEQ ID NO: 1638679
aaccauagcgaauauuuau

SEQ ID NO: 1638681 - RNA, 19 nt, Artificial Sequence
  Description of Artificial Sequence: Synthetic oligonucleotide
  Sense strand starting at position 984 of SEQ ID NO: 1560988
aaauauucgcuaugguugu

SEQ ID NO: 1638682 - RNA, 19 nt, Artificial Sequence
  Description of Artificial Sequence: Synthetic oligonucleotide
  Antisense strand to SEQ ID NO: 1638681
acaaccauagcgaauauuu

SEQ ID NO: 1638683 - RNA, 19 nt, Artificial Sequence
  Description of Artificial Sequence: Synthetic oligonucleotide
  Sense strand starting at position 1472 of SEQ ID NO: 1560988
ccuaaagggcucugagaau

SEQ ID NO: 1638684 - RNA, 19 nt, Artificial Sequence
  Description of Artificial Sequence: Synthetic oligonucleotide
  Antisense strand to SEQ ID NO: 1638683
auucucagagcccuuuagg

SEQ ID NO: 1638685 - RNA, 19 nt, Artificial Sequence
  Description of Artificial Sequence: Synthetic oligonucleotide
  Sense strand starting at position 2267 of SEQ ID NO: 1560988
guagaaaggcuccgugucu

SEQ ID NO: 1638686 - RNA, 19 nt, Artificial Sequence
  Description of Artificial Sequence: Synthetic oligonucleotide
  Antisense strand to SEQ ID NO: 1638685
agacacggagccuuucuac

SEQ ID NO: 1638687 - RNA, 19 nt, Artificial Sequence
  Description of Artificial Sequence: Synthetic oligonucleotide
  Sense strand starting at position 2274 of SEQ ID NO: 1560988
ggcuccgugucugcuuuaa

SEQ ID NO: 1638688 - RNA, 19 nt, Artificial Sequence
  Description of Artificial Sequence: Synthetic oligonucleotide
  Antisense strand to SEQ ID NO: 1638687
uuaaagcagacacggagcc

SEQ ID NO: 1638689 - RNA, 19 nt, Artificial Sequence
  Description of Artificial Sequence: Synthetic oligonucleotide
  Sense strand starting at position 2276 of SEQ ID NO: 1560988
cuccgugucugcuuuaauu

SEQ ID NO: 1638690 - RNA, 19 nt, Artificial Sequence
  Description of Artificial Sequence: Synthetic oligonucleotide
  Antisense strand to SEQ ID NO: 1638689
aauuaaagcagacacggag

SEQ ID NO: 1638691 - RNA, 19 nt, Artificial Sequence
  Description of Artificial Sequence: Synthetic oligonucleotide
  Sense strand starting at position 2278 of SEQ ID NO: 1560988
ccgugucugcuuuaauuac

SEQ ID NO: 1638692 - RNA, 19 nt, Artificial Sequence
  Description of Artificial Sequence: Synthetic oligonucleotide
  Antisense strand to SEQ ID NO: 1638691
guaauuaaagcagacacgg

SEQ ID NO: 1638693 - RNA, 19 nt, Artificial Sequence
  Description of Artificial Sequence: Synthetic oligonucleotide
  Sense strand starting at position 2338 of SEQ ID NO: 1560988
ugggagugguggcuuugua

SEQ ID NO: 1638694 - RNA, 19 nt, Artificial Sequence
  Description of Artificial Sequence: Synthetic oligonucleotide
  Antisense strand to SEQ ID NO: 1638693
uacaaagccaccacuccca

SEQ ID NO: 1638695 - RNA, 19 nt, Artificial Sequence
  Description of Artificial Sequence: Synthetic oligonucleotide
  Sense strand starting at position 2626 of SEQ ID NO: 1560988
accugauauuuguaaugca

SEQ ID NO: 1638696 - RNA, 19 nt, Artificial Sequence
  Description of Artificial Sequence: Synthetic oligonucleotide
  Antisense strand to SEQ ID NO: 1638695
ugcauuacaaauaucaggu

SEQ ID NO: 1638697 - RNA, 19 nt, Artificial Sequence
  Description of Artificial Sequence: Synthetic oligonucleotide
  Sense strand starting at position 2634 of SEQ ID NO: 1560988
uuuguaaugcauuggaaga

SEQ ID NO: 1638698 - RNA, 19 nt, Artificial Sequence
  Description of Artificial Sequence: Synthetic oligonucleotide
  Antisense strand to SEQ ID NO: 1638697
ucuuccaaugcauuacaaa

SEQ ID NO: 1638699 - RNA, 19 nt, Artificial Sequence
  Description of Artificial Sequence: Synthetic oligonucleotide
  Sense strand starting at position 2635 of SEQ ID NO: 1560988
uuguaaugcauuggaagaa

SEQ ID NO: 1638700 - RNA, 19 nt, Artificial Sequence
  Description of Artificial Sequence: Synthetic oligonucleotide
  Antisense strand to SEQ ID NO: 1638699
uucuuccaaugcauuacaa

SEQ ID NO: 1638701 - RNA, 19 nt, Artificial Sequence
  Description of Artificial Sequence: Synthetic oligonucleotide
  Sense strand starting at position 2636 of SEQ ID NO: 1560988
uguaaugcauuggaagaau

SEQ ID NO: 1638702 - RNA, 19 nt, Artificial Sequence
  Description of Artificial Sequence: Synthetic oligonucleotide
  Antisense strand to SEQ ID NO: 1638701
auucuuccaaugcauuaca

SEQ ID NO: 1638703 - RNA, 19 nt, Artificial Sequence
  Description of Artificial Sequence: Synthetic oligonucleotide
  Sense strand starting at position 2664 of SEQ ID NO: 1560988
guaguaaucgcugugcguc

SEQ ID NO: 1638704 - RNA, 19 nt, Artificial Sequence
  Description of Artificial Sequence: Synthetic oligonucleotide
  Antisense strand to SEQ ID NO: 1638703
gacgcacagcgauuacuac

SEQ ID NO: 1638705 - RNA, 19 nt, Artificial Sequence
  Description of Artificial Sequence: Synthetic oligonucleotide
  Sense strand starting at position 3216 of SEQ ID NO: 1560988
aaagaagugcuucguguag

SEQ ID NO: 1638706 - RNA, 19 nt, Artificial Sequence
  Description of Artificial Sequence: Synthetic oligonucleotide
  Antisense strand to SEQ ID NO: 1638705
cuacacgaagcacuucuuu

SEQ ID NO: 1638707 - RNA, 19 nt, Artificial Sequence
  Description of Artificial Sequence: Synthetic oligonucleotide
  Sense strand starting at position 3227 of SEQ ID NO: 1560988
ucguguagggcagauugaa

SEQ ID NO: 1638708 - RNA, 19 nt, Artificial Sequence
  Description of Artificial Sequence: Synthetic oligonucleotide
  Antisense strand to SEQ ID NO: 1638707
uucaaucugcccuacacga

SEQ ID NO: 1638709 - RNA, 19 nt, Artificial Sequence
  Description of Artificial Sequence: Synthetic oligonucleotide
  Sense strand starting at position 3255 of SEQ ID NO: 1560988
uuugaaacuuuguggaauu

SEQ ID NO: 1638710 - RNA, 19 nt, Artificial Sequence
  Description of Artificial Sequence: Synthetic oligonucleotide
  Antisense strand to SEQ ID NO: 1638709
aauuccacaaaguuucaaa

SEQ ID NO: 1638711 - RNA, 19 nt, Artificial Sequence
  Description of Artificial Sequence: Synthetic oligonucleotide
  Sense strand starting at position 3256 of SEQ ID NO: 1560988
uugaaacuuuguggaauuu

SEQ ID NO: 1638712 - RNA, 19 nt, Artificial Sequence
  Description of Artificial Sequence: Synthetic oligonucleotide
  Antisense strand to SEQ ID NO: 1638711
aaauuccacaaaguuucaa

SEQ ID NO: 1638713 - RNA, 19 nt, Artificial Sequence
  Description of Artificial Sequence: Synthetic oligonucleotide
  Sense strand starting at position 3341 of SEQ ID NO: 1560988
gcaugaguaugaggcauga

SEQ ID NO: 1638714 - RNA, 19 nt, Artificial Sequence
  Description of Artificial Sequence: Synthetic oligonucleotide
  Antisense strand to SEQ ID NO: 1638713
ucaugccucauacucaugc

SEQ ID NO: 1638715 - RNA, 19 nt, Artificial Sequence
  Description of Artificial Sequence: Synthetic oligonucleotide
  Sense strand starting at position 3362 of SEQ ID NO: 1560988
caccgugccuugucuguua

SEQ ID NO: 1638716 - RNA, 19 nt, Artificial Sequence
  Description of Artificial Sequence: Synthetic oligonucleotide
  Antisense strand to SEQ ID NO: 1638715
uaacagacaaggcacggug

SEQ ID NO: 1638717 - RNA, 19 nt, Artificial Sequence
  Description of Artificial Sequence: Synthetic oligonucleotide
  Sense strand starting at position 3366 of SEQ ID NO: 1560988
gugccuugucuguuaugcu

SEQ ID NO: 1638718 - RNA, 19 nt, Artificial Sequence
  Description of Artificial Sequence: Synthetic oligonucleotide
  Antisense strand to SEQ ID NO: 1638717
agcauaacagacaaggcac

SEQ ID NO: 1638719 - RNA, 19 nt, Artificial Sequence
  Description of Artificial Sequence: Synthetic oligonucleotide
  Sense strand starting at position 3373 of SEQ ID NO: 1560988
gucuguuaugcucaccuuu

SEQ ID NO: 1638720 - RNA, 19 nt, Artificial Sequence
  Description of Artificial Sequence: Synthetic oligonucleotide
  Antisense strand to SEQ ID NO: 1638719
aaaggugagcauaacagac

SEQ ID NO: 1638721 - RNA, 19 nt, Artificial Sequence
  Description of Artificial Sequence: Synthetic oligonucleotide
  Sense strand starting at position 3375 of SEQ ID NO: 1560988
cuguuaugcucaccuuucu

SEQ ID NO: 1638722 - RNA, 19 nt, Artificial Sequence
  Description of Artificial Sequence: Synthetic oligonucleotide
  Antisense strand to SEQ ID NO: 1638721
agaaaggugagcauaacag

SEQ ID NO: 1638723 - RNA, 19 nt, Artificial Sequence
  Description of Artificial Sequence: Synthetic oligonucleotide
  Sense strand starting at position 3716 of SEQ ID NO: 1560988
ggaggccuaucugguaaga

SEQ ID NO: 1638724 - RNA, 19 nt, Artificial Sequence
  Description of Artificial Sequence: Synthetic oligonucleotide
  Antisense strand to SEQ ID NO: 1638723
ucuuaccagauaggccucc

SEQ ID NO: 1638725 - RNA, 19 nt, Artificial Sequence
  Description of Artificial Sequence: Synthetic oligonucleotide
  Sense strand starting at position 3791 of SEQ ID NO: 1560988
gauggagagacuuguguua

SEQ ID NO: 1638726 - RNA, 19 nt, Artificial Sequence
  Description of Artificial Sequence: Synthetic oligonucleotide
  Antisense strand to SEQ ID NO: 1638725
uaacacaagucucuccauc

SEQ ID NO: 1638727 - RNA, 19 nt, Artificial Sequence
  Description of Artificial Sequence: Synthetic oligonucleotide
  Sense strand starting at position 3804 of SEQ ID NO: 1560988
guguuagccuccuuugacu

SEQ ID NO: 1638728 - RNA, 19 nt, Artificial Sequence
  Description of Artificial Sequence: Synthetic oligonucleotide
  Antisense strand to SEQ ID NO: 1638727
agucaaaggaggcuaacac

SEQ ID NO: 1638729 - RNA, 19 nt, Artificial Sequence
  Description of Artificial Sequence: Synthetic oligonucleotide
  Sense strand starting at position 567 of SEQ ID NO: 1560989
ccaugugaggccugacauu

SEQ ID NO: 1638730 - RNA, 19 nt, Artificial Sequence
  Description of Artificial Sequence: Synthetic oligonucleotide
  Antisense strand to SEQ ID NO: 1638729
aaugucaggccucacaugg

SEQ ID NO: 1638731 - RNA, 19 nt, Artificial Sequence
  Description of Artificial Sequence: Synthetic oligonucleotide
  Sense strand starting at position 609 of SEQ ID NO: 1560989
gcuaaucccagaggaggua

SEQ ID NO: 1638732 - RNA, 19 nt, Artificial Sequence
  Description of Artificial Sequence: Synthetic oligonucleotide
  Antisense strand to SEQ ID NO: 1638731
uaccuccucugggauuagc

SEQ ID NO: 1638733 - RNA, 19 nt, Artificial Sequence
  Description of Artificial Sequence: Synthetic oligonucleotide
  Sense strand starting at position 930 of SEQ ID NO: 1560989
aacugagguccagguuaau

SEQ ID NO: 1638734 - RNA, 19 nt, Artificial Sequence
  Description of Artificial Sequence: Synthetic oligonucleotide
  Antisense strand to SEQ ID NO: 1638733
auuaaccuggaccucaguu

SEQ ID NO: 1638735 - RNA, 19 nt, Artificial Sequence
  Description of Artificial Sequence: Synthetic oligonucleotide
  Sense strand starting at position 985 of SEQ ID NO: 1560989
gcuuucgaggucuaccauu

SEQ ID NO: 1638736 - RNA, 19 nt, Artificial Sequence
  Description of Artificial Sequence: Synthetic oligonucleotide
  Antisense strand to SEQ ID NO: 1638735
aaugguagaccucgaaagc

SEQ ID NO: 1638737 - RNA, 19 nt, Artificial Sequence
  Description of Artificial Sequence: Synthetic oligonucleotide
  Sense strand starting at position 1384 of SEQ ID NO: 1560989
ucagcugucuggguucgaa

SEQ ID NO: 1638738 - RNA, 19 nt, Artificial Sequence
  Description of Artificial Sequence: Synthetic oligonucleotide
  Antisense strand to SEQ ID NO: 1638737
uucgaacccagacagcuga

SEQ ID NO: 1638739 - RNA, 19 nt, Artificial Sequence
  Description of Artificial Sequence: Synthetic oligonucleotide
  Sense strand starting at position 1394 of SEQ ID NO: 1560989
ggguucgaaucccucaauu

SEQ ID NO: 1638740 - RNA, 19 nt, Artificial Sequence
  Description of Artificial Sequence: Synthetic oligonucleotide
  Antisense strand to SEQ ID NO: 1638739
aauugagggauucgaaccc

SEQ ID NO: 1638741 - RNA, 19 nt, Artificial Sequence
  Description of Artificial Sequence: Synthetic oligonucleotide
  Sense strand starting at position 1411 of SEQ ID NO: 1560989
uuuauaggccgugagaacu

SEQ ID NO: 1638742 - RNA, 19 nt, Artificial Sequence
  Description of Artificial Sequence: Synthetic oligonucleotide
  Antisense strand to SEQ ID NO: 1638741
aguucucacggccuauaaa

SEQ ID NO: 1638743 - RNA, 19 nt, Artificial Sequence
  Description of Artificial Sequence: Synthetic oligonucleotide
  Sense strand starting at position 1431 of SEQ ID NO: 1560989
gggcacgugacuuaaccuu

SEQ ID NO: 1638744 - RNA, 19 nt, Artificial Sequence
  Description of Artificial Sequence: Synthetic oligonucleotide
  Antisense strand to SEQ ID NO: 1638743
aagguuaagucacgugccc

SEQ ID NO: 1638745 - RNA, 19 nt, Artificial Sequence
  Description of Artificial Sequence: Synthetic oligonucleotide
  Sense strand starting at position 1438 of SEQ ID NO: 1560989
ugacuuaaccuuugagccu

SEQ ID NO: 1638746 - RNA, 19 nt, Artificial Sequence
  Description of Artificial Sequence: Synthetic oligonucleotide
  Antisense strand to SEQ ID NO: 1638745
aggcucaaagguuaaguca

SEQ ID NO: 1638747 - RNA, 19 nt, Artificial Sequence
  Description of Artificial Sequence: Synthetic oligonucleotide
  Sense strand starting at position 1495 of SEQ ID NO: 1560989
aacgaauuaugucuguaca

SEQ ID NO: 1638748 - RNA, 19 nt, Artificial Sequence
  Description of Artificial Sequence: Synthetic oligonucleotide
  Antisense strand to SEQ ID NO: 1638747
uguacagacauaauucguu

SEQ ID NO: 1638749 - RNA, 19 nt, Artificial Sequence
  Description of Artificial Sequence: Synthetic oligonucleotide
  Sense strand starting at position 1496 of SEQ ID NO: 1560989
acgaauuaugucuguacau

SEQ ID NO: 1638750 - RNA, 19 nt, Artificial Sequence
  Description of Artificial Sequence: Synthetic oligonucleotide
  Antisense strand to SEQ ID NO: 1638749
auguacagacauaauucgu

SEQ ID NO: 1638751 - RNA, 19 nt, Artificial Sequence
  Description of Artificial Sequence: Synthetic oligonucleotide
  Sense strand starting at position 1497 of SEQ ID NO: 1560989
cgaauuaugucuguacaua

SEQ ID NO: 1638752 - RNA, 19 nt, Artificial Sequence
  Description of Artificial Sequence: Synthetic oligonucleotide
  Antisense strand to SEQ ID NO: 1638751
uauguacagacauaauucg

SEQ ID NO: 1638753 - RNA, 19 nt, Artificial Sequence
  Description of Artificial Sequence: Synthetic oligonucleotide
  Sense strand starting at position 1498 of SEQ ID NO: 1560989
gaauuaugucuguacauag

SEQ ID NO: 1638754 - RNA, 19 nt, Artificial Sequence
  Description of Artificial Sequence: Synthetic oligonucleotide
  Antisense strand to SEQ ID NO: 1638753
cuauguacagacauaauuc

SEQ ID NO: 1638755 - RNA, 19 nt, Artificial Sequence
  Description of Artificial Sequence: Synthetic oligonucleotide
  Sense strand starting at position 1535 of SEQ ID NO: 1560989
aagcguggagcucaauaaa

SEQ ID NO: 1638756 - RNA, 19 nt, Artificial Sequence
  Description of Artificial Sequence: Synthetic oligonucleotide
  Antisense strand to SEQ ID NO: 1638755
uuuauugagcuccacgcuu

SEQ ID NO: 1638757 - RNA, 19 nt, Artificial Sequence
  Description of Artificial Sequence: Synthetic oligonucleotide
  Sense strand starting at position 1538 of SEQ ID NO: 1560989
cguggagcucaauaaauau

SEQ ID NO: 1638758 - RNA, 19 nt, Artificial Sequence
  Description of Artificial Sequence: Synthetic oligonucleotide
  Antisense strand to SEQ ID NO: 1638757
auauuuauugagcuccacg

SEQ ID NO: 1638759 - RNA, 19 nt, Artificial Sequence
  Description of Artificial Sequence: Synthetic oligonucleotide
  Sense strand starting at position 1548 of SEQ ID NO: 1560989
aauaaauauucgcuauggu

SEQ ID NO: 1638760 - RNA, 19 nt, Artificial Sequence
  Description of Artificial Sequence: Synthetic oligonucleotide
  Antisense strand to SEQ ID NO: 1638759
accauagcgaauauuuauu

SEQ ID NO: 1638761 - RNA, 19 nt, Artificial Sequence
  Description of Artificial Sequence: Synthetic oligonucleotide
  Sense strand starting at position 1549 of SEQ ID NO: 1560989
auaaauauucgcuaugguu

SEQ ID NO: 1638762 - RNA, 19 nt, Artificial Sequence
  Description of Artificial Sequence: Synthetic oligonucleotide
  Antisense strand to SEQ ID NO: 1638761
aaccauagcgaauauuuau

SEQ ID NO: 1638763 - RNA, 19 nt, Artificial Sequence
  Description of Artificial Sequence: Synthetic oligonucleotide
  Sense strand starting at position 1551 of SEQ ID NO: 1560989
aaauauucgcuaugguugu

SEQ ID NO: 1638764 - RNA, 19 nt, Artificial Sequence
  Description of Artificial Sequence: Synthetic oligonucleotide
  Antisense strand to SEQ ID NO: 1638763
acaaccauagcgaauauuu

SEQ ID NO: 1638765 - RNA, 19 nt, Artificial Sequence
  Description of Artificial Sequence: Synthetic oligonucleotide
  Sense strand starting at position 2039 of SEQ ID NO: 1560989
ccuaaagggcucugagaau

SEQ ID NO: 1638766 - RNA, 19 nt, Artificial Sequence
  Description of Artificial Sequence: Synthetic oligonucleotide
  Antisense strand to SEQ ID NO: 1638765
auucucagagcccuuuagg

SEQ ID NO: 1638767 - RNA, 19 nt, Artificial Sequence
  Description of Artificial Sequence: Synthetic oligonucleotide
  Sense strand starting at position 2834 of SEQ ID NO: 1560989
guagaaaggcuccgugucu

SEQ ID NO: 1638768 - RNA, 19 nt, Artificial Sequence
  Description of Artificial Sequence: Synthetic oligonucleotide
  Antisense strand to SEQ ID NO: 1638767
agacacggagccuuucuac

SEQ ID NO: 1638769 - RNA, 19 nt, Artificial Sequence
  Description of Artificial Sequence: Synthetic oligonucleotide
  Sense strand starting at position 2841 of SEQ ID NO: 1560989
ggcuccgugucugcuuuaa

SEQ ID NO: 1638770 - RNA, 19 nt, Artificial Sequence
  Description of Artificial Sequence: Synthetic oligonucleotide
  Antisense strand to SEQ ID NO: 1638769
uuaaagcagacacggagcc

SEQ ID NO: 1638771 - RNA, 19 nt, Artificial Sequence
  Description of Artificial Sequence: Synthetic oligonucleotide
  Sense strand starting at position 2843 of SEQ ID NO: 1560989
cuccgugucugcuuuaauu

SEQ ID NO: 1638772 - RNA, 19 nt, Artificial Sequence
  Description of Artificial Sequence: Synthetic oligonucleotide
  Antisense strand to SEQ ID NO: 1638771
aauuaaagcagacacggag

SEQ ID NO: 1638773 - RNA, 19 nt, Artificial Sequence
  Description of Artificial Sequence: Synthetic oligonucleotide
  Sense strand starting at position 2845 of SEQ ID NO: 1560989
ccgugucugcuuuaauuac

SEQ ID NO: 1638774 - RNA, 19 nt, Artificial Sequence
  Description of Artificial Sequence: Synthetic oligonucleotide
  Antisense strand to SEQ ID NO: 1638773
guaauuaaagcagacacgg

SEQ ID NO: 1638775 - RNA, 19 nt, Artificial Sequence
  Description of Artificial Sequence: Synthetic oligonucleotide
  Sense strand starting at position 2905 of SEQ ID NO: 1560989
ugggagugguggcuuugua

SEQ ID NO: 1638776 - RNA, 19 nt, Artificial Sequence
  Description of Artificial Sequence: Synthetic oligonucleotide
  Antisense strand to SEQ ID NO: 1638775
uacaaagccaccacuccca

SEQ ID NO: 1638777 - RNA, 19 nt, Artificial Sequence
  Description of Artificial Sequence: Synthetic oligonucleotide
  Sense strand starting at position 3193 of SEQ ID NO: 1560989
accugauauuuguaaugca

SEQ ID NO: 1638778 - RNA, 19 nt, Artificial Sequence
  Description of Artificial Sequence: Synthetic oligonucleotide
  Antisense strand to SEQ ID NO: 1638777
ugcauuacaaauaucaggu

SEQ ID NO: 1638779 - RNA, 19 nt, Artificial Sequence
  Description of Artificial Sequence: Synthetic oligonucleotide
  Sense strand starting at position 3201 of SEQ ID NO: 1560989
uuuguaaugcauuggaaga

SEQ ID NO: 1638780 - RNA, 19 nt, Artificial Sequence
  Description of Artificial Sequence: Synthetic oligonucleotide
  Antisense strand to SEQ ID NO: 1638779
ucuuccaaugcauuacaaa

SEQ ID NO: 1638781 - RNA, 19 nt, Artificial Sequence
  Description of Artificial Sequence: Synthetic oligonucleotide
  Sense strand starting at position 3202 of SEQ ID NO: 1560989
uuguaaugcauuggaagaa

SEQ ID NO: 1638782 - RNA, 19 nt, Artificial Sequence
  Description of Artificial Sequence: Synthetic oligonucleotide
  Antisense strand to SEQ ID NO: 1638781
uucuuccaaugcauuacaa

SEQ ID NO: 1638783 - RNA, 19 nt, Artificial Sequence
  Description of Artificial Sequence: Synthetic oligonucleotide
  Sense strand starting at position 3203 of SEQ ID NO: 1560989
uguaaugcauuggaagaau

SEQ ID NO: 1638784 - RNA, 19 nt, Artificial Sequence
  Description of Artificial Sequence: Synthetic oligonucleotide
  Antisense strand to SEQ ID NO: 1638783
auucuuccaaugcauuaca

SEQ ID NO: 1638785 - RNA, 19 nt, Artificial Sequence
  Description of Artificial Sequence: Synthetic oligonucleotide
  Sense strand starting at position 3230 of SEQ ID NO: 1560989
cguaguaaucgcugugcgu

SEQ ID NO: 1638786 - RNA, 19 nt, Artificial Sequence
  Description of Artificial Sequence: Synthetic oligonucleotide
  Antisense strand to SEQ ID NO: 1638785
acgcacagcgauuacuacg

SEQ ID NO: 1638787 - RNA, 19 nt, Artificial Sequence
  Description of Artificial Sequence: Synthetic oligonucleotide
  Sense strand starting at position 3231 of SEQ ID NO: 1560989
guaguaaucgcugugcguc

SEQ ID NO: 1638788 - RNA, 19 nt, Artificial Sequence
  Description of Artificial Sequence: Synthetic oligonucleotide
  Antisense strand to SEQ ID NO: 1638787
gacgcacagcgauuacuac

SEQ ID NO: 1638789 - RNA, 19 nt, Artificial Sequence
  Description of Artificial Sequence: Synthetic oligonucleotide
  Sense strand starting at position 3232 of SEQ ID NO: 1560989
uaguaaucgcugugcgucu

SEQ ID NO: 1638790 - RNA, 19 nt, Artificial Sequence
  Description of Artificial Sequence: Synthetic oligonucleotide
  Antisense strand to SEQ ID NO: 1638789
agacgcacagcgauuacua

SEQ ID NO: 1638791 - RNA, 19 nt, Artificial Sequence
  Description of Artificial Sequence: Synthetic oligonucleotide
  Sense strand starting at position 3783 of SEQ ID NO: 1560989
aaagaagugcuucguguag

SEQ ID NO: 1638792 - RNA, 19 nt, Artificial Sequence
  Description of Artificial Sequence: Synthetic oligonucleotide
  Antisense strand to SEQ ID NO: 1638791
cuacacgaagcacuucuuu

SEQ ID NO: 1638793 - RNA, 19 nt, Artificial Sequence
  Description of Artificial Sequence: Synthetic oligonucleotide
  Sense strand starting at position 3794 of SEQ ID NO: 1560989
ucguguagggcagauugaa

SEQ ID NO: 1638794 - RNA, 19 nt, Artificial Sequence
  Description of Artificial Sequence: Synthetic oligonucleotide
  Antisense strand to SEQ ID NO: 1638793
uucaaucugcccuacacga

SEQ ID NO: 1638795 - RNA, 19 nt, Artificial Sequence
  Description of Artificial Sequence: Synthetic oligonucleotide
  Sense strand starting at position 3822 of SEQ ID NO: 1560989
uuugaaacuuuguggaauu

SEQ ID NO: 1638796 - RNA, 19 nt, Artificial Sequence
  Description of Artificial Sequence: Synthetic oligonucleotide
  Antisense strand to SEQ ID NO: 1638795
aauuccacaaaguuucaaa

SEQ ID NO: 1638797 - RNA, 19 nt, Artificial Sequence
  Description of Artificial Sequence: Synthetic oligonucleotide
  Sense strand starting at position 3823 of SEQ ID NO: 1560989
uugaaacuuuguggaauuu

SEQ ID NO: 1638798 - RNA, 19 nt, Artificial Sequence
  Description of Artificial Sequence: Synthetic oligonucleotide
  Antisense strand to SEQ ID NO: 1638797
aaauuccacaaaguuucaa

SEQ ID NO: 1638799 - RNA, 19 nt, Artificial Sequence
  Description of Artificial Sequence: Synthetic oligonucleotide
  Sense strand starting at position 3908 of SEQ ID NO: 1560989
gcaugaguaugaggcauga

SEQ ID NO: 1638800 - RNA, 19 nt, Artificial Sequence
  Description of Artificial Sequence: Synthetic oligonucleotide
  Antisense strand to SEQ ID NO: 1638799
ucaugccucauacucaugc

SEQ ID NO: 1638801 - RNA, 19 nt, Artificial Sequence
  Description of Artificial Sequence: Synthetic oligonucleotide
  Sense strand starting at position 3929 of SEQ ID NO: 1560989
caccgugccuugucuguua

SEQ ID NO: 1638802 - RNA, 19 nt, Artificial Sequence
  Description of Artificial Sequence: Synthetic oligonucleotide
  Antisense strand to SEQ ID NO: 1638801
uaacagacaaggcacggug

SEQ ID NO: 1638803 - RNA, 19 nt, Artificial Sequence
  Description of Artificial Sequence: Synthetic oligonucleotide
  Sense strand starting at position 3933 of SEQ ID NO: 1560989
gugccuugucuguuaugcu

SEQ ID NO: 1638804 - RNA, 19 nt, Artificial Sequence
  Description of Artificial Sequence: Synthetic oligonucleotide
  Antisense strand to SEQ ID NO: 1638803
agcauaacagacaaggcac

SEQ ID NO: 1638805 - RNA, 19 nt, Artificial Sequence
  Description of Artificial Sequence: Synthetic oligonucleotide
  Sense strand starting at position 3940 of SEQ ID NO: 1560989
gucuguuaugcucaccuuu

SEQ ID NO: 1638806 - RNA, 19 nt, Artificial Sequence
  Description of Artificial Sequence: Synthetic oligonucleotide
  Antisense strand to SEQ ID NO: 1638805
aaaggugagcauaacagac

SEQ ID NO: 1638807 - RNA, 19 nt, Artificial Sequence
  Description of Artificial Sequence: Synthetic oligonucleotide
  Sense strand starting at position 3942 of SEQ ID NO: 1560989
cuguuaugcucaccuuucu

SEQ ID NO: 1638808 - RNA, 19 nt, Artificial Sequence
  Description of Artificial Sequence: Synthetic oligonucleotide
  Antisense strand to SEQ ID NO: 1638807
agaaaggugagcauaacag

SEQ ID NO: 1638809 - RNA, 19 nt, Artificial Sequence
  Description of Artificial Sequence: Synthetic oligonucleotide
  Sense strand starting at position 443 of SEQ ID NO: 1560990
ucaugugauuccucugucu

SEQ ID NO: 1638810 - RNA, 19 nt, Artificial Sequence
  Description of Artificial Sequence: Synthetic oligonucleotide
  Antisense strand to SEQ ID NO: 1638809
agacagaggaaucacauga

SEQ ID NO: 1638811 - RNA, 19 nt, Artificial Sequence
  Description of Artificial Sequence: Synthetic oligonucleotide
  Sense strand starting at position 462 of SEQ ID NO: 1560990
cccggcuucuuggaguuau

SEQ ID NO: 1638812 - RNA, 19 nt, Artificial Sequence
  Description of Artificial Sequence: Synthetic oligonucleotide
  Antisense strand to SEQ ID NO: 1638811
auaacuccaagaagccggg

SEQ ID NO: 1638813 - RNA, 19 nt, Artificial Sequence
  Description of Artificial Sequence: Synthetic oligonucleotide
  Sense strand starting at position 732 of SEQ ID NO: 1560990
ucucgaagcgcagggauua

SEQ ID NO: 1638814 - RNA, 19 nt, Artificial Sequence
  Description of Artificial Sequence: Synthetic oligonucleotide
  Antisense strand to SEQ ID NO: 1638813
uaaucccugcgcuucgaga

SEQ ID NO: 1638815 - RNA, 19 nt, Artificial Sequence
  Description of Artificial Sequence: Synthetic oligonucleotide
  Sense strand starting at position 776 of SEQ ID NO: 1560990
gcuugaaguuauuguuccu

SEQ ID NO: 1638816 - RNA, 19 nt, Artificial Sequence
  Description of Artificial Sequence: Synthetic oligonucleotide
  Antisense strand to SEQ ID NO: 1638815
aggaacaauaacuucaagc

SEQ ID NO: 1638817 - RNA, 19 nt, Artificial Sequence
  Description of Artificial Sequence: Synthetic oligonucleotide
  Sense strand starting at position 1068 of SEQ ID NO: 1560990
ccaguucuguccuuaccaa

SEQ ID NO: 1638818 - RNA, 19 nt, Artificial Sequence
  Description of Artificial Sequence: Synthetic oligonucleotide
  Antisense strand to SEQ ID NO: 1638817
uugguaaggacagaacugg

SEQ ID NO: 1638819 - RNA, 19 nt, Artificial Sequence
  Description of Artificial Sequence: Synthetic oligonucleotide
  Sense strand starting at position 2129 of SEQ ID NO: 1560990
aggagagguccuggcucuu

SEQ ID NO: 1638820 - RNA, 19 nt, Artificial Sequence
  Description of Artificial Sequence: Synthetic oligonucleotide
  Antisense strand to SEQ ID NO: 1638819
aagagccaggaccucuccu

SEQ ID NO: 1638821 - RNA, 19 nt, Artificial Sequence
  Description of Artificial Sequence: Synthetic oligonucleotide
  Sense strand starting at position 2293 of SEQ ID NO: 1560990
gggcuagcuugaucaagug

SEQ ID NO: 1638822 - RNA, 19 nt, Artificial Sequence
  Description of Artificial Sequence: Synthetic oligonucleotide
  Antisense strand to SEQ ID NO: 1638821
cacuugaucaagcuagccc

SEQ ID NO: 1638823 - RNA, 19 nt, Artificial Sequence
  Description of Artificial Sequence: Synthetic oligonucleotide
  Sense strand starting at position 3260 of SEQ ID NO: 1560990
gggcauggucgguaacauu

SEQ ID NO: 1638824 - RNA, 19 nt, Artificial Sequence
  Description of Artificial Sequence: Synthetic oligonucleotide
  Antisense strand to SEQ ID NO: 1638823
aauguuaccgaccaugccc

SEQ ID NO: 1638825 - RNA, 19 nt, Artificial Sequence
  Description of Artificial Sequence: Synthetic oligonucleotide
  Sense strand starting at position 3263 of SEQ ID NO: 1560990
cauggucgguaacauuuau

SEQ ID NO: 1638826 - RNA, 19 nt, Artificial Sequence
  Description of Artificial Sequence: Synthetic oligonucleotide
  Antisense strand to SEQ ID NO: 1638825
auaaauguuaccgaccaug

SEQ ID NO: 1638827 - RNA, 19 nt, Artificial Sequence
  Description of Artificial Sequence: Synthetic oligonucleotide
  Sense strand starting at position 3270 of SEQ ID NO: 1560990
gguaacauuuauugcgcaa

SEQ ID NO: 1638828 - RNA, 19 nt, Artificial Sequence
  Description of Artificial Sequence: Synthetic oligonucleotide
  Antisense strand to SEQ ID NO: 1638827
uugcgcaauaaauguuacc

SEQ ID NO: 1638829 - RNA, 19 nt, Artificial Sequence
  Description of Artificial Sequence: Synthetic oligonucleotide
  Sense strand starting at position 3274 of SEQ ID NO: 1560990
acauuuauugcgcaacucu

SEQ ID NO: 1638830 - RNA, 19 nt, Artificial Sequence
  Description of Artificial Sequence: Synthetic oligonucleotide
  Antisense strand to SEQ ID NO: 1638829
agaguugcgcaauaaaugu

SEQ ID NO: 1638831 - RNA, 19 nt, Artificial Sequence
  Description of Artificial Sequence: Synthetic oligonucleotide
  Sense strand starting at position 3510 of SEQ ID NO: 1560990
gacggugcuucuugugacu

SEQ ID NO: 1638832 - RNA, 19 nt, Artificial Sequence
  Description of Artificial Sequence: Synthetic oligonucleotide
  Antisense strand to SEQ ID NO: 1638831
agucacaagaagcaccguc

SEQ ID NO: 1638833 - RNA, 19 nt, Artificial Sequence
  Description of Artificial Sequence: Synthetic oligonucleotide
  Sense strand starting at position 3512 of SEQ ID NO: 1560990
cggugcuucuugugacuuu

SEQ ID NO: 1638834 - RNA, 19 nt, Artificial Sequence
  Description of Artificial Sequence: Synthetic oligonucleotide
  Antisense strand to SEQ ID NO: 1638833
aaagucacaagaagcaccg

SEQ ID NO: 1638835 - RNA, 19 nt, Artificial Sequence
  Description of Artificial Sequence: Synthetic oligonucleotide
  Sense strand starting at position 3519 of SEQ ID NO: 1560990
ucuugugacuuucgauuaa

SEQ ID NO: 1638836 - RNA, 19 nt, Artificial Sequence
  Description of Artificial Sequence: Synthetic oligonucleotide
  Antisense strand to SEQ ID NO: 1638835
uuaaucgaaagucacaaga

SEQ ID NO: 1638837 - RNA, 19 nt, Artificial Sequence
  Description of Artificial Sequence: Synthetic oligonucleotide
  Sense strand starting at position 3530 of SEQ ID NO: 1560990
ucgauuaauuucugggaac

SEQ ID NO: 1638838 - RNA, 19 nt, Artificial Sequence
  Description of Artificial Sequence: Synthetic oligonucleotide
  Antisense strand to SEQ ID NO: 1638837
guucccagaaauuaaucga

SEQ ID NO: 1638839 - RNA, 19 nt, Artificial Sequence
  Description of Artificial Sequence: Synthetic oligonucleotide
  Sense strand starting at position 3531 of SEQ ID NO: 1560990
cgauuaauuucugggaacg

SEQ ID NO: 1638840 - RNA, 19 nt, Artificial Sequence
  Description of Artificial Sequence: Synthetic oligonucleotide
  Antisense strand to SEQ ID NO: 1638839
cguucccagaaauuaaucg

SEQ ID NO: 1638841 - RNA, 19 nt, Artificial Sequence
  Description of Artificial Sequence: Synthetic oligonucleotide
  Sense strand starting at position 3533 of SEQ ID NO: 1560990
auuaauuucugggaacgga

SEQ ID NO: 1638842 - RNA, 19 nt, Artificial Sequence
  Description of Artificial Sequence: Synthetic oligonucleotide
  Antisense strand to SEQ ID NO: 1638841
uccguucccagaaauuaau

SEQ ID NO: 1638843 - RNA, 19 nt, Artificial Sequence
  Description of Artificial Sequence: Synthetic oligonucleotide
  Sense strand starting at position 3543 of SEQ ID NO: 1560990
gggaacggaucuugaguga

SEQ ID NO: 1638844 - RNA, 19 nt, Artificial Sequence
  Description of Artificial Sequence: Synthetic oligonucleotide
  Antisense strand to SEQ ID NO: 1638843
ucacucaagauccguuccc

SEQ ID NO: 1638845 - RNA, 19 nt, Artificial Sequence
  Description of Artificial Sequence: Synthetic oligonucleotide
  Sense strand starting at position 3556 of SEQ ID NO: 1560990
gagugaugcgcgggucacu

SEQ ID NO: 1638846 - RNA, 19 nt, Artificial Sequence
  Description of Artificial Sequence: Synthetic oligonucleotide
  Antisense strand to SEQ ID NO: 1638845
agugacccgcgcaucacuc

SEQ ID NO: 1638847 - RNA, 19 nt, Artificial Sequence
  Description of Artificial Sequence: Synthetic oligonucleotide
  Sense strand starting at position 3790 of SEQ ID NO: 1560990
aaacuuguccuuggaagug

SEQ ID NO: 1638848 - RNA, 19 nt, Artificial Sequence
  Description of Artificial Sequence: Synthetic oligonucleotide
  Antisense strand to SEQ ID NO: 1638847
cacuuccaaggacaaguuu

SEQ ID NO: 1638849 - RNA, 19 nt, Artificial Sequence
  Description of Artificial Sequence: Synthetic oligonucleotide
  Sense strand starting at position 3819 of SEQ ID NO: 1560990
gggcgaugcggguguugua

SEQ ID NO: 1638850 - RNA, 19 nt, Artificial Sequence
  Description of Artificial Sequence: Synthetic oligonucleotide
  Antisense strand to SEQ ID NO: 1638849
uacaacacccgcaucgccc

SEQ ID NO: 1638851 - RNA, 19 nt, Artificial Sequence
  Description of Artificial Sequence: Synthetic oligonucleotide
  Sense strand starting at position 3832 of SEQ ID NO: 1560990
guuguauucgggcagccuu

SEQ ID NO: 1638852 - RNA, 19 nt, Artificial Sequence
  Description of Artificial Sequence: Synthetic oligonucleotide
  Antisense strand to SEQ ID NO: 1638851
aaggcugcccgaauacaac

SEQ ID NO: 1638853 - RNA, 19 nt, Artificial Sequence
  Description of Artificial Sequence: Synthetic oligonucleotide
  Sense strand starting at position 2116 of SEQ ID NO: 1560991
ugggcuggacuccaugauu

SEQ ID NO: 1638854 - RNA, 19 nt, Artificial Sequence
  Description of Artificial Sequence: Synthetic oligonucleotide
  Antisense strand to SEQ ID NO: 1638853
aaucauggaguccagccca

SEQ ID NO: 1638855 - RNA, 19 nt, Artificial Sequence
  Description of Artificial Sequence: Synthetic oligonucleotide
  Sense strand starting at position 2127 of SEQ ID NO: 1560991
ccaugauugcucugcguac

SEQ ID NO: 1638856 - RNA, 19 nt, Artificial Sequence
  Description of Artificial Sequence: Synthetic oligonucleotide
  Antisense strand to SEQ ID NO: 1638855
guacgcagagcaaucaugg

SEQ ID NO: 1638857 - RNA, 19 nt, Artificial Sequence
  Description of Artificial Sequence: Synthetic oligonucleotide
  Sense strand starting at position 2128 of SEQ ID NO: 1560991
caugauugcucugcguaca

SEQ ID NO: 1638858 - RNA, 19 nt, Artificial Sequence
  Description of Artificial Sequence: Synthetic oligonucleotide
  Antisense strand to SEQ ID NO: 1638857
uguacgcagagcaaucaug

SEQ ID NO: 1638859 - RNA, 19 nt, Artificial Sequence
  Description of Artificial Sequence: Synthetic oligonucleotide
  Sense strand starting at position 2164 of SEQ ID NO: 1560991
acgguuucucauuggguca

SEQ ID NO: 1638860 - RNA, 19 nt, Artificial Sequence
  Description of Artificial Sequence: Synthetic oligonucleotide
  Antisense strand to SEQ ID NO: 1638859
ugacccaaugagaaaccgu

SEQ ID NO: 1638861 - RNA, 19 nt, Artificial Sequence
  Description of Artificial Sequence: Synthetic oligonucleotide
  Sense strand starting at position 2310 of SEQ ID NO: 1560991
cugggaaugaagcgaugua

SEQ ID NO: 1638862 - RNA, 19 nt, Artificial Sequence
  Description of Artificial Sequence: Synthetic oligonucleotide
  Antisense strand to SEQ ID NO: 1638861
uacaucgcuucauucccag

SEQ ID NO: 1638863 - RNA, 19 nt, Artificial Sequence
  Description of Artificial Sequence: Synthetic oligonucleotide
  Sense strand starting at position 2692 of SEQ ID NO: 1560991
gcgguuucccggaggccua

SEQ ID NO: 1638864 - RNA, 19 nt, Artificial Sequence
  Description of Artificial Sequence: Synthetic oligonucleotide
  Antisense strand to SEQ ID NO: 1638863
uaggccuccgggaaaccgc

SEQ ID NO: 1638865 - RNA, 19 nt, Artificial Sequence
  Description of Artificial Sequence: Synthetic oligonucleotide
  Sense strand starting at position 2839 of SEQ ID NO: 1560991
ucugcauucccacagguaa

SEQ ID NO: 1638866 - RNA, 19 nt, Artificial Sequence
  Description of Artificial Sequence: Synthetic oligonucleotide
  Antisense strand to SEQ ID NO: 1638865
uuaccugugggaaugcaga

SEQ ID NO: 1638867 - RNA, 19 nt, Artificial Sequence
  Description of Artificial Sequence: Synthetic oligonucleotide
  Sense strand starting at position 2850 of SEQ ID NO: 1560991
acagguaaagauuguuaaa

SEQ ID NO: 1638868 - RNA, 19 nt, Artificial Sequence
  Description of Artificial Sequence: Synthetic oligonucleotide
  Antisense strand to SEQ ID NO: 1638867
uuuaacaaucuuuaccugu

SEQ ID NO: 1638869 - RNA, 19 nt, Artificial Sequence
  Description of Artificial Sequence: Synthetic oligonucleotide
  Sense strand starting at position 2853 of SEQ ID NO: 1560991
gguaaagauuguuaaagga

SEQ ID NO: 1638870 - RNA, 19 nt, Artificial Sequence
  Description of Artificial Sequence: Synthetic oligonucleotide
  Antisense strand to SEQ ID NO: 1638869
uccuuuaacaaucuuuacc

SEQ ID NO: 1638871 - RNA, 19 nt, Artificial Sequence
  Description of Artificial Sequence: Synthetic oligonucleotide
  Sense strand starting at position 2874 of SEQ ID NO: 1560991
acucuuaagcaccgagaga

SEQ ID NO: 1638872 - RNA, 19 nt, Artificial Sequence
  Description of Artificial Sequence: Synthetic oligonucleotide
  Antisense strand to SEQ ID NO: 1638871
ucucucggugcuuaagagu

SEQ ID NO: 1638873 - RNA, 19 nt, Artificial Sequence
  Description of Artificial Sequence: Synthetic oligonucleotide
  Sense strand starting at position 2875 of SEQ ID NO: 1560991
cucuuaagcaccgagagau

SEQ ID NO: 1638874 - RNA, 19 nt, Artificial Sequence
  Description of Artificial Sequence: Synthetic oligonucleotide
  Antisense strand to SEQ ID NO: 1638873
aucucucggugcuuaagag

SEQ ID NO: 1638875 - RNA, 19 nt, Artificial Sequence
  Description of Artificial Sequence: Synthetic oligonucleotide
  Sense strand starting at position 2887 of SEQ ID NO: 1560991
gagagauguuccggauucu

SEQ ID NO: 1638876 - RNA, 19 nt, Artificial Sequence
  Description of Artificial Sequence: Synthetic oligonucleotide
  Antisense strand to SEQ ID NO: 1638875
agaauccggaacaucucuc

SEQ ID NO: 1638877 - RNA, 19 nt, Artificial Sequence
  Description of Artificial Sequence: Synthetic oligonucleotide
  Sense strand starting at position 2888 of SEQ ID NO: 1560991
agagauguuccggauucug

SEQ ID NO: 1638878 - RNA, 19 nt, Artificial Sequence
  Description of Artificial Sequence: Synthetic oligonucleotide
  Antisense strand to SEQ ID NO: 1638877
cagaauccggaacaucucu

SEQ ID NO: 1638879 - RNA, 19 nt, Artificial Sequence
  Description of Artificial Sequence: Synthetic oligonucleotide
  Sense strand starting at position 2896 of SEQ ID NO: 1560991
uccggauucugagucuguu

SEQ ID NO: 1638880 - RNA, 19 nt, Artificial Sequence
  Description of Artificial Sequence: Synthetic oligonucleotide
  Antisense strand to SEQ ID NO: 1638879
aacagacucagaauccgga

SEQ ID NO: 1638881 - RNA, 19 nt, Artificial Sequence
  Description of Artificial Sequence: Synthetic oligonucleotide
  Sense strand starting at position 3037 of SEQ ID NO: 1560991
acgggucuucgcugaggau

SEQ ID NO: 1638882 - RNA, 19 nt, Artificial Sequence
  Description of Artificial Sequence: Synthetic oligonucleotide
  Antisense strand to SEQ ID NO: 1638881
auccucagcgaagacccgu

SEQ ID NO: 1638883 - RNA, 19 nt, Artificial Sequence
  Description of Artificial Sequence: Synthetic oligonucleotide
  Sense strand starting at position 3038 of SEQ ID NO: 1560991
cgggucuucgcugaggauu

SEQ ID NO: 1638884 - RNA, 19 nt, Artificial Sequence
  Description of Artificial Sequence: Synthetic oligonucleotide
  Antisense strand to SEQ ID NO: 1638883
aauccucagcgaagacccg

SEQ ID NO: 1638885 - RNA, 19 nt, Artificial Sequence
  Description of Artificial Sequence: Synthetic oligonucleotide
  Sense strand starting at position 3040 of SEQ ID NO: 1560991
ggucuucgcugaggauuua

SEQ ID NO: 1638886 - RNA, 19 nt, Artificial Sequence
  Description of Artificial Sequence: Synthetic oligonucleotide
  Antisense strand to SEQ ID NO: 1638885
uaaauccucagcgaagacc

SEQ ID NO: 1638887 - RNA, 19 nt, Artificial Sequence
  Description of Artificial Sequence: Synthetic oligonucleotide
  Sense strand starting at position 3132 of SEQ ID NO: 1560991
guugauggguuucauggau

SEQ ID NO: 1638888 - RNA, 19 nt, Artificial Sequence
  Description of Artificial Sequence: Synthetic oligonucleotide
  Antisense strand to SEQ ID NO: 1638887
auccaugaaacccaucaac

SEQ ID NO: 1638889 - RNA, 19 nt, Artificial Sequence
  Description of Artificial Sequence: Synthetic oligonucleotide
  Sense strand starting at position 3197 of SEQ ID NO: 1560991
agaguagagcaguggauau

SEQ ID NO: 1638890 - RNA, 19 nt, Artificial Sequence
  Description of Artificial Sequence: Synthetic oligonucleotide
  Antisense strand to SEQ ID NO: 1638889
auauccacugcucuacucu

SEQ ID NO: 1638891 - RNA, 19 nt, Artificial Sequence
  Description of Artificial Sequence: Synthetic oligonucleotide
  Sense strand starting at position 3552 of SEQ ID NO: 1560991
gcuguuacguuucgagauc

SEQ ID NO: 1638892 - RNA, 19 nt, Artificial Sequence
  Description of Artificial Sequence: Synthetic oligonucleotide
  Antisense strand to SEQ ID NO: 1638891
gaucucgaaacguaacagc

SEQ ID NO: 1638893 - RNA, 19 nt, Artificial Sequence
  Description of Artificial Sequence: Synthetic oligonucleotide
  Sense strand starting at position 3553 of SEQ ID NO: 1560991
cuguuacguuucgagauca

SEQ ID NO: 1638894 - RNA, 19 nt, Artificial Sequence
  Description of Artificial Sequence: Synthetic oligonucleotide
  Antisense strand to SEQ ID NO: 1638893
ugaucucgaaacguaacag

SEQ ID NO: 1638895 - RNA, 19 nt, Artificial Sequence
  Description of Artificial Sequence: Synthetic oligonucleotide
  Sense strand starting at position 3712 of SEQ ID NO: 1560991
ccuugaccauuguguggaa

SEQ ID NO: 1638896 - RNA, 19 nt, Artificial Sequence
  Description of Artificial Sequence: Synthetic oligonucleotide
  Antisense strand to SEQ ID NO: 1638895
uuccacacaauggucaagg

SEQ ID NO: 1638897 - RNA, 19 nt, Artificial Sequence
  Description of Artificial Sequence: Synthetic oligonucleotide
  Sense strand starting at position 6 of SEQ ID NO: 1560992
aaauguguucugggaggcu

SEQ ID NO: 1638898 - RNA, 19 nt, Artificial Sequence
  Description of Artificial Sequence: Synthetic oligonucleotide
  Antisense strand to SEQ ID NO: 1638897
agccucccagaacacauuu

SEQ ID NO: 1638899 - RNA, 19 nt, Artificial Sequence
  Description of Artificial Sequence: Synthetic oligonucleotide
  Sense strand starting at position 93 of SEQ ID NO: 1560992
gcuacaccugcucagagaa

SEQ ID NO: 1638900 - RNA, 19 nt, Artificial Sequence
  Description of Artificial Sequence: Synthetic oligonucleotide
  Antisense strand to SEQ ID NO: 1638899
uucucugagcagguguagc

SEQ ID NO: 1638901 - RNA, 19 nt, Artificial Sequence
  Description of Artificial Sequence: Synthetic oligonucleotide
  Sense strand starting at position 121 of SEQ ID NO: 1560992
gaggaaaugucccagaaag

SEQ ID NO: 1638902 - RNA, 19 nt, Artificial Sequence
  Description of Artificial Sequence: Synthetic oligonucleotide
  Antisense strand to SEQ ID NO: 1638901
cuuucugggacauuuccuc

SEQ ID NO: 1638903 - RNA, 19 nt, Artificial Sequence
  Description of Artificial Sequence: Synthetic oligonucleotide
  Sense strand starting at position 256 of SEQ ID NO: 1560992
cugugauccucugucccaa

SEQ ID NO: 1638904 - RNA, 19 nt, Artificial Sequence
  Description of Artificial Sequence: Synthetic oligonucleotide
  Antisense strand to SEQ ID NO: 1638903
uugggacagaggaucacag

SEQ ID NO: 1638905 - RNA, 19 nt, Artificial Sequence
  Description of Artificial Sequence: Synthetic oligonucleotide
  Sense strand starting at position 294 of SEQ ID NO: 1560992
guuauaauccuguaauucc

SEQ ID NO: 1638906 - RNA, 19 nt, Artificial Sequence
  Description of Artificial Sequence: Synthetic oligonucleotide
  Antisense strand to SEQ ID NO: 1638905
ggaauuacaggauuauaac

SEQ ID NO: 1638907 - RNA, 19 nt, Artificial Sequence
  Description of Artificial Sequence: Synthetic oligonucleotide
  Sense strand starting at position 302 of SEQ ID NO: 1560992
ccuguaauuccaugaugac

SEQ ID NO: 1638908 - RNA, 19 nt, Artificial Sequence
  Description of Artificial Sequence: Synthetic oligonucleotide
  Antisense strand to SEQ ID NO: 1638907
gucaucauggaauuacagg

SEQ ID NO: 1638909 - RNA, 19 nt, Artificial Sequence
  Description of Artificial Sequence: Synthetic oligonucleotide
  Sense strand starting at position 305 of SEQ ID NO: 1560992
guaauuccaugaugacauc

SEQ ID NO: 1638910 - RNA, 19 nt, Artificial Sequence
  Description of Artificial Sequence: Synthetic oligonucleotide
  Antisense strand to SEQ ID NO: 1638909
gaugucaucauggaauuac

SEQ ID NO: 1638911 - RNA, 19 nt, Artificial Sequence
  Description of Artificial Sequence: Synthetic oligonucleotide
  Sense strand starting at position 429 of SEQ ID NO: 1560992
gcuccucaccagugagcaa

SEQ ID NO: 1638912 - RNA, 19 nt, Artificial Sequence
  Description of Artificial Sequence: Synthetic oligonucleotide
  Antisense strand to SEQ ID NO: 1638911
uugcucacuggugaggagc

SEQ ID NO: 1638913 - RNA, 19 nt, Artificial Sequence
  Description of Artificial Sequence: Synthetic oligonucleotide
  Sense strand starting at position 460 of SEQ ID NO: 1560992
cucugugucaccugggaga

SEQ ID NO: 1638914 - RNA, 19 nt, Artificial Sequence
  Description of Artificial Sequence: Synthetic oligonucleotide
  Antisense strand to SEQ ID NO: 1638913
ucucccaggugacacagag

SEQ ID NO: 1638915 - RNA, 19 nt, Artificial Sequence
  Description of Artificial Sequence: Synthetic oligonucleotide
  Sense strand starting at position 512 of SEQ ID NO: 1560992
auccuaaggcuuugaacaa

SEQ ID NO: 1638916 - RNA, 19 nt, Artificial Sequence
  Description of Artificial Sequence: Synthetic oligonucleotide
  Antisense strand to SEQ ID NO: 1638915
uuguucaaagccuuaggau

SEQ ID NO: 1638917 - RNA, 19 nt, Artificial Sequence
  Description of Artificial Sequence: Synthetic oligonucleotide
  Sense strand starting at position 513 of SEQ ID NO: 1560992
uccuaaggcuuugaacaau

SEQ ID NO: 1638918 - RNA, 19 nt, Artificial Sequence
  Description of Artificial Sequence: Synthetic oligonucleotide
  Antisense strand to SEQ ID NO: 1638917
auuguucaaagccuuagga

SEQ ID NO: 1638919 - RNA, 19 nt, Artificial Sequence
  Description of Artificial Sequence: Synthetic oligonucleotide
  Sense strand starting at position 533 of SEQ ID NO: 1560992
aagaauugauucguuuaug

SEQ ID NO: 1638920 - RNA, 19 nt, Artificial Sequence
  Description of Artificial Sequence: Synthetic oligonucleotide
  Antisense strand to SEQ ID NO: 1638919
cauaaacgaaucaauucuu

SEQ ID NO: 1638921 - RNA, 19 nt, Artificial Sequence
  Description of Artificial Sequence: Synthetic oligonucleotide
  Sense strand starting at position 536 of SEQ ID NO: 1560992
aauugauucguuuauggga

SEQ ID NO: 1638922 - RNA, 19 nt, Artificial Sequence
  Description of Artificial Sequence: Synthetic oligonucleotide
  Antisense strand to SEQ ID NO: 1638921
ucccauaaacgaaucaauu

SEQ ID NO: 1638923 - RNA, 19 nt, Artificial Sequence
  Description of Artificial Sequence: Synthetic oligonucleotide
  Sense strand starting at position 539 of SEQ ID NO: 1560992
ugauucguuuaugggaaag

SEQ ID NO: 1638924 - RNA, 19 nt, Artificial Sequence
  Description of Artificial Sequence: Synthetic oligonucleotide
  Antisense strand to SEQ ID NO: 1638923
cuuucccauaaacgaauca

SEQ ID NO: 1638925 - RNA, 19 nt, Artificial Sequence
  Description of Artificial Sequence: Synthetic oligonucleotide
  Sense strand starting at position 541 of SEQ ID NO: 1560992
auucguuuaugggaaaguu

SEQ ID NO: 1638926 - RNA, 19 nt, Artificial Sequence
  Description of Artificial Sequence: Synthetic oligonucleotide
  Antisense strand to SEQ ID NO: 1638925
aacuuucccauaaacgaau

SEQ ID NO: 1638927 - RNA, 19 nt, Artificial Sequence
  Description of Artificial Sequence: Synthetic oligonucleotide
  Sense strand starting at position 574 of SEQ ID NO: 1560992
auaauuaugcacugucgua

SEQ ID NO: 1638928 - RNA, 19 nt, Artificial Sequence
  Description of Artificial Sequence: Synthetic oligonucleotide
  Antisense strand to SEQ ID NO: 1638927
uacgacagugcauaauuau

SEQ ID NO: 1638929 - RNA, 19 nt, Artificial Sequence
  Description of Artificial Sequence: Synthetic oligonucleotide
  Sense strand starting at position 634 of SEQ ID NO: 1560992
cucagugaucccuggccaa

SEQ ID NO: 1638930 - RNA, 19 nt, Artificial Sequence
  Description of Artificial Sequence: Synthetic oligonucleotide
  Antisense strand to SEQ ID NO: 1638929
uuggccagggaucacugag

SEQ ID NO: 1638931 - RNA, 19 nt, Artificial Sequence
  Description of Artificial Sequence: Synthetic oligonucleotide
  Sense strand starting at position 670 of SEQ ID NO: 1560992
uagacuugcucaggaccua

SEQ ID NO: 1638932 - RNA, 19 nt, Artificial Sequence
  Description of Artificial Sequence: Synthetic oligonucleotide
  Antisense strand to SEQ ID NO: 1638931
uagguccugagcaagucua

SEQ ID NO: 1638933 - RNA, 19 nt, Artificial Sequence
  Description of Artificial Sequence: Synthetic oligonucleotide
  Sense strand starting at position 812 of SEQ ID NO: 1560992
gacugagcucccugacugu

SEQ ID NO: 1638934 - RNA, 19 nt, Artificial Sequence
  Description of Artificial Sequence: Synthetic oligonucleotide
  Antisense strand to SEQ ID NO: 1638933
acagucagggagcucaguc

SEQ ID NO: 1638935 - RNA, 19 nt, Artificial Sequence
  Description of Artificial Sequence: Synthetic oligonucleotide
  Sense strand starting at position 815 of SEQ ID NO: 1560992
ugagcucccugacuguuau

SEQ ID NO: 1638936 - RNA, 19 nt, Artificial Sequence
  Description of Artificial Sequence: Synthetic oligonucleotide
  Antisense strand to SEQ ID NO: 1638935
auaacagucagggagcuca

SEQ ID NO: 1638937 - RNA, 19 nt, Artificial Sequence
  Description of Artificial Sequence: Synthetic oligonucleotide
  Sense strand starting at position 828 of SEQ ID NO: 1560992
uguuaucuucugggcccaa

SEQ ID NO: 1638938 - RNA, 19 nt, Artificial Sequence
  Description of Artificial Sequence: Synthetic oligonucleotide
  Antisense strand to SEQ ID NO: 1638937
uugggcccagaagauaaca

SEQ ID NO: 1638939 - RNA, 19 nt, Artificial Sequence
  Description of Artificial Sequence: Synthetic oligonucleotide
  Sense strand starting at position 929 of SEQ ID NO: 1560992
ccaagucucccggacaaca

SEQ ID NO: 1638940 - RNA, 19 nt, Artificial Sequence
  Description of Artificial Sequence: Synthetic oligonucleotide
  Antisense strand to SEQ ID NO: 1638939
uguuguccgggagacuugg

SEQ ID NO: 1638941 - RNA, 19 nt, Artificial Sequence
  Description of Artificial Sequence: Synthetic oligonucleotide
  Sense strand starting at position 1214 of SEQ ID NO: 1560992
ccaagaguucgcgaccagu

SEQ ID NO: 1638942 - RNA, 19 nt, Artificial Sequence
  Description of Artificial Sequence: Synthetic oligonucleotide
  Antisense strand to SEQ ID NO: 1638941
acuggucgcgaacucuugg

SEQ ID NO: 1638943 - RNA, 19 nt, Artificial Sequence
  Description of Artificial Sequence: Synthetic oligonucleotide
  Sense strand starting at position 1362 of SEQ ID NO: 1560992
gcuauaaucgcgccacucu

SEQ ID NO: 1638944 - RNA, 19 nt, Artificial Sequence
  Description of Artificial Sequence: Synthetic oligonucleotide
  Antisense strand to SEQ ID NO: 1638943
agaguggcgcgauuauagc

SEQ ID NO: 1638945 - RNA, 19 nt, Artificial Sequence
  Description of Artificial Sequence: Synthetic oligonucleotide
  Sense strand starting at position 1363 of SEQ ID NO: 1560992
cuauaaucgcgccacucua

SEQ ID NO: 1638946 - RNA, 19 nt, Artificial Sequence
  Description of Artificial Sequence: Synthetic oligonucleotide
  Antisense strand to SEQ ID NO: 1638945
uagaguggcgcgauuauag

SEQ ID NO: 1638947 - RNA, 19 nt, Artificial Sequence
  Description of Artificial Sequence: Synthetic oligonucleotide
  Sense strand starting at position 2533 of SEQ ID NO: 1560992
gcuuguuggcaugggauca

SEQ ID NO: 1638948 - RNA, 19 nt, Artificial Sequence
  Description of Artificial Sequence: Synthetic oligonucleotide
  Antisense strand to SEQ ID NO: 1638947
ugaucccaugccaacaagc

SEQ ID NO: 1638949 - RNA, 19 nt, Artificial Sequence
  Description of Artificial Sequence: Synthetic oligonucleotide
  Sense strand starting at position 2534 of SEQ ID NO: 1560992
cuuguuggcaugggaucaa

SEQ ID NO: 1638950 - RNA, 19 nt, Artificial Sequence
  Description of Artificial Sequence: Synthetic oligonucleotide
  Antisense strand to SEQ ID NO: 1638949
uugaucccaugccaacaag

SEQ ID NO: 1638951 - RNA, 19 nt, Artificial Sequence
  Description of Artificial Sequence: Synthetic oligonucleotide
  Sense strand starting at position 2545 of SEQ ID NO: 1560992
gggaucaacucagccgauu

SEQ ID NO: 1638952 - RNA, 19 nt, Artificial Sequence
  Description of Artificial Sequence: Synthetic oligonucleotide
  Antisense strand to SEQ ID NO: 1638951
aaucggcugaguugauccc

SEQ ID NO: 1638953 - RNA, 19 nt, Artificial Sequence
  Description of Artificial Sequence: Synthetic oligonucleotide
  Sense strand starting at position 2604 of SEQ ID NO: 1560992
cgcggacugcccugagaga

SEQ ID NO: 1638954 - RNA, 19 nt, Artificial Sequence
  Description of Artificial Sequence: Synthetic oligonucleotide
  Antisense strand to SEQ ID NO: 1638953
ucucucagggcaguccgcg

SEQ ID NO: 1638955 - RNA, 19 nt, Artificial Sequence
  Description of Artificial Sequence: Synthetic oligonucleotide
  Sense strand starting at position 2655 of SEQ ID NO: 1560992
ggcagauguccuugagcac

SEQ ID NO: 1638956 - RNA, 19 nt, Artificial Sequence
  Description of Artificial Sequence: Synthetic oligonucleotide
  Antisense strand to SEQ ID NO: 1638955
gugcucaaggacaucugcc

SEQ ID NO: 1638957 - RNA, 19 nt, Artificial Sequence
  Description of Artificial Sequence: Synthetic oligonucleotide
  Sense strand starting at position 2656 of SEQ ID NO: 1560992
gcagauguccuugagcaca

SEQ ID NO: 1638958 - RNA, 19 nt, Artificial Sequence
  Description of Artificial Sequence: Synthetic oligonucleotide
  Antisense strand to SEQ ID NO: 1638957
ugugcucaaggacaucugc

SEQ ID NO: 1638959 - RNA, 19 nt, Artificial Sequence
  Description of Artificial Sequence: Synthetic oligonucleotide
  Sense strand starting at position 2732 of SEQ ID NO: 1560992
gcgaucucgacucuuugca

SEQ ID NO: 1638960 - RNA, 19 nt, Artificial Sequence
  Description of Artificial Sequence: Synthetic oligonucleotide
  Antisense strand to SEQ ID NO: 1638959
ugcaaagagucgagaucgc

SEQ ID NO: 1638961 - RNA, 19 nt, Artificial Sequence
  Description of Artificial Sequence: Synthetic oligonucleotide
  Sense strand starting at position 3162 of SEQ ID NO: 1560992
gucucaccaugauaucaag

SEQ ID NO: 1638962 - RNA, 19 nt, Artificial Sequence
  Description of Artificial Sequence: Synthetic oligonucleotide
  Antisense strand to SEQ ID NO: 1638961
cuugauaucauggugagac

SEQ ID NO: 1638963 - RNA, 19 nt, Artificial Sequence
  Description of Artificial Sequence: Synthetic oligonucleotide
  Sense strand starting at position 3202 of SEQ ID NO: 1560992
uuaagugauccucacucgu

SEQ ID NO: 1638964 - RNA, 19 nt, Artificial Sequence
  Description of Artificial Sequence: Synthetic oligonucleotide
  Antisense strand to SEQ ID NO: 1638963
acgagugaggaucacuuaa

SEQ ID NO: 1638965 - RNA, 19 nt, Artificial Sequence
  Description of Artificial Sequence: Synthetic oligonucleotide
  Sense strand starting at position 3204 of SEQ ID NO: 1560992
aagugauccucacucgucu

SEQ ID NO: 1638966 - RNA, 19 nt, Artificial Sequence
  Description of Artificial Sequence: Synthetic oligonucleotide
  Antisense strand to SEQ ID NO: 1638965
agacgagugaggaucacuu

SEQ ID NO: 1638967 - RNA, 19 nt, Artificial Sequence
  Description of Artificial Sequence: Synthetic oligonucleotide
  Sense strand starting at position 3599 of SEQ ID NO: 1560992
aagugaguguuggaaagua

SEQ ID NO: 1638968 - RNA, 19 nt, Artificial Sequence
  Description of Artificial Sequence: Synthetic oligonucleotide
  Antisense strand to SEQ ID NO: 1638967
uacuuuccaacacucacuu

SEQ ID NO: 1638969 - RNA, 19 nt, Artificial Sequence
  Description of Artificial Sequence: Synthetic oligonucleotide
  Sense strand starting at position 3623 of SEQ ID NO: 1560992
gaacuuaguuuaggaggga

SEQ ID NO: 1638970 - RNA, 19 nt, Artificial Sequence
  Description of Artificial Sequence: Synthetic oligonucleotide
  Antisense strand to SEQ ID NO: 1638969
ucccuccuaaacuaaguuc

SEQ ID NO: 1638971 - RNA, 19 nt, Artificial Sequence
  Description of Artificial Sequence: Synthetic oligonucleotide
  Sense strand starting at position 3624 of SEQ ID NO: 1560992
aacuuaguuuaggagggaa

SEQ ID NO: 1638972 - RNA, 19 nt, Artificial Sequence
  Description of Artificial Sequence: Synthetic oligonucleotide
  Antisense strand to SEQ ID NO: 1638971
uucccuccuaaacuaaguu

SEQ ID NO: 1638973 - RNA, 19 nt, Artificial Sequence
  Description of Artificial Sequence: Synthetic oligonucleotide
  Sense strand starting at position 3840 of SEQ ID NO: 1560992
cucagcggucgcgauagau

SEQ ID NO: 1638974 - RNA, 19 nt, Artificial Sequence
  Description of Artificial Sequence: Synthetic oligonucleotide
  Antisense strand to SEQ ID NO: 1638973
aucuaucgcgaccgcugag

SEQ ID NO: 1638975 - RNA, 19 nt, Artificial Sequence
  Description of Artificial Sequence: Synthetic oligonucleotide
  Sense strand starting at position 3902 of SEQ ID NO: 1560992
gcguuaacauaucuuuaaa

SEQ ID NO: 1638976 - RNA, 19 nt, Artificial Sequence
  Description of Artificial Sequence: Synthetic oligonucleotide
  Antisense strand to SEQ ID NO: 1638975
uuuaaagauauguuaacgc

SEQ ID NO: 1638977 - RNA, 19 nt, Artificial Sequence
  Description of Artificial Sequence: Synthetic oligonucleotide
  Sense strand starting at position 331 of SEQ ID NO: 1560993
uucuguagugagggaggua

SEQ ID NO: 1638978 - RNA, 19 nt, Artificial Sequence
  Description of Artificial Sequence: Synthetic oligonucleotide
  Antisense strand to SEQ ID NO: 1638977
uaccucccucacuacagaa

SEQ ID NO: 1638979 - RNA, 19 nt, Artificial Sequence
  Description of Artificial Sequence: Synthetic oligonucleotide
  Sense strand starting at position 332 of SEQ ID NO: 1560993
ucuguagugagggagguau

SEQ ID NO: 1638980 - RNA, 19 nt, Artificial Sequence
  Description of Artificial Sequence: Synthetic oligonucleotide
  Antisense strand to SEQ ID NO: 1638979
auaccucccucacuacaga

SEQ ID NO: 1638981 - RNA, 19 nt, Artificial Sequence
  Description of Artificial Sequence: Synthetic oligonucleotide
  Sense strand starting at position 510 of SEQ ID NO: 1560993
ggagaaagguaagacucaa

SEQ ID NO: 1638982 - RNA, 19 nt, Artificial Sequence
  Description of Artificial Sequence: Synthetic oligonucleotide
  Antisense strand to SEQ ID NO: 1638981
uugagucuuaccuuucucc

SEQ ID NO: 1638983 - RNA, 19 nt, Artificial Sequence
  Description of Artificial Sequence: Synthetic oligonucleotide
  Sense strand starting at position 543 of SEQ ID NO: 1560993
ucgggucauguucaagaua

SEQ ID NO: 1638984 - RNA, 19 nt, Artificial Sequence
  Description of Artificial Sequence: Synthetic oligonucleotide
  Antisense strand to SEQ ID NO: 1638983
uaucuugaacaugacccga

SEQ ID NO: 1638985 - RNA, 19 nt, Artificial Sequence
  Description of Artificial Sequence: Synthetic oligonucleotide
  Sense strand starting at position 941 of SEQ ID NO: 1560993
ggguuaaaucuuuaguacc

SEQ ID NO: 1638986 - RNA, 19 nt, Artificial Sequence
  Description of Artificial Sequence: Synthetic oligonucleotide
  Antisense strand to SEQ ID NO: 1638985
gguacuaaagauuuaaccc

SEQ ID NO: 1638987 - RNA, 19 nt, Artificial Sequence
  Description of Artificial Sequence: Synthetic oligonucleotide
  Sense strand starting at position 1048 of SEQ ID NO: 1560993
agugguaggaaauauguua

SEQ ID NO: 1638988 - RNA, 19 nt, Artificial Sequence
  Description of Artificial Sequence: Synthetic oligonucleotide
  Antisense strand to SEQ ID NO: 1638987
uaacauauuuccuaccacu

SEQ ID NO: 1638989 - RNA, 19 nt, Artificial Sequence
  Description of Artificial Sequence: Synthetic oligonucleotide
  Sense strand starting at position 1154 of SEQ ID NO: 1560993
guaggcagucccuauaucu

SEQ ID NO: 1638990 - RNA, 19 nt, Artificial Sequence
  Description of Artificial Sequence: Synthetic oligonucleotide
  Antisense strand to SEQ ID NO: 1638989
agauauagggacugccuac

SEQ ID NO: 1638991 - RNA, 19 nt, Artificial Sequence
  Description of Artificial Sequence: Synthetic oligonucleotide
  Sense strand starting at position 1279 of SEQ ID NO: 1560993
cugaaagaauuguacagga

SEQ ID NO: 1638992 - RNA, 19 nt, Artificial Sequence
  Description of Artificial Sequence: Synthetic oligonucleotide
  Antisense strand to SEQ ID NO: 1638991
uccuguacaauucuuucag

SEQ ID NO: 1638993 - RNA, 19 nt, Artificial Sequence
  Description of Artificial Sequence: Synthetic oligonucleotide
  Sense strand starting at position 1416 of SEQ ID NO: 1560993
cagaguccuacguagguua

SEQ ID NO: 1638994 - RNA, 19 nt, Artificial Sequence
  Description of Artificial Sequence: Synthetic oligonucleotide
  Antisense strand to SEQ ID NO: 1638993
uaaccuacguaggacucug

SEQ ID NO: 1638995 - RNA, 19 nt, Artificial Sequence
  Description of Artificial Sequence: Synthetic oligonucleotide
  Sense strand starting at position 1423 of SEQ ID NO: 1560993
cuacguagguuaucacuua

SEQ ID NO: 1638996 - RNA, 19 nt, Artificial Sequence
  Description of Artificial Sequence: Synthetic oligonucleotide
  Antisense strand to SEQ ID NO: 1638995
uaagugauaaccuacguag

SEQ ID NO: 1638997 - RNA, 19 nt, Artificial Sequence
  Description of Artificial Sequence: Synthetic oligonucleotide
  Sense strand starting at position 1558 of SEQ ID NO: 1560993
cugaauacaggcuggaauu

SEQ ID NO: 1638998 - RNA, 19 nt, Artificial Sequence
  Description of Artificial Sequence: Synthetic oligonucleotide
  Antisense strand to SEQ ID NO: 1638997
aauuccagccuguauucag

SEQ ID NO: 1638999 - RNA, 19 nt, Artificial Sequence
  Description of Artificial Sequence: Synthetic oligonucleotide
  Sense strand starting at position 1559 of SEQ ID NO: 1560993
ugaauacaggcuggaauua

SEQ ID NO: 1639000 - RNA, 19 nt, Artificial Sequence
  Description of Artificial Sequence: Synthetic oligonucleotide
  Antisense strand to SEQ ID NO: 1638999
uaauuccagccuguauuca

SEQ ID NO: 1639001 - RNA, 19 nt, Artificial Sequence
  Description of Artificial Sequence: Synthetic oligonucleotide
  Sense strand starting at position 1652 of SEQ ID NO: 1560993
gcagguguagcauauggau

SEQ ID NO: 1639002 - RNA, 19 nt, Artificial Sequence
  Description of Artificial Sequence: Synthetic oligonucleotide
  Antisense strand to SEQ ID NO: 1639001
auccauaugcuacaccugc

SEQ ID NO: 1639003 - RNA, 19 nt, Artificial Sequence
  Description of Artificial Sequence: Synthetic oligonucleotide
  Sense strand starting at position 1654 of SEQ ID NO: 1560993
agguguagcauauggauaa

SEQ ID NO: 1639004 - RNA, 19 nt, Artificial Sequence
  Description of Artificial Sequence: Synthetic oligonucleotide
  Antisense strand to SEQ ID NO: 1639003
uuauccauaugcuacaccu

SEQ ID NO: 1639005 - RNA, 19 nt, Artificial Sequence
  Description of Artificial Sequence: Synthetic oligonucleotide
  Sense strand starting at position 2186 of SEQ ID NO: 1560993
gagacuuucugguuccuua

SEQ ID NO: 1639006 - RNA, 19 nt, Artificial Sequence
  Description of Artificial Sequence: Synthetic oligonucleotide
  Antisense strand to SEQ ID NO: 1639005
uaaggaaccagaaagucuc

SEQ ID NO: 1639007 - RNA, 19 nt, Artificial Sequence
  Description of Artificial Sequence: Synthetic oligonucleotide
  Sense strand starting at position 2197 of SEQ ID NO: 1560993
guuccuuaguggcccaaga

SEQ ID NO: 1639008 - RNA, 19 nt, Artificial Sequence
  Description of Artificial Sequence: Synthetic oligonucleotide
  Antisense strand to SEQ ID NO: 1639007
ucuugggccacuaaggaac

SEQ ID NO: 1639009 - RNA, 19 nt, Artificial Sequence
  Description of Artificial Sequence: Synthetic oligonucleotide
  Sense strand starting at position 2270 of SEQ ID NO: 1560993
gccagaccggauuguuagu

SEQ ID NO: 1639010 - RNA, 19 nt, Artificial Sequence
  Description of Artificial Sequence: Synthetic oligonucleotide
  Antisense strand to SEQ ID NO: 1639009
acuaacaauccggucuggc

SEQ ID NO: 1639011 - RNA, 19 nt, Artificial Sequence
  Description of Artificial Sequence: Synthetic oligonucleotide
  Sense strand starting at position 2275 of SEQ ID NO: 1560993
accggauuguuaguuguuu

SEQ ID NO: 1639012 - RNA, 19 nt, Artificial Sequence
  Description of Artificial Sequence: Synthetic oligonucleotide
  Antisense strand to SEQ ID NO: 1639011
aaacaacuaacaauccggu

SEQ ID NO: 1639013 - RNA, 19 nt, Artificial Sequence
  Description of Artificial Sequence: Synthetic oligonucleotide
  Sense strand starting at position 2477 of SEQ ID NO: 1560993
guagguuagguaugguuua

SEQ ID NO: 1639014 - RNA, 19 nt, Artificial Sequence
  Description of Artificial Sequence: Synthetic oligonucleotide
  Antisense strand to SEQ ID NO: 1639013
uaaaccauaccuaaccuac

SEQ ID NO: 1639015 - RNA, 19 nt, Artificial Sequence
  Description of Artificial Sequence: Synthetic oligonucleotide
  Sense strand starting at position 2543 of SEQ ID NO: 1560993
cucccuguccuggaagagu

SEQ ID NO: 1639016 - RNA, 19 nt, Artificial Sequence
  Description of Artificial Sequence: Synthetic oligonucleotide
  Antisense strand to SEQ ID NO: 1639015
acucuuccaggacagggag

SEQ ID NO: 1639017 - RNA, 19 nt, Artificial Sequence
  Description of Artificial Sequence: Synthetic oligonucleotide
  Sense strand starting at position 2546 of SEQ ID NO: 1560993
ccuguccuggaagaguuaa

SEQ ID NO: 1639018 - RNA, 19 nt, Artificial Sequence
  Description of Artificial Sequence: Synthetic oligonucleotide
  Antisense strand to SEQ ID NO: 1639017
uuaacucuuccaggacagg

SEQ ID NO: 1639019 - RNA, 19 nt, Artificial Sequence
  Description of Artificial Sequence: Synthetic oligonucleotide
  Sense strand starting at position 2594 of SEQ ID NO: 1560993
ggcaguuagagaugaggga

SEQ ID NO: 1639020 - RNA, 19 nt, Artificial Sequence
  Description of Artificial Sequence: Synthetic oligonucleotide
  Antisense strand to SEQ ID NO: 1639019
ucccucaucucuaacugcc

SEQ ID NO: 1639021 - RNA, 19 nt, Artificial Sequence
  Description of Artificial Sequence: Synthetic oligonucleotide
  Sense strand starting at position 2611 of SEQ ID NO: 1560993
gagguuacuccuuagccca

SEQ ID NO: 1639022 - RNA, 19 nt, Artificial Sequence
  Description of Artificial Sequence: Synthetic oligonucleotide
  Antisense strand to SEQ ID NO: 1639021
ugggcuaaggaguaaccuc

SEQ ID NO: 1639023 - RNA, 19 nt, Artificial Sequence
  Description of Artificial Sequence: Synthetic oligonucleotide
  Sense strand starting at position 2629 of SEQ ID NO: 1560993
aggagugguuagagacagu

SEQ ID NO: 1639024 - RNA, 19 nt, Artificial Sequence
  Description of Artificial Sequence: Synthetic oligonucleotide
  Antisense strand to SEQ ID NO: 1639023
acugucucuaaccacuccu

SEQ ID NO: 1639025 - RNA, 19 nt, Artificial Sequence
  Description of Artificial Sequence: Synthetic oligonucleotide
  Sense strand starting at position 2654 of SEQ ID NO: 1560993
gguagagaugccuguuuaa

SEQ ID NO: 1639026 - RNA, 19 nt, Artificial Sequence
  Description of Artificial Sequence: Synthetic oligonucleotide
  Antisense strand to SEQ ID NO: 1639025
uuaaacaggcaucucuacc

SEQ ID NO: 1639027 - RNA, 19 nt, Artificial Sequence
  Description of Artificial Sequence: Synthetic oligonucleotide
  Sense strand starting at position 2679 of SEQ ID NO: 1560993
gccucuaggagguguuaga

SEQ ID NO: 1639028 - RNA, 19 nt, Artificial Sequence
  Description of Artificial Sequence: Synthetic oligonucleotide
  Antisense strand to SEQ ID NO: 1639027
ucuaacaccuccuagaggc

SEQ ID NO: 1639029 - RNA, 19 nt, Artificial Sequence
  Description of Artificial Sequence: Synthetic oligonucleotide
  Sense strand starting at position 2862 of SEQ ID NO: 1560993
gggagaugcagcugucacu

SEQ ID NO: 1639030 - RNA, 19 nt, Artificial Sequence
  Description of Artificial Sequence: Synthetic oligonucleotide
  Antisense strand to SEQ ID NO: 1639029
agugacagcugcaucuccc

SEQ ID NO: 1639031 - RNA, 19 nt, Artificial Sequence
  Description of Artificial Sequence: Synthetic oligonucleotide
  Sense strand starting at position 3025 of SEQ ID NO: 1560993
gcuccuucugcaggagcaa

SEQ ID NO: 1639032 - RNA, 19 nt, Artificial Sequence
  Description of Artificial Sequence: Synthetic oligonucleotide
  Antisense strand to SEQ ID NO: 1639031
uugcuccugcagaaggagc

SEQ ID NO: 1639033 - RNA, 19 nt, Artificial Sequence
  Description of Artificial Sequence: Synthetic oligonucleotide
  Sense strand starting at position 3055 of SEQ ID NO: 1560993
gucaaaggucacugugcau

SEQ ID NO: 1639034 - RNA, 19 nt, Artificial Sequence
  Description of Artificial Sequence: Synthetic oligonucleotide
  Antisense strand to SEQ ID NO: 1639033
augcacagugaccuuugac

SEQ ID NO: 1639035 - RNA, 19 nt, Artificial Sequence
  Description of Artificial Sequence: Synthetic oligonucleotide
  Sense strand starting at position 3387 of SEQ ID NO: 1560993
cuccgaggcccauaaucau

SEQ ID NO: 1639036 - RNA, 19 nt, Artificial Sequence
  Description of Artificial Sequence: Synthetic oligonucleotide
  Antisense strand to SEQ ID NO: 1639035
augauuaugggccucggag

SEQ ID NO: 1639037 - RNA, 19 nt, Artificial Sequence
  Description of Artificial Sequence: Synthetic oligonucleotide
  Sense strand starting at position 3504 of SEQ ID NO: 1560993
guuuguauccuagcucugu

SEQ ID NO: 1639038 - RNA, 19 nt, Artificial Sequence
  Description of Artificial Sequence: Synthetic oligonucleotide
  Antisense strand to SEQ ID NO: 1639037
acagagcuaggauacaaac

SEQ ID NO: 1639039 - RNA, 19 nt, Artificial Sequence
  Description of Artificial Sequence: Synthetic oligonucleotide
  Sense strand starting at position 3508 of SEQ ID NO: 1560993
guauccuagcucugugacu

SEQ ID NO: 1639040 - RNA, 19 nt, Artificial Sequence
  Description of Artificial Sequence: Synthetic oligonucleotide
  Antisense strand to SEQ ID NO: 1639039
agucacagagcuaggauac

SEQ ID NO: 1639041 - RNA, 19 nt, Artificial Sequence
  Description of Artificial Sequence: Synthetic oligonucleotide
  Sense strand starting at position 3670 of SEQ ID NO: 1560993
ccgaguagccuggaugaca

SEQ ID NO: 1639042 - RNA, 19 nt, Artificial Sequence
  Description of Artificial Sequence: Synthetic oligonucleotide
  Antisense strand to SEQ ID NO: 1639041
ugucauccaggcuacucgg

SEQ ID NO: 1639043 - RNA, 19 nt, Artificial Sequence
  Description of Artificial Sequence: Synthetic oligonucleotide
  Sense strand starting at position 3850 of SEQ ID NO: 1560993
cagugacuuuggucaagug

SEQ ID NO: 1639044 - RNA, 19 nt, Artificial Sequence
  Description of Artificial Sequence: Synthetic oligonucleotide
  Antisense strand to SEQ ID NO: 1639043
cacuugaccaaagucacug

SEQ ID NO: 1639045 - RNA, 19 nt, Artificial Sequence
  Description of Artificial Sequence: Synthetic oligonucleotide
  Sense strand starting at position 3851 of SEQ ID NO: 1560993
agugacuuuggucaaguga

SEQ ID NO: 1639046 - RNA, 19 nt, Artificial Sequence
  Description of Artificial Sequence: Synthetic oligonucleotide
  Antisense strand to SEQ ID NO: 1639045
ucacuugaccaaagucacu

SEQ ID NO: 1639047 - RNA, 19 nt, Artificial Sequence
  Description of Artificial Sequence: Synthetic oligonucleotide
  Sense strand starting at position 3860 of SEQ ID NO: 1560993
ggucaagugacuuguccuc

SEQ ID NO: 1639048 - RNA, 19 nt, Artificial Sequence
  Description of Artificial Sequence: Synthetic oligonucleotide
  Antisense strand to SEQ ID NO: 1639047
gaggacaagucacuugacc

SEQ ID NO: 1639049 - RNA, 19 nt, Artificial Sequence
  Description of Artificial Sequence: Synthetic oligonucleotide
  Sense strand starting at position 3865 of SEQ ID NO: 1560993
agugacuuguccucucugu

SEQ ID NO: 1639050 - RNA, 19 nt, Artificial Sequence
  Description of Artificial Sequence: Synthetic oligonucleotide
  Antisense strand to SEQ ID NO: 1639049
acagagaggacaagucacu

SEQ ID NO: 1639051 - RNA, 19 nt, Artificial Sequence
  Description of Artificial Sequence: Synthetic oligonucleotide
  Sense strand starting at position 3871 of SEQ ID NO: 1560993
uuguccucucugugucuua

SEQ ID NO: 1639052 - RNA, 19 nt, Artificial Sequence
  Description of Artificial Sequence: Synthetic oligonucleotide
  Antisense strand to SEQ ID NO: 1639051
uaagacacagagaggacaa

SEQ ID NO: 1639053 - RNA, 19 nt, Artificial Sequence
  Description of Artificial Sequence: Synthetic oligonucleotide
  Sense strand starting at position 3883 of SEQ ID NO: 1560993
ugucuuaguuuccuguaga

SEQ ID NO: 1639054 - RNA, 19 nt, Artificial Sequence
  Description of Artificial Sequence: Synthetic oligonucleotide
  Antisense strand to SEQ ID NO: 1639053
ucuacaggaaacuaagaca

SEQ ID NO: 1639055 - RNA, 19 nt, Artificial Sequence
  Description of Artificial Sequence: Synthetic oligonucleotide
  Sense strand starting at position 3886 of SEQ ID NO: 1560993
cuuaguuuccuguagaaua

SEQ ID NO: 1639056 - RNA, 19 nt, Artificial Sequence
  Description of Artificial Sequence: Synthetic oligonucleotide
  Antisense strand to SEQ ID NO: 1639055
uauucuacaggaaacuaag

SEQ ID NO: 1639057 - RNA, 19 nt, Artificial Sequence
  Description of Artificial Sequence: Synthetic oligonucleotide
  Sense strand starting at position 215 of SEQ ID NO: 1560994
guuagacauguuggcacaa

SEQ ID NO: 1639058 - RNA, 19 nt, Artificial Sequence
  Description of Artificial Sequence: Synthetic oligonucleotide
  Antisense strand to SEQ ID NO: 1639057
uugugccaacaugucuaac

SEQ ID NO: 1639059 - RNA, 19 nt, Artificial Sequence
  Description of Artificial Sequence: Synthetic oligonucleotide
  Sense strand starting at position 407 of SEQ ID NO: 1560994
ucacuuacuuugugucaaa

SEQ ID NO: 1639060 - RNA, 19 nt, Artificial Sequence
  Description of Artificial Sequence: Synthetic oligonucleotide
  Antisense strand to SEQ ID NO: 1639059
uuugacacaaaguaaguga

SEQ ID NO: 1639061 - RNA, 19 nt, Artificial Sequence
  Description of Artificial Sequence: Synthetic oligonucleotide
  Sense strand starting at position 410 of SEQ ID NO: 1560994
cuuacuuugugucaaacaa

SEQ ID NO: 1639062 - RNA, 19 nt, Artificial Sequence
  Description of Artificial Sequence: Synthetic oligonucleotide
  Antisense strand to SEQ ID NO: 1639061
uuguuugacacaaaguaag

SEQ ID NO: 1639063 - RNA, 19 nt, Artificial Sequence
  Description of Artificial Sequence: Synthetic oligonucleotide
  Sense strand starting at position 456 of SEQ ID NO: 1560994
ucuuuauucuucucaguga

SEQ ID NO: 1639064 - RNA, 19 nt, Artificial Sequence
  Description of Artificial Sequence: Synthetic oligonucleotide
  Antisense strand to SEQ ID NO: 1639063
ucacugagaagaauaaaga

SEQ ID NO: 1639065 - RNA, 19 nt, Artificial Sequence
  Description of Artificial Sequence: Synthetic oligonucleotide
  Sense strand starting at position 457 of SEQ ID NO: 1560994
cuuuauucuucucagugau

SEQ ID NO: 1639066 - RNA, 19 nt, Artificial Sequence
  Description of Artificial Sequence: Synthetic oligonucleotide
  Antisense strand to SEQ ID NO: 1639065
aucacugagaagaauaaag

SEQ ID NO: 1639067 - RNA, 19 nt, Artificial Sequence
  Description of Artificial Sequence: Synthetic oligonucleotide
  Sense strand starting at position 471 of SEQ ID NO: 1560994
gugauaaccaguugaggug

SEQ ID NO: 1639068 - RNA, 19 nt, Artificial Sequence
  Description of Artificial Sequence: Synthetic oligonucleotide
  Antisense strand to SEQ ID NO: 1639067
caccucaacugguuaucac

SEQ ID NO: 1639069 - RNA, 19 nt, Artificial Sequence
  Description of Artificial Sequence: Synthetic oligonucleotide
  Sense strand starting at position 692 of SEQ ID NO: 1560994
gagguaugguggcacacau

SEQ ID NO: 1639070 - RNA, 19 nt, Artificial Sequence
  Description of Artificial Sequence: Synthetic oligonucleotide
  Antisense strand to SEQ ID NO: 1639069
augugugccaccauaccuc

SEQ ID NO: 1639071 - RNA, 19 nt, Artificial Sequence
  Description of Artificial Sequence: Synthetic oligonucleotide
  Sense strand starting at position 904 of SEQ ID NO: 1560994
aguggugugucuucuaugu

SEQ ID NO: 1639072 - RNA, 19 nt, Artificial Sequence
  Description of Artificial Sequence: Synthetic oligonucleotide
  Antisense strand to SEQ ID NO: 1639071
acauagaagacacaccacu

SEQ ID NO: 1639073 - RNA, 19 nt, Artificial Sequence
  Description of Artificial Sequence: Synthetic oligonucleotide
  Sense strand starting at position 914 of SEQ ID NO: 1560994
cuucuauguccacgcucau

SEQ ID NO: 1639074 - RNA, 19 nt, Artificial Sequence
  Description of Artificial Sequence: Synthetic oligonucleotide
  Antisense strand to SEQ ID NO: 1639073
augagcguggacauagaag

SEQ ID NO: 1639075 - RNA, 19 nt, Artificial Sequence
  Description of Artificial Sequence: Synthetic oligonucleotide
  Sense strand starting at position 1009 of SEQ ID NO: 1560994
cucugacucuccugaugga

SEQ ID NO: 1639076 - RNA, 19 nt, Artificial Sequence
  Description of Artificial Sequence: Synthetic oligonucleotide
  Antisense strand to SEQ ID NO: 1639075
uccaucaggagagucagag

SEQ ID NO: 1639077 - RNA, 19 nt, Artificial Sequence
  Description of Artificial Sequence: Synthetic oligonucleotide
  Sense strand starting at position 1049 of SEQ ID NO: 1560994
ugcugagacucugcccuaa

SEQ ID NO: 1639078 - RNA, 19 nt, Artificial Sequence
  Description of Artificial Sequence: Synthetic oligonucleotide
  Antisense strand to SEQ ID NO: 1639077
uuagggcagagucucagca

SEQ ID NO: 1639079 - RNA, 19 nt, Artificial Sequence
  Description of Artificial Sequence: Synthetic oligonucleotide
  Sense strand starting at position 1051 of SEQ ID NO: 1560994
cugagacucugcccuaauc

SEQ ID NO: 1639080 - RNA, 19 nt, Artificial Sequence
  Description of Artificial Sequence: Synthetic oligonucleotide
  Antisense strand to SEQ ID NO: 1639079
gauuagggcagagucucag

SEQ ID NO: 1639081 - RNA, 19 nt, Artificial Sequence
  Description of Artificial Sequence: Synthetic oligonucleotide
  Sense strand starting at position 1117 of SEQ ID NO: 1560994
ugucucccauuugaagaua

SEQ ID NO: 1639082 - RNA, 19 nt, Artificial Sequence
  Description of Artificial Sequence: Synthetic oligonucleotide
  Antisense strand to SEQ ID NO: 1639081
uaucuucaaaugggagaca

SEQ ID NO: 1639083 - RNA, 19 nt, Artificial Sequence
  Description of Artificial Sequence: Synthetic oligonucleotide
  Sense strand starting at position 1461 of SEQ ID NO: 1560994
gaggucaugcauuagguga

SEQ ID NO: 1639084 - RNA, 19 nt, Artificial Sequence
  Description of Artificial Sequence: Synthetic oligonucleotide
  Antisense strand to SEQ ID NO: 1639083
ucaccuaaugcaugaccuc

SEQ ID NO: 1639085 - RNA, 19 nt, Artificial Sequence
  Description of Artificial Sequence: Synthetic oligonucleotide
  Sense strand starting at position 1542 of SEQ ID NO: 1560994
uucgguguugucuuugcaa

SEQ ID NO: 1639086 - RNA, 19 nt, Artificial Sequence
  Description of Artificial Sequence: Synthetic oligonucleotide
  Antisense strand to SEQ ID NO: 1639085
uugcaaagacaacaccgaa

SEQ ID NO: 1639087 - RNA, 19 nt, Artificial Sequence
  Description of Artificial Sequence: Synthetic oligonucleotide
  Sense strand starting at position 1544 of SEQ ID NO: 1560994
cgguguugucuuugcaaau

SEQ ID NO: 1639088 - RNA, 19 nt, Artificial Sequence
  Description of Artificial Sequence: Synthetic oligonucleotide
  Antisense strand to SEQ ID NO: 1639087
auuugcaaagacaacaccg

SEQ ID NO: 1639089 - RNA, 19 nt, Artificial Sequence
  Description of Artificial Sequence: Synthetic oligonucleotide
  Sense strand starting at position 1545 of SEQ ID NO: 1560994
gguguugucuuugcaaaug

SEQ ID NO: 1639090 - RNA, 19 nt, Artificial Sequence
  Description of Artificial Sequence: Synthetic oligonucleotide
  Antisense strand to SEQ ID NO: 1639089
cauuugcaaagacaacacc

SEQ ID NO: 1639091 - RNA, 19 nt, Artificial Sequence
  Description of Artificial Sequence: Synthetic oligonucleotide
  Sense strand starting at position 1677 of SEQ ID NO: 1560994
gcaggugucccuggcugaa

SEQ ID NO: 1639092 - RNA, 19 nt, Artificial Sequence
  Description of Artificial Sequence: Synthetic oligonucleotide
  Antisense strand to SEQ ID NO: 1639091
uucagccagggacaccugc

SEQ ID NO: 1639093 - RNA, 19 nt, Artificial Sequence
  Description of Artificial Sequence: Synthetic oligonucleotide
  Sense strand starting at position 2009 of SEQ ID NO: 1560994
ggagaugcuuugaacguga

SEQ ID NO: 1639094 - RNA, 19 nt, Artificial Sequence
  Description of Artificial Sequence: Synthetic oligonucleotide
  Antisense strand to SEQ ID NO: 1639093
ucacguucaaagcaucucc

SEQ ID NO: 1639095 - RNA, 19 nt, Artificial Sequence
  Description of Artificial Sequence: Synthetic oligonucleotide
  Sense strand starting at position 2011 of SEQ ID NO: 1560994
agaugcuuugaacgugaga

SEQ ID NO: 1639096 - RNA, 19 nt, Artificial Sequence
  Description of Artificial Sequence: Synthetic oligonucleotide
  Antisense strand to SEQ ID NO: 1639095
ucucacguucaaagcaucu

SEQ ID NO: 1639097 - RNA, 19 nt, Artificial Sequence
  Description of Artificial Sequence: Synthetic oligonucleotide
  Sense strand starting at position 2013 of SEQ ID NO: 1560994
augcuuugaacgugagagu

SEQ ID NO: 1639098 - RNA, 19 nt, Artificial Sequence
  Description of Artificial Sequence: Synthetic oligonucleotide
  Antisense strand to SEQ ID NO: 1639097
acucucacguucaaagcau

SEQ ID NO: 1639099 - RNA, 19 nt, Artificial Sequence
  Description of Artificial Sequence: Synthetic oligonucleotide
  Sense strand starting at position 2084 of SEQ ID NO: 1560994
ccacacucugccugaagaa

SEQ ID NO: 1639100 - RNA, 19 nt, Artificial Sequence
  Description of Artificial Sequence: Synthetic oligonucleotide
  Antisense strand to SEQ ID NO: 1639099
uucuucaggcagagugugg

SEQ ID NO: 1639101 - RNA, 19 nt, Artificial Sequence
  Description of Artificial Sequence: Synthetic oligonucleotide
  Sense strand starting at position 2189 of SEQ ID NO: 1560994
gauaaccuuucgcuaggga

SEQ ID NO: 1639102 - RNA, 19 nt, Artificial Sequence
  Description of Artificial Sequence: Synthetic oligonucleotide
  Antisense strand to SEQ ID NO: 1639101
ucccuagcgaaagguuauc

SEQ ID NO: 1639103 - RNA, 19 nt, Artificial Sequence
  Description of Artificial Sequence: Synthetic oligonucleotide
  Sense strand starting at position 2211 of SEQ ID NO: 1560994
ggugauguggcccagcuua

SEQ ID NO: 1639104 - RNA, 19 nt, Artificial Sequence
  Description of Artificial Sequence: Synthetic oligonucleotide
  Antisense strand to SEQ ID NO: 1639103
uaagcugggccacaucacc

SEQ ID NO: 1639105 - RNA, 19 nt, Artificial Sequence
  Description of Artificial Sequence: Synthetic oligonucleotide
  Sense strand starting at position 2231 of SEQ ID NO: 1560994
ugucaacaucauugacaga

SEQ ID NO: 1639106 - RNA, 19 nt, Artificial Sequence
  Description of Artificial Sequence: Synthetic oligonucleotide
  Antisense strand to SEQ ID NO: 1639105
ucugucaaugauguugaca

SEQ ID NO: 1639107 - RNA, 19 nt, Artificial Sequence
  Description of Artificial Sequence: Synthetic oligonucleotide
  Sense strand starting at position 2253 of SEQ ID NO: 1560994
gcgagaaggucuccaaccu

SEQ ID NO: 1639108 - RNA, 19 nt, Artificial Sequence
  Description of Artificial Sequence: Synthetic oligonucleotide
  Antisense strand to SEQ ID NO: 1639107
agguuggagaccuucucgc

SEQ ID NO: 1639109 - RNA, 19 nt, Artificial Sequence
  Description of Artificial Sequence: Synthetic oligonucleotide
  Sense strand starting at position 2344 of SEQ ID NO: 1560994
ccuggaccucuucgaagau

SEQ ID NO: 1639110 - RNA, 19 nt, Artificial Sequence
  Description of Artificial Sequence: Synthetic oligonucleotide
  Antisense strand to SEQ ID NO: 1639109
aucuucgaagagguccagg

SEQ ID NO: 1639111 - RNA, 19 nt, Artificial Sequence
  Description of Artificial Sequence: Synthetic oligonucleotide
  Sense strand starting at position 2356 of SEQ ID NO: 1560994
cgaagaucauaauagcagu

SEQ ID NO: 1639112 - RNA, 19 nt, Artificial Sequence
  Description of Artificial Sequence: Synthetic oligonucleotide
  Antisense strand to SEQ ID NO: 1639111
acugcuauuaugaucuucg

SEQ ID NO: 1639113 - RNA, 19 nt, Artificial Sequence
  Description of Artificial Sequence: Synthetic oligonucleotide
  Sense strand starting at position 2359 of SEQ ID NO: 1560994
agaucauaauagcagugaa

SEQ ID NO: 1639114 - RNA, 19 nt, Artificial Sequence
  Description of Artificial Sequence: Synthetic oligonucleotide
  Antisense strand to SEQ ID NO: 1639113
uucacugcuauuaugaucu

SEQ ID NO: 1639115 - RNA, 19 nt, Artificial Sequence
  Description of Artificial Sequence: Synthetic oligonucleotide
  Sense strand starting at position 2407 of SEQ ID NO: 1560994
ggcacacuacuguaagcau

SEQ ID NO: 1639116 - RNA, 19 nt, Artificial Sequence
  Description of Artificial Sequence: Synthetic oligonucleotide
  Antisense strand to SEQ ID NO: 1639115
augcuuacaguagugugcc

SEQ ID NO: 1639117 - RNA, 19 nt, Artificial Sequence
  Description of Artificial Sequence: Synthetic oligonucleotide
  Sense strand starting at position 2795 of SEQ ID NO: 1560994
ggguaaugguucucaaaug

SEQ ID NO: 1639118 - RNA, 19 nt, Artificial Sequence
  Description of Artificial Sequence: Synthetic oligonucleotide
  Antisense strand to SEQ ID NO: 1639117
cauuugagaaccauuaccc

SEQ ID NO: 1639119 - RNA, 19 nt, Artificial Sequence
  Description of Artificial Sequence: Synthetic oligonucleotide
  Sense strand starting at position 2800 of SEQ ID NO: 1560994
augguucucaaaugugagu

SEQ ID NO: 1639120 - RNA, 19 nt, Artificial Sequence
  Description of Artificial Sequence: Synthetic oligonucleotide
  Antisense strand to SEQ ID NO: 1639119
acucacauuugagaaccau

SEQ ID NO: 1639121 - RNA, 19 nt, Artificial Sequence
  Description of Artificial Sequence: Synthetic oligonucleotide
  Sense strand starting at position 2802 of SEQ ID NO: 1560994
gguucucaaaugugaguga

SEQ ID NO: 1639122 - RNA, 19 nt, Artificial Sequence
  Description of Artificial Sequence: Synthetic oligonucleotide
  Antisense strand to SEQ ID NO: 1639121
ucacucacauuugagaacc

SEQ ID NO: 1639123 - RNA, 19 nt, Artificial Sequence
  Description of Artificial Sequence: Synthetic oligonucleotide
  Sense strand starting at position 2806 of SEQ ID NO: 1560994
cucaaaugugagugagcuu

SEQ ID NO: 1639124 - RNA, 19 nt, Artificial Sequence
  Description of Artificial Sequence: Synthetic oligonucleotide
  Antisense strand to SEQ ID NO: 1639123
aagcucacucacauuugag

SEQ ID NO: 1639125 - RNA, 19 nt, Artificial Sequence
  Description of Artificial Sequence: Synthetic oligonucleotide
  Sense strand starting at position 2813 of SEQ ID NO: 1560994
gugagugagcuucagaauc

SEQ ID NO: 1639126 - RNA, 19 nt, Artificial Sequence
  Description of Artificial Sequence: Synthetic oligonucleotide
  Antisense strand to SEQ ID NO: 1639125
gauucugaagcucacucac

SEQ ID NO: 1639127 - RNA, 19 nt, Artificial Sequence
  Description of Artificial Sequence: Synthetic oligonucleotide
  Sense strand starting at position 3183 of SEQ ID NO: 1560994
ugcagagcuccugacucaa

SEQ ID NO: 1639128 - RNA, 19 nt, Artificial Sequence
  Description of Artificial Sequence: Synthetic oligonucleotide
  Antisense strand to SEQ ID NO: 1639127
uugagucaggagcucugca

SEQ ID NO: 1639129 - RNA, 19 nt, Artificial Sequence
  Description of Artificial Sequence: Synthetic oligonucleotide
  Sense strand starting at position 3552 of SEQ ID NO: 1560994
cugggauuggcuggacaca

SEQ ID NO: 1639130 - RNA, 19 nt, Artificial Sequence
  Description of Artificial Sequence: Synthetic oligonucleotide
  Antisense strand to SEQ ID NO: 1639129
uguguccagccaaucccag

SEQ ID NO: 1639131 - RNA, 19 nt, Artificial Sequence
  Description of Artificial Sequence: Synthetic oligonucleotide
  Sense strand starting at position 125 of SEQ ID NO: 1560995
gugacagguagacaaugua

SEQ ID NO: 1639132 - RNA, 19 nt, Artificial Sequence
  Description of Artificial Sequence: Synthetic oligonucleotide
  Antisense strand to SEQ ID NO: 1639131
uacauugucuaccugucac

SEQ ID NO: 1639133 - RNA, 19 nt, Artificial Sequence
  Description of Artificial Sequence: Synthetic oligonucleotide
  Sense strand starting at position 142 of SEQ ID NO: 1560995
uaggauuuguucuggagac

SEQ ID NO: 1639134 - RNA, 19 nt, Artificial Sequence
  Description of Artificial Sequence: Synthetic oligonucleotide
  Antisense strand to SEQ ID NO: 1639133
gucuccagaacaaauccua

SEQ ID NO: 1639135 - RNA, 19 nt, Artificial Sequence
  Description of Artificial Sequence: Synthetic oligonucleotide
  Sense strand starting at position 143 of SEQ ID NO: 1560995
aggauuuguucuggagacu

SEQ ID NO: 1639136 - RNA, 19 nt, Artificial Sequence
  Description of Artificial Sequence: Synthetic oligonucleotide
  Antisense strand to SEQ ID NO: 1639135
agucuccagaacaaauccu

SEQ ID NO: 1639137 - RNA, 19 nt, Artificial Sequence
  Description of Artificial Sequence: Synthetic oligonucleotide
  Sense strand starting at position 162 of SEQ ID NO: 1560995
gagccuuuaggaugaggga

SEQ ID NO: 1639138 - RNA, 19 nt, Artificial Sequence
  Description of Artificial Sequence: Synthetic oligonucleotide
  Antisense strand to SEQ ID NO: 1639137
ucccucauccuaaaggcuc

SEQ ID NO: 1639139 - RNA, 19 nt, Artificial Sequence
  Description of Artificial Sequence: Synthetic oligonucleotide
  Sense strand starting at position 221 of SEQ ID NO: 1560995
gucaguguggcacacauuu

SEQ ID NO: 1639140 - RNA, 19 nt, Artificial Sequence
  Description of Artificial Sequence: Synthetic oligonucleotide
  Antisense strand to SEQ ID NO: 1639139
aaaugugugccacacugac

SEQ ID NO: 1639141 - RNA, 19 nt, Artificial Sequence
  Description of Artificial Sequence: Synthetic oligonucleotide
  Sense strand starting at position 258 of SEQ ID NO: 1560995
cgaaaucaacaguagcaau

SEQ ID NO: 1639142 - RNA, 19 nt, Artificial Sequence
  Description of Artificial Sequence: Synthetic oligonucleotide
  Antisense strand to SEQ ID NO: 1639141
auugcuacuguugauuucg

SEQ ID NO: 1639143 - RNA, 19 nt, Artificial Sequence
  Description of Artificial Sequence: Synthetic oligonucleotide
  Sense strand starting at position 274 of SEQ ID NO: 1560995
aaugaauaugcccgaggca

SEQ ID NO: 1639144 - RNA, 19 nt, Artificial Sequence
  Description of Artificial Sequence: Synthetic oligonucleotide
  Antisense strand to SEQ ID NO: 1639143
ugccucgggcauauucauu

SEQ ID NO: 1639145 - RNA, 19 nt, Artificial Sequence
  Description of Artificial Sequence: Synthetic oligonucleotide
  Sense strand starting at position 290 of SEQ ID NO: 1560995
gcacuccagacguaucuga

SEQ ID NO: 1639146 - RNA, 19 nt, Artificial Sequence
  Description of Artificial Sequence: Synthetic oligonucleotide
  Antisense strand to SEQ ID NO: 1639145
ucagauacgucuggagugc

SEQ ID NO: 1639147 - RNA, 19 nt, Artificial Sequence
  Description of Artificial Sequence: Synthetic oligonucleotide
  Sense strand starting at position 297 of SEQ ID NO: 1560995
agacguaucugaugcugaa

SEQ ID NO: 1639148 - RNA, 19 nt, Artificial Sequence
  Description of Artificial Sequence: Synthetic oligonucleotide
  Antisense strand to SEQ ID NO: 1639147
uucagcaucagauacgucu

SEQ ID NO: 1639149 - RNA, 19 nt, Artificial Sequence
  Description of Artificial Sequence: Synthetic oligonucleotide
  Sense strand starting at position 467 of SEQ ID NO: 1560995
ucaccaauaggugggauua

SEQ ID NO: 1639150 - RNA, 19 nt, Artificial Sequence
  Description of Artificial Sequence: Synthetic oligonucleotide
  Antisense strand to SEQ ID NO: 1639149
uaaucccaccuauugguga

SEQ ID NO: 1639151 - RNA, 19 nt, Artificial Sequence
  Description of Artificial Sequence: Synthetic oligonucleotide
  Sense strand starting at position 469 of SEQ ID NO: 1560995
accaauaggugggauuaca

SEQ ID NO: 1639152 - RNA, 19 nt, Artificial Sequence
  Description of Artificial Sequence: Synthetic oligonucleotide
  Antisense strand to SEQ ID NO: 1639151
uguaaucccaccuauuggu

SEQ ID NO: 1639153 - RNA, 19 nt, Artificial Sequence
  Description of Artificial Sequence: Synthetic oligonucleotide
  Sense strand starting at position 603 of SEQ ID NO: 1560995
uccugaaacgcugggauua

SEQ ID NO: 1639154 - RNA, 19 nt, Artificial Sequence
  Description of Artificial Sequence: Synthetic oligonucleotide
  Antisense strand to SEQ ID NO: 1639153
uaaucccagcguuucagga

SEQ ID NO: 1639155 - RNA, 19 nt, Artificial Sequence
  Description of Artificial Sequence: Synthetic oligonucleotide
  Sense strand starting at position 1098 of SEQ ID NO: 1560995
aguuaacucaccuggguga

SEQ ID NO: 1639156 - RNA, 19 nt, Artificial Sequence
  Description of Artificial Sequence: Synthetic oligonucleotide
  Antisense strand to SEQ ID NO: 1639155
ucacccaggugaguuaacu

SEQ ID NO: 1639157 - RNA, 19 nt, Artificial Sequence
  Description of Artificial Sequence: Synthetic oligonucleotide
  Sense strand starting at position 1400 of SEQ ID NO: 1560995
gucuuugagucugggagga

SEQ ID NO: 1639158 - RNA, 19 nt, Artificial Sequence
  Description of Artificial Sequence: Synthetic oligonucleotide
  Antisense strand to SEQ ID NO: 1639157
uccucccagacucaaagac

SEQ ID NO: 1639159 - RNA, 19 nt, Artificial Sequence
  Description of Artificial Sequence: Synthetic oligonucleotide
  Sense strand starting at position 1648 of SEQ ID NO: 1560995
aaucacugagcccgugaaa

SEQ ID NO: 1639160 - RNA, 19 nt, Artificial Sequence
  Description of Artificial Sequence: Synthetic oligonucleotide
  Antisense strand to SEQ ID NO: 1639159
uuucacgggcucagugauu

SEQ ID NO: 1639161 - RNA, 19 nt, Artificial Sequence
  Description of Artificial Sequence: Synthetic oligonucleotide
  Sense strand starting at position 1651 of SEQ ID NO: 1560995
cacugagcccgugaaaguu

SEQ ID NO: 1639162 - RNA, 19 nt, Artificial Sequence
  Description of Artificial Sequence: Synthetic oligonucleotide
  Antisense strand to SEQ ID NO: 1639161
aacuuucacgggcucagug

SEQ ID NO: 1639163 - RNA, 19 nt, Artificial Sequence
  Description of Artificial Sequence: Synthetic oligonucleotide
  Sense strand starting at position 1657 of SEQ ID NO: 1560995
gcccgugaaaguugccauu

SEQ ID NO: 1639164 - RNA, 19 nt, Artificial Sequence
  Description of Artificial Sequence: Synthetic oligonucleotide
  Antisense strand to SEQ ID NO: 1639163
aauggcaacuuucacgggc

SEQ ID NO: 1639165 - RNA, 19 nt, Artificial Sequence
  Description of Artificial Sequence: Synthetic oligonucleotide
  Sense strand starting at position 2128 of SEQ ID NO: 1560995
ugggaauuguagucccgaa

SEQ ID NO: 1639166 - RNA, 19 nt, Artificial Sequence
  Description of Artificial Sequence: Synthetic oligonucleotide
  Antisense strand to SEQ ID NO: 1639165
uucgggacuacaauuccca

SEQ ID NO: 1639167 - RNA, 19 nt, Artificial Sequence
  Description of Artificial Sequence: Synthetic oligonucleotide
  Sense strand starting at position 2526 of SEQ ID NO: 1560995
ccgugcaagaucugugcuu

SEQ ID NO: 1639168 - RNA, 19 nt, Artificial Sequence
  Description of Artificial Sequence: Synthetic oligonucleotide
  Antisense strand to SEQ ID NO: 1639167
aagcacagaucuugcacgg

SEQ ID NO: 1639169 - RNA, 19 nt, Artificial Sequence
  Description of Artificial Sequence: Synthetic oligonucleotide
  Sense strand starting at position 2622 of SEQ ID NO: 1560995
ggucucugcucccuauaga

SEQ ID NO: 1639170 - RNA, 19 nt, Artificial Sequence
  Description of Artificial Sequence: Synthetic oligonucleotide
  Antisense strand to SEQ ID NO: 1639169
ucuauagggagcagagacc

SEQ ID NO: 1639171 - RNA, 19 nt, Artificial Sequence
  Description of Artificial Sequence: Synthetic oligonucleotide
  Sense strand starting at position 2623 of SEQ ID NO: 1560995
gucucugcucccuauagaa

SEQ ID NO: 1639172 - RNA, 19 nt, Artificial Sequence
  Description of Artificial Sequence: Synthetic oligonucleotide
  Antisense strand to SEQ ID NO: 1639171
uucuauagggagcagagac

SEQ ID NO: 1639173 - RNA, 19 nt, Artificial Sequence
  Description of Artificial Sequence: Synthetic oligonucleotide
  Sense strand starting at position 3526 of SEQ ID NO: 1560995
agcgaucucggcuuauugu

SEQ ID NO: 1639174 - RNA, 19 nt, Artificial Sequence
  Description of Artificial Sequence: Synthetic oligonucleotide
  Antisense strand to SEQ ID NO: 1639173
acaauaagccgagaucgcu

SEQ ID NO: 1639175 - RNA, 19 nt, Artificial Sequence
  Description of Artificial Sequence: Synthetic oligonucleotide
  Sense strand starting at position 3980 of SEQ ID NO: 1560995
aggugaucucaacgauauu

SEQ ID NO: 1639176 - RNA, 19 nt, Artificial Sequence
  Description of Artificial Sequence: Synthetic oligonucleotide
  Antisense strand to SEQ ID NO: 1639175
aauaucguugagaucaccu

SEQ ID NO: 1639177 - RNA, 19 nt, Artificial Sequence
  Description of Artificial Sequence: Synthetic oligonucleotide
  Sense strand starting at position 3981 of SEQ ID NO: 1560995
ggugaucucaacgauauug

SEQ ID NO: 1639178 - RNA, 19 nt, Artificial Sequence
  Description of Artificial Sequence: Synthetic oligonucleotide
  Antisense strand to SEQ ID NO: 1639177
caauaucguugagaucacc

SEQ ID NO: 1639179 - RNA, 19 nt, Artificial Sequence
  Description of Artificial Sequence: Synthetic oligonucleotide
  Sense strand starting at position 502 of SEQ ID NO: 1560996
ggacuucucuuacggguca

SEQ ID NO: 1639180 - RNA, 19 nt, Artificial Sequence
  Description of Artificial Sequence: Synthetic oligonucleotide
  Antisense strand to SEQ ID NO: 1639179
ugacccguaagagaagucc

SEQ ID NO: 1639181 - RNA, 19 nt, Artificial Sequence
  Description of Artificial Sequence: Synthetic oligonucleotide
  Sense strand starting at position 503 of SEQ ID NO: 1560996
gacuucucuuacgggucaa

SEQ ID NO: 1639182 - RNA, 19 nt, Artificial Sequence
  Description of Artificial Sequence: Synthetic oligonucleotide
  Antisense strand to SEQ ID NO: 1639181
uugacccguaagagaaguc

SEQ ID NO: 1639183 - RNA, 19 nt, Artificial Sequence
  Description of Artificial Sequence: Synthetic oligonucleotide
  Sense strand starting at position 1044 of SEQ ID NO: 1560996
aucagguccgcgugggaaa

SEQ ID NO: 1639184 - RNA, 19 nt, Artificial Sequence
  Description of Artificial Sequence: Synthetic oligonucleotide
  Antisense strand to SEQ ID NO: 1639183
uuucccacgcggaccugau

SEQ ID NO: 1639185 - RNA, 19 nt, Artificial Sequence
  Description of Artificial Sequence: Synthetic oligonucleotide
  Sense strand starting at position 2397 of SEQ ID NO: 1560996
gcucaaaugucagcuuaca

SEQ ID NO: 1639186 - RNA, 19 nt, Artificial Sequence
  Description of Artificial Sequence: Synthetic oligonucleotide
  Antisense strand to SEQ ID NO: 1639185
uguaagcugacauuugagc

SEQ ID NO: 1639187 - RNA, 19 nt, Artificial Sequence
  Description of Artificial Sequence: Synthetic oligonucleotide
  Sense strand starting at position 2635 of SEQ ID NO: 1560996
guggccuuguuuccaagau

SEQ ID NO: 1639188 - RNA, 19 nt, Artificial Sequence
  Description of Artificial Sequence: Synthetic oligonucleotide
  Antisense strand to SEQ ID NO: 1639187
aucuuggaaacaaggccac

SEQ ID NO: 1639189 - RNA, 19 nt, Artificial Sequence
  Description of Artificial Sequence: Synthetic oligonucleotide
  Sense strand starting at position 2636 of SEQ ID NO: 1560996
uggccuuguuuccaagaug

SEQ ID NO: 1639190 - RNA, 19 nt, Artificial Sequence
  Description of Artificial Sequence: Synthetic oligonucleotide
  Antisense strand to SEQ ID NO: 1639189
caucuuggaaacaaggcca

SEQ ID NO: 1639191 - RNA, 19 nt, Artificial Sequence
  Description of Artificial Sequence: Synthetic oligonucleotide
  Sense strand starting at position 2763 of SEQ ID NO: 1560996
caggaucauuucugagguu

SEQ ID NO: 1639192 - RNA, 19 nt, Artificial Sequence
  Description of Artificial Sequence: Synthetic oligonucleotide
  Antisense strand to SEQ ID NO: 1639191
aaccucagaaaugauccug

SEQ ID NO: 1639193 - RNA, 19 nt, Artificial Sequence
  Description of Artificial Sequence: Synthetic oligonucleotide
  Sense strand starting at position 2764 of SEQ ID NO: 1560996
aggaucauuucugagguua

SEQ ID NO: 1639194 - RNA, 19 nt, Artificial Sequence
  Description of Artificial Sequence: Synthetic oligonucleotide
  Antisense strand to SEQ ID NO: 1639193
uaaccucagaaaugauccu

SEQ ID NO: 1639195 - RNA, 19 nt, Artificial Sequence
  Description of Artificial Sequence: Synthetic oligonucleotide
  Sense strand starting at position 2766 of SEQ ID NO: 1560996
gaucauuucugagguuagu

SEQ ID NO: 1639196 - RNA, 19 nt, Artificial Sequence
  Description of Artificial Sequence: Synthetic oligonucleotide
  Antisense strand to SEQ ID NO: 1639195
acuaaccucagaaaugauc

SEQ ID NO: 1639197 - RNA, 19 nt, Artificial Sequence
  Description of Artificial Sequence: Synthetic oligonucleotide
  Sense strand starting at position 2775 of SEQ ID NO: 1560996
ugagguuaguucuggccca

SEQ ID NO: 1639198 - RNA, 19 nt, Artificial Sequence
  Description of Artificial Sequence: Synthetic oligonucleotide
  Antisense strand to SEQ ID NO: 1639197
ugggccagaacuaaccuca

SEQ ID NO: 1639199 - RNA, 19 nt, Artificial Sequence
  Description of Artificial Sequence: Synthetic oligonucleotide
  Sense strand starting at position 2776 of SEQ ID NO: 1560996
gagguuaguucuggcccaa

SEQ ID NO: 1639200 - RNA, 19 nt, Artificial Sequence
  Description of Artificial Sequence: Synthetic oligonucleotide
  Antisense strand to SEQ ID NO: 1639199
uugggccagaacuaaccuc

SEQ ID NO: 1639201 - RNA, 19 nt, Artificial Sequence
  Description of Artificial Sequence: Synthetic oligonucleotide
  Sense strand starting at position 2780 of SEQ ID NO: 1560996
uuaguucuggcccaaucau

SEQ ID NO: 1639202 - RNA, 19 nt, Artificial Sequence
  Description of Artificial Sequence: Synthetic oligonucleotide
  Antisense strand to SEQ ID NO: 1639201
augauugggccagaacuaa

SEQ ID NO: 1639203 - RNA, 19 nt, Artificial Sequence
  Description of Artificial Sequence: Synthetic oligonucleotide
  Sense strand starting at position 3105 of SEQ ID NO: 1560996
cggccucaugcguguauuu

SEQ ID NO: 1639204 - RNA, 19 nt, Artificial Sequence
  Description of Artificial Sequence: Synthetic oligonucleotide
  Antisense strand to SEQ ID NO: 1639203
aaauacacgcaugaggccg

SEQ ID NO: 1639205 - RNA, 19 nt, Artificial Sequence
  Description of Artificial Sequence: Synthetic oligonucleotide
  Sense strand starting at position 3107 of SEQ ID NO: 1560996
gccucaugcguguauuucu

SEQ ID NO: 1639206 - RNA, 19 nt, Artificial Sequence
  Description of Artificial Sequence: Synthetic oligonucleotide
  Antisense strand to SEQ ID NO: 1639205
agaaauacacgcaugaggc

SEQ ID NO: 1639207 - RNA, 19 nt, Artificial Sequence
  Description of Artificial Sequence: Synthetic oligonucleotide
  Sense strand starting at position 3346 of SEQ ID NO: 1560996
gaggcauuggagcgagacu

SEQ ID NO: 1639208 - RNA, 19 nt, Artificial Sequence
  Description of Artificial Sequence: Synthetic oligonucleotide
  Antisense strand to SEQ ID NO: 1639207
agucucgcuccaaugccuc

SEQ ID NO: 1639209 - RNA, 19 nt, Artificial Sequence
  Description of Artificial Sequence: Synthetic oligonucleotide
  Sense strand starting at position 3355 of SEQ ID NO: 1560996
gagcgagacuguugaggaa

SEQ ID NO: 1639210 - RNA, 19 nt, Artificial Sequence
  Description of Artificial Sequence: Synthetic oligonucleotide
  Antisense strand to SEQ ID NO: 1639209
uuccucaacagucucgcuc

SEQ ID NO: 1639211 - RNA, 19 nt, Artificial Sequence
  Description of Artificial Sequence: Synthetic oligonucleotide
  Sense strand starting at position 3357 of SEQ ID NO: 1560996
gcgagacuguugaggaauu

SEQ ID NO: 1639212 - RNA, 19 nt, Artificial Sequence
  Description of Artificial Sequence: Synthetic oligonucleotide
  Antisense strand to SEQ ID NO: 1639211
aauuccucaacagucucgc

SEQ ID NO: 1639213 - RNA, 19 nt, Artificial Sequence
  Description of Artificial Sequence: Synthetic oligonucleotide
  Sense strand starting at position 3358 of SEQ ID NO: 1560996
cgagacuguugaggaauua

SEQ ID NO: 1639214 - RNA, 19 nt, Artificial Sequence
  Description of Artificial Sequence: Synthetic oligonucleotide
  Antisense strand to SEQ ID NO: 1639213
uaauuccucaacagucucg

SEQ ID NO: 1639215 - RNA, 19 nt, Artificial Sequence
  Description of Artificial Sequence: Synthetic oligonucleotide
  Sense strand starting at position 3371 of SEQ ID NO: 1560996
gaauuaagaguuggagccu

SEQ ID NO: 1639216 - RNA, 19 nt, Artificial Sequence
  Description of Artificial Sequence: Synthetic oligonucleotide
  Antisense strand to SEQ ID NO: 1639215
aggcuccaacucuuaauuc

SEQ ID NO: 1639217 - RNA, 19 nt, Artificial Sequence
  Description of Artificial Sequence: Synthetic oligonucleotide
  Sense strand starting at position 3380 of SEQ ID NO: 1560996
guuggagccugugcauuua

SEQ ID NO: 1639218 - RNA, 19 nt, Artificial Sequence
  Description of Artificial Sequence: Synthetic oligonucleotide
  Antisense strand to SEQ ID NO: 1639217
uaaaugcacaggcuccaac

SEQ ID NO: 1639219 - RNA, 19 nt, Artificial Sequence
  Description of Artificial Sequence: Synthetic oligonucleotide
  Sense strand starting at position 3720 of SEQ ID NO: 1560996
uuugaauguccagagguug

SEQ ID NO: 1639220 - RNA, 19 nt, Artificial Sequence
  Description of Artificial Sequence: Synthetic oligonucleotide
  Antisense strand to SEQ ID NO: 1639219
caaccucuggacauucaaa

SEQ ID NO: 1639221 - RNA, 19 nt, Artificial Sequence
  Description of Artificial Sequence: Synthetic oligonucleotide
  Sense strand starting at position 1 of SEQ ID NO: 1560997
cuaggaucccucuggcuaa

SEQ ID NO: 1639222 - RNA, 19 nt, Artificial Sequence
  Description of Artificial Sequence: Synthetic oligonucleotide
  Antisense strand to SEQ ID NO: 1639221
uuagccagagggauccuag

SEQ ID NO: 1639223 - RNA, 19 nt, Artificial Sequence
  Description of Artificial Sequence: Synthetic oligonucleotide
  Sense strand starting at position 75 of SEQ ID NO: 1560997
gggugauguuggccucuga

SEQ ID NO: 1639224 - RNA, 19 nt, Artificial Sequence
  Description of Artificial Sequence: Synthetic oligonucleotide
  Antisense strand to SEQ ID NO: 1639223
ucagaggccaacaucaccc

SEQ ID NO: 1639225 - RNA, 19 nt, Artificial Sequence
  Description of Artificial Sequence: Synthetic oligonucleotide
  Sense strand starting at position 84 of SEQ ID NO: 1560997
uggccucugagccaugaua

SEQ ID NO: 1639226 - RNA, 19 nt, Artificial Sequence
  Description of Artificial Sequence: Synthetic oligonucleotide
  Antisense strand to SEQ ID NO: 1639225
uaucauggcucagaggcca

SEQ ID NO: 1639227 - RNA, 19 nt, Artificial Sequence
  Description of Artificial Sequence: Synthetic oligonucleotide
  Sense strand starting at position 86 of SEQ ID NO: 1560997
gccucugagccaugauaag

SEQ ID NO: 1639228 - RNA, 19 nt, Artificial Sequence
  Description of Artificial Sequence: Synthetic oligonucleotide
  Antisense strand to SEQ ID NO: 1639227
cuuaucauggcucagaggc

SEQ ID NO: 1639229 - RNA, 19 nt, Artificial Sequence
  Description of Artificial Sequence: Synthetic oligonucleotide
  Sense strand starting at position 171 of SEQ ID NO: 1560997
cagagcaguuugggacuua

SEQ ID NO: 1639230 - RNA, 19 nt, Artificial Sequence
  Description of Artificial Sequence: Synthetic oligonucleotide
  Antisense strand to SEQ ID NO: 1639229
uaagucccaaacugcucug

SEQ ID NO: 1639231 - RNA, 19 nt, Artificial Sequence
  Description of Artificial Sequence: Synthetic oligonucleotide
  Sense strand starting at position 204 of SEQ ID NO: 1560997
gccagucuuuaaggcucaa

SEQ ID NO: 1639232 - RNA, 19 nt, Artificial Sequence
  Description of Artificial Sequence: Synthetic oligonucleotide
  Antisense strand to SEQ ID NO: 1639231
uugagccuuaaagacuggc

SEQ ID NO: 1639233 - RNA, 19 nt, Artificial Sequence
  Description of Artificial Sequence: Synthetic oligonucleotide
  Sense strand starting at position 456 of SEQ ID NO: 1560997
agcucugcccuccaaagau

SEQ ID NO: 1639234 - RNA, 19 nt, Artificial Sequence
  Description of Artificial Sequence: Synthetic oligonucleotide
  Antisense strand to SEQ ID NO: 1639233
aucuuuggagggcagagcu

SEQ ID NO: 1639235 - RNA, 19 nt, Artificial Sequence
  Description of Artificial Sequence: Synthetic oligonucleotide
  Sense strand starting at position 508 of SEQ ID NO: 1560997
ggaugagugcuuuggccuc

SEQ ID NO: 1639236 - RNA, 19 nt, Artificial Sequence
  Description of Artificial Sequence: Synthetic oligonucleotide
  Antisense strand to SEQ ID NO: 1639235
gaggccaaagcacucaucc

SEQ ID NO: 1639237 - RNA, 19 nt, Artificial Sequence
  Description of Artificial Sequence: Synthetic oligonucleotide
  Sense strand starting at position 551 of SEQ ID NO: 1560997
aggaaucuguggugaggau

SEQ ID NO: 1639238 - RNA, 19 nt, Artificial Sequence
  Description of Artificial Sequence: Synthetic oligonucleotide
  Antisense strand to SEQ ID NO: 1639237
auccucaccacagauuccu

SEQ ID NO: 1639239 - RNA, 19 nt, Artificial Sequence
  Description of Artificial Sequence: Synthetic oligonucleotide
  Sense strand starting at position 788 of SEQ ID NO: 1560997
gcuggacagccacaagaau

SEQ ID NO: 1639240 - RNA, 19 nt, Artificial Sequence
  Description of Artificial Sequence: Synthetic oligonucleotide
  Antisense strand to SEQ ID NO: 1639239
auucuuguggcuguccagc

SEQ ID NO: 1639241 - RNA, 19 nt, Artificial Sequence
  Description of Artificial Sequence: Synthetic oligonucleotide
  Sense strand starting at position 997 of SEQ ID NO: 1560997
gcaguacuggcgcacuuau

SEQ ID NO: 1639242 - RNA, 19 nt, Artificial Sequence
  Description of Artificial Sequence: Synthetic oligonucleotide
  Antisense strand to SEQ ID NO: 1639241
auaagugcgccaguacugc

SEQ ID NO: 1639243 - RNA, 19 nt, Artificial Sequence
  Description of Artificial Sequence: Synthetic oligonucleotide
  Sense strand starting at position 2099 of SEQ ID NO: 1560997
gacuguacuuuagagagga

SEQ ID NO: 1639244 - RNA, 19 nt, Artificial Sequence
  Description of Artificial Sequence: Synthetic oligonucleotide
  Antisense strand to SEQ ID NO: 1639243
uccucucuaaaguacaguc

SEQ ID NO: 1639245 - RNA, 19 nt, Artificial Sequence
  Description of Artificial Sequence: Synthetic oligonucleotide
  Sense strand starting at position 2224 of SEQ ID NO: 1560997
ggguaccaguuccugaauu

SEQ ID NO: 1639246 - RNA, 19 nt, Artificial Sequence
  Description of Artificial Sequence: Synthetic oligonucleotide
  Antisense strand to SEQ ID NO: 1639245
aauucaggaacugguaccc

SEQ ID NO: 1639247 - RNA, 19 nt, Artificial Sequence
  Description of Artificial Sequence: Synthetic oligonucleotide
  Sense strand starting at position 2379 of SEQ ID NO: 1560997
cgccuuccuaccuguggaa

SEQ ID NO: 1639248 - RNA, 19 nt, Artificial Sequence
  Description of Artificial Sequence: Synthetic oligonucleotide
  Antisense strand to SEQ ID NO: 1639247
uuccacagguaggaaggcg

SEQ ID NO: 1639249 - RNA, 19 nt, Artificial Sequence
  Description of Artificial Sequence: Synthetic oligonucleotide
  Sense strand starting at position 2581 of SEQ ID NO: 1560997
aagccugucuuggccagau

SEQ ID NO: 1639250 - RNA, 19 nt, Artificial Sequence
  Description of Artificial Sequence: Synthetic oligonucleotide
  Antisense strand to SEQ ID NO: 1639249
aucuggccaagacaggcuu

SEQ ID NO: 1639251 - RNA, 19 nt, Artificial Sequence
  Description of Artificial Sequence: Synthetic oligonucleotide
  Sense strand starting at position 2583 of SEQ ID NO: 1560997
gccugucuuggccagaugu

SEQ ID NO: 1639252 - RNA, 19 nt, Artificial Sequence
  Description of Artificial Sequence: Synthetic oligonucleotide
  Antisense strand to SEQ ID NO: 1639251
acaucuggccaagacaggc

SEQ ID NO: 1639253 - RNA, 19 nt, Artificial Sequence
  Description of Artificial Sequence: Synthetic oligonucleotide
  Sense strand starting at position 2665 of SEQ ID NO: 1560997
ccugaugagucuucuacca

SEQ ID NO: 1639254 - RNA, 19 nt, Artificial Sequence
  Description of Artificial Sequence: Synthetic oligonucleotide
  Antisense strand to SEQ ID NO: 1639253
ugguagaagacucaucagg

SEQ ID NO: 1639255 - RNA, 19 nt, Artificial Sequence
  Description of Artificial Sequence: Synthetic oligonucleotide
  Sense strand starting at position 2667 of SEQ ID NO: 1560997
ugaugagucuucuaccaga

SEQ ID NO: 1639256 - RNA, 19 nt, Artificial Sequence
  Description of Artificial Sequence: Synthetic oligonucleotide
  Antisense strand to SEQ ID NO: 1639255
ucugguagaagacucauca

SEQ ID NO: 1639257 - RNA, 19 nt, Artificial Sequence
  Description of Artificial Sequence: Synthetic oligonucleotide
  Sense strand starting at position 2670 of SEQ ID NO: 1560997
ugagucuucuaccagaguc

SEQ ID NO: 1639258 - RNA, 19 nt, Artificial Sequence
  Description of Artificial Sequence: Synthetic oligonucleotide
  Antisense strand to SEQ ID NO: 1639257
gacucugguagaagacuca

SEQ ID NO: 1639259 - RNA, 19 nt, Artificial Sequence
  Description of Artificial Sequence: Synthetic oligonucleotide
  Sense strand starting at position 2847 of SEQ ID NO: 1560997
caaccucgccagugugaaa

SEQ ID NO: 1639260 - RNA, 19 nt, Artificial Sequence
  Description of Artificial Sequence: Synthetic oligonucleotide
  Antisense strand to SEQ ID NO: 1639259
uuucacacuggcgagguug

SEQ ID NO: 1639261 - RNA, 19 nt, Artificial Sequence
  Description of Artificial Sequence: Synthetic oligonucleotide
  Sense strand starting at position 2901 of SEQ ID NO: 1560997
gucugaaaucgugugcccu

SEQ ID NO: 1639262 - RNA, 19 nt, Artificial Sequence
  Description of Artificial Sequence: Synthetic oligonucleotide
  Antisense strand to SEQ ID NO: 1639261
agggcacacgauuucagac

SEQ ID NO: 1639263 - RNA, 19 nt, Artificial Sequence
  Description of Artificial Sequence: Synthetic oligonucleotide
  Sense strand starting at position 2902 of SEQ ID NO: 1560997
ucugaaaucgugugcccua

SEQ ID NO: 1639264 - RNA, 19 nt, Artificial Sequence
  Description of Artificial Sequence: Synthetic oligonucleotide
  Antisense strand to SEQ ID NO: 1639263
uagggcacacgauuucaga

SEQ ID NO: 1639265 - RNA, 19 nt, Artificial Sequence
  Description of Artificial Sequence: Synthetic oligonucleotide
  Sense strand starting at position 2903 of SEQ ID NO: 1560997
cugaaaucgugugcccuaa

SEQ ID NO: 1639266 - RNA, 19 nt, Artificial Sequence
  Description of Artificial Sequence: Synthetic oligonucleotide
  Antisense strand to SEQ ID NO: 1639265
uuagggcacacgauuucag

SEQ ID NO: 1639267 - RNA, 19 nt, Artificial Sequence
  Description of Artificial Sequence: Synthetic oligonucleotide
  Sense strand starting at position 2905 of SEQ ID NO: 1560997
gaaaucgugugcccuaaac

SEQ ID NO: 1639268 - RNA, 19 nt, Artificial Sequence
  Description of Artificial Sequence: Synthetic oligonucleotide
  Antisense strand to SEQ ID NO: 1639267
guuuagggcacacgauuuc

SEQ ID NO: 1639269 - RNA, 19 nt, Artificial Sequence
  Description of Artificial Sequence: Synthetic oligonucleotide
  Sense strand starting at position 2907 of SEQ ID NO: 1560997
aaucgugugcccuaaacag

SEQ ID NO: 1639270 - RNA, 19 nt, Artificial Sequence
  Description of Artificial Sequence: Synthetic oligonucleotide
  Antisense strand to SEQ ID NO: 1639269
cuguuuagggcacacgauu

SEQ ID NO: 1639271 - RNA, 19 nt, Artificial Sequence
  Description of Artificial Sequence: Synthetic oligonucleotide
  Sense strand starting at position 2973 of SEQ ID NO: 1560997
ucaggauggucuugugacu

SEQ ID NO: 1639272 - RNA, 19 nt, Artificial Sequence
  Description of Artificial Sequence: Synthetic oligonucleotide
  Antisense strand to SEQ ID NO: 1639271
agucacaagaccauccuga

SEQ ID NO: 1639273 - RNA, 19 nt, Artificial Sequence
  Description of Artificial Sequence: Synthetic oligonucleotide
  Sense strand starting at position 3057 of SEQ ID NO: 1560997
gcccucagaaguuauggau

SEQ ID NO: 1639274 - RNA, 19 nt, Artificial Sequence
  Description of Artificial Sequence: Synthetic oligonucleotide
  Antisense strand to SEQ ID NO: 1639273
auccauaacuucugagggc

SEQ ID NO: 1639275 - RNA, 19 nt, Artificial Sequence
  Description of Artificial Sequence: Synthetic oligonucleotide
  Sense strand starting at position 3060 of SEQ ID NO: 1560997
cucagaaguuauggauaac

SEQ ID NO: 1639276 - RNA, 19 nt, Artificial Sequence
  Description of Artificial Sequence: Synthetic oligonucleotide
  Antisense strand to SEQ ID NO: 1639275
guuauccauaacuucugag

SEQ ID NO: 1639277 - RNA, 19 nt, Artificial Sequence
  Description of Artificial Sequence: Synthetic oligonucleotide
  Sense strand starting at position 3157 of SEQ ID NO: 1560997
gugccaugguucugaguca

SEQ ID NO: 1639278 - RNA, 19 nt, Artificial Sequence
  Description of Artificial Sequence: Synthetic oligonucleotide
  Antisense strand to SEQ ID NO: 1639277
ugacucagaaccauggcac

SEQ ID NO: 1639279 - RNA, 19 nt, Artificial Sequence
  Description of Artificial Sequence: Synthetic oligonucleotide
  Sense strand starting at position 3162 of SEQ ID NO: 1560997
augguucugagucagcaau

SEQ ID NO: 1639280 - RNA, 19 nt, Artificial Sequence
  Description of Artificial Sequence: Synthetic oligonucleotide
  Antisense strand to SEQ ID NO: 1639279
auugcugacucagaaccau

SEQ ID NO: 1639281 - RNA, 19 nt, Artificial Sequence
  Description of Artificial Sequence: Synthetic oligonucleotide
  Sense strand starting at position 3164 of SEQ ID NO: 1560997
gguucugagucagcaauac

SEQ ID NO: 1639282 - RNA, 19 nt, Artificial Sequence
  Description of Artificial Sequence: Synthetic oligonucleotide
  Antisense strand to SEQ ID NO: 1639281
guauugcugacucagaacc

SEQ ID NO: 1639283 - RNA, 19 nt, Artificial Sequence
  Description of Artificial Sequence: Synthetic oligonucleotide
  Sense strand starting at position 3426 of SEQ ID NO: 1560997
agcucugaauucugaagga

SEQ ID NO: 1639284 - RNA, 19 nt, Artificial Sequence
  Description of Artificial Sequence: Synthetic oligonucleotide
  Antisense strand to SEQ ID NO: 1639283
uccuucagaauucagagcu

SEQ ID NO: 1639285 - RNA, 19 nt, Artificial Sequence
  Description of Artificial Sequence: Synthetic oligonucleotide
  Sense strand starting at position 3716 of SEQ ID NO: 1560997
guggcaucaugccugauuu

SEQ ID NO: 1639286 - RNA, 19 nt, Artificial Sequence
  Description of Artificial Sequence: Synthetic oligonucleotide
  Antisense strand to SEQ ID NO: 1639285
aaaucaggcaugaugccac

SEQ ID NO: 1639287 - RNA, 19 nt, Artificial Sequence
  Description of Artificial Sequence: Synthetic oligonucleotide
  Sense strand starting at position 3717 of SEQ ID NO: 1560997
uggcaucaugccugauuug

SEQ ID NO: 1639288 - RNA, 19 nt, Artificial Sequence
  Description of Artificial Sequence: Synthetic oligonucleotide
  Antisense strand to SEQ ID NO: 1639287
caaaucaggcaugaugcca

SEQ ID NO: 1639289 - RNA, 19 nt, Artificial Sequence
  Description of Artificial Sequence: Synthetic oligonucleotide
  Sense strand starting at position 3859 of SEQ ID NO: 1560997
guggcuugcgccuguaaca

SEQ ID NO: 1639290 - RNA, 19 nt, Artificial Sequence
  Description of Artificial Sequence: Synthetic oligonucleotide
  Antisense strand to SEQ ID NO: 1639289
uguuacaggcgcaagccac

SEQ ID NO: 1639291 - RNA, 19 nt, Artificial Sequence
  Description of Artificial Sequence: Synthetic oligonucleotide
  Sense strand starting at position 37 of SEQ ID NO: 1560998
guuacaagaccuuguaacu

SEQ ID NO: 1639292 - RNA, 19 nt, Artificial Sequence
  Description of Artificial Sequence: Synthetic oligonucleotide
  Antisense strand to SEQ ID NO: 1639291
aguuacaaggucuuguaac

SEQ ID NO: 1639293 - RNA, 19 nt, Artificial Sequence
  Description of Artificial Sequence: Synthetic oligonucleotide
  Sense strand starting at position 333 of SEQ ID NO: 1560998
uggccaaucaauuguagga

SEQ ID NO: 1639294 - RNA, 19 nt, Artificial Sequence
  Description of Artificial Sequence: Synthetic oligonucleotide
  Antisense strand to SEQ ID NO: 1639293
uccuacaauugauuggcca

SEQ ID NO: 1639295 - RNA, 19 nt, Artificial Sequence
  Description of Artificial Sequence: Synthetic oligonucleotide
  Sense strand starting at position 337 of SEQ ID NO: 1560998
caaucaauuguaggauguu

SEQ ID NO: 1639296 - RNA, 19 nt, Artificial Sequence
  Description of Artificial Sequence: Synthetic oligonucleotide
  Antisense strand to SEQ ID NO: 1639295
aacauccuacaauugauug

SEQ ID NO: 1639297 - RNA, 19 nt, Artificial Sequence
  Description of Artificial Sequence: Synthetic oligonucleotide
  Sense strand starting at position 340 of SEQ ID NO: 1560998
ucaauuguaggauguuaac

SEQ ID NO: 1639298 - RNA, 19 nt, Artificial Sequence
  Description of Artificial Sequence: Synthetic oligonucleotide
  Antisense strand to SEQ ID NO: 1639297
guuaacauccuacaauuga

SEQ ID NO: 1639299 - RNA, 19 nt, Artificial Sequence
  Description of Artificial Sequence: Synthetic oligonucleotide
  Sense strand starting at position 434 of SEQ ID NO: 1560998
ggaugagauuaggcagagu

SEQ ID NO: 1639300 - RNA, 19 nt, Artificial Sequence
  Description of Artificial Sequence: Synthetic oligonucleotide
  Antisense strand to SEQ ID NO: 1639299
acucugccuaaucucaucc

SEQ ID NO: 1639301 - RNA, 19 nt, Artificial Sequence
  Description of Artificial Sequence: Synthetic oligonucleotide
  Sense strand starting at position 437 of SEQ ID NO: 1560998
ugagauuaggcagaguagu

SEQ ID NO: 1639302 - RNA, 19 nt, Artificial Sequence
  Description of Artificial Sequence: Synthetic oligonucleotide
  Antisense strand to SEQ ID NO: 1639301
acuacucugccuaaucuca

SEQ ID NO: 1639303 - RNA, 19 nt, Artificial Sequence
  Description of Artificial Sequence: Synthetic oligonucleotide
  Sense strand starting at position 463 of SEQ ID NO: 1560998
ccaugcuagcucugcuaua

SEQ ID NO: 1639304 - RNA, 19 nt, Artificial Sequence
  Description of Artificial Sequence: Synthetic oligonucleotide
  Antisense strand to SEQ ID NO: 1639303
uauagcagagcuagcaugg

SEQ ID NO: 1639305 - RNA, 19 nt, Artificial Sequence
  Description of Artificial Sequence: Synthetic oligonucleotide
  Sense strand starting at position 525 of SEQ ID NO: 1560998
cagcuuccuccggaguaga

SEQ ID NO: 1639306 - RNA, 19 nt, Artificial Sequence
  Description of Artificial Sequence: Synthetic oligonucleotide
  Antisense strand to SEQ ID NO: 1639305
ucuacuccggaggaagcug

SEQ ID NO: 1639307 - RNA, 19 nt, Artificial Sequence
  Description of Artificial Sequence: Synthetic oligonucleotide
  Sense strand starting at position 528 of SEQ ID NO: 1560998
cuuccuccggaguagaaau

SEQ ID NO: 1639308 - RNA, 19 nt, Artificial Sequence
  Description of Artificial Sequence: Synthetic oligonucleotide
  Antisense strand to SEQ ID NO: 1639307
auuucuacuccggaggaag

SEQ ID NO: 1639309 - RNA, 19 nt, Artificial Sequence
  Description of Artificial Sequence: Synthetic oligonucleotide
  Sense strand starting at position 847 of SEQ ID NO: 1560998
aguagaaauccucauuguu

SEQ ID NO: 1639310 - RNA, 19 nt, Artificial Sequence
  Description of Artificial Sequence: Synthetic oligonucleotide
  Antisense strand to SEQ ID NO: 1639309
aacaaugaggauuucuacu

SEQ ID NO: 1639311 - RNA, 19 nt, Artificial Sequence
  Description of Artificial Sequence: Synthetic oligonucleotide
  Sense strand starting at position 896 of SEQ ID NO: 1560998
uguuacacaugcuuuguaa

SEQ ID NO: 1639312 - RNA, 19 nt, Artificial Sequence
  Description of Artificial Sequence: Synthetic oligonucleotide
  Antisense strand to SEQ ID NO: 1639311
uuacaaagcauguguaaca

SEQ ID NO: 1639313 - RNA, 19 nt, Artificial Sequence
  Description of Artificial Sequence: Synthetic oligonucleotide
  Sense strand starting at position 905 of SEQ ID NO: 1560998
ugcuuuguaagcguuggua

SEQ ID NO: 1639314 - RNA, 19 nt, Artificial Sequence
  Description of Artificial Sequence: Synthetic oligonucleotide
  Antisense strand to SEQ ID NO: 1639313
uaccaacgcuuacaaagca

SEQ ID NO: 1639315 - RNA, 19 nt, Artificial Sequence
  Description of Artificial Sequence: Synthetic oligonucleotide
  Sense strand starting at position 909 of SEQ ID NO: 1560998
uuguaagcguugguacaaa

SEQ ID NO: 1639316 - RNA, 19 nt, Artificial Sequence
  Description of Artificial Sequence: Synthetic oligonucleotide
  Antisense strand to SEQ ID NO: 1639315
uuuguaccaacgcuuacaa

SEQ ID NO: 1639317 - RNA, 19 nt, Artificial Sequence
  Description of Artificial Sequence: Synthetic oligonucleotide
  Sense strand starting at position 940 of SEQ ID NO: 1560998
cagacagacuuccugaagu

SEQ ID NO: 1639318 - RNA, 19 nt, Artificial Sequence
  Description of Artificial Sequence: Synthetic oligonucleotide
  Antisense strand to SEQ ID NO: 1639317
acuucaggaagucugucug

SEQ ID NO: 1639319 - RNA, 19 nt, Artificial Sequence
  Description of Artificial Sequence: Synthetic oligonucleotide
  Sense strand starting at position 1021 of SEQ ID NO: 1560998
caguaacugccucaggaau

SEQ ID NO: 1639320 - RNA, 19 nt, Artificial Sequence
  Description of Artificial Sequence: Synthetic oligonucleotide
  Antisense strand to SEQ ID NO: 1639319
auuccugaggcaguuacug

SEQ ID NO: 1639321 - RNA, 19 nt, Artificial Sequence
  Description of Artificial Sequence: Synthetic oligonucleotide
  Sense strand starting at position 1029 of SEQ ID NO: 1560998
gccucaggaauaugguuaa

SEQ ID NO: 1639322 - RNA, 19 nt, Artificial Sequence
  Description of Artificial Sequence: Synthetic oligonucleotide
  Antisense strand to SEQ ID NO: 1639321
uuaaccauauuccugaggc

SEQ ID NO: 1639323 - RNA, 19 nt, Artificial Sequence
  Description of Artificial Sequence: Synthetic oligonucleotide
  Sense strand starting at position 1032 of SEQ ID NO: 1560998
ucaggaauaugguuaacug

SEQ ID NO: 1639324 - RNA, 19 nt, Artificial Sequence
  Description of Artificial Sequence: Synthetic oligonucleotide
  Antisense strand to SEQ ID NO: 1639323
caguuaaccauauuccuga

SEQ ID NO: 1639325 - RNA, 19 nt, Artificial Sequence
  Description of Artificial Sequence: Synthetic oligonucleotide
  Sense strand starting at position 1068 of SEQ ID NO: 1560998
cgaacugugcuaggcacaa

SEQ ID NO: 1639326 - RNA, 19 nt, Artificial Sequence
  Description of Artificial Sequence: Synthetic oligonucleotide
  Antisense strand to SEQ ID NO: 1639325
uugugccuagcacaguucg

SEQ ID NO: 1639327 - RNA, 19 nt, Artificial Sequence
  Description of Artificial Sequence: Synthetic oligonucleotide
  Sense strand starting at position 1088 of SEQ ID NO: 1560998
gacacaugcuuggugaaca

SEQ ID NO: 1639328 - RNA, 19 nt, Artificial Sequence
  Description of Artificial Sequence: Synthetic oligonucleotide
  Antisense strand to SEQ ID NO: 1639327
uguucaccaagcauguguc

SEQ ID NO: 1639329 - RNA, 19 nt, Artificial Sequence
  Description of Artificial Sequence: Synthetic oligonucleotide
  Sense strand starting at position 1258 of SEQ ID NO: 1560998
augucccauccuuguggaa

SEQ ID NO: 1639330 - RNA, 19 nt, Artificial Sequence
  Description of Artificial Sequence: Synthetic oligonucleotide
  Antisense strand to SEQ ID NO: 1639329
uuccacaaggaugggacau

SEQ ID NO: 1639331 - RNA, 19 nt, Artificial Sequence
  Description of Artificial Sequence: Synthetic oligonucleotide
  Sense strand starting at position 1394 of SEQ ID NO: 1560998
gcagaaaggcauugagaau

SEQ ID NO: 1639332 - RNA, 19 nt, Artificial Sequence
  Description of Artificial Sequence: Synthetic oligonucleotide
  Antisense strand to SEQ ID NO: 1639331
auucucaaugccuuucugc

SEQ ID NO: 1639333 - RNA, 19 nt, Artificial Sequence
  Description of Artificial Sequence: Synthetic oligonucleotide
  Sense strand starting at position 1443 of SEQ ID NO: 1560998
uuaacaccuccacgugaaa

SEQ ID NO: 1639334 - RNA, 19 nt, Artificial Sequence
  Description of Artificial Sequence: Synthetic oligonucleotide
  Antisense strand to SEQ ID NO: 1639333
uuucacguggagguguuaa

SEQ ID NO: 1639335 - RNA, 19 nt, Artificial Sequence
  Description of Artificial Sequence: Synthetic oligonucleotide
  Sense strand starting at position 1474 of SEQ ID NO: 1560998
gcgcacugagcgggauaaa

SEQ ID NO: 1639336 - RNA, 19 nt, Artificial Sequence
  Description of Artificial Sequence: Synthetic oligonucleotide
  Antisense strand to SEQ ID NO: 1639335
uuuaucccgcucagugcgc

SEQ ID NO: 1639337 - RNA, 19 nt, Artificial Sequence
  Description of Artificial Sequence: Synthetic oligonucleotide
  Sense strand starting at position 1588 of SEQ ID NO: 1560998
guccaauucggccaagacu

SEQ ID NO: 1639338 - RNA, 19 nt, Artificial Sequence
  Description of Artificial Sequence: Synthetic oligonucleotide
  Antisense strand to SEQ ID NO: 1639337
agucuuggccgaauuggac

SEQ ID NO: 1639339 - RNA, 19 nt, Artificial Sequence
  Description of Artificial Sequence: Synthetic oligonucleotide
  Sense strand starting at position 2102 of SEQ ID NO: 1560998
guccaauccggacauucuu

SEQ ID NO: 1639340 - RNA, 19 nt, Artificial Sequence
  Description of Artificial Sequence: Synthetic oligonucleotide
  Antisense strand to SEQ ID NO: 1639339
aagaauguccggauuggac

SEQ ID NO: 1639341 - RNA, 19 nt, Artificial Sequence
  Description of Artificial Sequence: Synthetic oligonucleotide
  Sense strand starting at position 2261 of SEQ ID NO: 1560998
ccauguuugugaguggaag

SEQ ID NO: 1639342 - RNA, 19 nt, Artificial Sequence
  Description of Artificial Sequence: Synthetic oligonucleotide
  Antisense strand to SEQ ID NO: 1639341
cuuccacucacaaacaugg

SEQ ID NO: 1639343 - RNA, 19 nt, Artificial Sequence
  Description of Artificial Sequence: Synthetic oligonucleotide
  Sense strand starting at position 2408 of SEQ ID NO: 1560998
cuguguuguccacaccaga

SEQ ID NO: 1639344 - RNA, 19 nt, Artificial Sequence
  Description of Artificial Sequence: Synthetic oligonucleotide
  Antisense strand to SEQ ID NO: 1639343
ucugguguggacaacacag

SEQ ID NO: 1639345 - RNA, 19 nt, Artificial Sequence
  Description of Artificial Sequence: Synthetic oligonucleotide
  Sense strand starting at position 2691 of SEQ ID NO: 1560998
ugcccauucuaggcuuaga

SEQ ID NO: 1639346 - RNA, 19 nt, Artificial Sequence
  Description of Artificial Sequence: Synthetic oligonucleotide
  Antisense strand to SEQ ID NO: 1639345
ucuaagccuagaaugggca

SEQ ID NO: 1639347 - RNA, 19 nt, Artificial Sequence
  Description of Artificial Sequence: Synthetic oligonucleotide
  Sense strand starting at position 2694 of SEQ ID NO: 1560998
ccauucuaggcuuagagau

SEQ ID NO: 1639348 - RNA, 19 nt, Artificial Sequence
  Description of Artificial Sequence: Synthetic oligonucleotide
  Antisense strand to SEQ ID NO: 1639347
aucucuaagccuagaaugg

SEQ ID NO: 1639349 - RNA, 19 nt, Artificial Sequence
  Description of Artificial Sequence: Synthetic oligonucleotide
  Sense strand starting at position 2696 of SEQ ID NO: 1560998
auucuaggcuuagagauuu

SEQ ID NO: 1639350 - RNA, 19 nt, Artificial Sequence
  Description of Artificial Sequence: Synthetic oligonucleotide
  Antisense strand to SEQ ID NO: 1639349
aaaucucuaagccuagaau

SEQ ID NO: 1639351 - RNA, 19 nt, Artificial Sequence
  Description of Artificial Sequence: Synthetic oligonucleotide
  Sense strand starting at position 2820 of SEQ ID NO: 1560998
gggcucuaagaguggauca

SEQ ID NO: 1639352 - RNA, 19 nt, Artificial Sequence
  Description of Artificial Sequence: Synthetic oligonucleotide
  Antisense strand to SEQ ID NO: 1639351
ugauccacucuuagagccc

SEQ ID NO: 1639353 - RNA, 19 nt, Artificial Sequence
  Description of Artificial Sequence: Synthetic oligonucleotide
  Sense strand starting at position 2821 of SEQ ID NO: 1560998
ggcucuaagaguggaucaa

SEQ ID NO: 1639354 - RNA, 19 nt, Artificial Sequence
  Description of Artificial Sequence: Synthetic oligonucleotide
  Antisense strand to SEQ ID NO: 1639353
uugauccacucuuagagcc

SEQ ID NO: 1639355 - RNA, 19 nt, Artificial Sequence
  Description of Artificial Sequence: Synthetic oligonucleotide
  Sense strand starting at position 2875 of SEQ ID NO: 1560998
cugagcguuccucagagga

SEQ ID NO: 1639356 - RNA, 19 nt, Artificial Sequence
  Description of Artificial Sequence: Synthetic oligonucleotide
  Antisense strand to SEQ ID NO: 1639355
uccucugaggaacgcucag

SEQ ID NO: 1639357 - RNA, 19 nt, Artificial Sequence
  Description of Artificial Sequence: Synthetic oligonucleotide
  Sense strand starting at position 2879 of SEQ ID NO: 1560998
gcguuccucagaggaacuu

SEQ ID NO: 1639358 - RNA, 19 nt, Artificial Sequence
  Description of Artificial Sequence: Synthetic oligonucleotide
  Antisense strand to SEQ ID NO: 1639357
aaguuccucugaggaacgc

SEQ ID NO: 1639359 - RNA, 19 nt, Artificial Sequence
  Description of Artificial Sequence: Synthetic oligonucleotide
  Sense strand starting at position 3224 of SEQ ID NO: 1560998
acacguauugaaugaaaca

SEQ ID NO: 1639360 - RNA, 19 nt, Artificial Sequence
  Description of Artificial Sequence: Synthetic oligonucleotide
  Antisense strand to SEQ ID NO: 1639359
uguuucauucaauacgugu

SEQ ID NO: 1639361 - RNA, 19 nt, Artificial Sequence
  Description of Artificial Sequence: Synthetic oligonucleotide
  Sense strand starting at position 3579 of SEQ ID NO: 1560998
guuuaaggcuccgcugaga

SEQ ID NO: 1639362 - RNA, 19 nt, Artificial Sequence
  Description of Artificial Sequence: Synthetic oligonucleotide
  Antisense strand to SEQ ID NO: 1639361
ucucagcggagccuuaaac

SEQ ID NO: 1639363 - RNA, 19 nt, Artificial Sequence
  Description of Artificial Sequence: Synthetic oligonucleotide
  Sense strand starting at position 3630 of SEQ ID NO: 1560998
gccacagauuuaugcccaa

SEQ ID NO: 1639364 - RNA, 19 nt, Artificial Sequence
  Description of Artificial Sequence: Synthetic oligonucleotide
  Antisense strand to SEQ ID NO: 1639363
uugggcauaaaucuguggc

SEQ ID NO: 1639365 - RNA, 19 nt, Artificial Sequence
  Description of Artificial Sequence: Synthetic oligonucleotide
  Sense strand starting at position 3686 of SEQ ID NO: 1560998
gggcauugcuguccaagag

SEQ ID NO: 1639366 - RNA, 19 nt, Artificial Sequence
  Description of Artificial Sequence: Synthetic oligonucleotide
  Antisense strand to SEQ ID NO: 1639365
cucuuggacagcaaugccc

SEQ ID NO: 1639367 - RNA, 19 nt, Artificial Sequence
  Description of Artificial Sequence: Synthetic oligonucleotide
  Sense strand starting at position 3701 of SEQ ID NO: 1560998
agagaacguggccaugaua

SEQ ID NO: 1639368 - RNA, 19 nt, Artificial Sequence
  Description of Artificial Sequence: Synthetic oligonucleotide
  Antisense strand to SEQ ID NO: 1639367
uaucauggccacguucucu

SEQ ID NO: 1639369 - RNA, 19 nt, Artificial Sequence
  Description of Artificial Sequence: Synthetic oligonucleotide
  Sense strand starting at position 3704 of SEQ ID NO: 1560998
gaacguggccaugauagaa

SEQ ID NO: 1639370 - RNA, 19 nt, Artificial Sequence
  Description of Artificial Sequence: Synthetic oligonucleotide
  Antisense strand to SEQ ID NO: 1639369
uucuaucauggccacguuc

SEQ ID NO: 1639371 - RNA, 19 nt, Artificial Sequence
  Description of Artificial Sequence: Synthetic oligonucleotide
  Sense strand starting at position 78 of SEQ ID NO: 1560999
acaugaugaucuggacuaa

SEQ ID NO: 1639372 - RNA, 19 nt, Artificial Sequence
  Description of Artificial Sequence: Synthetic oligonucleotide
  Antisense strand to SEQ ID NO: 1639371
uuaguccagaucaucaugu

SEQ ID NO: 1639373 - RNA, 19 nt, Artificial Sequence
  Description of Artificial Sequence: Synthetic oligonucleotide
  Sense strand starting at position 335 of SEQ ID NO: 1560999
gggugacccuucccaaaga

SEQ ID NO: 1639374 - RNA, 19 nt, Artificial Sequence
  Description of Artificial Sequence: Synthetic oligonucleotide
  Antisense strand to SEQ ID NO: 1639373
ucuuugggaagggucaccc

SEQ ID NO: 1639375 - RNA, 19 nt, Artificial Sequence
  Description of Artificial Sequence: Synthetic oligonucleotide
  Sense strand starting at position 670 of SEQ ID NO: 1560999
ccugaaacaucguaacaca

SEQ ID NO: 1639376 - RNA, 19 nt, Artificial Sequence
  Description of Artificial Sequence: Synthetic oligonucleotide
  Antisense strand to SEQ ID NO: 1639375
uguguuacgauguuucagg

SEQ ID NO: 1639377 - RNA, 19 nt, Artificial Sequence
  Description of Artificial Sequence: Synthetic oligonucleotide
  Sense strand starting at position 964 of SEQ ID NO: 1560999
ucuugaucuccugggcaag

SEQ ID NO: 1639378 - RNA, 19 nt, Artificial Sequence
  Description of Artificial Sequence: Synthetic oligonucleotide
  Antisense strand to SEQ ID NO: 1639377
cuugcccaggagaucaaga

SEQ ID NO: 1639379 - RNA, 19 nt, Artificial Sequence
  Description of Artificial Sequence: Synthetic oligonucleotide
  Sense strand starting at position 1058 of SEQ ID NO: 1560999
cugccuuucugagcaacuu

SEQ ID NO: 1639380 - RNA, 19 nt, Artificial Sequence
  Description of Artificial Sequence: Synthetic oligonucleotide
  Antisense strand to SEQ ID NO: 1639379
aaguugcucagaaaggcag

SEQ ID NO: 1639381 - RNA, 19 nt, Artificial Sequence
  Description of Artificial Sequence: Synthetic oligonucleotide
  Sense strand starting at position 1059 of SEQ ID NO: 1560999
ugccuuucugagcaacuua

SEQ ID NO: 1639382 - RNA, 19 nt, Artificial Sequence
  Description of Artificial Sequence: Synthetic oligonucleotide
  Antisense strand to SEQ ID NO: 1639381
uaaguugcucagaaaggca

SEQ ID NO: 1639383 - RNA, 19 nt, Artificial Sequence
  Description of Artificial Sequence: Synthetic oligonucleotide
  Sense strand starting at position 1084 of SEQ ID NO: 1560999
ucagacuguguugacaauu

SEQ ID NO: 1639384 - RNA, 19 nt, Artificial Sequence
  Description of Artificial Sequence: Synthetic oligonucleotide
  Antisense strand to SEQ ID NO: 1639383
aauugucaacacagucuga

SEQ ID NO: 1639385 - RNA, 19 nt, Artificial Sequence
  Description of Artificial Sequence: Synthetic oligonucleotide
  Sense strand starting at position 1160 of SEQ ID NO: 1560999
augagcaucuccugugaau

SEQ ID NO: 1639386 - RNA, 19 nt, Artificial Sequence
  Description of Artificial Sequence: Synthetic oligonucleotide
  Antisense strand to SEQ ID NO: 1639385
auucacaggagaugcucau

SEQ ID NO: 1639387 - RNA, 19 nt, Artificial Sequence
  Description of Artificial Sequence: Synthetic oligonucleotide
  Sense strand starting at position 1194 of SEQ ID NO: 1560999
ucacaaacuugucagauga

SEQ ID NO: 1639388 - RNA, 19 nt, Artificial Sequence
  Description of Artificial Sequence: Synthetic oligonucleotide
  Antisense strand to SEQ ID NO: 1639387
ucaucugacaaguuuguga

SEQ ID NO: 1639389 - RNA, 19 nt, Artificial Sequence
  Description of Artificial Sequence: Synthetic oligonucleotide
  Sense strand starting at position 1196 of SEQ ID NO: 1560999
acaaacuugucagaugaga

SEQ ID NO: 1639390 - RNA, 19 nt, Artificial Sequence
  Description of Artificial Sequence: Synthetic oligonucleotide
  Antisense strand to SEQ ID NO: 1639389
ucucaucugacaaguuugu

SEQ ID NO: 1639391 - RNA, 19 nt, Artificial Sequence
  Description of Artificial Sequence: Synthetic oligonucleotide
  Sense strand starting at position 1207 of SEQ ID NO: 1560999
agaugagauuacuguguac

SEQ ID NO: 1639392 - RNA, 19 nt, Artificial Sequence
  Description of Artificial Sequence: Synthetic oligonucleotide
  Antisense strand to SEQ ID NO: 1639391
guacacaguaaucucaucu

SEQ ID NO: 1639393 - RNA, 19 nt, Artificial Sequence
  Description of Artificial Sequence: Synthetic oligonucleotide
  Sense strand starting at position 1210 of SEQ ID NO: 1560999
ugagauuacuguguaccca

SEQ ID NO: 1639394 - RNA, 19 nt, Artificial Sequence
  Description of Artificial Sequence: Synthetic oligonucleotide
  Antisense strand to SEQ ID NO: 1639393
uggguacacaguaaucuca

SEQ ID NO: 1639395 - RNA, 19 nt, Artificial Sequence
  Description of Artificial Sequence: Synthetic oligonucleotide
  Sense strand starting at position 1211 of SEQ ID NO: 1560999
gagauuacuguguacccaa

SEQ ID NO: 1639396 - RNA, 19 nt, Artificial Sequence
  Description of Artificial Sequence: Synthetic oligonucleotide
  Antisense strand to SEQ ID NO: 1639395
uuggguacacaguaaucuc

SEQ ID NO: 1639397 - RNA, 19 nt, Artificial Sequence
  Description of Artificial Sequence: Synthetic oligonucleotide
  Sense strand starting at position 1517 of SEQ ID NO: 1560999
uccacuuggucaucuacua

SEQ ID NO: 1639398 - RNA, 19 nt, Artificial Sequence
  Description of Artificial Sequence: Synthetic oligonucleotide
  Antisense strand to SEQ ID NO: 1639397
uaguagaugaccaagugga

SEQ ID NO: 1639399 - RNA, 19 nt, Artificial Sequence
  Description of Artificial Sequence: Synthetic oligonucleotide
  Sense strand starting at position 1848 of SEQ ID NO: 1560999
ccggacuucucugugguga

SEQ ID NO: 1639400 - RNA, 19 nt, Artificial Sequence
  Description of Artificial Sequence: Synthetic oligonucleotide
  Antisense strand to SEQ ID NO: 1639399
ucaccacagagaaguccgg

SEQ ID NO: 1639401 - RNA, 19 nt, Artificial Sequence
  Description of Artificial Sequence: Synthetic oligonucleotide
  Sense strand starting at position 1850 of SEQ ID NO: 1560999
ggacuucucuguggugagu

SEQ ID NO: 1639402 - RNA, 19 nt, Artificial Sequence
  Description of Artificial Sequence: Synthetic oligonucleotide
  Antisense strand to SEQ ID NO: 1639401
acucaccacagagaagucc

SEQ ID NO: 1639403 - RNA, 19 nt, Artificial Sequence
  Description of Artificial Sequence: Synthetic oligonucleotide
  Sense strand starting at position 1861 of SEQ ID NO: 1560999
uggugaguuggacgacuga

SEQ ID NO: 1639404 - RNA, 19 nt, Artificial Sequence
  Description of Artificial Sequence: Synthetic oligonucleotide
  Antisense strand to SEQ ID NO: 1639403
ucagucguccaacucacca

SEQ ID NO: 1639405 - RNA, 19 nt, Artificial Sequence
  Description of Artificial Sequence: Synthetic oligonucleotide
  Sense strand starting at position 2259 of SEQ ID NO: 1560999
aguccuacuuaaggucuaa

SEQ ID NO: 1639406 - RNA, 19 nt, Artificial Sequence
  Description of Artificial Sequence: Synthetic oligonucleotide
  Antisense strand to SEQ ID NO: 1639405
uuagaccuuaaguaggacu

SEQ ID NO: 1639407 - RNA, 19 nt, Artificial Sequence
  Description of Artificial Sequence: Synthetic oligonucleotide
  Sense strand starting at position 2271 of SEQ ID NO: 1560999
ggucuaacccgagaugauc

SEQ ID NO: 1639408 - RNA, 19 nt, Artificial Sequence
  Description of Artificial Sequence: Synthetic oligonucleotide
  Antisense strand to SEQ ID NO: 1639407
gaucaucucggguuagacc

SEQ ID NO: 1639409 - RNA, 19 nt, Artificial Sequence
  Description of Artificial Sequence: Synthetic oligonucleotide
  Sense strand starting at position 2279 of SEQ ID NO: 1560999
ccgagaugaucuugcugca

SEQ ID NO: 1639410 - RNA, 19 nt, Artificial Sequence
  Description of Artificial Sequence: Synthetic oligonucleotide
  Antisense strand to SEQ ID NO: 1639409
ugcagcaagaucaucucgg

SEQ ID NO: 1639411 - RNA, 19 nt, Artificial Sequence
  Description of Artificial Sequence: Synthetic oligonucleotide
  Sense strand starting at position 2317 of SEQ ID NO: 1560999
guauucccauccuuugagu

SEQ ID NO: 1639412 - RNA, 19 nt, Artificial Sequence
  Description of Artificial Sequence: Synthetic oligonucleotide
  Antisense strand to SEQ ID NO: 1639411
acucaaaggaugggaauac

SEQ ID NO: 1639413 - RNA, 19 nt, Artificial Sequence
  Description of Artificial Sequence: Synthetic oligonucleotide
  Sense strand starting at position 2368 of SEQ ID NO: 1560999
gcccuucccugaccuagaa

SEQ ID NO: 1639414 - RNA, 19 nt, Artificial Sequence
  Description of Artificial Sequence: Synthetic oligonucleotide
  Antisense strand to SEQ ID NO: 1639413
uucuaggucagggaagggc

SEQ ID NO: 1639415 - RNA, 19 nt, Artificial Sequence
  Description of Artificial Sequence: Synthetic oligonucleotide
  Sense strand starting at position 2573 of SEQ ID NO: 1560999
uggcucugcuaguuacuaa

SEQ ID NO: 1639416 - RNA, 19 nt, Artificial Sequence
  Description of Artificial Sequence: Synthetic oligonucleotide
  Antisense strand to SEQ ID NO: 1639415
uuaguaacuagcagagcca

SEQ ID NO: 1639417 - RNA, 19 nt, Artificial Sequence
  Description of Artificial Sequence: Synthetic oligonucleotide
  Sense strand starting at position 2656 of SEQ ID NO: 1560999
gccuuacucuccuuaugga

SEQ ID NO: 1639418 - RNA, 19 nt, Artificial Sequence
  Description of Artificial Sequence: Synthetic oligonucleotide
  Antisense strand to SEQ ID NO: 1639417
uccauaaggagaguaaggc

SEQ ID NO: 1639419 - RNA, 19 nt, Artificial Sequence
  Description of Artificial Sequence: Synthetic oligonucleotide
  Sense strand starting at position 2739 of SEQ ID NO: 1560999
aacugcugaggucaauauu

SEQ ID NO: 1639420 - RNA, 19 nt, Artificial Sequence
  Description of Artificial Sequence: Synthetic oligonucleotide
  Antisense strand to SEQ ID NO: 1639419
aauauugaccucagcaguu

SEQ ID NO: 1639421 - RNA, 19 nt, Artificial Sequence
  Description of Artificial Sequence: Synthetic oligonucleotide
  Sense strand starting at position 2806 of SEQ ID NO: 1560999
gcauacauauugugugcaa

SEQ ID NO: 1639422 - RNA, 19 nt, Artificial Sequence
  Description of Artificial Sequence: Synthetic oligonucleotide
  Antisense strand to SEQ ID NO: 1639421
uugcacacaauauguaugc

SEQ ID NO: 1639423 - RNA, 19 nt, Artificial Sequence
  Description of Artificial Sequence: Synthetic oligonucleotide
  Sense strand starting at position 2936 of SEQ ID NO: 1560999
ccugcaguuggcugucaau

SEQ ID NO: 1639424 - RNA, 19 nt, Artificial Sequence
  Description of Artificial Sequence: Synthetic oligonucleotide
  Antisense strand to SEQ ID NO: 1639423
auugacagccaacugcagg

SEQ ID NO: 1639425 - RNA, 19 nt, Artificial Sequence
  Description of Artificial Sequence: Synthetic oligonucleotide
  Sense strand starting at position 3161 of SEQ ID NO: 1560999
uccucauacuguggaaaga

SEQ ID NO: 1639426 - RNA, 19 nt, Artificial Sequence
  Description of Artificial Sequence: Synthetic oligonucleotide
  Antisense strand to SEQ ID NO: 1639425
ucuuuccacaguaugagga

SEQ ID NO: 1639427 - RNA, 19 nt, Artificial Sequence
  Description of Artificial Sequence: Synthetic oligonucleotide
  Sense strand starting at position 32 of SEQ ID NO: 1561000
gaugcaguuccugaacuca

SEQ ID NO: 1639428 - RNA, 19 nt, Artificial Sequence
  Description of Artificial Sequence: Synthetic oligonucleotide
  Antisense strand to SEQ ID NO: 1639427
ugaguucaggaacugcauc

SEQ ID NO: 1639429 - RNA, 19 nt, Artificial Sequence
  Description of Artificial Sequence: Synthetic oligonucleotide
  Sense strand starting at position 191 of SEQ ID NO: 1561000
gucccuggcuuucuaauca

SEQ ID NO: 1639430 - RNA, 19 nt, Artificial Sequence
  Description of Artificial Sequence: Synthetic oligonucleotide
  Antisense strand to SEQ ID NO: 1639429
ugauuagaaagccagggac

SEQ ID NO: 1639431 - RNA, 19 nt, Artificial Sequence
  Description of Artificial Sequence: Synthetic oligonucleotide
  Sense strand starting at position 195 of SEQ ID NO: 1561000
cuggcuuucuaaucaggga

SEQ ID NO: 1639432 - RNA, 19 nt, Artificial Sequence
  Description of Artificial Sequence: Synthetic oligonucleotide
  Antisense strand to SEQ ID NO: 1639431
ucccugauuagaaagccag

SEQ ID NO: 1639433 - RNA, 19 nt, Artificial Sequence
  Description of Artificial Sequence: Synthetic oligonucleotide
  Sense strand starting at position 277 of SEQ ID NO: 1561000
gucugaugugaugggauua

SEQ ID NO: 1639434 - RNA, 19 nt, Artificial Sequence
  Description of Artificial Sequence: Synthetic oligonucleotide
  Antisense strand to SEQ ID NO: 1639433
uaaucccaucacaucagac

SEQ ID NO: 1639435 - RNA, 19 nt, Artificial Sequence
  Description of Artificial Sequence: Synthetic oligonucleotide
  Sense strand starting at position 316 of SEQ ID NO: 1561000
ccguucgaugucugauuaa

SEQ ID NO: 1639436 - RNA, 19 nt, Artificial Sequence
  Description of Artificial Sequence: Synthetic oligonucleotide
  Antisense strand to SEQ ID NO: 1639435
uuaaucagacaucgaacgg

SEQ ID NO: 1639437 - RNA, 19 nt, Artificial Sequence
  Description of Artificial Sequence: Synthetic oligonucleotide
  Sense strand starting at position 319 of SEQ ID NO: 1561000
uucgaugucugauuaauuc

SEQ ID NO: 1639438 - RNA, 19 nt, Artificial Sequence
  Description of Artificial Sequence: Synthetic oligonucleotide
  Antisense strand to SEQ ID NO: 1639437
gaauuaaucagacaucgaa

SEQ ID NO: 1639439 - RNA, 19 nt, Artificial Sequence
  Description of Artificial Sequence: Synthetic oligonucleotide
  Sense strand starting at position 326 of SEQ ID NO: 1561000
ucugauuaauucuugagau

SEQ ID NO: 1639440 - RNA, 19 nt, Artificial Sequence
  Description of Artificial Sequence: Synthetic oligonucleotide
  Antisense strand to SEQ ID NO: 1639439
aucucaagaauuaaucaga

SEQ ID NO: 1639441 - RNA, 19 nt, Artificial Sequence
  Description of Artificial Sequence: Synthetic oligonucleotide
  Sense strand starting at position 328 of SEQ ID NO: 1561000
ugauuaauucuugagaugc

SEQ ID NO: 1639442 - RNA, 19 nt, Artificial Sequence
  Description of Artificial Sequence: Synthetic oligonucleotide
  Antisense strand to SEQ ID NO: 1639441
gcaucucaagaauuaauca

SEQ ID NO: 1639443 - RNA, 19 nt, Artificial Sequence
  Description of Artificial Sequence: Synthetic oligonucleotide
  Sense strand starting at position 714 of SEQ ID NO: 1561000
ccauguggauucuugguga

SEQ ID NO: 1639444 - RNA, 19 nt, Artificial Sequence
  Description of Artificial Sequence: Synthetic oligonucleotide
  Antisense strand to SEQ ID NO: 1639443
ucaccaagaauccacaugg

SEQ ID NO: 1639445 - RNA, 19 nt, Artificial Sequence
  Description of Artificial Sequence: Synthetic oligonucleotide
  Sense strand starting at position 717 of SEQ ID NO: 1561000
uguggauucuuggugacug

SEQ ID NO: 1639446 - RNA, 19 nt, Artificial Sequence
  Description of Artificial Sequence: Synthetic oligonucleotide
  Antisense strand to SEQ ID NO: 1639445
cagucaccaagaauccaca

SEQ ID NO: 1639447 - RNA, 19 nt, Artificial Sequence
  Description of Artificial Sequence: Synthetic oligonucleotide
  Sense strand starting at position 719 of SEQ ID NO: 1561000
uggauucuuggugacugua

SEQ ID NO: 1639448 - RNA, 19 nt, Artificial Sequence
  Description of Artificial Sequence: Synthetic oligonucleotide
  Antisense strand to SEQ ID NO: 1639447
uacagucaccaagaaucca

SEQ ID NO: 1639449 - RNA, 19 nt, Artificial Sequence
  Description of Artificial Sequence: Synthetic oligonucleotide
  Sense strand starting at position 851 of SEQ ID NO: 1561000
ccaggaaagcuguggcuua

SEQ ID NO: 1639450 - RNA, 19 nt, Artificial Sequence
  Description of Artificial Sequence: Synthetic oligonucleotide
  Antisense strand to SEQ ID NO: 1639449
uaagccacagcuuuccugg

SEQ ID NO: 1639451 - RNA, 19 nt, Artificial Sequence
  Description of Artificial Sequence: Synthetic oligonucleotide
  Sense strand starting at position 1117 of SEQ ID NO: 1561000
aaacguuuggcccagggaa

SEQ ID NO: 1639452 - RNA, 19 nt, Artificial Sequence
  Description of Artificial Sequence: Synthetic oligonucleotide
  Antisense strand to SEQ ID NO: 1639451
uucccugggccaaacguuu

SEQ ID NO: 1639453 - RNA, 19 nt, Artificial Sequence
  Description of Artificial Sequence: Synthetic oligonucleotide
  Sense strand starting at position 1119 of SEQ ID NO: 1561000
acguuuggcccagggaaga

SEQ ID NO: 1639454 - RNA, 19 nt, Artificial Sequence
  Description of Artificial Sequence: Synthetic oligonucleotide
  Antisense strand to SEQ ID NO: 1639453
ucuucccugggccaaacgu

SEQ ID NO: 1639455 - RNA, 19 nt, Artificial Sequence
  Description of Artificial Sequence: Synthetic oligonucleotide
  Sense strand starting at position 1158 of SEQ ID NO: 1561000
aggugagaaucuuugguca

SEQ ID NO: 1639456 - RNA, 19 nt, Artificial Sequence
  Description of Artificial Sequence: Synthetic oligonucleotide
  Antisense strand to SEQ ID NO: 1639455
ugaccaaagauucucaccu

SEQ ID NO: 1639457 - RNA, 19 nt, Artificial Sequence
  Description of Artificial Sequence: Synthetic oligonucleotide
  Sense strand starting at position 1161 of SEQ ID NO: 1561000
ugagaaucuuuggucaagu

SEQ ID NO: 1639458 - RNA, 19 nt, Artificial Sequence
  Description of Artificial Sequence: Synthetic oligonucleotide
  Antisense strand to SEQ ID NO: 1639457
acuugaccaaagauucuca

SEQ ID NO: 1639459 - RNA, 19 nt, Artificial Sequence
  Description of Artificial Sequence: Synthetic oligonucleotide
  Sense strand starting at position 1162 of SEQ ID NO: 1561000
gagaaucuuuggucaaguc

SEQ ID NO: 1639460 - RNA, 19 nt, Artificial Sequence
  Description of Artificial Sequence: Synthetic oligonucleotide
  Antisense strand to SEQ ID NO: 1639459
gacuugaccaaagauucuc

SEQ ID NO: 1639461 - RNA, 19 nt, Artificial Sequence
  Description of Artificial Sequence: Synthetic oligonucleotide
  Sense strand starting at position 1176 of SEQ ID NO: 1561000
aaguccaggcucugugaua

SEQ ID NO: 1639462 - RNA, 19 nt, Artificial Sequence
  Description of Artificial Sequence: Synthetic oligonucleotide
  Antisense strand to SEQ ID NO: 1639461
uaucacagagccuggacuu

SEQ ID NO: 1639463 - RNA, 19 nt, Artificial Sequence
  Description of Artificial Sequence: Synthetic oligonucleotide
  Sense strand starting at position 1177 of SEQ ID NO: 1561000
aguccaggcucugugauau

SEQ ID NO: 1639464 - RNA, 19 nt, Artificial Sequence
  Description of Artificial Sequence: Synthetic oligonucleotide
  Antisense strand to SEQ ID NO: 1639463
auaucacagagccuggacu

SEQ ID NO: 1639465 - RNA, 19 nt, Artificial Sequence
  Description of Artificial Sequence: Synthetic oligonucleotide
  Sense strand starting at position 1183 of SEQ ID NO: 1561000
ggcucugugauauggcaca

SEQ ID NO: 1639466 - RNA, 19 nt, Artificial Sequence
  Description of Artificial Sequence: Synthetic oligonucleotide
  Antisense strand to SEQ ID NO: 1639465
ugugccauaucacagagcc

SEQ ID NO: 1639467 - RNA, 19 nt, Artificial Sequence
  Description of Artificial Sequence: Synthetic oligonucleotide
  Sense strand starting at position 1428 of SEQ ID NO: 1561000
cgccauagagccguuugau

SEQ ID NO: 1639468 - RNA, 19 nt, Artificial Sequence
  Description of Artificial Sequence: Synthetic oligonucleotide
  Antisense strand to SEQ ID NO: 1639467
aucaaacggcucuauggcg

SEQ ID NO: 1639469 - RNA, 19 nt, Artificial Sequence
  Description of Artificial Sequence: Synthetic oligonucleotide
  Sense strand starting at position 1431 of SEQ ID NO: 1561000
cauagagccguuugauucu

SEQ ID NO: 1639470 - RNA, 19 nt, Artificial Sequence
  Description of Artificial Sequence: Synthetic oligonucleotide
  Antisense strand to SEQ ID NO: 1639469
agaaucaaacggcucuaug

SEQ ID NO: 1639471 - RNA, 19 nt, Artificial Sequence
  Description of Artificial Sequence: Synthetic oligonucleotide
  Sense strand starting at position 1440 of SEQ ID NO: 1561000
guuugauucuauccaguau

SEQ ID NO: 1639472 - RNA, 19 nt, Artificial Sequence
  Description of Artificial Sequence: Synthetic oligonucleotide
  Antisense strand to SEQ ID NO: 1639471
auacuggauagaaucaaac

SEQ ID NO: 1639473 - RNA, 19 nt, Artificial Sequence
  Description of Artificial Sequence: Synthetic oligonucleotide
  Sense strand starting at position 1493 of SEQ ID NO: 1561000
ggcucacuguuagcaauuu

SEQ ID NO: 1639474 - RNA, 19 nt, Artificial Sequence
  Description of Artificial Sequence: Synthetic oligonucleotide
  Antisense strand to SEQ ID NO: 1639473
aaauugcuaacagugagcc

SEQ ID NO: 1639475 - RNA, 19 nt, Artificial Sequence
  Description of Artificial Sequence: Synthetic oligonucleotide
  Sense strand starting at position 1526 of SEQ ID NO: 1561000
cagccauuccggcagaaag

SEQ ID NO: 1639476 - RNA, 19 nt, Artificial Sequence
  Description of Artificial Sequence: Synthetic oligonucleotide
  Antisense strand to SEQ ID NO: 1639475
cuuucugccggaauggcug

SEQ ID NO: 1639477 - RNA, 19 nt, Artificial Sequence
  Description of Artificial Sequence: Synthetic oligonucleotide
  Sense strand starting at position 1528 of SEQ ID NO: 1561000
gccauuccggcagaaagaa

SEQ ID NO: 1639478 - RNA, 19 nt, Artificial Sequence
  Description of Artificial Sequence: Synthetic oligonucleotide
  Antisense strand to SEQ ID NO: 1639477
uucuuucugccggaauggc

SEQ ID NO: 1639479 - RNA, 19 nt, Artificial Sequence
  Description of Artificial Sequence: Synthetic oligonucleotide
  Sense strand starting at position 2121 of SEQ ID NO: 1561000
gagacuucguuucccagaa

SEQ ID NO: 1639480 - RNA, 19 nt, Artificial Sequence
  Description of Artificial Sequence: Synthetic oligonucleotide
  Antisense strand to SEQ ID NO: 1639479
uucugggaaacgaagucuc

SEQ ID NO: 1639481 - RNA, 19 nt, Artificial Sequence
  Description of Artificial Sequence: Synthetic oligonucleotide
  Sense strand starting at position 2125 of SEQ ID NO: 1561000
cuucguuucccagaaggca

SEQ ID NO: 1639482 - RNA, 19 nt, Artificial Sequence
  Description of Artificial Sequence: Synthetic oligonucleotide
  Antisense strand to SEQ ID NO: 1639481
ugccuucugggaaacgaag

SEQ ID NO: 1639483 - RNA, 19 nt, Artificial Sequence
  Description of Artificial Sequence: Synthetic oligonucleotide
  Sense strand starting at position 2318 of SEQ ID NO: 1561000
ccgugagaucccgaugcuu

SEQ ID NO: 1639484 - RNA, 19 nt, Artificial Sequence
  Description of Artificial Sequence: Synthetic oligonucleotide
  Antisense strand to SEQ ID NO: 1639483
aagcaucgggaucucacgg

SEQ ID NO: 1639485 - RNA, 19 nt, Artificial Sequence
  Description of Artificial Sequence: Synthetic oligonucleotide
  Sense strand starting at position 2320 of SEQ ID NO: 1561000
gugagaucccgaugcuuca

SEQ ID NO: 1639486 - RNA, 19 nt, Artificial Sequence
  Description of Artificial Sequence: Synthetic oligonucleotide
  Antisense strand to SEQ ID NO: 1639485
ugaagcaucgggaucucac

SEQ ID NO: 1639487 - RNA, 19 nt, Artificial Sequence
  Description of Artificial Sequence: Synthetic oligonucleotide
  Sense strand starting at position 2391 of SEQ ID NO: 1561000
accugaggguaucuguaaa

SEQ ID NO: 1639488 - RNA, 19 nt, Artificial Sequence
  Description of Artificial Sequence: Synthetic oligonucleotide
  Antisense strand to SEQ ID NO: 1639487
uuuacagauacccucaggu

SEQ ID NO: 1639489 - RNA, 19 nt, Artificial Sequence
  Description of Artificial Sequence: Synthetic oligonucleotide
  Sense strand starting at position 2443 of SEQ ID NO: 1561000
gauguugcagcacgaauau

SEQ ID NO: 1639490 - RNA, 19 nt, Artificial Sequence
  Description of Artificial Sequence: Synthetic oligonucleotide
  Antisense strand to SEQ ID NO: 1639489
auauucgugcugcaacauc

SEQ ID NO: 1639491 - RNA, 19 nt, Artificial Sequence
  Description of Artificial Sequence: Synthetic oligonucleotide
  Sense strand starting at position 2461 of SEQ ID NO: 1561000
uugaauaagcucuggaaug

SEQ ID NO: 1639492 - RNA, 19 nt, Artificial Sequence
  Description of Artificial Sequence: Synthetic oligonucleotide
  Antisense strand to SEQ ID NO: 1639491
cauuccagagcuuauucaa

SEQ ID NO: 1639493 - RNA, 19 nt, Artificial Sequence
  Description of Artificial Sequence: Synthetic oligonucleotide
  Sense strand starting at position 2463 of SEQ ID NO: 1561000
gaauaagcucuggaaugcu

SEQ ID NO: 1639494 - RNA, 19 nt, Artificial Sequence
  Description of Artificial Sequence: Synthetic oligonucleotide
  Antisense strand to SEQ ID NO: 1639493
agcauuccagagcuuauuc

SEQ ID NO: 1639495 - RNA, 19 nt, Artificial Sequence
  Description of Artificial Sequence: Synthetic oligonucleotide
  Sense strand starting at position 2500 of SEQ ID NO: 1561000
uccgauuuguguuucguag

SEQ ID NO: 1639496 - RNA, 19 nt, Artificial Sequence
  Description of Artificial Sequence: Synthetic oligonucleotide
  Antisense strand to SEQ ID NO: 1639495
cuacgaaacacaaaucgga

SEQ ID NO: 1639497 - RNA, 19 nt, Artificial Sequence
  Description of Artificial Sequence: Synthetic oligonucleotide
  Sense strand starting at position 2653 of SEQ ID NO: 1561000
caguuugcuugggcagaaa

SEQ ID NO: 1639498 - RNA, 19 nt, Artificial Sequence
  Description of Artificial Sequence: Synthetic oligonucleotide
  Antisense strand to SEQ ID NO: 1639497
uuucugcccaagcaaacug

SEQ ID NO: 1639499 - RNA, 19 nt, Artificial Sequence
  Description of Artificial Sequence: Synthetic oligonucleotide
  Sense strand starting at position 2724 of SEQ ID NO: 1561000
gcaaacaacucccugauga

SEQ ID NO: 1639500 - RNA, 19 nt, Artificial Sequence
  Description of Artificial Sequence: Synthetic oligonucleotide
  Antisense strand to SEQ ID NO: 1639499
ucaucagggaguuguuugc

SEQ ID NO: 1639501 - RNA, 19 nt, Artificial Sequence
  Description of Artificial Sequence: Synthetic oligonucleotide
  Sense strand starting at position 2739 of SEQ ID NO: 1561000
augacaaggcuaugaagua

SEQ ID NO: 1639502 - RNA, 19 nt, Artificial Sequence
  Description of Artificial Sequence: Synthetic oligonucleotide
  Antisense strand to SEQ ID NO: 1639501
uacuucauagccuugucau

SEQ ID NO: 1639503 - RNA, 19 nt, Artificial Sequence
  Description of Artificial Sequence: Synthetic oligonucleotide
  Sense strand starting at position 3303 of SEQ ID NO: 1561000
gucacuacugggugugauu

SEQ ID NO: 1639504 - RNA, 19 nt, Artificial Sequence
  Description of Artificial Sequence: Synthetic oligonucleotide
  Antisense strand to SEQ ID NO: 1639503
aaucacacccaguagugac

SEQ ID NO: 1639505 - RNA, 19 nt, Artificial Sequence
  Description of Artificial Sequence: Synthetic oligonucleotide
  Sense strand starting at position 3675 of SEQ ID NO: 1561000
uccuuugugccguuaaugu

SEQ ID NO: 1639506 - RNA, 19 nt, Artificial Sequence
  Description of Artificial Sequence: Synthetic oligonucleotide
  Antisense strand to SEQ ID NO: 1639505
acauuaacggcacaaagga

SEQ ID NO: 1639507 - RNA, 19 nt, Artificial Sequence
  Description of Artificial Sequence: Synthetic oligonucleotide
  Sense strand starting at position 688 of SEQ ID NO: 1561001
gcuggacuccuccauuaga

SEQ ID NO: 1639508 - RNA, 19 nt, Artificial Sequence
  Description of Artificial Sequence: Synthetic oligonucleotide
  Antisense strand to SEQ ID NO: 1639507
ucuaauggaggaguccagc

SEQ ID NO: 1639509 - RNA, 19 nt, Artificial Sequence
  Description of Artificial Sequence: Synthetic oligonucleotide
  Sense strand starting at position 884 of SEQ ID NO: 1561001
ccuguugugccucaaucuu

SEQ ID NO: 1639510 - RNA, 19 nt, Artificial Sequence
  Description of Artificial Sequence: Synthetic oligonucleotide
  Antisense strand to SEQ ID NO: 1639509
aagauugaggcacaacagg

SEQ ID NO: 1639511 - RNA, 19 nt, Artificial Sequence
  Description of Artificial Sequence: Synthetic oligonucleotide
  Sense strand starting at position 1377 of SEQ ID NO: 1561001
ggcacaaggcaucgugaau

SEQ ID NO: 1639512 - RNA, 19 nt, Artificial Sequence
  Description of Artificial Sequence: Synthetic oligonucleotide
  Antisense strand to SEQ ID NO: 1639511
auucacgaugccuugugcc

SEQ ID NO: 1639513 - RNA, 19 nt, Artificial Sequence
  Description of Artificial Sequence: Synthetic oligonucleotide
  Sense strand starting at position 2105 of SEQ ID NO: 1561001
cgaugauguucggcugcuu

SEQ ID NO: 1639514 - RNA, 19 nt, Artificial Sequence
  Description of Artificial Sequence: Synthetic oligonucleotide
  Antisense strand to SEQ ID NO: 1639513
aagcagccgaacaucaucg

SEQ ID NO: 1639515 - RNA, 19 nt, Artificial Sequence
  Description of Artificial Sequence: Synthetic oligonucleotide
  Sense strand starting at position 2136 of SEQ ID NO: 1561001
cgcucaacgcucgggaaua

SEQ ID NO: 1639516 - RNA, 19 nt, Artificial Sequence
  Description of Artificial Sequence: Synthetic oligonucleotide
  Antisense strand to SEQ ID NO: 1639515
uauucccgagcguugagcg

SEQ ID NO: 1639517 - RNA, 19 nt, Artificial Sequence
  Description of Artificial Sequence: Synthetic oligonucleotide
  Sense strand starting at position 2138 of SEQ ID NO: 1561001
cucaacgcucgggaauauu

SEQ ID NO: 1639518 - RNA, 19 nt, Artificial Sequence
  Description of Artificial Sequence: Synthetic oligonucleotide
  Antisense strand to SEQ ID NO: 1639517
aauauucccgagcguugag

SEQ ID NO: 1639519 - RNA, 19 nt, Artificial Sequence
  Description of Artificial Sequence: Synthetic oligonucleotide
  Sense strand starting at position 2147 of SEQ ID NO: 1561001
cgggaauauucggaacucu

SEQ ID NO: 1639520 - RNA, 19 nt, Artificial Sequence
  Description of Artificial Sequence: Synthetic oligonucleotide
  Antisense strand to SEQ ID NO: 1639519
agaguuccgaauauucccg

SEQ ID NO: 1639521 - RNA, 19 nt, Artificial Sequence
  Description of Artificial Sequence: Synthetic oligonucleotide
  Sense strand starting at position 2183 of SEQ ID NO: 1561001
agcguauuccgggaaccgu

SEQ ID NO: 1639522 - RNA, 19 nt, Artificial Sequence
  Description of Artificial Sequence: Synthetic oligonucleotide
  Antisense strand to SEQ ID NO: 1639521
acgguucccggaauacgcu

SEQ ID NO: 1639523 - RNA, 19 nt, Artificial Sequence
  Description of Artificial Sequence: Synthetic oligonucleotide
  Sense strand starting at position 2184 of SEQ ID NO: 1561001
gcguauuccgggaaccguu

SEQ ID NO: 1639524 - RNA, 19 nt, Artificial Sequence
  Description of Artificial Sequence: Synthetic oligonucleotide
  Antisense strand to SEQ ID NO: 1639523
aacgguucccggaauacgc

SEQ ID NO: 1639525 - RNA, 19 nt, Artificial Sequence
  Description of Artificial Sequence: Synthetic oligonucleotide
  Sense strand starting at position 2193 of SEQ ID NO: 1561001
gggaaccguucggaaguuu

SEQ ID NO: 1639526 - RNA, 19 nt, Artificial Sequence
  Description of Artificial Sequence: Synthetic oligonucleotide
  Antisense strand to SEQ ID NO: 1639525
aaacuuccgaacgguuccc

SEQ ID NO: 1639527 - RNA, 19 nt, Artificial Sequence
  Description of Artificial Sequence: Synthetic oligonucleotide
  Sense strand starting at position 2264 of SEQ ID NO: 1561001
acccauaccucagcguuau

SEQ ID NO: 1639528 - RNA, 19 nt, Artificial Sequence
  Description of Artificial Sequence: Synthetic oligonucleotide
  Antisense strand to SEQ ID NO: 1639527
auaacgcugagguaugggu

SEQ ID NO: 1639529 - RNA, 19 nt, Artificial Sequence
  Description of Artificial Sequence: Synthetic oligonucleotide
  Sense strand starting at position 2275 of SEQ ID NO: 1561001
agcguuaucucuccaguau

SEQ ID NO: 1639530 - RNA, 19 nt, Artificial Sequence
  Description of Artificial Sequence: Synthetic oligonucleotide
  Antisense strand to SEQ ID NO: 1639529
auacuggagagauaacgcu

SEQ ID NO: 1639531 - RNA, 19 nt, Artificial Sequence
  Description of Artificial Sequence: Synthetic oligonucleotide
  Sense strand starting at position 2276 of SEQ ID NO: 1561001
gcguuaucucuccaguauu

SEQ ID NO: 1639532 - RNA, 19 nt, Artificial Sequence
  Description of Artificial Sequence: Synthetic oligonucleotide
  Antisense strand to SEQ ID NO: 1639531
aauacuggagagauaacgc

SEQ ID NO: 1639533 - RNA, 19 nt, Artificial Sequence
  Description of Artificial Sequence: Synthetic oligonucleotide
  Sense strand starting at position 2302 of SEQ ID NO: 1561001
cagcacuugucacugugau

SEQ ID NO: 1639534 - RNA, 19 nt, Artificial Sequence
  Description of Artificial Sequence: Synthetic oligonucleotide
  Antisense strand to SEQ ID NO: 1639533
aucacagugacaagugcug

SEQ ID NO: 1639535 - RNA, 19 nt, Artificial Sequence
  Description of Artificial Sequence: Synthetic oligonucleotide
  Sense strand starting at position 2303 of SEQ ID NO: 1561001
agcacuugucacugugauu

SEQ ID NO: 1639536 - RNA, 19 nt, Artificial Sequence
  Description of Artificial Sequence: Synthetic oligonucleotide
  Antisense strand to SEQ ID NO: 1639535
aaucacagugacaagugcu

SEQ ID NO: 1639537 - RNA, 19 nt, Artificial Sequence
  Description of Artificial Sequence: Synthetic oligonucleotide
  Sense strand starting at position 2309 of SEQ ID NO: 1561001
ugucacugugauuggcaua

SEQ ID NO: 1639538 - RNA, 19 nt, Artificial Sequence
  Description of Artificial Sequence: Synthetic oligonucleotide
  Antisense strand to SEQ ID NO: 1639537
uaugccaaucacagugaca

SEQ ID NO: 1639539 - RNA, 19 nt, Artificial Sequence
  Description of Artificial Sequence: Synthetic oligonucleotide
  Sense strand starting at position 2310 of SEQ ID NO: 1561001
gucacugugauuggcauau

SEQ ID NO: 1639540 - RNA, 19 nt, Artificial Sequence
  Description of Artificial Sequence: Synthetic oligonucleotide
  Antisense strand to SEQ ID NO: 1639539
auaugccaaucacagugac

SEQ ID NO: 1639541 - RNA, 19 nt, Artificial Sequence
  Description of Artificial Sequence: Synthetic oligonucleotide
  Sense strand starting at position 2312 of SEQ ID NO: 1561001
cacugugauuggcauauga

SEQ ID NO: 1639542 - RNA, 19 nt, Artificial Sequence
  Description of Artificial Sequence: Synthetic oligonucleotide
  Antisense strand to SEQ ID NO: 1639541
ucauaugccaaucacagug

SEQ ID NO: 1639543 - RNA, 19 nt, Artificial Sequence
  Description of Artificial Sequence: Synthetic oligonucleotide
  Sense strand starting at position 2314 of SEQ ID NO: 1561001
cugugauuggcauaugaug

SEQ ID NO: 1639544 - RNA, 19 nt, Artificial Sequence
  Description of Artificial Sequence: Synthetic oligonucleotide
  Antisense strand to SEQ ID NO: 1639543
caucauaugccaaucacag

SEQ ID NO: 1639545 - RNA, 19 nt, Artificial Sequence
  Description of Artificial Sequence: Synthetic oligonucleotide
  Sense strand starting at position 2366 of SEQ ID NO: 1561001
uggugaaugcgugaacuau

SEQ ID NO: 1639546 - RNA, 19 nt, Artificial Sequence
  Description of Artificial Sequence: Synthetic oligonucleotide
  Antisense strand to SEQ ID NO: 1639545
auaguucacgcauucacca

SEQ ID NO: 1639547 - RNA, 19 nt, Artificial Sequence
  Description of Artificial Sequence: Synthetic oligonucleotide
  Sense strand starting at position 2374 of SEQ ID NO: 1561001
gcgugaacuauauaagccu

SEQ ID NO: 1639548 - RNA, 19 nt, Artificial Sequence
  Description of Artificial Sequence: Synthetic oligonucleotide
  Antisense strand to SEQ ID NO: 1639547
aggcuuauauaguucacgc

SEQ ID NO: 1639549 - RNA, 19 nt, Artificial Sequence
  Description of Artificial Sequence: Synthetic oligonucleotide
  Sense strand starting at position 2405 of SEQ ID NO: 1561001
uuuggauauuuccggucuu

SEQ ID NO: 1639550 - RNA, 19 nt, Artificial Sequence
  Description of Artificial Sequence: Synthetic oligonucleotide
  Antisense strand to SEQ ID NO: 1639549
aagaccggaaauauccaaa

SEQ ID NO: 1639551 - RNA, 19 nt, Artificial Sequence
  Description of Artificial Sequence: Synthetic oligonucleotide
  Sense strand starting at position 2507 of SEQ ID NO: 1561001
agguguguauguucggaaa

SEQ ID NO: 1639552 - RNA, 19 nt, Artificial Sequence
  Description of Artificial Sequence: Synthetic oligonucleotide
  Antisense strand to SEQ ID NO: 1639551
uuuccgaacauacacaccu

SEQ ID NO: 1639553 - RNA, 19 nt, Artificial Sequence
  Description of Artificial Sequence: Synthetic oligonucleotide
  Sense strand starting at position 2510 of SEQ ID NO: 1561001
uguguauguucggaaauac

SEQ ID NO: 1639554 - RNA, 19 nt, Artificial Sequence
  Description of Artificial Sequence: Synthetic oligonucleotide
  Antisense strand to SEQ ID NO: 1639553
guauuuccgaacauacaca

SEQ ID NO: 1639555 - RNA, 19 nt, Artificial Sequence
  Description of Artificial Sequence: Synthetic oligonucleotide
  Sense strand starting at position 2539 of SEQ ID NO: 1561001
uucggaaucccucggcuaa

SEQ ID NO: 1639556 - RNA, 19 nt, Artificial Sequence
  Description of Artificial Sequence: Synthetic oligonucleotide
  Antisense strand to SEQ ID NO: 1639555
uuagccgagggauuccgaa

SEQ ID NO: 1639557 - RNA, 19 nt, Artificial Sequence
  Description of Artificial Sequence: Synthetic oligonucleotide
  Sense strand starting at position 2540 of SEQ ID NO: 1561001
ucggaaucccucggcuaau

SEQ ID NO: 1639558 - RNA, 19 nt, Artificial Sequence
  Description of Artificial Sequence: Synthetic oligonucleotide
  Antisense strand to SEQ ID NO: 1639557
auuagccgagggauuccga

SEQ ID NO: 1639559 - RNA, 19 nt, Artificial Sequence
  Description of Artificial Sequence: Synthetic oligonucleotide
  Sense strand starting at position 2642 of SEQ ID NO: 1561001
cacggaaacuucucgcuga

SEQ ID NO: 1639560 - RNA, 19 nt, Artificial Sequence
  Description of Artificial Sequence: Synthetic oligonucleotide
  Antisense strand to SEQ ID NO: 1639559
ucagcgagaaguuuccgug

SEQ ID NO: 1639561 - RNA, 19 nt, Artificial Sequence
  Description of Artificial Sequence: Synthetic oligonucleotide
  Sense strand starting at position 2645 of SEQ ID NO: 1561001
ggaaacuucucgcugacug

SEQ ID NO: 1639562 - RNA, 19 nt, Artificial Sequence
  Description of Artificial Sequence: Synthetic oligonucleotide
  Antisense strand to SEQ ID NO: 1639561
cagucagcgagaaguuucc

SEQ ID NO: 1639563 - RNA, 19 nt, Artificial Sequence
  Description of Artificial Sequence: Synthetic oligonucleotide
  Sense strand starting at position 2679 of SEQ ID NO: 1561001
gcggaugcccucuaaggga

SEQ ID NO: 1639564 - RNA, 19 nt, Artificial Sequence
  Description of Artificial Sequence: Synthetic oligonucleotide
  Antisense strand to SEQ ID NO: 1639563
ucccuuagagggcauccgc

SEQ ID NO: 1639565 - RNA, 19 nt, Artificial Sequence
  Description of Artificial Sequence: Synthetic oligonucleotide
  Sense strand starting at position 2695 of SEQ ID NO: 1561001
ggagaauuguuuggaggga

SEQ ID NO: 1639566 - RNA, 19 nt, Artificial Sequence
  Description of Artificial Sequence: Synthetic oligonucleotide
  Antisense strand to SEQ ID NO: 1639565
ucccuccaaacaauucucc

SEQ ID NO: 1639567 - RNA, 19 nt, Artificial Sequence
  Description of Artificial Sequence: Synthetic oligonucleotide
  Sense strand starting at position 2714 of SEQ ID NO: 1561001
gggagauuugcauguggcu

SEQ ID NO: 1639568 - RNA, 19 nt, Artificial Sequence
  Description of Artificial Sequence: Synthetic oligonucleotide
  Antisense strand to SEQ ID NO: 1639567
agccacaugcaaaucuccc

SEQ ID NO: 1639569 - RNA, 19 nt, Artificial Sequence
  Description of Artificial Sequence: Synthetic oligonucleotide
  Sense strand starting at position 2744 of SEQ ID NO: 1561001
ccuuuaggauucuauagau

SEQ ID NO: 1639570 - RNA, 19 nt, Artificial Sequence
  Description of Artificial Sequence: Synthetic oligonucleotide
  Antisense strand to SEQ ID NO: 1639569
aucuauagaauccuaaagg

SEQ ID NO: 1639571 - RNA, 19 nt, Artificial Sequence
  Description of Artificial Sequence: Synthetic oligonucleotide
  Sense strand starting at position 2840 of SEQ ID NO: 1561001
agguuaugauccguuguca

SEQ ID NO: 1639572 - RNA, 19 nt, Artificial Sequence
  Description of Artificial Sequence: Synthetic oligonucleotide
  Antisense strand to SEQ ID NO: 1639571
ugacaacggaucauaaccu

SEQ ID NO: 1639573 - RNA, 19 nt, Artificial Sequence
  Description of Artificial Sequence: Synthetic oligonucleotide
  Sense strand starting at position 2875 of SEQ ID NO: 1561001
gcaggagccuugccugaua

SEQ ID NO: 1639574 - RNA, 19 nt, Artificial Sequence
  Description of Artificial Sequence: Synthetic oligonucleotide
  Antisense strand to SEQ ID NO: 1639573
uaucaggcaaggcuccugc

SEQ ID NO: 1639575 - RNA, 19 nt, Artificial Sequence
  Description of Artificial Sequence: Synthetic oligonucleotide
  Sense strand starting at position 2877 of SEQ ID NO: 1561001
aggagccuugccugauauu

SEQ ID NO: 1639576 - RNA, 19 nt, Artificial Sequence
  Description of Artificial Sequence: Synthetic oligonucleotide
  Antisense strand to SEQ ID NO: 1639575
aauaucaggcaaggcuccu

SEQ ID NO: 1639577 - RNA, 19 nt, Artificial Sequence
  Description of Artificial Sequence: Synthetic oligonucleotide
  Sense strand starting at position 2886 of SEQ ID NO: 1561001
gccugauauuucucugugu

SEQ ID NO: 1639578 - RNA, 19 nt, Artificial Sequence
  Description of Artificial Sequence: Synthetic oligonucleotide
  Antisense strand to SEQ ID NO: 1639577
acacagagaaauaucaggc

SEQ ID NO: 1639579 - RNA, 19 nt, Artificial Sequence
  Description of Artificial Sequence: Synthetic oligonucleotide
  Sense strand starting at position 2889 of SEQ ID NO: 1561001
ugauauuucucuguguccu

SEQ ID NO: 1639580 - RNA, 19 nt, Artificial Sequence
  Description of Artificial Sequence: Synthetic oligonucleotide
  Antisense strand to SEQ ID NO: 1639579
aggacacagagaaauauca

SEQ ID NO: 1639581 - RNA, 19 nt, Artificial Sequence
  Description of Artificial Sequence: Synthetic oligonucleotide
  Sense strand starting at position 3044 of SEQ ID NO: 1561001
ucgucugguccauaggacu

SEQ ID NO: 1639582 - RNA, 19 nt, Artificial Sequence
  Description of Artificial Sequence: Synthetic oligonucleotide
  Antisense strand to SEQ ID NO: 1639581
aguccuauggaccagacga

SEQ ID NO: 1639583 - RNA, 19 nt, Artificial Sequence
  Description of Artificial Sequence: Synthetic oligonucleotide
  Sense strand starting at position 3282 of SEQ ID NO: 1561001
gucuaaaggccuugucuga

SEQ ID NO: 1639584 - RNA, 19 nt, Artificial Sequence
  Description of Artificial Sequence: Synthetic oligonucleotide
  Antisense strand to SEQ ID NO: 1639583
ucagacaaggccuuuagac

SEQ ID NO: 1639585 - RNA, 19 nt, Artificial Sequence
  Description of Artificial Sequence: Synthetic oligonucleotide
  Sense strand starting at position 3309 of SEQ ID NO: 1561001
gucugaucugcacaggcuu

SEQ ID NO: 1639586 - RNA, 19 nt, Artificial Sequence
  Description of Artificial Sequence: Synthetic oligonucleotide
  Antisense strand to SEQ ID NO: 1639585
aagccugugcagaucagac

SEQ ID NO: 1639587 - RNA, 19 nt, Artificial Sequence
  Description of Artificial Sequence: Synthetic oligonucleotide
  Sense strand starting at position 241 of SEQ ID NO: 1561002
ccgggagaucuucgacauc

SEQ ID NO: 1639588 - RNA, 19 nt, Artificial Sequence
  Description of Artificial Sequence: Synthetic oligonucleotide
  Antisense strand to SEQ ID NO: 1639587
gaugucgaagaucucccgg

SEQ ID NO: 1639589 - RNA, 19 nt, Artificial Sequence
  Description of Artificial Sequence: Synthetic oligonucleotide
  Sense strand starting at position 449 of SEQ ID NO: 1561002
gcuuaaucagaguguggca

SEQ ID NO: 1639590 - RNA, 19 nt, Artificial Sequence
  Description of Artificial Sequence: Synthetic oligonucleotide
  Antisense strand to SEQ ID NO: 1639589
ugccacacucugauuaagc

SEQ ID NO: 1639591 - RNA, 19 nt, Artificial Sequence
  Description of Artificial Sequence: Synthetic oligonucleotide
  Sense strand starting at position 451 of SEQ ID NO: 1561002
uuaaucagaguguggcaua

SEQ ID NO: 1639592 - RNA, 19 nt, Artificial Sequence
  Description of Artificial Sequence: Synthetic oligonucleotide
  Antisense strand to SEQ ID NO: 1639591
uaugccacacucugauuaa

SEQ ID NO: 1639593 - RNA, 19 nt, Artificial Sequence
  Description of Artificial Sequence: Synthetic oligonucleotide
  Sense strand starting at position 454 of SEQ ID NO: 1561002
aucagaguguggcauagaa

SEQ ID NO: 1639594 - RNA, 19 nt, Artificial Sequence
  Description of Artificial Sequence: Synthetic oligonucleotide
  Antisense strand to SEQ ID NO: 1639593
uucuaugccacacucugau

SEQ ID NO: 1639595 - RNA, 19 nt, Artificial Sequence
  Description of Artificial Sequence: Synthetic oligonucleotide
  Sense strand starting at position 458 of SEQ ID NO: 1561002
gaguguggcauagaagcua

SEQ ID NO: 1639596 - RNA, 19 nt, Artificial Sequence
  Description of Artificial Sequence: Synthetic oligonucleotide
  Antisense strand to SEQ ID NO: 1639595
uagcuucuaugccacacuc

SEQ ID NO: 1639597 - RNA, 19 nt, Artificial Sequence
  Description of Artificial Sequence: Synthetic oligonucleotide
  Sense strand starting at position 1056 of SEQ ID NO: 1561002
ccugcauucuaguuaagca

SEQ ID NO: 1639598 - RNA, 19 nt, Artificial Sequence
  Description of Artificial Sequence: Synthetic oligonucleotide
  Antisense strand to SEQ ID NO: 1639597
ugcuuaacuagaaugcagg

SEQ ID NO: 1639599 - RNA, 19 nt, Artificial Sequence
  Description of Artificial Sequence: Synthetic oligonucleotide
  Sense strand starting at position 1090 of SEQ ID NO: 1561002
ccgcgauuucccuggcuac

SEQ ID NO: 1639600 - RNA, 19 nt, Artificial Sequence
  Description of Artificial Sequence: Synthetic oligonucleotide
  Antisense strand to SEQ ID NO: 1639599
guagccagggaaaucgcgg

SEQ ID NO: 1639601 - RNA, 19 nt, Artificial Sequence
  Description of Artificial Sequence: Synthetic oligonucleotide
  Sense strand starting at position 1091 of SEQ ID NO: 1561002
cgcgauuucccuggcuacu

SEQ ID NO: 1639602 - RNA, 19 nt, Artificial Sequence
  Description of Artificial Sequence: Synthetic oligonucleotide
  Antisense strand to SEQ ID NO: 1639601
aguagccagggaaaucgcg

SEQ ID NO: 1639603 - RNA, 19 nt, Artificial Sequence
  Description of Artificial Sequence: Synthetic oligonucleotide
  Sense strand starting at position 1333 of SEQ ID NO: 1561002
uccuuacuccugcgucaga

SEQ ID NO: 1639604 - RNA, 19 nt, Artificial Sequence
  Description of Artificial Sequence: Synthetic oligonucleotide
  Antisense strand to SEQ ID NO: 1639603
ucugacgcaggaguaagga

SEQ ID NO: 1639605 - RNA, 19 nt, Artificial Sequence
  Description of Artificial Sequence: Synthetic oligonucleotide
  Sense strand starting at position 1334 of SEQ ID NO: 1561002
ccuuacuccugcgucagaa

SEQ ID NO: 1639606 - RNA, 19 nt, Artificial Sequence
  Description of Artificial Sequence: Synthetic oligonucleotide
  Antisense strand to SEQ ID NO: 1639605
uucugacgcaggaguaagg

SEQ ID NO: 1639607 - RNA, 19 nt, Artificial Sequence
  Description of Artificial Sequence: Synthetic oligonucleotide
  Sense strand starting at position 1359 of SEQ ID NO: 1561002
acccgcugcccgcuuaaua

SEQ ID NO: 1639608 - RNA, 19 nt, Artificial Sequence
  Description of Artificial Sequence: Synthetic oligonucleotide
  Antisense strand to SEQ ID NO: 1639607
uauuaagcgggcagcgggu

SEQ ID NO: 1639609 - RNA, 19 nt, Artificial Sequence
  Description of Artificial Sequence: Synthetic oligonucleotide
  Sense strand starting at position 1360 of SEQ ID NO: 1561002
cccgcugcccgcuuaauaa

SEQ ID NO: 1639610 - RNA, 19 nt, Artificial Sequence
  Description of Artificial Sequence: Synthetic oligonucleotide
  Antisense strand to SEQ ID NO: 1639609
uuauuaagcgggcagcggg

SEQ ID NO: 1639611 - RNA, 19 nt, Artificial Sequence
  Description of Artificial Sequence: Synthetic oligonucleotide
  Sense strand starting at position 1455 of SEQ ID NO: 1561002
cuccuacuccugcgucaga

SEQ ID NO: 1639612 - RNA, 19 nt, Artificial Sequence
  Description of Artificial Sequence: Synthetic oligonucleotide
  Antisense strand to SEQ ID NO: 1639611
ucugacgcaggaguaggag

SEQ ID NO: 1639613 - RNA, 19 nt, Artificial Sequence
  Description of Artificial Sequence: Synthetic oligonucleotide
  Sense strand starting at position 1456 of SEQ ID NO: 1561002
uccuacuccugcgucagaa

SEQ ID NO: 1639614 - RNA, 19 nt, Artificial Sequence
  Description of Artificial Sequence: Synthetic oligonucleotide
  Antisense strand to SEQ ID NO: 1639613
uucugacgcaggaguagga

SEQ ID NO: 1639615 - RNA, 19 nt, Artificial Sequence
  Description of Artificial Sequence: Synthetic oligonucleotide
  Sense strand starting at position 2063 of SEQ ID NO: 1561002
gggauaucuacucggcuca

SEQ ID NO: 1639616 - RNA, 19 nt, Artificial Sequence
  Description of Artificial Sequence: Synthetic oligonucleotide
  Antisense strand to SEQ ID NO: 1639615
ugagccgaguagauauccc

SEQ ID NO: 1639617 - RNA, 19 nt, Artificial Sequence
  Description of Artificial Sequence: Synthetic oligonucleotide
  Sense strand starting at position 2165 of SEQ ID NO: 1561002
gaccgagcucccugagcau

SEQ ID NO: 1639618 - RNA, 19 nt, Artificial Sequence
  Description of Artificial Sequence: Synthetic oligonucleotide
  Antisense strand to SEQ ID NO: 1639617
augcucagggagcucgguc

SEQ ID NO: 1639619 - RNA, 19 nt, Artificial Sequence
  Description of Artificial Sequence: Synthetic oligonucleotide
  Sense strand starting at position 2249 of SEQ ID NO: 1561002
ccucccucugccugugaaa

SEQ ID NO: 1639620 - RNA, 19 nt, Artificial Sequence
  Description of Artificial Sequence: Synthetic oligonucleotide
  Antisense strand to SEQ ID NO: 1639619
uuucacaggcagagggagg

SEQ ID NO: 1639621 - RNA, 19 nt, Artificial Sequence
  Description of Artificial Sequence: Synthetic oligonucleotide
  Sense strand starting at position 2251 of SEQ ID NO: 1561002
ucccucugccugugaaaug

SEQ ID NO: 1639622 - RNA, 19 nt, Artificial Sequence
  Description of Artificial Sequence: Synthetic oligonucleotide
  Antisense strand to SEQ ID NO: 1639621
cauuucacaggcagaggga

SEQ ID NO: 1639623 - RNA, 19 nt, Artificial Sequence
  Description of Artificial Sequence: Synthetic oligonucleotide
  Sense strand starting at position 2252 of SEQ ID NO: 1561002
cccucugccugugaaauga

SEQ ID NO: 1639624 - RNA, 19 nt, Artificial Sequence
  Description of Artificial Sequence: Synthetic oligonucleotide
  Antisense strand to SEQ ID NO: 1639623
ucauuucacaggcagaggg

SEQ ID NO: 1639625 - RNA, 19 nt, Artificial Sequence
  Description of Artificial Sequence: Synthetic oligonucleotide
  Sense strand starting at position 2338 of SEQ ID NO: 1561002
ucacuuguagagcgggaau

SEQ ID NO: 1639626 - RNA, 19 nt, Artificial Sequence
  Description of Artificial Sequence: Synthetic oligonucleotide
  Antisense strand to SEQ ID NO: 1639625
auucccgcucuacaaguga

SEQ ID NO: 1639627 - RNA, 19 nt, Artificial Sequence
  Description of Artificial Sequence: Synthetic oligonucleotide
  Sense strand starting at position 2340 of SEQ ID NO: 1561002
acuuguagagcgggaauaa

SEQ ID NO: 1639628 - RNA, 19 nt, Artificial Sequence
  Description of Artificial Sequence: Synthetic oligonucleotide
  Antisense strand to SEQ ID NO: 1639627
uuauucccgcucuacaagu

SEQ ID NO: 1639629 - RNA, 19 nt, Artificial Sequence
  Description of Artificial Sequence: Synthetic oligonucleotide
  Sense strand starting at position 2341 of SEQ ID NO: 1561002
cuuguagagcgggaauaau

SEQ ID NO: 1639630 - RNA, 19 nt, Artificial Sequence
  Description of Artificial Sequence: Synthetic oligonucleotide
  Antisense strand to SEQ ID NO: 1639629
auuauucccgcucuacaag

SEQ ID NO: 1639631 - RNA, 19 nt, Artificial Sequence
  Description of Artificial Sequence: Synthetic oligonucleotide
  Sense strand starting at position 2350 of SEQ ID NO: 1561002
cgggaauaauaauaccaaa

SEQ ID NO: 1639632 - RNA, 19 nt, Artificial Sequence
  Description of Artificial Sequence: Synthetic oligonucleotide
  Antisense strand to SEQ ID NO: 1639631
uuugguauuauuauucccg

SEQ ID NO: 1639633 - RNA, 19 nt, Artificial Sequence
  Description of Artificial Sequence: Synthetic oligonucleotide
  Sense strand starting at position 2478 of SEQ ID NO: 1561002
ccagccuaauacggugaaa

SEQ ID NO: 1639634 - RNA, 19 nt, Artificial Sequence
  Description of Artificial Sequence: Synthetic oligonucleotide
  Antisense strand to SEQ ID NO: 1639633
uuucaccguauuaggcugg

SEQ ID NO: 1639635 - RNA, 19 nt, Artificial Sequence
  Description of Artificial Sequence: Synthetic oligonucleotide
  Sense strand starting at position 2875 of SEQ ID NO: 1561002
guuaucaauuggucaagcu

SEQ ID NO: 1639636 - RNA, 19 nt, Artificial Sequence
  Description of Artificial Sequence: Synthetic oligonucleotide
  Antisense strand to SEQ ID NO: 1639635
agcuugaccaauugauaac

SEQ ID NO: 1639637 - RNA, 19 nt, Artificial Sequence
  Description of Artificial Sequence: Synthetic oligonucleotide
  Sense strand starting at position 2883 of SEQ ID NO: 1561002
uuggucaagcucuagacua

SEQ ID NO: 1639638 - RNA, 19 nt, Artificial Sequence
  Description of Artificial Sequence: Synthetic oligonucleotide
  Antisense strand to SEQ ID NO: 1639637
uagucuagagcuugaccaa

SEQ ID NO: 1639639 - RNA, 19 nt, Artificial Sequence
  Description of Artificial Sequence: Synthetic oligonucleotide
  Sense strand starting at position 2891 of SEQ ID NO: 1561002
gcucuagacuaggucugaa

SEQ ID NO: 1639640 - RNA, 19 nt, Artificial Sequence
  Description of Artificial Sequence: Synthetic oligonucleotide
  Antisense strand to SEQ ID NO: 1639639
uucagaccuagucuagagc

SEQ ID NO: 1639641 - RNA, 19 nt, Artificial Sequence
  Description of Artificial Sequence: Synthetic oligonucleotide
  Sense strand starting at position 2894 of SEQ ID NO: 1561002
cuagacuaggucugaauac

SEQ ID NO: 1639642 - RNA, 19 nt, Artificial Sequence
  Description of Artificial Sequence: Synthetic oligonucleotide
  Antisense strand to SEQ ID NO: 1639641
guauucagaccuagucuag

SEQ ID NO: 1639643 - RNA, 19 nt, Artificial Sequence
  Description of Artificial Sequence: Synthetic oligonucleotide
  Sense strand starting at position 2895 of SEQ ID NO: 1561002
uagacuaggucugaauaca

SEQ ID NO: 1639644 - RNA, 19 nt, Artificial Sequence
  Description of Artificial Sequence: Synthetic oligonucleotide
  Antisense strand to SEQ ID NO: 1639643
uguauucagaccuagucua

SEQ ID NO: 1639645 - RNA, 19 nt, Artificial Sequence
  Description of Artificial Sequence: Synthetic oligonucleotide
  Sense strand starting at position 2910 of SEQ ID NO: 1561002
uacagcaacguguaauagu

SEQ ID NO: 1639646 - RNA, 19 nt, Artificial Sequence
  Description of Artificial Sequence: Synthetic oligonucleotide
  Antisense strand to SEQ ID NO: 1639645
acuauuacacguugcugua

SEQ ID NO: 1639647 - RNA, 19 nt, Artificial Sequence
  Description of Artificial Sequence: Synthetic oligonucleotide
  Sense strand starting at position 3048 of SEQ ID NO: 1561002
agaagagagucucaauuua

SEQ ID NO: 1639648 - RNA, 19 nt, Artificial Sequence
  Description of Artificial Sequence: Synthetic oligonucleotide
  Antisense strand to SEQ ID NO: 1639647
uaaauugagacucucuucu

SEQ ID NO: 1639649 - RNA, 19 nt, Artificial Sequence
  Description of Artificial Sequence: Synthetic oligonucleotide
  Sense strand starting at position 3059 of SEQ ID NO: 1561002
ucaauuuagggcugcucua

SEQ ID NO: 1639650 - RNA, 19 nt, Artificial Sequence
  Description of Artificial Sequence: Synthetic oligonucleotide
  Antisense strand to SEQ ID NO: 1639649
uagagcagcccuaaauuga

SEQ ID NO: 1639651 - RNA, 19 nt, Artificial Sequence
  Description of Artificial Sequence: Synthetic oligonucleotide
  Sense strand starting at position 3081 of SEQ ID NO: 1561002
aggguuagcgcuuucaugu

SEQ ID NO: 1639652 - RNA, 19 nt, Artificial Sequence
  Description of Artificial Sequence: Synthetic oligonucleotide
  Antisense strand to SEQ ID NO: 1639651
acaugaaagcgcuaacccu

SEQ ID NO: 1639653 - RNA, 19 nt, Artificial Sequence
  Description of Artificial Sequence: Synthetic oligonucleotide
  Sense strand starting at position 3082 of SEQ ID NO: 1561002
ggguuagcgcuuucauguu

SEQ ID NO: 1639654 - RNA, 19 nt, Artificial Sequence
  Description of Artificial Sequence: Synthetic oligonucleotide
  Antisense strand to SEQ ID NO: 1639653
aacaugaaagcgcuaaccc

SEQ ID NO: 1639655 - RNA, 19 nt, Artificial Sequence
  Description of Artificial Sequence: Synthetic oligonucleotide
  Sense strand starting at position 3133 of SEQ ID NO: 1561002
gcuagagugcacugcugua

SEQ ID NO: 1639656 - RNA, 19 nt, Artificial Sequence
  Description of Artificial Sequence: Synthetic oligonucleotide
  Antisense strand to SEQ ID NO: 1639655
uacagcagugcacucuagc

SEQ ID NO: 1639657 - RNA, 19 nt, Artificial Sequence
  Description of Artificial Sequence: Synthetic oligonucleotide
  Sense strand starting at position 3138 of SEQ ID NO: 1561002
agugcacugcuguaaucau

SEQ ID NO: 1639658 - RNA, 19 nt, Artificial Sequence
  Description of Artificial Sequence: Synthetic oligonucleotide
  Antisense strand to SEQ ID NO: 1639657
augauuacagcagugcacu

SEQ ID NO: 1639659 - RNA, 19 nt, Artificial Sequence
  Description of Artificial Sequence: Synthetic oligonucleotide
  Sense strand starting at position 3147 of SEQ ID NO: 1561002
cuguaaucauagcuuauug

SEQ ID NO: 1639660 - RNA, 19 nt, Artificial Sequence
  Description of Artificial Sequence: Synthetic oligonucleotide
  Antisense strand to SEQ ID NO: 1639659
caauaagcuaugauuacag

SEQ ID NO: 1639661 - RNA, 19 nt, Artificial Sequence
  Description of Artificial Sequence: Synthetic oligonucleotide
  Sense strand starting at position 3149 of SEQ ID NO: 1561002
guaaucauagcuuauugua

SEQ ID NO: 1639662 - RNA, 19 nt, Artificial Sequence
  Description of Artificial Sequence: Synthetic oligonucleotide
  Antisense strand to SEQ ID NO: 1639661
uacaauaagcuaugauuac

SEQ ID NO: 1639663 - RNA, 19 nt, Artificial Sequence
  Description of Artificial Sequence: Synthetic oligonucleotide
  Sense strand starting at position 3705 of SEQ ID NO: 1561002
ccaccugugaaaugggauu

SEQ ID NO: 1639664 - RNA, 19 nt, Artificial Sequence
  Description of Artificial Sequence: Synthetic oligonucleotide
  Antisense strand to SEQ ID NO: 1639663
aaucccauuucacaggugg

SEQ ID NO: 1639665 - RNA, 19 nt, Artificial Sequence
  Description of Artificial Sequence: Synthetic oligonucleotide
  Sense strand starting at position 3711 of SEQ ID NO: 1561002
gugaaaugggauugagagu

SEQ ID NO: 1639666 - RNA, 19 nt, Artificial Sequence
  Description of Artificial Sequence: Synthetic oligonucleotide
  Antisense strand to SEQ ID NO: 1639665
acucucaaucccauuucac

SEQ ID NO: 1639667 - RNA, 19 nt, Artificial Sequence
  Description of Artificial Sequence: Synthetic oligonucleotide
  Sense strand starting at position 167 of SEQ ID NO: 1561003
ccgggagaucuucgacauc

SEQ ID NO: 1639668 - RNA, 19 nt, Artificial Sequence
  Description of Artificial Sequence: Synthetic oligonucleotide
  Antisense strand to SEQ ID NO: 1639667
gaugucgaagaucucccgg

SEQ ID NO: 1639669 - RNA, 19 nt, Artificial Sequence
  Description of Artificial Sequence: Synthetic oligonucleotide
  Sense strand starting at position 375 of SEQ ID NO: 1561003
gcuuaaucagaguguggca

SEQ ID NO: 1639670 - RNA, 19 nt, Artificial Sequence
  Description of Artificial Sequence: Synthetic oligonucleotide
  Antisense strand to SEQ ID NO: 1639669
ugccacacucugauuaagc

SEQ ID NO: 1639671 - RNA, 19 nt, Artificial Sequence
  Description of Artificial Sequence: Synthetic oligonucleotide
  Sense strand starting at position 377 of SEQ ID NO: 1561003
uuaaucagaguguggcaua

SEQ ID NO: 1639672 - RNA, 19 nt, Artificial Sequence
  Description of Artificial Sequence: Synthetic oligonucleotide
  Antisense strand to SEQ ID NO: 1639671
uaugccacacucugauuaa

SEQ ID NO: 1639673 - RNA, 19 nt, Artificial Sequence
  Description of Artificial Sequence: Synthetic oligonucleotide
  Sense strand starting at position 380 of SEQ ID NO: 1561003
aucagaguguggcauagaa

SEQ ID NO: 1639674 - RNA, 19 nt, Artificial Sequence
  Description of Artificial Sequence: Synthetic oligonucleotide
  Antisense strand to SEQ ID NO: 1639673
uucuaugccacacucugau

SEQ ID NO: 1639675 - RNA, 19 nt, Artificial Sequence
  Description of Artificial Sequence: Synthetic oligonucleotide
  Sense strand starting at position 384 of SEQ ID NO: 1561003
gaguguggcauagaagcua

SEQ ID NO: 1639676 - RNA, 19 nt, Artificial Sequence
  Description of Artificial Sequence: Synthetic oligonucleotide
  Antisense strand to SEQ ID NO: 1639675
uagcuucuaugccacacuc

SEQ ID NO: 1639677 - RNA, 19 nt, Artificial Sequence
  Description of Artificial Sequence: Synthetic oligonucleotide
  Sense strand starting at position 982 of SEQ ID NO: 1561003
ccugcauucuaguuaagca

SEQ ID NO: 1639678 - RNA, 19 nt, Artificial Sequence
  Description of Artificial Sequence: Synthetic oligonucleotide
  Antisense strand to SEQ ID NO: 1639677
ugcuuaacuagaaugcagg

SEQ ID NO: 1639679 - RNA, 19 nt, Artificial Sequence
  Description of Artificial Sequence: Synthetic oligonucleotide
  Sense strand starting at position 1016 of SEQ ID NO: 1561003
ccgcgauuucccuggcuac

SEQ ID NO: 1639680 - RNA, 19 nt, Artificial Sequence
  Description of Artificial Sequence: Synthetic oligonucleotide
  Antisense strand to SEQ ID NO: 1639679
guagccagggaaaucgcgg

SEQ ID NO: 1639681 - RNA, 19 nt, Artificial Sequence
  Description of Artificial Sequence: Synthetic oligonucleotide
  Sense strand starting at position 1017 of SEQ ID NO: 1561003
cgcgauuucccuggcuacu

SEQ ID NO: 1639682 - RNA, 19 nt, Artificial Sequence
  Description of Artificial Sequence: Synthetic oligonucleotide
  Antisense strand to SEQ ID NO: 1639681
aguagccagggaaaucgcg

SEQ ID NO: 1639683 - RNA, 19 nt, Artificial Sequence
  Description of Artificial Sequence: Synthetic oligonucleotide
  Sense strand starting at position 1259 of SEQ ID NO: 1561003
uccuuacuccugcgucaga

SEQ ID NO: 1639684 - RNA, 19 nt, Artificial Sequence
  Description of Artificial Sequence: Synthetic oligonucleotide
  Antisense strand to SEQ ID NO: 1639683
ucugacgcaggaguaagga

SEQ ID NO: 1639685 - RNA, 19 nt, Artificial Sequence
  Description of Artificial Sequence: Synthetic oligonucleotide
  Sense strand starting at position 1260 of SEQ ID NO: 1561003
ccuuacuccugcgucagaa

SEQ ID NO: 1639686 - RNA, 19 nt, Artificial Sequence
  Description of Artificial Sequence: Synthetic oligonucleotide
  Antisense strand to SEQ ID NO: 1639685
uucugacgcaggaguaagg

SEQ ID NO: 1639687 - RNA, 19 nt, Artificial Sequence
  Description of Artificial Sequence: Synthetic oligonucleotide
  Sense strand starting at position 1285 of SEQ ID NO: 1561003
acccgcugcccgcuuaaua

SEQ ID NO: 1639688 - RNA, 19 nt, Artificial Sequence
  Description of Artificial Sequence: Synthetic oligonucleotide
  Antisense strand to SEQ ID NO: 1639687
uauuaagcgggcagcgggu

SEQ ID NO: 1639689 - RNA, 19 nt, Artificial Sequence
  Description of Artificial Sequence: Synthetic oligonucleotide
  Sense strand starting at position 1286 of SEQ ID NO: 1561003
cccgcugcccgcuuaauaa

SEQ ID NO: 1639690 - RNA, 19 nt, Artificial Sequence
  Description of Artificial Sequence: Synthetic oligonucleotide
  Antisense strand to SEQ ID NO: 1639689
uuauuaagcgggcagcggg

SEQ ID NO: 1639691 - RNA, 19 nt, Artificial Sequence
  Description of Artificial Sequence: Synthetic oligonucleotide
  Sense strand starting at position 1381 of SEQ ID NO: 1561003
cuccuacuccugcgucaga

SEQ ID NO: 1639692 - RNA, 19 nt, Artificial Sequence
  Description of Artificial Sequence: Synthetic oligonucleotide
  Antisense strand to SEQ ID NO: 1639691
ucugacgcaggaguaggag

SEQ ID NO: 1639693 - RNA, 19 nt, Artificial Sequence
  Description of Artificial Sequence: Synthetic oligonucleotide
  Sense strand starting at position 1382 of SEQ ID NO: 1561003
uccuacuccugcgucagaa

SEQ ID NO: 1639694 - RNA, 19 nt, Artificial Sequence
  Description of Artificial Sequence: Synthetic oligonucleotide
  Antisense strand to SEQ ID NO: 1639693
uucugacgcaggaguagga

SEQ ID NO: 1639695 - RNA, 19 nt, Artificial Sequence
  Description of Artificial Sequence: Synthetic oligonucleotide
  Sense strand starting at position 1989 of SEQ ID NO: 1561003
gggauaucuacucggcuca

SEQ ID NO: 1639696 - RNA, 19 nt, Artificial Sequence
  Description of Artificial Sequence: Synthetic oligonucleotide
  Antisense strand to SEQ ID NO: 1639695
ugagccgaguagauauccc

SEQ ID NO: 1639697 - RNA, 19 nt, Artificial Sequence
  Description of Artificial Sequence: Synthetic oligonucleotide
  Sense strand starting at position 2091 of SEQ ID NO: 1561003
gaccgagcucccugagcau

SEQ ID NO: 1639698 - RNA, 19 nt, Artificial Sequence
  Description of Artificial Sequence: Synthetic oligonucleotide
  Antisense strand to SEQ ID NO: 1639697
augcucagggagcucgguc

SEQ ID NO: 1639699 - RNA, 19 nt, Artificial Sequence
  Description of Artificial Sequence: Synthetic oligonucleotide
  Sense strand starting at position 2175 of SEQ ID NO: 1561003
ccucccucugccugugaaa

SEQ ID NO: 1639700 - RNA, 19 nt, Artificial Sequence
  Description of Artificial Sequence: Synthetic oligonucleotide
  Antisense strand to SEQ ID NO: 1639699
uuucacaggcagagggagg

SEQ ID NO: 1639701 - RNA, 19 nt, Artificial Sequence
  Description of Artificial Sequence: Synthetic oligonucleotide
  Sense strand starting at position 2177 of SEQ ID NO: 1561003
ucccucugccugugaaaug

SEQ ID NO: 1639702 - RNA, 19 nt, Artificial Sequence
  Description of Artificial Sequence: Synthetic oligonucleotide
  Antisense strand to SEQ ID NO: 1639701
cauuucacaggcagaggga

SEQ ID NO: 1639703 - RNA, 19 nt, Artificial Sequence
  Description of Artificial Sequence: Synthetic oligonucleotide
  Sense strand starting at position 2178 of SEQ ID NO: 1561003
cccucugccugugaaauga

SEQ ID NO: 1639704 - RNA, 19 nt, Artificial Sequence
  Description of Artificial Sequence: Synthetic oligonucleotide
  Antisense strand to SEQ ID NO: 1639703
ucauuucacaggcagaggg

SEQ ID NO: 1639705 - RNA, 19 nt, Artificial Sequence
  Description of Artificial Sequence: Synthetic oligonucleotide
  Sense strand starting at position 2264 of SEQ ID NO: 1561003
ucacuuguagagcgggaau

SEQ ID NO: 1639706 - RNA, 19 nt, Artificial Sequence
  Description of Artificial Sequence: Synthetic oligonucleotide
  Antisense strand to SEQ ID NO: 1639705
auucccgcucuacaaguga

SEQ ID NO: 1639707 - RNA, 19 nt, Artificial Sequence
  Description of Artificial Sequence: Synthetic oligonucleotide
  Sense strand starting at position 2266 of SEQ ID NO: 1561003
acuuguagagcgggaauaa

SEQ ID NO: 1639708 - RNA, 19 nt, Artificial Sequence
  Description of Artificial Sequence: Synthetic oligonucleotide
  Antisense strand to SEQ ID NO: 1639707
uuauucccgcucuacaagu

SEQ ID NO: 1639709 - RNA, 19 nt, Artificial Sequence
  Description of Artificial Sequence: Synthetic oligonucleotide
  Sense strand starting at position 2267 of SEQ ID NO: 1561003
cuuguagagcgggaauaau

SEQ ID NO: 1639710 - RNA, 19 nt, Artificial Sequence
  Description of Artificial Sequence: Synthetic oligonucleotide
  Antisense strand to SEQ ID NO: 1639709
auuauucccgcucuacaag

SEQ ID NO: 1639711 - RNA, 19 nt, Artificial Sequence
  Description of Artificial Sequence: Synthetic oligonucleotide
  Sense strand starting at position 2276 of SEQ ID NO: 1561003
cgggaauaauaauaccaaa

SEQ ID NO: 1639712 - RNA, 19 nt, Artificial Sequence
  Description of Artificial Sequence: Synthetic oligonucleotide
  Antisense strand to SEQ ID NO: 1639711
uuugguauuauuauucccg

SEQ ID NO: 1639713 - RNA, 19 nt, Artificial Sequence
  Description of Artificial Sequence: Synthetic oligonucleotide
  Sense strand starting at position 2404 of SEQ ID NO: 1561003
ccagccuaauacggugaaa

SEQ ID NO: 1639714 - RNA, 19 nt, Artificial Sequence
  Description of Artificial Sequence: Synthetic oligonucleotide
  Antisense strand to SEQ ID NO: 1639713
uuucaccguauuaggcugg

SEQ ID NO: 1639715 - RNA, 19 nt, Artificial Sequence
  Description of Artificial Sequence: Synthetic oligonucleotide
  Sense strand starting at position 2801 of SEQ ID NO: 1561003
guuaucaauuggucaagcu

SEQ ID NO: 1639716 - RNA, 19 nt, Artificial Sequence
  Description of Artificial Sequence: Synthetic oligonucleotide
  Antisense strand to SEQ ID NO: 1639715
agcuugaccaauugauaac

SEQ ID NO: 1639717 - RNA, 19 nt, Artificial Sequence
  Description of Artificial Sequence: Synthetic oligonucleotide
  Sense strand starting at position 2809 of SEQ ID NO: 1561003
uuggucaagcucuagacua

SEQ ID NO: 1639718 - RNA, 19 nt, Artificial Sequence
  Description of Artificial Sequence: Synthetic oligonucleotide
  Antisense strand to SEQ ID NO: 1639717
uagucuagagcuugaccaa

SEQ ID NO: 1639719 - RNA, 19 nt, Artificial Sequence
  Description of Artificial Sequence: Synthetic oligonucleotide
  Sense strand starting at position 2817 of SEQ ID NO: 1561003
gcucuagacuaggucugaa

SEQ ID NO: 1639720 - RNA, 19 nt, Artificial Sequence
  Description of Artificial Sequence: Synthetic oligonucleotide
  Antisense strand to SEQ ID NO: 1639719
uucagaccuagucuagagc

SEQ ID NO: 1639721 - RNA, 19 nt, Artificial Sequence
  Description of Artificial Sequence: Synthetic oligonucleotide
  Sense strand starting at position 2820 of SEQ ID NO: 1561003
cuagacuaggucugaauac

SEQ ID NO: 1639722 - RNA, 19 nt, Artificial Sequence
  Description of Artificial Sequence: Synthetic oligonucleotide
  Antisense strand to SEQ ID NO: 1639721
guauucagaccuagucuag

SEQ ID NO: 1639723 - RNA, 19 nt, Artificial Sequence
  Description of Artificial Sequence: Synthetic oligonucleotide
  Sense strand starting at position 2821 of SEQ ID NO: 1561003
uagacuaggucugaauaca

SEQ ID NO: 1639724 - RNA, 19 nt, Artificial Sequence
  Description of Artificial Sequence: Synthetic oligonucleotide
  Antisense strand to SEQ ID NO: 1639723
uguauucagaccuagucua

SEQ ID NO: 1639725 - RNA, 19 nt, Artificial Sequence
  Description of Artificial Sequence: Synthetic oligonucleotide
  Sense strand starting at position 2836 of SEQ ID NO: 1561003
uacagcaacguguaauagu

SEQ ID NO: 1639726 - RNA, 19 nt, Artificial Sequence
  Description of Artificial Sequence: Synthetic oligonucleotide
  Antisense strand to SEQ ID NO: 1639725
acuauuacacguugcugua

SEQ ID NO: 1639727 - RNA, 19 nt, Artificial Sequence
  Description of Artificial Sequence: Synthetic oligonucleotide
  Sense strand starting at position 2974 of SEQ ID NO: 1561003
agaagagagucucaauuua

SEQ ID NO: 1639728 - RNA, 19 nt, Artificial Sequence
  Description of Artificial Sequence: Synthetic oligonucleotide
  Antisense strand to SEQ ID NO: 1639727
uaaauugagacucucuucu

SEQ ID NO: 1639729 - RNA, 19 nt, Artificial Sequence
  Description of Artificial Sequence: Synthetic oligonucleotide
  Sense strand starting at position 2985 of SEQ ID NO: 1561003
ucaauuuagggcugcucua

SEQ ID NO: 1639730 - RNA, 19 nt, Artificial Sequence
  Description of Artificial Sequence: Synthetic oligonucleotide
  Antisense strand to SEQ ID NO: 1639729
uagagcagcccuaaauuga

SEQ ID NO: 1639731 - RNA, 19 nt, Artificial Sequence
  Description of Artificial Sequence: Synthetic oligonucleotide
  Sense strand starting at position 3007 of SEQ ID NO: 1561003
aggguuagcgcuuucaugu

SEQ ID NO: 1639732 - RNA, 19 nt, Artificial Sequence
  Description of Artificial Sequence: Synthetic oligonucleotide
  Antisense strand to SEQ ID NO: 1639731
acaugaaagcgcuaacccu

SEQ ID NO: 1639733 - RNA, 19 nt, Artificial Sequence
  Description of Artificial Sequence: Synthetic oligonucleotide
  Sense strand starting at position 3008 of SEQ ID NO: 1561003
ggguuagcgcuuucauguu

SEQ ID NO: 1639734 - RNA, 19 nt, Artificial Sequence
  Description of Artificial Sequence: Synthetic oligonucleotide
  Antisense strand to SEQ ID NO: 1639733
aacaugaaagcgcuaaccc

SEQ ID NO: 1639735 - RNA, 19 nt, Artificial Sequence
  Description of Artificial Sequence: Synthetic oligonucleotide
  Sense strand starting at position 3059 of SEQ ID NO: 1561003
gcuagagugcacugcugua

SEQ ID NO: 1639736 - RNA, 19 nt, Artificial Sequence
  Description of Artificial Sequence: Synthetic oligonucleotide
  Antisense strand to SEQ ID NO: 1639735
uacagcagugcacucuagc

SEQ ID NO: 1639737 - RNA, 19 nt, Artificial Sequence
  Description of Artificial Sequence: Synthetic oligonucleotide
  Sense strand starting at position 3064 of SEQ ID NO: 1561003
agugcacugcuguaaucau

SEQ ID NO: 1639738 - RNA, 19 nt, Artificial Sequence
  Description of Artificial Sequence: Synthetic oligonucleotide
  Antisense strand to SEQ ID NO: 1639737
augauuacagcagugcacu

SEQ ID NO: 1639739 - RNA, 19 nt, Artificial Sequence
  Description of Artificial Sequence: Synthetic oligonucleotide
  Sense strand starting at position 3073 of SEQ ID NO: 1561003
cuguaaucauagcuuauug

SEQ ID NO: 1639740 - RNA, 19 nt, Artificial Sequence
  Description of Artificial Sequence: Synthetic oligonucleotide
  Antisense strand to SEQ ID NO: 1639739
caauaagcuaugauuacag

SEQ ID NO: 1639741 - RNA, 19 nt, Artificial Sequence
  Description of Artificial Sequence: Synthetic oligonucleotide
  Sense strand starting at position 3075 of SEQ ID NO: 1561003
guaaucauagcuuauugua

SEQ ID NO: 1639742 - RNA, 19 nt, Artificial Sequence
  Description of Artificial Sequence: Synthetic oligonucleotide
  Antisense strand to SEQ ID NO: 1639741
uacaauaagcuaugauuac

SEQ ID NO: 1639743 - RNA, 19 nt, Artificial Sequence
  Description of Artificial Sequence: Synthetic oligonucleotide
  Sense strand starting at position 3631 of SEQ ID NO: 1561003
ccaccugugaaaugggauu

SEQ ID NO: 1639744 - RNA, 19 nt, Artificial Sequence
  Description of Artificial Sequence: Synthetic oligonucleotide
  Antisense strand to SEQ ID NO: 1639743
aaucccauuucacaggugg

SEQ ID NO: 1639745 - RNA, 19 nt, Artificial Sequence
  Description of Artificial Sequence: Synthetic oligonucleotide
  Sense strand starting at position 3637 of SEQ ID NO: 1561003
gugaaaugggauugagagu

SEQ ID NO: 1639746 - RNA, 19 nt, Artificial Sequence
  Description of Artificial Sequence: Synthetic oligonucleotide
  Antisense strand to SEQ ID NO: 1639745
acucucaaucccauuucac

SEQ ID NO: 1639747 - RNA, 19 nt, Artificial Sequence
  Description of Artificial Sequence: Synthetic oligonucleotide
  Sense strand starting at position 50 of SEQ ID NO: 1561004
uguuuagaccuaugucaca

SEQ ID NO: 1639748 - RNA, 19 nt, Artificial Sequence
  Description of Artificial Sequence: Synthetic oligonucleotide
  Antisense strand to SEQ ID NO: 1639747
ugugacauaggucuaaaca

SEQ ID NO: 1639749 - RNA, 19 nt, Artificial Sequence
  Description of Artificial Sequence: Synthetic oligonucleotide
  Sense strand starting at position 80 of SEQ ID NO: 1561004
ucucacuauguaugcgaga

SEQ ID NO: 1639750 - RNA, 19 nt, Artificial Sequence
  Description of Artificial Sequence: Synthetic oligonucleotide
  Antisense strand to SEQ ID NO: 1639749
ucucgcauacauagugaga

SEQ ID NO: 1639751 - RNA, 19 nt, Artificial Sequence
  Description of Artificial Sequence: Synthetic oligonucleotide
  Sense strand starting at position 81 of SEQ ID NO: 1561004
cucacuauguaugcgagaa

SEQ ID NO: 1639752 - RNA, 19 nt, Artificial Sequence
  Description of Artificial Sequence: Synthetic oligonucleotide
  Antisense strand to SEQ ID NO: 1639751
uucucgcauacauagugag

SEQ ID NO: 1639753 - RNA, 19 nt, Artificial Sequence
  Description of Artificial Sequence: Synthetic oligonucleotide
  Sense strand starting at position 82 of SEQ ID NO: 1561004
ucacuauguaugcgagaac

SEQ ID NO: 1639754 - RNA, 19 nt, Artificial Sequence
  Description of Artificial Sequence: Synthetic oligonucleotide
  Antisense strand to SEQ ID NO: 1639753
guucucgcauacauaguga

SEQ ID NO: 1639755 - RNA, 19 nt, Artificial Sequence
  Description of Artificial Sequence: Synthetic oligonucleotide
  Sense strand starting at position 83 of SEQ ID NO: 1561004
cacuauguaugcgagaaca

SEQ ID NO: 1639756 - RNA, 19 nt, Artificial Sequence
  Description of Artificial Sequence: Synthetic oligonucleotide
  Antisense strand to SEQ ID NO: 1639755
uguucucgcauacauagug

SEQ ID NO: 1639757 - RNA, 19 nt, Artificial Sequence
  Description of Artificial Sequence: Synthetic oligonucleotide
  Sense strand starting at position 85 of SEQ ID NO: 1561004
cuauguaugcgagaacauu

SEQ ID NO: 1639758 - RNA, 19 nt, Artificial Sequence
  Description of Artificial Sequence: Synthetic oligonucleotide
  Antisense strand to SEQ ID NO: 1639757
aauguucucgcauacauag

SEQ ID NO: 1639759 - RNA, 19 nt, Artificial Sequence
  Description of Artificial Sequence: Synthetic oligonucleotide
  Sense strand starting at position 146 of SEQ ID NO: 1561004
uguagaacgcuuugauucu

SEQ ID NO: 1639760 - RNA, 19 nt, Artificial Sequence
  Description of Artificial Sequence: Synthetic oligonucleotide
  Antisense strand to SEQ ID NO: 1639759
agaaucaaagcguucuaca

SEQ ID NO: 1639761 - RNA, 19 nt, Artificial Sequence
  Description of Artificial Sequence: Synthetic oligonucleotide
  Sense strand starting at position 153 of SEQ ID NO: 1561004
cgcuuugauucugaagaac

SEQ ID NO: 1639762 - RNA, 19 nt, Artificial Sequence
  Description of Artificial Sequence: Synthetic oligonucleotide
  Antisense strand to SEQ ID NO: 1639761
guucuucagaaucaaagcg

SEQ ID NO: 1639763 - RNA, 19 nt, Artificial Sequence
  Description of Artificial Sequence: Synthetic oligonucleotide
  Sense strand starting at position 235 of SEQ ID NO: 1561004
cucaguuggccuuaaauug

SEQ ID NO: 1639764 - RNA, 19 nt, Artificial Sequence
  Description of Artificial Sequence: Synthetic oligonucleotide
  Antisense strand to SEQ ID NO: 1639763
caauuuaaggccaacugag

SEQ ID NO: 1639765 - RNA, 19 nt, Artificial Sequence
  Description of Artificial Sequence: Synthetic oligonucleotide
  Sense strand starting at position 242 of SEQ ID NO: 1561004
ggccuuaaauugguccgau

SEQ ID NO: 1639766 - RNA, 19 nt, Artificial Sequence
  Description of Artificial Sequence: Synthetic oligonucleotide
  Antisense strand to SEQ ID NO: 1639765
aucggaccaauuuaaggcc

SEQ ID NO: 1639767 - RNA, 19 nt, Artificial Sequence
  Description of Artificial Sequence: Synthetic oligonucleotide
  Sense strand starting at position 243 of SEQ ID NO: 1561004
gccuuaaauugguccgauc

SEQ ID NO: 1639768 - RNA, 19 nt, Artificial Sequence
  Description of Artificial Sequence: Synthetic oligonucleotide
  Antisense strand to SEQ ID NO: 1639767
gaucggaccaauuuaaggc

SEQ ID NO: 1639769 - RNA, 19 nt, Artificial Sequence
  Description of Artificial Sequence: Synthetic oligonucleotide
  Sense strand starting at position 1162 of SEQ ID NO: 1561004
gcacgcucagucuacagau

SEQ ID NO: 1639770 - RNA, 19 nt, Artificial Sequence
  Description of Artificial Sequence: Synthetic oligonucleotide
  Antisense strand to SEQ ID NO: 1639769
aucuguagacugagcgugc

SEQ ID NO: 1639771 - RNA, 19 nt, Artificial Sequence
  Description of Artificial Sequence: Synthetic oligonucleotide
  Sense strand starting at position 1164 of SEQ ID NO: 1561004
acgcucagucuacagauua

SEQ ID NO: 1639772 - RNA, 19 nt, Artificial Sequence
  Description of Artificial Sequence: Synthetic oligonucleotide
  Antisense strand to SEQ ID NO: 1639771
uaaucuguagacugagcgu

SEQ ID NO: 1639773 - RNA, 19 nt, Artificial Sequence
  Description of Artificial Sequence: Synthetic oligonucleotide
  Sense strand starting at position 1174 of SEQ ID NO: 1561004
uacagauuaugaggagaaa

SEQ ID NO: 1639774 - RNA, 19 nt, Artificial Sequence
  Description of Artificial Sequence: Synthetic oligonucleotide
  Antisense strand to SEQ ID NO: 1639773
uuucuccucauaaucugua

SEQ ID NO: 1639775 - RNA, 19 nt, Artificial Sequence
  Description of Artificial Sequence: Synthetic oligonucleotide
  Sense strand starting at position 1366 of SEQ ID NO: 1561004
agaucuaagcccgagguua

SEQ ID NO: 1639776 - RNA, 19 nt, Artificial Sequence
  Description of Artificial Sequence: Synthetic oligonucleotide
  Antisense strand to SEQ ID NO: 1639775
uaaccucgggcuuagaucu

SEQ ID NO: 1639777 - RNA, 19 nt, Artificial Sequence
  Description of Artificial Sequence: Synthetic oligonucleotide
  Sense strand starting at position 1368 of SEQ ID NO: 1561004
aucuaagcccgagguuauu

SEQ ID NO: 1639778 - RNA, 19 nt, Artificial Sequence
  Description of Artificial Sequence: Synthetic oligonucleotide
  Antisense strand to SEQ ID NO: 1639777
aauaaccucgggcuuagau

SEQ ID NO: 1639779 - RNA, 19 nt, Artificial Sequence
  Description of Artificial Sequence: Synthetic oligonucleotide
  Sense strand starting at position 1522 of SEQ ID NO: 1561004
cuccuuauguaguacauaa

SEQ ID NO: 1639780 - RNA, 19 nt, Artificial Sequence
  Description of Artificial Sequence: Synthetic oligonucleotide
  Antisense strand to SEQ ID NO: 1639779
uuauguacuacauaaggag

SEQ ID NO: 1639781 - RNA, 19 nt, Artificial Sequence
  Description of Artificial Sequence: Synthetic oligonucleotide
  Sense strand starting at position 1575 of SEQ ID NO: 1561004
uggauuagcccuuaggagu

SEQ ID NO: 1639782 - RNA, 19 nt, Artificial Sequence
  Description of Artificial Sequence: Synthetic oligonucleotide
  Antisense strand to SEQ ID NO: 1639781
acuccuaagggcuaaucca

SEQ ID NO: 1639783 - RNA, 19 nt, Artificial Sequence
  Description of Artificial Sequence: Synthetic oligonucleotide
  Sense strand starting at position 1588 of SEQ ID NO: 1561004
aggaguccguuuccacaga

SEQ ID NO: 1639784 - RNA, 19 nt, Artificial Sequence
  Description of Artificial Sequence: Synthetic oligonucleotide
  Antisense strand to SEQ ID NO: 1639783
ucuguggaaacggacuccu

SEQ ID NO: 1639785 - RNA, 19 nt, Artificial Sequence
  Description of Artificial Sequence: Synthetic oligonucleotide
  Sense strand starting at position 2114 of SEQ ID NO: 1561004
cggugucucgcgagagucu

SEQ ID NO: 1639786 - RNA, 19 nt, Artificial Sequence
  Description of Artificial Sequence: Synthetic oligonucleotide
  Antisense strand to SEQ ID NO: 1639785
agacucucgcgagacaccg

SEQ ID NO: 1639787 - RNA, 19 nt, Artificial Sequence
  Description of Artificial Sequence: Synthetic oligonucleotide
  Sense strand starting at position 2115 of SEQ ID NO: 1561004
ggugucucgcgagagucuu

SEQ ID NO: 1639788 - RNA, 19 nt, Artificial Sequence
  Description of Artificial Sequence: Synthetic oligonucleotide
  Antisense strand to SEQ ID NO: 1639787
aagacucucgcgagacacc

SEQ ID NO: 1639789 - RNA, 19 nt, Artificial Sequence
  Description of Artificial Sequence: Synthetic oligonucleotide
  Sense strand starting at position 2116 of SEQ ID NO: 1561004
gugucucgcgagagucuua

SEQ ID NO: 1639790 - RNA, 19 nt, Artificial Sequence
  Description of Artificial Sequence: Synthetic oligonucleotide
  Antisense strand to SEQ ID NO: 1639789
uaagacucucgcgagacac

SEQ ID NO: 1639791 - RNA, 19 nt, Artificial Sequence
  Description of Artificial Sequence: Synthetic oligonucleotide
  Sense strand starting at position 2169 of SEQ ID NO: 1561004
ggaagaugugaccagccuu

SEQ ID NO: 1639792 - RNA, 19 nt, Artificial Sequence
  Description of Artificial Sequence: Synthetic oligonucleotide
  Antisense strand to SEQ ID NO: 1639791
aaggcuggucacaucuucc

SEQ ID NO: 1639793 - RNA, 19 nt, Artificial Sequence
  Description of Artificial Sequence: Synthetic oligonucleotide
  Sense strand starting at position 2194 of SEQ ID NO: 1561004
gcccguauuaucgcgagag

SEQ ID NO: 1639794 - RNA, 19 nt, Artificial Sequence
  Description of Artificial Sequence: Synthetic oligonucleotide
  Antisense strand to SEQ ID NO: 1639793
cucucgcgauaauacgggc

SEQ ID NO: 1639795 - RNA, 19 nt, Artificial Sequence
  Description of Artificial Sequence: Synthetic oligonucleotide
  Sense strand starting at position 2196 of SEQ ID NO: 1561004
ccguauuaucgcgagaguc

SEQ ID NO: 1639796 - RNA, 19 nt, Artificial Sequence
  Description of Artificial Sequence: Synthetic oligonucleotide
  Antisense strand to SEQ ID NO: 1639795
gacucucgcgauaauacgg

SEQ ID NO: 1639797 - RNA, 19 nt, Artificial Sequence
  Description of Artificial Sequence: Synthetic oligonucleotide
  Sense strand starting at position 2197 of SEQ ID NO: 1561004
cguauuaucgcgagagucg

SEQ ID NO: 1639798 - RNA, 19 nt, Artificial Sequence
  Description of Artificial Sequence: Synthetic oligonucleotide
  Antisense strand to SEQ ID NO: 1639797
cgacucucgcgauaauacg

SEQ ID NO: 1639799 - RNA, 19 nt, Artificial Sequence
  Description of Artificial Sequence: Synthetic oligonucleotide
  Sense strand starting at position 2198 of SEQ ID NO: 1561004
guauuaucgcgagagucgu

SEQ ID NO: 1639800 - RNA, 19 nt, Artificial Sequence
  Description of Artificial Sequence: Synthetic oligonucleotide
  Antisense strand to SEQ ID NO: 1639799
acgacucucgcgauaauac

SEQ ID NO: 1639801 - RNA, 19 nt, Artificial Sequence
  Description of Artificial Sequence: Synthetic oligonucleotide
  Sense strand starting at position 2243 of SEQ ID NO: 1561004
cguaggcucccgugggauu

SEQ ID NO: 1639802 - RNA, 19 nt, Artificial Sequence
  Description of Artificial Sequence: Synthetic oligonucleotide
  Antisense strand to SEQ ID NO: 1639801
aaucccacgggagccuacg

SEQ ID NO: 1639803 - RNA, 19 nt, Artificial Sequence
  Description of Artificial Sequence: Synthetic oligonucleotide
  Sense strand starting at position 2364 of SEQ ID NO: 1561004
ggcgucgccaucuuuguua

SEQ ID NO: 1639804 - RNA, 19 nt, Artificial Sequence
  Description of Artificial Sequence: Synthetic oligonucleotide
  Antisense strand to SEQ ID NO: 1639803
uaacaaagauggcgacgcc

SEQ ID NO: 1639805 - RNA, 19 nt, Artificial Sequence
  Description of Artificial Sequence: Synthetic oligonucleotide
  Sense strand starting at position 3327 of SEQ ID NO: 1561004
auaacaggaucgucuagua

SEQ ID NO: 1639806 - RNA, 19 nt, Artificial Sequence
  Description of Artificial Sequence: Synthetic oligonucleotide
  Antisense strand to SEQ ID NO: 1639805
uacuagacgauccuguuau

SEQ ID NO: 1639807 - RNA, 19 nt, Artificial Sequence
  Description of Artificial Sequence: Synthetic oligonucleotide
  Sense strand starting at position 3332 of SEQ ID NO: 1561004
aggaucgucuaguagaacu

SEQ ID NO: 1639808 - RNA, 19 nt, Artificial Sequence
  Description of Artificial Sequence: Synthetic oligonucleotide
  Antisense strand to SEQ ID NO: 1639807
aguucuacuagacgauccu

SEQ ID NO: 1639809 - RNA, 19 nt, Artificial Sequence
  Description of Artificial Sequence: Synthetic oligonucleotide
  Sense strand starting at position 3334 of SEQ ID NO: 1561004
gaucgucuaguagaacuuu

SEQ ID NO: 1639810 - RNA, 19 nt, Artificial Sequence
  Description of Artificial Sequence: Synthetic oligonucleotide
  Antisense strand to SEQ ID NO: 1639809
aaaguucuacuagacgauc

SEQ ID NO: 1639811 - RNA, 19 nt, Artificial Sequence
  Description of Artificial Sequence: Synthetic oligonucleotide
  Sense strand starting at position 3340 of SEQ ID NO: 1561004
cuaguagaacuuuauguga

SEQ ID NO: 1639812 - RNA, 19 nt, Artificial Sequence
  Description of Artificial Sequence: Synthetic oligonucleotide
  Antisense strand to SEQ ID NO: 1639811
ucacauaaaguucuacuag

SEQ ID NO: 1639813 - RNA, 19 nt, Artificial Sequence
  Description of Artificial Sequence: Synthetic oligonucleotide
  Sense strand starting at position 3342 of SEQ ID NO: 1561004
aguagaacuuuaugugaug

SEQ ID NO: 1639814 - RNA, 19 nt, Artificial Sequence
  Description of Artificial Sequence: Synthetic oligonucleotide
  Antisense strand to SEQ ID NO: 1639813
caucacauaaaguucuacu

SEQ ID NO: 1639815 - RNA, 19 nt, Artificial Sequence
  Description of Artificial Sequence: Synthetic oligonucleotide
  Sense strand starting at position 3345 of SEQ ID NO: 1561004
agaacuuuaugugauggaa

SEQ ID NO: 1639816 - RNA, 19 nt, Artificial Sequence
  Description of Artificial Sequence: Synthetic oligonucleotide
  Antisense strand to SEQ ID NO: 1639815
uuccaucacauaaaguucu

SEQ ID NO: 1639817 - RNA, 19 nt, Artificial Sequence
  Description of Artificial Sequence: Synthetic oligonucleotide
  Sense strand starting at position 3347 of SEQ ID NO: 1561004
aacuuuaugugauggaaau

SEQ ID NO: 1639818 - RNA, 19 nt, Artificial Sequence
  Description of Artificial Sequence: Synthetic oligonucleotide
  Antisense strand to SEQ ID NO: 1639817
auuuccaucacauaaaguu

SEQ ID NO: 1639819 - RNA, 19 nt, Artificial Sequence
  Description of Artificial Sequence: Synthetic oligonucleotide
  Sense strand starting at position 3348 of SEQ ID NO: 1561004
acuuuaugugauggaaauu

SEQ ID NO: 1639820 - RNA, 19 nt, Artificial Sequence
  Description of Artificial Sequence: Synthetic oligonucleotide
  Antisense strand to SEQ ID NO: 1639819
aauuuccaucacauaaagu

SEQ ID NO: 1639821 - RNA, 19 nt, Artificial Sequence
  Description of Artificial Sequence: Synthetic oligonucleotide
  Sense strand starting at position 3430 of SEQ ID NO: 1561004
ggacauaaauguuuaacuu

SEQ ID NO: 1639822 - RNA, 19 nt, Artificial Sequence
  Description of Artificial Sequence: Synthetic oligonucleotide
  Antisense strand to SEQ ID NO: 1639821
aaguuaaacauuuaugucc

SEQ ID NO: 1639823 - RNA, 19 nt, Artificial Sequence
  Description of Artificial Sequence: Synthetic oligonucleotide
  Sense strand starting at position 3440 of SEQ ID NO: 1561004
guuuaacuuugauuguguu

SEQ ID NO: 1639824 - RNA, 19 nt, Artificial Sequence
  Description of Artificial Sequence: Synthetic oligonucleotide
  Antisense strand to SEQ ID NO: 1639823
aacacaaucaaaguuaaac

SEQ ID NO: 1639825 - RNA, 19 nt, Artificial Sequence
  Description of Artificial Sequence: Synthetic oligonucleotide
  Sense strand starting at position 3505 of SEQ ID NO: 1561004
acaagucuauagcugaaua

SEQ ID NO: 1639826 - RNA, 19 nt, Artificial Sequence
  Description of Artificial Sequence: Synthetic oligonucleotide
  Antisense strand to SEQ ID NO: 1639825
uauucagcuauagacuugu

SEQ ID NO: 1639827 - RNA, 19 nt, Artificial Sequence
  Description of Artificial Sequence: Synthetic oligonucleotide
  Sense strand starting at position 431 of SEQ ID NO: 1561005
gguucucuccagggacaga

SEQ ID NO: 1639828 - RNA, 19 nt, Artificial Sequence
  Description of Artificial Sequence: Synthetic oligonucleotide
  Antisense strand to SEQ ID NO: 1639827
ucugucccuggagagaacc

SEQ ID NO: 1639829 - RNA, 19 nt, Artificial Sequence
  Description of Artificial Sequence: Synthetic oligonucleotide
  Sense strand starting at position 470 of SEQ ID NO: 1561005
guccauuguagugacuaca

SEQ ID NO: 1639830 - RNA, 19 nt, Artificial Sequence
  Description of Artificial Sequence: Synthetic oligonucleotide
  Antisense strand to SEQ ID NO: 1639829
uguagucacuacaauggac

SEQ ID NO: 1639831 - RNA, 19 nt, Artificial Sequence
  Description of Artificial Sequence: Synthetic oligonucleotide
  Sense strand starting at position 519 of SEQ ID NO: 1561005
gccagauaugcgcgacuca

SEQ ID NO: 1639832 - RNA, 19 nt, Artificial Sequence
  Description of Artificial Sequence: Synthetic oligonucleotide
  Antisense strand to SEQ ID NO: 1639831
ugagucgcgcauaucuggc

SEQ ID NO: 1639833 - RNA, 19 nt, Artificial Sequence
  Description of Artificial Sequence: Synthetic oligonucleotide
  Sense strand starting at position 772 of SEQ ID NO: 1561005
gagaaacgcuguuuccaca

SEQ ID NO: 1639834 - RNA, 19 nt, Artificial Sequence
  Description of Artificial Sequence: Synthetic oligonucleotide
  Antisense strand to SEQ ID NO: 1639833
uguggaaacagcguuucuc

SEQ ID NO: 1639835 - RNA, 19 nt, Artificial Sequence
  Description of Artificial Sequence: Synthetic oligonucleotide
  Sense strand starting at position 1068 of SEQ ID NO: 1561005
ggaugagacuccgccucaa

SEQ ID NO: 1639836 - RNA, 19 nt, Artificial Sequence
  Description of Artificial Sequence: Synthetic oligonucleotide
  Antisense strand to SEQ ID NO: 1639835
uugaggcggagucucaucc

SEQ ID NO: 1639837 - RNA, 19 nt, Artificial Sequence
  Description of Artificial Sequence: Synthetic oligonucleotide
  Sense strand starting at position 1204 of SEQ ID NO: 1561005
uucuaagucacgugggcua

SEQ ID NO: 1639838 - RNA, 19 nt, Artificial Sequence
  Description of Artificial Sequence: Synthetic oligonucleotide
  Antisense strand to SEQ ID NO: 1639837
uagcccacgugacuuagaa

SEQ ID NO: 1639839 - RNA, 19 nt, Artificial Sequence
  Description of Artificial Sequence: Synthetic oligonucleotide
  Sense strand starting at position 1275 of SEQ ID NO: 1561005
gcagguugcaaauaagcaa

SEQ ID NO: 1639840 - RNA, 19 nt, Artificial Sequence
  Description of Artificial Sequence: Synthetic oligonucleotide
  Antisense strand to SEQ ID NO: 1639839
uugcuuauuugcaaccugc

SEQ ID NO: 1639841 - RNA, 19 nt, Artificial Sequence
  Description of Artificial Sequence: Synthetic oligonucleotide
  Sense strand starting at position 2194 of SEQ ID NO: 1561005
guucgugcuccgucaucua

SEQ ID NO: 1639842 - RNA, 19 nt, Artificial Sequence
  Description of Artificial Sequence: Synthetic oligonucleotide
  Antisense strand to SEQ ID NO: 1639841
uagaugacggagcacgaac

SEQ ID NO: 1639843 - RNA, 19 nt, Artificial Sequence
  Description of Artificial Sequence: Synthetic oligonucleotide
  Sense strand starting at position 2358 of SEQ ID NO: 1561005
ccauuccggcuuuaacaga

SEQ ID NO: 1639844 - RNA, 19 nt, Artificial Sequence
  Description of Artificial Sequence: Synthetic oligonucleotide
  Antisense strand to SEQ ID NO: 1639843
ucuguuaaagccggaaugg

SEQ ID NO: 1639845 - RNA, 19 nt, Artificial Sequence
  Description of Artificial Sequence: Synthetic oligonucleotide
  Sense strand starting at position 2608 of SEQ ID NO: 1561005
uuaggaauaucacuggguu

SEQ ID NO: 1639846 - RNA, 19 nt, Artificial Sequence
  Description of Artificial Sequence: Synthetic oligonucleotide
  Antisense strand to SEQ ID NO: 1639845
aacccagugauauuccuaa

SEQ ID NO: 1639847 - RNA, 19 nt, Artificial Sequence
  Description of Artificial Sequence: Synthetic oligonucleotide
  Sense strand starting at position 2609 of SEQ ID NO: 1561005
uaggaauaucacuggguuu

SEQ ID NO: 1639848 - RNA, 19 nt, Artificial Sequence
  Description of Artificial Sequence: Synthetic oligonucleotide
  Antisense strand to SEQ ID NO: 1639847
aaacccagugauauuccua

SEQ ID NO: 1639849 - RNA, 19 nt, Artificial Sequence
  Description of Artificial Sequence: Synthetic oligonucleotide
  Sense strand starting at position 2611 of SEQ ID NO: 1561005
ggaauaucacuggguuugu

SEQ ID NO: 1639850 - RNA, 19 nt, Artificial Sequence
  Description of Artificial Sequence: Synthetic oligonucleotide
  Antisense strand to SEQ ID NO: 1639849
acaaacccagugauauucc

SEQ ID NO: 1639851 - RNA, 19 nt, Artificial Sequence
  Description of Artificial Sequence: Synthetic oligonucleotide
  Sense strand starting at position 2612 of SEQ ID NO: 1561005
gaauaucacuggguuuguu

SEQ ID NO: 1639852 - RNA, 19 nt, Artificial Sequence
  Description of Artificial Sequence: Synthetic oligonucleotide
  Antisense strand to SEQ ID NO: 1639851
aacaaacccagugauauuc

SEQ ID NO: 1639853 - RNA, 19 nt, Artificial Sequence
  Description of Artificial Sequence: Synthetic oligonucleotide
  Sense strand starting at position 2616 of SEQ ID NO: 1561005
aucacuggguuuguuaaga

SEQ ID NO: 1639854 - RNA, 19 nt, Artificial Sequence
  Description of Artificial Sequence: Synthetic oligonucleotide
  Antisense strand to SEQ ID NO: 1639853
ucuuaacaaacccagugau

SEQ ID NO: 1639855 - RNA, 19 nt, Artificial Sequence
  Description of Artificial Sequence: Synthetic oligonucleotide
  Sense strand starting at position 2621 of SEQ ID NO: 1561005
uggguuuguuaagauaugu

SEQ ID NO: 1639856 - RNA, 19 nt, Artificial Sequence
  Description of Artificial Sequence: Synthetic oligonucleotide
  Antisense strand to SEQ ID NO: 1639855
acauaucuuaacaaaccca

SEQ ID NO: 1639857 - RNA, 19 nt, Artificial Sequence
  Description of Artificial Sequence: Synthetic oligonucleotide
  Sense strand starting at position 2648 of SEQ ID NO: 1561005
ugugaauaaugauagcuca

SEQ ID NO: 1639858 - RNA, 19 nt, Artificial Sequence
  Description of Artificial Sequence: Synthetic oligonucleotide
  Antisense strand to SEQ ID NO: 1639857
ugagcuaucauuauucaca

SEQ ID NO: 1639859 - RNA, 19 nt, Artificial Sequence
  Description of Artificial Sequence: Synthetic oligonucleotide
  Sense strand starting at position 2907 of SEQ ID NO: 1561005
aggccauguuggucucgaa

SEQ ID NO: 1639860 - RNA, 19 nt, Artificial Sequence
  Description of Artificial Sequence: Synthetic oligonucleotide
  Antisense strand to SEQ ID NO: 1639859
uucgagaccaacauggccu

SEQ ID NO: 1639861 - RNA, 19 nt, Artificial Sequence
  Description of Artificial Sequence: Synthetic oligonucleotide
  Sense strand starting at position 2998 of SEQ ID NO: 1561005
uggccuaggagugauguuu

SEQ ID NO: 1639862 - RNA, 19 nt, Artificial Sequence
  Description of Artificial Sequence: Synthetic oligonucleotide
  Antisense strand to SEQ ID NO: 1639861
aaacaucacuccuaggcca

SEQ ID NO: 1639863 - RNA, 19 nt, Artificial Sequence
  Description of Artificial Sequence: Synthetic oligonucleotide
  Sense strand starting at position 3006 of SEQ ID NO: 1561005
gagugauguuucuguaucu

SEQ ID NO: 1639864 - RNA, 19 nt, Artificial Sequence
  Description of Artificial Sequence: Synthetic oligonucleotide
  Antisense strand to SEQ ID NO: 1639863
agauacagaaacaucacuc

SEQ ID NO: 1639865 - RNA, 19 nt, Artificial Sequence
  Description of Artificial Sequence: Synthetic oligonucleotide
  Sense strand starting at position 3007 of SEQ ID NO: 1561005
agugauguuucuguaucuu

SEQ ID NO: 1639866 - RNA, 19 nt, Artificial Sequence
  Description of Artificial Sequence: Synthetic oligonucleotide
  Antisense strand to SEQ ID NO: 1639865
aagauacagaaacaucacu

SEQ ID NO: 1639867 - RNA, 19 nt, Artificial Sequence
  Description of Artificial Sequence: Synthetic oligonucleotide
  Sense strand starting at position 3015 of SEQ ID NO: 1561005
uucuguaucuuacuggaau

SEQ ID NO: 1639868 - RNA, 19 nt, Artificial Sequence
  Description of Artificial Sequence: Synthetic oligonucleotide
  Antisense strand to SEQ ID NO: 1639867
auuccaguaagauacagaa

SEQ ID NO: 1639869 - RNA, 19 nt, Artificial Sequence
  Description of Artificial Sequence: Synthetic oligonucleotide
  Sense strand starting at position 3016 of SEQ ID NO: 1561005
ucuguaucuuacuggaauu

SEQ ID NO: 1639870 - RNA, 19 nt, Artificial Sequence
  Description of Artificial Sequence: Synthetic oligonucleotide
  Antisense strand to SEQ ID NO: 1639869
aauuccaguaagauacaga

SEQ ID NO: 1639871 - RNA, 19 nt, Artificial Sequence
  Description of Artificial Sequence: Synthetic oligonucleotide
  Sense strand starting at position 3043 of SEQ ID NO: 1561005
aguugaaggugacuauuaa

SEQ ID NO: 1639872 - RNA, 19 nt, Artificial Sequence
  Description of Artificial Sequence: Synthetic oligonucleotide
  Antisense strand to SEQ ID NO: 1639871
uuaauagucaccuucaacu

SEQ ID NO: 1639873 - RNA, 19 nt, Artificial Sequence
  Description of Artificial Sequence: Synthetic oligonucleotide
  Sense strand starting at position 3047 of SEQ ID NO: 1561005
gaaggugacuauuaacuau

SEQ ID NO: 1639874 - RNA, 19 nt, Artificial Sequence
  Description of Artificial Sequence: Synthetic oligonucleotide
  Antisense strand to SEQ ID NO: 1639873
auaguuaauagucaccuuc

SEQ ID NO: 1639875 - RNA, 19 nt, Artificial Sequence
  Description of Artificial Sequence: Synthetic oligonucleotide
  Sense strand starting at position 3050 of SEQ ID NO: 1561005
ggugacuauuaacuaugga

SEQ ID NO: 1639876 - RNA, 19 nt, Artificial Sequence
  Description of Artificial Sequence: Synthetic oligonucleotide
  Antisense strand to SEQ ID NO: 1639875
uccauaguuaauagucacc

SEQ ID NO: 1639877 - RNA, 19 nt, Artificial Sequence
  Description of Artificial Sequence: Synthetic oligonucleotide
  Sense strand starting at position 3053 of SEQ ID NO: 1561005
gacuauuaacuauggaugu

SEQ ID NO: 1639878 - RNA, 19 nt, Artificial Sequence
  Description of Artificial Sequence: Synthetic oligonucleotide
  Antisense strand to SEQ ID NO: 1639877
acauccauaguuaauaguc

SEQ ID NO: 1639879 - RNA, 19 nt, Artificial Sequence
  Description of Artificial Sequence: Synthetic oligonucleotide
  Sense strand starting at position 3574 of SEQ ID NO: 1561005
gaguguccuggcuggaaag

SEQ ID NO: 1639880 - RNA, 19 nt, Artificial Sequence
  Description of Artificial Sequence: Synthetic oligonucleotide
  Antisense strand to SEQ ID NO: 1639879
cuuuccagccaggacacuc

SEQ ID NO: 1639881 - RNA, 19 nt, Artificial Sequence
  Description of Artificial Sequence: Synthetic oligonucleotide
  Sense strand starting at position 3796 of SEQ ID NO: 1561005
gguacugucucagugagga

SEQ ID NO: 1639882 - RNA, 19 nt, Artificial Sequence
  Description of Artificial Sequence: Synthetic oligonucleotide
  Antisense strand to SEQ ID NO: 1639881
uccucacugagacaguacc

SEQ ID NO: 1639883 - RNA, 19 nt, Artificial Sequence
  Description of Artificial Sequence: Synthetic oligonucleotide
  Sense strand starting at position 3800 of SEQ ID NO: 1561005
cugucucagugaggaaacu

SEQ ID NO: 1639884 - RNA, 19 nt, Artificial Sequence
  Description of Artificial Sequence: Synthetic oligonucleotide
  Antisense strand to SEQ ID NO: 1639883
aguuuccucacugagacag

SEQ ID NO: 1639885 - RNA, 19 nt, Artificial Sequence
  Description of Artificial Sequence: Synthetic oligonucleotide
  Sense strand starting at position 72 of SEQ ID NO: 1561006
uaagacugguucuuagaag

SEQ ID NO: 1639886 - RNA, 19 nt, Artificial Sequence
  Description of Artificial Sequence: Synthetic oligonucleotide
  Antisense strand to SEQ ID NO: 1639885
cuucuaagaaccagucuua

SEQ ID NO: 1639887 - RNA, 19 nt, Artificial Sequence
  Description of Artificial Sequence: Synthetic oligonucleotide
  Sense strand starting at position 78 of SEQ ID NO: 1561006
ugguucuuagaaggcugaa

SEQ ID NO: 1639888 - RNA, 19 nt, Artificial Sequence
  Description of Artificial Sequence: Synthetic oligonucleotide
  Antisense strand to SEQ ID NO: 1639887
uucagccuucuaagaacca

SEQ ID NO: 1639889 - RNA, 19 nt, Artificial Sequence
  Description of Artificial Sequence: Synthetic oligonucleotide
  Sense strand starting at position 103 of SEQ ID NO: 1561006
ggagcauuccaauagcuuc

SEQ ID NO: 1639890 - RNA, 19 nt, Artificial Sequence
  Description of Artificial Sequence: Synthetic oligonucleotide
  Antisense strand to SEQ ID NO: 1639889
gaagcuauuggaaugcucc

SEQ ID NO: 1639891 - RNA, 19 nt, Artificial Sequence
  Description of Artificial Sequence: Synthetic oligonucleotide
  Sense strand starting at position 137 of SEQ ID NO: 1561006
uguuucaaguagucgaaag

SEQ ID NO: 1639892 - RNA, 19 nt, Artificial Sequence
  Description of Artificial Sequence: Synthetic oligonucleotide
  Antisense strand to SEQ ID NO: 1639891
cuuucgacuacuugaaaca

SEQ ID NO: 1639893 - RNA, 19 nt, Artificial Sequence
  Description of Artificial Sequence: Synthetic oligonucleotide
  Sense strand starting at position 220 of SEQ ID NO: 1561006
ccucacagguuuccagaau

SEQ ID NO: 1639894 - RNA, 19 nt, Artificial Sequence
  Description of Artificial Sequence: Synthetic oligonucleotide
  Antisense strand to SEQ ID NO: 1639893
auucuggaaaccugugagg

SEQ ID NO: 1639895 - RNA, 19 nt, Artificial Sequence
  Description of Artificial Sequence: Synthetic oligonucleotide
  Sense strand starting at position 293 of SEQ ID NO: 1561006
cagugccucugucuggaua

SEQ ID NO: 1639896 - RNA, 19 nt, Artificial Sequence
  Description of Artificial Sequence: Synthetic oligonucleotide
  Antisense strand to SEQ ID NO: 1639895
uauccagacagaggcacug

SEQ ID NO: 1639897 - RNA, 19 nt, Artificial Sequence
  Description of Artificial Sequence: Synthetic oligonucleotide
  Sense strand starting at position 365 of SEQ ID NO: 1561006
uggaucagcuucugguauu

SEQ ID NO: 1639898 - RNA, 19 nt, Artificial Sequence
  Description of Artificial Sequence: Synthetic oligonucleotide
  Antisense strand to SEQ ID NO: 1639897
aauaccagaagcugaucca

SEQ ID NO: 1639899 - RNA, 19 nt, Artificial Sequence
  Description of Artificial Sequence: Synthetic oligonucleotide
  Sense strand starting at position 431 of SEQ ID NO: 1561006
gaccuuaagucaucuggau

SEQ ID NO: 1639900 - RNA, 19 nt, Artificial Sequence
  Description of Artificial Sequence: Synthetic oligonucleotide
  Antisense strand to SEQ ID NO: 1639899
auccagaugacuuaagguc

SEQ ID NO: 1639901 - RNA, 19 nt, Artificial Sequence
  Description of Artificial Sequence: Synthetic oligonucleotide
  Sense strand starting at position 435 of SEQ ID NO: 1561006
uuaagucaucuggaucacu

SEQ ID NO: 1639902 - RNA, 19 nt, Artificial Sequence
  Description of Artificial Sequence: Synthetic oligonucleotide
  Antisense strand to SEQ ID NO: 1639901
agugauccagaugacuuaa

SEQ ID NO: 1639903 - RNA, 19 nt, Artificial Sequence
  Description of Artificial Sequence: Synthetic oligonucleotide
  Sense strand starting at position 712 of SEQ ID NO: 1561006
gugccuguagucuuggcaa

SEQ ID NO: 1639904 - RNA, 19 nt, Artificial Sequence
  Description of Artificial Sequence: Synthetic oligonucleotide
  Antisense strand to SEQ ID NO: 1639903
uugccaagacuacaggcac

SEQ ID NO: 1639905 - RNA, 19 nt, Artificial Sequence
  Description of Artificial Sequence: Synthetic oligonucleotide
  Sense strand starting at position 753 of SEQ ID NO: 1561006
ucuccaacucaggaguuua

SEQ ID NO: 1639906 - RNA, 19 nt, Artificial Sequence
  Description of Artificial Sequence: Synthetic oligonucleotide
  Antisense strand to SEQ ID NO: 1639905
uaaacuccugaguuggaga

SEQ ID NO: 1639907 - RNA, 19 nt, Artificial Sequence
  Description of Artificial Sequence: Synthetic oligonucleotide
  Sense strand starting at position 773 of SEQ ID NO: 1561006
ggcugcaguucauuaggau

SEQ ID NO: 1639908 - RNA, 19 nt, Artificial Sequence
  Description of Artificial Sequence: Synthetic oligonucleotide
  Antisense strand to SEQ ID NO: 1639907
auccuaaugaacugcagcc

SEQ ID NO: 1639909 - RNA, 19 nt, Artificial Sequence
  Description of Artificial Sequence: Synthetic oligonucleotide
  Sense strand starting at position 782 of SEQ ID NO: 1561006
ucauuaggauugugcuauu

SEQ ID NO: 1639910 - RNA, 19 nt, Artificial Sequence
  Description of Artificial Sequence: Synthetic oligonucleotide
  Antisense strand to SEQ ID NO: 1639909
aauagcacaauccuaauga

SEQ ID NO: 1639911 - RNA, 19 nt, Artificial Sequence
  Description of Artificial Sequence: Synthetic oligonucleotide
  Sense strand starting at position 934 of SEQ ID NO: 1561006
aucagacucugguuucuuu

SEQ ID NO: 1639912 - RNA, 19 nt, Artificial Sequence
  Description of Artificial Sequence: Synthetic oligonucleotide
  Antisense strand to SEQ ID NO: 1639911
aaagaaaccagagucugau

SEQ ID NO: 1639913 - RNA, 19 nt, Artificial Sequence
  Description of Artificial Sequence: Synthetic oligonucleotide
  Sense strand starting at position 961 of SEQ ID NO: 1561006
agccaaagaaauugagagu

SEQ ID NO: 1639914 - RNA, 19 nt, Artificial Sequence
  Description of Artificial Sequence: Synthetic oligonucleotide
  Antisense strand to SEQ ID NO: 1639913
acucucaauuucuuuggcu

SEQ ID NO: 1639915 - RNA, 19 nt, Artificial Sequence
  Description of Artificial Sequence: Synthetic oligonucleotide
  Sense strand starting at position 1109 of SEQ ID NO: 1561006
uaaugaguucgagaccacu

SEQ ID NO: 1639916 - RNA, 19 nt, Artificial Sequence
  Description of Artificial Sequence: Synthetic oligonucleotide
  Antisense strand to SEQ ID NO: 1639915
aguggucucgaacucauua

SEQ ID NO: 1639917 - RNA, 19 nt, Artificial Sequence
  Description of Artificial Sequence: Synthetic oligonucleotide
  Sense strand starting at position 1387 of SEQ ID NO: 1561006
aggugagcuuccuaacauc

SEQ ID NO: 1639918 - RNA, 19 nt, Artificial Sequence
  Description of Artificial Sequence: Synthetic oligonucleotide
  Antisense strand to SEQ ID NO: 1639917
gauguuaggaagcucaccu

SEQ ID NO: 1639919 - RNA, 19 nt, Artificial Sequence
  Description of Artificial Sequence: Synthetic oligonucleotide
  Sense strand starting at position 1524 of SEQ ID NO: 1561006
uaaacaucccguugcugau

SEQ ID NO: 1639920 - RNA, 19 nt, Artificial Sequence
  Description of Artificial Sequence: Synthetic oligonucleotide
  Antisense strand to SEQ ID NO: 1639919
aucagcaacgggauguuua

SEQ ID NO: 1639921 - RNA, 19 nt, Artificial Sequence
  Description of Artificial Sequence: Synthetic oligonucleotide
  Sense strand starting at position 1722 of SEQ ID NO: 1561006
cgcugucuucuguaagaua

SEQ ID NO: 1639922 - RNA, 19 nt, Artificial Sequence
  Description of Artificial Sequence: Synthetic oligonucleotide
  Antisense strand to SEQ ID NO: 1639921
uaucuuacagaagacagcg

SEQ ID NO: 1639923 - RNA, 19 nt, Artificial Sequence
  Description of Artificial Sequence: Synthetic oligonucleotide
  Sense strand starting at position 1725 of SEQ ID NO: 1561006
ugucuucuguaagauacaa

SEQ ID NO: 1639924 - RNA, 19 nt, Artificial Sequence
  Description of Artificial Sequence: Synthetic oligonucleotide
  Antisense strand to SEQ ID NO: 1639923
uuguaucuuacagaagaca

SEQ ID NO: 1639925 - RNA, 19 nt, Artificial Sequence
  Description of Artificial Sequence: Synthetic oligonucleotide
  Sense strand starting at position 2255 of SEQ ID NO: 1561006
uuugcauucuggcucuuua

SEQ ID NO: 1639926 - RNA, 19 nt, Artificial Sequence
  Description of Artificial Sequence: Synthetic oligonucleotide
  Antisense strand to SEQ ID NO: 1639925
uaaagagccagaaugcaaa

SEQ ID NO: 1639927 - RNA, 19 nt, Artificial Sequence
  Description of Artificial Sequence: Synthetic oligonucleotide
  Sense strand starting at position 2373 of SEQ ID NO: 1561006
agaaucuuccuuuggaauc

SEQ ID NO: 1639928 - RNA, 19 nt, Artificial Sequence
  Description of Artificial Sequence: Synthetic oligonucleotide
  Antisense strand to SEQ ID NO: 1639927
gauuccaaaggaagauucu

SEQ ID NO: 1639929 - RNA, 19 nt, Artificial Sequence
  Description of Artificial Sequence: Synthetic oligonucleotide
  Sense strand starting at position 2383 of SEQ ID NO: 1561006
uuuggaaucuacugcaaga

SEQ ID NO: 1639930 - RNA, 19 nt, Artificial Sequence
  Description of Artificial Sequence: Synthetic oligonucleotide
  Antisense strand to SEQ ID NO: 1639929
ucuugcaguagauuccaaa

SEQ ID NO: 1639931 - RNA, 19 nt, Artificial Sequence
  Description of Artificial Sequence: Synthetic oligonucleotide
  Sense strand starting at position 2397 of SEQ ID NO: 1561006
caagaaaucuggcuggauu

SEQ ID NO: 1639932 - RNA, 19 nt, Artificial Sequence
  Description of Artificial Sequence: Synthetic oligonucleotide
  Antisense strand to SEQ ID NO: 1639931
aauccagccagauuucuug

SEQ ID NO: 1639933 - RNA, 19 nt, Artificial Sequence
  Description of Artificial Sequence: Synthetic oligonucleotide
  Sense strand starting at position 2398 of SEQ ID NO: 1561006
aagaaaucuggcuggauuc

SEQ ID NO: 1639934 - RNA, 19 nt, Artificial Sequence
  Description of Artificial Sequence: Synthetic oligonucleotide
  Antisense strand to SEQ ID NO: 1639933
gaauccagccagauuucuu

SEQ ID NO: 1639935 - RNA, 19 nt, Artificial Sequence
  Description of Artificial Sequence: Synthetic oligonucleotide
  Sense strand starting at position 2399 of SEQ ID NO: 1561006
agaaaucuggcuggauucu

SEQ ID NO: 1639936 - RNA, 19 nt, Artificial Sequence
  Description of Artificial Sequence: Synthetic oligonucleotide
  Antisense strand to SEQ ID NO: 1639935
agaauccagccagauuucu

SEQ ID NO: 1639937 - RNA, 19 nt, Artificial Sequence
  Description of Artificial Sequence: Synthetic oligonucleotide
  Sense strand starting at position 2405 of SEQ ID NO: 1561006
cuggcuggauucucagauu

SEQ ID NO: 1639938 - RNA, 19 nt, Artificial Sequence
  Description of Artificial Sequence: Synthetic oligonucleotide
  Antisense strand to SEQ ID NO: 1639937
aaucugagaauccagccag

SEQ ID NO: 1639939 - RNA, 19 nt, Artificial Sequence
  Description of Artificial Sequence: Synthetic oligonucleotide
  Sense strand starting at position 2408 of SEQ ID NO: 1561006
gcuggauucucagauuaag

SEQ ID NO: 1639940 - RNA, 19 nt, Artificial Sequence
  Description of Artificial Sequence: Synthetic oligonucleotide
  Antisense strand to SEQ ID NO: 1639939
cuuaaucugagaauccagc

SEQ ID NO: 1639941 - RNA, 19 nt, Artificial Sequence
  Description of Artificial Sequence: Synthetic oligonucleotide
  Sense strand starting at position 2545 of SEQ ID NO: 1561006
ucaguuuccucuucccaga

SEQ ID NO: 1639942 - RNA, 19 nt, Artificial Sequence
  Description of Artificial Sequence: Synthetic oligonucleotide
  Antisense strand to SEQ ID NO: 1639941
ucugggaagaggaaacuga

SEQ ID NO: 1639943 - RNA, 19 nt, Artificial Sequence
  Description of Artificial Sequence: Synthetic oligonucleotide
  Sense strand starting at position 2604 of SEQ ID NO: 1561006
cccucuuaagagugcucaa

SEQ ID NO: 1639944 - RNA, 19 nt, Artificial Sequence
  Description of Artificial Sequence: Synthetic oligonucleotide
  Antisense strand to SEQ ID NO: 1639943
uugagcacucuuaagaggg

SEQ ID NO: 1639945 - RNA, 19 nt, Artificial Sequence
  Description of Artificial Sequence: Synthetic oligonucleotide
  Sense strand starting at position 2607 of SEQ ID NO: 1561006
ucuuaagagugcucaacuu

SEQ ID NO: 1639946 - RNA, 19 nt, Artificial Sequence
  Description of Artificial Sequence: Synthetic oligonucleotide
  Antisense strand to SEQ ID NO: 1639945
aaguugagcacucuuaaga

SEQ ID NO: 1639947 - RNA, 19 nt, Artificial Sequence
  Description of Artificial Sequence: Synthetic oligonucleotide
  Sense strand starting at position 2688 of SEQ ID NO: 1561006
gaaucuuucucuugucagg

SEQ ID NO: 1639948 - RNA, 19 nt, Artificial Sequence
  Description of Artificial Sequence: Synthetic oligonucleotide
  Antisense strand to SEQ ID NO: 1639947
ccugacaagagaaagauuc

SEQ ID NO: 1639949 - RNA, 19 nt, Artificial Sequence
  Description of Artificial Sequence: Synthetic oligonucleotide
  Sense strand starting at position 2848 of SEQ ID NO: 1561006
cuaccuuucuccugaguuu

SEQ ID NO: 1639950 - RNA, 19 nt, Artificial Sequence
  Description of Artificial Sequence: Synthetic oligonucleotide
  Antisense strand to SEQ ID NO: 1639949
aaacucaggagaaagguag

SEQ ID NO: 1639951 - RNA, 19 nt, Artificial Sequence
  Description of Artificial Sequence: Synthetic oligonucleotide
  Sense strand starting at position 2851 of SEQ ID NO: 1561006
ccuuucuccugaguuuauu

SEQ ID NO: 1639952 - RNA, 19 nt, Artificial Sequence
  Description of Artificial Sequence: Synthetic oligonucleotide
  Antisense strand to SEQ ID NO: 1639951
aauaaacucaggagaaagg

SEQ ID NO: 1639953 - RNA, 19 nt, Artificial Sequence
  Description of Artificial Sequence: Synthetic oligonucleotide
  Sense strand starting at position 2861 of SEQ ID NO: 1561006
gaguuuauuucccuuccga

SEQ ID NO: 1639954 - RNA, 19 nt, Artificial Sequence
  Description of Artificial Sequence: Synthetic oligonucleotide
  Antisense strand to SEQ ID NO: 1639953
ucggaagggaaauaaacuc

SEQ ID NO: 1639955 - RNA, 19 nt, Artificial Sequence
  Description of Artificial Sequence: Synthetic oligonucleotide
  Sense strand starting at position 2865 of SEQ ID NO: 1561006
uuauuucccuuccgagacu

SEQ ID NO: 1639956 - RNA, 19 nt, Artificial Sequence
  Description of Artificial Sequence: Synthetic oligonucleotide
  Antisense strand to SEQ ID NO: 1639955
agucucggaagggaaauaa

SEQ ID NO: 1639957 - RNA, 19 nt, Artificial Sequence
  Description of Artificial Sequence: Synthetic oligonucleotide
  Sense strand starting at position 3762 of SEQ ID NO: 1561006
ggcagaugucccugcgucu

SEQ ID NO: 1639958 - RNA, 19 nt, Artificial Sequence
  Description of Artificial Sequence: Synthetic oligonucleotide
  Antisense strand to SEQ ID NO: 1639957
agacgcagggacaucugcc

SEQ ID NO: 1639959 - RNA, 19 nt, Artificial Sequence
  Description of Artificial Sequence: Synthetic oligonucleotide
  Sense strand starting at position 3804 of SEQ ID NO: 1561006
cgaagagguuccucucuca

SEQ ID NO: 1639960 - RNA, 19 nt, Artificial Sequence
  Description of Artificial Sequence: Synthetic oligonucleotide
  Antisense strand to SEQ ID NO: 1639959
ugagagaggaaccucuucg

SEQ ID NO: 1639961 - RNA, 19 nt, Artificial Sequence
  Description of Artificial Sequence: Synthetic oligonucleotide
  Sense strand starting at position 3847 of SEQ ID NO: 1561006
cucaguuucucuggcagua

SEQ ID NO: 1639962 - RNA, 19 nt, Artificial Sequence
  Description of Artificial Sequence: Synthetic oligonucleotide
  Antisense strand to SEQ ID NO: 1639961
uacugccagagaaacugag

SEQ ID NO: 1639963 - RNA, 19 nt, Artificial Sequence
  Description of Artificial Sequence: Synthetic oligonucleotide
  Sense strand starting at position 3849 of SEQ ID NO: 1561006
caguuucucuggcaguaca

SEQ ID NO: 1639964 - RNA, 19 nt, Artificial Sequence
  Description of Artificial Sequence: Synthetic oligonucleotide
  Antisense strand to SEQ ID NO: 1639963
uguacugccagagaaacug

SEQ ID NO: 1639965 - RNA, 19 nt, Artificial Sequence
  Description of Artificial Sequence: Synthetic oligonucleotide
  Sense strand starting at position 121 of SEQ ID NO: 1561007
uggccagaucuccaaccau

SEQ ID NO: 1639966 - RNA, 19 nt, Artificial Sequence
  Description of Artificial Sequence: Synthetic oligonucleotide
  Antisense strand to SEQ ID NO: 1639965
augguuggagaucuggcca

SEQ ID NO: 1639967 - RNA, 19 nt, Artificial Sequence
  Description of Artificial Sequence: Synthetic oligonucleotide
  Sense strand starting at position 144 of SEQ ID NO: 1561007
uuagaaacagccuguuaga

SEQ ID NO: 1639968 - RNA, 19 nt, Artificial Sequence
  Description of Artificial Sequence: Synthetic oligonucleotide
  Antisense strand to SEQ ID NO: 1639967
ucuaacaggcuguuucuaa

SEQ ID NO: 1639969 - RNA, 19 nt, Artificial Sequence
  Description of Artificial Sequence: Synthetic oligonucleotide
  Sense strand starting at position 153 of SEQ ID NO: 1561007
gccuguuagagauauggag

SEQ ID NO: 1639970 - RNA, 19 nt, Artificial Sequence
  Description of Artificial Sequence: Synthetic oligonucleotide
  Antisense strand to SEQ ID NO: 1639969
cuccauaucucuaacaggc

SEQ ID NO: 1639971 - RNA, 19 nt, Artificial Sequence
  Description of Artificial Sequence: Synthetic oligonucleotide
  Sense strand starting at position 182 of SEQ ID NO: 1561007
ugaugaucugagcaauagu

SEQ ID NO: 1639972 - RNA, 19 nt, Artificial Sequence
  Description of Artificial Sequence: Synthetic oligonucleotide
  Antisense strand to SEQ ID NO: 1639971
acuauugcucagaucauca

SEQ ID NO: 1639973 - RNA, 19 nt, Artificial Sequence
  Description of Artificial Sequence: Synthetic oligonucleotide
  Sense strand starting at position 290 of SEQ ID NO: 1561007
cuaguacugguacaauaau

SEQ ID NO: 1639974 - RNA, 19 nt, Artificial Sequence
  Description of Artificial Sequence: Synthetic oligonucleotide
  Antisense strand to SEQ ID NO: 1639973
auuauuguaccaguacuag

SEQ ID NO: 1639975 - RNA, 19 nt, Artificial Sequence
  Description of Artificial Sequence: Synthetic oligonucleotide
  Sense strand starting at position 401 of SEQ ID NO: 1561007
gggagucugccuccgugua

SEQ ID NO: 1639976 - RNA, 19 nt, Artificial Sequence
  Description of Artificial Sequence: Synthetic oligonucleotide
  Antisense strand to SEQ ID NO: 1639975
uacacggaggcagacuccc

SEQ ID NO: 1639977 - RNA, 19 nt, Artificial Sequence
  Description of Artificial Sequence: Synthetic oligonucleotide
  Sense strand starting at position 405 of SEQ ID NO: 1561007
gucugccuccguguauaua

SEQ ID NO: 1639978 - RNA, 19 nt, Artificial Sequence
  Description of Artificial Sequence: Synthetic oligonucleotide
  Antisense strand to SEQ ID NO: 1639977
uauauacacggaggcagac

SEQ ID NO: 1639979 - RNA, 19 nt, Artificial Sequence
  Description of Artificial Sequence: Synthetic oligonucleotide
  Sense strand starting at position 540 of SEQ ID NO: 1561007
ggaguaccaaguuaucgaa

SEQ ID NO: 1639980 - RNA, 19 nt, Artificial Sequence
  Description of Artificial Sequence: Synthetic oligonucleotide
  Antisense strand to SEQ ID NO: 1639979
uucgauaacuugguacucc

SEQ ID NO: 1639981 - RNA, 19 nt, Artificial Sequence
  Description of Artificial Sequence: Synthetic oligonucleotide
  Sense strand starting at position 547 of SEQ ID NO: 1561007
caaguuaucgaaugucaca

SEQ ID NO: 1639982 - RNA, 19 nt, Artificial Sequence
  Description of Artificial Sequence: Synthetic oligonucleotide
  Antisense strand to SEQ ID NO: 1639981
ugugacauucgauaacuug

SEQ ID NO: 1639983 - RNA, 19 nt, Artificial Sequence
  Description of Artificial Sequence: Synthetic oligonucleotide
  Sense strand starting at position 891 of SEQ ID NO: 1561007
cuaugcugugcccagagua

SEQ ID NO: 1639984 - RNA, 19 nt, Artificial Sequence
  Description of Artificial Sequence: Synthetic oligonucleotide
  Antisense strand to SEQ ID NO: 1639983
uacucugggcacagcauag

SEQ ID NO: 1639985 - RNA, 19 nt, Artificial Sequence
  Description of Artificial Sequence: Synthetic oligonucleotide
  Sense strand starting at position 1334 of SEQ ID NO: 1561007
ucuggaucgcacuaacaga

SEQ ID NO: 1639986 - RNA, 19 nt, Artificial Sequence
  Description of Artificial Sequence: Synthetic oligonucleotide
  Antisense strand to SEQ ID NO: 1639985
ucuguuagugcgauccaga

SEQ ID NO: 1639987 - RNA, 19 nt, Artificial Sequence
  Description of Artificial Sequence: Synthetic oligonucleotide
  Sense strand starting at position 2134 of SEQ ID NO: 1561007
gaggaagaaauguggcuau

SEQ ID NO: 1639988 - RNA, 19 nt, Artificial Sequence
  Description of Artificial Sequence: Synthetic oligonucleotide
  Antisense strand to SEQ ID NO: 1639987
auagccacauuucuuccuc

SEQ ID NO: 1639989 - RNA, 19 nt, Artificial Sequence
  Description of Artificial Sequence: Synthetic oligonucleotide
  Sense strand starting at position 2137 of SEQ ID NO: 1561007
gaagaaauguggcuaucau

SEQ ID NO: 1639990 - RNA, 19 nt, Artificial Sequence
  Description of Artificial Sequence: Synthetic oligonucleotide
  Antisense strand to SEQ ID NO: 1639989
augauagccacauuucuuc

SEQ ID NO: 1639991 - RNA, 19 nt, Artificial Sequence
  Description of Artificial Sequence: Synthetic oligonucleotide
  Sense strand starting at position 2138 of SEQ ID NO: 1561007
aagaaauguggcuaucauc

SEQ ID NO: 1639992 - RNA, 19 nt, Artificial Sequence
  Description of Artificial Sequence: Synthetic oligonucleotide
  Antisense strand to SEQ ID NO: 1639991
gaugauagccacauuucuu

SEQ ID NO: 1639993 - RNA, 19 nt, Artificial Sequence
  Description of Artificial Sequence: Synthetic oligonucleotide
  Sense strand starting at position 2442 of SEQ ID NO: 1561007
gggcuugucucaccauuaa

SEQ ID NO: 1639994 - RNA, 19 nt, Artificial Sequence
  Description of Artificial Sequence: Synthetic oligonucleotide
  Antisense strand to SEQ ID NO: 1639993
uuaauggugagacaagccc

SEQ ID NO: 1639995 - RNA, 19 nt, Artificial Sequence
  Description of Artificial Sequence: Synthetic oligonucleotide
  Sense strand starting at position 2513 of SEQ ID NO: 1561007
gguucauggcgcgucacau

SEQ ID NO: 1639996 - RNA, 19 nt, Artificial Sequence
  Description of Artificial Sequence: Synthetic oligonucleotide
  Antisense strand to SEQ ID NO: 1639995
augugacgcgccaugaacc

SEQ ID NO: 1639997 - RNA, 19 nt, Artificial Sequence
  Description of Artificial Sequence: Synthetic oligonucleotide
  Sense strand starting at position 2521 of SEQ ID NO: 1561007
gcgcgucacaugcucuaaa

SEQ ID NO: 1639998 - RNA, 19 nt, Artificial Sequence
  Description of Artificial Sequence: Synthetic oligonucleotide
  Antisense strand to SEQ ID NO: 1639997
uuuagagcaugugacgcgc

SEQ ID NO: 1639999 - RNA, 19 nt, Artificial Sequence
  Description of Artificial Sequence: Synthetic oligonucleotide
  Sense strand starting at position 2661 of SEQ ID NO: 1561007
acuaaauaacgugguccaa

SEQ ID NO: 1640000 - RNA, 19 nt, Artificial Sequence
  Description of Artificial Sequence: Synthetic oligonucleotide
  Antisense strand to SEQ ID NO: 1639999
uuggaccacguuauuuagu

SEQ ID NO: 1640001 - RNA, 19 nt, Artificial Sequence
  Description of Artificial Sequence: Synthetic oligonucleotide
  Sense strand starting at position 2663 of SEQ ID NO: 1561007
uaaauaacgugguccaaua

SEQ ID NO: 1640002 - RNA, 19 nt, Artificial Sequence
  Description of Artificial Sequence: Synthetic oligonucleotide
  Antisense strand to SEQ ID NO: 1640001
uauuggaccacguuauuua

SEQ ID NO: 1640003 - RNA, 19 nt, Artificial Sequence
  Description of Artificial Sequence: Synthetic oligonucleotide
  Sense strand starting at position 2665 of SEQ ID NO: 1561007
aauaacgugguccaauaaa

SEQ ID NO: 1640004 - RNA, 19 nt, Artificial Sequence
  Description of Artificial Sequence: Synthetic oligonucleotide
  Antisense strand to SEQ ID NO: 1640003
uuuauuggaccacguuauu

SEQ ID NO: 1640005 - RNA, 19 nt, Artificial Sequence
  Description of Artificial Sequence: Synthetic oligonucleotide
  Sense strand starting at position 2713 of SEQ ID NO: 1561007
acugaaauguguguagcua

SEQ ID NO: 1640006 - RNA, 19 nt, Artificial Sequence
  Description of Artificial Sequence: Synthetic oligonucleotide
  Antisense strand to SEQ ID NO: 1640005
uagcuacacacauuucagu

SEQ ID NO: 1640007 - RNA, 19 nt, Artificial Sequence
  Description of Artificial Sequence: Synthetic oligonucleotide
  Sense strand starting at position 2714 of SEQ ID NO: 1561007
cugaaauguguguagcuau

SEQ ID NO: 1640008 - RNA, 19 nt, Artificial Sequence
  Description of Artificial Sequence: Synthetic oligonucleotide
  Antisense strand to SEQ ID NO: 1640007
auagcuacacacauuucag

SEQ ID NO: 1640009 - RNA, 19 nt, Artificial Sequence
  Description of Artificial Sequence: Synthetic oligonucleotide
  Sense strand starting at position 2839 of SEQ ID NO: 1561007
agacucguaucuguuagaa

SEQ ID NO: 1640010 - RNA, 19 nt, Artificial Sequence
  Description of Artificial Sequence: Synthetic oligonucleotide
  Antisense strand to SEQ ID NO: 1640009
uucuaacagauacgagucu

SEQ ID NO: 1640011 - RNA, 19 nt, Artificial Sequence
  Description of Artificial Sequence: Synthetic oligonucleotide
  Sense strand starting at position 2873 of SEQ ID NO: 1561007
augcuucuagcauaagauc

SEQ ID NO: 1640012 - RNA, 19 nt, Artificial Sequence
  Description of Artificial Sequence: Synthetic oligonucleotide
  Antisense strand to SEQ ID NO: 1640011
gaucuuaugcuagaagcau

SEQ ID NO: 1640013 - RNA, 19 nt, Artificial Sequence
  Description of Artificial Sequence: Synthetic oligonucleotide
  Sense strand starting at position 2920 of SEQ ID NO: 1561007
uguagaauguuguugaaac

SEQ ID NO: 1640014 - RNA, 19 nt, Artificial Sequence
  Description of Artificial Sequence: Synthetic oligonucleotide
  Antisense strand to SEQ ID NO: 1640013
guuucaacaacauucuaca

SEQ ID NO: 1640015 - RNA, 19 nt, Artificial Sequence
  Description of Artificial Sequence: Synthetic oligonucleotide
  Sense strand starting at position 3036 of SEQ ID NO: 1561007
ggguaauauaugcaugucu

SEQ ID NO: 1640016 - RNA, 19 nt, Artificial Sequence
  Description of Artificial Sequence: Synthetic oligonucleotide
  Antisense strand to SEQ ID NO: 1640015
agacaugcauauauuaccc

SEQ ID NO: 1640017 - RNA, 19 nt, Artificial Sequence
  Description of Artificial Sequence: Synthetic oligonucleotide
  Sense strand starting at position 3038 of SEQ ID NO: 1561007
guaauauaugcaugucuaa

SEQ ID NO: 1640018 - RNA, 19 nt, Artificial Sequence
  Description of Artificial Sequence: Synthetic oligonucleotide
  Antisense strand to SEQ ID NO: 1640017
uuagacaugcauauauuac

SEQ ID NO: 1640019 - RNA, 19 nt, Artificial Sequence
  Description of Artificial Sequence: Synthetic oligonucleotide
  Sense strand starting at position 3045 of SEQ ID NO: 1561007
augcaugucuaacuggaaa

SEQ ID NO: 1640020 - RNA, 19 nt, Artificial Sequence
  Description of Artificial Sequence: Synthetic oligonucleotide
  Antisense strand to SEQ ID NO: 1640019
uuuccaguuagacaugcau

SEQ ID NO: 1640021 - RNA, 19 nt, Artificial Sequence
  Description of Artificial Sequence: Synthetic oligonucleotide
  Sense strand starting at position 3058 of SEQ ID NO: 1561007
uggaaaucuccagguacuu

SEQ ID NO: 1640022 - RNA, 19 nt, Artificial Sequence
  Description of Artificial Sequence: Synthetic oligonucleotide
  Antisense strand to SEQ ID NO: 1640021
aaguaccuggagauuucca

SEQ ID NO: 1640023 - RNA, 19 nt, Artificial Sequence
  Description of Artificial Sequence: Synthetic oligonucleotide
  Sense strand starting at position 3517 of SEQ ID NO: 1561007
ucuggagugccugaccaaa

SEQ ID NO: 1640024 - RNA, 19 nt, Artificial Sequence
  Description of Artificial Sequence: Synthetic oligonucleotide
  Antisense strand to SEQ ID NO: 1640023
uuuggucaggcacuccaga

SEQ ID NO: 1640025 - RNA, 19 nt, Artificial Sequence
  Description of Artificial Sequence: Synthetic oligonucleotide
  Sense strand starting at position 3625 of SEQ ID NO: 1561007
gcaggcauguauuuaugca

SEQ ID NO: 1640026 - RNA, 19 nt, Artificial Sequence
  Description of Artificial Sequence: Synthetic oligonucleotide
  Antisense strand to SEQ ID NO: 1640025
ugcauaaauacaugccugc

SEQ ID NO: 1640027 - RNA, 19 nt, Artificial Sequence
  Description of Artificial Sequence: Synthetic oligonucleotide
  Sense strand starting at position 3633 of SEQ ID NO: 1561007
guauuuaugcaacggagcu

SEQ ID NO: 1640028 - RNA, 19 nt, Artificial Sequence
  Description of Artificial Sequence: Synthetic oligonucleotide
  Antisense strand to SEQ ID NO: 1640027
agcuccguugcauaaauac

SEQ ID NO: 1640029 - RNA, 19 nt, Artificial Sequence
  Description of Artificial Sequence: Synthetic oligonucleotide
  Sense strand starting at position 3683 of SEQ ID NO: 1561007
gauucugcuuccuuggaca

SEQ ID NO: 1640030 - RNA, 19 nt, Artificial Sequence
  Description of Artificial Sequence: Synthetic oligonucleotide
  Antisense strand to SEQ ID NO: 1640029
uguccaaggaagcagaauc

SEQ ID NO: 1640031 - RNA, 19 nt, Artificial Sequence
  Description of Artificial Sequence: Synthetic oligonucleotide
  Sense strand starting at position 3685 of SEQ ID NO: 1561007
uucugcuuccuuggacauu

SEQ ID NO: 1640032 - RNA, 19 nt, Artificial Sequence
  Description of Artificial Sequence: Synthetic oligonucleotide
  Antisense strand to SEQ ID NO: 1640031
aauguccaaggaagcagaa

SEQ ID NO: 1640033 - RNA, 19 nt, Artificial Sequence
  Description of Artificial Sequence: Synthetic oligonucleotide
  Sense strand starting at position 3720 of SEQ ID NO: 1561007
uguacaauguugucucuaa

SEQ ID NO: 1640034 - RNA, 19 nt, Artificial Sequence
  Description of Artificial Sequence: Synthetic oligonucleotide
  Antisense strand to SEQ ID NO: 1640033
uuagagacaacauuguaca

SEQ ID NO: 1640035 - RNA, 19 nt, Artificial Sequence
  Description of Artificial Sequence: Synthetic oligonucleotide
  Sense strand starting at position 3721 of SEQ ID NO: 1561007
guacaauguugucucuaaa

SEQ ID NO: 1640036 - RNA, 19 nt, Artificial Sequence
  Description of Artificial Sequence: Synthetic oligonucleotide
  Antisense strand to SEQ ID NO: 1640035
uuuagagacaacauuguac

SEQ ID NO: 1640037 - RNA, 19 nt, Artificial Sequence
  Description of Artificial Sequence: Synthetic oligonucleotide
  Sense strand starting at position 3782 of SEQ ID NO: 1561007
gacuuagacuuuccaggua

SEQ ID NO: 1640038 - RNA, 19 nt, Artificial Sequence
  Description of Artificial Sequence: Synthetic oligonucleotide
  Antisense strand to SEQ ID NO: 1640037
uaccuggaaagucuaaguc

SEQ ID NO: 1640039 - RNA, 19 nt, Artificial Sequence
  Description of Artificial Sequence: Synthetic oligonucleotide
  Sense strand starting at position 3798 of SEQ ID NO: 1561007
guaagaaugagauguccca

SEQ ID NO: 1640040 - RNA, 19 nt, Artificial Sequence
  Description of Artificial Sequence: Synthetic oligonucleotide
  Antisense strand to SEQ ID NO: 1640039
ugggacaucucauucuuac

SEQ ID NO: 1640041 - RNA, 19 nt, Artificial Sequence
  Description of Artificial Sequence: Synthetic oligonucleotide
  Sense strand starting at position 3951 of SEQ ID NO: 1561007
aacucugugaggugguuau

SEQ ID NO: 1640042 - RNA, 19 nt, Artificial Sequence
  Description of Artificial Sequence: Synthetic oligonucleotide
  Antisense strand to SEQ ID NO: 1640041
auaaccaccucacagaguu

SEQ ID NO: 1640043 - RNA, 19 nt, Artificial Sequence
  Description of Artificial Sequence: Synthetic oligonucleotide
  Sense strand starting at position 3962 of SEQ ID NO: 1561007
gugguuauagaccagucaa

SEQ ID NO: 1640044 - RNA, 19 nt, Artificial Sequence
  Description of Artificial Sequence: Synthetic oligonucleotide
  Antisense strand to SEQ ID NO: 1640043
uugacuggucuauaaccac

SEQ ID NO: 1640045 - RNA, 19 nt, Artificial Sequence
  Description of Artificial Sequence: Synthetic oligonucleotide
  Sense strand starting at position 239 of SEQ ID NO: 1561008
aggcguucugaacaagcuu

SEQ ID NO: 1640046 - RNA, 19 nt, Artificial Sequence
  Description of Artificial Sequence: Synthetic oligonucleotide
  Antisense strand to SEQ ID NO: 1640045
aagcuuguucagaacgccu

SEQ ID NO: 1640047 - RNA, 19 nt, Artificial Sequence
  Description of Artificial Sequence: Synthetic oligonucleotide
  Sense strand starting at position 274 of SEQ ID NO: 1561008
agcugugauguuugggaga

SEQ ID NO: 1640048 - RNA, 19 nt, Artificial Sequence
  Description of Artificial Sequence: Synthetic oligonucleotide
  Antisense strand to SEQ ID NO: 1640047
ucucccaaacaucacagcu

SEQ ID NO: 1640049 - RNA, 19 nt, Artificial Sequence
  Description of Artificial Sequence: Synthetic oligonucleotide
  Sense strand starting at position 285 of SEQ ID NO: 1561008
uugggagauuagguguauu

SEQ ID NO: 1640050 - RNA, 19 nt, Artificial Sequence
  Description of Artificial Sequence: Synthetic oligonucleotide
  Antisense strand to SEQ ID NO: 1640049
aauacaccuaaucucccaa

SEQ ID NO: 1640051 - RNA, 19 nt, Artificial Sequence
  Description of Artificial Sequence: Synthetic oligonucleotide
  Sense strand starting at position 334 of SEQ ID NO: 1561008
cuaugauguacucaccgga

SEQ ID NO: 1640052 - RNA, 19 nt, Artificial Sequence
  Description of Artificial Sequence: Synthetic oligonucleotide
  Antisense strand to SEQ ID NO: 1640051
uccggugaguacaucauag

SEQ ID NO: 1640053 - RNA, 19 nt, Artificial Sequence
  Description of Artificial Sequence: Synthetic oligonucleotide
  Sense strand starting at position 337 of SEQ ID NO: 1561008
ugauguacucaccggaaug

SEQ ID NO: 1640054 - RNA, 19 nt, Artificial Sequence
  Description of Artificial Sequence: Synthetic oligonucleotide
  Antisense strand to SEQ ID NO: 1640053
cauuccggugaguacauca

SEQ ID NO: 1640055 - RNA, 19 nt, Artificial Sequence
  Description of Artificial Sequence: Synthetic oligonucleotide
  Sense strand starting at position 338 of SEQ ID NO: 1561008
gauguacucaccggaaugu

SEQ ID NO: 1640056 - RNA, 19 nt, Artificial Sequence
  Description of Artificial Sequence: Synthetic oligonucleotide
  Antisense strand to SEQ ID NO: 1640055
acauuccggugaguacauc

SEQ ID NO: 1640057 - RNA, 19 nt, Artificial Sequence
  Description of Artificial Sequence: Synthetic oligonucleotide
  Sense strand starting at position 339 of SEQ ID NO: 1561008
auguacucaccggaaugua

SEQ ID NO: 1640058 - RNA, 19 nt, Artificial Sequence
  Description of Artificial Sequence: Synthetic oligonucleotide
  Antisense strand to SEQ ID NO: 1640057
uacauuccggugaguacau

SEQ ID NO: 1640059 - RNA, 19 nt, Artificial Sequence
  Description of Artificial Sequence: Synthetic oligonucleotide
  Sense strand starting at position 349 of SEQ ID NO: 1561008
cggaauguaacccauugua

SEQ ID NO: 1640060 - RNA, 19 nt, Artificial Sequence
  Description of Artificial Sequence: Synthetic oligonucleotide
  Antisense strand to SEQ ID NO: 1640059
uacaauggguuacauuccg

SEQ ID NO: 1640061 - RNA, 19 nt, Artificial Sequence
  Description of Artificial Sequence: Synthetic oligonucleotide
  Sense strand starting at position 620 of SEQ ID NO: 1561008
aggagaaugcggugacaau

SEQ ID NO: 1640062 - RNA, 19 nt, Artificial Sequence
  Description of Artificial Sequence: Synthetic oligonucleotide
  Antisense strand to SEQ ID NO: 1640061
auugucaccgcauucuccu

SEQ ID NO: 1640063 - RNA, 19 nt, Artificial Sequence
  Description of Artificial Sequence: Synthetic oligonucleotide
  Sense strand starting at position 621 of SEQ ID NO: 1561008
ggagaaugcggugacaaug

SEQ ID NO: 1640064 - RNA, 19 nt, Artificial Sequence
  Description of Artificial Sequence: Synthetic oligonucleotide
  Antisense strand to SEQ ID NO: 1640063
cauugucaccgcauucucc

SEQ ID NO: 1640065 - RNA, 19 nt, Artificial Sequence
  Description of Artificial Sequence: Synthetic oligonucleotide
  Sense strand starting at position 696 of SEQ ID NO: 1561008
gggagaucuccucgucagu

SEQ ID NO: 1640066 - RNA, 19 nt, Artificial Sequence
  Description of Artificial Sequence: Synthetic oligonucleotide
  Antisense strand to SEQ ID NO: 1640065
acugacgaggagaucuccc

SEQ ID NO: 1640067 - RNA, 19 nt, Artificial Sequence
  Description of Artificial Sequence: Synthetic oligonucleotide
  Sense strand starting at position 698 of SEQ ID NO: 1561008
gagaucuccucgucaguca

SEQ ID NO: 1640068 - RNA, 19 nt, Artificial Sequence
  Description of Artificial Sequence: Synthetic oligonucleotide
  Antisense strand to SEQ ID NO: 1640067
ugacugacgaggagaucuc

SEQ ID NO: 1640069 - RNA, 19 nt, Artificial Sequence
  Description of Artificial Sequence: Synthetic oligonucleotide
  Sense strand starting at position 857 of SEQ ID NO: 1561008
gugauagagcccugaucca

SEQ ID NO: 1640070 - RNA, 19 nt, Artificial Sequence
  Description of Artificial Sequence: Synthetic oligonucleotide
  Antisense strand to SEQ ID NO: 1640069
uggaucagggcucuaucac

SEQ ID NO: 1640071 - RNA, 19 nt, Artificial Sequence
  Description of Artificial Sequence: Synthetic oligonucleotide
  Sense strand starting at position 1067 of SEQ ID NO: 1561008
gagaaacccuagucguaua

SEQ ID NO: 1640072 - RNA, 19 nt, Artificial Sequence
  Description of Artificial Sequence: Synthetic oligonucleotide
  Antisense strand to SEQ ID NO: 1640071
uauacgacuaggguuucuc

SEQ ID NO: 1640073 - RNA, 19 nt, Artificial Sequence
  Description of Artificial Sequence: Synthetic oligonucleotide
  Sense strand starting at position 1648 of SEQ ID NO: 1561008
cagaauacagaucguuaaa

SEQ ID NO: 1640074 - RNA, 19 nt, Artificial Sequence
  Description of Artificial Sequence: Synthetic oligonucleotide
  Antisense strand to SEQ ID NO: 1640073
uuuaacgaucuguauucug

SEQ ID NO: 1640075 - RNA, 19 nt, Artificial Sequence
  Description of Artificial Sequence: Synthetic oligonucleotide
  Sense strand starting at position 1650 of SEQ ID NO: 1561008
gaauacagaucguuaaagg

SEQ ID NO: 1640076 - RNA, 19 nt, Artificial Sequence
  Description of Artificial Sequence: Synthetic oligonucleotide
  Antisense strand to SEQ ID NO: 1640075
ccuuuaacgaucuguauuc

SEQ ID NO: 1640077 - RNA, 19 nt, Artificial Sequence
  Description of Artificial Sequence: Synthetic oligonucleotide
  Sense strand starting at position 1875 of SEQ ID NO: 1561008
gcccguuuggcuccucuaa

SEQ ID NO: 1640078 - RNA, 19 nt, Artificial Sequence
  Description of Artificial Sequence: Synthetic oligonucleotide
  Antisense strand to SEQ ID NO: 1640077
uuagaggagccaaacgggc

SEQ ID NO: 1640079 - RNA, 19 nt, Artificial Sequence
  Description of Artificial Sequence: Synthetic oligonucleotide
  Sense strand starting at position 2123 of SEQ ID NO: 1561008
uucaguaucgcggacggaa

SEQ ID NO: 1640080 - RNA, 19 nt, Artificial Sequence
  Description of Artificial Sequence: Synthetic oligonucleotide
  Antisense strand to SEQ ID NO: 1640079
uuccguccgcgauacugaa

SEQ ID NO: 1640081 - RNA, 19 nt, Artificial Sequence
  Description of Artificial Sequence: Synthetic oligonucleotide
  Sense strand starting at position 2299 of SEQ ID NO: 1561008
cccgaaucucccugggaac

SEQ ID NO: 1640082 - RNA, 19 nt, Artificial Sequence
  Description of Artificial Sequence: Synthetic oligonucleotide
  Antisense strand to SEQ ID NO: 1640081
guucccagggagauucggg

SEQ ID NO: 1640083 - RNA, 19 nt, Artificial Sequence
  Description of Artificial Sequence: Synthetic oligonucleotide
  Sense strand starting at position 2698 of SEQ ID NO: 1561008
aaacgaaaucuguguuccu

SEQ ID NO: 1640084 - RNA, 19 nt, Artificial Sequence
  Description of Artificial Sequence: Synthetic oligonucleotide
  Antisense strand to SEQ ID NO: 1640083
aggaacacagauuucguuu

SEQ ID NO: 1640085 - RNA, 19 nt, Artificial Sequence
  Description of Artificial Sequence: Synthetic oligonucleotide
  Sense strand starting at position 2699 of SEQ ID NO: 1561008
aacgaaaucuguguuccuu

SEQ ID NO: 1640086 - RNA, 19 nt, Artificial Sequence
  Description of Artificial Sequence: Synthetic oligonucleotide
  Antisense strand to SEQ ID NO: 1640085
aaggaacacagauuucguu

SEQ ID NO: 1640087 - RNA, 19 nt, Artificial Sequence
  Description of Artificial Sequence: Synthetic oligonucleotide
  Sense strand starting at position 2775 of SEQ ID NO: 1561008
ggcagagguuugccuuuaa

SEQ ID NO: 1640088 - RNA, 19 nt, Artificial Sequence
  Description of Artificial Sequence: Synthetic oligonucleotide
  Antisense strand to SEQ ID NO: 1640087
uuaaaggcaaaccucugcc

SEQ ID NO: 1640089 - RNA, 19 nt, Artificial Sequence
  Description of Artificial Sequence: Synthetic oligonucleotide
  Sense strand starting at position 2779 of SEQ ID NO: 1561008
gagguuugccuuuaaccuu

SEQ ID NO: 1640090 - RNA, 19 nt, Artificial Sequence
  Description of Artificial Sequence: Synthetic oligonucleotide
  Antisense strand to SEQ ID NO: 1640089
aagguuaaaggcaaaccuc

SEQ ID NO: 1640091 - RNA, 19 nt, Artificial Sequence
  Description of Artificial Sequence: Synthetic oligonucleotide
  Sense strand starting at position 2942 of SEQ ID NO: 1561008
ggcgaaaucauuugccuca

SEQ ID NO: 1640092 - RNA, 19 nt, Artificial Sequence
  Description of Artificial Sequence: Synthetic oligonucleotide
  Antisense strand to SEQ ID NO: 1640091
ugaggcaaaugauuucgcc

SEQ ID NO: 1640093 - RNA, 19 nt, Artificial Sequence
  Description of Artificial Sequence: Synthetic oligonucleotide
  Sense strand starting at position 2943 of SEQ ID NO: 1561008
gcgaaaucauuugccucaa

SEQ ID NO: 1640094 - RNA, 19 nt, Artificial Sequence
  Description of Artificial Sequence: Synthetic oligonucleotide
  Antisense strand to SEQ ID NO: 1640093
uugaggcaaaugauuucgc

SEQ ID NO: 1640095 - RNA, 19 nt, Artificial Sequence
  Description of Artificial Sequence: Synthetic oligonucleotide
  Sense strand starting at position 3084 of SEQ ID NO: 1561008
uggguuuaacuuugugaac

SEQ ID NO: 1640096 - RNA, 19 nt, Artificial Sequence
  Description of Artificial Sequence: Synthetic oligonucleotide
  Antisense strand to SEQ ID NO: 1640095
guucacaaaguuaaaccca

SEQ ID NO: 1640097 - RNA, 19 nt, Artificial Sequence
  Description of Artificial Sequence: Synthetic oligonucleotide
  Sense strand starting at position 3093 of SEQ ID NO: 1561008
cuuugugaaccaggaaagu

SEQ ID NO: 1640098 - RNA, 19 nt, Artificial Sequence
  Description of Artificial Sequence: Synthetic oligonucleotide
  Antisense strand to SEQ ID NO: 1640097
acuuuccugguucacaaag

SEQ ID NO: 1640099 - RNA, 19 nt, Artificial Sequence
  Description of Artificial Sequence: Synthetic oligonucleotide
  Sense strand starting at position 3102 of SEQ ID NO: 1561008
ccaggaaaguucuuaucca

SEQ ID NO: 1640100 - RNA, 19 nt, Artificial Sequence
  Description of Artificial Sequence: Synthetic oligonucleotide
  Antisense strand to SEQ ID NO: 1640099
uggauaagaacuuuccugg

SEQ ID NO: 1640101 - RNA, 19 nt, Artificial Sequence
  Description of Artificial Sequence: Synthetic oligonucleotide
  Sense strand starting at position 3135 of SEQ ID NO: 1561008
cgccacauucuagggagaa

SEQ ID NO: 1640102 - RNA, 19 nt, Artificial Sequence
  Description of Artificial Sequence: Synthetic oligonucleotide
  Antisense strand to SEQ ID NO: 1640101
uucucccuagaauguggcg

SEQ ID NO: 1640103 - RNA, 19 nt, Artificial Sequence
  Description of Artificial Sequence: Synthetic oligonucleotide
  Sense strand starting at position 3182 of SEQ ID NO: 1561008
aguauuguucuggaaugcu

SEQ ID NO: 1640104 - RNA, 19 nt, Artificial Sequence
  Description of Artificial Sequence: Synthetic oligonucleotide
  Antisense strand to SEQ ID NO: 1640103
agcauuccagaacaauacu

SEQ ID NO: 1640105 - RNA, 19 nt, Artificial Sequence
  Description of Artificial Sequence: Synthetic oligonucleotide
  Sense strand starting at position 3190 of SEQ ID NO: 1561008
ucuggaaugcuuugaagac

SEQ ID NO: 1640106 - RNA, 19 nt, Artificial Sequence
  Description of Artificial Sequence: Synthetic oligonucleotide
  Antisense strand to SEQ ID NO: 1640105
gucuucaaagcauuccaga

SEQ ID NO: 1640107 - RNA, 19 nt, Artificial Sequence
  Description of Artificial Sequence: Synthetic oligonucleotide
  Sense strand starting at position 3249 of SEQ ID NO: 1561008
ucagaugauugggaaagau

SEQ ID NO: 1640108 - RNA, 19 nt, Artificial Sequence
  Description of Artificial Sequence: Synthetic oligonucleotide
  Antisense strand to SEQ ID NO: 1640107
aucuuucccaaucaucuga

SEQ ID NO: 1640109 - RNA, 19 nt, Artificial Sequence
  Description of Artificial Sequence: Synthetic oligonucleotide
  Sense strand starting at position 3258 of SEQ ID NO: 1561008
ugggaaagaucuuucuuug

SEQ ID NO: 1640110 - RNA, 19 nt, Artificial Sequence
  Description of Artificial Sequence: Synthetic oligonucleotide
  Antisense strand to SEQ ID NO: 1640109
caaagaaagaucuuuccca

SEQ ID NO: 1640111 - RNA, 19 nt, Artificial Sequence
  Description of Artificial Sequence: Synthetic oligonucleotide
  Sense strand starting at position 3753 of SEQ ID NO: 1561008
aagggauaaugguauaauc

SEQ ID NO: 1640112 - RNA, 19 nt, Artificial Sequence
  Description of Artificial Sequence: Synthetic oligonucleotide
  Antisense strand to SEQ ID NO: 1640111
gauuauaccauuaucccuu

SEQ ID NO: 1640113 - RNA, 19 nt, Artificial Sequence
  Description of Artificial Sequence: Synthetic oligonucleotide
  Sense strand starting at position 3762 of SEQ ID NO: 1561008
ugguauaaucuaugaaguc

SEQ ID NO: 1640114 - RNA, 19 nt, Artificial Sequence
  Description of Artificial Sequence: Synthetic oligonucleotide
  Antisense strand to SEQ ID NO: 1640113
gacuucauagauuauacca

SEQ ID NO: 1640115 - RNA, 19 nt, Artificial Sequence
  Description of Artificial Sequence: Synthetic oligonucleotide
  Sense strand starting at position 3797 of SEQ ID NO: 1561008
uaaggcagucauugaggau

SEQ ID NO: 1640116 - RNA, 19 nt, Artificial Sequence
  Description of Artificial Sequence: Synthetic oligonucleotide
  Antisense strand to SEQ ID NO: 1640115
auccucaaugacugccuua

SEQ ID NO: 1640117 - RNA, 19 nt, Artificial Sequence
  Description of Artificial Sequence: Synthetic oligonucleotide
  Sense strand starting at position 3801 of SEQ ID NO: 1561008
gcagucauugaggauuaua

SEQ ID NO: 1640118 - RNA, 19 nt, Artificial Sequence
  Description of Artificial Sequence: Synthetic oligonucleotide
  Antisense strand to SEQ ID NO: 1640117
uauaauccucaaugacugc

SEQ ID NO: 1640119 - RNA, 19 nt, Artificial Sequence
  Description of Artificial Sequence: Synthetic oligonucleotide
  Sense strand starting at position 3809 of SEQ ID NO: 1561008
ugaggauuauaaugaaagg

SEQ ID NO: 1640120 - RNA, 19 nt, Artificial Sequence
  Description of Artificial Sequence: Synthetic oligonucleotide
  Antisense strand to SEQ ID NO: 1640119
ccuuucauuauaauccuca

SEQ ID NO: 1640121 - RNA, 19 nt, Artificial Sequence
  Description of Artificial Sequence: Synthetic oligonucleotide
  Sense strand starting at position 3859 of SEQ ID NO: 1561008
uguaaaugccuauauguug

SEQ ID NO: 1640122 - RNA, 19 nt, Artificial Sequence
  Description of Artificial Sequence: Synthetic oligonucleotide
  Antisense strand to SEQ ID NO: 1640121
caacauauaggcauuuaca

SEQ ID NO: 1640123 - RNA, 19 nt, Artificial Sequence
  Description of Artificial Sequence: Synthetic oligonucleotide
  Sense strand starting at position 3873 of SEQ ID NO: 1561008
uguugugacuaauuccaaa

SEQ ID NO: 1640124 - RNA, 19 nt, Artificial Sequence
  Description of Artificial Sequence: Synthetic oligonucleotide
  Antisense strand to SEQ ID NO: 1640123
uuuggaauuagucacaaca

SEQ ID NO: 1640125 - RNA, 19 nt, Artificial Sequence
  Description of Artificial Sequence: Synthetic oligonucleotide
  Sense strand starting at position 300 of SEQ ID NO: 1561009
guggaauauaacugaaagu

SEQ ID NO: 1640126 - RNA, 19 nt, Artificial Sequence
  Description of Artificial Sequence: Synthetic oligonucleotide
  Antisense strand to SEQ ID NO: 1640125
acuuucaguuauauuccac

SEQ ID NO: 1640127 - RNA, 19 nt, Artificial Sequence
  Description of Artificial Sequence: Synthetic oligonucleotide
  Sense strand starting at position 700 of SEQ ID NO: 1561009
aggagaugguacuggauaa

SEQ ID NO: 1640128 - RNA, 19 nt, Artificial Sequence
  Description of Artificial Sequence: Synthetic oligonucleotide
  Antisense strand to SEQ ID NO: 1640127
uuauccaguaccaucuccu

SEQ ID NO: 1640129 - RNA, 19 nt, Artificial Sequence
  Description of Artificial Sequence: Synthetic oligonucleotide
  Sense strand starting at position 789 of SEQ ID NO: 1561009
ccauaugugagaugugaug

SEQ ID NO: 1640130 - RNA, 19 nt, Artificial Sequence
  Description of Artificial Sequence: Synthetic oligonucleotide
  Antisense strand to SEQ ID NO: 1640129
caucacaucucacauaugg

SEQ ID NO: 1640131 - RNA, 19 nt, Artificial Sequence
  Description of Artificial Sequence: Synthetic oligonucleotide
  Sense strand starting at position 791 of SEQ ID NO: 1561009
auaugugagaugugaugcu

SEQ ID NO: 1640132 - RNA, 19 nt, Artificial Sequence
  Description of Artificial Sequence: Synthetic oligonucleotide
  Antisense strand to SEQ ID NO: 1640131
agcaucacaucucacauau

SEQ ID NO: 1640133 - RNA, 19 nt, Artificial Sequence
  Description of Artificial Sequence: Synthetic oligonucleotide
  Sense strand starting at position 844 of SEQ ID NO: 1561009
uguagucaucuuugaacag

SEQ ID NO: 1640134 - RNA, 19 nt, Artificial Sequence
  Description of Artificial Sequence: Synthetic oligonucleotide
  Antisense strand to SEQ ID NO: 1640133
cuguucaaagaugacuaca

SEQ ID NO: 1640135 - RNA, 19 nt, Artificial Sequence
  Description of Artificial Sequence: Synthetic oligonucleotide
  Sense strand starting at position 880 of SEQ ID NO: 1561009
gguagaugugguggucaag

SEQ ID NO: 1640136 - RNA, 19 nt, Artificial Sequence
  Description of Artificial Sequence: Synthetic oligonucleotide
  Antisense strand to SEQ ID NO: 1640135
cuugaccaccacaucuacc

SEQ ID NO: 1640137 - RNA, 19 nt, Artificial Sequence
  Description of Artificial Sequence: Synthetic oligonucleotide
  Sense strand starting at position 914 of SEQ ID NO: 1561009
cuguuaugaucucuauucu

SEQ ID NO: 1640138 - RNA, 19 nt, Artificial Sequence
  Description of Artificial Sequence: Synthetic oligonucleotide
  Antisense strand to SEQ ID NO: 1640137
agaauagagaucauaacag

SEQ ID NO: 1640139 - RNA, 19 nt, Artificial Sequence
  Description of Artificial Sequence: Synthetic oligonucleotide
  Sense strand starting at position 915 of SEQ ID NO: 1561009
uguuaugaucucuauucuu

SEQ ID NO: 1640140 - RNA, 19 nt, Artificial Sequence
  Description of Artificial Sequence: Synthetic oligonucleotide
  Antisense strand to SEQ ID NO: 1640139
aagaauagagaucauaaca

SEQ ID NO: 1640141 - RNA, 19 nt, Artificial Sequence
  Description of Artificial Sequence: Synthetic oligonucleotide
  Sense strand starting at position 960 of SEQ ID NO: 1561009
augugugccuuccuggaau

SEQ ID NO: 1640142 - RNA, 19 nt, Artificial Sequence
  Description of Artificial Sequence: Synthetic oligonucleotide
  Antisense strand to SEQ ID NO: 1640141
auuccaggaaggcacacau

SEQ ID NO: 1640143 - RNA, 19 nt, Artificial Sequence
  Description of Artificial Sequence: Synthetic oligonucleotide
  Sense strand starting at position 962 of SEQ ID NO: 1561009
gugugccuuccuggaauaa

SEQ ID NO: 1640144 - RNA, 19 nt, Artificial Sequence
  Description of Artificial Sequence: Synthetic oligonucleotide
  Antisense strand to SEQ ID NO: 1640143
uuauuccaggaaggcacac

SEQ ID NO: 1640145 - RNA, 19 nt, Artificial Sequence
  Description of Artificial Sequence: Synthetic oligonucleotide
  Sense strand starting at position 963 of SEQ ID NO: 1561009
ugugccuuccuggaauaau

SEQ ID NO: 1640146 - RNA, 19 nt, Artificial Sequence
  Description of Artificial Sequence: Synthetic oligonucleotide
  Antisense strand to SEQ ID NO: 1640145
auuauuccaggaaggcaca

SEQ ID NO: 1640147 - RNA, 19 nt, Artificial Sequence
  Description of Artificial Sequence: Synthetic oligonucleotide
  Sense strand starting at position 1219 of SEQ ID NO: 1561009
ccgccaucuagugaugaac

SEQ ID NO: 1640148 - RNA, 19 nt, Artificial Sequence
  Description of Artificial Sequence: Synthetic oligonucleotide
  Antisense strand to SEQ ID NO: 1640147
guucaucacuagauggcgg

SEQ ID NO: 1640149 - RNA, 19 nt, Artificial Sequence
  Description of Artificial Sequence: Synthetic oligonucleotide
  Sense strand starting at position 1301 of SEQ ID NO: 1561009
agcugucagcaagaagcau

SEQ ID NO: 1640150 - RNA, 19 nt, Artificial Sequence
  Description of Artificial Sequence: Synthetic oligonucleotide
  Antisense strand to SEQ ID NO: 1640149
augcuucuugcugacagcu

SEQ ID NO: 1640151 - RNA, 19 nt, Artificial Sequence
  Description of Artificial Sequence: Synthetic oligonucleotide
  Sense strand starting at position 1392 of SEQ ID NO: 1561009
gguauaauggcucagcaga

SEQ ID NO: 1640152 - RNA, 19 nt, Artificial Sequence
  Description of Artificial Sequence: Synthetic oligonucleotide
  Antisense strand to SEQ ID NO: 1640151
ucugcugagccauuauacc

SEQ ID NO: 1640153 - RNA, 19 nt, Artificial Sequence
  Description of Artificial Sequence: Synthetic oligonucleotide
  Sense strand starting at position 1426 of SEQ ID NO: 1561009
cacugcaugggcuguaauu

SEQ ID NO: 1640154 - RNA, 19 nt, Artificial Sequence
  Description of Artificial Sequence: Synthetic oligonucleotide
  Antisense strand to SEQ ID NO: 1640153
aauuacagcccaugcagug

SEQ ID NO: 1640155 - RNA, 19 nt, Artificial Sequence
  Description of Artificial Sequence: Synthetic oligonucleotide
  Sense strand starting at position 1457 of SEQ ID NO: 1561009
ucgcgauuuacauggucuu

SEQ ID NO: 1640156 - RNA, 19 nt, Artificial Sequence
  Description of Artificial Sequence: Synthetic oligonucleotide
  Antisense strand to SEQ ID NO: 1640155
aagaccauguaaaucgcga

SEQ ID NO: 1640157 - RNA, 19 nt, Artificial Sequence
  Description of Artificial Sequence: Synthetic oligonucleotide
  Sense strand starting at position 1458 of SEQ ID NO: 1561009
cgcgauuuacauggucuuu

SEQ ID NO: 1640158 - RNA, 19 nt, Artificial Sequence
  Description of Artificial Sequence: Synthetic oligonucleotide
  Antisense strand to SEQ ID NO: 1640157
aaagaccauguaaaucgcg

SEQ ID NO: 1640159 - RNA, 19 nt, Artificial Sequence
  Description of Artificial Sequence: Synthetic oligonucleotide
  Sense strand starting at position 1587 of SEQ ID NO: 1561009
ucgauucuugaccgacagu

SEQ ID NO: 1640160 - RNA, 19 nt, Artificial Sequence
  Description of Artificial Sequence: Synthetic oligonucleotide
  Antisense strand to SEQ ID NO: 1640159
acugucggucaagaaucga

SEQ ID NO: 1640161 - RNA, 19 nt, Artificial Sequence
  Description of Artificial Sequence: Synthetic oligonucleotide
  Sense strand starting at position 1588 of SEQ ID NO: 1561009
cgauucuugaccgacagua

SEQ ID NO: 1640162 - RNA, 19 nt, Artificial Sequence
  Description of Artificial Sequence: Synthetic oligonucleotide
  Antisense strand to SEQ ID NO: 1640161
uacugucggucaagaaucg

SEQ ID NO: 1640163 - RNA, 19 nt, Artificial Sequence
  Description of Artificial Sequence: Synthetic oligonucleotide
  Sense strand starting at position 1660 of SEQ ID NO: 1561009
ggcaucgugucccuaagaa

SEQ ID NO: 1640164 - RNA, 19 nt, Artificial Sequence
  Description of Artificial Sequence: Synthetic oligonucleotide
  Antisense strand to SEQ ID NO: 1640163
uucuuagggacacgaugcc

SEQ ID NO: 1640165 - RNA, 19 nt, Artificial Sequence
  Description of Artificial Sequence: Synthetic oligonucleotide
  Sense strand starting at position 1697 of SEQ ID NO: 1561009
agaguacaaccgcauaguu

SEQ ID NO: 1640166 - RNA, 19 nt, Artificial Sequence
  Description of Artificial Sequence: Synthetic oligonucleotide
  Antisense strand to SEQ ID NO: 1640165
aacuaugcgguuguacucu

SEQ ID NO: 1640167 - RNA, 19 nt, Artificial Sequence
  Description of Artificial Sequence: Synthetic oligonucleotide
  Sense strand starting at position 1920 of SEQ ID NO: 1561009
ggcggucucaccugagaac

SEQ ID NO: 1640168 - RNA, 19 nt, Artificial Sequence
  Description of Artificial Sequence: Synthetic oligonucleotide
  Antisense strand to SEQ ID NO: 1640167
guucucaggugagaccgcc

SEQ ID NO: 1640169 - RNA, 19 nt, Artificial Sequence
  Description of Artificial Sequence: Synthetic oligonucleotide
  Sense strand starting at position 1921 of SEQ ID NO: 1561009
gcggucucaccugagaaca

SEQ ID NO: 1640170 - RNA, 19 nt, Artificial Sequence
  Description of Artificial Sequence: Synthetic oligonucleotide
  Antisense strand to SEQ ID NO: 1640169
uguucucaggugagaccgc

SEQ ID NO: 1640171 - RNA, 19 nt, Artificial Sequence
  Description of Artificial Sequence: Synthetic oligonucleotide
  Sense strand starting at position 2056 of SEQ ID NO: 1561009
cgggugacgcuugcguaaa

SEQ ID NO: 1640172 - RNA, 19 nt, Artificial Sequence
  Description of Artificial Sequence: Synthetic oligonucleotide
  Antisense strand to SEQ ID NO: 1640171
uuuacgcaagcgucacccg

SEQ ID NO: 1640173 - RNA, 19 nt, Artificial Sequence
  Description of Artificial Sequence: Synthetic oligonucleotide
  Sense strand starting at position 2077 of SEQ ID NO: 1561009
gccaucgugucccuauaga

SEQ ID NO: 1640174 - RNA, 19 nt, Artificial Sequence
  Description of Artificial Sequence: Synthetic oligonucleotide
  Antisense strand to SEQ ID NO: 1640173
ucuauagggacacgauggc

SEQ ID NO: 1640175 - RNA, 19 nt, Artificial Sequence
  Description of Artificial Sequence: Synthetic oligonucleotide
  Sense strand starting at position 2271 of SEQ ID NO: 1561009
cgcagccaugucuaauaaa

SEQ ID NO: 1640176 - RNA, 19 nt, Artificial Sequence
  Description of Artificial Sequence: Synthetic oligonucleotide
  Antisense strand to SEQ ID NO: 1640175
uuuauuagacauggcugcg

SEQ ID NO: 1640177 - RNA, 19 nt, Artificial Sequence
  Description of Artificial Sequence: Synthetic oligonucleotide
  Sense strand starting at position 2661 of SEQ ID NO: 1561009
uaaucucgcccguggaaga

SEQ ID NO: 1640178 - RNA, 19 nt, Artificial Sequence
  Description of Artificial Sequence: Synthetic oligonucleotide
  Antisense strand to SEQ ID NO: 1640177
ucuuccacgggcgagauua

SEQ ID NO: 1640179 - RNA, 19 nt, Artificial Sequence
  Description of Artificial Sequence: Synthetic oligonucleotide
  Sense strand starting at position 2957 of SEQ ID NO: 1561009
gggucagaaacguagguuu

SEQ ID NO: 1640180 - RNA, 19 nt, Artificial Sequence
  Description of Artificial Sequence: Synthetic oligonucleotide
  Antisense strand to SEQ ID NO: 1640179
aaaccuacguuucugaccc

SEQ ID NO: 1640181 - RNA, 19 nt, Artificial Sequence
  Description of Artificial Sequence: Synthetic oligonucleotide
  Sense strand starting at position 2959 of SEQ ID NO: 1561009
gucagaaacguagguuucu

SEQ ID NO: 1640182 - RNA, 19 nt, Artificial Sequence
  Description of Artificial Sequence: Synthetic oligonucleotide
  Antisense strand to SEQ ID NO: 1640181
agaaaccuacguuucugac

SEQ ID NO: 1640183 - RNA, 19 nt, Artificial Sequence
  Description of Artificial Sequence: Synthetic oligonucleotide
  Sense strand starting at position 2968 of SEQ ID NO: 1561009
guagguuucuggccaaagg

SEQ ID NO: 1640184 - RNA, 19 nt, Artificial Sequence
  Description of Artificial Sequence: Synthetic oligonucleotide
  Antisense strand to SEQ ID NO: 1640183
ccuuuggccagaaaccuac

SEQ ID NO: 1640185 - RNA, 19 nt, Artificial Sequence
  Description of Artificial Sequence: Synthetic oligonucleotide
  Sense strand starting at position 2969 of SEQ ID NO: 1561009
uagguuucuggccaaaggu

SEQ ID NO: 1640186 - RNA, 19 nt, Artificial Sequence
  Description of Artificial Sequence: Synthetic oligonucleotide
  Antisense strand to SEQ ID NO: 1640185
accuuuggccagaaaccua

SEQ ID NO: 1640187 - RNA, 19 nt, Artificial Sequence
  Description of Artificial Sequence: Synthetic oligonucleotide
  Sense strand starting at position 3027 of SEQ ID NO: 1561009
gauuauucccgccagcaca

SEQ ID NO: 1640188 - RNA, 19 nt, Artificial Sequence
  Description of Artificial Sequence: Synthetic oligonucleotide
  Antisense strand to SEQ ID NO: 1640187
ugugcuggcgggaauaauc

SEQ ID NO: 1640189 - RNA, 19 nt, Artificial Sequence
  Description of Artificial Sequence: Synthetic oligonucleotide
  Sense strand starting at position 3157 of SEQ ID NO: 1561009
cugaacuauugcgugggau

SEQ ID NO: 1640190 - RNA, 19 nt, Artificial Sequence
  Description of Artificial Sequence: Synthetic oligonucleotide
  Antisense strand to SEQ ID NO: 1640189
aucccacgcaauaguucag

SEQ ID NO: 1640191 - RNA, 19 nt, Artificial Sequence
  Description of Artificial Sequence: Synthetic oligonucleotide
  Sense strand starting at position 3158 of SEQ ID NO: 1561009
ugaacuauugcgugggauu

SEQ ID NO: 1640192 - RNA, 19 nt, Artificial Sequence
  Description of Artificial Sequence: Synthetic oligonucleotide
  Antisense strand to SEQ ID NO: 1640191
aaucccacgcaauaguuca

SEQ ID NO: 1640193 - RNA, 19 nt, Artificial Sequence
  Description of Artificial Sequence: Synthetic oligonucleotide
  Sense strand starting at position 3159 of SEQ ID NO: 1561009
gaacuauugcgugggauug

SEQ ID NO: 1640194 - RNA, 19 nt, Artificial Sequence
  Description of Artificial Sequence: Synthetic oligonucleotide
  Antisense strand to SEQ ID NO: 1640193
caaucccacgcaauaguuc

SEQ ID NO: 1640195 - RNA, 19 nt, Artificial Sequence
  Description of Artificial Sequence: Synthetic oligonucleotide
  Sense strand starting at position 3160 of SEQ ID NO: 1561009
aacuauugcgugggauuga

SEQ ID NO: 1640196 - RNA, 19 nt, Artificial Sequence
  Description of Artificial Sequence: Synthetic oligonucleotide
  Antisense strand to SEQ ID NO: 1640195
ucaaucccacgcaauaguu

SEQ ID NO: 1640197 - RNA, 19 nt, Artificial Sequence
  Description of Artificial Sequence: Synthetic oligonucleotide
  Sense strand starting at position 3332 of SEQ ID NO: 1561009
cucuuagaucuaggcucau

SEQ ID NO: 1640198 - RNA, 19 nt, Artificial Sequence
  Description of Artificial Sequence: Synthetic oligonucleotide
  Antisense strand to SEQ ID NO: 1640197
augagccuagaucuaagag

SEQ ID NO: 1640199 - RNA, 19 nt, Artificial Sequence
  Description of Artificial Sequence: Synthetic oligonucleotide
  Sense strand starting at position 3362 of SEQ ID NO: 1561009
ggacuuuccagagguagca

SEQ ID NO: 1640200 - RNA, 19 nt, Artificial Sequence
  Description of Artificial Sequence: Synthetic oligonucleotide
  Antisense strand to SEQ ID NO: 1640199
ugcuaccucuggaaagucc

SEQ ID NO: 1640201 - RNA, 19 nt, Artificial Sequence
  Description of Artificial Sequence: Synthetic oligonucleotide
  Sense strand starting at position 3655 of SEQ ID NO: 1561009
gggcguuucuguccaaaua

SEQ ID NO: 1640202 - RNA, 19 nt, Artificial Sequence
  Description of Artificial Sequence: Synthetic oligonucleotide
  Antisense strand to SEQ ID NO: 1640201
uauuuggacagaaacgccc

SEQ ID NO: 1640203 - RNA, 19 nt, Artificial Sequence
  Description of Artificial Sequence: Synthetic oligonucleotide
  Sense strand starting at position 3656 of SEQ ID NO: 1561009
ggcguuucuguccaaauau

SEQ ID NO: 1640204 - RNA, 19 nt, Artificial Sequence
  Description of Artificial Sequence: Synthetic oligonucleotide
  Antisense strand to SEQ ID NO: 1640203
auauuuggacagaaacgcc

SEQ ID NO: 1640205 - RNA, 19 nt, Artificial Sequence
  Description of Artificial Sequence: Synthetic oligonucleotide
  Sense strand starting at position 21 of SEQ ID NO: 1561010
cugugauaaucuguagcua

SEQ ID NO: 1640206 - RNA, 19 nt, Artificial Sequence
  Description of Artificial Sequence: Synthetic oligonucleotide
  Antisense strand to SEQ ID NO: 1640205
uagcuacagauuaucacag

SEQ ID NO: 1640207 - RNA, 19 nt, Artificial Sequence
  Description of Artificial Sequence: Synthetic oligonucleotide
  Sense strand starting at position 22 of SEQ ID NO: 1561010
ugugauaaucuguagcuaa

SEQ ID NO: 1640208 - RNA, 19 nt, Artificial Sequence
  Description of Artificial Sequence: Synthetic oligonucleotide
  Antisense strand to SEQ ID NO: 1640207
uuagcuacagauuaucaca

SEQ ID NO: 1640209 - RNA, 19 nt, Artificial Sequence
  Description of Artificial Sequence: Synthetic oligonucleotide
  Sense strand starting at position 51 of SEQ ID NO: 1561010
ggacuuucucaacgccuaa

SEQ ID NO: 1640210 - RNA, 19 nt, Artificial Sequence
  Description of Artificial Sequence: Synthetic oligonucleotide
  Antisense strand to SEQ ID NO: 1640209
uuaggcguugagaaagucc

SEQ ID NO: 1640211 - RNA, 19 nt, Artificial Sequence
  Description of Artificial Sequence: Synthetic oligonucleotide
  Sense strand starting at position 163 of SEQ ID NO: 1561010
agcgucucaggauauacaa

SEQ ID NO: 1640212 - RNA, 19 nt, Artificial Sequence
  Description of Artificial Sequence: Synthetic oligonucleotide
  Antisense strand to SEQ ID NO: 1640211
uuguauauccugagacgcu

SEQ ID NO: 1640213 - RNA, 19 nt, Artificial Sequence
  Description of Artificial Sequence: Synthetic oligonucleotide
  Sense strand starting at position 199 of SEQ ID NO: 1561010
gccaaucugcuguagaaag

SEQ ID NO: 1640214 - RNA, 19 nt, Artificial Sequence
  Description of Artificial Sequence: Synthetic oligonucleotide
  Antisense strand to SEQ ID NO: 1640213
cuuucuacagcagauuggc

SEQ ID NO: 1640215 - RNA, 19 nt, Artificial Sequence
  Description of Artificial Sequence: Synthetic oligonucleotide
  Sense strand starting at position 317 of SEQ ID NO: 1561010
agccuaagucuaugugauc

SEQ ID NO: 1640216 - RNA, 19 nt, Artificial Sequence
  Description of Artificial Sequence: Synthetic oligonucleotide
  Antisense strand to SEQ ID NO: 1640215
gaucacauagacuuaggcu

SEQ ID NO: 1640217 - RNA, 19 nt, Artificial Sequence
  Description of Artificial Sequence: Synthetic oligonucleotide
  Sense strand starting at position 322 of SEQ ID NO: 1561010
aagucuaugugaucugcau

SEQ ID NO: 1640218 - RNA, 19 nt, Artificial Sequence
  Description of Artificial Sequence: Synthetic oligonucleotide
  Antisense strand to SEQ ID NO: 1640217
augcagaucacauagacuu

SEQ ID NO: 1640219 - RNA, 19 nt, Artificial Sequence
  Description of Artificial Sequence: Synthetic oligonucleotide
  Sense strand starting at position 360 of SEQ ID NO: 1561010
cugaaaugcuguucccuga

SEQ ID NO: 1640220 - RNA, 19 nt, Artificial Sequence
  Description of Artificial Sequence: Synthetic oligonucleotide
  Antisense strand to SEQ ID NO: 1640219
ucagggaacagcauuucag

SEQ ID NO: 1640221 - RNA, 19 nt, Artificial Sequence
  Description of Artificial Sequence: Synthetic oligonucleotide
  Sense strand starting at position 364 of SEQ ID NO: 1561010
aaugcuguucccugagaca

SEQ ID NO: 1640222 - RNA, 19 nt, Artificial Sequence
  Description of Artificial Sequence: Synthetic oligonucleotide
  Antisense strand to SEQ ID NO: 1640221
ugucucagggaacagcauu

SEQ ID NO: 1640223 - RNA, 19 nt, Artificial Sequence
  Description of Artificial Sequence: Synthetic oligonucleotide
  Sense strand starting at position 424 of SEQ ID NO: 1561010
ccuaaauguccuugaccag

SEQ ID NO: 1640224 - RNA, 19 nt, Artificial Sequence
  Description of Artificial Sequence: Synthetic oligonucleotide
  Antisense strand to SEQ ID NO: 1640223
cuggucaaggacauuuagg

SEQ ID NO: 1640225 - RNA, 19 nt, Artificial Sequence
  Description of Artificial Sequence: Synthetic oligonucleotide
  Sense strand starting at position 603 of SEQ ID NO: 1561010
ccaagauugcgacaacuac

SEQ ID NO: 1640226 - RNA, 19 nt, Artificial Sequence
  Description of Artificial Sequence: Synthetic oligonucleotide
  Antisense strand to SEQ ID NO: 1640225
guaguugucgcaaucuugg

SEQ ID NO: 1640227 - RNA, 19 nt, Artificial Sequence
  Description of Artificial Sequence: Synthetic oligonucleotide
  Sense strand starting at position 1009 of SEQ ID NO: 1561010
agcucuggucauuacuaaa

SEQ ID NO: 1640228 - RNA, 19 nt, Artificial Sequence
  Description of Artificial Sequence: Synthetic oligonucleotide
  Antisense strand to SEQ ID NO: 1640227
uuuaguaaugaccagagcu

SEQ ID NO: 1640229 - RNA, 19 nt, Artificial Sequence
  Description of Artificial Sequence: Synthetic oligonucleotide
  Sense strand starting at position 1033 of SEQ ID NO: 1561010
gguccaauaacugggcaaa

SEQ ID NO: 1640230 - RNA, 19 nt, Artificial Sequence
  Description of Artificial Sequence: Synthetic oligonucleotide
  Antisense strand to SEQ ID NO: 1640229
uuugcccaguuauuggacc

SEQ ID NO: 1640231 - RNA, 19 nt, Artificial Sequence
  Description of Artificial Sequence: Synthetic oligonucleotide
  Sense strand starting at position 1075 of SEQ ID NO: 1561010
ggcaaagacugauccagau

SEQ ID NO: 1640232 - RNA, 19 nt, Artificial Sequence
  Description of Artificial Sequence: Synthetic oligonucleotide
  Antisense strand to SEQ ID NO: 1640231
aucuggaucagucuuugcc

SEQ ID NO: 1640233 - RNA, 19 nt, Artificial Sequence
  Description of Artificial Sequence: Synthetic oligonucleotide
  Sense strand starting at position 1127 of SEQ ID NO: 1561010
uuagaaggcugguuccauu

SEQ ID NO: 1640234 - RNA, 19 nt, Artificial Sequence
  Description of Artificial Sequence: Synthetic oligonucleotide
  Antisense strand to SEQ ID NO: 1640233
aauggaaccagccuucuaa

SEQ ID NO: 1640235 - RNA, 19 nt, Artificial Sequence
  Description of Artificial Sequence: Synthetic oligonucleotide
  Sense strand starting at position 1455 of SEQ ID NO: 1561010
uuccuaaaccacgaauagu

SEQ ID NO: 1640236 - RNA, 19 nt, Artificial Sequence
  Description of Artificial Sequence: Synthetic oligonucleotide
  Antisense strand to SEQ ID NO: 1640235
acuauucgugguuuaggaa

SEQ ID NO: 1640237 - RNA, 19 nt, Artificial Sequence
  Description of Artificial Sequence: Synthetic oligonucleotide
  Sense strand starting at position 1709 of SEQ ID NO: 1561010
agagaagugugagcguaag

SEQ ID NO: 1640238 - RNA, 19 nt, Artificial Sequence
  Description of Artificial Sequence: Synthetic oligonucleotide
  Antisense strand to SEQ ID NO: 1640237
cuuacgcucacacuucucu

SEQ ID NO: 1640239 - RNA, 19 nt, Artificial Sequence
  Description of Artificial Sequence: Synthetic oligonucleotide
  Sense strand starting at position 1785 of SEQ ID NO: 1561010
auccgaucucgcgagaaua

SEQ ID NO: 1640240 - RNA, 19 nt, Artificial Sequence
  Description of Artificial Sequence: Synthetic oligonucleotide
  Antisense strand to SEQ ID NO: 1640239
uauucucgcgagaucggau

SEQ ID NO: 1640241 - RNA, 19 nt, Artificial Sequence
  Description of Artificial Sequence: Synthetic oligonucleotide
  Sense strand starting at position 1787 of SEQ ID NO: 1561010
ccgaucucgcgagaauaac

SEQ ID NO: 1640242 - RNA, 19 nt, Artificial Sequence
  Description of Artificial Sequence: Synthetic oligonucleotide
  Antisense strand to SEQ ID NO: 1640241
guuauucucgcgagaucgg

SEQ ID NO: 1640243 - RNA, 19 nt, Artificial Sequence
  Description of Artificial Sequence: Synthetic oligonucleotide
  Sense strand starting at position 1878 of SEQ ID NO: 1561010
uccuaacgucuuuagcuua

SEQ ID NO: 1640244 - RNA, 19 nt, Artificial Sequence
  Description of Artificial Sequence: Synthetic oligonucleotide
  Antisense strand to SEQ ID NO: 1640243
uaagcuaaagacguuagga

SEQ ID NO: 1640245 - RNA, 19 nt, Artificial Sequence
  Description of Artificial Sequence: Synthetic oligonucleotide
  Sense strand starting at position 1883 of SEQ ID NO: 1561010
acgucuuuagcuuacucau

SEQ ID NO: 1640246 - RNA, 19 nt, Artificial Sequence
  Description of Artificial Sequence: Synthetic oligonucleotide
  Antisense strand to SEQ ID NO: 1640245
augaguaagcuaaagacgu

SEQ ID NO: 1640247 - RNA, 19 nt, Artificial Sequence
  Description of Artificial Sequence: Synthetic oligonucleotide
  Sense strand starting at position 1886 of SEQ ID NO: 1561010
ucuuuagcuuacucaugga

SEQ ID NO: 1640248 - RNA, 19 nt, Artificial Sequence
  Description of Artificial Sequence: Synthetic oligonucleotide
  Antisense strand to SEQ ID NO: 1640247
uccaugaguaagcuaaaga

SEQ ID NO: 1640249 - RNA, 19 nt, Artificial Sequence
  Description of Artificial Sequence: Synthetic oligonucleotide
  Sense strand starting at position 2015 of SEQ ID NO: 1561010
acggcugcgcucuuauagu

SEQ ID NO: 1640250 - RNA, 19 nt, Artificial Sequence
  Description of Artificial Sequence: Synthetic oligonucleotide
  Antisense strand to SEQ ID NO: 1640249
acuauaagagcgcagccgu

SEQ ID NO: 1640251 - RNA, 19 nt, Artificial Sequence
  Description of Artificial Sequence: Synthetic oligonucleotide
  Sense strand starting at position 2582 of SEQ ID NO: 1561010
gccacauacuguucuaaga

SEQ ID NO: 1640252 - RNA, 19 nt, Artificial Sequence
  Description of Artificial Sequence: Synthetic oligonucleotide
  Antisense strand to SEQ ID NO: 1640251
ucuuagaacaguauguggc

SEQ ID NO: 1640253 - RNA, 19 nt, Artificial Sequence
  Description of Artificial Sequence: Synthetic oligonucleotide
  Sense strand starting at position 3105 of SEQ ID NO: 1561010
cguguucuucaguugucuu

SEQ ID NO: 1640254 - RNA, 19 nt, Artificial Sequence
  Description of Artificial Sequence: Synthetic oligonucleotide
  Antisense strand to SEQ ID NO: 1640253
aagacaacugaagaacacg

SEQ ID NO: 1640255 - RNA, 19 nt, Artificial Sequence
  Description of Artificial Sequence: Synthetic oligonucleotide
  Sense strand starting at position 3145 of SEQ ID NO: 1561010
gucacuaucuccucaggaa

SEQ ID NO: 1640256 - RNA, 19 nt, Artificial Sequence
  Description of Artificial Sequence: Synthetic oligonucleotide
  Antisense strand to SEQ ID NO: 1640255
uuccugaggagauagugac

SEQ ID NO: 1640257 - RNA, 19 nt, Artificial Sequence
  Description of Artificial Sequence: Synthetic oligonucleotide
  Sense strand starting at position 3246 of SEQ ID NO: 1561010
gcugcagugccuucgacaa

SEQ ID NO: 1640258 - RNA, 19 nt, Artificial Sequence
  Description of Artificial Sequence: Synthetic oligonucleotide
  Antisense strand to SEQ ID NO: 1640257
uugucgaaggcacugcagc

SEQ ID NO: 1640259 - RNA, 19 nt, Artificial Sequence
  Description of Artificial Sequence: Synthetic oligonucleotide
  Sense strand starting at position 3258 of SEQ ID NO: 1561010
ucgacaaguuucucaauca

SEQ ID NO: 1640260 - RNA, 19 nt, Artificial Sequence
  Description of Artificial Sequence: Synthetic oligonucleotide
  Antisense strand to SEQ ID NO: 1640259
ugauugagaaacuugucga

SEQ ID NO: 1640261 - RNA, 19 nt, Artificial Sequence
  Description of Artificial Sequence: Synthetic oligonucleotide
  Sense strand starting at position 3356 of SEQ ID NO: 1561010
gagucuauccaguguugag

SEQ ID NO: 1640262 - RNA, 19 nt, Artificial Sequence
  Description of Artificial Sequence: Synthetic oligonucleotide
  Antisense strand to SEQ ID NO: 1640261
cucaacacuggauagacuc

SEQ ID NO: 1640263 - RNA, 19 nt, Artificial Sequence
  Description of Artificial Sequence: Synthetic oligonucleotide
  Sense strand starting at position 3405 of SEQ ID NO: 1561010
agcuaccaucgucauuauu

SEQ ID NO: 1640264 - RNA, 19 nt, Artificial Sequence
  Description of Artificial Sequence: Synthetic oligonucleotide
  Antisense strand to SEQ ID NO: 1640263
aauaaugacgaugguagcu

SEQ ID NO: 1640265 - RNA, 19 nt, Artificial Sequence
  Description of Artificial Sequence: Synthetic oligonucleotide
  Sense strand starting at position 3416 of SEQ ID NO: 1561010
ucauuauugucaucugcau

SEQ ID NO: 1640266 - RNA, 19 nt, Artificial Sequence
  Description of Artificial Sequence: Synthetic oligonucleotide
  Antisense strand to SEQ ID NO: 1640265
augcagaugacaauaauga

SEQ ID NO: 1640267 - RNA, 19 nt, Artificial Sequence
  Description of Artificial Sequence: Synthetic oligonucleotide
  Sense strand starting at position 3428 of SEQ ID NO: 1561010
ucugcauuguacuuccaua

SEQ ID NO: 1640268 - RNA, 19 nt, Artificial Sequence
  Description of Artificial Sequence: Synthetic oligonucleotide
  Antisense strand to SEQ ID NO: 1640267
uauggaaguacaaugcaga

SEQ ID NO: 1640269 - RNA, 19 nt, Artificial Sequence
  Description of Artificial Sequence: Synthetic oligonucleotide
  Sense strand starting at position 3642 of SEQ ID NO: 1561010
cuugaacacgcguauauua

SEQ ID NO: 1640270 - RNA, 19 nt, Artificial Sequence
  Description of Artificial Sequence: Synthetic oligonucleotide
  Antisense strand to SEQ ID NO: 1640269
uaauauacgcguguucaag

SEQ ID NO: 1640271 - RNA, 19 nt, Artificial Sequence
  Description of Artificial Sequence: Synthetic oligonucleotide
  Sense strand starting at position 3644 of SEQ ID NO: 1561010
ugaacacgcguauauuauu

SEQ ID NO: 1640272 - RNA, 19 nt, Artificial Sequence
  Description of Artificial Sequence: Synthetic oligonucleotide
  Antisense strand to SEQ ID NO: 1640271
aauaauauacgcguguuca

SEQ ID NO: 1640273 - RNA, 19 nt, Artificial Sequence
  Description of Artificial Sequence: Synthetic oligonucleotide
  Sense strand starting at position 3755 of SEQ ID NO: 1561010
cgugauuacagagaugguu

SEQ ID NO: 1640274 - RNA, 19 nt, Artificial Sequence
  Description of Artificial Sequence: Synthetic oligonucleotide
  Antisense strand to SEQ ID NO: 1640273
aaccaucucuguaaucacg

SEQ ID NO: 1640275 - RNA, 19 nt, Artificial Sequence
  Description of Artificial Sequence: Synthetic oligonucleotide
  Sense strand starting at position 3824 of SEQ ID NO: 1561010
guuugaaccucagcaguca

SEQ ID NO: 1640276 - RNA, 19 nt, Artificial Sequence
  Description of Artificial Sequence: Synthetic oligonucleotide
  Antisense strand to SEQ ID NO: 1640275
ugacugcugagguucaaac

SEQ ID NO: 1640277 - RNA, 19 nt, Artificial Sequence
  Description of Artificial Sequence: Synthetic oligonucleotide
  Sense strand starting at position 3844 of SEQ ID NO: 1561010
ugacgagcucuugaucuua

SEQ ID NO: 1640278 - RNA, 19 nt, Artificial Sequence
  Description of Artificial Sequence: Synthetic oligonucleotide
  Antisense strand to SEQ ID NO: 1640277
uaagaucaagagcucguca

SEQ ID NO: 1640279 - RNA, 19 nt, Artificial Sequence
  Description of Artificial Sequence: Synthetic oligonucleotide
  Sense strand starting at position 3852 of SEQ ID NO: 1561010
ucuugaucuuaggcaaauu

SEQ ID NO: 1640280 - RNA, 19 nt, Artificial Sequence
  Description of Artificial Sequence: Synthetic oligonucleotide
  Antisense strand to SEQ ID NO: 1640279
aauuugccuaagaucaaga

SEQ ID NO: 1640281 - RNA, 19 nt, Artificial Sequence
  Description of Artificial Sequence: Synthetic oligonucleotide
  Sense strand starting at position 3914 of SEQ ID NO: 1561010
ccucauaggguuugaugau

SEQ ID NO: 1640282 - RNA, 19 nt, Artificial Sequence
  Description of Artificial Sequence: Synthetic oligonucleotide
  Antisense strand to SEQ ID NO: 1640281
aucaucaaacccuaugagg

SEQ ID NO: 1640283 - RNA, 19 nt, Artificial Sequence
  Description of Artificial Sequence: Synthetic oligonucleotide
  Sense strand starting at position 3972 of SEQ ID NO: 1561010
cagagucuuguguacugaa

SEQ ID NO: 1640284 - RNA, 19 nt, Artificial Sequence
  Description of Artificial Sequence: Synthetic oligonucleotide
  Antisense strand to SEQ ID NO: 1640283
uucaguacacaagacucug

SEQ ID NO: 1640285 - RNA, 19 nt, Artificial Sequence
  Description of Artificial Sequence: Synthetic oligonucleotide
  Sense strand starting at position 386 of SEQ ID NO: 1561011
gcugcaucugucgguuaga

SEQ ID NO: 1640286 - RNA, 19 nt, Artificial Sequence
  Description of Artificial Sequence: Synthetic oligonucleotide
  Antisense strand to SEQ ID NO: 1640285
ucuaaccgacagaugcagc

SEQ ID NO: 1640287 - RNA, 19 nt, Artificial Sequence
  Description of Artificial Sequence: Synthetic oligonucleotide
  Sense strand starting at position 666 of SEQ ID NO: 1561011
gggcuucuuccauggagau

SEQ ID NO: 1640288 - RNA, 19 nt, Artificial Sequence
  Description of Artificial Sequence: Synthetic oligonucleotide
  Antisense strand to SEQ ID NO: 1640287
aucuccauggaagaagccc

SEQ ID NO: 1640289 - RNA, 19 nt, Artificial Sequence
  Description of Artificial Sequence: Synthetic oligonucleotide
  Sense strand starting at position 667 of SEQ ID NO: 1561011
ggcuucuuccauggagaug

SEQ ID NO: 1640290 - RNA, 19 nt, Artificial Sequence
  Description of Artificial Sequence: Synthetic oligonucleotide
  Antisense strand to SEQ ID NO: 1640289
caucuccauggaagaagcc

SEQ ID NO: 1640291 - RNA, 19 nt, Artificial Sequence
  Description of Artificial Sequence: Synthetic oligonucleotide
  Sense strand starting at position 668 of SEQ ID NO: 1561011
gcuucuuccauggagauga

SEQ ID NO: 1640292 - RNA, 19 nt, Artificial Sequence
  Description of Artificial Sequence: Synthetic oligonucleotide
  Antisense strand to SEQ ID NO: 1640291
ucaucuccauggaagaagc

SEQ ID NO: 1640293 - RNA, 19 nt, Artificial Sequence
  Description of Artificial Sequence: Synthetic oligonucleotide
  Sense strand starting at position 722 of SEQ ID NO: 1561011
gggaguugcagcggagaaa

SEQ ID NO: 1640294 - RNA, 19 nt, Artificial Sequence
  Description of Artificial Sequence: Synthetic oligonucleotide
  Antisense strand to SEQ ID NO: 1640293
uuucuccgcugcaacuccc

SEQ ID NO: 1640295 - RNA, 19 nt, Artificial Sequence
  Description of Artificial Sequence: Synthetic oligonucleotide
  Sense strand starting at position 836 of SEQ ID NO: 1561011
cuuggagauuucuggaaug

SEQ ID NO: 1640296 - RNA, 19 nt, Artificial Sequence
  Description of Artificial Sequence: Synthetic oligonucleotide
  Antisense strand to SEQ ID NO: 1640295
cauuccagaaaucuccaag

SEQ ID NO: 1640297 - RNA, 19 nt, Artificial Sequence
  Description of Artificial Sequence: Synthetic oligonucleotide
  Sense strand starting at position 913 of SEQ ID NO: 1561011
uggguagucccagaagagu

SEQ ID NO: 1640298 - RNA, 19 nt, Artificial Sequence
  Description of Artificial Sequence: Synthetic oligonucleotide
  Antisense strand to SEQ ID NO: 1640297
acucuucugggacuaccca

SEQ ID NO: 1640299 - RNA, 19 nt, Artificial Sequence
  Description of Artificial Sequence: Synthetic oligonucleotide
  Sense strand starting at position 1371 of SEQ ID NO: 1561011
gaaggcucucaauggcuua

SEQ ID NO: 1640300 - RNA, 19 nt, Artificial Sequence
  Description of Artificial Sequence: Synthetic oligonucleotide
  Antisense strand to SEQ ID NO: 1640299
uaagccauugagagccuuc

SEQ ID NO: 1640301 - RNA, 19 nt, Artificial Sequence
  Description of Artificial Sequence: Synthetic oligonucleotide
  Sense strand starting at position 1559 of SEQ ID NO: 1561011
ggucuuaggcacugggaga

SEQ ID NO: 1640302 - RNA, 19 nt, Artificial Sequence
  Description of Artificial Sequence: Synthetic oligonucleotide
  Antisense strand to SEQ ID NO: 1640301
ucucccagugccuaagacc

SEQ ID NO: 1640303 - RNA, 19 nt, Artificial Sequence
  Description of Artificial Sequence: Synthetic oligonucleotide
  Sense strand starting at position 1636 of SEQ ID NO: 1561011
gaggcucuccaagaguuua

SEQ ID NO: 1640304 - RNA, 19 nt, Artificial Sequence
  Description of Artificial Sequence: Synthetic oligonucleotide
  Antisense strand to SEQ ID NO: 1640303
uaaacucuuggagagccuc

SEQ ID NO: 1640305 - RNA, 19 nt, Artificial Sequence
  Description of Artificial Sequence: Synthetic oligonucleotide
  Sense strand starting at position 1641 of SEQ ID NO: 1561011
ucuccaagaguuuagguua

SEQ ID NO: 1640306 - RNA, 19 nt, Artificial Sequence
  Description of Artificial Sequence: Synthetic oligonucleotide
  Antisense strand to SEQ ID NO: 1640305
uaaccuaaacucuuggaga

SEQ ID NO: 1640307 - RNA, 19 nt, Artificial Sequence
  Description of Artificial Sequence: Synthetic oligonucleotide
  Sense strand starting at position 1644 of SEQ ID NO: 1561011
ccaagaguuuagguuacaa

SEQ ID NO: 1640308 - RNA, 19 nt, Artificial Sequence
  Description of Artificial Sequence: Synthetic oligonucleotide
  Antisense strand to SEQ ID NO: 1640307
uuguaaccuaaacucuugg

SEQ ID NO: 1640309 - RNA, 19 nt, Artificial Sequence
  Description of Artificial Sequence: Synthetic oligonucleotide
  Sense strand starting at position 1677 of SEQ ID NO: 1561011
uuaagauuagagggccuua

SEQ ID NO: 1640310 - RNA, 19 nt, Artificial Sequence
  Description of Artificial Sequence: Synthetic oligonucleotide
  Antisense strand to SEQ ID NO: 1640309
uaaggcccucuaaucuuaa

SEQ ID NO: 1640311 - RNA, 19 nt, Artificial Sequence
  Description of Artificial Sequence: Synthetic oligonucleotide
  Sense strand starting at position 1695 of SEQ ID NO: 1561011
auaggagggucucagugau

SEQ ID NO: 1640312 - RNA, 19 nt, Artificial Sequence
  Description of Artificial Sequence: Synthetic oligonucleotide
  Antisense strand to SEQ ID NO: 1640311
aucacugagacccuccuau

SEQ ID NO: 1640313 - RNA, 19 nt, Artificial Sequence
  Description of Artificial Sequence: Synthetic oligonucleotide
  Sense strand starting at position 1702 of SEQ ID NO: 1561011
ggucucagugaugggucaa

SEQ ID NO: 1640314 - RNA, 19 nt, Artificial Sequence
  Description of Artificial Sequence: Synthetic oligonucleotide
  Antisense strand to SEQ ID NO: 1640313
uugacccaucacugagacc

SEQ ID NO: 1640315 - RNA, 19 nt, Artificial Sequence
  Description of Artificial Sequence: Synthetic oligonucleotide
  Sense strand starting at position 1703 of SEQ ID NO: 1561011
gucucagugaugggucaag

SEQ ID NO: 1640316 - RNA, 19 nt, Artificial Sequence
  Description of Artificial Sequence: Synthetic oligonucleotide
  Antisense strand to SEQ ID NO: 1640315
cuugacccaucacugagac

SEQ ID NO: 1640317 - RNA, 19 nt, Artificial Sequence
  Description of Artificial Sequence: Synthetic oligonucleotide
  Sense strand starting at position 2046 of SEQ ID NO: 1561011
aaucaugagcucuggcaag

SEQ ID NO: 1640318 - RNA, 19 nt, Artificial Sequence
  Description of Artificial Sequence: Synthetic oligonucleotide
  Antisense strand to SEQ ID NO: 1640317
cuugccagagcucaugauu

SEQ ID NO: 1640319 - RNA, 19 nt, Artificial Sequence
  Description of Artificial Sequence: Synthetic oligonucleotide
  Sense strand starting at position 2118 of SEQ ID NO: 1561011
gagcuauguuaauaaggga

SEQ ID NO: 1640320 - RNA, 19 nt, Artificial Sequence
  Description of Artificial Sequence: Synthetic oligonucleotide
  Antisense strand to SEQ ID NO: 1640319
ucccuuauuaacauagcuc

SEQ ID NO: 1640321 - RNA, 19 nt, Artificial Sequence
  Description of Artificial Sequence: Synthetic oligonucleotide
  Sense strand starting at position 2252 of SEQ ID NO: 1561011
gggcguggcuaugcuaaua

SEQ ID NO: 1640322 - RNA, 19 nt, Artificial Sequence
  Description of Artificial Sequence: Synthetic oligonucleotide
  Antisense strand to SEQ ID NO: 1640321
uauuagcauagccacgccc

SEQ ID NO: 1640323 - RNA, 19 nt, Artificial Sequence
  Description of Artificial Sequence: Synthetic oligonucleotide
  Sense strand starting at position 2257 of SEQ ID NO: 1561011
uggcuaugcuaauaagaau

SEQ ID NO: 1640324 - RNA, 19 nt, Artificial Sequence
  Description of Artificial Sequence: Synthetic oligonucleotide
  Antisense strand to SEQ ID NO: 1640323
auucuuauuagcauagcca

SEQ ID NO: 1640325 - RNA, 19 nt, Artificial Sequence
  Description of Artificial Sequence: Synthetic oligonucleotide
  Sense strand starting at position 2641 of SEQ ID NO: 1561011
ccgugagaucacugcauuc

SEQ ID NO: 1640326 - RNA, 19 nt, Artificial Sequence
  Description of Artificial Sequence: Synthetic oligonucleotide
  Antisense strand to SEQ ID NO: 1640325
gaaugcagugaucucacgg

SEQ ID NO: 1640327 - RNA, 19 nt, Artificial Sequence
  Description of Artificial Sequence: Synthetic oligonucleotide
  Sense strand starting at position 2643 of SEQ ID NO: 1561011
gugagaucacugcauuccu

SEQ ID NO: 1640328 - RNA, 19 nt, Artificial Sequence
  Description of Artificial Sequence: Synthetic oligonucleotide
  Antisense strand to SEQ ID NO: 1640327
aggaaugcagugaucucac

SEQ ID NO: 1640329 - RNA, 19 nt, Artificial Sequence
  Description of Artificial Sequence: Synthetic oligonucleotide
  Sense strand starting at position 2686 of SEQ ID NO: 1561011
uagggaugccugggucaug

SEQ ID NO: 1640330 - RNA, 19 nt, Artificial Sequence
  Description of Artificial Sequence: Synthetic oligonucleotide
  Antisense strand to SEQ ID NO: 1640329
caugacccaggcaucccua

SEQ ID NO: 1640331 - RNA, 19 nt, Artificial Sequence
  Description of Artificial Sequence: Synthetic oligonucleotide
  Sense strand starting at position 2722 of SEQ ID NO: 1561011
auuucugggucuugaagga

SEQ ID NO: 1640332 - RNA, 19 nt, Artificial Sequence
  Description of Artificial Sequence: Synthetic oligonucleotide
  Antisense strand to SEQ ID NO: 1640331
uccuucaagacccagaaau

SEQ ID NO: 1640333 - RNA, 19 nt, Artificial Sequence
  Description of Artificial Sequence: Synthetic oligonucleotide
  Sense strand starting at position 2839 of SEQ ID NO: 1561011
guagacagguuccuucgua

SEQ ID NO: 1640334 - RNA, 19 nt, Artificial Sequence
  Description of Artificial Sequence: Synthetic oligonucleotide
  Antisense strand to SEQ ID NO: 1640333
uacgaaggaaccugucuac

SEQ ID NO: 1640335 - RNA, 19 nt, Artificial Sequence
  Description of Artificial Sequence: Synthetic oligonucleotide
  Sense strand starting at position 2853 of SEQ ID NO: 1561011
ucguacuagguucgguaaa

SEQ ID NO: 1640336 - RNA, 19 nt, Artificial Sequence
  Description of Artificial Sequence: Synthetic oligonucleotide
  Antisense strand to SEQ ID NO: 1640335
uuuaccgaaccuaguacga

SEQ ID NO: 1640337 - RNA, 19 nt, Artificial Sequence
  Description of Artificial Sequence: Synthetic oligonucleotide
  Sense strand starting at position 2893 of SEQ ID NO: 1561011
cucuuagguccaggaauug

SEQ ID NO: 1640338 - RNA, 19 nt, Artificial Sequence
  Description of Artificial Sequence: Synthetic oligonucleotide
  Antisense strand to SEQ ID NO: 1640337
caauuccuggaccuaagag

SEQ ID NO: 1640339 - RNA, 19 nt, Artificial Sequence
  Description of Artificial Sequence: Synthetic oligonucleotide
  Sense strand starting at position 2967 of SEQ ID NO: 1561011
cccgaauucguaugugaga

SEQ ID NO: 1640340 - RNA, 19 nt, Artificial Sequence
  Description of Artificial Sequence: Synthetic oligonucleotide
  Antisense strand to SEQ ID NO: 1640339
ucucacauacgaauucggg

SEQ ID NO: 1640341 - RNA, 19 nt, Artificial Sequence
  Description of Artificial Sequence: Synthetic oligonucleotide
  Sense strand starting at position 2968 of SEQ ID NO: 1561011
ccgaauucguaugugagag

SEQ ID NO: 1640342 - RNA, 19 nt, Artificial Sequence
  Description of Artificial Sequence: Synthetic oligonucleotide
  Antisense strand to SEQ ID NO: 1640341
cucucacauacgaauucgg

SEQ ID NO: 1640343 - RNA, 19 nt, Artificial Sequence
  Description of Artificial Sequence: Synthetic oligonucleotide
  Sense strand starting at position 2986 of SEQ ID NO: 1561011
gcuugagaccaggacuagu

SEQ ID NO: 1640344 - RNA, 19 nt, Artificial Sequence
  Description of Artificial Sequence: Synthetic oligonucleotide
  Antisense strand to SEQ ID NO: 1640343
acuaguccuggucucaagc

SEQ ID NO: 1640345 - RNA, 19 nt, Artificial Sequence
  Description of Artificial Sequence: Synthetic oligonucleotide
  Sense strand starting at position 2994 of SEQ ID NO: 1561011
ccaggacuagucugggaga

SEQ ID NO: 1640346 - RNA, 19 nt, Artificial Sequence
  Description of Artificial Sequence: Synthetic oligonucleotide
  Antisense strand to SEQ ID NO: 1640345
ucucccagacuaguccugg

SEQ ID NO: 1640347 - RNA, 19 nt, Artificial Sequence
  Description of Artificial Sequence: Synthetic oligonucleotide
  Sense strand starting at position 3015 of SEQ ID NO: 1561011
gacucuuggauccgaggaa

SEQ ID NO: 1640348 - RNA, 19 nt, Artificial Sequence
  Description of Artificial Sequence: Synthetic oligonucleotide
  Antisense strand to SEQ ID NO: 1640347
uuccucggauccaagaguc

SEQ ID NO: 1640349 - RNA, 19 nt, Artificial Sequence
  Description of Artificial Sequence: Synthetic oligonucleotide
  Sense strand starting at position 3080 of SEQ ID NO: 1561011
uggacacugcucugaguga

SEQ ID NO: 1640350 - RNA, 19 nt, Artificial Sequence
  Description of Artificial Sequence: Synthetic oligonucleotide
  Antisense strand to SEQ ID NO: 1640349
ucacucagagcagugucca

SEQ ID NO: 1640351 - RNA, 19 nt, Artificial Sequence
  Description of Artificial Sequence: Synthetic oligonucleotide
  Sense strand starting at position 3112 of SEQ ID NO: 1561011
ucagacuucucuguacuga

SEQ ID NO: 1640352 - RNA, 19 nt, Artificial Sequence
  Description of Artificial Sequence: Synthetic oligonucleotide
  Antisense strand to SEQ ID NO: 1640351
ucaguacagagaagucuga

SEQ ID NO: 1640353 - RNA, 19 nt, Artificial Sequence
  Description of Artificial Sequence: Synthetic oligonucleotide
  Sense strand starting at position 3195 of SEQ ID NO: 1561011
cggaguuuccgucuuguag

SEQ ID NO: 1640354 - RNA, 19 nt, Artificial Sequence
  Description of Artificial Sequence: Synthetic oligonucleotide
  Antisense strand to SEQ ID NO: 1640353
cuacaagacggaaacuccg

SEQ ID NO: 1640355 - RNA, 19 nt, Artificial Sequence
  Description of Artificial Sequence: Synthetic oligonucleotide
  Sense strand starting at position 3392 of SEQ ID NO: 1561011
uugaacuccugauaucaga

SEQ ID NO: 1640356 - RNA, 19 nt, Artificial Sequence
  Description of Artificial Sequence: Synthetic oligonucleotide
  Antisense strand to SEQ ID NO: 1640355
ucugauaucaggaguucaa

SEQ ID NO: 1640357 - RNA, 19 nt, Artificial Sequence
  Description of Artificial Sequence: Synthetic oligonucleotide
  Sense strand starting at position 3592 of SEQ ID NO: 1561011
caucccgucugguucuaaa

SEQ ID NO: 1640358 - RNA, 19 nt, Artificial Sequence
  Description of Artificial Sequence: Synthetic oligonucleotide
  Antisense strand to SEQ ID NO: 1640357
uuuagaaccagacgggaug

SEQ ID NO: 1640359 - RNA, 19 nt, Artificial Sequence
  Description of Artificial Sequence: Synthetic oligonucleotide
  Sense strand starting at position 3595 of SEQ ID NO: 1561011
cccgucugguucuaaauuu

SEQ ID NO: 1640360 - RNA, 19 nt, Artificial Sequence
  Description of Artificial Sequence: Synthetic oligonucleotide
  Antisense strand to SEQ ID NO: 1640359
aaauuuagaaccagacggg

SEQ ID NO: 1640361 - RNA, 19 nt, Artificial Sequence
  Description of Artificial Sequence: Synthetic oligonucleotide
  Sense strand starting at position 3969 of SEQ ID NO: 1561011
cgugcucgguacuugaaau

SEQ ID NO: 1640362 - RNA, 19 nt, Artificial Sequence
  Description of Artificial Sequence: Synthetic oligonucleotide
  Antisense strand to SEQ ID NO: 1640361
auuucaaguaccgagcacg

SEQ ID NO: 1640363 - RNA, 19 nt, Artificial Sequence
  Description of Artificial Sequence: Synthetic oligonucleotide
  Sense strand starting at position 3970 of SEQ ID NO: 1561011
gugcucgguacuugaaauc

SEQ ID NO: 1640364 - RNA, 19 nt, Artificial Sequence
  Description of Artificial Sequence: Synthetic oligonucleotide
  Antisense strand to SEQ ID NO: 1640363
gauuucaaguaccgagcac

SEQ ID NO: 1640365 - RNA, 19 nt, Artificial Sequence
  Description of Artificial Sequence: Synthetic oligonucleotide
  Sense strand starting at position 349 of SEQ ID NO: 1561012
ucaccugaguccuuagcuu

SEQ ID NO: 1640366 - RNA, 19 nt, Artificial Sequence
  Description of Artificial Sequence: Synthetic oligonucleotide
  Antisense strand to SEQ ID NO: 1640365
aagcuaaggacucagguga

SEQ ID NO: 1640367 - RNA, 19 nt, Artificial Sequence
  Description of Artificial Sequence: Synthetic oligonucleotide
  Sense strand starting at position 410 of SEQ ID NO: 1561012
gagagcauccuggguaucu

SEQ ID NO: 1640368 - RNA, 19 nt, Artificial Sequence
  Description of Artificial Sequence: Synthetic oligonucleotide
  Antisense strand to SEQ ID NO: 1640367
agauacccaggaugcucuc

SEQ ID NO: 1640369 - RNA, 19 nt, Artificial Sequence
  Description of Artificial Sequence: Synthetic oligonucleotide
  Sense strand starting at position 411 of SEQ ID NO: 1561012
agagcauccuggguaucua

SEQ ID NO: 1640370 - RNA, 19 nt, Artificial Sequence
  Description of Artificial Sequence: Synthetic oligonucleotide
  Antisense strand to SEQ ID NO: 1640369
uagauacccaggaugcucu

SEQ ID NO: 1640371 - RNA, 19 nt, Artificial Sequence
  Description of Artificial Sequence: Synthetic oligonucleotide
  Sense strand starting at position 412 of SEQ ID NO: 1561012
gagcauccuggguaucuaa

SEQ ID NO: 1640372 - RNA, 19 nt, Artificial Sequence
  Description of Artificial Sequence: Synthetic oligonucleotide
  Antisense strand to SEQ ID NO: 1640371
uuagauacccaggaugcuc

SEQ ID NO: 1640373 - RNA, 19 nt, Artificial Sequence
  Description of Artificial Sequence: Synthetic oligonucleotide
  Sense strand starting at position 500 of SEQ ID NO: 1561012
gguuuaguugcaggauaag

SEQ ID NO: 1640374 - RNA, 19 nt, Artificial Sequence
  Description of Artificial Sequence: Synthetic oligonucleotide
  Antisense strand to SEQ ID NO: 1640373
cuuauccugcaacuaaacc

SEQ ID NO: 1640375 - RNA, 19 nt, Artificial Sequence
  Description of Artificial Sequence: Synthetic oligonucleotide
  Sense strand starting at position 841 of SEQ ID NO: 1561012
agccaaaucacguguucug

SEQ ID NO: 1640376 - RNA, 19 nt, Artificial Sequence
  Description of Artificial Sequence: Synthetic oligonucleotide
  Antisense strand to SEQ ID NO: 1640375
cagaacacgugauuuggcu

SEQ ID NO: 1640377 - RNA, 19 nt, Artificial Sequence
  Description of Artificial Sequence: Synthetic oligonucleotide
  Sense strand starting at position 844 of SEQ ID NO: 1561012
caaaucacguguucuggaa

SEQ ID NO: 1640378 - RNA, 19 nt, Artificial Sequence
  Description of Artificial Sequence: Synthetic oligonucleotide
  Antisense strand to SEQ ID NO: 1640377
uuccagaacacgugauuug

SEQ ID NO: 1640379 - RNA, 19 nt, Artificial Sequence
  Description of Artificial Sequence: Synthetic oligonucleotide
  Sense strand starting at position 848 of SEQ ID NO: 1561012
ucacguguucuggaauccu

SEQ ID NO: 1640380 - RNA, 19 nt, Artificial Sequence
  Description of Artificial Sequence: Synthetic oligonucleotide
  Antisense strand to SEQ ID NO: 1640379
aggauuccagaacacguga

SEQ ID NO: 1640381 - RNA, 19 nt, Artificial Sequence
  Description of Artificial Sequence: Synthetic oligonucleotide
  Sense strand starting at position 873 of SEQ ID NO: 1561012
gccauauccuagcugugua

SEQ ID NO: 1640382 - RNA, 19 nt, Artificial Sequence
  Description of Artificial Sequence: Synthetic oligonucleotide
  Antisense strand to SEQ ID NO: 1640381
uacacagcuaggauauggc

SEQ ID NO: 1640383 - RNA, 19 nt, Artificial Sequence
  Description of Artificial Sequence: Synthetic oligonucleotide
  Sense strand starting at position 876 of SEQ ID NO: 1561012
auauccuagcuguguaguu

SEQ ID NO: 1640384 - RNA, 19 nt, Artificial Sequence
  Description of Artificial Sequence: Synthetic oligonucleotide
  Antisense strand to SEQ ID NO: 1640383
aacuacacagcuaggauau

SEQ ID NO: 1640385 - RNA, 19 nt, Artificial Sequence
  Description of Artificial Sequence: Synthetic oligonucleotide
  Sense strand starting at position 924 of SEQ ID NO: 1561012
ucggucuccuccucuguaa

SEQ ID NO: 1640386 - RNA, 19 nt, Artificial Sequence
  Description of Artificial Sequence: Synthetic oligonucleotide
  Antisense strand to SEQ ID NO: 1640385
uuacagaggaggagaccga

SEQ ID NO: 1640387 - RNA, 19 nt, Artificial Sequence
  Description of Artificial Sequence: Synthetic oligonucleotide
  Sense strand starting at position 926 of SEQ ID NO: 1561012
ggucuccuccucuguaaag

SEQ ID NO: 1640388 - RNA, 19 nt, Artificial Sequence
  Description of Artificial Sequence: Synthetic oligonucleotide
  Antisense strand to SEQ ID NO: 1640387
cuuuacagaggaggagacc

SEQ ID NO: 1640389 - RNA, 19 nt, Artificial Sequence
  Description of Artificial Sequence: Synthetic oligonucleotide
  Sense strand starting at position 927 of SEQ ID NO: 1561012
gucuccuccucuguaaagu

SEQ ID NO: 1640390 - RNA, 19 nt, Artificial Sequence
  Description of Artificial Sequence: Synthetic oligonucleotide
  Antisense strand to SEQ ID NO: 1640389
acuuuacagaggaggagac

SEQ ID NO: 1640391 - RNA, 19 nt, Artificial Sequence
  Description of Artificial Sequence: Synthetic oligonucleotide
  Sense strand starting at position 928 of SEQ ID NO: 1561012
ucuccuccucuguaaagua

SEQ ID NO: 1640392 - RNA, 19 nt, Artificial Sequence
  Description of Artificial Sequence: Synthetic oligonucleotide
  Antisense strand to SEQ ID NO: 1640391
uacuuuacagaggaggaga

SEQ ID NO: 1640393 - RNA, 19 nt, Artificial Sequence
  Description of Artificial Sequence: Synthetic oligonucleotide
  Sense strand starting at position 961 of SEQ ID NO: 1561012
gcucaucuccggugagaau

SEQ ID NO: 1640394 - RNA, 19 nt, Artificial Sequence
  Description of Artificial Sequence: Synthetic oligonucleotide
  Antisense strand to SEQ ID NO: 1640393
auucucaccggagaugagc

SEQ ID NO: 1640395 - RNA, 19 nt, Artificial Sequence
  Description of Artificial Sequence: Synthetic oligonucleotide
  Sense strand starting at position 962 of SEQ ID NO: 1561012
cucaucuccggugagaauu

SEQ ID NO: 1640396 - RNA, 19 nt, Artificial Sequence
  Description of Artificial Sequence: Synthetic oligonucleotide
  Antisense strand to SEQ ID NO: 1640395
aauucucaccggagaugag

SEQ ID NO: 1640397 - RNA, 19 nt, Artificial Sequence
  Description of Artificial Sequence: Synthetic oligonucleotide
  Sense strand starting at position 972 of SEQ ID NO: 1561012
gugagaauuaggugagugu

SEQ ID NO: 1640398 - RNA, 19 nt, Artificial Sequence
  Description of Artificial Sequence: Synthetic oligonucleotide
  Antisense strand to SEQ ID NO: 1640397
acacucaccuaauucucac

SEQ ID NO: 1640399 - RNA, 19 nt, Artificial Sequence
  Description of Artificial Sequence: Synthetic oligonucleotide
  Sense strand starting at position 1016 of SEQ ID NO: 1561012
agugaaugcuagcuguugu

SEQ ID NO: 1640400 - RNA, 19 nt, Artificial Sequence
  Description of Artificial Sequence: Synthetic oligonucleotide
  Antisense strand to SEQ ID NO: 1640399
acaacagcuagcauucacu

SEQ ID NO: 1640401 - RNA, 19 nt, Artificial Sequence
  Description of Artificial Sequence: Synthetic oligonucleotide
  Sense strand starting at position 1017 of SEQ ID NO: 1561012
gugaaugcuagcuguuguu

SEQ ID NO: 1640402 - RNA, 19 nt, Artificial Sequence
  Description of Artificial Sequence: Synthetic oligonucleotide
  Antisense strand to SEQ ID NO: 1640401
aacaacagcuagcauucac

SEQ ID NO: 1640403 - RNA, 19 nt, Artificial Sequence
  Description of Artificial Sequence: Synthetic oligonucleotide
  Sense strand starting at position 1042 of SEQ ID NO: 1561012
gauuccgacucagcugaau

SEQ ID NO: 1640404 - RNA, 19 nt, Artificial Sequence
  Description of Artificial Sequence: Synthetic oligonucleotide
  Antisense strand to SEQ ID NO: 1640403
auucagcugagucggaauc

SEQ ID NO: 1640405 - RNA, 19 nt, Artificial Sequence
  Description of Artificial Sequence: Synthetic oligonucleotide
  Sense strand starting at position 1057 of SEQ ID NO: 1561012
gaauuagagucacugguuu

SEQ ID NO: 1640406 - RNA, 19 nt, Artificial Sequence
  Description of Artificial Sequence: Synthetic oligonucleotide
  Antisense strand to SEQ ID NO: 1640405
aaaccagugacucuaauuc

SEQ ID NO: 1640407 - RNA, 19 nt, Artificial Sequence
  Description of Artificial Sequence: Synthetic oligonucleotide
  Sense strand starting at position 1081 of SEQ ID NO: 1561012
gagggaugaucccuugucu

SEQ ID NO: 1640408 - RNA, 19 nt, Artificial Sequence
  Description of Artificial Sequence: Synthetic oligonucleotide
  Antisense strand to SEQ ID NO: 1640407
agacaagggaucaucccuc

SEQ ID NO: 1640409 - RNA, 19 nt, Artificial Sequence
  Description of Artificial Sequence: Synthetic oligonucleotide
  Sense strand starting at position 1085 of SEQ ID NO: 1561012
gaugaucccuugucugacu

SEQ ID NO: 1640410 - RNA, 19 nt, Artificial Sequence
  Description of Artificial Sequence: Synthetic oligonucleotide
  Antisense strand to SEQ ID NO: 1640409
agucagacaagggaucauc

SEQ ID NO: 1640411 - RNA, 19 nt, Artificial Sequence
  Description of Artificial Sequence: Synthetic oligonucleotide
  Sense strand starting at position 1317 of SEQ ID NO: 1561012
agggucaucccuuauguaa

SEQ ID NO: 1640412 - RNA, 19 nt, Artificial Sequence
  Description of Artificial Sequence: Synthetic oligonucleotide
  Antisense strand to SEQ ID NO: 1640411
uuacauaagggaugacccu

SEQ ID NO: 1640413 - RNA, 19 nt, Artificial Sequence
  Description of Artificial Sequence: Synthetic oligonucleotide
  Sense strand starting at position 1367 of SEQ ID NO: 1561012
cugucugguagagguugaa

SEQ ID NO: 1640414 - RNA, 19 nt, Artificial Sequence
  Description of Artificial Sequence: Synthetic oligonucleotide
  Antisense strand to SEQ ID NO: 1640413
uucaaccucuaccagacag

SEQ ID NO: 1640415 - RNA, 19 nt, Artificial Sequence
  Description of Artificial Sequence: Synthetic oligonucleotide
  Sense strand starting at position 1845 of SEQ ID NO: 1561012
acagaucucuaggagaaag

SEQ ID NO: 1640416 - RNA, 19 nt, Artificial Sequence
  Description of Artificial Sequence: Synthetic oligonucleotide
  Antisense strand to SEQ ID NO: 1640415
cuuucuccuagagaucugu

SEQ ID NO: 1640417 - RNA, 19 nt, Artificial Sequence
  Description of Artificial Sequence: Synthetic oligonucleotide
  Sense strand starting at position 1857 of SEQ ID NO: 1561012
gagaaaggcuugcagacaa

SEQ ID NO: 1640418 - RNA, 19 nt, Artificial Sequence
  Description of Artificial Sequence: Synthetic oligonucleotide
  Antisense strand to SEQ ID NO: 1640417
uugucugcaagccuuucuc

SEQ ID NO: 1640419 - RNA, 19 nt, Artificial Sequence
  Description of Artificial Sequence: Synthetic oligonucleotide
  Sense strand starting at position 2560 of SEQ ID NO: 1561012
agucgucauccaugcugau

SEQ ID NO: 1640420 - RNA, 19 nt, Artificial Sequence
  Description of Artificial Sequence: Synthetic oligonucleotide
  Antisense strand to SEQ ID NO: 1640419
aucagcauggaugacgacu

SEQ ID NO: 1640421 - RNA, 19 nt, Artificial Sequence
  Description of Artificial Sequence: Synthetic oligonucleotide
  Sense strand starting at position 2913 of SEQ ID NO: 1561012
ugagguggucuuugaguuc

SEQ ID NO: 1640422 - RNA, 19 nt, Artificial Sequence
  Description of Artificial Sequence: Synthetic oligonucleotide
  Antisense strand to SEQ ID NO: 1640421
gaacucaaagaccaccuca

SEQ ID NO: 1640423 - RNA, 19 nt, Artificial Sequence
  Description of Artificial Sequence: Synthetic oligonucleotide
  Sense strand starting at position 3191 of SEQ ID NO: 1561012
ccuccaagauggucaugau

SEQ ID NO: 1640424 - RNA, 19 nt, Artificial Sequence
  Description of Artificial Sequence: Synthetic oligonucleotide
  Antisense strand to SEQ ID NO: 1640423
aucaugaccaucuuggagg

SEQ ID NO: 1640425 - RNA, 19 nt, Artificial Sequence
  Description of Artificial Sequence: Synthetic oligonucleotide
  Sense strand starting at position 3194 of SEQ ID NO: 1561012
ccaagauggucaugaugga

SEQ ID NO: 1640426 - RNA, 19 nt, Artificial Sequence
  Description of Artificial Sequence: Synthetic oligonucleotide
  Antisense strand to SEQ ID NO: 1640425
uccaucaugaccaucuugg

SEQ ID NO: 1640427 - RNA, 19 nt, Artificial Sequence
  Description of Artificial Sequence: Synthetic oligonucleotide
  Sense strand starting at position 3198 of SEQ ID NO: 1561012
gauggucaugauggaguua

SEQ ID NO: 1640428 - RNA, 19 nt, Artificial Sequence
  Description of Artificial Sequence: Synthetic oligonucleotide
  Antisense strand to SEQ ID NO: 1640427
uaacuccaucaugaccauc

SEQ ID NO: 1640429 - RNA, 19 nt, Artificial Sequence
  Description of Artificial Sequence: Synthetic oligonucleotide
  Sense strand starting at position 3211 of SEQ ID NO: 1561012
gaguuagggaugugagcuu

SEQ ID NO: 1640430 - RNA, 19 nt, Artificial Sequence
  Description of Artificial Sequence: Synthetic oligonucleotide
  Antisense strand to SEQ ID NO: 1640429
aagcucacaucccuaacuc

SEQ ID NO: 1640431 - RNA, 19 nt, Artificial Sequence
  Description of Artificial Sequence: Synthetic oligonucleotide
  Sense strand starting at position 3579 of SEQ ID NO: 1561012
gcuggcagcacuugaugaa

SEQ ID NO: 1640432 - RNA, 19 nt, Artificial Sequence
  Description of Artificial Sequence: Synthetic oligonucleotide
  Antisense strand to SEQ ID NO: 1640431
uucaucaagugcugccagc

SEQ ID NO: 1640433 - RNA, 19 nt, Artificial Sequence
  Description of Artificial Sequence: Synthetic oligonucleotide
  Sense strand starting at position 3679 of SEQ ID NO: 1561012
gagccuugacacugggaga

SEQ ID NO: 1640434 - RNA, 19 nt, Artificial Sequence
  Description of Artificial Sequence: Synthetic oligonucleotide
  Antisense strand to SEQ ID NO: 1640433
ucucccagugucaaggcuc

SEQ ID NO: 1640435 - RNA, 19 nt, Artificial Sequence
  Description of Artificial Sequence: Synthetic oligonucleotide
  Sense strand starting at position 3680 of SEQ ID NO: 1561012
agccuugacacugggagaa

SEQ ID NO: 1640436 - RNA, 19 nt, Artificial Sequence
  Description of Artificial Sequence: Synthetic oligonucleotide
  Antisense strand to SEQ ID NO: 1640435
uucucccagugucaaggcu

SEQ ID NO: 1640437 - RNA, 19 nt, Artificial Sequence
  Description of Artificial Sequence: Synthetic oligonucleotide
  Sense strand starting at position 3731 of SEQ ID NO: 1561012
auccaagauuccucuggau

SEQ ID NO: 1640438 - RNA, 19 nt, Artificial Sequence
  Description of Artificial Sequence: Synthetic oligonucleotide
  Antisense strand to SEQ ID NO: 1640437
auccagaggaaucuuggau

SEQ ID NO: 1640439 - RNA, 19 nt, Artificial Sequence
  Description of Artificial Sequence: Synthetic oligonucleotide
  Sense strand starting at position 3733 of SEQ ID NO: 1561012
ccaagauuccucuggaugg

SEQ ID NO: 1640440 - RNA, 19 nt, Artificial Sequence
  Description of Artificial Sequence: Synthetic oligonucleotide
  Antisense strand to SEQ ID NO: 1640439
ccauccagaggaaucuugg

SEQ ID NO: 1640441 - RNA, 19 nt, Artificial Sequence
  Description of Artificial Sequence: Synthetic oligonucleotide
  Sense strand starting at position 3780 of SEQ ID NO: 1561012
aggccuuugucuucccgau

SEQ ID NO: 1640442 - RNA, 19 nt, Artificial Sequence
  Description of Artificial Sequence: Synthetic oligonucleotide
  Antisense strand to SEQ ID NO: 1640441
aucgggaagacaaaggccu

SEQ ID NO: 1640443 - RNA, 19 nt, Artificial Sequence
  Description of Artificial Sequence: Synthetic oligonucleotide
  Sense strand starting at position 3901 of SEQ ID NO: 1561012
gggagcaccucucaugaca

SEQ ID NO: 1640444 - RNA, 19 nt, Artificial Sequence
  Description of Artificial Sequence: Synthetic oligonucleotide
  Antisense strand to SEQ ID NO: 1640443
ugucaugagaggugcuccc

SEQ ID NO: 1640445 - RNA, 19 nt, Artificial Sequence
  Description of Artificial Sequence: Synthetic oligonucleotide
  Sense strand starting at position 6 of SEQ ID NO: 1561013
aaagaaaucgcagggcuau

SEQ ID NO: 1640446 - RNA, 19 nt, Artificial Sequence
  Description of Artificial Sequence: Synthetic oligonucleotide
  Antisense strand to SEQ ID NO: 1640445
auagcccugcgauuucuuu

SEQ ID NO: 1640447 - RNA, 19 nt, Artificial Sequence
  Description of Artificial Sequence: Synthetic oligonucleotide
  Sense strand starting at position 30 of SEQ ID NO: 1561013
gccacauugccauauggca

SEQ ID NO: 1640448 - RNA, 19 nt, Artificial Sequence
  Description of Artificial Sequence: Synthetic oligonucleotide
  Antisense strand to SEQ ID NO: 1640447
ugccauauggcaauguggc

SEQ ID NO: 1640449 - RNA, 19 nt, Artificial Sequence
  Description of Artificial Sequence: Synthetic oligonucleotide
  Sense strand starting at position 90 of SEQ ID NO: 1561013
cuaccugggcucuaaacau

SEQ ID NO: 1640450 - RNA, 19 nt, Artificial Sequence
  Description of Artificial Sequence: Synthetic oligonucleotide
  Antisense strand to SEQ ID NO: 1640449
auguuuagagcccagguag

SEQ ID NO: 1640451 - RNA, 19 nt, Artificial Sequence
  Description of Artificial Sequence: Synthetic oligonucleotide
  Sense strand starting at position 326 of SEQ ID NO: 1561013
ggagguguuccaggaagga

SEQ ID NO: 1640452 - RNA, 19 nt, Artificial Sequence
  Description of Artificial Sequence: Synthetic oligonucleotide
  Antisense strand to SEQ ID NO: 1640451
uccuuccuggaacaccucc

SEQ ID NO: 1640453 - RNA, 19 nt, Artificial Sequence
  Description of Artificial Sequence: Synthetic oligonucleotide
  Sense strand starting at position 392 of SEQ ID NO: 1561013
gagggaguuccugggcaau

SEQ ID NO: 1640454 - RNA, 19 nt, Artificial Sequence
  Description of Artificial Sequence: Synthetic oligonucleotide
  Antisense strand to SEQ ID NO: 1640453
auugcccaggaacucccuc

SEQ ID NO: 1640455 - RNA, 19 nt, Artificial Sequence
  Description of Artificial Sequence: Synthetic oligonucleotide
  Sense strand starting at position 411 of SEQ ID NO: 1561013
gggcaaaguacgcgagaaa

SEQ ID NO: 1640456 - RNA, 19 nt, Artificial Sequence
  Description of Artificial Sequence: Synthetic oligonucleotide
  Antisense strand to SEQ ID NO: 1640455
uuucucgcguacuuugccc

SEQ ID NO: 1640457 - RNA, 19 nt, Artificial Sequence
  Description of Artificial Sequence: Synthetic oligonucleotide
  Sense strand starting at position 565 of SEQ ID NO: 1561013
ggucuuggauauucaggua

SEQ ID NO: 1640458 - RNA, 19 nt, Artificial Sequence
  Description of Artificial Sequence: Synthetic oligonucleotide
  Antisense strand to SEQ ID NO: 1640457
uaccugaauauccaagacc

SEQ ID NO: 1640459 - RNA, 19 nt, Artificial Sequence
  Description of Artificial Sequence: Synthetic oligonucleotide
  Sense strand starting at position 668 of SEQ ID NO: 1561013
cuuccuuuggaaugcaaau

SEQ ID NO: 1640460 - RNA, 19 nt, Artificial Sequence
  Description of Artificial Sequence: Synthetic oligonucleotide
  Antisense strand to SEQ ID NO: 1640459
auuugcauuccaaaggaag

SEQ ID NO: 1640461 - RNA, 19 nt, Artificial Sequence
  Description of Artificial Sequence: Synthetic oligonucleotide
  Sense strand starting at position 1116 of SEQ ID NO: 1561013
agcucugcgagguauauuu

SEQ ID NO: 1640462 - RNA, 19 nt, Artificial Sequence
  Description of Artificial Sequence: Synthetic oligonucleotide
  Antisense strand to SEQ ID NO: 1640461
aaauauaccucgcagagcu

SEQ ID NO: 1640463 - RNA, 19 nt, Artificial Sequence
  Description of Artificial Sequence: Synthetic oligonucleotide
  Sense strand starting at position 1779 of SEQ ID NO: 1561013
agaaccauguccucuaugu

SEQ ID NO: 1640464 - RNA, 19 nt, Artificial Sequence
  Description of Artificial Sequence: Synthetic oligonucleotide
  Antisense strand to SEQ ID NO: 1640463
acauagaggacaugguucu

SEQ ID NO: 1640465 - RNA, 19 nt, Artificial Sequence
  Description of Artificial Sequence: Synthetic oligonucleotide
  Sense strand starting at position 2393 of SEQ ID NO: 1561013
gcuuaagcucuguaucuau

SEQ ID NO: 1640466 - RNA, 19 nt, Artificial Sequence
  Description of Artificial Sequence: Synthetic oligonucleotide
  Antisense strand to SEQ ID NO: 1640465
auagauacagagcuuaagc

SEQ ID NO: 1640467 - RNA, 19 nt, Artificial Sequence
  Description of Artificial Sequence: Synthetic oligonucleotide
  Sense strand starting at position 2558 of SEQ ID NO: 1561013
guuguaugagguuauguuu

SEQ ID NO: 1640468 - RNA, 19 nt, Artificial Sequence
  Description of Artificial Sequence: Synthetic oligonucleotide
  Antisense strand to SEQ ID NO: 1640467
aaacauaaccucauacaac

SEQ ID NO: 1640469 - RNA, 19 nt, Artificial Sequence
  Description of Artificial Sequence: Synthetic oligonucleotide
  Sense strand starting at position 2561 of SEQ ID NO: 1561013
guaugagguuauguuuaug

SEQ ID NO: 1640470 - RNA, 19 nt, Artificial Sequence
  Description of Artificial Sequence: Synthetic oligonucleotide
  Antisense strand to SEQ ID NO: 1640469
cauaaacauaaccucauac

SEQ ID NO: 1640471 - RNA, 19 nt, Artificial Sequence
  Description of Artificial Sequence: Synthetic oligonucleotide
  Sense strand starting at position 2564 of SEQ ID NO: 1561013
ugagguuauguuuaugugu

SEQ ID NO: 1640472 - RNA, 19 nt, Artificial Sequence
  Description of Artificial Sequence: Synthetic oligonucleotide
  Antisense strand to SEQ ID NO: 1640471
acacauaaacauaaccuca

SEQ ID NO: 1640473 - RNA, 19 nt, Artificial Sequence
  Description of Artificial Sequence: Synthetic oligonucleotide
  Sense strand starting at position 2660 of SEQ ID NO: 1561013
ggaggauugugugucccaa

SEQ ID NO: 1640474 - RNA, 19 nt, Artificial Sequence
  Description of Artificial Sequence: Synthetic oligonucleotide
  Antisense strand to SEQ ID NO: 1640473
uugggacacacaauccucc

SEQ ID NO: 1640475 - RNA, 19 nt, Artificial Sequence
  Description of Artificial Sequence: Synthetic oligonucleotide
  Sense strand starting at position 2765 of SEQ ID NO: 1561013
guuggaagucaguggauaa

SEQ ID NO: 1640476 - RNA, 19 nt, Artificial Sequence
  Description of Artificial Sequence: Synthetic oligonucleotide
  Antisense strand to SEQ ID NO: 1640475
uuauccacugacuuccaac

SEQ ID NO: 1640477 - RNA, 19 nt, Artificial Sequence
  Description of Artificial Sequence: Synthetic oligonucleotide
  Sense strand starting at position 2821 of SEQ ID NO: 1561013
agaaaugucaugugcugag

SEQ ID NO: 1640478 - RNA, 19 nt, Artificial Sequence
  Description of Artificial Sequence: Synthetic oligonucleotide
  Antisense strand to SEQ ID NO: 1640477
cucagcacaugacauuucu

SEQ ID NO: 1640479 - RNA, 19 nt, Artificial Sequence
  Description of Artificial Sequence: Synthetic oligonucleotide
  Sense strand starting at position 2874 of SEQ ID NO: 1561013
ucugaaguuucugugaaug

SEQ ID NO: 1640480 - RNA, 19 nt, Artificial Sequence
  Description of Artificial Sequence: Synthetic oligonucleotide
  Antisense strand to SEQ ID NO: 1640479
cauucacagaaacuucaga

SEQ ID NO: 1640481 - RNA, 19 nt, Artificial Sequence
  Description of Artificial Sequence: Synthetic oligonucleotide
  Sense strand starting at position 2880 of SEQ ID NO: 1561013
guuucugugaauguguguu

SEQ ID NO: 1640482 - RNA, 19 nt, Artificial Sequence
  Description of Artificial Sequence: Synthetic oligonucleotide
  Antisense strand to SEQ ID NO: 1640481
aacacacauucacagaaac

SEQ ID NO: 1640483 - RNA, 19 nt, Artificial Sequence
  Description of Artificial Sequence: Synthetic oligonucleotide
  Sense strand starting at position 2978 of SEQ ID NO: 1561013
ugcaguagugaacaagaca

SEQ ID NO: 1640484 - RNA, 19 nt, Artificial Sequence
  Description of Artificial Sequence: Synthetic oligonucleotide
  Antisense strand to SEQ ID NO: 1640483
ugucuuguucacuacugca

SEQ ID NO: 1640485 - RNA, 19 nt, Artificial Sequence
  Description of Artificial Sequence: Synthetic oligonucleotide
  Sense strand starting at position 3232 of SEQ ID NO: 1561013
gugaaucaagauuguucca

SEQ ID NO: 1640486 - RNA, 19 nt, Artificial Sequence
  Description of Artificial Sequence: Synthetic oligonucleotide
  Antisense strand to SEQ ID NO: 1640485
uggaacaaucuugauucac

SEQ ID NO: 1640487 - RNA, 19 nt, Artificial Sequence
  Description of Artificial Sequence: Synthetic oligonucleotide
  Sense strand starting at position 3418 of SEQ ID NO: 1561013
auguguuguguugggagaa

SEQ ID NO: 1640488 - RNA, 19 nt, Artificial Sequence
  Description of Artificial Sequence: Synthetic oligonucleotide
  Antisense strand to SEQ ID NO: 1640487
uucucccaacacaacacau

SEQ ID NO: 1640489 - RNA, 19 nt, Artificial Sequence
  Description of Artificial Sequence: Synthetic oligonucleotide
  Sense strand starting at position 3455 of SEQ ID NO: 1561013
ugauaauuugugugcaacu

SEQ ID NO: 1640490 - RNA, 19 nt, Artificial Sequence
  Description of Artificial Sequence: Synthetic oligonucleotide
  Antisense strand to SEQ ID NO: 1640489
aguugcacacaaauuauca

SEQ ID NO: 1640491 - RNA, 19 nt, Artificial Sequence
  Description of Artificial Sequence: Synthetic oligonucleotide
  Sense strand starting at position 3514 of SEQ ID NO: 1561013
uugguuaaguguuuauaug

SEQ ID NO: 1640492 - RNA, 19 nt, Artificial Sequence
  Description of Artificial Sequence: Synthetic oligonucleotide
  Antisense strand to SEQ ID NO: 1640491
cauauaaacacuuaaccaa

SEQ ID NO: 1640493 - RNA, 19 nt, Artificial Sequence
  Description of Artificial Sequence: Synthetic oligonucleotide
  Sense strand starting at position 3553 of SEQ ID NO: 1561013
auuggaugacuguguguau

SEQ ID NO: 1640494 - RNA, 19 nt, Artificial Sequence
  Description of Artificial Sequence: Synthetic oligonucleotide
  Antisense strand to SEQ ID NO: 1640493
auacacacagucauccaau

SEQ ID NO: 1640495 - RNA, 19 nt, Artificial Sequence
  Description of Artificial Sequence: Synthetic oligonucleotide
  Sense strand starting at position 3655 of SEQ ID NO: 1561013
gcauuugcugaguaugugu

SEQ ID NO: 1640496 - RNA, 19 nt, Artificial Sequence
  Description of Artificial Sequence: Synthetic oligonucleotide
  Antisense strand to SEQ ID NO: 1640495
acacauacucagcaaaugc

SEQ ID NO: 1640497 - RNA, 19 nt, Artificial Sequence
  Description of Artificial Sequence: Synthetic oligonucleotide
  Sense strand starting at position 3680 of SEQ ID NO: 1561013
guguguuaauuugcagaau

SEQ ID NO: 1640498 - RNA, 19 nt, Artificial Sequence
  Description of Artificial Sequence: Synthetic oligonucleotide
  Antisense strand to SEQ ID NO: 1640497
auucugcaaauuaacacac

SEQ ID NO: 1640499 - RNA, 19 nt, Artificial Sequence
  Description of Artificial Sequence: Synthetic oligonucleotide
  Sense strand starting at position 3709 of SEQ ID NO: 1561013
guguuuguggaguauaugu

SEQ ID NO: 1640500 - RNA, 19 nt, Artificial Sequence
  Description of Artificial Sequence: Synthetic oligonucleotide
  Antisense strand to SEQ ID NO: 1640499
acauauacuccacaaacac

SEQ ID NO: 1640501 - RNA, 19 nt, Artificial Sequence
  Description of Artificial Sequence: Synthetic oligonucleotide
  Sense strand starting at position 3711 of SEQ ID NO: 1561013
guuuguggaguauauguuu

SEQ ID NO: 1640502 - RNA, 19 nt, Artificial Sequence
  Description of Artificial Sequence: Synthetic oligonucleotide
  Antisense strand to SEQ ID NO: 1640501
aaacauauacuccacaaac

SEQ ID NO: 1640503 - RNA, 19 nt, Artificial Sequence
  Description of Artificial Sequence: Synthetic oligonucleotide
  Sense strand starting at position 3716 of SEQ ID NO: 1561013
uggaguauauguuugcaga

SEQ ID NO: 1640504 - RNA, 19 nt, Artificial Sequence
  Description of Artificial Sequence: Synthetic oligonucleotide
  Antisense strand to SEQ ID NO: 1640503
ucugcaaacauauacucca

SEQ ID NO: 1640505 - RNA, 19 nt, Artificial Sequence
  Description of Artificial Sequence: Synthetic oligonucleotide
  Sense strand starting at position 3717 of SEQ ID NO: 1561013
ggaguauauguuugcagag

SEQ ID NO: 1640506 - RNA, 19 nt, Artificial Sequence
  Description of Artificial Sequence: Synthetic oligonucleotide
  Antisense strand to SEQ ID NO: 1640505
cucugcaaacauauacucc

SEQ ID NO: 1640507 - RNA, 19 nt, Artificial Sequence
  Description of Artificial Sequence: Synthetic oligonucleotide
  Sense strand starting at position 3718 of SEQ ID NO: 1561013
gaguauauguuugcagagu

SEQ ID NO: 1640508 - RNA, 19 nt, Artificial Sequence
  Description of Artificial Sequence: Synthetic oligonucleotide
  Antisense strand to SEQ ID NO: 1640507
acucugcaaacauauacuc

SEQ ID NO: 1640509 - RNA, 19 nt, Artificial Sequence
  Description of Artificial Sequence: Synthetic oligonucleotide
  Sense strand starting at position 3729 of SEQ ID NO: 1561013
ugcagaguauguucgaaua

SEQ ID NO: 1640510 - RNA, 19 nt, Artificial Sequence
  Description of Artificial Sequence: Synthetic oligonucleotide
  Antisense strand to SEQ ID NO: 1640509
uauucgaacauacucugca

SEQ ID NO: 1640511 - RNA, 19 nt, Artificial Sequence
  Description of Artificial Sequence: Synthetic oligonucleotide
  Sense strand starting at position 3743 of SEQ ID NO: 1561013
gaauaaauguuuguguguc

SEQ ID NO: 1640512 - RNA, 19 nt, Artificial Sequence
  Description of Artificial Sequence: Synthetic oligonucleotide
  Antisense strand to SEQ ID NO: 1640511
gacacacaaacauuuauuc

SEQ ID NO: 1640513 - RNA, 19 nt, Artificial Sequence
  Description of Artificial Sequence: Synthetic oligonucleotide
  Sense strand starting at position 3763 of SEQ ID NO: 1561013
guguuuacugaauauguga

SEQ ID NO: 1640514 - RNA, 19 nt, Artificial Sequence
  Description of Artificial Sequence: Synthetic oligonucleotide
  Antisense strand to SEQ ID NO: 1640513
ucacauauucaguaaacac

SEQ ID NO: 1640515 - RNA, 19 nt, Artificial Sequence
  Description of Artificial Sequence: Synthetic oligonucleotide
  Sense strand starting at position 3771 of SEQ ID NO: 1561013
ugaauaugugacugugagu

SEQ ID NO: 1640516 - RNA, 19 nt, Artificial Sequence
  Description of Artificial Sequence: Synthetic oligonucleotide
  Antisense strand to SEQ ID NO: 1640515
acucacagucacauauuca

SEQ ID NO: 1640517 - RNA, 19 nt, Artificial Sequence
  Description of Artificial Sequence: Synthetic oligonucleotide
  Sense strand starting at position 3800 of SEQ ID NO: 1561013
cucucaucucagggcaaga

SEQ ID NO: 1640518 - RNA, 19 nt, Artificial Sequence
  Description of Artificial Sequence: Synthetic oligonucleotide
  Antisense strand to SEQ ID NO: 1640517
ucuugcccugagaugagag

SEQ ID NO: 1640519 - RNA, 19 nt, Artificial Sequence
  Description of Artificial Sequence: Synthetic oligonucleotide
  Sense strand starting at position 3886 of SEQ ID NO: 1561013
agguacucaauauguggua

SEQ ID NO: 1640520 - RNA, 19 nt, Artificial Sequence
  Description of Artificial Sequence: Synthetic oligonucleotide
  Antisense strand to SEQ ID NO: 1640519
uaccacauauugaguaccu

SEQ ID NO: 1640521 - RNA, 19 nt, Artificial Sequence
  Description of Artificial Sequence: Synthetic oligonucleotide
  Sense strand starting at position 3887 of SEQ ID NO: 1561013
gguacucaauaugugguaa

SEQ ID NO: 1640522 - RNA, 19 nt, Artificial Sequence
  Description of Artificial Sequence: Synthetic oligonucleotide
  Antisense strand to SEQ ID NO: 1640521
uuaccacauauugaguacc

SEQ ID NO: 1640523 - RNA, 19 nt, Artificial Sequence
  Description of Artificial Sequence: Synthetic oligonucleotide
  Sense strand starting at position 3895 of SEQ ID NO: 1561013
auaugugguaagugaacaa

SEQ ID NO: 1640524 - RNA, 19 nt, Artificial Sequence
  Description of Artificial Sequence: Synthetic oligonucleotide
  Antisense strand to SEQ ID NO: 1640523
uuguucacuuaccacauau

SEQ ID NO: 1640525 - RNA, 19 nt, Artificial Sequence
  Description of Artificial Sequence: Synthetic oligonucleotide
  Sense strand starting at position 53 of SEQ ID NO: 1561014
gggaguucuugauuggaca

SEQ ID NO: 1640526 - RNA, 19 nt, Artificial Sequence
  Description of Artificial Sequence: Synthetic oligonucleotide
  Antisense strand to SEQ ID NO: 1640525
uguccaaucaagaacuccc

SEQ ID NO: 1640527 - RNA, 19 nt, Artificial Sequence
  Description of Artificial Sequence: Synthetic oligonucleotide
  Sense strand starting at position 54 of SEQ ID NO: 1561014
ggaguucuugauuggacag

SEQ ID NO: 1640528 - RNA, 19 nt, Artificial Sequence
  Description of Artificial Sequence: Synthetic oligonucleotide
  Antisense strand to SEQ ID NO: 1640527
cuguccaaucaagaacucc

SEQ ID NO: 1640529 - RNA, 19 nt, Artificial Sequence
  Description of Artificial Sequence: Synthetic oligonucleotide
  Sense strand starting at position 99 of SEQ ID NO: 1561014
cugggaaugugucucacca

SEQ ID NO: 1640530 - RNA, 19 nt, Artificial Sequence
  Description of Artificial Sequence: Synthetic oligonucleotide
  Antisense strand to SEQ ID NO: 1640529
uggugagacacauucccag

SEQ ID NO: 1640531 - RNA, 19 nt, Artificial Sequence
  Description of Artificial Sequence: Synthetic oligonucleotide
  Sense strand starting at position 147 of SEQ ID NO: 1561014
gaauguaucucagggagaa

SEQ ID NO: 1640532 - RNA, 19 nt, Artificial Sequence
  Description of Artificial Sequence: Synthetic oligonucleotide
  Antisense strand to SEQ ID NO: 1640531
uucucccugagauacauuc

SEQ ID NO: 1640533 - RNA, 19 nt, Artificial Sequence
  Description of Artificial Sequence: Synthetic oligonucleotide
  Sense strand starting at position 179 of SEQ ID NO: 1561014
guguuucuugacugagggu

SEQ ID NO: 1640534 - RNA, 19 nt, Artificial Sequence
  Description of Artificial Sequence: Synthetic oligonucleotide
  Antisense strand to SEQ ID NO: 1640533
acccucagucaagaaacac

SEQ ID NO: 1640535 - RNA, 19 nt, Artificial Sequence
  Description of Artificial Sequence: Synthetic oligonucleotide
  Sense strand starting at position 180 of SEQ ID NO: 1561014
uguuucuugacugaggguu

SEQ ID NO: 1640536 - RNA, 19 nt, Artificial Sequence
  Description of Artificial Sequence: Synthetic oligonucleotide
  Antisense strand to SEQ ID NO: 1640535
aacccucagucaagaaaca

SEQ ID NO: 1640537 - RNA, 19 nt, Artificial Sequence
  Description of Artificial Sequence: Synthetic oligonucleotide
  Sense strand starting at position 922 of SEQ ID NO: 1561014
aaguuauugcccuagggcu

SEQ ID NO: 1640538 - RNA, 19 nt, Artificial Sequence
  Description of Artificial Sequence: Synthetic oligonucleotide
  Antisense strand to SEQ ID NO: 1640537
agcccuagggcaauaacuu

SEQ ID NO: 1640539 - RNA, 19 nt, Artificial Sequence
  Description of Artificial Sequence: Synthetic oligonucleotide
  Sense strand starting at position 977 of SEQ ID NO: 1561014
aaacauguuugugcggcaa

SEQ ID NO: 1640540 - RNA, 19 nt, Artificial Sequence
  Description of Artificial Sequence: Synthetic oligonucleotide
  Antisense strand to SEQ ID NO: 1640539
uugccgcacaaacauguuu

SEQ ID NO: 1640541 - RNA, 19 nt, Artificial Sequence
  Description of Artificial Sequence: Synthetic oligonucleotide
  Sense strand starting at position 1371 of SEQ ID NO: 1561014
gggauucuguagccgagaa

SEQ ID NO: 1640542 - RNA, 19 nt, Artificial Sequence
  Description of Artificial Sequence: Synthetic oligonucleotide
  Antisense strand to SEQ ID NO: 1640541
uucucggcuacagaauccc

SEQ ID NO: 1640543 - RNA, 19 nt, Artificial Sequence
  Description of Artificial Sequence: Synthetic oligonucleotide
  Sense strand starting at position 1432 of SEQ ID NO: 1561014
acggaaguucaggguuaau

SEQ ID NO: 1640544 - RNA, 19 nt, Artificial Sequence
  Description of Artificial Sequence: Synthetic oligonucleotide
  Antisense strand to SEQ ID NO: 1640543
auuaacccugaacuuccgu

SEQ ID NO: 1640545 - RNA, 19 nt, Artificial Sequence
  Description of Artificial Sequence: Synthetic oligonucleotide
  Sense strand starting at position 1559 of SEQ ID NO: 1561014
cuugguaaucuggaguuua

SEQ ID NO: 1640546 - RNA, 19 nt, Artificial Sequence
  Description of Artificial Sequence: Synthetic oligonucleotide
  Antisense strand to SEQ ID NO: 1640545
uaaacuccagauuaccaag

SEQ ID NO: 1640547 - RNA, 19 nt, Artificial Sequence
  Description of Artificial Sequence: Synthetic oligonucleotide
  Sense strand starting at position 1689 of SEQ ID NO: 1561014
caucauucccgagguugaa

SEQ ID NO: 1640548 - RNA, 19 nt, Artificial Sequence
  Description of Artificial Sequence: Synthetic oligonucleotide
  Antisense strand to SEQ ID NO: 1640547
uucaaccucgggaaugaug

SEQ ID NO: 1640549 - RNA, 19 nt, Artificial Sequence
  Description of Artificial Sequence: Synthetic oligonucleotide
  Sense strand starting at position 1720 of SEQ ID NO: 1561014
cugauuggucagugcagca

SEQ ID NO: 1640550 - RNA, 19 nt, Artificial Sequence
  Description of Artificial Sequence: Synthetic oligonucleotide
  Antisense strand to SEQ ID NO: 1640549
ugcugcacugaccaaucag

SEQ ID NO: 1640551 - RNA, 19 nt, Artificial Sequence
  Description of Artificial Sequence: Synthetic oligonucleotide
  Sense strand starting at position 2179 of SEQ ID NO: 1561014
cggcgaucccugucggagu

SEQ ID NO: 1640552 - RNA, 19 nt, Artificial Sequence
  Description of Artificial Sequence: Synthetic oligonucleotide
  Antisense strand to SEQ ID NO: 1640551
acuccgacagggaucgccg

SEQ ID NO: 1640553 - RNA, 19 nt, Artificial Sequence
  Description of Artificial Sequence: Synthetic oligonucleotide
  Sense strand starting at position 2212 of SEQ ID NO: 1561014
uucccuucuggcgggauua

SEQ ID NO: 1640554 - RNA, 19 nt, Artificial Sequence
  Description of Artificial Sequence: Synthetic oligonucleotide
  Antisense strand to SEQ ID NO: 1640553
uaaucccgccagaagggaa

SEQ ID NO: 1640555 - RNA, 19 nt, Artificial Sequence
  Description of Artificial Sequence: Synthetic oligonucleotide
  Sense strand starting at position 2213 of SEQ ID NO: 1561014
ucccuucuggcgggauuaa

SEQ ID NO: 1640556 - RNA, 19 nt, Artificial Sequence
  Description of Artificial Sequence: Synthetic oligonucleotide
  Antisense strand to SEQ ID NO: 1640555
uuaaucccgccagaaggga

SEQ ID NO: 1640557 - RNA, 19 nt, Artificial Sequence
  Description of Artificial Sequence: Synthetic oligonucleotide
  Sense strand starting at position 2631 of SEQ ID NO: 1561014
ugggaucuuauauguagac

SEQ ID NO: 1640558 - RNA, 19 nt, Artificial Sequence
  Description of Artificial Sequence: Synthetic oligonucleotide
  Antisense strand to SEQ ID NO: 1640557
gucuacauauaagauccca

SEQ ID NO: 1640559 - RNA, 19 nt, Artificial Sequence
  Description of Artificial Sequence: Synthetic oligonucleotide
  Sense strand starting at position 2632 of SEQ ID NO: 1561014
gggaucuuauauguagaca

SEQ ID NO: 1640560 - RNA, 19 nt, Artificial Sequence
  Description of Artificial Sequence: Synthetic oligonucleotide
  Antisense strand to SEQ ID NO: 1640559
ugucuacauauaagauccc

SEQ ID NO: 1640561 - RNA, 19 nt, Artificial Sequence
  Description of Artificial Sequence: Synthetic oligonucleotide
  Sense strand starting at position 2648 of SEQ ID NO: 1561014
acagcauccugaguucgaa

SEQ ID NO: 1640562 - RNA, 19 nt, Artificial Sequence
  Description of Artificial Sequence: Synthetic oligonucleotide
  Antisense strand to SEQ ID NO: 1640561
uucgaacucaggaugcugu

SEQ ID NO: 1640563 - RNA, 19 nt, Artificial Sequence
  Description of Artificial Sequence: Synthetic oligonucleotide
  Sense strand starting at position 2687 of SEQ ID NO: 1561014
cuauuaauccugugcggga

SEQ ID NO: 1640564 - RNA, 19 nt, Artificial Sequence
  Description of Artificial Sequence: Synthetic oligonucleotide
  Antisense strand to SEQ ID NO: 1640563
ucccgcacaggauuaauag

SEQ ID NO: 1640565 - RNA, 19 nt, Artificial Sequence
  Description of Artificial Sequence: Synthetic oligonucleotide
  Sense strand starting at position 2809 of SEQ ID NO: 1561014
cuuucuucgucccuagaau

SEQ ID NO: 1640566 - RNA, 19 nt, Artificial Sequence
  Description of Artificial Sequence: Synthetic oligonucleotide
  Antisense strand to SEQ ID NO: 1640565
auucuagggacgaagaaag

SEQ ID NO: 1640567 - RNA, 19 nt, Artificial Sequence
  Description of Artificial Sequence: Synthetic oligonucleotide
  Sense strand starting at position 2810 of SEQ ID NO: 1561014
uuucuucgucccuagaaug

SEQ ID NO: 1640568 - RNA, 19 nt, Artificial Sequence
  Description of Artificial Sequence: Synthetic oligonucleotide
  Antisense strand to SEQ ID NO: 1640567
cauucuagggacgaagaaa

SEQ ID NO: 1640569 - RNA, 19 nt, Artificial Sequence
  Description of Artificial Sequence: Synthetic oligonucleotide
  Sense strand starting at position 2937 of SEQ ID NO: 1561014
ugggcucuguggccagaaa

SEQ ID NO: 1640570 - RNA, 19 nt, Artificial Sequence
  Description of Artificial Sequence: Synthetic oligonucleotide
  Antisense strand to SEQ ID NO: 1640569
uuucuggccacagagccca

SEQ ID NO: 1640571 - RNA, 19 nt, Artificial Sequence
  Description of Artificial Sequence: Synthetic oligonucleotide
  Sense strand starting at position 2964 of SEQ ID NO: 1561014
cuugauuucgcuugggcca

SEQ ID NO: 1640572 - RNA, 19 nt, Artificial Sequence
  Description of Artificial Sequence: Synthetic oligonucleotide
  Antisense strand to SEQ ID NO: 1640571
uggcccaagcgaaaucaag

SEQ ID NO: 1640573 - RNA, 19 nt, Artificial Sequence
  Description of Artificial Sequence: Synthetic oligonucleotide
  Sense strand starting at position 3111 of SEQ ID NO: 1561014
uauguuuguccguuguaca

SEQ ID NO: 1640574 - RNA, 19 nt, Artificial Sequence
  Description of Artificial Sequence: Synthetic oligonucleotide
  Antisense strand to SEQ ID NO: 1640573
uguacaacggacaaacaua

SEQ ID NO: 1640575 - RNA, 19 nt, Artificial Sequence
  Description of Artificial Sequence: Synthetic oligonucleotide
  Sense strand starting at position 3188 of SEQ ID NO: 1561014
acgccuguucuccagacuu

SEQ ID NO: 1640576 - RNA, 19 nt, Artificial Sequence
  Description of Artificial Sequence: Synthetic oligonucleotide
  Antisense strand to SEQ ID NO: 1640575
aagucuggagaacaggcgu

SEQ ID NO: 1640577 - RNA, 19 nt, Artificial Sequence
  Description of Artificial Sequence: Synthetic oligonucleotide
  Sense strand starting at position 3190 of SEQ ID NO: 1561014
gccuguucuccagacuuag

SEQ ID NO: 1640578 - RNA, 19 nt, Artificial Sequence
  Description of Artificial Sequence: Synthetic oligonucleotide
  Antisense strand to SEQ ID NO: 1640577
cuaagucuggagaacaggc

SEQ ID NO: 1640579 - RNA, 19 nt, Artificial Sequence
  Description of Artificial Sequence: Synthetic oligonucleotide
  Sense strand starting at position 3295 of SEQ ID NO: 1561014
ggacuauuggaaggucauu

SEQ ID NO: 1640580 - RNA, 19 nt, Artificial Sequence
  Description of Artificial Sequence: Synthetic oligonucleotide
  Antisense strand to SEQ ID NO: 1640579
aaugaccuuccaauagucc

SEQ ID NO: 1640581 - RNA, 19 nt, Artificial Sequence
  Description of Artificial Sequence: Synthetic oligonucleotide
  Sense strand starting at position 3308 of SEQ ID NO: 1561014
gucauuugccaaggucaua

SEQ ID NO: 1640582 - RNA, 19 nt, Artificial Sequence
  Description of Artificial Sequence: Synthetic oligonucleotide
  Antisense strand to SEQ ID NO: 1640581
uaugaccuuggcaaaugac

SEQ ID NO: 1640583 - RNA, 19 nt, Artificial Sequence
  Description of Artificial Sequence: Synthetic oligonucleotide
  Sense strand starting at position 3375 of SEQ ID NO: 1561014
uagaaaugucuaggacauc

SEQ ID NO: 1640584 - RNA, 19 nt, Artificial Sequence
  Description of Artificial Sequence: Synthetic oligonucleotide
  Antisense strand to SEQ ID NO: 1640583
gauguccuagacauuucua

SEQ ID NO: 1640585 - RNA, 19 nt, Artificial Sequence
  Description of Artificial Sequence: Synthetic oligonucleotide
  Sense strand starting at position 3596 of SEQ ID NO: 1561014
uuccuaagagcuugacaaa

SEQ ID NO: 1640586 - RNA, 19 nt, Artificial Sequence
  Description of Artificial Sequence: Synthetic oligonucleotide
  Antisense strand to SEQ ID NO: 1640585
uuugucaagcucuuaggaa

SEQ ID NO: 1640587 - RNA, 19 nt, Artificial Sequence
  Description of Artificial Sequence: Synthetic oligonucleotide
  Sense strand starting at position 3697 of SEQ ID NO: 1561014
gcggccaucaccugaauuu

SEQ ID NO: 1640588 - RNA, 19 nt, Artificial Sequence
  Description of Artificial Sequence: Synthetic oligonucleotide
  Antisense strand to SEQ ID NO: 1640587
aaauucaggugauggccgc

SEQ ID NO: 1640589 - RNA, 19 nt, Artificial Sequence
  Description of Artificial Sequence: Synthetic oligonucleotide
  Sense strand starting at position 3778 of SEQ ID NO: 1561014
ggugucuuacuccagcagu

SEQ ID NO: 1640590 - RNA, 19 nt, Artificial Sequence
  Description of Artificial Sequence: Synthetic oligonucleotide
  Antisense strand to SEQ ID NO: 1640589
acugcuggaguaagacacc

SEQ ID NO: 1640591 - RNA, 19 nt, Artificial Sequence
  Description of Artificial Sequence: Synthetic oligonucleotide
  Sense strand starting at position 3789 of SEQ ID NO: 1561014
ccagcaguggugcaaucau

SEQ ID NO: 1640592 - RNA, 19 nt, Artificial Sequence
  Description of Artificial Sequence: Synthetic oligonucleotide
  Antisense strand to SEQ ID NO: 1640591
augauugcaccacugcugg

SEQ ID NO: 1640593 - RNA, 19 nt, Artificial Sequence
  Description of Artificial Sequence: Synthetic oligonucleotide
  Sense strand starting at position 3875 of SEQ ID NO: 1561014
uuaaaucucaguugugagu

SEQ ID NO: 1640594 - RNA, 19 nt, Artificial Sequence
  Description of Artificial Sequence: Synthetic oligonucleotide
  Antisense strand to SEQ ID NO: 1640593
acucacaacugagauuuaa

SEQ ID NO: 1640595 - RNA, 19 nt, Artificial Sequence
  Description of Artificial Sequence: Synthetic oligonucleotide
  Sense strand starting at position 3882 of SEQ ID NO: 1561014
ucaguugugagucacucua

SEQ ID NO: 1640596 - RNA, 19 nt, Artificial Sequence
  Description of Artificial Sequence: Synthetic oligonucleotide
  Antisense strand to SEQ ID NO: 1640595
uagagugacucacaacuga

SEQ ID NO: 1640597 - RNA, 19 nt, Artificial Sequence
  Description of Artificial Sequence: Synthetic oligonucleotide
  Sense strand starting at position 3884 of SEQ ID NO: 1561014
aguugugagucacucuacu

SEQ ID NO: 1640598 - RNA, 19 nt, Artificial Sequence
  Description of Artificial Sequence: Synthetic oligonucleotide
  Antisense strand to SEQ ID NO: 1640597
aguagagugacucacaacu

SEQ ID NO: 1640599 - RNA, 19 nt, Artificial Sequence
  Description of Artificial Sequence: Synthetic oligonucleotide
  Sense strand starting at position 3949 of SEQ ID NO: 1561014
gucagauagaucugcugag

SEQ ID NO: 1640600 - RNA, 19 nt, Artificial Sequence
  Description of Artificial Sequence: Synthetic oligonucleotide
  Antisense strand to SEQ ID NO: 1640599
cucagcagaucuaucugac

SEQ ID NO: 1640601 - RNA, 19 nt, Artificial Sequence
  Description of Artificial Sequence: Synthetic oligonucleotide
  Sense strand starting at position 3953 of SEQ ID NO: 1561014
gauagaucugcugaggugu

SEQ ID NO: 1640602 - RNA, 19 nt, Artificial Sequence
  Description of Artificial Sequence: Synthetic oligonucleotide
  Antisense strand to SEQ ID NO: 1640601
acaccucagcagaucuauc

SEQ ID NO: 1640603 - RNA, 19 nt, Artificial Sequence
  Description of Artificial Sequence: Synthetic oligonucleotide
  Sense strand starting at position 3964 of SEQ ID NO: 1561014
ugagguguagaugagucau

SEQ ID NO: 1640604 - RNA, 19 nt, Artificial Sequence
  Description of Artificial Sequence: Synthetic oligonucleotide
  Antisense strand to SEQ ID NO: 1640603
augacucaucuacaccuca

SEQ ID NO: 1640605 - RNA, 19 nt, Artificial Sequence
  Description of Artificial Sequence: Synthetic oligonucleotide
  Sense strand starting at position 181 of SEQ ID NO: 1561015
cgacaagcuccuggugaau

SEQ ID NO: 1640606 - RNA, 19 nt, Artificial Sequence
  Description of Artificial Sequence: Synthetic oligonucleotide
  Antisense strand to SEQ ID NO: 1640605
auucaccaggagcuugucg

SEQ ID NO: 1640607 - RNA, 19 nt, Artificial Sequence
  Description of Artificial Sequence: Synthetic oligonucleotide
  Sense strand starting at position 395 of SEQ ID NO: 1561015
ggccucaccugugugaaca

SEQ ID NO: 1640608 - RNA, 19 nt, Artificial Sequence
  Description of Artificial Sequence: Synthetic oligonucleotide
  Antisense strand to SEQ ID NO: 1640607
uguucacacaggugaggcc

SEQ ID NO: 1640609 - RNA, 19 nt, Artificial Sequence
  Description of Artificial Sequence: Synthetic oligonucleotide
  Sense strand starting at position 396 of SEQ ID NO: 1561015
gccucaccugugugaacau

SEQ ID NO: 1640610 - RNA, 19 nt, Artificial Sequence
  Description of Artificial Sequence: Synthetic oligonucleotide
  Antisense strand to SEQ ID NO: 1640609
auguucacacaggugaggc

SEQ ID NO: 1640611 - RNA, 19 nt, Artificial Sequence
  Description of Artificial Sequence: Synthetic oligonucleotide
  Sense strand starting at position 598 of SEQ ID NO: 1561015
gcauaauauguaugcacau

SEQ ID NO: 1640612 - RNA, 19 nt, Artificial Sequence
  Description of Artificial Sequence: Synthetic oligonucleotide
  Antisense strand to SEQ ID NO: 1640611
augugcauacauauuaugc

SEQ ID NO: 1640613 - RNA, 19 nt, Artificial Sequence
  Description of Artificial Sequence: Synthetic oligonucleotide
  Sense strand starting at position 629 of SEQ ID NO: 1561015
uugcgucuccugugaagac

SEQ ID NO: 1640614 - RNA, 19 nt, Artificial Sequence
  Description of Artificial Sequence: Synthetic oligonucleotide
  Antisense strand to SEQ ID NO: 1640613
gucuucacaggagacgcaa

SEQ ID NO: 1640615 - RNA, 19 nt, Artificial Sequence
  Description of Artificial Sequence: Synthetic oligonucleotide
  Sense strand starting at position 671 of SEQ ID NO: 1561015
cucuguaagcaugagaucu

SEQ ID NO: 1640616 - RNA, 19 nt, Artificial Sequence
  Description of Artificial Sequence: Synthetic oligonucleotide
  Antisense strand to SEQ ID NO: 1640615
agaucucaugcuuacagag

SEQ ID NO: 1640617 - RNA, 19 nt, Artificial Sequence
  Description of Artificial Sequence: Synthetic oligonucleotide
  Sense strand starting at position 719 of SEQ ID NO: 1561015
gggacaguuucccacagag

SEQ ID NO: 1640618 - RNA, 19 nt, Artificial Sequence
  Description of Artificial Sequence: Synthetic oligonucleotide
  Antisense strand to SEQ ID NO: 1640617
cucugugggaaacuguccc

SEQ ID NO: 1640619 - RNA, 19 nt, Artificial Sequence
  Description of Artificial Sequence: Synthetic oligonucleotide
  Sense strand starting at position 768 of SEQ ID NO: 1561015
guauccuuuacacgggaau

SEQ ID NO: 1640620 - RNA, 19 nt, Artificial Sequence
  Description of Artificial Sequence: Synthetic oligonucleotide
  Antisense strand to SEQ ID NO: 1640619
auucccguguaaaggauac

SEQ ID NO: 1640621 - RNA, 19 nt, Artificial Sequence
  Description of Artificial Sequence: Synthetic oligonucleotide
  Sense strand starting at position 771 of SEQ ID NO: 1561015
uccuuuacacgggaauugu

SEQ ID NO: 1640622 - RNA, 19 nt, Artificial Sequence
  Description of Artificial Sequence: Synthetic oligonucleotide
  Antisense strand to SEQ ID NO: 1640621
acaauucccguguaaagga

SEQ ID NO: 1640623 - RNA, 19 nt, Artificial Sequence
  Description of Artificial Sequence: Synthetic oligonucleotide
  Sense strand starting at position 785 of SEQ ID NO: 1561015
auuguuacuccugggaucu

SEQ ID NO: 1640624 - RNA, 19 nt, Artificial Sequence
  Description of Artificial Sequence: Synthetic oligonucleotide
  Antisense strand to SEQ ID NO: 1640623
agaucccaggaguaacaau

SEQ ID NO: 1640625 - RNA, 19 nt, Artificial Sequence
  Description of Artificial Sequence: Synthetic oligonucleotide
  Sense strand starting at position 786 of SEQ ID NO: 1561015
uuguuacuccugggaucuu

SEQ ID NO: 1640626 - RNA, 19 nt, Artificial Sequence
  Description of Artificial Sequence: Synthetic oligonucleotide
  Antisense strand to SEQ ID NO: 1640625
aagaucccaggaguaacaa

SEQ ID NO: 1640627 - RNA, 19 nt, Artificial Sequence
  Description of Artificial Sequence: Synthetic oligonucleotide
  Sense strand starting at position 873 of SEQ ID NO: 1561015
ccauaucuauuaggaauga

SEQ ID NO: 1640628 - RNA, 19 nt, Artificial Sequence
  Description of Artificial Sequence: Synthetic oligonucleotide
  Antisense strand to SEQ ID NO: 1640627
ucauuccuaauagauaugg

SEQ ID NO: 1640629 - RNA, 19 nt, Artificial Sequence
  Description of Artificial Sequence: Synthetic oligonucleotide
  Sense strand starting at position 905 of SEQ ID NO: 1561015
gggaguucuugauuggaca

SEQ ID NO: 1640630 - RNA, 19 nt, Artificial Sequence
  Description of Artificial Sequence: Synthetic oligonucleotide
  Antisense strand to SEQ ID NO: 1640629
uguccaaucaagaacuccc

SEQ ID NO: 1640631 - RNA, 19 nt, Artificial Sequence
  Description of Artificial Sequence: Synthetic oligonucleotide
  Sense strand starting at position 906 of SEQ ID NO: 1561015
ggaguucuugauuggacag

SEQ ID NO: 1640632 - RNA, 19 nt, Artificial Sequence
  Description of Artificial Sequence: Synthetic oligonucleotide
  Antisense strand to SEQ ID NO: 1640631
cuguccaaucaagaacucc

SEQ ID NO: 1640633 - RNA, 19 nt, Artificial Sequence
  Description of Artificial Sequence: Synthetic oligonucleotide
  Sense strand starting at position 951 of SEQ ID NO: 1561015
cugggaaugugucucacca

SEQ ID NO: 1640634 - RNA, 19 nt, Artificial Sequence
  Description of Artificial Sequence: Synthetic oligonucleotide
  Antisense strand to SEQ ID NO: 1640633
uggugagacacauucccag

SEQ ID NO: 1640635 - RNA, 19 nt, Artificial Sequence
  Description of Artificial Sequence: Synthetic oligonucleotide
  Sense strand starting at position 999 of SEQ ID NO: 1561015
gaauguaucucagggagaa

SEQ ID NO: 1640636 - RNA, 19 nt, Artificial Sequence
  Description of Artificial Sequence: Synthetic oligonucleotide
  Antisense strand to SEQ ID NO: 1640635
uucucccugagauacauuc

SEQ ID NO: 1640637 - RNA, 19 nt, Artificial Sequence
  Description of Artificial Sequence: Synthetic oligonucleotide
  Sense strand starting at position 1031 of SEQ ID NO: 1561015
guguuucuugacugagggu

SEQ ID NO: 1640638 - RNA, 19 nt, Artificial Sequence
  Description of Artificial Sequence: Synthetic oligonucleotide
  Antisense strand to SEQ ID NO: 1640637
acccucagucaagaaacac

SEQ ID NO: 1640639 - RNA, 19 nt, Artificial Sequence
  Description of Artificial Sequence: Synthetic oligonucleotide
  Sense strand starting at position 1032 of SEQ ID NO: 1561015
uguuucuugacugaggguu

SEQ ID NO: 1640640 - RNA, 19 nt, Artificial Sequence
  Description of Artificial Sequence: Synthetic oligonucleotide
  Antisense strand to SEQ ID NO: 1640639
aacccucagucaagaaaca

SEQ ID NO: 1640641 - RNA, 19 nt, Artificial Sequence
  Description of Artificial Sequence: Synthetic oligonucleotide
  Sense strand starting at position 1774 of SEQ ID NO: 1561015
aaguuauugcccuagggcu

SEQ ID NO: 1640642 - RNA, 19 nt, Artificial Sequence
  Description of Artificial Sequence: Synthetic oligonucleotide
  Antisense strand to SEQ ID NO: 1640641
agcccuagggcaauaacuu

SEQ ID NO: 1640643 - RNA, 19 nt, Artificial Sequence
  Description of Artificial Sequence: Synthetic oligonucleotide
  Sense strand starting at position 1829 of SEQ ID NO: 1561015
aaacauguuugugcggcaa

SEQ ID NO: 1640644 - RNA, 19 nt, Artificial Sequence
  Description of Artificial Sequence: Synthetic oligonucleotide
  Antisense strand to SEQ ID NO: 1640643
uugccgcacaaacauguuu

SEQ ID NO: 1640645 - RNA, 19 nt, Artificial Sequence
  Description of Artificial Sequence: Synthetic oligonucleotide
  Sense strand starting at position 2223 of SEQ ID NO: 1561015
gggauucuguagccgagaa

SEQ ID NO: 1640646 - RNA, 19 nt, Artificial Sequence
  Description of Artificial Sequence: Synthetic oligonucleotide
  Antisense strand to SEQ ID NO: 1640645
uucucggcuacagaauccc

SEQ ID NO: 1640647 - RNA, 19 nt, Artificial Sequence
  Description of Artificial Sequence: Synthetic oligonucleotide
  Sense strand starting at position 2284 of SEQ ID NO: 1561015
acggaaguucaggguuaau

SEQ ID NO: 1640648 - RNA, 19 nt, Artificial Sequence
  Description of Artificial Sequence: Synthetic oligonucleotide
  Antisense strand to SEQ ID NO: 1640647
auuaacccugaacuuccgu

SEQ ID NO: 1640649 - RNA, 19 nt, Artificial Sequence
  Description of Artificial Sequence: Synthetic oligonucleotide
  Sense strand starting at position 2411 of SEQ ID NO: 1561015
cuugguaaucuggaguuua

SEQ ID NO: 1640650 - RNA, 19 nt, Artificial Sequence
  Description of Artificial Sequence: Synthetic oligonucleotide
  Antisense strand to SEQ ID NO: 1640649
uaaacuccagauuaccaag

SEQ ID NO: 1640651 - RNA, 19 nt, Artificial Sequence
  Description of Artificial Sequence: Synthetic oligonucleotide
  Sense strand starting at position 2541 of SEQ ID NO: 1561015
caucauucccgagguugaa

SEQ ID NO: 1640652 - RNA, 19 nt, Artificial Sequence
  Description of Artificial Sequence: Synthetic oligonucleotide
  Antisense strand to SEQ ID NO: 1640651
uucaaccucgggaaugaug

SEQ ID NO: 1640653 - RNA, 19 nt, Artificial Sequence
  Description of Artificial Sequence: Synthetic oligonucleotide
  Sense strand starting at position 2572 of SEQ ID NO: 1561015
cugauuggucagugcagca

SEQ ID NO: 1640654 - RNA, 19 nt, Artificial Sequence
  Description of Artificial Sequence: Synthetic oligonucleotide
  Antisense strand to SEQ ID NO: 1640653
ugcugcacugaccaaucag

SEQ ID NO: 1640655 - RNA, 19 nt, Artificial Sequence
  Description of Artificial Sequence: Synthetic oligonucleotide
  Sense strand starting at position 2764 of SEQ ID NO: 1561015
agaguggguuccgagagaa

SEQ ID NO: 1640656 - RNA, 19 nt, Artificial Sequence
  Description of Artificial Sequence: Synthetic oligonucleotide
  Antisense strand to SEQ ID NO: 1640655
uucucucggaacccacucu

SEQ ID NO: 1640657 - RNA, 19 nt, Artificial Sequence
  Description of Artificial Sequence: Synthetic oligonucleotide
  Sense strand starting at position 3031 of SEQ ID NO: 1561015
cggcgaucccugucggagu

SEQ ID NO: 1640658 - RNA, 19 nt, Artificial Sequence
  Description of Artificial Sequence: Synthetic oligonucleotide
  Antisense strand to SEQ ID NO: 1640657
acuccgacagggaucgccg

SEQ ID NO: 1640659 - RNA, 19 nt, Artificial Sequence
  Description of Artificial Sequence: Synthetic oligonucleotide
  Sense strand starting at position 3064 of SEQ ID NO: 1561015
uucccuucuggcgggauua

SEQ ID NO: 1640660 - RNA, 19 nt, Artificial Sequence
  Description of Artificial Sequence: Synthetic oligonucleotide
  Antisense strand to SEQ ID NO: 1640659
uaaucccgccagaagggaa

SEQ ID NO: 1640661 - RNA, 19 nt, Artificial Sequence
  Description of Artificial Sequence: Synthetic oligonucleotide
  Sense strand starting at position 3065 of SEQ ID NO: 1561015
ucccuucuggcgggauuaa

SEQ ID NO: 1640662 - RNA, 19 nt, Artificial Sequence
  Description of Artificial Sequence: Synthetic oligonucleotide
  Antisense strand to SEQ ID NO: 1640661
uuaaucccgccagaaggga

SEQ ID NO: 1640663 - RNA, 19 nt, Artificial Sequence
  Description of Artificial Sequence: Synthetic oligonucleotide
  Sense strand starting at position 3483 of SEQ ID NO: 1561015
ugggaucuuauauguagac

SEQ ID NO: 1640664 - RNA, 19 nt, Artificial Sequence
  Description of Artificial Sequence: Synthetic oligonucleotide
  Antisense strand to SEQ ID NO: 1640663
gucuacauauaagauccca

SEQ ID NO: 1640665 - RNA, 19 nt, Artificial Sequence
  Description of Artificial Sequence: Synthetic oligonucleotide
  Sense strand starting at position 3484 of SEQ ID NO: 1561015
gggaucuuauauguagaca

SEQ ID NO: 1640666 - RNA, 19 nt, Artificial Sequence
  Description of Artificial Sequence: Synthetic oligonucleotide
  Antisense strand to SEQ ID NO: 1640665
ugucuacauauaagauccc

SEQ ID NO: 1640667 - RNA, 19 nt, Artificial Sequence
  Description of Artificial Sequence: Synthetic oligonucleotide
  Sense strand starting at position 3500 of SEQ ID NO: 1561015
acagcauccugaguucgaa

SEQ ID NO: 1640668 - RNA, 19 nt, Artificial Sequence
  Description of Artificial Sequence: Synthetic oligonucleotide
  Antisense strand to SEQ ID NO: 1640667
uucgaacucaggaugcugu

SEQ ID NO: 1640669 - RNA, 19 nt, Artificial Sequence
  Description of Artificial Sequence: Synthetic oligonucleotide
  Sense strand starting at position 3539 of SEQ ID NO: 1561015
cuauuaauccugugcggga

SEQ ID NO: 1640670 - RNA, 19 nt, Artificial Sequence
  Description of Artificial Sequence: Synthetic oligonucleotide
  Antisense strand to SEQ ID NO: 1640669
ucccgcacaggauuaauag

SEQ ID NO: 1640671 - RNA, 19 nt, Artificial Sequence
  Description of Artificial Sequence: Synthetic oligonucleotide
  Sense strand starting at position 3581 of SEQ ID NO: 1561015
cggcucugcagcugagauu

SEQ ID NO: 1640672 - RNA, 19 nt, Artificial Sequence
  Description of Artificial Sequence: Synthetic oligonucleotide
  Antisense strand to SEQ ID NO: 1640671
aaucucagcugcagagccg

SEQ ID NO: 1640673 - RNA, 19 nt, Artificial Sequence
  Description of Artificial Sequence: Synthetic oligonucleotide
  Sense strand starting at position 3661 of SEQ ID NO: 1561015
cuuucuucgucccuagaau

SEQ ID NO: 1640674 - RNA, 19 nt, Artificial Sequence
  Description of Artificial Sequence: Synthetic oligonucleotide
  Antisense strand to SEQ ID NO: 1640673
auucuagggacgaagaaag

SEQ ID NO: 1640675 - RNA, 19 nt, Artificial Sequence
  Description of Artificial Sequence: Synthetic oligonucleotide
  Sense strand starting at position 3662 of SEQ ID NO: 1561015
uuucuucgucccuagaaug

SEQ ID NO: 1640676 - RNA, 19 nt, Artificial Sequence
  Description of Artificial Sequence: Synthetic oligonucleotide
  Antisense strand to SEQ ID NO: 1640675
cauucuagggacgaagaaa

SEQ ID NO: 1640677 - RNA, 19 nt, Artificial Sequence
  Description of Artificial Sequence: Synthetic oligonucleotide
  Sense strand starting at position 3789 of SEQ ID NO: 1561015
ugggcucuguggccagaaa

SEQ ID NO: 1640678 - RNA, 19 nt, Artificial Sequence
  Description of Artificial Sequence: Synthetic oligonucleotide
  Antisense strand to SEQ ID NO: 1640677
uuucuggccacagagccca

SEQ ID NO: 1640679 - RNA, 19 nt, Artificial Sequence
  Description of Artificial Sequence: Synthetic oligonucleotide
  Sense strand starting at position 3816 of SEQ ID NO: 1561015
cuugauuucgcuugggcca

SEQ ID NO: 1640680 - RNA, 19 nt, Artificial Sequence
  Description of Artificial Sequence: Synthetic oligonucleotide
  Antisense strand to SEQ ID NO: 1640679
uggcccaagcgaaaucaag

SEQ ID NO: 1640681 - RNA, 19 nt, Artificial Sequence
  Description of Artificial Sequence: Synthetic oligonucleotide
  Sense strand starting at position 3963 of SEQ ID NO: 1561015
uauguuuguccguuguaca

SEQ ID NO: 1640682 - RNA, 19 nt, Artificial Sequence
  Description of Artificial Sequence: Synthetic oligonucleotide
  Antisense strand to SEQ ID NO: 1640681
uguacaacggacaaacaua

SEQ ID NO: 1640683 - RNA, 19 nt, Artificial Sequence
  Description of Artificial Sequence: Synthetic oligonucleotide
  Sense strand starting at position 3964 of SEQ ID NO: 1561015
auguuuguccguuguacaa

SEQ ID NO: 1640684 - RNA, 19 nt, Artificial Sequence
  Description of Artificial Sequence: Synthetic oligonucleotide
  Antisense strand to SEQ ID NO: 1640683
uuguacaacggacaaacau

SEQ ID NO: 1640685 - RNA, 19 nt, Artificial Sequence
  Description of Artificial Sequence: Synthetic oligonucleotide
  Sense strand starting at position 67 of SEQ ID NO: 1561016
ggagguguuccaggaagga

SEQ ID NO: 1640686 - RNA, 19 nt, Artificial Sequence
  Description of Artificial Sequence: Synthetic oligonucleotide
  Antisense strand to SEQ ID NO: 1640685
uccuuccuggaacaccucc

SEQ ID NO: 1640687 - RNA, 19 nt, Artificial Sequence
  Description of Artificial Sequence: Synthetic oligonucleotide
  Sense strand starting at position 133 of SEQ ID NO: 1561016
gagggaguuccugggcaau

SEQ ID NO: 1640688 - RNA, 19 nt, Artificial Sequence
  Description of Artificial Sequence: Synthetic oligonucleotide
  Antisense strand to SEQ ID NO: 1640687
auugcccaggaacucccuc

SEQ ID NO: 1640689 - RNA, 19 nt, Artificial Sequence
  Description of Artificial Sequence: Synthetic oligonucleotide
  Sense strand starting at position 152 of SEQ ID NO: 1561016
gggcaaaguacgcgagaaa

SEQ ID NO: 1640690 - RNA, 19 nt, Artificial Sequence
  Description of Artificial Sequence: Synthetic oligonucleotide
  Antisense strand to SEQ ID NO: 1640689
uuucucgcguacuuugccc

SEQ ID NO: 1640691 - RNA, 19 nt, Artificial Sequence
  Description of Artificial Sequence: Synthetic oligonucleotide
  Sense strand starting at position 306 of SEQ ID NO: 1561016
ggucuuggauauucaggua

SEQ ID NO: 1640692 - RNA, 19 nt, Artificial Sequence
  Description of Artificial Sequence: Synthetic oligonucleotide
  Antisense strand to SEQ ID NO: 1640691
uaccugaauauccaagacc

SEQ ID NO: 1640693 - RNA, 19 nt, Artificial Sequence
  Description of Artificial Sequence: Synthetic oligonucleotide
  Sense strand starting at position 409 of SEQ ID NO: 1561016
cuuccuuuggaaugcaaau

SEQ ID NO: 1640694 - RNA, 19 nt, Artificial Sequence
  Description of Artificial Sequence: Synthetic oligonucleotide
  Antisense strand to SEQ ID NO: 1640693
auuugcauuccaaaggaag

SEQ ID NO: 1640695 - RNA, 19 nt, Artificial Sequence
  Description of Artificial Sequence: Synthetic oligonucleotide
  Sense strand starting at position 857 of SEQ ID NO: 1561016
agcucugcgagguauauuu

SEQ ID NO: 1640696 - RNA, 19 nt, Artificial Sequence
  Description of Artificial Sequence: Synthetic oligonucleotide
  Antisense strand to SEQ ID NO: 1640695
aaauauaccucgcagagcu

SEQ ID NO: 1640697 - RNA, 19 nt, Artificial Sequence
  Description of Artificial Sequence: Synthetic oligonucleotide
  Sense strand starting at position 1520 of SEQ ID NO: 1561016
agaaccauguccucuaugu

SEQ ID NO: 1640698 - RNA, 19 nt, Artificial Sequence
  Description of Artificial Sequence: Synthetic oligonucleotide
  Antisense strand to SEQ ID NO: 1640697
acauagaggacaugguucu

SEQ ID NO: 1640699 - RNA, 19 nt, Artificial Sequence
  Description of Artificial Sequence: Synthetic oligonucleotide
  Sense strand starting at position 2134 of SEQ ID NO: 1561016
gcuuaagcucuguaucuau

SEQ ID NO: 1640700 - RNA, 19 nt, Artificial Sequence
  Description of Artificial Sequence: Synthetic oligonucleotide
  Antisense strand to SEQ ID NO: 1640699
auagauacagagcuuaagc

SEQ ID NO: 1640701 - RNA, 19 nt, Artificial Sequence
  Description of Artificial Sequence: Synthetic oligonucleotide
  Sense strand starting at position 2299 of SEQ ID NO: 1561016
guuguaugagguuauguuu

SEQ ID NO: 1640702 - RNA, 19 nt, Artificial Sequence
  Description of Artificial Sequence: Synthetic oligonucleotide
  Antisense strand to SEQ ID NO: 1640701
aaacauaaccucauacaac

SEQ ID NO: 1640703 - RNA, 19 nt, Artificial Sequence
  Description of Artificial Sequence: Synthetic oligonucleotide
  Sense strand starting at position 2302 of SEQ ID NO: 1561016
guaugagguuauguuuaug

SEQ ID NO: 1640704 - RNA, 19 nt, Artificial Sequence
  Description of Artificial Sequence: Synthetic oligonucleotide
  Antisense strand to SEQ ID NO: 1640703
cauaaacauaaccucauac

SEQ ID NO: 1640705 - RNA, 19 nt, Artificial Sequence
  Description of Artificial Sequence: Synthetic oligonucleotide
  Sense strand starting at position 2305 of SEQ ID NO: 1561016
ugagguuauguuuaugugu

SEQ ID NO: 1640706 - RNA, 19 nt, Artificial Sequence
  Description of Artificial Sequence: Synthetic oligonucleotide
  Antisense strand to SEQ ID NO: 1640705
acacauaaacauaaccuca

SEQ ID NO: 1640707 - RNA, 19 nt, Artificial Sequence
  Description of Artificial Sequence: Synthetic oligonucleotide
  Sense strand starting at position 2401 of SEQ ID NO: 1561016
ggaggauugugugucccaa

SEQ ID NO: 1640708 - RNA, 19 nt, Artificial Sequence
  Description of Artificial Sequence: Synthetic oligonucleotide
  Antisense strand to SEQ ID NO: 1640707
uugggacacacaauccucc

SEQ ID NO: 1640709 - RNA, 19 nt, Artificial Sequence
  Description of Artificial Sequence: Synthetic oligonucleotide
  Sense strand starting at position 2506 of SEQ ID NO: 1561016
guuggaagucaguggauaa

SEQ ID NO: 1640710 - RNA, 19 nt, Artificial Sequence
  Description of Artificial Sequence: Synthetic oligonucleotide
  Antisense strand to SEQ ID NO: 1640709
uuauccacugacuuccaac

SEQ ID NO: 1640711 - RNA, 19 nt, Artificial Sequence
  Description of Artificial Sequence: Synthetic oligonucleotide
  Sense strand starting at position 2562 of SEQ ID NO: 1561016
agaaaugucaugugcugag

SEQ ID NO: 1640712 - RNA, 19 nt, Artificial Sequence
  Description of Artificial Sequence: Synthetic oligonucleotide
  Antisense strand to SEQ ID NO: 1640711
cucagcacaugacauuucu

SEQ ID NO: 1640713 - RNA, 19 nt, Artificial Sequence
  Description of Artificial Sequence: Synthetic oligonucleotide
  Sense strand starting at position 2615 of SEQ ID NO: 1561016
ucugaaguuucugugaaug

SEQ ID NO: 1640714 - RNA, 19 nt, Artificial Sequence
  Description of Artificial Sequence: Synthetic oligonucleotide
  Antisense strand to SEQ ID NO: 1640713
cauucacagaaacuucaga

SEQ ID NO: 1640715 - RNA, 19 nt, Artificial Sequence
  Description of Artificial Sequence: Synthetic oligonucleotide
  Sense strand starting at position 2621 of SEQ ID NO: 1561016
guuucugugaauguguguu

SEQ ID NO: 1640716 - RNA, 19 nt, Artificial Sequence
  Description of Artificial Sequence: Synthetic oligonucleotide
  Antisense strand to SEQ ID NO: 1640715
aacacacauucacagaaac

SEQ ID NO: 1640717 - RNA, 19 nt, Artificial Sequence
  Description of Artificial Sequence: Synthetic oligonucleotide
  Sense strand starting at position 2719 of SEQ ID NO: 1561016
ugcaguagugaacaagaca

SEQ ID NO: 1640718 - RNA, 19 nt, Artificial Sequence
  Description of Artificial Sequence: Synthetic oligonucleotide
  Antisense strand to SEQ ID NO: 1640717
ugucuuguucacuacugca

SEQ ID NO: 1640719 - RNA, 19 nt, Artificial Sequence
  Description of Artificial Sequence: Synthetic oligonucleotide
  Sense strand starting at position 2973 of SEQ ID NO: 1561016
gugaaucaagauuguucca

SEQ ID NO: 1640720 - RNA, 19 nt, Artificial Sequence
  Description of Artificial Sequence: Synthetic oligonucleotide
  Antisense strand to SEQ ID NO: 1640719
uggaacaaucuugauucac

SEQ ID NO: 1640721 - RNA, 19 nt, Artificial Sequence
  Description of Artificial Sequence: Synthetic oligonucleotide
  Sense strand starting at position 3159 of SEQ ID NO: 1561016
auguguuguguugggagaa

SEQ ID NO: 1640722 - RNA, 19 nt, Artificial Sequence
  Description of Artificial Sequence: Synthetic oligonucleotide
  Antisense strand to SEQ ID NO: 1640721
uucucccaacacaacacau

SEQ ID NO: 1640723 - RNA, 19 nt, Artificial Sequence
  Description of Artificial Sequence: Synthetic oligonucleotide
  Sense strand starting at position 3196 of SEQ ID NO: 1561016
ugauaauuugugugcaacu

SEQ ID NO: 1640724 - RNA, 19 nt, Artificial Sequence
  Description of Artificial Sequence: Synthetic oligonucleotide
  Antisense strand to SEQ ID NO: 1640723
aguugcacacaaauuauca

SEQ ID NO: 1640725 - RNA, 19 nt, Artificial Sequence
  Description of Artificial Sequence: Synthetic oligonucleotide
  Sense strand starting at position 3233 of SEQ ID NO: 1561016
gaacuaugugacugugcuu

SEQ ID NO: 1640726 - RNA, 19 nt, Artificial Sequence
  Description of Artificial Sequence: Synthetic oligonucleotide
  Antisense strand to SEQ ID NO: 1640725
aagcacagucacauaguuc

SEQ ID NO: 1640727 - RNA, 19 nt, Artificial Sequence
  Description of Artificial Sequence: Synthetic oligonucleotide
  Sense strand starting at position 3248 of SEQ ID NO: 1561016
gcuuccauugguuaagugu

SEQ ID NO: 1640728 - RNA, 19 nt, Artificial Sequence
  Description of Artificial Sequence: Synthetic oligonucleotide
  Antisense strand to SEQ ID NO: 1640727
acacuuaaccaauggaagc

SEQ ID NO: 1640729 - RNA, 19 nt, Artificial Sequence
  Description of Artificial Sequence: Synthetic oligonucleotide
  Sense strand starting at position 3255 of SEQ ID NO: 1561016
uugguuaaguguuuauaug

SEQ ID NO: 1640730 - RNA, 19 nt, Artificial Sequence
  Description of Artificial Sequence: Synthetic oligonucleotide
  Antisense strand to SEQ ID NO: 1640729
cauauaaacacuuaaccaa

SEQ ID NO: 1640731 - RNA, 19 nt, Artificial Sequence
  Description of Artificial Sequence: Synthetic oligonucleotide
  Sense strand starting at position 3294 of SEQ ID NO: 1561016
auuggaugacuguguguau

SEQ ID NO: 1640732 - RNA, 19 nt, Artificial Sequence
  Description of Artificial Sequence: Synthetic oligonucleotide
  Antisense strand to SEQ ID NO: 1640731
auacacacagucauccaau

SEQ ID NO: 1640733 - RNA, 19 nt, Artificial Sequence
  Description of Artificial Sequence: Synthetic oligonucleotide
  Sense strand starting at position 3396 of SEQ ID NO: 1561016
gcauuugcugaguaugugu

SEQ ID NO: 1640734 - RNA, 19 nt, Artificial Sequence
  Description of Artificial Sequence: Synthetic oligonucleotide
  Antisense strand to SEQ ID NO: 1640733
acacauacucagcaaaugc

SEQ ID NO: 1640735 - RNA, 19 nt, Artificial Sequence
  Description of Artificial Sequence: Synthetic oligonucleotide
  Sense strand starting at position 3421 of SEQ ID NO: 1561016
guguguuaauuugcagaau

SEQ ID NO: 1640736 - RNA, 19 nt, Artificial Sequence
  Description of Artificial Sequence: Synthetic oligonucleotide
  Antisense strand to SEQ ID NO: 1640735
auucugcaaauuaacacac

SEQ ID NO: 1640737 - RNA, 19 nt, Artificial Sequence
  Description of Artificial Sequence: Synthetic oligonucleotide
  Sense strand starting at position 3450 of SEQ ID NO: 1561016
guguuuguggaguauaugu

SEQ ID NO: 1640738 - RNA, 19 nt, Artificial Sequence
  Description of Artificial Sequence: Synthetic oligonucleotide
  Antisense strand to SEQ ID NO: 1640737
acauauacuccacaaacac

SEQ ID NO: 1640739 - RNA, 19 nt, Artificial Sequence
  Description of Artificial Sequence: Synthetic oligonucleotide
  Sense strand starting at position 3452 of SEQ ID NO: 1561016
guuuguggaguauauguuu

SEQ ID NO: 1640740 - RNA, 19 nt, Artificial Sequence
  Description of Artificial Sequence: Synthetic oligonucleotide
  Antisense strand to SEQ ID NO: 1640739
aaacauauacuccacaaac

SEQ ID NO: 1640741 - RNA, 19 nt, Artificial Sequence
  Description of Artificial Sequence: Synthetic oligonucleotide
  Sense strand starting at position 3457 of SEQ ID NO: 1561016
uggaguauauguuugcaga

SEQ ID NO: 1640742 - RNA, 19 nt, Artificial Sequence
  Description of Artificial Sequence: Synthetic oligonucleotide
  Antisense strand to SEQ ID NO: 1640741
ucugcaaacauauacucca

SEQ ID NO: 1640743 - RNA, 19 nt, Artificial Sequence
  Description of Artificial Sequence: Synthetic oligonucleotide
  Sense strand starting at position 3458 of SEQ ID NO: 1561016
ggaguauauguuugcagag

SEQ ID NO: 1640744 - RNA, 19 nt, Artificial Sequence
  Description of Artificial Sequence: Synthetic oligonucleotide
  Antisense strand to SEQ ID NO: 1640743
cucugcaaacauauacucc

SEQ ID NO: 1640745 - RNA, 19 nt, Artificial Sequence
  Description of Artificial Sequence: Synthetic oligonucleotide
  Sense strand starting at position 3459 of SEQ ID NO: 1561016
gaguauauguuugcagagu

SEQ ID NO: 1640746 - RNA, 19 nt, Artificial Sequence
  Description of Artificial Sequence: Synthetic oligonucleotide
  Antisense strand to SEQ ID NO: 1640745
acucugcaaacauauacuc

SEQ ID NO: 1640747 - RNA, 19 nt, Artificial Sequence
  Description of Artificial Sequence: Synthetic oligonucleotide
  Sense strand starting at position 3470 of SEQ ID NO: 1561016
ugcagaguauguucgaaua

SEQ ID NO: 1640748 - RNA, 19 nt, Artificial Sequence
  Description of Artificial Sequence: Synthetic oligonucleotide
  Antisense strand to SEQ ID NO: 1640747
uauucgaacauacucugca

SEQ ID NO: 1640749 - RNA, 19 nt, Artificial Sequence
  Description of Artificial Sequence: Synthetic oligonucleotide
  Sense strand starting at position 3484 of SEQ ID NO: 1561016
gaauaaauguuuguguguc

SEQ ID NO: 1640750 - RNA, 19 nt, Artificial Sequence
  Description of Artificial Sequence: Synthetic oligonucleotide
  Antisense strand to SEQ ID NO: 1640749
gacacacaaacauuuauuc

SEQ ID NO: 1640751 - RNA, 19 nt, Artificial Sequence
  Description of Artificial Sequence: Synthetic oligonucleotide
  Sense strand starting at position 3504 of SEQ ID NO: 1561016
guguuuacugaauauguga

SEQ ID NO: 1640752 - RNA, 19 nt, Artificial Sequence
  Description of Artificial Sequence: Synthetic oligonucleotide
  Antisense strand to SEQ ID NO: 1640751
ucacauauucaguaaacac

SEQ ID NO: 1640753 - RNA, 19 nt, Artificial Sequence
  Description of Artificial Sequence: Synthetic oligonucleotide
  Sense strand starting at position 3512 of SEQ ID NO: 1561016
ugaauaugugacugugagu

SEQ ID NO: 1640754 - RNA, 19 nt, Artificial Sequence
  Description of Artificial Sequence: Synthetic oligonucleotide
  Antisense strand to SEQ ID NO: 1640753
acucacagucacauauuca

SEQ ID NO: 1640755 - RNA, 19 nt, Artificial Sequence
  Description of Artificial Sequence: Synthetic oligonucleotide
  Sense strand starting at position 3541 of SEQ ID NO: 1561016
cucucaucucagggcaaga

SEQ ID NO: 1640756 - RNA, 19 nt, Artificial Sequence
  Description of Artificial Sequence: Synthetic oligonucleotide
  Antisense strand to SEQ ID NO: 1640755
ucuugcccugagaugagag

SEQ ID NO: 1640757 - RNA, 19 nt, Artificial Sequence
  Description of Artificial Sequence: Synthetic oligonucleotide
  Sense strand starting at position 3627 of SEQ ID NO: 1561016
agguacucaauauguggua

SEQ ID NO: 1640758 - RNA, 19 nt, Artificial Sequence
  Description of Artificial Sequence: Synthetic oligonucleotide
  Antisense strand to SEQ ID NO: 1640757
uaccacauauugaguaccu

SEQ ID NO: 1640759 - RNA, 19 nt, Artificial Sequence
  Description of Artificial Sequence: Synthetic oligonucleotide
  Sense strand starting at position 3628 of SEQ ID NO: 1561016
gguacucaauaugugguaa

SEQ ID NO: 1640760 - RNA, 19 nt, Artificial Sequence
  Description of Artificial Sequence: Synthetic oligonucleotide
  Antisense strand to SEQ ID NO: 1640759
uuaccacauauugaguacc

SEQ ID NO: 1640761 - RNA, 19 nt, Artificial Sequence
  Description of Artificial Sequence: Synthetic oligonucleotide
  Sense strand starting at position 3636 of SEQ ID NO: 1561016
auaugugguaagugaacaa

SEQ ID NO: 1640762 - RNA, 19 nt, Artificial Sequence
  Description of Artificial Sequence: Synthetic oligonucleotide
  Antisense strand to SEQ ID NO: 1640761
uuguucacuuaccacauau

SEQ ID NO: 1640763 - RNA, 19 nt, Artificial Sequence
  Description of Artificial Sequence: Synthetic oligonucleotide
  Sense strand starting at position 3769 of SEQ ID NO: 1561016
ggaugcuugugggucagau

SEQ ID NO: 1640764 - RNA, 19 nt, Artificial Sequence
  Description of Artificial Sequence: Synthetic oligonucleotide
  Antisense strand to SEQ ID NO: 1640763
aucugacccacaagcaucc

SEQ ID NO: 1640765 - RNA, 19 nt, Artificial Sequence
  Description of Artificial Sequence: Synthetic oligonucleotide
  Sense strand starting at position 79 of SEQ ID NO: 1561017
cuucuucugcgagagggaa

SEQ ID NO: 1640766 - RNA, 19 nt, Artificial Sequence
  Description of Artificial Sequence: Synthetic oligonucleotide
  Antisense strand to SEQ ID NO: 1640765
uucccucucgcagaagaag

SEQ ID NO: 1640767 - RNA, 19 nt, Artificial Sequence
  Description of Artificial Sequence: Synthetic oligonucleotide
  Sense strand starting at position 127 of SEQ ID NO: 1561017
guccgaaucacagaagugu

SEQ ID NO: 1640768 - RNA, 19 nt, Artificial Sequence
  Description of Artificial Sequence: Synthetic oligonucleotide
  Antisense strand to SEQ ID NO: 1640767
acacuucugugauucggac

SEQ ID NO: 1640769 - RNA, 19 nt, Artificial Sequence
  Description of Artificial Sequence: Synthetic oligonucleotide
  Sense strand starting at position 144 of SEQ ID NO: 1561017
gucccaguccuggaaucuu

SEQ ID NO: 1640770 - RNA, 19 nt, Artificial Sequence
  Description of Artificial Sequence: Synthetic oligonucleotide
  Antisense strand to SEQ ID NO: 1640769
aagauuccaggacugggac

SEQ ID NO: 1640771 - RNA, 19 nt, Artificial Sequence
  Description of Artificial Sequence: Synthetic oligonucleotide
  Sense strand starting at position 166 of SEQ ID NO: 1561017
auauuugaaucacgggauu

SEQ ID NO: 1640772 - RNA, 19 nt, Artificial Sequence
  Description of Artificial Sequence: Synthetic oligonucleotide
  Antisense strand to SEQ ID NO: 1640771
aaucccgugauucaaauau

SEQ ID NO: 1640773 - RNA, 19 nt, Artificial Sequence
  Description of Artificial Sequence: Synthetic oligonucleotide
  Sense strand starting at position 218 of SEQ ID NO: 1561017
agcaucacugccugaugaa

SEQ ID NO: 1640774 - RNA, 19 nt, Artificial Sequence
  Description of Artificial Sequence: Synthetic oligonucleotide
  Antisense strand to SEQ ID NO: 1640773
uucaucaggcagugaugcu

SEQ ID NO: 1640775 - RNA, 19 nt, Artificial Sequence
  Description of Artificial Sequence: Synthetic oligonucleotide
  Sense strand starting at position 219 of SEQ ID NO: 1561017
gcaucacugccugaugaag

SEQ ID NO: 1640776 - RNA, 19 nt, Artificial Sequence
  Description of Artificial Sequence: Synthetic oligonucleotide
  Antisense strand to SEQ ID NO: 1640775
cuucaucaggcagugaugc

SEQ ID NO: 1640777 - RNA, 19 nt, Artificial Sequence
  Description of Artificial Sequence: Synthetic oligonucleotide
  Sense strand starting at position 236 of SEQ ID NO: 1561017
agcucagagucuuugaagu

SEQ ID NO: 1640778 - RNA, 19 nt, Artificial Sequence
  Description of Artificial Sequence: Synthetic oligonucleotide
  Antisense strand to SEQ ID NO: 1640777
acuucaaagacucugagcu

SEQ ID NO: 1640779 - RNA, 19 nt, Artificial Sequence
  Description of Artificial Sequence: Synthetic oligonucleotide
  Sense strand starting at position 252 of SEQ ID NO: 1561017
aguccaaauccaggaaucu

SEQ ID NO: 1640780 - RNA, 19 nt, Artificial Sequence
  Description of Artificial Sequence: Synthetic oligonucleotide
  Antisense strand to SEQ ID NO: 1640779
agauuccuggauuuggacu

SEQ ID NO: 1640781 - RNA, 19 nt, Artificial Sequence
  Description of Artificial Sequence: Synthetic oligonucleotide
  Sense strand starting at position 293 of SEQ ID NO: 1561017
ggaaucuuaggagguuuca

SEQ ID NO: 1640782 - RNA, 19 nt, Artificial Sequence
  Description of Artificial Sequence: Synthetic oligonucleotide
  Antisense strand to SEQ ID NO: 1640781
ugaaaccuccuaagauucc

SEQ ID NO: 1640783 - RNA, 19 nt, Artificial Sequence
  Description of Artificial Sequence: Synthetic oligonucleotide
  Sense strand starting at position 380 of SEQ ID NO: 1561017
gggauacagcugugaagaa

SEQ ID NO: 1640784 - RNA, 19 nt, Artificial Sequence
  Description of Artificial Sequence: Synthetic oligonucleotide
  Antisense strand to SEQ ID NO: 1640783
uucuucacagcuguauccc

SEQ ID NO: 1640785 - RNA, 19 nt, Artificial Sequence
  Description of Artificial Sequence: Synthetic oligonucleotide
  Sense strand starting at position 425 of SEQ ID NO: 1561017
agcugacacucuuugggau

SEQ ID NO: 1640786 - RNA, 19 nt, Artificial Sequence
  Description of Artificial Sequence: Synthetic oligonucleotide
  Antisense strand to SEQ ID NO: 1640785
aucccaaagagugucagcu

SEQ ID NO: 1640787 - RNA, 19 nt, Artificial Sequence
  Description of Artificial Sequence: Synthetic oligonucleotide
  Sense strand starting at position 426 of SEQ ID NO: 1561017
gcugacacucuuugggaua

SEQ ID NO: 1640788 - RNA, 19 nt, Artificial Sequence
  Description of Artificial Sequence: Synthetic oligonucleotide
  Antisense strand to SEQ ID NO: 1640787
uaucccaaagagugucagc

SEQ ID NO: 1640789 - RNA, 19 nt, Artificial Sequence
  Description of Artificial Sequence: Synthetic oligonucleotide
  Sense strand starting at position 545 of SEQ ID NO: 1561017
cucauaggguggucaagaa

SEQ ID NO: 1640790 - RNA, 19 nt, Artificial Sequence
  Description of Artificial Sequence: Synthetic oligonucleotide
  Antisense strand to SEQ ID NO: 1640789
uucuugaccacccuaugag

SEQ ID NO: 1640791 - RNA, 19 nt, Artificial Sequence
  Description of Artificial Sequence: Synthetic oligonucleotide
  Sense strand starting at position 569 of SEQ ID NO: 1561017
cucugauaagaugacguuu

SEQ ID NO: 1640792 - RNA, 19 nt, Artificial Sequence
  Description of Artificial Sequence: Synthetic oligonucleotide
  Antisense strand to SEQ ID NO: 1640791
aaacgucaucuuaucagag

SEQ ID NO: 1640793 - RNA, 19 nt, Artificial Sequence
  Description of Artificial Sequence: Synthetic oligonucleotide
  Sense strand starting at position 578 of SEQ ID NO: 1561017
gaugacguuugagcagaga

SEQ ID NO: 1640794 - RNA, 19 nt, Artificial Sequence
  Description of Artificial Sequence: Synthetic oligonucleotide
  Antisense strand to SEQ ID NO: 1640793
ucucugcucaaacgucauc

SEQ ID NO: 1640795 - RNA, 19 nt, Artificial Sequence
  Description of Artificial Sequence: Synthetic oligonucleotide
  Sense strand starting at position 581 of SEQ ID NO: 1561017
gacguuugagcagagaucu

SEQ ID NO: 1640796 - RNA, 19 nt, Artificial Sequence
  Description of Artificial Sequence: Synthetic oligonucleotide
  Antisense strand to SEQ ID NO: 1640795
agaucucugcucaaacguc

SEQ ID NO: 1640797 - RNA, 19 nt, Artificial Sequence
  Description of Artificial Sequence: Synthetic oligonucleotide
  Sense strand starting at position 632 of SEQ ID NO: 1561017
ggacgucuuccagguagag

SEQ ID NO: 1640798 - RNA, 19 nt, Artificial Sequence
  Description of Artificial Sequence: Synthetic oligonucleotide
  Antisense strand to SEQ ID NO: 1640797
cucuaccuggaagacgucc

SEQ ID NO: 1640799 - RNA, 19 nt, Artificial Sequence
  Description of Artificial Sequence: Synthetic oligonucleotide
  Sense strand starting at position 634 of SEQ ID NO: 1561017
acgucuuccagguagagaa

SEQ ID NO: 1640800 - RNA, 19 nt, Artificial Sequence
  Description of Artificial Sequence: Synthetic oligonucleotide
  Antisense strand to SEQ ID NO: 1640799
uucucuaccuggaagacgu

SEQ ID NO: 1640801 - RNA, 19 nt, Artificial Sequence
  Description of Artificial Sequence: Synthetic oligonucleotide
  Sense strand starting at position 686 of SEQ ID NO: 1561017
augcuuggcaucugaggaa

SEQ ID NO: 1640802 - RNA, 19 nt, Artificial Sequence
  Description of Artificial Sequence: Synthetic oligonucleotide
  Antisense strand to SEQ ID NO: 1640801
uuccucagaugccaagcau

SEQ ID NO: 1640803 - RNA, 19 nt, Artificial Sequence
  Description of Artificial Sequence: Synthetic oligonucleotide
  Sense strand starting at position 703 of SEQ ID NO: 1561017
aacugagaggugcgaagau

SEQ ID NO: 1640804 - RNA, 19 nt, Artificial Sequence
  Description of Artificial Sequence: Synthetic oligonucleotide
  Antisense strand to SEQ ID NO: 1640803
aucuucgcaccucucaguu

SEQ ID NO: 1640805 - RNA, 19 nt, Artificial Sequence
  Description of Artificial Sequence: Synthetic oligonucleotide
  Sense strand starting at position 810 of SEQ ID NO: 1561017
cucccuuuguaaucugaag

SEQ ID NO: 1640806 - RNA, 19 nt, Artificial Sequence
  Description of Artificial Sequence: Synthetic oligonucleotide
  Antisense strand to SEQ ID NO: 1640805
cuucagauuacaaagggag

SEQ ID NO: 1640807 - RNA, 19 nt, Artificial Sequence
  Description of Artificial Sequence: Synthetic oligonucleotide
  Sense strand starting at position 907 of SEQ ID NO: 1561017
acacgcgagacauggaaau

SEQ ID NO: 1640808 - RNA, 19 nt, Artificial Sequence
  Description of Artificial Sequence: Synthetic oligonucleotide
  Antisense strand to SEQ ID NO: 1640807
auuuccaugucucgcgugu

SEQ ID NO: 1640809 - RNA, 19 nt, Artificial Sequence
  Description of Artificial Sequence: Synthetic oligonucleotide
  Sense strand starting at position 927 of SEQ ID NO: 1561017
gcuagaucuaaggguguug

SEQ ID NO: 1640810 - RNA, 19 nt, Artificial Sequence
  Description of Artificial Sequence: Synthetic oligonucleotide
  Antisense strand to SEQ ID NO: 1640809
caacacccuuagaucuagc

SEQ ID NO: 1640811 - RNA, 19 nt, Artificial Sequence
  Description of Artificial Sequence: Synthetic oligonucleotide
  Sense strand starting at position 929 of SEQ ID NO: 1561017
uagaucuaaggguguugaa

SEQ ID NO: 1640812 - RNA, 19 nt, Artificial Sequence
  Description of Artificial Sequence: Synthetic oligonucleotide
  Antisense strand to SEQ ID NO: 1640811
uucaacacccuuagaucua

SEQ ID NO: 1640813 - RNA, 19 nt, Artificial Sequence
  Description of Artificial Sequence: Synthetic oligonucleotide
  Sense strand starting at position 989 of SEQ ID NO: 1561017
guagacauggacuguuaua

SEQ ID NO: 1640814 - RNA, 19 nt, Artificial Sequence
  Description of Artificial Sequence: Synthetic oligonucleotide
  Antisense strand to SEQ ID NO: 1640813
uauaacaguccaugucuac

SEQ ID NO: 1640815 - RNA, 19 nt, Artificial Sequence
  Description of Artificial Sequence: Synthetic oligonucleotide
  Sense strand starting at position 1074 of SEQ ID NO: 1561017
cagagcuuugcacauagau

SEQ ID NO: 1640816 - RNA, 19 nt, Artificial Sequence
  Description of Artificial Sequence: Synthetic oligonucleotide
  Antisense strand to SEQ ID NO: 1640815
aucuaugugcaaagcucug

SEQ ID NO: 1640817 - RNA, 19 nt, Artificial Sequence
  Description of Artificial Sequence: Synthetic oligonucleotide
  Sense strand starting at position 1104 of SEQ ID NO: 1561017
cgguuuggaaauugaaauc

SEQ ID NO: 1640818 - RNA, 19 nt, Artificial Sequence
  Description of Artificial Sequence: Synthetic oligonucleotide
  Antisense strand to SEQ ID NO: 1640817
gauuucaauuuccaaaccg

SEQ ID NO: 1640819 - RNA, 19 nt, Artificial Sequence
  Description of Artificial Sequence: Synthetic oligonucleotide
  Sense strand starting at position 1200 of SEQ ID NO: 1561017
accauuaaccagugguaaa

SEQ ID NO: 1640820 - RNA, 19 nt, Artificial Sequence
  Description of Artificial Sequence: Synthetic oligonucleotide
  Antisense strand to SEQ ID NO: 1640819
uuuaccacugguuaauggu

SEQ ID NO: 1640821 - RNA, 19 nt, Artificial Sequence
  Description of Artificial Sequence: Synthetic oligonucleotide
  Sense strand starting at position 1213 of SEQ ID NO: 1561017
gguaaagaccgcuaagaac

SEQ ID NO: 1640822 - RNA, 19 nt, Artificial Sequence
  Description of Artificial Sequence: Synthetic oligonucleotide
  Antisense strand to SEQ ID NO: 1640821
guucuuagcggucuuuacc

SEQ ID NO: 1640823 - RNA, 19 nt, Artificial Sequence
  Description of Artificial Sequence: Synthetic oligonucleotide
  Sense strand starting at position 1221 of SEQ ID NO: 1561017
ccgcuaagaacccaugagu

SEQ ID NO: 1640824 - RNA, 19 nt, Artificial Sequence
  Description of Artificial Sequence: Synthetic oligonucleotide
  Antisense strand to SEQ ID NO: 1640823
acucauggguucuuagcgg

SEQ ID NO: 1640825 - RNA, 19 nt, Artificial Sequence
  Description of Artificial Sequence: Synthetic oligonucleotide
  Sense strand starting at position 2336 of SEQ ID NO: 1561017
auucuaaugcucugaggua

SEQ ID NO: 1640826 - RNA, 19 nt, Artificial Sequence
  Description of Artificial Sequence: Synthetic oligonucleotide
  Antisense strand to SEQ ID NO: 1640825
uaccucagagcauuagaau

SEQ ID NO: 1640827 - RNA, 19 nt, Artificial Sequence
  Description of Artificial Sequence: Synthetic oligonucleotide
  Sense strand starting at position 3025 of SEQ ID NO: 1561017
ggagcuuggacugaguguu

SEQ ID NO: 1640828 - RNA, 19 nt, Artificial Sequence
  Description of Artificial Sequence: Synthetic oligonucleotide
  Antisense strand to SEQ ID NO: 1640827
aacacucaguccaagcucc

SEQ ID NO: 1640829 - RNA, 19 nt, Artificial Sequence
  Description of Artificial Sequence: Synthetic oligonucleotide
  Sense strand starting at position 3037 of SEQ ID NO: 1561017
gaguguuguguugagaaca

SEQ ID NO: 1640830 - RNA, 19 nt, Artificial Sequence
  Description of Artificial Sequence: Synthetic oligonucleotide
  Antisense strand to SEQ ID NO: 1640829
uguucucaacacaacacuc

SEQ ID NO: 1640831 - RNA, 19 nt, Artificial Sequence
  Description of Artificial Sequence: Synthetic oligonucleotide
  Sense strand starting at position 3063 of SEQ ID NO: 1561017
uagaauuaguuucccugga

SEQ ID NO: 1640832 - RNA, 19 nt, Artificial Sequence
  Description of Artificial Sequence: Synthetic oligonucleotide
  Antisense strand to SEQ ID NO: 1640831
uccagggaaacuaauucua

SEQ ID NO: 1640833 - RNA, 19 nt, Artificial Sequence
  Description of Artificial Sequence: Synthetic oligonucleotide
  Sense strand starting at position 3064 of SEQ ID NO: 1561017
agaauuaguuucccuggaa

SEQ ID NO: 1640834 - RNA, 19 nt, Artificial Sequence
  Description of Artificial Sequence: Synthetic oligonucleotide
  Antisense strand to SEQ ID NO: 1640833
uuccagggaaacuaauucu

SEQ ID NO: 1640835 - RNA, 19 nt, Artificial Sequence
  Description of Artificial Sequence: Synthetic oligonucleotide
  Sense strand starting at position 3065 of SEQ ID NO: 1561017
gaauuaguuucccuggaac

SEQ ID NO: 1640836 - RNA, 19 nt, Artificial Sequence
  Description of Artificial Sequence: Synthetic oligonucleotide
  Antisense strand to SEQ ID NO: 1640835
guuccagggaaacuaauuc

SEQ ID NO: 1640837 - RNA, 19 nt, Artificial Sequence
  Description of Artificial Sequence: Synthetic oligonucleotide
  Sense strand starting at position 3067 of SEQ ID NO: 1561017
auuaguuucccuggaacac

SEQ ID NO: 1640838 - RNA, 19 nt, Artificial Sequence
  Description of Artificial Sequence: Synthetic oligonucleotide
  Antisense strand to SEQ ID NO: 1640837
guguuccagggaaacuaau

SEQ ID NO: 1640839 - RNA, 19 nt, Artificial Sequence
  Description of Artificial Sequence: Synthetic oligonucleotide
  Sense strand starting at position 3137 of SEQ ID NO: 1561017
gauguauaacaguguguga

SEQ ID NO: 1640840 - RNA, 19 nt, Artificial Sequence
  Description of Artificial Sequence: Synthetic oligonucleotide
  Antisense strand to SEQ ID NO: 1640839
ucacacacuguuauacauc

SEQ ID NO: 1640841 - RNA, 19 nt, Artificial Sequence
  Description of Artificial Sequence: Synthetic oligonucleotide
  Sense strand starting at position 3318 of SEQ ID NO: 1561017
gaaggagauuuagaugguu

SEQ ID NO: 1640842 - RNA, 19 nt, Artificial Sequence
  Description of Artificial Sequence: Synthetic oligonucleotide
  Antisense strand to SEQ ID NO: 1640841
aaccaucuaaaucuccuuc

SEQ ID NO: 1640843 - RNA, 19 nt, Artificial Sequence
  Description of Artificial Sequence: Synthetic oligonucleotide
  Sense strand starting at position 3397 of SEQ ID NO: 1561017
uccugaucccagggcugaa

SEQ ID NO: 1640844 - RNA, 19 nt, Artificial Sequence
  Description of Artificial Sequence: Synthetic oligonucleotide
  Antisense strand to SEQ ID NO: 1640843
uucagcccugggaucagga

SEQ ID NO: 1640845 - RNA, 19 nt, Artificial Sequence
  Description of Artificial Sequence: Synthetic oligonucleotide
  Sense strand starting at position 670 of SEQ ID NO: 1561018
caccgcgcucggucauaua

SEQ ID NO: 1640846 - RNA, 19 nt, Artificial Sequence
  Description of Artificial Sequence: Synthetic oligonucleotide
  Antisense strand to SEQ ID NO: 1640845
uauaugaccgagcgcggug

SEQ ID NO: 1640847 - RNA, 19 nt, Artificial Sequence
  Description of Artificial Sequence: Synthetic oligonucleotide
  Sense strand starting at position 721 of SEQ ID NO: 1561018
gcuuacuaguaagaccaua

SEQ ID NO: 1640848 - RNA, 19 nt, Artificial Sequence
  Description of Artificial Sequence: Synthetic oligonucleotide
  Antisense strand to SEQ ID NO: 1640847
uauggucuuacuaguaagc

SEQ ID NO: 1640849 - RNA, 19 nt, Artificial Sequence
  Description of Artificial Sequence: Synthetic oligonucleotide
  Sense strand starting at position 834 of SEQ ID NO: 1561018
ucagguguaaagugauauc

SEQ ID NO: 1640850 - RNA, 19 nt, Artificial Sequence
  Description of Artificial Sequence: Synthetic oligonucleotide
  Antisense strand to SEQ ID NO: 1640849
gauaucacuuuacaccuga

SEQ ID NO: 1640851 - RNA, 19 nt, Artificial Sequence
  Description of Artificial Sequence: Synthetic oligonucleotide
  Sense strand starting at position 873 of SEQ ID NO: 1561018
acauguuucuaaguccuaa

SEQ ID NO: 1640852 - RNA, 19 nt, Artificial Sequence
  Description of Artificial Sequence: Synthetic oligonucleotide
  Antisense strand to SEQ ID NO: 1640851
uuaggacuuagaaacaugu

SEQ ID NO: 1640853 - RNA, 19 nt, Artificial Sequence
  Description of Artificial Sequence: Synthetic oligonucleotide
  Sense strand starting at position 1315 of SEQ ID NO: 1561018
guaaucugcuuuccuuuga

SEQ ID NO: 1640854 - RNA, 19 nt, Artificial Sequence
  Description of Artificial Sequence: Synthetic oligonucleotide
  Antisense strand to SEQ ID NO: 1640853
ucaaaggaaagcagauuac

SEQ ID NO: 1640855 - RNA, 19 nt, Artificial Sequence
  Description of Artificial Sequence: Synthetic oligonucleotide
  Sense strand starting at position 1347 of SEQ ID NO: 1561018
ggaacucaguaccuuucua

SEQ ID NO: 1640856 - RNA, 19 nt, Artificial Sequence
  Description of Artificial Sequence: Synthetic oligonucleotide
  Antisense strand to SEQ ID NO: 1640855
uagaaagguacugaguucc

SEQ ID NO: 1640857 - RNA, 19 nt, Artificial Sequence
  Description of Artificial Sequence: Synthetic oligonucleotide
  Sense strand starting at position 1717 of SEQ ID NO: 1561018
agugcuggcucgaaggaga

SEQ ID NO: 1640858 - RNA, 19 nt, Artificial Sequence
  Description of Artificial Sequence: Synthetic oligonucleotide
  Antisense strand to SEQ ID NO: 1640857
ucuccuucgagccagcacu

SEQ ID NO: 1640859 - RNA, 19 nt, Artificial Sequence
  Description of Artificial Sequence: Synthetic oligonucleotide
  Sense strand starting at position 1806 of SEQ ID NO: 1561018
gcggaagcagaucaguaau

SEQ ID NO: 1640860 - RNA, 19 nt, Artificial Sequence
  Description of Artificial Sequence: Synthetic oligonucleotide
  Antisense strand to SEQ ID NO: 1640859
auuacugaucugcuuccgc

SEQ ID NO: 1640861 - RNA, 19 nt, Artificial Sequence
  Description of Artificial Sequence: Synthetic oligonucleotide
  Sense strand starting at position 1808 of SEQ ID NO: 1561018
ggaagcagaucaguaauaa

SEQ ID NO: 1640862 - RNA, 19 nt, Artificial Sequence
  Description of Artificial Sequence: Synthetic oligonucleotide
  Antisense strand to SEQ ID NO: 1640861
uuauuacugaucugcuucc

SEQ ID NO: 1640863 - RNA, 19 nt, Artificial Sequence
  Description of Artificial Sequence: Synthetic oligonucleotide
  Sense strand starting at position 1833 of SEQ ID NO: 1561018
uccggaugugcaggagaua

SEQ ID NO: 1640864 - RNA, 19 nt, Artificial Sequence
  Description of Artificial Sequence: Synthetic oligonucleotide
  Antisense strand to SEQ ID NO: 1640863
uaucuccugcacauccgga

SEQ ID NO: 1640865 - RNA, 19 nt, Artificial Sequence
  Description of Artificial Sequence: Synthetic oligonucleotide
  Sense strand starting at position 1834 of SEQ ID NO: 1561018
ccggaugugcaggagauaa

SEQ ID NO: 1640866 - RNA, 19 nt, Artificial Sequence
  Description of Artificial Sequence: Synthetic oligonucleotide
  Antisense strand to SEQ ID NO: 1640865
uuaucuccugcacauccgg

SEQ ID NO: 1640867 - RNA, 19 nt, Artificial Sequence
  Description of Artificial Sequence: Synthetic oligonucleotide
  Sense strand starting at position 1844 of SEQ ID NO: 1561018
aggagauaagggcgaguuu

SEQ ID NO: 1640868 - RNA, 19 nt, Artificial Sequence
  Description of Artificial Sequence: Synthetic oligonucleotide
  Antisense strand to SEQ ID NO: 1640867
aaacucgcccuuaucuccu

SEQ ID NO: 1640869 - RNA, 19 nt, Artificial Sequence
  Description of Artificial Sequence: Synthetic oligonucleotide
  Sense strand starting at position 2153 of SEQ ID NO: 1561018
uaaaguaaggcugggucau

SEQ ID NO: 1640870 - RNA, 19 nt, Artificial Sequence
  Description of Artificial Sequence: Synthetic oligonucleotide
  Antisense strand to SEQ ID NO: 1640869
augacccagccuuacuuua

SEQ ID NO: 1640871 - RNA, 19 nt, Artificial Sequence
  Description of Artificial Sequence: Synthetic oligonucleotide
  Sense strand starting at position 2154 of SEQ ID NO: 1561018
aaaguaaggcugggucauu

SEQ ID NO: 1640872 - RNA, 19 nt, Artificial Sequence
  Description of Artificial Sequence: Synthetic oligonucleotide
  Antisense strand to SEQ ID NO: 1640871
aaugacccagccuuacuuu

SEQ ID NO: 1640873 - RNA, 19 nt, Artificial Sequence
  Description of Artificial Sequence: Synthetic oligonucleotide
  Sense strand starting at position 2304 of SEQ ID NO: 1561018
cucccaaaguguuuaggau

SEQ ID NO: 1640874 - RNA, 19 nt, Artificial Sequence
  Description of Artificial Sequence: Synthetic oligonucleotide
  Antisense strand to SEQ ID NO: 1640873
auccuaaacacuuugggag

SEQ ID NO: 1640875 - RNA, 19 nt, Artificial Sequence
  Description of Artificial Sequence: Synthetic oligonucleotide
  Sense strand starting at position 2308 of SEQ ID NO: 1561018
caaaguguuuaggauuaca

SEQ ID NO: 1640876 - RNA, 19 nt, Artificial Sequence
  Description of Artificial Sequence: Synthetic oligonucleotide
  Antisense strand to SEQ ID NO: 1640875
uguaauccuaaacacuuug

SEQ ID NO: 1640877 - RNA, 19 nt, Artificial Sequence
  Description of Artificial Sequence: Synthetic oligonucleotide
  Sense strand starting at position 2775 of SEQ ID NO: 1561018
cacgucuagccagauguga

SEQ ID NO: 1640878 - RNA, 19 nt, Artificial Sequence
  Description of Artificial Sequence: Synthetic oligonucleotide
  Antisense strand to SEQ ID NO: 1640877
ucacaucuggcuagacgug

SEQ ID NO: 1640879 - RNA, 19 nt, Artificial Sequence
  Description of Artificial Sequence: Synthetic oligonucleotide
  Sense strand starting at position 2777 of SEQ ID NO: 1561018
cgucuagccagaugugaua

SEQ ID NO: 1640880 - RNA, 19 nt, Artificial Sequence
  Description of Artificial Sequence: Synthetic oligonucleotide
  Antisense strand to SEQ ID NO: 1640879
uaucacaucuggcuagacg

SEQ ID NO: 1640881 - RNA, 19 nt, Artificial Sequence
  Description of Artificial Sequence: Synthetic oligonucleotide
  Sense strand starting at position 2823 of SEQ ID NO: 1561018
auguacuguuccuuugcga

SEQ ID NO: 1640882 - RNA, 19 nt, Artificial Sequence
  Description of Artificial Sequence: Synthetic oligonucleotide
  Antisense strand to SEQ ID NO: 1640881
ucgcaaaggaacaguacau

SEQ ID NO: 1640883 - RNA, 19 nt, Artificial Sequence
  Description of Artificial Sequence: Synthetic oligonucleotide
  Sense strand starting at position 2839 of SEQ ID NO: 1561018
cgagguuggucccuuuaau

SEQ ID NO: 1640884 - RNA, 19 nt, Artificial Sequence
  Description of Artificial Sequence: Synthetic oligonucleotide
  Antisense strand to SEQ ID NO: 1640883
auuaaagggaccaaccucg

SEQ ID NO: 1640885 - RNA, 19 nt, Artificial Sequence
  Description of Artificial Sequence: Synthetic oligonucleotide
  Sense strand starting at position 2908 of SEQ ID NO: 1561018
acacguugcuuaccuagaa

SEQ ID NO: 1640886 - RNA, 19 nt, Artificial Sequence
  Description of Artificial Sequence: Synthetic oligonucleotide
  Antisense strand to SEQ ID NO: 1640885
uucuagguaagcaacgugu

SEQ ID NO: 1640887 - RNA, 19 nt, Artificial Sequence
  Description of Artificial Sequence: Synthetic oligonucleotide
  Sense strand starting at position 2929 of SEQ ID NO: 1561018
cguggcuccaccgugaauu

SEQ ID NO: 1640888 - RNA, 19 nt, Artificial Sequence
  Description of Artificial Sequence: Synthetic oligonucleotide
  Antisense strand to SEQ ID NO: 1640887
aauucacgguggagccacg

SEQ ID NO: 1640889 - RNA, 19 nt, Artificial Sequence
  Description of Artificial Sequence: Synthetic oligonucleotide
  Sense strand starting at position 2946 of SEQ ID NO: 1561018
uucuaauugguccgugcua

SEQ ID NO: 1640890 - RNA, 19 nt, Artificial Sequence
  Description of Artificial Sequence: Synthetic oligonucleotide
  Antisense strand to SEQ ID NO: 1640889
uagcacggaccaauuagaa

SEQ ID NO: 1640891 - RNA, 19 nt, Artificial Sequence
  Description of Artificial Sequence: Synthetic oligonucleotide
  Sense strand starting at position 2947 of SEQ ID NO: 1561018
ucuaauugguccgugcuau

SEQ ID NO: 1640892 - RNA, 19 nt, Artificial Sequence
  Description of Artificial Sequence: Synthetic oligonucleotide
  Antisense strand to SEQ ID NO: 1640891
auagcacggaccaauuaga

SEQ ID NO: 1640893 - RNA, 19 nt, Artificial Sequence
  Description of Artificial Sequence: Synthetic oligonucleotide
  Sense strand starting at position 2948 of SEQ ID NO: 1561018
cuaauugguccgugcuauc

SEQ ID NO: 1640894 - RNA, 19 nt, Artificial Sequence
  Description of Artificial Sequence: Synthetic oligonucleotide
  Antisense strand to SEQ ID NO: 1640893
gauagcacggaccaauuag

SEQ ID NO: 1640895 - RNA, 19 nt, Artificial Sequence
  Description of Artificial Sequence: Synthetic oligonucleotide
  Sense strand starting at position 3148 of SEQ ID NO: 1561018
ugagcaagucggagucgua

SEQ ID NO: 1640896 - RNA, 19 nt, Artificial Sequence
  Description of Artificial Sequence: Synthetic oligonucleotide
  Antisense strand to SEQ ID NO: 1640895
uacgacuccgacuugcuca

SEQ ID NO: 1640897 - RNA, 19 nt, Artificial Sequence
  Description of Artificial Sequence: Synthetic oligonucleotide
  Sense strand starting at position 3157 of SEQ ID NO: 1561018
cggagucguagguccaguu

SEQ ID NO: 1640898 - RNA, 19 nt, Artificial Sequence
  Description of Artificial Sequence: Synthetic oligonucleotide
  Antisense strand to SEQ ID NO: 1640897
aacuggaccuacgacuccg

SEQ ID NO: 1640899 - RNA, 19 nt, Artificial Sequence
  Description of Artificial Sequence: Synthetic oligonucleotide
  Sense strand starting at position 3170 of SEQ ID NO: 1561018
ccaguucugauacgguaga

SEQ ID NO: 1640900 - RNA, 19 nt, Artificial Sequence
  Description of Artificial Sequence: Synthetic oligonucleotide
  Antisense strand to SEQ ID NO: 1640899
ucuaccguaucagaacugg

SEQ ID NO: 1640901 - RNA, 19 nt, Artificial Sequence
  Description of Artificial Sequence: Synthetic oligonucleotide
  Sense strand starting at position 3196 of SEQ ID NO: 1561018
ggccgugagcuuucuucuu

SEQ ID NO: 1640902 - RNA, 19 nt, Artificial Sequence
  Description of Artificial Sequence: Synthetic oligonucleotide
  Antisense strand to SEQ ID NO: 1640901
aagaagaaagcucacggcc

SEQ ID NO: 1640903 - RNA, 19 nt, Artificial Sequence
  Description of Artificial Sequence: Synthetic oligonucleotide
  Sense strand starting at position 3696 of SEQ ID NO: 1561018
cucguccuccucugagaau

SEQ ID NO: 1640904 - RNA, 19 nt, Artificial Sequence
  Description of Artificial Sequence: Synthetic oligonucleotide
  Antisense strand to SEQ ID NO: 1640903
auucucagaggaggacgag

SEQ ID NO: 1640905 - RNA, 19 nt, Artificial Sequence
  Description of Artificial Sequence: Synthetic oligonucleotide
  Sense strand starting at position 3707 of SEQ ID NO: 1561018
cugagaauucccgggcugu

SEQ ID NO: 1640906 - RNA, 19 nt, Artificial Sequence
  Description of Artificial Sequence: Synthetic oligonucleotide
  Antisense strand to SEQ ID NO: 1640905
acagcccgggaauucucag

SEQ ID NO: 1640907 - RNA, 19 nt, Artificial Sequence
  Description of Artificial Sequence: Synthetic oligonucleotide
  Sense strand starting at position 3708 of SEQ ID NO: 1561018
ugagaauucccgggcugug

SEQ ID NO: 1640908 - RNA, 19 nt, Artificial Sequence
  Description of Artificial Sequence: Synthetic oligonucleotide
  Antisense strand to SEQ ID NO: 1640907
cacagcccgggaauucuca

SEQ ID NO: 1640909 - RNA, 19 nt, Artificial Sequence
  Description of Artificial Sequence: Synthetic oligonucleotide
  Sense strand starting at position 3722 of SEQ ID NO: 1561018
cugugugcagcucucgaaa

SEQ ID NO: 1640910 - RNA, 19 nt, Artificial Sequence
  Description of Artificial Sequence: Synthetic oligonucleotide
  Antisense strand to SEQ ID NO: 1640909
uuucgagagcugcacacag

SEQ ID NO: 1640911 - RNA, 19 nt, Artificial Sequence
  Description of Artificial Sequence: Synthetic oligonucleotide
  Sense strand starting at position 3889 of SEQ ID NO: 1561018
cuucuucugcgagagggaa

SEQ ID NO: 1640912 - RNA, 19 nt, Artificial Sequence
  Description of Artificial Sequence: Synthetic oligonucleotide
  Antisense strand to SEQ ID NO: 1640911
uucccucucgcagaagaag

SEQ ID NO: 1640913 - RNA, 19 nt, Artificial Sequence
  Description of Artificial Sequence: Synthetic oligonucleotide
  Sense strand starting at position 3913 of SEQ ID NO: 1561018
cgaagacucuuagaagcuu

SEQ ID NO: 1640914 - RNA, 19 nt, Artificial Sequence
  Description of Artificial Sequence: Synthetic oligonucleotide
  Antisense strand to SEQ ID NO: 1640913
aagcuucuaagagucuucg

SEQ ID NO: 1640915 - RNA, 19 nt, Artificial Sequence
  Description of Artificial Sequence: Synthetic oligonucleotide
  Sense strand starting at position 3927 of SEQ ID NO: 1561018
agcuuagacuguccgaauc

SEQ ID NO: 1640916 - RNA, 19 nt, Artificial Sequence
  Description of Artificial Sequence: Synthetic oligonucleotide
  Antisense strand to SEQ ID NO: 1640915
gauucggacagucuaagcu

SEQ ID NO: 1640917 - RNA, 19 nt, Artificial Sequence
  Description of Artificial Sequence: Synthetic oligonucleotide
  Sense strand starting at position 3937 of SEQ ID NO: 1561018
guccgaaucacagaagugu

SEQ ID NO: 1640918 - RNA, 19 nt, Artificial Sequence
  Description of Artificial Sequence: Synthetic oligonucleotide
  Antisense strand to SEQ ID NO: 1640917
acacuucugugauucggac

SEQ ID NO: 1640919 - RNA, 19 nt, Artificial Sequence
  Description of Artificial Sequence: Synthetic oligonucleotide
  Sense strand starting at position 3954 of SEQ ID NO: 1561018
gucccaguccuggaaucuu

SEQ ID NO: 1640920 - RNA, 19 nt, Artificial Sequence
  Description of Artificial Sequence: Synthetic oligonucleotide
  Antisense strand to SEQ ID NO: 1640919
aagauuccaggacugggac

SEQ ID NO: 1640921 - RNA, 19 nt, Artificial Sequence
  Description of Artificial Sequence: Synthetic oligonucleotide
  Sense strand starting at position 3962 of SEQ ID NO: 1561018
ccuggaaucuuagaauauu

SEQ ID NO: 1640922 - RNA, 19 nt, Artificial Sequence
  Description of Artificial Sequence: Synthetic oligonucleotide
  Antisense strand to SEQ ID NO: 1640921
aauauucuaagauuccagg

SEQ ID NO: 1640923 - RNA, 19 nt, Artificial Sequence
  Description of Artificial Sequence: Synthetic oligonucleotide
  Sense strand starting at position 3976 of SEQ ID NO: 1561018
auauuugaaucacgggauu

SEQ ID NO: 1640924 - RNA, 19 nt, Artificial Sequence
  Description of Artificial Sequence: Synthetic oligonucleotide
  Antisense strand to SEQ ID NO: 1640923
aaucccgugauucaaauau

SEQ ID NO: 1640925 - RNA, 19 nt, Artificial Sequence
  Description of Artificial Sequence: Synthetic oligonucleotide
  Sense strand starting at position 407 of SEQ ID NO: 1561019
gagccaaucguuuagacuu

SEQ ID NO: 1640926 - RNA, 19 nt, Artificial Sequence
  Description of Artificial Sequence: Synthetic oligonucleotide
  Antisense strand to SEQ ID NO: 1640925
aagucuaaacgauuggcuc

SEQ ID NO: 1640927 - RNA, 19 nt, Artificial Sequence
  Description of Artificial Sequence: Synthetic oligonucleotide
  Sense strand starting at position 420 of SEQ ID NO: 1561019
agacuuucuggccaucaau

SEQ ID NO: 1640928 - RNA, 19 nt, Artificial Sequence
  Description of Artificial Sequence: Synthetic oligonucleotide
  Antisense strand to SEQ ID NO: 1640927
auugauggccagaaagucu

SEQ ID NO: 1640929 - RNA, 19 nt, Artificial Sequence
  Description of Artificial Sequence: Synthetic oligonucleotide
  Sense strand starting at position 462 of SEQ ID NO: 1561019
gugugaaccuucccaccua

SEQ ID NO: 1640930 - RNA, 19 nt, Artificial Sequence
  Description of Artificial Sequence: Synthetic oligonucleotide
  Antisense strand to SEQ ID NO: 1640929
uaggugggaagguucacac

SEQ ID NO: 1640931 - RNA, 19 nt, Artificial Sequence
  Description of Artificial Sequence: Synthetic oligonucleotide
  Sense strand starting at position 752 of SEQ ID NO: 1561019
auacuuucuccacgguagu

SEQ ID NO: 1640932 - RNA, 19 nt, Artificial Sequence
  Description of Artificial Sequence: Synthetic oligonucleotide
  Antisense strand to SEQ ID NO: 1640931
acuaccguggagaaaguau

SEQ ID NO: 1640933 - RNA, 19 nt, Artificial Sequence
  Description of Artificial Sequence: Synthetic oligonucleotide
  Sense strand starting at position 901 of SEQ ID NO: 1561019
ugggcucaucauggaaauu

SEQ ID NO: 1640934 - RNA, 19 nt, Artificial Sequence
  Description of Artificial Sequence: Synthetic oligonucleotide
  Antisense strand to SEQ ID NO: 1640933
aauuuccaugaugagccca

SEQ ID NO: 1640935 - RNA, 19 nt, Artificial Sequence
  Description of Artificial Sequence: Synthetic oligonucleotide
  Sense strand starting at position 1386 of SEQ ID NO: 1561019
gugugaaauacuggaaaua

SEQ ID NO: 1640936 - RNA, 19 nt, Artificial Sequence
  Description of Artificial Sequence: Synthetic oligonucleotide
  Antisense strand to SEQ ID NO: 1640935
uauuuccaguauuucacac

SEQ ID NO: 1640937 - RNA, 19 nt, Artificial Sequence
  Description of Artificial Sequence: Synthetic oligonucleotide
  Sense strand starting at position 1437 of SEQ ID NO: 1561019
cccgauuucugggucccua

SEQ ID NO: 1640938 - RNA, 19 nt, Artificial Sequence
  Description of Artificial Sequence: Synthetic oligonucleotide
  Antisense strand to SEQ ID NO: 1640937
uagggacccagaaaucggg

SEQ ID NO: 1640939 - RNA, 19 nt, Artificial Sequence
  Description of Artificial Sequence: Synthetic oligonucleotide
  Sense strand starting at position 1480 of SEQ ID NO: 1561019
cucucuuguuccucgacaa

SEQ ID NO: 1640940 - RNA, 19 nt, Artificial Sequence
  Description of Artificial Sequence: Synthetic oligonucleotide
  Antisense strand to SEQ ID NO: 1640939
uugucgaggaacaagagag

SEQ ID NO: 1640941 - RNA, 19 nt, Artificial Sequence
  Description of Artificial Sequence: Synthetic oligonucleotide
  Sense strand starting at position 1481 of SEQ ID NO: 1561019
ucucuuguuccucgacaau

SEQ ID NO: 1640942 - RNA, 19 nt, Artificial Sequence
  Description of Artificial Sequence: Synthetic oligonucleotide
  Antisense strand to SEQ ID NO: 1640941
auugucgaggaacaagaga

SEQ ID NO: 1640943 - RNA, 19 nt, Artificial Sequence
  Description of Artificial Sequence: Synthetic oligonucleotide
  Sense strand starting at position 1688 of SEQ ID NO: 1561019
ggccguugcgccaagauga

SEQ ID NO: 1640944 - RNA, 19 nt, Artificial Sequence
  Description of Artificial Sequence: Synthetic oligonucleotide
  Antisense strand to SEQ ID NO: 1640943
ucaucuuggcgcaacggcc

SEQ ID NO: 1640945 - RNA, 19 nt, Artificial Sequence
  Description of Artificial Sequence: Synthetic oligonucleotide
  Sense strand starting at position 1689 of SEQ ID NO: 1561019
gccguugcgccaagaugau

SEQ ID NO: 1640946 - RNA, 19 nt, Artificial Sequence
  Description of Artificial Sequence: Synthetic oligonucleotide
  Antisense strand to SEQ ID NO: 1640945
aucaucuuggcgcaacggc

SEQ ID NO: 1640947 - RNA, 19 nt, Artificial Sequence
  Description of Artificial Sequence: Synthetic oligonucleotide
  Sense strand starting at position 2081 of SEQ ID NO: 1561019
ucucgaugguuccucauaa

SEQ ID NO: 1640948 - RNA, 19 nt, Artificial Sequence
  Description of Artificial Sequence: Synthetic oligonucleotide
  Antisense strand to SEQ ID NO: 1640947
uuaugaggaaccaucgaga

SEQ ID NO: 1640949 - RNA, 19 nt, Artificial Sequence
  Description of Artificial Sequence: Synthetic oligonucleotide
  Sense strand starting at position 2082 of SEQ ID NO: 1561019
cucgaugguuccucauaaa

SEQ ID NO: 1640950 - RNA, 19 nt, Artificial Sequence
  Description of Artificial Sequence: Synthetic oligonucleotide
  Antisense strand to SEQ ID NO: 1640949
uuuaugaggaaccaucgag

SEQ ID NO: 1640951 - RNA, 19 nt, Artificial Sequence
  Description of Artificial Sequence: Synthetic oligonucleotide
  Sense strand starting at position 2264 of SEQ ID NO: 1561019
auucuuagcuguucuuuga

SEQ ID NO: 1640952 - RNA, 19 nt, Artificial Sequence
  Description of Artificial Sequence: Synthetic oligonucleotide
  Antisense strand to SEQ ID NO: 1640951
ucaaagaacagcuaagaau

SEQ ID NO: 1640953 - RNA, 19 nt, Artificial Sequence
  Description of Artificial Sequence: Synthetic oligonucleotide
  Sense strand starting at position 2271 of SEQ ID NO: 1561019
gcuguucuuugaguaacca

SEQ ID NO: 1640954 - RNA, 19 nt, Artificial Sequence
  Description of Artificial Sequence: Synthetic oligonucleotide
  Antisense strand to SEQ ID NO: 1640953
ugguuacucaaagaacagc

SEQ ID NO: 1640955 - RNA, 19 nt, Artificial Sequence
  Description of Artificial Sequence: Synthetic oligonucleotide
  Sense strand starting at position 2376 of SEQ ID NO: 1561019
aggccacucguuuccguaa

SEQ ID NO: 1640956 - RNA, 19 nt, Artificial Sequence
  Description of Artificial Sequence: Synthetic oligonucleotide
  Antisense strand to SEQ ID NO: 1640955
uuacggaaacgaguggccu

SEQ ID NO: 1640957 - RNA, 19 nt, Artificial Sequence
  Description of Artificial Sequence: Synthetic oligonucleotide
  Sense strand starting at position 2847 of SEQ ID NO: 1561019
ugaauucgaccuggagaac

SEQ ID NO: 1640958 - RNA, 19 nt, Artificial Sequence
  Description of Artificial Sequence: Synthetic oligonucleotide
  Antisense strand to SEQ ID NO: 1640957
guucuccaggucgaauuca

SEQ ID NO: 1640959 - RNA, 19 nt, Artificial Sequence
  Description of Artificial Sequence: Synthetic oligonucleotide
  Sense strand starting at position 2961 of SEQ ID NO: 1561019
ccggaacucugaguuguag

SEQ ID NO: 1640960 - RNA, 19 nt, Artificial Sequence
  Description of Artificial Sequence: Synthetic oligonucleotide
  Antisense strand to SEQ ID NO: 1640959
cuacaacucagaguuccgg

SEQ ID NO: 1640961 - RNA, 19 nt, Artificial Sequence
  Description of Artificial Sequence: Synthetic oligonucleotide
  Sense strand starting at position 2963 of SEQ ID NO: 1561019
ggaacucugaguuguagga

SEQ ID NO: 1640962 - RNA, 19 nt, Artificial Sequence
  Description of Artificial Sequence: Synthetic oligonucleotide
  Antisense strand to SEQ ID NO: 1640961
uccuacaacucagaguucc

SEQ ID NO: 1640963 - RNA, 19 nt, Artificial Sequence
  Description of Artificial Sequence: Synthetic oligonucleotide
  Sense strand starting at position 3001 of SEQ ID NO: 1561019
acccuugugaccugggcaa

SEQ ID NO: 1640964 - RNA, 19 nt, Artificial Sequence
  Description of Artificial Sequence: Synthetic oligonucleotide
  Antisense strand to SEQ ID NO: 1640963
uugcccaggucacaagggu

SEQ ID NO: 1640965 - RNA, 19 nt, Artificial Sequence
  Description of Artificial Sequence: Synthetic oligonucleotide
  Sense strand starting at position 3021 of SEQ ID NO: 1561019
gaggcuguguccuugagga

SEQ ID NO: 1640966 - RNA, 19 nt, Artificial Sequence
  Description of Artificial Sequence: Synthetic oligonucleotide
  Antisense strand to SEQ ID NO: 1640965
uccucaaggacacagccuc

SEQ ID NO: 1640967 - RNA, 19 nt, Artificial Sequence
  Description of Artificial Sequence: Synthetic oligonucleotide
  Sense strand starting at position 3067 of SEQ ID NO: 1561019
agagggaugguucguuuga

SEQ ID NO: 1640968 - RNA, 19 nt, Artificial Sequence
  Description of Artificial Sequence: Synthetic oligonucleotide
  Antisense strand to SEQ ID NO: 1640967
ucaaacgaaccaucccucu

SEQ ID NO: 1640969 - RNA, 19 nt, Artificial Sequence
  Description of Artificial Sequence: Synthetic oligonucleotide
  Sense strand starting at position 3068 of SEQ ID NO: 1561019
gagggaugguucguuugac

SEQ ID NO: 1640970 - RNA, 19 nt, Artificial Sequence
  Description of Artificial Sequence: Synthetic oligonucleotide
  Antisense strand to SEQ ID NO: 1640969
gucaaacgaaccaucccuc

SEQ ID NO: 1640971 - RNA, 19 nt, Artificial Sequence
  Description of Artificial Sequence: Synthetic oligonucleotide
  Sense strand starting at position 3069 of SEQ ID NO: 1561019
agggaugguucguuugacu

SEQ ID NO: 1640972 - RNA, 19 nt, Artificial Sequence
  Description of Artificial Sequence: Synthetic oligonucleotide
  Antisense strand to SEQ ID NO: 1640971
agucaaacgaaccaucccu

SEQ ID NO: 1640973 - RNA, 19 nt, Artificial Sequence
  Description of Artificial Sequence: Synthetic oligonucleotide
  Sense strand starting at position 3074 of SEQ ID NO: 1561019
ugguucguuugacuuaaga

SEQ ID NO: 1640974 - RNA, 19 nt, Artificial Sequence
  Description of Artificial Sequence: Synthetic oligonucleotide
  Antisense strand to SEQ ID NO: 1640973
ucuuaagucaaacgaacca

SEQ ID NO: 1640975 - RNA, 19 nt, Artificial Sequence
  Description of Artificial Sequence: Synthetic oligonucleotide
  Sense strand starting at position 3076 of SEQ ID NO: 1561019
guucguuugacuuaagaug

SEQ ID NO: 1640976 - RNA, 19 nt, Artificial Sequence
  Description of Artificial Sequence: Synthetic oligonucleotide
  Antisense strand to SEQ ID NO: 1640975
caucuuaagucaaacgaac

SEQ ID NO: 1640977 - RNA, 19 nt, Artificial Sequence
  Description of Artificial Sequence: Synthetic oligonucleotide
  Sense strand starting at position 3167 of SEQ ID NO: 1561019
gcaggcuuccgagagacua

SEQ ID NO: 1640978 - RNA, 19 nt, Artificial Sequence
  Description of Artificial Sequence: Synthetic oligonucleotide
  Antisense strand to SEQ ID NO: 1640977
uagucucucggaagccugc

SEQ ID NO: 1640979 - RNA, 19 nt, Artificial Sequence
  Description of Artificial Sequence: Synthetic oligonucleotide
  Sense strand starting at position 3222 of SEQ ID NO: 1561019
augggauuucugcgugcaa

SEQ ID NO: 1640980 - RNA, 19 nt, Artificial Sequence
  Description of Artificial Sequence: Synthetic oligonucleotide
  Antisense strand to SEQ ID NO: 1640979
uugcacgcagaaaucccau

SEQ ID NO: 1640981 - RNA, 19 nt, Artificial Sequence
  Description of Artificial Sequence: Synthetic oligonucleotide
  Sense strand starting at position 3223 of SEQ ID NO: 1561019
ugggauuucugcgugcaaa

SEQ ID NO: 1640982 - RNA, 19 nt, Artificial Sequence
  Description of Artificial Sequence: Synthetic oligonucleotide
  Antisense strand to SEQ ID NO: 1640981
uuugcacgcagaaauccca

SEQ ID NO: 1640983 - RNA, 19 nt, Artificial Sequence
  Description of Artificial Sequence: Synthetic oligonucleotide
  Sense strand starting at position 3224 of SEQ ID NO: 1561019
gggauuucugcgugcaaac

SEQ ID NO: 1640984 - RNA, 19 nt, Artificial Sequence
  Description of Artificial Sequence: Synthetic oligonucleotide
  Antisense strand to SEQ ID NO: 1640983
guuugcacgcagaaauccc

SEQ ID NO: 1640985 - RNA, 19 nt, Artificial Sequence
  Description of Artificial Sequence: Synthetic oligonucleotide
  Sense strand starting at position 3226 of SEQ ID NO: 1561019
gauuucugcgugcaaaccu

SEQ ID NO: 1640986 - RNA, 19 nt, Artificial Sequence
  Description of Artificial Sequence: Synthetic oligonucleotide
  Antisense strand to SEQ ID NO: 1640985
agguuugcacgcagaaauc

SEQ ID NO: 1640987 - RNA, 19 nt, Artificial Sequence
  Description of Artificial Sequence: Synthetic oligonucleotide
  Sense strand starting at position 3362 of SEQ ID NO: 1561019
ugaggaucuggcugcuuaa

SEQ ID NO: 1640988 - RNA, 19 nt, Artificial Sequence
  Description of Artificial Sequence: Synthetic oligonucleotide
  Antisense strand to SEQ ID NO: 1640987
uuaagcagccagauccuca

SEQ ID NO: 1640989 - RNA, 19 nt, Artificial Sequence
  Description of Artificial Sequence: Synthetic oligonucleotide
  Sense strand starting at position 3365 of SEQ ID NO: 1561019
ggaucuggcugcuuaagaa

SEQ ID NO: 1640990 - RNA, 19 nt, Artificial Sequence
  Description of Artificial Sequence: Synthetic oligonucleotide
  Antisense strand to SEQ ID NO: 1640989
uucuuaagcagccagaucc

SEQ ID NO: 1640991 - RNA, 19 nt, Artificial Sequence
  Description of Artificial Sequence: Synthetic oligonucleotide
  Sense strand starting at position 3372 of SEQ ID NO: 1561019
gcugcuuaagaauaaagau

SEQ ID NO: 1640992 - RNA, 19 nt, Artificial Sequence
  Description of Artificial Sequence: Synthetic oligonucleotide
  Antisense strand to SEQ ID NO: 1640991
aucuuuauucuuaagcagc

SEQ ID NO: 1640993 - RNA, 19 nt, Artificial Sequence
  Description of Artificial Sequence: Synthetic oligonucleotide
  Sense strand starting at position 3409 of SEQ ID NO: 1561019
uaaugaaugccugggcuuu

SEQ ID NO: 1640994 - RNA, 19 nt, Artificial Sequence
  Description of Artificial Sequence: Synthetic oligonucleotide
  Antisense strand to SEQ ID NO: 1640993
aaagcccaggcauucauua

SEQ ID NO: 1640995 - RNA, 19 nt, Artificial Sequence
  Description of Artificial Sequence: Synthetic oligonucleotide
  Sense strand starting at position 3437 of SEQ ID NO: 1561019
gagggccugagcuauuagu

SEQ ID NO: 1640996 - RNA, 19 nt, Artificial Sequence
  Description of Artificial Sequence: Synthetic oligonucleotide
  Antisense strand to SEQ ID NO: 1640995
acuaauagcucaggcccuc

SEQ ID NO: 1640997 - RNA, 19 nt, Artificial Sequence
  Description of Artificial Sequence: Synthetic oligonucleotide
  Sense strand starting at position 3580 of SEQ ID NO: 1561019
ugucuugggcuucagaaag

SEQ ID NO: 1640998 - RNA, 19 nt, Artificial Sequence
  Description of Artificial Sequence: Synthetic oligonucleotide
  Antisense strand to SEQ ID NO: 1640997
cuuucugaagcccaagaca

SEQ ID NO: 1640999 - RNA, 19 nt, Artificial Sequence
  Description of Artificial Sequence: Synthetic oligonucleotide
  Sense strand starting at position 3602 of SEQ ID NO: 1561019
agguucuggccuuggagaa

SEQ ID NO: 1641000 - RNA, 19 nt, Artificial Sequence
  Description of Artificial Sequence: Synthetic oligonucleotide
  Antisense strand to SEQ ID NO: 1640999
uucuccaaggccagaaccu

SEQ ID NO: 1641001 - RNA, 19 nt, Artificial Sequence
  Description of Artificial Sequence: Synthetic oligonucleotide
  Sense strand starting at position 3806 of SEQ ID NO: 1561019
ggcuccugggucugggaua

SEQ ID NO: 1641002 - RNA, 19 nt, Artificial Sequence
  Description of Artificial Sequence: Synthetic oligonucleotide
  Antisense strand to SEQ ID NO: 1641001
uaucccagacccaggagcc

SEQ ID NO: 1641003 - RNA, 19 nt, Artificial Sequence
  Description of Artificial Sequence: Synthetic oligonucleotide
  Sense strand starting at position 3927 of SEQ ID NO: 1561019
caggcuucucuugggcaau

SEQ ID NO: 1641004 - RNA, 19 nt, Artificial Sequence
  Description of Artificial Sequence: Synthetic oligonucleotide
  Antisense strand to SEQ ID NO: 1641003
auugcccaagagaagccug

SEQ ID NO: 1641005 - RNA, 19 nt, Artificial Sequence
  Description of Artificial Sequence: Synthetic oligonucleotide
  Sense strand starting at position 275 of SEQ ID NO: 1561020
ccacgaccucaguaacaau

SEQ ID NO: 1641006 - RNA, 19 nt, Artificial Sequence
  Description of Artificial Sequence: Synthetic oligonucleotide
  Antisense strand to SEQ ID NO: 1641005
auuguuacugaggucgugg

SEQ ID NO: 1641007 - RNA, 19 nt, Artificial Sequence
  Description of Artificial Sequence: Synthetic oligonucleotide
  Sense strand starting at position 320 of SEQ ID NO: 1561020
gagagauuccagggccaag

SEQ ID NO: 1641008 - RNA, 19 nt, Artificial Sequence
  Description of Artificial Sequence: Synthetic oligonucleotide
  Antisense strand to SEQ ID NO: 1641007
cuuggcccuggaaucucuc

SEQ ID NO: 1641009 - RNA, 19 nt, Artificial Sequence
  Description of Artificial Sequence: Synthetic oligonucleotide
  Sense strand starting at position 492 of SEQ ID NO: 1561020
ucaaaucugucagggagau

SEQ ID NO: 1641010 - RNA, 19 nt, Artificial Sequence
  Description of Artificial Sequence: Synthetic oligonucleotide
  Antisense strand to SEQ ID NO: 1641009
aucucccugacagauuuga

SEQ ID NO: 1641011 - RNA, 19 nt, Artificial Sequence
  Description of Artificial Sequence: Synthetic oligonucleotide
  Sense strand starting at position 546 of SEQ ID NO: 1561020
aggauauaauuagaugucu

SEQ ID NO: 1641012 - RNA, 19 nt, Artificial Sequence
  Description of Artificial Sequence: Synthetic oligonucleotide
  Antisense strand to SEQ ID NO: 1641011
agacaucuaauuauauccu

SEQ ID NO: 1641013 - RNA, 19 nt, Artificial Sequence
  Description of Artificial Sequence: Synthetic oligonucleotide
  Sense strand starting at position 551 of SEQ ID NO: 1561020
auaauuagaugucucagga

SEQ ID NO: 1641014 - RNA, 19 nt, Artificial Sequence
  Description of Artificial Sequence: Synthetic oligonucleotide
  Antisense strand to SEQ ID NO: 1641013
uccugagacaucuaauuau

SEQ ID NO: 1641015 - RNA, 19 nt, Artificial Sequence
  Description of Artificial Sequence: Synthetic oligonucleotide
  Sense strand starting at position 765 of SEQ ID NO: 1561020
guuccucucucccaggaaa

SEQ ID NO: 1641016 - RNA, 19 nt, Artificial Sequence
  Description of Artificial Sequence: Synthetic oligonucleotide
  Antisense strand to SEQ ID NO: 1641015
uuuccugggagagaggaac

SEQ ID NO: 1641017 - RNA, 19 nt, Artificial Sequence
  Description of Artificial Sequence: Synthetic oligonucleotide
  Sense strand starting at position 1043 of SEQ ID NO: 1561020
ccggcuauucugggaggga

SEQ ID NO: 1641018 - RNA, 19 nt, Artificial Sequence
  Description of Artificial Sequence: Synthetic oligonucleotide
  Antisense strand to SEQ ID NO: 1641017
ucccucccagaauagccgg

SEQ ID NO: 1641019 - RNA, 19 nt, Artificial Sequence
  Description of Artificial Sequence: Synthetic oligonucleotide
  Sense strand starting at position 1059 of SEQ ID NO: 1561020
ggacaccuguuguuccaau

SEQ ID NO: 1641020 - RNA, 19 nt, Artificial Sequence
  Description of Artificial Sequence: Synthetic oligonucleotide
  Antisense strand to SEQ ID NO: 1641019
auuggaacaacaggugucc

SEQ ID NO: 1641021 - RNA, 19 nt, Artificial Sequence
  Description of Artificial Sequence: Synthetic oligonucleotide
  Sense strand starting at position 1142 of SEQ ID NO: 1561020
aucagagggccuuaagcua

SEQ ID NO: 1641022 - RNA, 19 nt, Artificial Sequence
  Description of Artificial Sequence: Synthetic oligonucleotide
  Antisense strand to SEQ ID NO: 1641021
uagcuuaaggcccucugau

SEQ ID NO: 1641023 - RNA, 19 nt, Artificial Sequence
  Description of Artificial Sequence: Synthetic oligonucleotide
  Sense strand starting at position 1569 of SEQ ID NO: 1561020
gggacaaaucgcuaaaguc

SEQ ID NO: 1641024 - RNA, 19 nt, Artificial Sequence
  Description of Artificial Sequence: Synthetic oligonucleotide
  Antisense strand to SEQ ID NO: 1641023
gacuuuagcgauuuguccc

SEQ ID NO: 1641025 - RNA, 19 nt, Artificial Sequence
  Description of Artificial Sequence: Synthetic oligonucleotide
  Sense strand starting at position 1577 of SEQ ID NO: 1561020
ucgcuaaagucagaagaga

SEQ ID NO: 1641026 - RNA, 19 nt, Artificial Sequence
  Description of Artificial Sequence: Synthetic oligonucleotide
  Antisense strand to SEQ ID NO: 1641025
ucucuucugacuuuagcga

SEQ ID NO: 1641027 - RNA, 19 nt, Artificial Sequence
  Description of Artificial Sequence: Synthetic oligonucleotide
  Sense strand starting at position 1636 of SEQ ID NO: 1561020
ccuacuaauucucuguagu

SEQ ID NO: 1641028 - RNA, 19 nt, Artificial Sequence
  Description of Artificial Sequence: Synthetic oligonucleotide
  Antisense strand to SEQ ID NO: 1641027
acuacagagaauuaguagg

SEQ ID NO: 1641029 - RNA, 19 nt, Artificial Sequence
  Description of Artificial Sequence: Synthetic oligonucleotide
  Sense strand starting at position 1637 of SEQ ID NO: 1561020
cuacuaauucucuguagug

SEQ ID NO: 1641030 - RNA, 19 nt, Artificial Sequence
  Description of Artificial Sequence: Synthetic oligonucleotide
  Antisense strand to SEQ ID NO: 1641029
cacuacagagaauuaguag

SEQ ID NO: 1641031 - RNA, 19 nt, Artificial Sequence
  Description of Artificial Sequence: Synthetic oligonucleotide
  Sense strand starting at position 1639 of SEQ ID NO: 1561020
acuaauucucuguagugag

SEQ ID NO: 1641032 - RNA, 19 nt, Artificial Sequence
  Description of Artificial Sequence: Synthetic oligonucleotide
  Antisense strand to SEQ ID NO: 1641031
cucacuacagagaauuagu

SEQ ID NO: 1641033 - RNA, 19 nt, Artificial Sequence
  Description of Artificial Sequence: Synthetic oligonucleotide
  Sense strand starting at position 2121 of SEQ ID NO: 1561020
caaaucuuggcuggagguu

SEQ ID NO: 1641034 - RNA, 19 nt, Artificial Sequence
  Description of Artificial Sequence: Synthetic oligonucleotide
  Antisense strand to SEQ ID NO: 1641033
aaccuccagccaagauuug

SEQ ID NO: 1641035 - RNA, 19 nt, Artificial Sequence
  Description of Artificial Sequence: Synthetic oligonucleotide
  Sense strand starting at position 2225 of SEQ ID NO: 1561020
gugccaucauucucccauu

SEQ ID NO: 1641036 - RNA, 19 nt, Artificial Sequence
  Description of Artificial Sequence: Synthetic oligonucleotide
  Antisense strand to SEQ ID NO: 1641035
aaugggagaaugauggcac

SEQ ID NO: 1641037 - RNA, 19 nt, Artificial Sequence
  Description of Artificial Sequence: Synthetic oligonucleotide
  Sense strand starting at position 2570 of SEQ ID NO: 1561020
gcuugaacuccuugaauuc

SEQ ID NO: 1641038 - RNA, 19 nt, Artificial Sequence
  Description of Artificial Sequence: Synthetic oligonucleotide
  Antisense strand to SEQ ID NO: 1641037
gaauucaaggaguucaagc

SEQ ID NO: 1641039 - RNA, 19 nt, Artificial Sequence
  Description of Artificial Sequence: Synthetic oligonucleotide
  Sense strand starting at position 2639 of SEQ ID NO: 1561020
gggcgagacuucgucugaa

SEQ ID NO: 1641040 - RNA, 19 nt, Artificial Sequence
  Description of Artificial Sequence: Synthetic oligonucleotide
  Antisense strand to SEQ ID NO: 1641039
uucagacgaagucucgccc

SEQ ID NO: 1641041 - RNA, 19 nt, Artificial Sequence
  Description of Artificial Sequence: Synthetic oligonucleotide
  Sense strand starting at position 2726 of SEQ ID NO: 1561020
uugccacuuccuugaguua

SEQ ID NO: 1641042 - RNA, 19 nt, Artificial Sequence
  Description of Artificial Sequence: Synthetic oligonucleotide
  Antisense strand to SEQ ID NO: 1641041
uaacucaaggaaguggcaa

SEQ ID NO: 1641043 - RNA, 19 nt, Artificial Sequence
  Description of Artificial Sequence: Synthetic oligonucleotide
  Sense strand starting at position 2729 of SEQ ID NO: 1561020
ccacuuccuugaguuacau

SEQ ID NO: 1641044 - RNA, 19 nt, Artificial Sequence
  Description of Artificial Sequence: Synthetic oligonucleotide
  Antisense strand to SEQ ID NO: 1641043
auguaacucaaggaagugg

SEQ ID NO: 1641045 - RNA, 19 nt, Artificial Sequence
  Description of Artificial Sequence: Synthetic oligonucleotide
  Sense strand starting at position 2733 of SEQ ID NO: 1561020
uuccuugaguuacauggau

SEQ ID NO: 1641046 - RNA, 19 nt, Artificial Sequence
  Description of Artificial Sequence: Synthetic oligonucleotide
  Antisense strand to SEQ ID NO: 1641045
auccauguaacucaaggaa

SEQ ID NO: 1641047 - RNA, 19 nt, Artificial Sequence
  Description of Artificial Sequence: Synthetic oligonucleotide
  Sense strand starting at position 2879 of SEQ ID NO: 1561020
gugccagugccugguuaau

SEQ ID NO: 1641048 - RNA, 19 nt, Artificial Sequence
  Description of Artificial Sequence: Synthetic oligonucleotide
  Antisense strand to SEQ ID NO: 1641047
auuaaccaggcacuggcac

SEQ ID NO: 1641049 - RNA, 19 nt, Artificial Sequence
  Description of Artificial Sequence: Synthetic oligonucleotide
  Sense strand starting at position 2881 of SEQ ID NO: 1561020
gccagugccugguuaaugu

SEQ ID NO: 1641050 - RNA, 19 nt, Artificial Sequence
  Description of Artificial Sequence: Synthetic oligonucleotide
  Antisense strand to SEQ ID NO: 1641049
acauuaaccaggcacuggc

SEQ ID NO: 1641051 - RNA, 19 nt, Artificial Sequence
  Description of Artificial Sequence: Synthetic oligonucleotide
  Sense strand starting at position 2892 of SEQ ID NO: 1561020
guuaauguaauguaagugu

SEQ ID NO: 1641052 - RNA, 19 nt, Artificial Sequence
  Description of Artificial Sequence: Synthetic oligonucleotide
  Antisense strand to SEQ ID NO: 1641051
acacuuacauuacauuaac

SEQ ID NO: 1641053 - RNA, 19 nt, Artificial Sequence
  Description of Artificial Sequence: Synthetic oligonucleotide
  Sense strand starting at position 2901 of SEQ ID NO: 1561020
auguaaguguugcuauuau

SEQ ID NO: 1641054 - RNA, 19 nt, Artificial Sequence
  Description of Artificial Sequence: Synthetic oligonucleotide
  Antisense strand to SEQ ID NO: 1641053
auaauagcaacacuuacau

SEQ ID NO: 1641055 - RNA, 19 nt, Artificial Sequence
  Description of Artificial Sequence: Synthetic oligonucleotide
  Sense strand starting at position 3559 of SEQ ID NO: 1561020
cauguagugguauacagua

SEQ ID NO: 1641056 - RNA, 19 nt, Artificial Sequence
  Description of Artificial Sequence: Synthetic oligonucleotide
  Antisense strand to SEQ ID NO: 1641055
uacuguauaccacuacaug

SEQ ID NO: 1641057 - RNA, 19 nt, Artificial Sequence
  Description of Artificial Sequence: Synthetic oligonucleotide
  Sense strand starting at position 3564 of SEQ ID NO: 1561020
agugguauacaguaaguua

SEQ ID NO: 1641058 - RNA, 19 nt, Artificial Sequence
  Description of Artificial Sequence: Synthetic oligonucleotide
  Antisense strand to SEQ ID NO: 1641057
uaacuuacuguauaccacu

SEQ ID NO: 1641059 - RNA, 19 nt, Artificial Sequence
  Description of Artificial Sequence: Synthetic oligonucleotide
  Sense strand starting at position 3567 of SEQ ID NO: 1561020
gguauacaguaaguuauau

SEQ ID NO: 1641060 - RNA, 19 nt, Artificial Sequence
  Description of Artificial Sequence: Synthetic oligonucleotide
  Antisense strand to SEQ ID NO: 1641059
auauaacuuacuguauacc

SEQ ID NO: 1641061 - RNA, 19 nt, Artificial Sequence
  Description of Artificial Sequence: Synthetic oligonucleotide
  Sense strand starting at position 3649 of SEQ ID NO: 1561020
cuagguguuccauaauuaa

SEQ ID NO: 1641062 - RNA, 19 nt, Artificial Sequence
  Description of Artificial Sequence: Synthetic oligonucleotide
  Antisense strand to SEQ ID NO: 1641061
uuaauuauggaacaccuag

SEQ ID NO: 1641063 - RNA, 19 nt, Artificial Sequence
  Description of Artificial Sequence: Synthetic oligonucleotide
  Sense strand starting at position 3652 of SEQ ID NO: 1561020
gguguuccauaauuaaaua

SEQ ID NO: 1641064 - RNA, 19 nt, Artificial Sequence
  Description of Artificial Sequence: Synthetic oligonucleotide
  Antisense strand to SEQ ID NO: 1641063
uauuuaauuauggaacacc

SEQ ID NO: 1641065 - RNA, 19 nt, Artificial Sequence
  Description of Artificial Sequence: Synthetic oligonucleotide
  Sense strand starting at position 3807 of SEQ ID NO: 1561020
uauguuguaucuguuauac

SEQ ID NO: 1641066 - RNA, 19 nt, Artificial Sequence
  Description of Artificial Sequence: Synthetic oligonucleotide
  Antisense strand to SEQ ID NO: 1641065
guauaacagauacaacaua

SEQ ID NO: 1641067 - RNA, 19 nt, Artificial Sequence
  Description of Artificial Sequence: Synthetic oligonucleotide
  Sense strand starting at position 3835 of SEQ ID NO: 1561020
cgcauaguuguauauuaaa

SEQ ID NO: 1641068 - RNA, 19 nt, Artificial Sequence
  Description of Artificial Sequence: Synthetic oligonucleotide
  Antisense strand to SEQ ID NO: 1641067
uuuaauauacaacuaugcg

SEQ ID NO: 1641069 - RNA, 19 nt, Artificial Sequence
  Description of Artificial Sequence: Synthetic oligonucleotide
  Sense strand starting at position 3887 of SEQ ID NO: 1561020
aaaugauucugugucauug

SEQ ID NO: 1641070 - RNA, 19 nt, Artificial Sequence
  Description of Artificial Sequence: Synthetic oligonucleotide
  Antisense strand to SEQ ID NO: 1641069
caaugacacagaaucauuu

SEQ ID NO: 1641071 - RNA, 19 nt, Artificial Sequence
  Description of Artificial Sequence: Synthetic oligonucleotide
  Sense strand starting at position 3891 of SEQ ID NO: 1561020
gauucugugucauugagca

SEQ ID NO: 1641072 - RNA, 19 nt, Artificial Sequence
  Description of Artificial Sequence: Synthetic oligonucleotide
  Antisense strand to SEQ ID NO: 1641071
ugcucaaugacacagaauc

SEQ ID NO: 1641073 - RNA, 19 nt, Artificial Sequence
  Description of Artificial Sequence: Synthetic oligonucleotide
  Sense strand starting at position 3895 of SEQ ID NO: 1561020
cugugucauugagcauuau

SEQ ID NO: 1641074 - RNA, 19 nt, Artificial Sequence
  Description of Artificial Sequence: Synthetic oligonucleotide
  Antisense strand to SEQ ID NO: 1641073
auaaugcucaaugacacag

SEQ ID NO: 1641075 - RNA, 19 nt, Artificial Sequence
  Description of Artificial Sequence: Synthetic oligonucleotide
  Sense strand starting at position 3896 of SEQ ID NO: 1561020
ugugucauugagcauuaua

SEQ ID NO: 1641076 - RNA, 19 nt, Artificial Sequence
  Description of Artificial Sequence: Synthetic oligonucleotide
  Antisense strand to SEQ ID NO: 1641075
uauaaugcucaaugacaca

SEQ ID NO: 1641077 - RNA, 19 nt, Artificial Sequence
  Description of Artificial Sequence: Synthetic oligonucleotide
  Sense strand starting at position 3899 of SEQ ID NO: 1561020
gucauugagcauuauauca

SEQ ID NO: 1641078 - RNA, 19 nt, Artificial Sequence
  Description of Artificial Sequence: Synthetic oligonucleotide
  Antisense strand to SEQ ID NO: 1641077
ugauauaaugcucaaugac

SEQ ID NO: 1641079 - RNA, 19 nt, Artificial Sequence
  Description of Artificial Sequence: Synthetic oligonucleotide
  Sense strand starting at position 3904 of SEQ ID NO: 1561020
ugagcauuauaucauaaga

SEQ ID NO: 1641080 - RNA, 19 nt, Artificial Sequence
  Description of Artificial Sequence: Synthetic oligonucleotide
  Antisense strand to SEQ ID NO: 1641079
ucuuaugauauaaugcuca

SEQ ID NO: 1641081 - RNA, 19 nt, Artificial Sequence
  Description of Artificial Sequence: Synthetic oligonucleotide
  Sense strand starting at position 3946 of SEQ ID NO: 1561020
gucagucaucauuaugugu

SEQ ID NO: 1641082 - RNA, 19 nt, Artificial Sequence
  Description of Artificial Sequence: Synthetic oligonucleotide
  Antisense strand to SEQ ID NO: 1641081
acacauaaugaugacugac

SEQ ID NO: 1641083 - RNA, 19 nt, Artificial Sequence
  Description of Artificial Sequence: Synthetic oligonucleotide
  Sense strand starting at position 3977 of SEQ ID NO: 1561020
ccuuguugcucuguggaca

SEQ ID NO: 1641084 - RNA, 19 nt, Artificial Sequence
  Description of Artificial Sequence: Synthetic oligonucleotide
  Antisense strand to SEQ ID NO: 1641083
uguccacagagcaacaagg

SEQ ID NO: 1641085 - RNA, 19 nt, Artificial Sequence
  Description of Artificial Sequence: Synthetic oligonucleotide
  Sense strand starting at position 264 of SEQ ID NO: 1561021
ugccuaagccuaggaaagu

SEQ ID NO: 1641086 - RNA, 19 nt, Artificial Sequence
  Description of Artificial Sequence: Synthetic oligonucleotide
  Antisense strand to SEQ ID NO: 1641085
acuuuccuaggcuuaggca

SEQ ID NO: 1641087 - RNA, 19 nt, Artificial Sequence
  Description of Artificial Sequence: Synthetic oligonucleotide
  Sense strand starting at position 561 of SEQ ID NO: 1561021
augggaaacuaucaugaua

SEQ ID NO: 1641088 - RNA, 19 nt, Artificial Sequence
  Description of Artificial Sequence: Synthetic oligonucleotide
  Antisense strand to SEQ ID NO: 1641087
uaucaugauaguuucccau

SEQ ID NO: 1641089 - RNA, 19 nt, Artificial Sequence
  Description of Artificial Sequence: Synthetic oligonucleotide
  Sense strand starting at position 563 of SEQ ID NO: 1561021
gggaaacuaucaugauauc

SEQ ID NO: 1641090 - RNA, 19 nt, Artificial Sequence
  Description of Artificial Sequence: Synthetic oligonucleotide
  Antisense strand to SEQ ID NO: 1641089
gauaucaugauaguuuccc

SEQ ID NO: 1641091 - RNA, 19 nt, Artificial Sequence
  Description of Artificial Sequence: Synthetic oligonucleotide
  Sense strand starting at position 628 of SEQ ID NO: 1561021
cagggagcaagucaguuau

SEQ ID NO: 1641092 - RNA, 19 nt, Artificial Sequence
  Description of Artificial Sequence: Synthetic oligonucleotide
  Antisense strand to SEQ ID NO: 1641091
auaacugacuugcucccug

SEQ ID NO: 1641093 - RNA, 19 nt, Artificial Sequence
  Description of Artificial Sequence: Synthetic oligonucleotide
  Sense strand starting at position 630 of SEQ ID NO: 1561021
gggagcaagucaguuauca

SEQ ID NO: 1641094 - RNA, 19 nt, Artificial Sequence
  Description of Artificial Sequence: Synthetic oligonucleotide
  Antisense strand to SEQ ID NO: 1641093
ugauaacugacuugcuccc

SEQ ID NO: 1641095 - RNA, 19 nt, Artificial Sequence
  Description of Artificial Sequence: Synthetic oligonucleotide
  Sense strand starting at position 657 of SEQ ID NO: 1561021
agggaugccuggcacaaau

SEQ ID NO: 1641096 - RNA, 19 nt, Artificial Sequence
  Description of Artificial Sequence: Synthetic oligonucleotide
  Antisense strand to SEQ ID NO: 1641095
auuugugccaggcaucccu

SEQ ID NO: 1641097 - RNA, 19 nt, Artificial Sequence
  Description of Artificial Sequence: Synthetic oligonucleotide
  Sense strand starting at position 659 of SEQ ID NO: 1561021
ggaugccuggcacaaauaa

SEQ ID NO: 1641098 - RNA, 19 nt, Artificial Sequence
  Description of Artificial Sequence: Synthetic oligonucleotide
  Antisense strand to SEQ ID NO: 1641097
uuauuugugccaggcaucc

SEQ ID NO: 1641099 - RNA, 19 nt, Artificial Sequence
  Description of Artificial Sequence: Synthetic oligonucleotide
  Sense strand starting at position 874 of SEQ ID NO: 1561021
gcgugucuccauggagaug

SEQ ID NO: 1641100 - RNA, 19 nt, Artificial Sequence
  Description of Artificial Sequence: Synthetic oligonucleotide
  Antisense strand to SEQ ID NO: 1641099
caucuccauggagacacgc

SEQ ID NO: 1641101 - RNA, 19 nt, Artificial Sequence
  Description of Artificial Sequence: Synthetic oligonucleotide
  Sense strand starting at position 932 of SEQ ID NO: 1561021
cuccuuaucugguuuagga

SEQ ID NO: 1641102 - RNA, 19 nt, Artificial Sequence
  Description of Artificial Sequence: Synthetic oligonucleotide
  Antisense strand to SEQ ID NO: 1641101
uccuaaaccagauaaggag

SEQ ID NO: 1641103 - RNA, 19 nt, Artificial Sequence
  Description of Artificial Sequence: Synthetic oligonucleotide
  Sense strand starting at position 934 of SEQ ID NO: 1561021
ccuuaucugguuuaggaau

SEQ ID NO: 1641104 - RNA, 19 nt, Artificial Sequence
  Description of Artificial Sequence: Synthetic oligonucleotide
  Antisense strand to SEQ ID NO: 1641103
auuccuaaaccagauaagg

SEQ ID NO: 1641105 - RNA, 19 nt, Artificial Sequence
  Description of Artificial Sequence: Synthetic oligonucleotide
  Sense strand starting at position 1087 of SEQ ID NO: 1561021
ccucgagauucugggaaga

SEQ ID NO: 1641106 - RNA, 19 nt, Artificial Sequence
  Description of Artificial Sequence: Synthetic oligonucleotide
  Antisense strand to SEQ ID NO: 1641105
ucuucccagaaucucgagg

SEQ ID NO: 1641107 - RNA, 19 nt, Artificial Sequence
  Description of Artificial Sequence: Synthetic oligonucleotide
  Sense strand starting at position 1089 of SEQ ID NO: 1561021
ucgagauucugggaagacu

SEQ ID NO: 1641108 - RNA, 19 nt, Artificial Sequence
  Description of Artificial Sequence: Synthetic oligonucleotide
  Antisense strand to SEQ ID NO: 1641107
agucuucccagaaucucga

SEQ ID NO: 1641109 - RNA, 19 nt, Artificial Sequence
  Description of Artificial Sequence: Synthetic oligonucleotide
  Sense strand starting at position 1661 of SEQ ID NO: 1561021
agucgaaagcgcucggauu

SEQ ID NO: 1641110 - RNA, 19 nt, Artificial Sequence
  Description of Artificial Sequence: Synthetic oligonucleotide
  Antisense strand to SEQ ID NO: 1641109
aauccgagcgcuuucgacu

SEQ ID NO: 1641111 - RNA, 19 nt, Artificial Sequence
  Description of Artificial Sequence: Synthetic oligonucleotide
  Sense strand starting at position 1700 of SEQ ID NO: 1561021
acuuccugccgcugagaaa

SEQ ID NO: 1641112 - RNA, 19 nt, Artificial Sequence
  Description of Artificial Sequence: Synthetic oligonucleotide
  Antisense strand to SEQ ID NO: 1641111
uuucucagcggcaggaagu

SEQ ID NO: 1641113 - RNA, 19 nt, Artificial Sequence
  Description of Artificial Sequence: Synthetic oligonucleotide
  Sense strand starting at position 2136 of SEQ ID NO: 1561021
ugcaaugaauuccagaugu

SEQ ID NO: 1641114 - RNA, 19 nt, Artificial Sequence
  Description of Artificial Sequence: Synthetic oligonucleotide
  Antisense strand to SEQ ID NO: 1641113
acaucuggaauucauugca

SEQ ID NO: 1641115 - RNA, 19 nt, Artificial Sequence
  Description of Artificial Sequence: Synthetic oligonucleotide
  Sense strand starting at position 2359 of SEQ ID NO: 1561021
cagguuaccucugggcuua

SEQ ID NO: 1641116 - RNA, 19 nt, Artificial Sequence
  Description of Artificial Sequence: Synthetic oligonucleotide
  Antisense strand to SEQ ID NO: 1641115
uaagcccagagguaaccug

SEQ ID NO: 1641117 - RNA, 19 nt, Artificial Sequence
  Description of Artificial Sequence: Synthetic oligonucleotide
  Sense strand starting at position 2411 of SEQ ID NO: 1561021
ggucacauuuauugacuca

SEQ ID NO: 1641118 - RNA, 19 nt, Artificial Sequence
  Description of Artificial Sequence: Synthetic oligonucleotide
  Antisense strand to SEQ ID NO: 1641117
ugagucaauaaaugugacc

SEQ ID NO: 1641119 - RNA, 19 nt, Artificial Sequence
  Description of Artificial Sequence: Synthetic oligonucleotide
  Sense strand starting at position 2429 of SEQ ID NO: 1561021
aacaaagagccuuggaagu

SEQ ID NO: 1641120 - RNA, 19 nt, Artificial Sequence
  Description of Artificial Sequence: Synthetic oligonucleotide
  Antisense strand to SEQ ID NO: 1641119
acuuccaaggcucuuuguu

SEQ ID NO: 1641121 - RNA, 19 nt, Artificial Sequence
  Description of Artificial Sequence: Synthetic oligonucleotide
  Sense strand starting at position 2524 of SEQ ID NO: 1561021
gugcgauguccugucccaa

SEQ ID NO: 1641122 - RNA, 19 nt, Artificial Sequence
  Description of Artificial Sequence: Synthetic oligonucleotide
  Antisense strand to SEQ ID NO: 1641121
uugggacaggacaucgcac

SEQ ID NO: 1641123 - RNA, 19 nt, Artificial Sequence
  Description of Artificial Sequence: Synthetic oligonucleotide
  Sense strand starting at position 2838 of SEQ ID NO: 1561021
accagucucucccuugaua

SEQ ID NO: 1641124 - RNA, 19 nt, Artificial Sequence
  Description of Artificial Sequence: Synthetic oligonucleotide
  Antisense strand to SEQ ID NO: 1641123
uaucaagggagagacuggu

SEQ ID NO: 1641125 - RNA, 19 nt, Artificial Sequence
  Description of Artificial Sequence: Synthetic oligonucleotide
  Sense strand starting at position 2841 of SEQ ID NO: 1561021
agucucucccuugauagga

SEQ ID NO: 1641126 - RNA, 19 nt, Artificial Sequence
  Description of Artificial Sequence: Synthetic oligonucleotide
  Antisense strand to SEQ ID NO: 1641125
uccuaucaagggagagacu

SEQ ID NO: 1641127 - RNA, 19 nt, Artificial Sequence
  Description of Artificial Sequence: Synthetic oligonucleotide
  Sense strand starting at position 2917 of SEQ ID NO: 1561021
cuuuccugccucuguagau

SEQ ID NO: 1641128 - RNA, 19 nt, Artificial Sequence
  Description of Artificial Sequence: Synthetic oligonucleotide
  Antisense strand to SEQ ID NO: 1641127
aucuacagaggcaggaaag

SEQ ID NO: 1641129 - RNA, 19 nt, Artificial Sequence
  Description of Artificial Sequence: Synthetic oligonucleotide
  Sense strand starting at position 3014 of SEQ ID NO: 1561021
ucacuaauuccugggcauu

SEQ ID NO: 1641130 - RNA, 19 nt, Artificial Sequence
  Description of Artificial Sequence: Synthetic oligonucleotide
  Antisense strand to SEQ ID NO: 1641129
aaugcccaggaauuaguga

SEQ ID NO: 1641131 - RNA, 19 nt, Artificial Sequence
  Description of Artificial Sequence: Synthetic oligonucleotide
  Sense strand starting at position 3131 of SEQ ID NO: 1561021
gcaguucgacaacaggaua

SEQ ID NO: 1641132 - RNA, 19 nt, Artificial Sequence
  Description of Artificial Sequence: Synthetic oligonucleotide
  Antisense strand to SEQ ID NO: 1641131
uauccuguugucgaacugc

SEQ ID NO: 1641133 - RNA, 19 nt, Artificial Sequence
  Description of Artificial Sequence: Synthetic oligonucleotide
  Sense strand starting at position 3861 of SEQ ID NO: 1561021
aucuuauguucagguggga

SEQ ID NO: 1641134 - RNA, 19 nt, Artificial Sequence
  Description of Artificial Sequence: Synthetic oligonucleotide
  Antisense strand to SEQ ID NO: 1641133
ucccaccugaacauaagau

SEQ ID NO: 1641135 - RNA, 19 nt, Artificial Sequence
  Description of Artificial Sequence: Synthetic oligonucleotide
  Sense strand starting at position 3864 of SEQ ID NO: 1561021
uuauguucaggugggaaau

SEQ ID NO: 1641136 - RNA, 19 nt, Artificial Sequence
  Description of Artificial Sequence: Synthetic oligonucleotide
  Antisense strand to SEQ ID NO: 1641135
auuucccaccugaacauaa

SEQ ID NO: 1641137 - RNA, 19 nt, Artificial Sequence
  Description of Artificial Sequence: Synthetic oligonucleotide
  Sense strand starting at position 3866 of SEQ ID NO: 1561021
auguucaggugggaaauau

SEQ ID NO: 1641138 - RNA, 19 nt, Artificial Sequence
  Description of Artificial Sequence: Synthetic oligonucleotide
  Antisense strand to SEQ ID NO: 1641137
auauuucccaccugaacau

SEQ ID NO: 1641139 - RNA, 19 nt, Artificial Sequence
  Description of Artificial Sequence: Synthetic oligonucleotide
  Sense strand starting at position 183 of SEQ ID NO: 1561022
ggcggcauuaacugucauu

SEQ ID NO: 1641140 - RNA, 19 nt, Artificial Sequence
  Description of Artificial Sequence: Synthetic oligonucleotide
  Antisense strand to SEQ ID NO: 1641139
aaugacaguuaaugccgcc

SEQ ID NO: 1641141 - RNA, 19 nt, Artificial Sequence
  Description of Artificial Sequence: Synthetic oligonucleotide
  Sense strand starting at position 186 of SEQ ID NO: 1561022
ggcauuaacugucauuguc

SEQ ID NO: 1641142 - RNA, 19 nt, Artificial Sequence
  Description of Artificial Sequence: Synthetic oligonucleotide
  Antisense strand to SEQ ID NO: 1641141
gacaaugacaguuaaugcc

SEQ ID NO: 1641143 - RNA, 19 nt, Artificial Sequence
  Description of Artificial Sequence: Synthetic oligonucleotide
  Sense strand starting at position 2002 of SEQ ID NO: 1561022
uggucuugguuuccuguua

SEQ ID NO: 1641144 - RNA, 19 nt, Artificial Sequence
  Description of Artificial Sequence: Synthetic oligonucleotide
  Antisense strand to SEQ ID NO: 1641143
uaacaggaaaccaagacca

SEQ ID NO: 1641145 - RNA, 19 nt, Artificial Sequence
  Description of Artificial Sequence: Synthetic oligonucleotide
  Sense strand starting at position 2003 of SEQ ID NO: 1561022
ggucuugguuuccuguuau

SEQ ID NO: 1641146 - RNA, 19 nt, Artificial Sequence
  Description of Artificial Sequence: Synthetic oligonucleotide
  Antisense strand to SEQ ID NO: 1641145
auaacaggaaaccaagacc

SEQ ID NO: 1641147 - RNA, 19 nt, Artificial Sequence
  Description of Artificial Sequence: Synthetic oligonucleotide
  Sense strand starting at position 2007 of SEQ ID NO: 1561022
uugguuuccuguuauuuga

SEQ ID NO: 1641148 - RNA, 19 nt, Artificial Sequence
  Description of Artificial Sequence: Synthetic oligonucleotide
  Antisense strand to SEQ ID NO: 1641147
ucaaauaacaggaaaccaa

SEQ ID NO: 1641149 - RNA, 19 nt, Artificial Sequence
  Description of Artificial Sequence: Synthetic oligonucleotide
  Sense strand starting at position 2021 of SEQ ID NO: 1561022
uuugaaauuuccuguuaug

SEQ ID NO: 1641150 - RNA, 19 nt, Artificial Sequence
  Description of Artificial Sequence: Synthetic oligonucleotide
  Antisense strand to SEQ ID NO: 1641149
cauaacaggaaauuucaaa

SEQ ID NO: 1641151 - RNA, 19 nt, Artificial Sequence
  Description of Artificial Sequence: Synthetic oligonucleotide
  Sense strand starting at position 2449 of SEQ ID NO: 1561022
ccugaugcguuacagaaga

SEQ ID NO: 1641152 - RNA, 19 nt, Artificial Sequence
  Description of Artificial Sequence: Synthetic oligonucleotide
  Antisense strand to SEQ ID NO: 1641151
ucuucuguaacgcaucagg

SEQ ID NO: 1641153 - RNA, 19 nt, Artificial Sequence
  Description of Artificial Sequence: Synthetic oligonucleotide
  Sense strand starting at position 3066 of SEQ ID NO: 1561022
cagagagccugaugcguua

SEQ ID NO: 1641154 - RNA, 19 nt, Artificial Sequence
  Description of Artificial Sequence: Synthetic oligonucleotide
  Antisense strand to SEQ ID NO: 1641153
uaacgcaucaggcucucug

SEQ ID NO: 1641155 - RNA, 19 nt, Artificial Sequence
  Description of Artificial Sequence: Synthetic oligonucleotide
  Sense strand starting at position 3499 of SEQ ID NO: 1561022
gaggguuggccuugcccua

SEQ ID NO: 1641156 - RNA, 19 nt, Artificial Sequence
  Description of Artificial Sequence: Synthetic oligonucleotide
  Antisense strand to SEQ ID NO: 1641155
uagggcaaggccaacccuc

SEQ ID NO: 1641157 - RNA, 19 nt, Artificial Sequence
  Description of Artificial Sequence: Synthetic oligonucleotide
  Sense strand starting at position 3952 of SEQ ID NO: 1561022
gacaucaucugucacggau

SEQ ID NO: 1641158 - RNA, 19 nt, Artificial Sequence
  Description of Artificial Sequence: Synthetic oligonucleotide
  Antisense strand to SEQ ID NO: 1641157
auccgugacagaugauguc

SEQ ID NO: 1641159 - RNA, 19 nt, Artificial Sequence
  Description of Artificial Sequence: Synthetic oligonucleotide
  Sense strand starting at position 251 of SEQ ID NO: 1561023
acucuugucucacugcaua

SEQ ID NO: 1641160 - RNA, 19 nt, Artificial Sequence
  Description of Artificial Sequence: Synthetic oligonucleotide
  Antisense strand to SEQ ID NO: 1641159
uaugcagugagacaagagu

SEQ ID NO: 1641161 - RNA, 19 nt, Artificial Sequence
  Description of Artificial Sequence: Synthetic oligonucleotide
  Sense strand starting at position 318 of SEQ ID NO: 1561023
gaaaguugcuccuuggcca

SEQ ID NO: 1641162 - RNA, 19 nt, Artificial Sequence
  Description of Artificial Sequence: Synthetic oligonucleotide
  Antisense strand to SEQ ID NO: 1641161
uggccaaggagcaacuuuc

SEQ ID NO: 1641163 - RNA, 19 nt, Artificial Sequence
  Description of Artificial Sequence: Synthetic oligonucleotide
  Sense strand starting at position 722 of SEQ ID NO: 1561023
gggcacacaugucauuaaa

SEQ ID NO: 1641164 - RNA, 19 nt, Artificial Sequence
  Description of Artificial Sequence: Synthetic oligonucleotide
  Antisense strand to SEQ ID NO: 1641163
uuuaaugacaugugugccc

SEQ ID NO: 1641165 - RNA, 19 nt, Artificial Sequence
  Description of Artificial Sequence: Synthetic oligonucleotide
  Sense strand starting at position 760 of SEQ ID NO: 1561023
cugccucugugaccuuauu

SEQ ID NO: 1641166 - RNA, 19 nt, Artificial Sequence
  Description of Artificial Sequence: Synthetic oligonucleotide
  Antisense strand to SEQ ID NO: 1641165
aauaaggucacagaggcag

SEQ ID NO: 1641167 - RNA, 19 nt, Artificial Sequence
  Description of Artificial Sequence: Synthetic oligonucleotide
  Sense strand starting at position 795 of SEQ ID NO: 1561023
aguccuaauuuacagauga

SEQ ID NO: 1641168 - RNA, 19 nt, Artificial Sequence
  Description of Artificial Sequence: Synthetic oligonucleotide
  Antisense strand to SEQ ID NO: 1641167
ucaucuguaaauuaggacu

SEQ ID NO: 1641169 - RNA, 19 nt, Artificial Sequence
  Description of Artificial Sequence: Synthetic oligonucleotide
  Sense strand starting at position 830 of SEQ ID NO: 1561023
aagaaaugcuucguaucga

SEQ ID NO: 1641170 - RNA, 19 nt, Artificial Sequence
  Description of Artificial Sequence: Synthetic oligonucleotide
  Antisense strand to SEQ ID NO: 1641169
ucgauacgaagcauuucuu

SEQ ID NO: 1641171 - RNA, 19 nt, Artificial Sequence
  Description of Artificial Sequence: Synthetic oligonucleotide
  Sense strand starting at position 831 of SEQ ID NO: 1561023
agaaaugcuucguaucgaa

SEQ ID NO: 1641172 - RNA, 19 nt, Artificial Sequence
  Description of Artificial Sequence: Synthetic oligonucleotide
  Antisense strand to SEQ ID NO: 1641171
uucgauacgaagcauuucu

SEQ ID NO: 1641173 - RNA, 19 nt, Artificial Sequence
  Description of Artificial Sequence: Synthetic oligonucleotide
  Sense strand starting at position 2050 of SEQ ID NO: 1561023
gcaggauugugaugggaac

SEQ ID NO: 1641174 - RNA, 19 nt, Artificial Sequence
  Description of Artificial Sequence: Synthetic oligonucleotide
  Antisense strand to SEQ ID NO: 1641173
guucccaucacaauccugc

SEQ ID NO: 1641175 - RNA, 19 nt, Artificial Sequence
  Description of Artificial Sequence: Synthetic oligonucleotide
  Sense strand starting at position 2051 of SEQ ID NO: 1561023
caggauugugaugggaacu

SEQ ID NO: 1641176 - RNA, 19 nt, Artificial Sequence
  Description of Artificial Sequence: Synthetic oligonucleotide
  Antisense strand to SEQ ID NO: 1641175
aguucccaucacaauccug

SEQ ID NO: 1641177 - RNA, 19 nt, Artificial Sequence
  Description of Artificial Sequence: Synthetic oligonucleotide
  Sense strand starting at position 2052 of SEQ ID NO: 1561023
aggauugugaugggaacuu

SEQ ID NO: 1641178 - RNA, 19 nt, Artificial Sequence
  Description of Artificial Sequence: Synthetic oligonucleotide
  Antisense strand to SEQ ID NO: 1641177
aaguucccaucacaauccu

SEQ ID NO: 1641179 - RNA, 19 nt, Artificial Sequence
  Description of Artificial Sequence: Synthetic oligonucleotide
  Sense strand starting at position 2145 of SEQ ID NO: 1561023
acccuuaucgcugacgaca

SEQ ID NO: 1641180 - RNA, 19 nt, Artificial Sequence
  Description of Artificial Sequence: Synthetic oligonucleotide
  Antisense strand to SEQ ID NO: 1641179
ugucgucagcgauaagggu

SEQ ID NO: 1641181 - RNA, 19 nt, Artificial Sequence
  Description of Artificial Sequence: Synthetic oligonucleotide
  Sense strand starting at position 2147 of SEQ ID NO: 1561023
ccuuaucgcugacgacaaa

SEQ ID NO: 1641182 - RNA, 19 nt, Artificial Sequence
  Description of Artificial Sequence: Synthetic oligonucleotide
  Antisense strand to SEQ ID NO: 1641181
uuugucgucagcgauaagg

SEQ ID NO: 1641183 - RNA, 19 nt, Artificial Sequence
  Description of Artificial Sequence: Synthetic oligonucleotide
  Sense strand starting at position 2197 of SEQ ID NO: 1561023
guguccuuagcagacagua

SEQ ID NO: 1641184 - RNA, 19 nt, Artificial Sequence
  Description of Artificial Sequence: Synthetic oligonucleotide
  Antisense strand to SEQ ID NO: 1641183
uacugucugcuaaggacac

SEQ ID NO: 1641185 - RNA, 19 nt, Artificial Sequence
  Description of Artificial Sequence: Synthetic oligonucleotide
  Sense strand starting at position 2295 of SEQ ID NO: 1561023
guggcaacaucauaaguca

SEQ ID NO: 1641186 - RNA, 19 nt, Artificial Sequence
  Description of Artificial Sequence: Synthetic oligonucleotide
  Antisense strand to SEQ ID NO: 1641185
ugacuuaugauguugccac

SEQ ID NO: 1641187 - RNA, 19 nt, Artificial Sequence
  Description of Artificial Sequence: Synthetic oligonucleotide
  Sense strand starting at position 2403 of SEQ ID NO: 1561023
ccagauaaugaaugagugu

SEQ ID NO: 1641188 - RNA, 19 nt, Artificial Sequence
  Description of Artificial Sequence: Synthetic oligonucleotide
  Antisense strand to SEQ ID NO: 1641187
acacucauucauuaucugg

SEQ ID NO: 1641189 - RNA, 19 nt, Artificial Sequence
  Description of Artificial Sequence: Synthetic oligonucleotide
  Sense strand starting at position 2412 of SEQ ID NO: 1561023
gaaugagugucucccucac

SEQ ID NO: 1641190 - RNA, 19 nt, Artificial Sequence
  Description of Artificial Sequence: Synthetic oligonucleotide
  Antisense strand to SEQ ID NO: 1641189
gugagggagacacucauuc

SEQ ID NO: 1641191 - RNA, 19 nt, Artificial Sequence
  Description of Artificial Sequence: Synthetic oligonucleotide
  Sense strand starting at position 2414 of SEQ ID NO: 1561023
augagugucucccucacuu

SEQ ID NO: 1641192 - RNA, 19 nt, Artificial Sequence
  Description of Artificial Sequence: Synthetic oligonucleotide
  Antisense strand to SEQ ID NO: 1641191
aagugagggagacacucau

SEQ ID NO: 1641193 - RNA, 19 nt, Artificial Sequence
  Description of Artificial Sequence: Synthetic oligonucleotide
  Sense strand starting at position 2518 of SEQ ID NO: 1561023
cuuuguugcugucugugau

SEQ ID NO: 1641194 - RNA, 19 nt, Artificial Sequence
  Description of Artificial Sequence: Synthetic oligonucleotide
  Antisense strand to SEQ ID NO: 1641193
aucacagacagcaacaaag

SEQ ID NO: 1641195 - RNA, 19 nt, Artificial Sequence
  Description of Artificial Sequence: Synthetic oligonucleotide
  Sense strand starting at position 3245 of SEQ ID NO: 1561023
ugaacuucuuucccacgaa

SEQ ID NO: 1641196 - RNA, 19 nt, Artificial Sequence
  Description of Artificial Sequence: Synthetic oligonucleotide
  Antisense strand to SEQ ID NO: 1641195
uucgugggaaagaaguuca

SEQ ID NO: 1641197 - RNA, 19 nt, Artificial Sequence
  Description of Artificial Sequence: Synthetic oligonucleotide
  Sense strand starting at position 3248 of SEQ ID NO: 1561023
acuucuuucccacgaauug

SEQ ID NO: 1641198 - RNA, 19 nt, Artificial Sequence
  Description of Artificial Sequence: Synthetic oligonucleotide
  Antisense strand to SEQ ID NO: 1641197
caauucgugggaaagaagu

SEQ ID NO: 1641199 - RNA, 19 nt, Artificial Sequence
  Description of Artificial Sequence: Synthetic oligonucleotide
  Sense strand starting at position 3287 of SEQ ID NO: 1561023
ccaggaucucgacagaugu

SEQ ID NO: 1641200 - RNA, 19 nt, Artificial Sequence
  Description of Artificial Sequence: Synthetic oligonucleotide
  Antisense strand to SEQ ID NO: 1641199
acaucugucgagauccugg

SEQ ID NO: 1641201 - RNA, 19 nt, Artificial Sequence
  Description of Artificial Sequence: Synthetic oligonucleotide
  Sense strand starting at position 3401 of SEQ ID NO: 1561023
cccuguguuucucagagua

SEQ ID NO: 1641202 - RNA, 19 nt, Artificial Sequence
  Description of Artificial Sequence: Synthetic oligonucleotide
  Antisense strand to SEQ ID NO: 1641201
uacucugagaaacacaggg

SEQ ID NO: 1641203 - RNA, 19 nt, Artificial Sequence
  Description of Artificial Sequence: Synthetic oligonucleotide
  Sense strand starting at position 3403 of SEQ ID NO: 1561023
cuguguuucucagaguaag

SEQ ID NO: 1641204 - RNA, 19 nt, Artificial Sequence
  Description of Artificial Sequence: Synthetic oligonucleotide
  Antisense strand to SEQ ID NO: 1641203
cuuacucugagaaacacag

SEQ ID NO: 1641205 - RNA, 19 nt, Artificial Sequence
  Description of Artificial Sequence: Synthetic oligonucleotide
  Sense strand starting at position 3406 of SEQ ID NO: 1561023
uguuucucagaguaaguga

SEQ ID NO: 1641206 - RNA, 19 nt, Artificial Sequence
  Description of Artificial Sequence: Synthetic oligonucleotide
  Antisense strand to SEQ ID NO: 1641205
ucacuuacucugagaaaca

SEQ ID NO: 1641207 - RNA, 19 nt, Artificial Sequence
  Description of Artificial Sequence: Synthetic oligonucleotide
  Sense strand starting at position 3413 of SEQ ID NO: 1561023
cagaguaagugaucaaguc

SEQ ID NO: 1641208 - RNA, 19 nt, Artificial Sequence
  Description of Artificial Sequence: Synthetic oligonucleotide
  Antisense strand to SEQ ID NO: 1641207
gacuugaucacuuacucug

SEQ ID NO: 1641209 - RNA, 19 nt, Artificial Sequence
  Description of Artificial Sequence: Synthetic oligonucleotide
  Sense strand starting at position 3458 of SEQ ID NO: 1561023
gccauaugccguccugauu

SEQ ID NO: 1641210 - RNA, 19 nt, Artificial Sequence
  Description of Artificial Sequence: Synthetic oligonucleotide
  Antisense strand to SEQ ID NO: 1641209
aaucaggacggcauauggc

SEQ ID NO: 1641211 - RNA, 19 nt, Artificial Sequence
  Description of Artificial Sequence: Synthetic oligonucleotide
  Sense strand starting at position 3467 of SEQ ID NO: 1561023
cguccugauuugucucuuu

SEQ ID NO: 1641212 - RNA, 19 nt, Artificial Sequence
  Description of Artificial Sequence: Synthetic oligonucleotide
  Antisense strand to SEQ ID NO: 1641211
aaagagacaaaucaggacg

SEQ ID NO: 1641213 - RNA, 19 nt, Artificial Sequence
  Description of Artificial Sequence: Synthetic oligonucleotide
  Sense strand starting at position 3628 of SEQ ID NO: 1561023
cuggucaccuccucagaga

SEQ ID NO: 1641214 - RNA, 19 nt, Artificial Sequence
  Description of Artificial Sequence: Synthetic oligonucleotide
  Antisense strand to SEQ ID NO: 1641213
ucucugaggaggugaccag

SEQ ID NO: 1641215 - RNA, 19 nt, Artificial Sequence
  Description of Artificial Sequence: Synthetic oligonucleotide
  Sense strand starting at position 3643 of SEQ ID NO: 1561023
gagagaccuucccugaucu

SEQ ID NO: 1641216 - RNA, 19 nt, Artificial Sequence
  Description of Artificial Sequence: Synthetic oligonucleotide
  Antisense strand to SEQ ID NO: 1641215
agaucagggaaggucucuc

SEQ ID NO: 1641217 - RNA, 19 nt, Artificial Sequence
  Description of Artificial Sequence: Synthetic oligonucleotide
  Sense strand starting at position 3645 of SEQ ID NO: 1561023
gagaccuucccugaucugu

SEQ ID NO: 1641218 - RNA, 19 nt, Artificial Sequence
  Description of Artificial Sequence: Synthetic oligonucleotide
  Antisense strand to SEQ ID NO: 1641217
acagaucagggaaggucuc

SEQ ID NO: 1641219 - RNA, 19 nt, Artificial Sequence
  Description of Artificial Sequence: Synthetic oligonucleotide
  Sense strand starting at position 3656 of SEQ ID NO: 1561023
ugaucugucccucaucuca

SEQ ID NO: 1641220 - RNA, 19 nt, Artificial Sequence
  Description of Artificial Sequence: Synthetic oligonucleotide
  Antisense strand to SEQ ID NO: 1641219
ugagaugagggacagauca

SEQ ID NO: 1641221 - RNA, 19 nt, Artificial Sequence
  Description of Artificial Sequence: Synthetic oligonucleotide
  Sense strand starting at position 3678 of SEQ ID NO: 1561023
ggcaguuggcauuaucuga

SEQ ID NO: 1641222 - RNA, 19 nt, Artificial Sequence
  Description of Artificial Sequence: Synthetic oligonucleotide
  Antisense strand to SEQ ID NO: 1641221
ucagauaaugccaacugcc

SEQ ID NO: 1641223 - RNA, 19 nt, Artificial Sequence
  Description of Artificial Sequence: Synthetic oligonucleotide
  Sense strand starting at position 3683 of SEQ ID NO: 1561023
uuggcauuaucugaaauca

SEQ ID NO: 1641224 - RNA, 19 nt, Artificial Sequence
  Description of Artificial Sequence: Synthetic oligonucleotide
  Antisense strand to SEQ ID NO: 1641223
ugauuucagauaaugccaa

SEQ ID NO: 1641225 - RNA, 19 nt, Artificial Sequence
  Description of Artificial Sequence: Synthetic oligonucleotide
  Sense strand starting at position 337 of SEQ ID NO: 1561024
gguguaugccuauagucca

SEQ ID NO: 1641226 - RNA, 19 nt, Artificial Sequence
  Description of Artificial Sequence: Synthetic oligonucleotide
  Antisense strand to SEQ ID NO: 1641225
uggacuauaggcauacacc

SEQ ID NO: 1641227 - RNA, 19 nt, Artificial Sequence
  Description of Artificial Sequence: Synthetic oligonucleotide
  Sense strand starting at position 414 of SEQ ID NO: 1561024
gcugcagucagugagcauu

SEQ ID NO: 1641228 - RNA, 19 nt, Artificial Sequence
  Description of Artificial Sequence: Synthetic oligonucleotide
  Antisense strand to SEQ ID NO: 1641227
aaugcucacugacugcagc

SEQ ID NO: 1641229 - RNA, 19 nt, Artificial Sequence
  Description of Artificial Sequence: Synthetic oligonucleotide
  Sense strand starting at position 417 of SEQ ID NO: 1561024
gcagucagugagcauugau

SEQ ID NO: 1641230 - RNA, 19 nt, Artificial Sequence
  Description of Artificial Sequence: Synthetic oligonucleotide
  Antisense strand to SEQ ID NO: 1641229
aucaaugcucacugacugc

SEQ ID NO: 1641231 - RNA, 19 nt, Artificial Sequence
  Description of Artificial Sequence: Synthetic oligonucleotide
  Sense strand starting at position 420 of SEQ ID NO: 1561024
gucagugagcauugauugu

SEQ ID NO: 1641232 - RNA, 19 nt, Artificial Sequence
  Description of Artificial Sequence: Synthetic oligonucleotide
  Antisense strand to SEQ ID NO: 1641231
acaaucaaugcucacugac

SEQ ID NO: 1641233 - RNA, 19 nt, Artificial Sequence
  Description of Artificial Sequence: Synthetic oligonucleotide
  Sense strand starting at position 509 of SEQ ID NO: 1561024
gggaguuccagagacguaa

SEQ ID NO: 1641234 - RNA, 19 nt, Artificial Sequence
  Description of Artificial Sequence: Synthetic oligonucleotide
  Antisense strand to SEQ ID NO: 1641233
uuacgucucuggaacuccc

SEQ ID NO: 1641235 - RNA, 19 nt, Artificial Sequence
  Description of Artificial Sequence: Synthetic oligonucleotide
  Sense strand starting at position 511 of SEQ ID NO: 1561024
gaguuccagagacguaaca

SEQ ID NO: 1641236 - RNA, 19 nt, Artificial Sequence
  Description of Artificial Sequence: Synthetic oligonucleotide
  Antisense strand to SEQ ID NO: 1641235
uguuacgucucuggaacuc

SEQ ID NO: 1641237 - RNA, 19 nt, Artificial Sequence
  Description of Artificial Sequence: Synthetic oligonucleotide
  Sense strand starting at position 513 of SEQ ID NO: 1561024
guuccagagacguaacagu

SEQ ID NO: 1641238 - RNA, 19 nt, Artificial Sequence
  Description of Artificial Sequence: Synthetic oligonucleotide
  Antisense strand to SEQ ID NO: 1641237
acuguuacgucucuggaac

SEQ ID NO: 1641239 - RNA, 19 nt, Artificial Sequence
  Description of Artificial Sequence: Synthetic oligonucleotide
  Sense strand starting at position 793 of SEQ ID NO: 1561024
acucuugucucacugcaua

SEQ ID NO: 1641240 - RNA, 19 nt, Artificial Sequence
  Description of Artificial Sequence: Synthetic oligonucleotide
  Antisense strand to SEQ ID NO: 1641239
uaugcagugagacaagagu

SEQ ID NO: 1641241 - RNA, 19 nt, Artificial Sequence
  Description of Artificial Sequence: Synthetic oligonucleotide
  Sense strand starting at position 860 of SEQ ID NO: 1561024
gaaaguugcuccuuggcca

SEQ ID NO: 1641242 - RNA, 19 nt, Artificial Sequence
  Description of Artificial Sequence: Synthetic oligonucleotide
  Antisense strand to SEQ ID NO: 1641241
uggccaaggagcaacuuuc

SEQ ID NO: 1641243 - RNA, 19 nt, Artificial Sequence
  Description of Artificial Sequence: Synthetic oligonucleotide
  Sense strand starting at position 1264 of SEQ ID NO: 1561024
gggcacacaugucauuaaa

SEQ ID NO: 1641244 - RNA, 19 nt, Artificial Sequence
  Description of Artificial Sequence: Synthetic oligonucleotide
  Antisense strand to SEQ ID NO: 1641243
uuuaaugacaugugugccc

SEQ ID NO: 1641245 - RNA, 19 nt, Artificial Sequence
  Description of Artificial Sequence: Synthetic oligonucleotide
  Sense strand starting at position 1302 of SEQ ID NO: 1561024
cugccucugugaccuuauu

SEQ ID NO: 1641246 - RNA, 19 nt, Artificial Sequence
  Description of Artificial Sequence: Synthetic oligonucleotide
  Antisense strand to SEQ ID NO: 1641245
aauaaggucacagaggcag

SEQ ID NO: 1641247 - RNA, 19 nt, Artificial Sequence
  Description of Artificial Sequence: Synthetic oligonucleotide
  Sense strand starting at position 1337 of SEQ ID NO: 1561024
aguccuaauuuacagauga

SEQ ID NO: 1641248 - RNA, 19 nt, Artificial Sequence
  Description of Artificial Sequence: Synthetic oligonucleotide
  Antisense strand to SEQ ID NO: 1641247
ucaucuguaaauuaggacu

SEQ ID NO: 1641249 - RNA, 19 nt, Artificial Sequence
  Description of Artificial Sequence: Synthetic oligonucleotide
  Sense strand starting at position 1372 of SEQ ID NO: 1561024
aagaaaugcuucguaucga

SEQ ID NO: 1641250 - RNA, 19 nt, Artificial Sequence
  Description of Artificial Sequence: Synthetic oligonucleotide
  Antisense strand to SEQ ID NO: 1641249
ucgauacgaagcauuucuu

SEQ ID NO: 1641251 - RNA, 19 nt, Artificial Sequence
  Description of Artificial Sequence: Synthetic oligonucleotide
  Sense strand starting at position 1373 of SEQ ID NO: 1561024
agaaaugcuucguaucgaa

SEQ ID NO: 1641252 - RNA, 19 nt, Artificial Sequence
  Description of Artificial Sequence: Synthetic oligonucleotide
  Antisense strand to SEQ ID NO: 1641251
uucgauacgaagcauuucu

SEQ ID NO: 1641253 - RNA, 19 nt, Artificial Sequence
  Description of Artificial Sequence: Synthetic oligonucleotide
  Sense strand starting at position 2592 of SEQ ID NO: 1561024
gcaggauugugaugggaac

SEQ ID NO: 1641254 - RNA, 19 nt, Artificial Sequence
  Description of Artificial Sequence: Synthetic oligonucleotide
  Antisense strand to SEQ ID NO: 1641253
guucccaucacaauccugc

SEQ ID NO: 1641255 - RNA, 19 nt, Artificial Sequence
  Description of Artificial Sequence: Synthetic oligonucleotide
  Sense strand starting at position 2593 of SEQ ID NO: 1561024
caggauugugaugggaacu

SEQ ID NO: 1641256 - RNA, 19 nt, Artificial Sequence
  Description of Artificial Sequence: Synthetic oligonucleotide
  Antisense strand to SEQ ID NO: 1641255
aguucccaucacaauccug

SEQ ID NO: 1641257 - RNA, 19 nt, Artificial Sequence
  Description of Artificial Sequence: Synthetic oligonucleotide
  Sense strand starting at position 2594 of SEQ ID NO: 1561024
aggauugugaugggaacuu

SEQ ID NO: 1641258 - RNA, 19 nt, Artificial Sequence
  Description of Artificial Sequence: Synthetic oligonucleotide
  Antisense strand to SEQ ID NO: 1641257
aaguucccaucacaauccu

SEQ ID NO: 1641259 - RNA, 19 nt, Artificial Sequence
  Description of Artificial Sequence: Synthetic oligonucleotide
  Sense strand starting at position 2687 of SEQ ID NO: 1561024
acccuuaucgcugacgaca

SEQ ID NO: 1641260 - RNA, 19 nt, Artificial Sequence
  Description of Artificial Sequence: Synthetic oligonucleotide
  Antisense strand to SEQ ID NO: 1641259
ugucgucagcgauaagggu

SEQ ID NO: 1641261 - RNA, 19 nt, Artificial Sequence
  Description of Artificial Sequence: Synthetic oligonucleotide
  Sense strand starting at position 2689 of SEQ ID NO: 1561024
ccuuaucgcugacgacaaa

SEQ ID NO: 1641262 - RNA, 19 nt, Artificial Sequence
  Description of Artificial Sequence: Synthetic oligonucleotide
  Antisense strand to SEQ ID NO: 1641261
uuugucgucagcgauaagg

SEQ ID NO: 1641263 - RNA, 19 nt, Artificial Sequence
  Description of Artificial Sequence: Synthetic oligonucleotide
  Sense strand starting at position 2739 of SEQ ID NO: 1561024
guguccuuagcagacagua

SEQ ID NO: 1641264 - RNA, 19 nt, Artificial Sequence
  Description of Artificial Sequence: Synthetic oligonucleotide
  Antisense strand to SEQ ID NO: 1641263
uacugucugcuaaggacac

SEQ ID NO: 1641265 - RNA, 19 nt, Artificial Sequence
  Description of Artificial Sequence: Synthetic oligonucleotide
  Sense strand starting at position 2837 of SEQ ID NO: 1561024
guggcaacaucauaaguca

SEQ ID NO: 1641266 - RNA, 19 nt, Artificial Sequence
  Description of Artificial Sequence: Synthetic oligonucleotide
  Antisense strand to SEQ ID NO: 1641265
ugacuuaugauguugccac

SEQ ID NO: 1641267 - RNA, 19 nt, Artificial Sequence
  Description of Artificial Sequence: Synthetic oligonucleotide
  Sense strand starting at position 2945 of SEQ ID NO: 1561024
ccagauaaugaaugagugu

SEQ ID NO: 1641268 - RNA, 19 nt, Artificial Sequence
  Description of Artificial Sequence: Synthetic oligonucleotide
  Antisense strand to SEQ ID NO: 1641267
acacucauucauuaucugg

SEQ ID NO: 1641269 - RNA, 19 nt, Artificial Sequence
  Description of Artificial Sequence: Synthetic oligonucleotide
  Sense strand starting at position 2954 of SEQ ID NO: 1561024
gaaugagugucucccucac

SEQ ID NO: 1641270 - RNA, 19 nt, Artificial Sequence
  Description of Artificial Sequence: Synthetic oligonucleotide
  Antisense strand to SEQ ID NO: 1641269
gugagggagacacucauuc

SEQ ID NO: 1641271 - RNA, 19 nt, Artificial Sequence
  Description of Artificial Sequence: Synthetic oligonucleotide
  Sense strand starting at position 2956 of SEQ ID NO: 1561024
augagugucucccucacuu

SEQ ID NO: 1641272 - RNA, 19 nt, Artificial Sequence
  Description of Artificial Sequence: Synthetic oligonucleotide
  Antisense strand to SEQ ID NO: 1641271
aagugagggagacacucau

SEQ ID NO: 1641273 - RNA, 19 nt, Artificial Sequence
  Description of Artificial Sequence: Synthetic oligonucleotide
  Sense strand starting at position 3060 of SEQ ID NO: 1561024
cuuuguugcugucugugau

SEQ ID NO: 1641274 - RNA, 19 nt, Artificial Sequence
  Description of Artificial Sequence: Synthetic oligonucleotide
  Antisense strand to SEQ ID NO: 1641273
aucacagacagcaacaaag

SEQ ID NO: 1641275 - RNA, 19 nt, Artificial Sequence
  Description of Artificial Sequence: Synthetic oligonucleotide
  Sense strand starting at position 3787 of SEQ ID NO: 1561024
ugaacuucuuucccacgaa

SEQ ID NO: 1641276 - RNA, 19 nt, Artificial Sequence
  Description of Artificial Sequence: Synthetic oligonucleotide
  Antisense strand to SEQ ID NO: 1641275
uucgugggaaagaaguuca

SEQ ID NO: 1641277 - RNA, 19 nt, Artificial Sequence
  Description of Artificial Sequence: Synthetic oligonucleotide
  Sense strand starting at position 3790 of SEQ ID NO: 1561024
acuucuuucccacgaauug

SEQ ID NO: 1641278 - RNA, 19 nt, Artificial Sequence
  Description of Artificial Sequence: Synthetic oligonucleotide
  Antisense strand to SEQ ID NO: 1641277
caauucgugggaaagaagu

SEQ ID NO: 1641279 - RNA, 19 nt, Artificial Sequence
  Description of Artificial Sequence: Synthetic oligonucleotide
  Sense strand starting at position 3829 of SEQ ID NO: 1561024
ccaggaucucgacagaugu

SEQ ID NO: 1641280 - RNA, 19 nt, Artificial Sequence
  Description of Artificial Sequence: Synthetic oligonucleotide
  Antisense strand to SEQ ID NO: 1641279
acaucugucgagauccugg

SEQ ID NO: 1641281 - RNA, 19 nt, Artificial Sequence
  Description of Artificial Sequence: Synthetic oligonucleotide
  Sense strand starting at position 3943 of SEQ ID NO: 1561024
cccuguguuucucagagua

SEQ ID NO: 1641282 - RNA, 19 nt, Artificial Sequence
  Description of Artificial Sequence: Synthetic oligonucleotide
  Antisense strand to SEQ ID NO: 1641281
uacucugagaaacacaggg

SEQ ID NO: 1641283 - RNA, 19 nt, Artificial Sequence
  Description of Artificial Sequence: Synthetic oligonucleotide
  Sense strand starting at position 3945 of SEQ ID NO: 1561024
cuguguuucucagaguaag

SEQ ID NO: 1641284 - RNA, 19 nt, Artificial Sequence
  Description of Artificial Sequence: Synthetic oligonucleotide
  Antisense strand to SEQ ID NO: 1641283
cuuacucugagaaacacag

SEQ ID NO: 1641285 - RNA, 19 nt, Artificial Sequence
  Description of Artificial Sequence: Synthetic oligonucleotide
  Sense strand starting at position 3948 of SEQ ID NO: 1561024
uguuucucagaguaaguga

SEQ ID NO: 1641286 - RNA, 19 nt, Artificial Sequence
  Description of Artificial Sequence: Synthetic oligonucleotide
  Antisense strand to SEQ ID NO: 1641285
ucacuuacucugagaaaca

SEQ ID NO: 1641287 - RNA, 19 nt, Artificial Sequence
  Description of Artificial Sequence: Synthetic oligonucleotide
  Sense strand starting at position 3955 of SEQ ID NO: 1561024
cagaguaagugaucaaguc

SEQ ID NO: 1641288 - RNA, 19 nt, Artificial Sequence
  Description of Artificial Sequence: Synthetic oligonucleotide
  Antisense strand to SEQ ID NO: 1641287
gacuugaucacuuacucug

SEQ ID NO: 1641289 - RNA, 19 nt, Artificial Sequence
  Description of Artificial Sequence: Synthetic oligonucleotide
  Sense strand starting at position 31 of SEQ ID NO: 1561025
accucagucuccugacaag

SEQ ID NO: 1641290 - RNA, 19 nt, Artificial Sequence
  Description of Artificial Sequence: Synthetic oligonucleotide
  Antisense strand to SEQ ID NO: 1641289
cuugucaggagacugaggu

SEQ ID NO: 1641291 - RNA, 19 nt, Artificial Sequence
  Description of Artificial Sequence: Synthetic oligonucleotide
  Sense strand starting at position 403 of SEQ ID NO: 1561025
aaauuagucggaugaugug

SEQ ID NO: 1641292 - RNA, 19 nt, Artificial Sequence
  Description of Artificial Sequence: Synthetic oligonucleotide
  Antisense strand to SEQ ID NO: 1641291
cacaucauccgacuaauuu

SEQ ID NO: 1641293 - RNA, 19 nt, Artificial Sequence
  Description of Artificial Sequence: Synthetic oligonucleotide
  Sense strand starting at position 464 of SEQ ID NO: 1561025
gggaauaucccuugagccu

SEQ ID NO: 1641294 - RNA, 19 nt, Artificial Sequence
  Description of Artificial Sequence: Synthetic oligonucleotide
  Antisense strand to SEQ ID NO: 1641293
aggcucaagggauauuccc

SEQ ID NO: 1641295 - RNA, 19 nt, Artificial Sequence
  Description of Artificial Sequence: Synthetic oligonucleotide
  Sense strand starting at position 465 of SEQ ID NO: 1561025
ggaauaucccuugagccuu

SEQ ID NO: 1641296 - RNA, 19 nt, Artificial Sequence
  Description of Artificial Sequence: Synthetic oligonucleotide
  Antisense strand to SEQ ID NO: 1641295
aaggcucaagggauauucc

SEQ ID NO: 1641297 - RNA, 19 nt, Artificial Sequence
  Description of Artificial Sequence: Synthetic oligonucleotide
  Sense strand starting at position 1243 of SEQ ID NO: 1561025
cuccgagccucucaagauu

SEQ ID NO: 1641298 - RNA, 19 nt, Artificial Sequence
  Description of Artificial Sequence: Synthetic oligonucleotide
  Antisense strand to SEQ ID NO: 1641297
aaucuugagaggcucggag

SEQ ID NO: 1641299 - RNA, 19 nt, Artificial Sequence
  Description of Artificial Sequence: Synthetic oligonucleotide
  Sense strand starting at position 1257 of SEQ ID NO: 1561025
agauucccauuugagauaa

SEQ ID NO: 1641300 - RNA, 19 nt, Artificial Sequence
  Description of Artificial Sequence: Synthetic oligonucleotide
  Antisense strand to SEQ ID NO: 1641299
uuaucucaaaugggaaucu

SEQ ID NO: 1641301 - RNA, 19 nt, Artificial Sequence
  Description of Artificial Sequence: Synthetic oligonucleotide
  Sense strand starting at position 1268 of SEQ ID NO: 1561025
ugagauaacuugcuccaaa

SEQ ID NO: 1641302 - RNA, 19 nt, Artificial Sequence
  Description of Artificial Sequence: Synthetic oligonucleotide
  Antisense strand to SEQ ID NO: 1641301
uuuggagcaaguuaucuca

SEQ ID NO: 1641303 - RNA, 19 nt, Artificial Sequence
  Description of Artificial Sequence: Synthetic oligonucleotide
  Sense strand starting at position 1403 of SEQ ID NO: 1561025
gucccauacccucgaauga

SEQ ID NO: 1641304 - RNA, 19 nt, Artificial Sequence
  Description of Artificial Sequence: Synthetic oligonucleotide
  Antisense strand to SEQ ID NO: 1641303
ucauucgaggguaugggac

SEQ ID NO: 1641305 - RNA, 19 nt, Artificial Sequence
  Description of Artificial Sequence: Synthetic oligonucleotide
  Sense strand starting at position 2173 of SEQ ID NO: 1561025
ucacuuauguggcacuuaa

SEQ ID NO: 1641306 - RNA, 19 nt, Artificial Sequence
  Description of Artificial Sequence: Synthetic oligonucleotide
  Antisense strand to SEQ ID NO: 1641305
uuaagugccacauaaguga

SEQ ID NO: 1641307 - RNA, 19 nt, Artificial Sequence
  Description of Artificial Sequence: Synthetic oligonucleotide
  Sense strand starting at position 2228 of SEQ ID NO: 1561025
cagcaauagggauguugua

SEQ ID NO: 1641308 - RNA, 19 nt, Artificial Sequence
  Description of Artificial Sequence: Synthetic oligonucleotide
  Antisense strand to SEQ ID NO: 1641307
uacaacaucccuauugcug

SEQ ID NO: 1641309 - RNA, 19 nt, Artificial Sequence
  Description of Artificial Sequence: Synthetic oligonucleotide
  Sense strand starting at position 2251 of SEQ ID NO: 1561025
aacgguauugagugaaauc

SEQ ID NO: 1641310 - RNA, 19 nt, Artificial Sequence
  Description of Artificial Sequence: Synthetic oligonucleotide
  Antisense strand to SEQ ID NO: 1641309
gauuucacucaauaccguu

SEQ ID NO: 1641311 - RNA, 19 nt, Artificial Sequence
  Description of Artificial Sequence: Synthetic oligonucleotide
  Sense strand starting at position 2329 of SEQ ID NO: 1561025
auauaaacccagcgaugau

SEQ ID NO: 1641312 - RNA, 19 nt, Artificial Sequence
  Description of Artificial Sequence: Synthetic oligonucleotide
  Antisense strand to SEQ ID NO: 1641311
aucaucgcuggguuuauau

SEQ ID NO: 1641313 - RNA, 19 nt, Artificial Sequence
  Description of Artificial Sequence: Synthetic oligonucleotide
  Sense strand starting at position 2408 of SEQ ID NO: 1561025
gaaggcuuaucagagguga

SEQ ID NO: 1641314 - RNA, 19 nt, Artificial Sequence
  Description of Artificial Sequence: Synthetic oligonucleotide
  Antisense strand to SEQ ID NO: 1641313
ucaccucugauaagccuuc

SEQ ID NO: 1641315 - RNA, 19 nt, Artificial Sequence
  Description of Artificial Sequence: Synthetic oligonucleotide
  Sense strand starting at position 2410 of SEQ ID NO: 1561025
aggcuuaucagaggugaca

SEQ ID NO: 1641316 - RNA, 19 nt, Artificial Sequence
  Description of Artificial Sequence: Synthetic oligonucleotide
  Antisense strand to SEQ ID NO: 1641315
ugucaccucugauaagccu

SEQ ID NO: 1641317 - RNA, 19 nt, Artificial Sequence
  Description of Artificial Sequence: Synthetic oligonucleotide
  Sense strand starting at position 2412 of SEQ ID NO: 1561025
gcuuaucagaggugacauu

SEQ ID NO: 1641318 - RNA, 19 nt, Artificial Sequence
  Description of Artificial Sequence: Synthetic oligonucleotide
  Antisense strand to SEQ ID NO: 1641317
aaugucaccucugauaagc

SEQ ID NO: 1641319 - RNA, 19 nt, Artificial Sequence
  Description of Artificial Sequence: Synthetic oligonucleotide
  Sense strand starting at position 2585 of SEQ ID NO: 1561025
ccuacuauguguugcacuu

SEQ ID NO: 1641320 - RNA, 19 nt, Artificial Sequence
  Description of Artificial Sequence: Synthetic oligonucleotide
  Antisense strand to SEQ ID NO: 1641319
aagugcaacacauaguagg

SEQ ID NO: 1641321 - RNA, 19 nt, Artificial Sequence
  Description of Artificial Sequence: Synthetic oligonucleotide
  Sense strand starting at position 2759 of SEQ ID NO: 1561025
gcaggcagauuacuuuaaa

SEQ ID NO: 1641322 - RNA, 19 nt, Artificial Sequence
  Description of Artificial Sequence: Synthetic oligonucleotide
  Antisense strand to SEQ ID NO: 1641321
uuuaaaguaaucugccugc

SEQ ID NO: 1641323 - RNA, 19 nt, Artificial Sequence
  Description of Artificial Sequence: Synthetic oligonucleotide
  Sense strand starting at position 2894 of SEQ ID NO: 1561025
guaggauaauugcuugaau

SEQ ID NO: 1641324 - RNA, 19 nt, Artificial Sequence
  Description of Artificial Sequence: Synthetic oligonucleotide
  Antisense strand to SEQ ID NO: 1641323
auucaagcaauuauccuac

SEQ ID NO: 1641325 - RNA, 19 nt, Artificial Sequence
  Description of Artificial Sequence: Synthetic oligonucleotide
  Sense strand starting at position 3109 of SEQ ID NO: 1561025
gggaaacgcuaucucuauu

SEQ ID NO: 1641326 - RNA, 19 nt, Artificial Sequence
  Description of Artificial Sequence: Synthetic oligonucleotide
  Antisense strand to SEQ ID NO: 1641325
aauagagauagcguuuccc

SEQ ID NO: 1641327 - RNA, 19 nt, Artificial Sequence
  Description of Artificial Sequence: Synthetic oligonucleotide
  Sense strand starting at position 3199 of SEQ ID NO: 1561025
aaggauuucugauguuaga

SEQ ID NO: 1641328 - RNA, 19 nt, Artificial Sequence
  Description of Artificial Sequence: Synthetic oligonucleotide
  Antisense strand to SEQ ID NO: 1641327
ucuaacaucagaaauccuu

SEQ ID NO: 1641329 - RNA, 19 nt, Artificial Sequence
  Description of Artificial Sequence: Synthetic oligonucleotide
  Sense strand starting at position 3491 of SEQ ID NO: 1561025
gacagagacucccgucuaa

SEQ ID NO: 1641330 - RNA, 19 nt, Artificial Sequence
  Description of Artificial Sequence: Synthetic oligonucleotide
  Antisense strand to SEQ ID NO: 1641329
uuagacgggagucucuguc

SEQ ID NO: 1641331 - RNA, 19 nt, Artificial Sequence
  Description of Artificial Sequence: Synthetic oligonucleotide
  Sense strand starting at position 7 of SEQ ID NO: 1561026
ugggaagucucagucacca

SEQ ID NO: 1641332 - RNA, 19 nt, Artificial Sequence
  Description of Artificial Sequence: Synthetic oligonucleotide
  Antisense strand to SEQ ID NO: 1641331
uggugacugagacuuccca

SEQ ID NO: 1641333 - RNA, 19 nt, Artificial Sequence
  Description of Artificial Sequence: Synthetic oligonucleotide
  Sense strand starting at position 34 of SEQ ID NO: 1561026
ggaagaucacagcagcuuu

SEQ ID NO: 1641334 - RNA, 19 nt, Artificial Sequence
  Description of Artificial Sequence: Synthetic oligonucleotide
  Antisense strand to SEQ ID NO: 1641333
aaagcugcugugaucuucc

SEQ ID NO: 1641335 - RNA, 19 nt, Artificial Sequence
  Description of Artificial Sequence: Synthetic oligonucleotide
  Sense strand starting at position 183 of SEQ ID NO: 1561026
gguaaauauguagaucagu

SEQ ID NO: 1641336 - RNA, 19 nt, Artificial Sequence
  Description of Artificial Sequence: Synthetic oligonucleotide
  Antisense strand to SEQ ID NO: 1641335
acugaucuacauauuuacc

SEQ ID NO: 1641337 - RNA, 19 nt, Artificial Sequence
  Description of Artificial Sequence: Synthetic oligonucleotide
  Sense strand starting at position 203 of SEQ ID NO: 1561026
ggcuuccugccuuaucuga

SEQ ID NO: 1641338 - RNA, 19 nt, Artificial Sequence
  Description of Artificial Sequence: Synthetic oligonucleotide
  Antisense strand to SEQ ID NO: 1641337
ucagauaaggcaggaagcc

SEQ ID NO: 1641339 - RNA, 19 nt, Artificial Sequence
  Description of Artificial Sequence: Synthetic oligonucleotide
  Sense strand starting at position 210 of SEQ ID NO: 1561026
ugccuuaucugaguaaaga

SEQ ID NO: 1641340 - RNA, 19 nt, Artificial Sequence
  Description of Artificial Sequence: Synthetic oligonucleotide
  Antisense strand to SEQ ID NO: 1641339
ucuuuacucagauaaggca

SEQ ID NO: 1641341 - RNA, 19 nt, Artificial Sequence
  Description of Artificial Sequence: Synthetic oligonucleotide
  Sense strand starting at position 211 of SEQ ID NO: 1561026
gccuuaucugaguaaagag

SEQ ID NO: 1641342 - RNA, 19 nt, Artificial Sequence
  Description of Artificial Sequence: Synthetic oligonucleotide
  Antisense strand to SEQ ID NO: 1641341
cucuuuacucagauaaggc

SEQ ID NO: 1641343 - RNA, 19 nt, Artificial Sequence
  Description of Artificial Sequence: Synthetic oligonucleotide
  Sense strand starting at position 277 of SEQ ID NO: 1561026
gugacucuggccgagacaa

SEQ ID NO: 1641344 - RNA, 19 nt, Artificial Sequence
  Description of Artificial Sequence: Synthetic oligonucleotide
  Antisense strand to SEQ ID NO: 1641343
uugucucggccagagucac

SEQ ID NO: 1641345 - RNA, 19 nt, Artificial Sequence
  Description of Artificial Sequence: Synthetic oligonucleotide
  Sense strand starting at position 313 of SEQ ID NO: 1561026
caggguuucucaucaggaa

SEQ ID NO: 1641346 - RNA, 19 nt, Artificial Sequence
  Description of Artificial Sequence: Synthetic oligonucleotide
  Antisense strand to SEQ ID NO: 1641345
uuccugaugagaaacccug

SEQ ID NO: 1641347 - RNA, 19 nt, Artificial Sequence
  Description of Artificial Sequence: Synthetic oligonucleotide
  Sense strand starting at position 375 of SEQ ID NO: 1561026
auaauaaagcccugugauc

SEQ ID NO: 1641348 - RNA, 19 nt, Artificial Sequence
  Description of Artificial Sequence: Synthetic oligonucleotide
  Antisense strand to SEQ ID NO: 1641347
gaucacagggcuuuauuau

SEQ ID NO: 1641349 - RNA, 19 nt, Artificial Sequence
  Description of Artificial Sequence: Synthetic oligonucleotide
  Sense strand starting at position 844 of SEQ ID NO: 1561026
ggucuccuaugcccaagau

SEQ ID NO: 1641350 - RNA, 19 nt, Artificial Sequence
  Description of Artificial Sequence: Synthetic oligonucleotide
  Antisense strand to SEQ ID NO: 1641349
aucuugggcauaggagacc

SEQ ID NO: 1641351 - RNA, 19 nt, Artificial Sequence
  Description of Artificial Sequence: Synthetic oligonucleotide
  Sense strand starting at position 1105 of SEQ ID NO: 1561026
ucccuuugaguauguccua

SEQ ID NO: 1641352 - RNA, 19 nt, Artificial Sequence
  Description of Artificial Sequence: Synthetic oligonucleotide
  Antisense strand to SEQ ID NO: 1641351
uaggacauacucaaaggga

SEQ ID NO: 1641353 - RNA, 19 nt, Artificial Sequence
  Description of Artificial Sequence: Synthetic oligonucleotide
  Sense strand starting at position 1123 of SEQ ID NO: 1561026
acggguguuuccuuuguaa

SEQ ID NO: 1641354 - RNA, 19 nt, Artificial Sequence
  Description of Artificial Sequence: Synthetic oligonucleotide
  Antisense strand to SEQ ID NO: 1641353
uuacaaaggaaacacccgu

SEQ ID NO: 1641355 - RNA, 19 nt, Artificial Sequence
  Description of Artificial Sequence: Synthetic oligonucleotide
  Sense strand starting at position 1125 of SEQ ID NO: 1561026
ggguguuuccuuuguaaau

SEQ ID NO: 1641356 - RNA, 19 nt, Artificial Sequence
  Description of Artificial Sequence: Synthetic oligonucleotide
  Antisense strand to SEQ ID NO: 1641355
auuuacaaaggaaacaccc

SEQ ID NO: 1641357 - RNA, 19 nt, Artificial Sequence
  Description of Artificial Sequence: Synthetic oligonucleotide
  Sense strand starting at position 1126 of SEQ ID NO: 1561026
gguguuuccuuuguaaauc

SEQ ID NO: 1641358 - RNA, 19 nt, Artificial Sequence
  Description of Artificial Sequence: Synthetic oligonucleotide
  Antisense strand to SEQ ID NO: 1641357
gauuuacaaaggaaacacc

SEQ ID NO: 1641359 - RNA, 19 nt, Artificial Sequence
  Description of Artificial Sequence: Synthetic oligonucleotide
  Sense strand starting at position 1357 of SEQ ID NO: 1561026
ggagaacccuccucucagu

SEQ ID NO: 1641360 - RNA, 19 nt, Artificial Sequence
  Description of Artificial Sequence: Synthetic oligonucleotide
  Antisense strand to SEQ ID NO: 1641359
acugagaggaggguucucc

SEQ ID NO: 1641361 - RNA, 19 nt, Artificial Sequence
  Description of Artificial Sequence: Synthetic oligonucleotide
  Sense strand starting at position 2145 of SEQ ID NO: 1561026
gcguccuugcugcuaagua

SEQ ID NO: 1641362 - RNA, 19 nt, Artificial Sequence
  Description of Artificial Sequence: Synthetic oligonucleotide
  Antisense strand to SEQ ID NO: 1641361
uacuuagcagcaaggacgc

SEQ ID NO: 1641363 - RNA, 19 nt, Artificial Sequence
  Description of Artificial Sequence: Synthetic oligonucleotide
  Sense strand starting at position 2213 of SEQ ID NO: 1561026
ggaggaaacgagugcguuu

SEQ ID NO: 1641364 - RNA, 19 nt, Artificial Sequence
  Description of Artificial Sequence: Synthetic oligonucleotide
  Antisense strand to SEQ ID NO: 1641363
aaacgcacucguuuccucc

SEQ ID NO: 1641365 - RNA, 19 nt, Artificial Sequence
  Description of Artificial Sequence: Synthetic oligonucleotide
  Sense strand starting at position 2846 of SEQ ID NO: 1561026
aguuuccuccuccggagaa

SEQ ID NO: 1641366 - RNA, 19 nt, Artificial Sequence
  Description of Artificial Sequence: Synthetic oligonucleotide
  Antisense strand to SEQ ID NO: 1641365
uucuccggaggaggaaacu

SEQ ID NO: 1641367 - RNA, 19 nt, Artificial Sequence
  Description of Artificial Sequence: Synthetic oligonucleotide
  Sense strand starting at position 2998 of SEQ ID NO: 1561026
uugggucugccugagacau

SEQ ID NO: 1641368 - RNA, 19 nt, Artificial Sequence
  Description of Artificial Sequence: Synthetic oligonucleotide
  Antisense strand to SEQ ID NO: 1641367
augucucaggcagacccaa

SEQ ID NO: 1641369 - RNA, 19 nt, Artificial Sequence
  Description of Artificial Sequence: Synthetic oligonucleotide
  Sense strand starting at position 3130 of SEQ ID NO: 1561026
ggaauugucuguuuccgca

SEQ ID NO: 1641370 - RNA, 19 nt, Artificial Sequence
  Description of Artificial Sequence: Synthetic oligonucleotide
  Antisense strand to SEQ ID NO: 1641369
ugcggaaacagacaauucc

SEQ ID NO: 1641371 - RNA, 19 nt, Artificial Sequence
  Description of Artificial Sequence: Synthetic oligonucleotide
  Sense strand starting at position 3563 of SEQ ID NO: 1561026
ggagguuguuacuuguaag

SEQ ID NO: 1641372 - RNA, 19 nt, Artificial Sequence
  Description of Artificial Sequence: Synthetic oligonucleotide
  Antisense strand to SEQ ID NO: 1641371
cuuacaaguaacaaccucc

SEQ ID NO: 1641373 - RNA, 19 nt, Artificial Sequence
  Description of Artificial Sequence: Synthetic oligonucleotide
  Sense strand starting at position 3564 of SEQ ID NO: 1561026
gagguuguuacuuguaagg

SEQ ID NO: 1641374 - RNA, 19 nt, Artificial Sequence
  Description of Artificial Sequence: Synthetic oligonucleotide
  Antisense strand to SEQ ID NO: 1641373
ccuuacaaguaacaaccuc

SEQ ID NO: 1641375 - RNA, 19 nt, Artificial Sequence
  Description of Artificial Sequence: Synthetic oligonucleotide
  Sense strand starting at position 3570 of SEQ ID NO: 1561026
guuacuuguaaggaacagu

SEQ ID NO: 1641376 - RNA, 19 nt, Artificial Sequence
  Description of Artificial Sequence: Synthetic oligonucleotide
  Antisense strand to SEQ ID NO: 1641375
acuguuccuuacaaguaac

SEQ ID NO: 1641377 - RNA, 19 nt, Artificial Sequence
  Description of Artificial Sequence: Synthetic oligonucleotide
  Sense strand starting at position 3630 of SEQ ID NO: 1561026
ucccuaauaggcgguuaaa

SEQ ID NO: 1641378 - RNA, 19 nt, Artificial Sequence
  Description of Artificial Sequence: Synthetic oligonucleotide
  Antisense strand to SEQ ID NO: 1641377
uuuaaccgccuauuaggga

SEQ ID NO: 1641379 - RNA, 19 nt, Artificial Sequence
  Description of Artificial Sequence: Synthetic oligonucleotide
  Sense strand starting at position 3633 of SEQ ID NO: 1561026
cuaauaggcgguuaaagaa

SEQ ID NO: 1641380 - RNA, 19 nt, Artificial Sequence
  Description of Artificial Sequence: Synthetic oligonucleotide
  Antisense strand to SEQ ID NO: 1641379
uucuuuaaccgccuauuag

SEQ ID NO: 1641381 - RNA, 19 nt, Artificial Sequence
  Description of Artificial Sequence: Synthetic oligonucleotide
  Sense strand starting at position 3669 of SEQ ID NO: 1561026
ugaaauuggcaucgaguua

SEQ ID NO: 1641382 - RNA, 19 nt, Artificial Sequence
  Description of Artificial Sequence: Synthetic oligonucleotide
  Antisense strand to SEQ ID NO: 1641381
uaacucgaugccaauuuca

SEQ ID NO: 1641383 - RNA, 19 nt, Artificial Sequence
  Description of Artificial Sequence: Synthetic oligonucleotide
  Sense strand starting at position 3670 of SEQ ID NO: 1561026
gaaauuggcaucgaguuag

SEQ ID NO: 1641384 - RNA, 19 nt, Artificial Sequence
  Description of Artificial Sequence: Synthetic oligonucleotide
  Antisense strand to SEQ ID NO: 1641383
cuaacucgaugccaauuuc

SEQ ID NO: 1641385 - RNA, 19 nt, Artificial Sequence
  Description of Artificial Sequence: Synthetic oligonucleotide
  Sense strand starting at position 3702 of SEQ ID NO: 1561026
gaagucagccaagagaugu

SEQ ID NO: 1641386 - RNA, 19 nt, Artificial Sequence
  Description of Artificial Sequence: Synthetic oligonucleotide
  Antisense strand to SEQ ID NO: 1641385
acaucucuuggcugacuuc

SEQ ID NO: 1641387 - RNA, 19 nt, Artificial Sequence
  Description of Artificial Sequence: Synthetic oligonucleotide
  Sense strand starting at position 3706 of SEQ ID NO: 1561026
ucagccaagagauguguua

SEQ ID NO: 1641388 - RNA, 19 nt, Artificial Sequence
  Description of Artificial Sequence: Synthetic oligonucleotide
  Antisense strand to SEQ ID NO: 1641387
uaacacaucucuuggcuga

SEQ ID NO: 1641389 - RNA, 19 nt, Artificial Sequence
  Description of Artificial Sequence: Synthetic oligonucleotide
  Sense strand starting at position 3708 of SEQ ID NO: 1561026
agccaagagauguguuaaa

SEQ ID NO: 1641390 - RNA, 19 nt, Artificial Sequence
  Description of Artificial Sequence: Synthetic oligonucleotide
  Antisense strand to SEQ ID NO: 1641389
uuuaacacaucucuuggcu

SEQ ID NO: 1641391 - RNA, 19 nt, Artificial Sequence
  Description of Artificial Sequence: Synthetic oligonucleotide
  Sense strand starting at position 3717 of SEQ ID NO: 1561026
auguguuaaagguauugua

SEQ ID NO: 1641392 - RNA, 19 nt, Artificial Sequence
  Description of Artificial Sequence: Synthetic oligonucleotide
  Antisense strand to SEQ ID NO: 1641391
uacaauaccuuuaacacau

SEQ ID NO: 1641393 - RNA, 19 nt, Artificial Sequence
  Description of Artificial Sequence: Synthetic oligonucleotide
  Sense strand starting at position 3749 of SEQ ID NO: 1561026
gggcuugaguguucagaga

SEQ ID NO: 1641394 - RNA, 19 nt, Artificial Sequence
  Description of Artificial Sequence: Synthetic oligonucleotide
  Antisense strand to SEQ ID NO: 1641393
ucucugaacacucaagccc

SEQ ID NO: 1641395 - RNA, 19 nt, Artificial Sequence
  Description of Artificial Sequence: Synthetic oligonucleotide
  Sense strand starting at position 3772 of SEQ ID NO: 1561026
agagaaaugguguguagug

SEQ ID NO: 1641396 - RNA, 19 nt, Artificial Sequence
  Description of Artificial Sequence: Synthetic oligonucleotide
  Antisense strand to SEQ ID NO: 1641395
cacuacacaccauuucucu

SEQ ID NO: 1641397 - RNA, 19 nt, Artificial Sequence
  Description of Artificial Sequence: Synthetic oligonucleotide
  Sense strand starting at position 3773 of SEQ ID NO: 1561026
gagaaaugguguguagugu

SEQ ID NO: 1641398 - RNA, 19 nt, Artificial Sequence
  Description of Artificial Sequence: Synthetic oligonucleotide
  Antisense strand to SEQ ID NO: 1641397
acacuacacaccauuucuc

SEQ ID NO: 1641399 - RNA, 19 nt, Artificial Sequence
  Description of Artificial Sequence: Synthetic oligonucleotide
  Sense strand starting at position 3801 of SEQ ID NO: 1561026
gccuucuaggcugggagaa

SEQ ID NO: 1641400 - RNA, 19 nt, Artificial Sequence
  Description of Artificial Sequence: Synthetic oligonucleotide
  Antisense strand to SEQ ID NO: 1641399
uucucccagccuagaaggc

SEQ ID NO: 1641401 - RNA, 19 nt, Artificial Sequence
  Description of Artificial Sequence: Synthetic oligonucleotide
  Sense strand starting at position 3802 of SEQ ID NO: 1561026
ccuucuaggcugggagaau

SEQ ID NO: 1641402 - RNA, 19 nt, Artificial Sequence
  Description of Artificial Sequence: Synthetic oligonucleotide
  Antisense strand to SEQ ID NO: 1641401
auucucccagccuagaagg

SEQ ID NO: 1641403 - RNA, 19 nt, Artificial Sequence
  Description of Artificial Sequence: Synthetic oligonucleotide
  Sense strand starting at position 3815 of SEQ ID NO: 1561026
gagaauuucucugguacuc

SEQ ID NO: 1641404 - RNA, 19 nt, Artificial Sequence
  Description of Artificial Sequence: Synthetic oligonucleotide
  Antisense strand to SEQ ID NO: 1641403
gaguaccagagaaauucuc

SEQ ID NO: 1641405 - RNA, 19 nt, Artificial Sequence
  Description of Artificial Sequence: Synthetic oligonucleotide
  Sense strand starting at position 3835 of SEQ ID NO: 1561026
gugucccuccacuaagagu

SEQ ID NO: 1641406 - RNA, 19 nt, Artificial Sequence
  Description of Artificial Sequence: Synthetic oligonucleotide
  Antisense strand to SEQ ID NO: 1641405
acucuuaguggagggacac

SEQ ID NO: 1641407 - RNA, 19 nt, Artificial Sequence
  Description of Artificial Sequence: Synthetic oligonucleotide
  Sense strand starting at position 3959 of SEQ ID NO: 1561026
agcuucugccauugggauu

SEQ ID NO: 1641408 - RNA, 19 nt, Artificial Sequence
  Description of Artificial Sequence: Synthetic oligonucleotide
  Antisense strand to SEQ ID NO: 1641407
aaucccaauggcagaagcu

SEQ ID NO: 1641409 - RNA, 19 nt, Artificial Sequence
  Description of Artificial Sequence: Synthetic oligonucleotide
  Sense strand starting at position 3960 of SEQ ID NO: 1561026
gcuucugccauugggauua

SEQ ID NO: 1641410 - RNA, 19 nt, Artificial Sequence
  Description of Artificial Sequence: Synthetic oligonucleotide
  Antisense strand to SEQ ID NO: 1641409
uaaucccaauggcagaagc

SEQ ID NO: 1641411 - RNA, 19 nt, Artificial Sequence
  Description of Artificial Sequence: Synthetic oligonucleotide
  Sense strand starting at position 76 of SEQ ID NO: 1561027
guuccucagacccguagaa

SEQ ID NO: 1641412 - RNA, 19 nt, Artificial Sequence
  Description of Artificial Sequence: Synthetic oligonucleotide
  Antisense strand to SEQ ID NO: 1641411
uucuacgggucugaggaac

SEQ ID NO: 1641413 - RNA, 19 nt, Artificial Sequence
  Description of Artificial Sequence: Synthetic oligonucleotide
  Sense strand starting at position 78 of SEQ ID NO: 1561027
uccucagacccguagaagu

SEQ ID NO: 1641414 - RNA, 19 nt, Artificial Sequence
  Description of Artificial Sequence: Synthetic oligonucleotide
  Antisense strand to SEQ ID NO: 1641413
acuucuacgggucugagga

SEQ ID NO: 1641415 - RNA, 19 nt, Artificial Sequence
  Description of Artificial Sequence: Synthetic oligonucleotide
  Sense strand starting at position 98 of SEQ ID NO: 1561027
gcuuuaagagcuugucuuu

SEQ ID NO: 1641416 - RNA, 19 nt, Artificial Sequence
  Description of Artificial Sequence: Synthetic oligonucleotide
  Antisense strand to SEQ ID NO: 1641415
aaagacaagcucuuaaagc

SEQ ID NO: 1641417 - RNA, 19 nt, Artificial Sequence
  Description of Artificial Sequence: Synthetic oligonucleotide
  Sense strand starting at position 105 of SEQ ID NO: 1561027
gagcuugucuuucucuagu

SEQ ID NO: 1641418 - RNA, 19 nt, Artificial Sequence
  Description of Artificial Sequence: Synthetic oligonucleotide
  Antisense strand to SEQ ID NO: 1641417
acuagagaaagacaagcuc

SEQ ID NO: 1641419 - RNA, 19 nt, Artificial Sequence
  Description of Artificial Sequence: Synthetic oligonucleotide
  Sense strand starting at position 108 of SEQ ID NO: 1561027
cuugucuuucucuaguuga

SEQ ID NO: 1641420 - RNA, 19 nt, Artificial Sequence
  Description of Artificial Sequence: Synthetic oligonucleotide
  Antisense strand to SEQ ID NO: 1641419
ucaacuagagaaagacaag

SEQ ID NO: 1641421 - RNA, 19 nt, Artificial Sequence
  Description of Artificial Sequence: Synthetic oligonucleotide
  Sense strand starting at position 111 of SEQ ID NO: 1561027
gucuuucucuaguugacuu

SEQ ID NO: 1641422 - RNA, 19 nt, Artificial Sequence
  Description of Artificial Sequence: Synthetic oligonucleotide
  Antisense strand to SEQ ID NO: 1641421
aagucaacuagagaaagac

SEQ ID NO: 1641423 - RNA, 19 nt, Artificial Sequence
  Description of Artificial Sequence: Synthetic oligonucleotide
  Sense strand starting at position 249 of SEQ ID NO: 1561027
aaagcuaacucuuagugga

SEQ ID NO: 1641424 - RNA, 19 nt, Artificial Sequence
  Description of Artificial Sequence: Synthetic oligonucleotide
  Antisense strand to SEQ ID NO: 1641423
uccacuaagaguuagcuuu

SEQ ID NO: 1641425 - RNA, 19 nt, Artificial Sequence
  Description of Artificial Sequence: Synthetic oligonucleotide
  Sense strand starting at position 418 of SEQ ID NO: 1561027
cuucuaacucgaugccaau

SEQ ID NO: 1641426 - RNA, 19 nt, Artificial Sequence
  Description of Artificial Sequence: Synthetic oligonucleotide
  Antisense strand to SEQ ID NO: 1641425
auuggcaucgaguuagaag

SEQ ID NO: 1641427 - RNA, 19 nt, Artificial Sequence
  Description of Artificial Sequence: Synthetic oligonucleotide
  Sense strand starting at position 466 of SEQ ID NO: 1561027
ccgccuauuagggagagau

SEQ ID NO: 1641428 - RNA, 19 nt, Artificial Sequence
  Description of Artificial Sequence: Synthetic oligonucleotide
  Antisense strand to SEQ ID NO: 1641427
aucucucccuaauaggcgg

SEQ ID NO: 1641429 - RNA, 19 nt, Artificial Sequence
  Description of Artificial Sequence: Synthetic oligonucleotide
  Sense strand starting at position 745 of SEQ ID NO: 1561027
augccaaaccuucgacuuu

SEQ ID NO: 1641430 - RNA, 19 nt, Artificial Sequence
  Description of Artificial Sequence: Synthetic oligonucleotide
  Antisense strand to SEQ ID NO: 1641429
aaagucgaagguuuggcau

SEQ ID NO: 1641431 - RNA, 19 nt, Artificial Sequence
  Description of Artificial Sequence: Synthetic oligonucleotide
  Sense strand starting at position 746 of SEQ ID NO: 1561027
ugccaaaccuucgacuuua

SEQ ID NO: 1641432 - RNA, 19 nt, Artificial Sequence
  Description of Artificial Sequence: Synthetic oligonucleotide
  Antisense strand to SEQ ID NO: 1641431
uaaagucgaagguuuggca

SEQ ID NO: 1641433 - RNA, 19 nt, Artificial Sequence
  Description of Artificial Sequence: Synthetic oligonucleotide
  Sense strand starting at position 764 of SEQ ID NO: 1561027
aaaguuauaugaugggaca

SEQ ID NO: 1641434 - RNA, 19 nt, Artificial Sequence
  Description of Artificial Sequence: Synthetic oligonucleotide
  Antisense strand to SEQ ID NO: 1641433
ugucccaucauauaacuuu

SEQ ID NO: 1641435 - RNA, 19 nt, Artificial Sequence
  Description of Artificial Sequence: Synthetic oligonucleotide
  Sense strand starting at position 767 of SEQ ID NO: 1561027
guuauaugaugggacaaau

SEQ ID NO: 1641436 - RNA, 19 nt, Artificial Sequence
  Description of Artificial Sequence: Synthetic oligonucleotide
  Antisense strand to SEQ ID NO: 1641435
auuugucccaucauauaac

SEQ ID NO: 1641437 - RNA, 19 nt, Artificial Sequence
  Description of Artificial Sequence: Synthetic oligonucleotide
  Sense strand starting at position 940 of SEQ ID NO: 1561027
gcucaaguuguuuguucca

SEQ ID NO: 1641438 - RNA, 19 nt, Artificial Sequence
  Description of Artificial Sequence: Synthetic oligonucleotide
  Antisense strand to SEQ ID NO: 1641437
uggaacaaacaacuugagc

SEQ ID NO: 1641439 - RNA, 19 nt, Artificial Sequence
  Description of Artificial Sequence: Synthetic oligonucleotide
  Sense strand starting at position 942 of SEQ ID NO: 1561027
ucaaguuguuuguuccagu

SEQ ID NO: 1641440 - RNA, 19 nt, Artificial Sequence
  Description of Artificial Sequence: Synthetic oligonucleotide
  Antisense strand to SEQ ID NO: 1641439
acuggaacaaacaacuuga

SEQ ID NO: 1641441 - RNA, 19 nt, Artificial Sequence
  Description of Artificial Sequence: Synthetic oligonucleotide
  Sense strand starting at position 949 of SEQ ID NO: 1561027
guuuguuccaguugcggaa

SEQ ID NO: 1641442 - RNA, 19 nt, Artificial Sequence
  Description of Artificial Sequence: Synthetic oligonucleotide
  Antisense strand to SEQ ID NO: 1641441
uuccgcaacuggaacaaac

SEQ ID NO: 1641443 - RNA, 19 nt, Artificial Sequence
  Description of Artificial Sequence: Synthetic oligonucleotide
  Sense strand starting at position 1089 of SEQ ID NO: 1561027
ggugaugucucaggcagac

SEQ ID NO: 1641444 - RNA, 19 nt, Artificial Sequence
  Description of Artificial Sequence: Synthetic oligonucleotide
  Antisense strand to SEQ ID NO: 1641443
gucugccugagacaucacc

SEQ ID NO: 1641445 - RNA, 19 nt, Artificial Sequence
  Description of Artificial Sequence: Synthetic oligonucleotide
  Sense strand starting at position 1155 of SEQ ID NO: 1561027
gguggacagcuucguaaag

SEQ ID NO: 1641446 - RNA, 19 nt, Artificial Sequence
  Description of Artificial Sequence: Synthetic oligonucleotide
  Antisense strand to SEQ ID NO: 1641445
cuuuacgaagcuguccacc

SEQ ID NO: 1641447 - RNA, 19 nt, Artificial Sequence
  Description of Artificial Sequence: Synthetic oligonucleotide
  Sense strand starting at position 1213 of SEQ ID NO: 1561027
cuguaaaugcucuggaguc

SEQ ID NO: 1641448 - RNA, 19 nt, Artificial Sequence
  Description of Artificial Sequence: Synthetic oligonucleotide
  Antisense strand to SEQ ID NO: 1641447
gacuccagagcauuuacag

SEQ ID NO: 1641449 - RNA, 19 nt, Artificial Sequence
  Description of Artificial Sequence: Synthetic oligonucleotide
  Sense strand starting at position 2913 of SEQ ID NO: 1561027
cagggaagaugcuuuguga

SEQ ID NO: 1641450 - RNA, 19 nt, Artificial Sequence
  Description of Artificial Sequence: Synthetic oligonucleotide
  Antisense strand to SEQ ID NO: 1641449
ucacaaagcaucuucccug

SEQ ID NO: 1641451 - RNA, 19 nt, Artificial Sequence
  Description of Artificial Sequence: Synthetic oligonucleotide
  Sense strand starting at position 2917 of SEQ ID NO: 1561027
gaagaugcuuugugaccca

SEQ ID NO: 1641452 - RNA, 19 nt, Artificial Sequence
  Description of Artificial Sequence: Synthetic oligonucleotide
  Antisense strand to SEQ ID NO: 1641451
ugggucacaaagcaucuuc

SEQ ID NO: 1641453 - RNA, 19 nt, Artificial Sequence
  Description of Artificial Sequence: Synthetic oligonucleotide
  Sense strand starting at position 3047 of SEQ ID NO: 1561027
ccgguacucgcucggugaa

SEQ ID NO: 1641454 - RNA, 19 nt, Artificial Sequence
  Description of Artificial Sequence: Synthetic oligonucleotide
  Antisense strand to SEQ ID NO: 1641453
uucaccgagcgaguaccgg

SEQ ID NO: 1641455 - RNA, 19 nt, Artificial Sequence
  Description of Artificial Sequence: Synthetic oligonucleotide
  Sense strand starting at position 3049 of SEQ ID NO: 1561027
gguacucgcucggugaagu

SEQ ID NO: 1641456 - RNA, 19 nt, Artificial Sequence
  Description of Artificial Sequence: Synthetic oligonucleotide
  Antisense strand to SEQ ID NO: 1641455
acuucaccgagcgaguacc

SEQ ID NO: 1641457 - RNA, 19 nt, Artificial Sequence
  Description of Artificial Sequence: Synthetic oligonucleotide
  Sense strand starting at position 3050 of SEQ ID NO: 1561027
guacucgcucggugaagua

SEQ ID NO: 1641458 - RNA, 19 nt, Artificial Sequence
  Description of Artificial Sequence: Synthetic oligonucleotide
  Antisense strand to SEQ ID NO: 1641457
uacuucaccgagcgaguac

SEQ ID NO: 1641459 - RNA, 19 nt, Artificial Sequence
  Description of Artificial Sequence: Synthetic oligonucleotide
  Sense strand starting at position 3088 of SEQ ID NO: 1561027
ugguguugacgguagugau

SEQ ID NO: 1641460 - RNA, 19 nt, Artificial Sequence
  Description of Artificial Sequence: Synthetic oligonucleotide
  Antisense strand to SEQ ID NO: 1641459
aucacuaccgucaacacca

SEQ ID NO: 1641461 - RNA, 19 nt, Artificial Sequence
  Description of Artificial Sequence: Synthetic oligonucleotide
  Sense strand starting at position 3089 of SEQ ID NO: 1561027
gguguugacgguagugauc

SEQ ID NO: 1641462 - RNA, 19 nt, Artificial Sequence
  Description of Artificial Sequence: Synthetic oligonucleotide
  Antisense strand to SEQ ID NO: 1641461
gaucacuaccgucaacacc

SEQ ID NO: 1641463 - RNA, 19 nt, Artificial Sequence
  Description of Artificial Sequence: Synthetic oligonucleotide
  Sense strand starting at position 3095 of SEQ ID NO: 1561027
gacgguagugaucagaaau

SEQ ID NO: 1641464 - RNA, 19 nt, Artificial Sequence
  Description of Artificial Sequence: Synthetic oligonucleotide
  Antisense strand to SEQ ID NO: 1641463
auuucugaucacuaccguc

SEQ ID NO: 1641465 - RNA, 19 nt, Artificial Sequence
  Description of Artificial Sequence: Synthetic oligonucleotide
  Sense strand starting at position 3240 of SEQ ID NO: 1561027
uggccugaucuugggcaua

SEQ ID NO: 1641466 - RNA, 19 nt, Artificial Sequence
  Description of Artificial Sequence: Synthetic oligonucleotide
  Antisense strand to SEQ ID NO: 1641465
uaugcccaagaucaggcca

SEQ ID NO: 1641467 - RNA, 19 nt, Artificial Sequence
  Description of Artificial Sequence: Synthetic oligonucleotide
  Sense strand starting at position 3415 of SEQ ID NO: 1561027
ugugguugccaucacgauu

SEQ ID NO: 1641468 - RNA, 19 nt, Artificial Sequence
  Description of Artificial Sequence: Synthetic oligonucleotide
  Antisense strand to SEQ ID NO: 1641467
aaucgugauggcaaccaca

SEQ ID NO: 1641469 - RNA, 19 nt, Artificial Sequence
  Description of Artificial Sequence: Synthetic oligonucleotide
  Sense strand starting at position 3457 of SEQ ID NO: 1561027
cgaguccucauuugcagau

SEQ ID NO: 1641470 - RNA, 19 nt, Artificial Sequence
  Description of Artificial Sequence: Synthetic oligonucleotide
  Antisense strand to SEQ ID NO: 1641469
aucugcaaaugaggacucg

SEQ ID NO: 1641471 - RNA, 19 nt, Artificial Sequence
  Description of Artificial Sequence: Synthetic oligonucleotide
  Sense strand starting at position 3561 of SEQ ID NO: 1561027
uccuuauuccuguagcuuu

SEQ ID NO: 1641472 - RNA, 19 nt, Artificial Sequence
  Description of Artificial Sequence: Synthetic oligonucleotide
  Antisense strand to SEQ ID NO: 1641471
aaagcuacaggaauaagga

SEQ ID NO: 1641473 - RNA, 19 nt, Artificial Sequence
  Description of Artificial Sequence: Synthetic oligonucleotide
  Sense strand starting at position 3712 of SEQ ID NO: 1561027
cggagaucacagggcuuua

SEQ ID NO: 1641474 - RNA, 19 nt, Artificial Sequence
  Description of Artificial Sequence: Synthetic oligonucleotide
  Antisense strand to SEQ ID NO: 1641473
uaaagcccugugaucuccg

SEQ ID NO: 1641475 - RNA, 19 nt, Artificial Sequence
  Description of Artificial Sequence: Synthetic oligonucleotide
  Sense strand starting at position 3717 of SEQ ID NO: 1561027
aucacagggcuuuauuauu

SEQ ID NO: 1641476 - RNA, 19 nt, Artificial Sequence
  Description of Artificial Sequence: Synthetic oligonucleotide
  Antisense strand to SEQ ID NO: 1641475
aauaauaaagcccugugau

SEQ ID NO: 1641477 - RNA, 19 nt, Artificial Sequence
  Description of Artificial Sequence: Synthetic oligonucleotide
  Sense strand starting at position 3730 of SEQ ID NO: 1561027
auuauuaauuggugaugag

SEQ ID NO: 1641478 - RNA, 19 nt, Artificial Sequence
  Description of Artificial Sequence: Synthetic oligonucleotide
  Antisense strand to SEQ ID NO: 1641477
cucaucaccaauuaauaau

SEQ ID NO: 1641479 - RNA, 19 nt, Artificial Sequence
  Description of Artificial Sequence: Synthetic oligonucleotide
  Sense strand starting at position 3733 of SEQ ID NO: 1561027
auuaauuggugaugagaag

SEQ ID NO: 1641480 - RNA, 19 nt, Artificial Sequence
  Description of Artificial Sequence: Synthetic oligonucleotide
  Antisense strand to SEQ ID NO: 1641479
cuucucaucaccaauuaau

SEQ ID NO: 1641481 - RNA, 19 nt, Artificial Sequence
  Description of Artificial Sequence: Synthetic oligonucleotide
  Sense strand starting at position 3785 of SEQ ID NO: 1561027
ugagaaacccugggcucaa

SEQ ID NO: 1641482 - RNA, 19 nt, Artificial Sequence
  Description of Artificial Sequence: Synthetic oligonucleotide
  Antisense strand to SEQ ID NO: 1641481
uugagcccaggguuucuca

SEQ ID NO: 1641483 - RNA, 19 nt, Artificial Sequence
  Description of Artificial Sequence: Synthetic oligonucleotide
  Sense strand starting at position 3809 of SEQ ID NO: 1561027
gauaguugucucggccaga

SEQ ID NO: 1641484 - RNA, 19 nt, Artificial Sequence
  Description of Artificial Sequence: Synthetic oligonucleotide
  Antisense strand to SEQ ID NO: 1641483
ucuggccgagacaacuauc

SEQ ID NO: 1641485 - RNA, 19 nt, Artificial Sequence
  Description of Artificial Sequence: Synthetic oligonucleotide
  Sense strand starting at position 3810 of SEQ ID NO: 1561027
auaguugucucggccagag

SEQ ID NO: 1641486 - RNA, 19 nt, Artificial Sequence
  Description of Artificial Sequence: Synthetic oligonucleotide
  Antisense strand to SEQ ID NO: 1641485
cucuggccgagacaacuau

SEQ ID NO: 1641487 - RNA, 19 nt, Artificial Sequence
  Description of Artificial Sequence: Synthetic oligonucleotide
  Sense strand starting at position 3875 of SEQ ID NO: 1561027
ggauucucuuuacucagau

SEQ ID NO: 1641488 - RNA, 19 nt, Artificial Sequence
  Description of Artificial Sequence: Synthetic oligonucleotide
  Antisense strand to SEQ ID NO: 1641487
aucugaguaaagagaaucc

SEQ ID NO: 1641489 - RNA, 19 nt, Artificial Sequence
  Description of Artificial Sequence: Synthetic oligonucleotide
  Sense strand starting at position 3879 of SEQ ID NO: 1561027
ucucuuuacucagauaagg

SEQ ID NO: 1641490 - RNA, 19 nt, Artificial Sequence
  Description of Artificial Sequence: Synthetic oligonucleotide
  Antisense strand to SEQ ID NO: 1641489
ccuuaucugaguaaagaga

SEQ ID NO: 1641491 - RNA, 19 nt, Artificial Sequence
  Description of Artificial Sequence: Synthetic oligonucleotide
  Sense strand starting at position 16 of SEQ ID NO: 1561028
gggucaucauccucaaagu

SEQ ID NO: 1641492 - RNA, 19 nt, Artificial Sequence
  Description of Artificial Sequence: Synthetic oligonucleotide
  Antisense strand to SEQ ID NO: 1641491
acuuugaggaugaugaccc

SEQ ID NO: 1641493 - RNA, 19 nt, Artificial Sequence
  Description of Artificial Sequence: Synthetic oligonucleotide
  Sense strand starting at position 50 of SEQ ID NO: 1561028
ccuugauguggugcucgua

SEQ ID NO: 1641494 - RNA, 19 nt, Artificial Sequence
  Description of Artificial Sequence: Synthetic oligonucleotide
  Antisense strand to SEQ ID NO: 1641493
uacgagcaccacaucaagg

SEQ ID NO: 1641495 - RNA, 19 nt, Artificial Sequence
  Description of Artificial Sequence: Synthetic oligonucleotide
  Sense strand starting at position 53 of SEQ ID NO: 1561028
ugauguggugcucguagau

SEQ ID NO: 1641496 - RNA, 19 nt, Artificial Sequence
  Description of Artificial Sequence: Synthetic oligonucleotide
  Antisense strand to SEQ ID NO: 1641495
aucuacgagcaccacauca

SEQ ID NO: 1641497 - RNA, 19 nt, Artificial Sequence
  Description of Artificial Sequence: Synthetic oligonucleotide
  Sense strand starting at position 123 of SEQ ID NO: 1561028
cugcaugagcagcaaagau

SEQ ID NO: 1641498 - RNA, 19 nt, Artificial Sequence
  Description of Artificial Sequence: Synthetic oligonucleotide
  Antisense strand to SEQ ID NO: 1641497
aucuuugcugcucaugcag

SEQ ID NO: 1641499 - RNA, 19 nt, Artificial Sequence
  Description of Artificial Sequence: Synthetic oligonucleotide
  Sense strand starting at position 280 of SEQ ID NO: 1561028
ggaauccagccucaguaaa

SEQ ID NO: 1641500 - RNA, 19 nt, Artificial Sequence
  Description of Artificial Sequence: Synthetic oligonucleotide
  Antisense strand to SEQ ID NO: 1641499
uuuacugaggcuggauucc

SEQ ID NO: 1641501 - RNA, 19 nt, Artificial Sequence
  Description of Artificial Sequence: Synthetic oligonucleotide
  Sense strand starting at position 395 of SEQ ID NO: 1561028
ggaugucucucuggcugua

SEQ ID NO: 1641502 - RNA, 19 nt, Artificial Sequence
  Description of Artificial Sequence: Synthetic oligonucleotide
  Antisense strand to SEQ ID NO: 1641501
uacagccagagagacaucc

SEQ ID NO: 1641503 - RNA, 19 nt, Artificial Sequence
  Description of Artificial Sequence: Synthetic oligonucleotide
  Sense strand starting at position 584 of SEQ ID NO: 1561028
ggcuuugucuucgggcuga

SEQ ID NO: 1641504 - RNA, 19 nt, Artificial Sequence
  Description of Artificial Sequence: Synthetic oligonucleotide
  Antisense strand to SEQ ID NO: 1641503
ucagcccgaagacaaagcc

SEQ ID NO: 1641505 - RNA, 19 nt, Artificial Sequence
  Description of Artificial Sequence: Synthetic oligonucleotide
  Sense strand starting at position 599 of SEQ ID NO: 1561028
cugaguuccucuccaccua

SEQ ID NO: 1641506 - RNA, 19 nt, Artificial Sequence
  Description of Artificial Sequence: Synthetic oligonucleotide
  Antisense strand to SEQ ID NO: 1641505
uagguggagaggaacucag

SEQ ID NO: 1641507 - RNA, 19 nt, Artificial Sequence
  Description of Artificial Sequence: Synthetic oligonucleotide
  Sense strand starting at position 635 of SEQ ID NO: 1561028
gagggauccuuaccuguuc

SEQ ID NO: 1641508 - RNA, 19 nt, Artificial Sequence
  Description of Artificial Sequence: Synthetic oligonucleotide
  Antisense strand to SEQ ID NO: 1641507
gaacagguaaggaucccuc

SEQ ID NO: 1641509 - RNA, 19 nt, Artificial Sequence
  Description of Artificial Sequence: Synthetic oligonucleotide
  Sense strand starting at position 970 of SEQ ID NO: 1561028
auuaguagcuguucuaauc

SEQ ID NO: 1641510 - RNA, 19 nt, Artificial Sequence
  Description of Artificial Sequence: Synthetic oligonucleotide
  Antisense strand to SEQ ID NO: 1641509
gauuagaacagcuacuaau

SEQ ID NO: 1641511 - RNA, 19 nt, Artificial Sequence
  Description of Artificial Sequence: Synthetic oligonucleotide
  Sense strand starting at position 1079 of SEQ ID NO: 1561028
cgugccaggcucuguguua

SEQ ID NO: 1641512 - RNA, 19 nt, Artificial Sequence
  Description of Artificial Sequence: Synthetic oligonucleotide
  Antisense strand to SEQ ID NO: 1641511
uaacacagagccuggcacg

SEQ ID NO: 1641513 - RNA, 19 nt, Artificial Sequence
  Description of Artificial Sequence: Synthetic oligonucleotide
  Sense strand starting at position 1084 of SEQ ID NO: 1561028
caggcucuguguuaacuaa

SEQ ID NO: 1641514 - RNA, 19 nt, Artificial Sequence
  Description of Artificial Sequence: Synthetic oligonucleotide
  Antisense strand to SEQ ID NO: 1641513
uuaguuaacacagagccug

SEQ ID NO: 1641515 - RNA, 19 nt, Artificial Sequence
  Description of Artificial Sequence: Synthetic oligonucleotide
  Sense strand starting at position 1150 of SEQ ID NO: 1561028
ggucgcuacuguuauuaaa

SEQ ID NO: 1641516 - RNA, 19 nt, Artificial Sequence
  Description of Artificial Sequence: Synthetic oligonucleotide
  Antisense strand to SEQ ID NO: 1641515
uuuaauaacaguagcgacc

SEQ ID NO: 1641517 - RNA, 19 nt, Artificial Sequence
  Description of Artificial Sequence: Synthetic oligonucleotide
  Sense strand starting at position 1158 of SEQ ID NO: 1561028
cuguuauuaaaccgcguuu

SEQ ID NO: 1641518 - RNA, 19 nt, Artificial Sequence
  Description of Artificial Sequence: Synthetic oligonucleotide
  Antisense strand to SEQ ID NO: 1641517
aaacgcgguuuaauaacag

SEQ ID NO: 1641519 - RNA, 19 nt, Artificial Sequence
  Description of Artificial Sequence: Synthetic oligonucleotide
  Sense strand starting at position 1160 of SEQ ID NO: 1561028
guuauuaaaccgcguuuac

SEQ ID NO: 1641520 - RNA, 19 nt, Artificial Sequence
  Description of Artificial Sequence: Synthetic oligonucleotide
  Antisense strand to SEQ ID NO: 1641519
guaaacgcgguuuaauaac

SEQ ID NO: 1641521 - RNA, 19 nt, Artificial Sequence
  Description of Artificial Sequence: Synthetic oligonucleotide
  Sense strand starting at position 1171 of SEQ ID NO: 1561028
gcguuuacagcggaggaaa

SEQ ID NO: 1641522 - RNA, 19 nt, Artificial Sequence
  Description of Artificial Sequence: Synthetic oligonucleotide
  Antisense strand to SEQ ID NO: 1641521
uuuccuccgcuguaaacgc

SEQ ID NO: 1641523 - RNA, 19 nt, Artificial Sequence
  Description of Artificial Sequence: Synthetic oligonucleotide
  Sense strand starting at position 1769 of SEQ ID NO: 1561028
ggaucaguuucucgagcuc

SEQ ID NO: 1641524 - RNA, 19 nt, Artificial Sequence
  Description of Artificial Sequence: Synthetic oligonucleotide
  Antisense strand to SEQ ID NO: 1641523
gagcucgagaaacugaucc

SEQ ID NO: 1641525 - RNA, 19 nt, Artificial Sequence
  Description of Artificial Sequence: Synthetic oligonucleotide
  Sense strand starting at position 1880 of SEQ ID NO: 1561028
agucgaugguguccaggau

SEQ ID NO: 1641526 - RNA, 19 nt, Artificial Sequence
  Description of Artificial Sequence: Synthetic oligonucleotide
  Antisense strand to SEQ ID NO: 1641525
auccuggacaccaucgacu

SEQ ID NO: 1641527 - RNA, 19 nt, Artificial Sequence
  Description of Artificial Sequence: Synthetic oligonucleotide
  Sense strand starting at position 2146 of SEQ ID NO: 1561028
gcugcuguuucuuugcaaa

SEQ ID NO: 1641528 - RNA, 19 nt, Artificial Sequence
  Description of Artificial Sequence: Synthetic oligonucleotide
  Antisense strand to SEQ ID NO: 1641527
uuugcaaagaaacagcagc

SEQ ID NO: 1641529 - RNA, 19 nt, Artificial Sequence
  Description of Artificial Sequence: Synthetic oligonucleotide
  Sense strand starting at position 3089 of SEQ ID NO: 1561028
ggcaguuugacgcucguuu

SEQ ID NO: 1641530 - RNA, 19 nt, Artificial Sequence
  Description of Artificial Sequence: Synthetic oligonucleotide
  Antisense strand to SEQ ID NO: 1641529
aaacgagcgucaaacugcc

SEQ ID NO: 1641531 - RNA, 19 nt, Artificial Sequence
  Description of Artificial Sequence: Synthetic oligonucleotide
  Sense strand starting at position 3141 of SEQ ID NO: 1561028
gcuaaacccugguuacaag

SEQ ID NO: 1641532 - RNA, 19 nt, Artificial Sequence
  Description of Artificial Sequence: Synthetic oligonucleotide
  Antisense strand to SEQ ID NO: 1641531
cuuguaaccaggguuuagc

SEQ ID NO: 1641533 - RNA, 19 nt, Artificial Sequence
  Description of Artificial Sequence: Synthetic oligonucleotide
  Sense strand starting at position 3197 of SEQ ID NO: 1561028
guccgaaauucccuuucca

SEQ ID NO: 1641534 - RNA, 19 nt, Artificial Sequence
  Description of Artificial Sequence: Synthetic oligonucleotide
  Antisense strand to SEQ ID NO: 1641533
uggaaagggaauuucggac

SEQ ID NO: 1641535 - RNA, 19 nt, Artificial Sequence
  Description of Artificial Sequence: Synthetic oligonucleotide
  Sense strand starting at position 3336 of SEQ ID NO: 1561028
ggaagucucguccuucgca

SEQ ID NO: 1641536 - RNA, 19 nt, Artificial Sequence
  Description of Artificial Sequence: Synthetic oligonucleotide
  Antisense strand to SEQ ID NO: 1641535
ugcgaaggacgagacuucc

SEQ ID NO: 1641537 - RNA, 19 nt, Artificial Sequence
  Description of Artificial Sequence: Synthetic oligonucleotide
  Sense strand starting at position 3406 of SEQ ID NO: 1561028
gagaacuccuccugggaug

SEQ ID NO: 1641538 - RNA, 19 nt, Artificial Sequence
  Description of Artificial Sequence: Synthetic oligonucleotide
  Antisense strand to SEQ ID NO: 1641537
caucccaggaggaguucuc

SEQ ID NO: 1641539 - RNA, 19 nt, Artificial Sequence
  Description of Artificial Sequence: Synthetic oligonucleotide
  Sense strand starting at position 3782 of SEQ ID NO: 1561028
ggaggaaagacuugggcuu

SEQ ID NO: 1641540 - RNA, 19 nt, Artificial Sequence
  Description of Artificial Sequence: Synthetic oligonucleotide
  Antisense strand to SEQ ID NO: 1641539
aagcccaagucuuuccucc

SEQ ID NO: 1641541 - RNA, 19 nt, Artificial Sequence
  Description of Artificial Sequence: Synthetic oligonucleotide
  Sense strand starting at position 3937 of SEQ ID NO: 1561028
ccuagacccucgcaggauu

SEQ ID NO: 1641542 - RNA, 19 nt, Artificial Sequence
  Description of Artificial Sequence: Synthetic oligonucleotide
  Antisense strand to SEQ ID NO: 1641541
aauccugcgagggucuagg

SEQ ID NO: 1641543 - RNA, 19 nt, Artificial Sequence
  Description of Artificial Sequence: Synthetic oligonucleotide
  Sense strand starting at position 118 of SEQ ID NO: 1561029
ggagaaagcugaguaaagu

SEQ ID NO: 1641544 - RNA, 19 nt, Artificial Sequence
  Description of Artificial Sequence: Synthetic oligonucleotide
  Antisense strand to SEQ ID NO: 1641543
acuuuacucagcuuucucc

SEQ ID NO: 1641545 - RNA, 19 nt, Artificial Sequence
  Description of Artificial Sequence: Synthetic oligonucleotide
  Sense strand starting at position 223 of SEQ ID NO: 1561029
agagcaagagcucggguua

SEQ ID NO: 1641546 - RNA, 19 nt, Artificial Sequence
  Description of Artificial Sequence: Synthetic oligonucleotide
  Antisense strand to SEQ ID NO: 1641545
uaacccgagcucuugcucu

SEQ ID NO: 1641547 - RNA, 19 nt, Artificial Sequence
  Description of Artificial Sequence: Synthetic oligonucleotide
  Sense strand starting at position 263 of SEQ ID NO: 1561029
gugugagggucuucuucaa

SEQ ID NO: 1641548 - RNA, 19 nt, Artificial Sequence
  Description of Artificial Sequence: Synthetic oligonucleotide
  Antisense strand to SEQ ID NO: 1641547
uugaagaagacccucacac

SEQ ID NO: 1641549 - RNA, 19 nt, Artificial Sequence
  Description of Artificial Sequence: Synthetic oligonucleotide
  Sense strand starting at position 346 of SEQ ID NO: 1561029
cccuuaguaaggcagaagu

SEQ ID NO: 1641550 - RNA, 19 nt, Artificial Sequence
  Description of Artificial Sequence: Synthetic oligonucleotide
  Antisense strand to SEQ ID NO: 1641549
acuucugccuuacuaaggg

SEQ ID NO: 1641551 - RNA, 19 nt, Artificial Sequence
  Description of Artificial Sequence: Synthetic oligonucleotide
  Sense strand starting at position 348 of SEQ ID NO: 1561029
cuuaguaaggcagaaguau

SEQ ID NO: 1641552 - RNA, 19 nt, Artificial Sequence
  Description of Artificial Sequence: Synthetic oligonucleotide
  Antisense strand to SEQ ID NO: 1641551
auacuucugccuuacuaag

SEQ ID NO: 1641553 - RNA, 19 nt, Artificial Sequence
  Description of Artificial Sequence: Synthetic oligonucleotide
  Sense strand starting at position 592 of SEQ ID NO: 1561029
gggauucugagguguuagu

SEQ ID NO: 1641554 - RNA, 19 nt, Artificial Sequence
  Description of Artificial Sequence: Synthetic oligonucleotide
  Antisense strand to SEQ ID NO: 1641553
acuaacaccucagaauccc

SEQ ID NO: 1641555 - RNA, 19 nt, Artificial Sequence
  Description of Artificial Sequence: Synthetic oligonucleotide
  Sense strand starting at position 615 of SEQ ID NO: 1561029
gggaguucuacgggaucug

SEQ ID NO: 1641556 - RNA, 19 nt, Artificial Sequence
  Description of Artificial Sequence: Synthetic oligonucleotide
  Antisense strand to SEQ ID NO: 1641555
cagaucccguagaacuccc

SEQ ID NO: 1641557 - RNA, 19 nt, Artificial Sequence
  Description of Artificial Sequence: Synthetic oligonucleotide
  Sense strand starting at position 616 of SEQ ID NO: 1561029
ggaguucuacgggaucuga

SEQ ID NO: 1641558 - RNA, 19 nt, Artificial Sequence
  Description of Artificial Sequence: Synthetic oligonucleotide
  Antisense strand to SEQ ID NO: 1641557
ucagaucccguagaacucc

SEQ ID NO: 1641559 - RNA, 19 nt, Artificial Sequence
  Description of Artificial Sequence: Synthetic oligonucleotide
  Sense strand starting at position 758 of SEQ ID NO: 1561029
cugagaguccucuggagau

SEQ ID NO: 1641560 - RNA, 19 nt, Artificial Sequence
  Description of Artificial Sequence: Synthetic oligonucleotide
  Antisense strand to SEQ ID NO: 1641559
aucuccagaggacucucag

SEQ ID NO: 1641561 - RNA, 19 nt, Artificial Sequence
  Description of Artificial Sequence: Synthetic oligonucleotide
  Sense strand starting at position 779 of SEQ ID NO: 1561029
caggcaauugcuggagauu

SEQ ID NO: 1641562 - RNA, 19 nt, Artificial Sequence
  Description of Artificial Sequence: Synthetic oligonucleotide
  Antisense strand to SEQ ID NO: 1641561
aaucuccagcaauugccug

SEQ ID NO: 1641563 - RNA, 19 nt, Artificial Sequence
  Description of Artificial Sequence: Synthetic oligonucleotide
  Sense strand starting at position 831 of SEQ ID NO: 1561029
ggugaagaucacugggcua

SEQ ID NO: 1641564 - RNA, 19 nt, Artificial Sequence
  Description of Artificial Sequence: Synthetic oligonucleotide
  Antisense strand to SEQ ID NO: 1641563
uagcccagugaucuucacc

SEQ ID NO: 1641565 - RNA, 19 nt, Artificial Sequence
  Description of Artificial Sequence: Synthetic oligonucleotide
  Sense strand starting at position 833 of SEQ ID NO: 1561029
ugaagaucacugggcuaca

SEQ ID NO: 1641566 - RNA, 19 nt, Artificial Sequence
  Description of Artificial Sequence: Synthetic oligonucleotide
  Antisense strand to SEQ ID NO: 1641565
uguagcccagugaucuuca

SEQ ID NO: 1641567 - RNA, 19 nt, Artificial Sequence
  Description of Artificial Sequence: Synthetic oligonucleotide
  Sense strand starting at position 834 of SEQ ID NO: 1561029
gaagaucacugggcuacau

SEQ ID NO: 1641568 - RNA, 19 nt, Artificial Sequence
  Description of Artificial Sequence: Synthetic oligonucleotide
  Antisense strand to SEQ ID NO: 1641567
auguagcccagugaucuuc

SEQ ID NO: 1641569 - RNA, 19 nt, Artificial Sequence
  Description of Artificial Sequence: Synthetic oligonucleotide
  Sense strand starting at position 853 of SEQ ID NO: 1561029
gagggugaucucuagggca

SEQ ID NO: 1641570 - RNA, 19 nt, Artificial Sequence
  Description of Artificial Sequence: Synthetic oligonucleotide
  Antisense strand to SEQ ID NO: 1641569
ugcccuagagaucacccuc

SEQ ID NO: 1641571 - RNA, 19 nt, Artificial Sequence
  Description of Artificial Sequence: Synthetic oligonucleotide
  Sense strand starting at position 855 of SEQ ID NO: 1561029
gggugaucucuagggcauu

SEQ ID NO: 1641572 - RNA, 19 nt, Artificial Sequence
  Description of Artificial Sequence: Synthetic oligonucleotide
  Antisense strand to SEQ ID NO: 1641571
aaugcccuagagaucaccc

SEQ ID NO: 1641573 - RNA, 19 nt, Artificial Sequence
  Description of Artificial Sequence: Synthetic oligonucleotide
  Sense strand starting at position 931 of SEQ ID NO: 1561029
guggaaagguccagaggga

SEQ ID NO: 1641574 - RNA, 19 nt, Artificial Sequence
  Description of Artificial Sequence: Synthetic oligonucleotide
  Antisense strand to SEQ ID NO: 1641573
ucccucuggaccuuuccac

SEQ ID NO: 1641575 - RNA, 19 nt, Artificial Sequence
  Description of Artificial Sequence: Synthetic oligonucleotide
  Sense strand starting at position 964 of SEQ ID NO: 1561029
guguguaugagagaugguu

SEQ ID NO: 1641576 - RNA, 19 nt, Artificial Sequence
  Description of Artificial Sequence: Synthetic oligonucleotide
  Antisense strand to SEQ ID NO: 1641575
aaccaucucucauacacac

SEQ ID NO: 1641577 - RNA, 19 nt, Artificial Sequence
  Description of Artificial Sequence: Synthetic oligonucleotide
  Sense strand starting at position 970 of SEQ ID NO: 1561029
augagagaugguugcaaua

SEQ ID NO: 1641578 - RNA, 19 nt, Artificial Sequence
  Description of Artificial Sequence: Synthetic oligonucleotide
  Antisense strand to SEQ ID NO: 1641577
uauugcaaccaucucucau

SEQ ID NO: 1641579 - RNA, 19 nt, Artificial Sequence
  Description of Artificial Sequence: Synthetic oligonucleotide
  Sense strand starting at position 1004 of SEQ ID NO: 1561029
uggagucuucuaggugagu

SEQ ID NO: 1641580 - RNA, 19 nt, Artificial Sequence
  Description of Artificial Sequence: Synthetic oligonucleotide
  Antisense strand to SEQ ID NO: 1641579
acucaccuagaagacucca

SEQ ID NO: 1641581 - RNA, 19 nt, Artificial Sequence
  Description of Artificial Sequence: Synthetic oligonucleotide
  Sense strand starting at position 1005 of SEQ ID NO: 1561029
ggagucuucuaggugaguu

SEQ ID NO: 1641582 - RNA, 19 nt, Artificial Sequence
  Description of Artificial Sequence: Synthetic oligonucleotide
  Antisense strand to SEQ ID NO: 1641581
aacucaccuagaagacucc

SEQ ID NO: 1641583 - RNA, 19 nt, Artificial Sequence
  Description of Artificial Sequence: Synthetic oligonucleotide
  Sense strand starting at position 1043 of SEQ ID NO: 1561029
ucacaaagucugugaggaa

SEQ ID NO: 1641584 - RNA, 19 nt, Artificial Sequence
  Description of Artificial Sequence: Synthetic oligonucleotide
  Antisense strand to SEQ ID NO: 1641583
uuccucacagacuuuguga

SEQ ID NO: 1641585 - RNA, 19 nt, Artificial Sequence
  Description of Artificial Sequence: Synthetic oligonucleotide
  Sense strand starting at position 1407 of SEQ ID NO: 1561029
gaggacuauuucuggagac

SEQ ID NO: 1641586 - RNA, 19 nt, Artificial Sequence
  Description of Artificial Sequence: Synthetic oligonucleotide
  Antisense strand to SEQ ID NO: 1641585
gucuccagaaauaguccuc

SEQ ID NO: 1641587 - RNA, 19 nt, Artificial Sequence
  Description of Artificial Sequence: Synthetic oligonucleotide
  Sense strand starting at position 1408 of SEQ ID NO: 1561029
aggacuauuucuggagaca

SEQ ID NO: 1641588 - RNA, 19 nt, Artificial Sequence
  Description of Artificial Sequence: Synthetic oligonucleotide
  Antisense strand to SEQ ID NO: 1641587
ugucuccagaaauaguccu

SEQ ID NO: 1641589 - RNA, 19 nt, Artificial Sequence
  Description of Artificial Sequence: Synthetic oligonucleotide
  Sense strand starting at position 1653 of SEQ ID NO: 1561029
gagaaagauuucggaggga

SEQ ID NO: 1641590 - RNA, 19 nt, Artificial Sequence
  Description of Artificial Sequence: Synthetic oligonucleotide
  Antisense strand to SEQ ID NO: 1641589
ucccuccgaaaucuuucuc

SEQ ID NO: 1641591 - RNA, 19 nt, Artificial Sequence
  Description of Artificial Sequence: Synthetic oligonucleotide
  Sense strand starting at position 2617 of SEQ ID NO: 1561029
agccuuuagggugggaaga

SEQ ID NO: 1641592 - RNA, 19 nt, Artificial Sequence
  Description of Artificial Sequence: Synthetic oligonucleotide
  Antisense strand to SEQ ID NO: 1641591
ucuucccacccuaaaggcu

SEQ ID NO: 1641593 - RNA, 19 nt, Artificial Sequence
  Description of Artificial Sequence: Synthetic oligonucleotide
  Sense strand starting at position 2641 of SEQ ID NO: 1561029
cacagaaagcgcuaaggau

SEQ ID NO: 1641594 - RNA, 19 nt, Artificial Sequence
  Description of Artificial Sequence: Synthetic oligonucleotide
  Antisense strand to SEQ ID NO: 1641593
auccuuagcgcuuucugug

SEQ ID NO: 1641595 - RNA, 19 nt, Artificial Sequence
  Description of Artificial Sequence: Synthetic oligonucleotide
  Sense strand starting at position 2657 of SEQ ID NO: 1561029
gaucaaggaggcugucaau

SEQ ID NO: 1641596 - RNA, 19 nt, Artificial Sequence
  Description of Artificial Sequence: Synthetic oligonucleotide
  Antisense strand to SEQ ID NO: 1641595
auugacagccuccuugauc

SEQ ID NO: 1641597 - RNA, 19 nt, Artificial Sequence
  Description of Artificial Sequence: Synthetic oligonucleotide
  Sense strand starting at position 2705 of SEQ ID NO: 1561029
gugaucugugcguuccaca

SEQ ID NO: 1641598 - RNA, 19 nt, Artificial Sequence
  Description of Artificial Sequence: Synthetic oligonucleotide
  Antisense strand to SEQ ID NO: 1641597
uguggaacgcacagaucac

SEQ ID NO: 1641599 - RNA, 19 nt, Artificial Sequence
  Description of Artificial Sequence: Synthetic oligonucleotide
  Sense strand starting at position 2769 of SEQ ID NO: 1561029
gaaggcucucggugacaga

SEQ ID NO: 1641600 - RNA, 19 nt, Artificial Sequence
  Description of Artificial Sequence: Synthetic oligonucleotide
  Antisense strand to SEQ ID NO: 1641599
ucugucaccgagagccuuc

SEQ ID NO: 1641601 - RNA, 19 nt, Artificial Sequence
  Description of Artificial Sequence: Synthetic oligonucleotide
  Sense strand starting at position 2785 of SEQ ID NO: 1561029
agagaucuggcuuguuaca

SEQ ID NO: 1641602 - RNA, 19 nt, Artificial Sequence
  Description of Artificial Sequence: Synthetic oligonucleotide
  Antisense strand to SEQ ID NO: 1641601
uguaacaagccagaucucu

SEQ ID NO: 1641603 - RNA, 19 nt, Artificial Sequence
  Description of Artificial Sequence: Synthetic oligonucleotide
  Sense strand starting at position 2825 of SEQ ID NO: 1561029
gauggagggucgaguugaa

SEQ ID NO: 1641604 - RNA, 19 nt, Artificial Sequence
  Description of Artificial Sequence: Synthetic oligonucleotide
  Antisense strand to SEQ ID NO: 1641603
uucaacucgacccuccauc

SEQ ID NO: 1641605 - RNA, 19 nt, Artificial Sequence
  Description of Artificial Sequence: Synthetic oligonucleotide
  Sense strand starting at position 2900 of SEQ ID NO: 1561029
uggacuugucccgagggca

SEQ ID NO: 1641606 - RNA, 19 nt, Artificial Sequence
  Description of Artificial Sequence: Synthetic oligonucleotide
  Antisense strand to SEQ ID NO: 1641605
ugcccucgggacaagucca

SEQ ID NO: 1641607 - RNA, 19 nt, Artificial Sequence
  Description of Artificial Sequence: Synthetic oligonucleotide
  Sense strand starting at position 2977 of SEQ ID NO: 1561029
agagaugucucucuggcuu

SEQ ID NO: 1641608 - RNA, 19 nt, Artificial Sequence
  Description of Artificial Sequence: Synthetic oligonucleotide
  Antisense strand to SEQ ID NO: 1641607
aagccagagagacaucucu

SEQ ID NO: 1641609 - RNA, 19 nt, Artificial Sequence
  Description of Artificial Sequence: Synthetic oligonucleotide
  Sense strand starting at position 2983 of SEQ ID NO: 1561029
gucucucuggcuuauacau

SEQ ID NO: 1641610 - RNA, 19 nt, Artificial Sequence
  Description of Artificial Sequence: Synthetic oligonucleotide
  Antisense strand to SEQ ID NO: 1641609
auguauaagccagagagac

SEQ ID NO: 1641611 - RNA, 19 nt, Artificial Sequence
  Description of Artificial Sequence: Synthetic oligonucleotide
  Sense strand starting at position 3355 of SEQ ID NO: 1561029
aggaucgucaaagauggua

SEQ ID NO: 1641612 - RNA, 19 nt, Artificial Sequence
  Description of Artificial Sequence: Synthetic oligonucleotide
  Antisense strand to SEQ ID NO: 1641611
uaccaucuuugacgauccu

SEQ ID NO: 1641613 - RNA, 19 nt, Artificial Sequence
  Description of Artificial Sequence: Synthetic oligonucleotide
  Sense strand starting at position 3358 of SEQ ID NO: 1561029
aucgucaaagaugguaauu

SEQ ID NO: 1641614 - RNA, 19 nt, Artificial Sequence
  Description of Artificial Sequence: Synthetic oligonucleotide
  Antisense strand to SEQ ID NO: 1641613
aauuaccaucuuugacgau

SEQ ID NO: 1641615 - RNA, 19 nt, Artificial Sequence
  Description of Artificial Sequence: Synthetic oligonucleotide
  Sense strand starting at position 3370 of SEQ ID NO: 1561029
gguaauugaggcuguggga

SEQ ID NO: 1641616 - RNA, 19 nt, Artificial Sequence
  Description of Artificial Sequence: Synthetic oligonucleotide
  Antisense strand to SEQ ID NO: 1641615
ucccacagccucaauuacc

SEQ ID NO: 1641617 - RNA, 19 nt, Artificial Sequence
  Description of Artificial Sequence: Synthetic oligonucleotide
  Sense strand starting at position 3460 of SEQ ID NO: 1561029
gaggcaggauuugagcaaa

SEQ ID NO: 1641618 - RNA, 19 nt, Artificial Sequence
  Description of Artificial Sequence: Synthetic oligonucleotide
  Antisense strand to SEQ ID NO: 1641617
uuugcucaaauccugccuc

SEQ ID NO: 1641619 - RNA, 19 nt, Artificial Sequence
  Description of Artificial Sequence: Synthetic oligonucleotide
  Sense strand starting at position 3482 of SEQ ID NO: 1561029
auugacgcugucgaugaau

SEQ ID NO: 1641620 - RNA, 19 nt, Artificial Sequence
  Description of Artificial Sequence: Synthetic oligonucleotide
  Antisense strand to SEQ ID NO: 1641619
auucaucgacagcgucaau

SEQ ID NO: 1641621 - RNA, 19 nt, Artificial Sequence
  Description of Artificial Sequence: Synthetic oligonucleotide
  Sense strand starting at position 3485 of SEQ ID NO: 1561029
gacgcugucgaugaauauu

SEQ ID NO: 1641622 - RNA, 19 nt, Artificial Sequence
  Description of Artificial Sequence: Synthetic oligonucleotide
  Antisense strand to SEQ ID NO: 1641621
aauauucaucgacagcguc

SEQ ID NO: 1641623 - RNA, 19 nt, Artificial Sequence
  Description of Artificial Sequence: Synthetic oligonucleotide
  Sense strand starting at position 319 of SEQ ID NO: 1561030
uuacuagacugugaacuca

SEQ ID NO: 1641624 - RNA, 19 nt, Artificial Sequence
  Description of Artificial Sequence: Synthetic oligonucleotide
  Antisense strand to SEQ ID NO: 1641623
ugaguucacagucuaguaa

SEQ ID NO: 1641625 - RNA, 19 nt, Artificial Sequence
  Description of Artificial Sequence: Synthetic oligonucleotide
  Sense strand starting at position 352 of SEQ ID NO: 1561030
acagcaggguacuuaagau

SEQ ID NO: 1641626 - RNA, 19 nt, Artificial Sequence
  Description of Artificial Sequence: Synthetic oligonucleotide
  Antisense strand to SEQ ID NO: 1641625
aucuuaaguacccugcugu

SEQ ID NO: 1641627 - RNA, 19 nt, Artificial Sequence
  Description of Artificial Sequence: Synthetic oligonucleotide
  Sense strand starting at position 475 of SEQ ID NO: 1561030
auaguaugucccugucuca

SEQ ID NO: 1641628 - RNA, 19 nt, Artificial Sequence
  Description of Artificial Sequence: Synthetic oligonucleotide
  Antisense strand to SEQ ID NO: 1641627
ugagacagggacauacuau

SEQ ID NO: 1641629 - RNA, 19 nt, Artificial Sequence
  Description of Artificial Sequence: Synthetic oligonucleotide
  Sense strand starting at position 478 of SEQ ID NO: 1561030
guaugucccugucucaaca

SEQ ID NO: 1641630 - RNA, 19 nt, Artificial Sequence
  Description of Artificial Sequence: Synthetic oligonucleotide
  Antisense strand to SEQ ID NO: 1641629
uguugagacagggacauac

SEQ ID NO: 1641631 - RNA, 19 nt, Artificial Sequence
  Description of Artificial Sequence: Synthetic oligonucleotide
  Sense strand starting at position 557 of SEQ ID NO: 1561030
ggcugagugggaggauuau

SEQ ID NO: 1641632 - RNA, 19 nt, Artificial Sequence
  Description of Artificial Sequence: Synthetic oligonucleotide
  Antisense strand to SEQ ID NO: 1641631
auaauccucccacucagcc

SEQ ID NO: 1641633 - RNA, 19 nt, Artificial Sequence
  Description of Artificial Sequence: Synthetic oligonucleotide
  Sense strand starting at position 685 of SEQ ID NO: 1561030
aguggauucuaggccagaa

SEQ ID NO: 1641634 - RNA, 19 nt, Artificial Sequence
  Description of Artificial Sequence: Synthetic oligonucleotide
  Antisense strand to SEQ ID NO: 1641633
uucuggccuagaauccacu

SEQ ID NO: 1641635 - RNA, 19 nt, Artificial Sequence
  Description of Artificial Sequence: Synthetic oligonucleotide
  Sense strand starting at position 689 of SEQ ID NO: 1561030
gauucuaggccagaaagca

SEQ ID NO: 1641636 - RNA, 19 nt, Artificial Sequence
  Description of Artificial Sequence: Synthetic oligonucleotide
  Antisense strand to SEQ ID NO: 1641635
ugcuuucuggccuagaauc

SEQ ID NO: 1641637 - RNA, 19 nt, Artificial Sequence
  Description of Artificial Sequence: Synthetic oligonucleotide
  Sense strand starting at position 953 of SEQ ID NO: 1561030
uauugugaacccgguccua

SEQ ID NO: 1641638 - RNA, 19 nt, Artificial Sequence
  Description of Artificial Sequence: Synthetic oligonucleotide
  Antisense strand to SEQ ID NO: 1641637
uaggaccggguucacaaua

SEQ ID NO: 1641639 - RNA, 19 nt, Artificial Sequence
  Description of Artificial Sequence: Synthetic oligonucleotide
  Sense strand starting at position 1046 of SEQ ID NO: 1561030
gcaguugcaccuuaaguau

SEQ ID NO: 1641640 - RNA, 19 nt, Artificial Sequence
  Description of Artificial Sequence: Synthetic oligonucleotide
  Antisense strand to SEQ ID NO: 1641639
auacuuaaggugcaacugc

SEQ ID NO: 1641641 - RNA, 19 nt, Artificial Sequence
  Description of Artificial Sequence: Synthetic oligonucleotide
  Sense strand starting at position 1055 of SEQ ID NO: 1561030
ccuuaaguaucaguuuaau

SEQ ID NO: 1641642 - RNA, 19 nt, Artificial Sequence
  Description of Artificial Sequence: Synthetic oligonucleotide
  Antisense strand to SEQ ID NO: 1641641
auuaaacugauacuuaagg

SEQ ID NO: 1641643 - RNA, 19 nt, Artificial Sequence
  Description of Artificial Sequence: Synthetic oligonucleotide
  Sense strand starting at position 1284 of SEQ ID NO: 1561030
ggcaaugucacauagcaag

SEQ ID NO: 1641644 - RNA, 19 nt, Artificial Sequence
  Description of Artificial Sequence: Synthetic oligonucleotide
  Antisense strand to SEQ ID NO: 1641643
cuugcuaugugacauugcc

SEQ ID NO: 1641645 - RNA, 19 nt, Artificial Sequence
  Description of Artificial Sequence: Synthetic oligonucleotide
  Sense strand starting at position 1295 of SEQ ID NO: 1561030
auagcaaguuccuaaagga

SEQ ID NO: 1641646 - RNA, 19 nt, Artificial Sequence
  Description of Artificial Sequence: Synthetic oligonucleotide
  Antisense strand to SEQ ID NO: 1641645
uccuuuaggaacuugcuau

SEQ ID NO: 1641647 - RNA, 19 nt, Artificial Sequence
  Description of Artificial Sequence: Synthetic oligonucleotide
  Sense strand starting at position 1323 of SEQ ID NO: 1561030
cccagcgagcaguaugaaa

SEQ ID NO: 1641648 - RNA, 19 nt, Artificial Sequence
  Description of Artificial Sequence: Synthetic oligonucleotide
  Antisense strand to SEQ ID NO: 1641647
uuucauacugcucgcuggg

SEQ ID NO: 1641649 - RNA, 19 nt, Artificial Sequence
  Description of Artificial Sequence: Synthetic oligonucleotide
  Sense strand starting at position 1370 of SEQ ID NO: 1561030
guaggcauucuuggcacau

SEQ ID NO: 1641650 - RNA, 19 nt, Artificial Sequence
  Description of Artificial Sequence: Synthetic oligonucleotide
  Antisense strand to SEQ ID NO: 1641649
augugccaagaaugccuac

SEQ ID NO: 1641651 - RNA, 19 nt, Artificial Sequence
  Description of Artificial Sequence: Synthetic oligonucleotide
  Sense strand starting at position 1371 of SEQ ID NO: 1561030
uaggcauucuuggcacaua

SEQ ID NO: 1641652 - RNA, 19 nt, Artificial Sequence
  Description of Artificial Sequence: Synthetic oligonucleotide
  Antisense strand to SEQ ID NO: 1641651
uaugugccaagaaugccua

SEQ ID NO: 1641653 - RNA, 19 nt, Artificial Sequence
  Description of Artificial Sequence: Synthetic oligonucleotide
  Sense strand starting at position 1374 of SEQ ID NO: 1561030
gcauucuuggcacauagua

SEQ ID NO: 1641654 - RNA, 19 nt, Artificial Sequence
  Description of Artificial Sequence: Synthetic oligonucleotide
  Antisense strand to SEQ ID NO: 1641653
uacuaugugccaagaaugc

SEQ ID NO: 1641655 - RNA, 19 nt, Artificial Sequence
  Description of Artificial Sequence: Synthetic oligonucleotide
  Sense strand starting at position 1440 of SEQ ID NO: 1561030
acaagacguuggcuaacuu

SEQ ID NO: 1641656 - RNA, 19 nt, Artificial Sequence
  Description of Artificial Sequence: Synthetic oligonucleotide
  Antisense strand to SEQ ID NO: 1641655
aaguuagccaacgucuugu

SEQ ID NO: 1641657 - RNA, 19 nt, Artificial Sequence
  Description of Artificial Sequence: Synthetic oligonucleotide
  Sense strand starting at position 1447 of SEQ ID NO: 1561030
guuggcuaacuugggaaau

SEQ ID NO: 1641658 - RNA, 19 nt, Artificial Sequence
  Description of Artificial Sequence: Synthetic oligonucleotide
  Antisense strand to SEQ ID NO: 1641657
auuucccaaguuagccaac

SEQ ID NO: 1641659 - RNA, 19 nt, Artificial Sequence
  Description of Artificial Sequence: Synthetic oligonucleotide
  Sense strand starting at position 1449 of SEQ ID NO: 1561030
uggcuaacuugggaaauaa

SEQ ID NO: 1641660 - RNA, 19 nt, Artificial Sequence
  Description of Artificial Sequence: Synthetic oligonucleotide
  Antisense strand to SEQ ID NO: 1641659
uuauuucccaaguuagcca

SEQ ID NO: 1641661 - RNA, 19 nt, Artificial Sequence
  Description of Artificial Sequence: Synthetic oligonucleotide
  Sense strand starting at position 1518 of SEQ ID NO: 1561030
ccaauucuuccguaaagca

SEQ ID NO: 1641662 - RNA, 19 nt, Artificial Sequence
  Description of Artificial Sequence: Synthetic oligonucleotide
  Antisense strand to SEQ ID NO: 1641661
ugcuuuacggaagaauugg

SEQ ID NO: 1641663 - RNA, 19 nt, Artificial Sequence
  Description of Artificial Sequence: Synthetic oligonucleotide
  Sense strand starting at position 1711 of SEQ ID NO: 1561030
ggagguuccgguuucguuu

SEQ ID NO: 1641664 - RNA, 19 nt, Artificial Sequence
  Description of Artificial Sequence: Synthetic oligonucleotide
  Antisense strand to SEQ ID NO: 1641663
aaacgaaaccggaaccucc

SEQ ID NO: 1641665 - RNA, 19 nt, Artificial Sequence
  Description of Artificial Sequence: Synthetic oligonucleotide
  Sense strand starting at position 1722 of SEQ ID NO: 1561030
uuucguuucucuguaguga

SEQ ID NO: 1641666 - RNA, 19 nt, Artificial Sequence
  Description of Artificial Sequence: Synthetic oligonucleotide
  Antisense strand to SEQ ID NO: 1641665
ucacuacagagaaacgaaa

SEQ ID NO: 1641667 - RNA, 19 nt, Artificial Sequence
  Description of Artificial Sequence: Synthetic oligonucleotide
  Sense strand starting at position 1723 of SEQ ID NO: 1561030
uucguuucucuguagugaa

SEQ ID NO: 1641668 - RNA, 19 nt, Artificial Sequence
  Description of Artificial Sequence: Synthetic oligonucleotide
  Antisense strand to SEQ ID NO: 1641667
uucacuacagagaaacgaa

SEQ ID NO: 1641669 - RNA, 19 nt, Artificial Sequence
  Description of Artificial Sequence: Synthetic oligonucleotide
  Sense strand starting at position 1736 of SEQ ID NO: 1561030
agugaaacuucuccuugga

SEQ ID NO: 1641670 - RNA, 19 nt, Artificial Sequence
  Description of Artificial Sequence: Synthetic oligonucleotide
  Antisense strand to SEQ ID NO: 1641669
uccaaggagaaguuucacu

SEQ ID NO: 1641671 - RNA, 19 nt, Artificial Sequence
  Description of Artificial Sequence: Synthetic oligonucleotide
  Sense strand starting at position 1738 of SEQ ID NO: 1561030
ugaaacuucuccuuggacu

SEQ ID NO: 1641672 - RNA, 19 nt, Artificial Sequence
  Description of Artificial Sequence: Synthetic oligonucleotide
  Antisense strand to SEQ ID NO: 1641671
aguccaaggagaaguuuca

SEQ ID NO: 1641673 - RNA, 19 nt, Artificial Sequence
  Description of Artificial Sequence: Synthetic oligonucleotide
  Sense strand starting at position 1749 of SEQ ID NO: 1561030
cuuggacuaucguuggaga

SEQ ID NO: 1641674 - RNA, 19 nt, Artificial Sequence
  Description of Artificial Sequence: Synthetic oligonucleotide
  Antisense strand to SEQ ID NO: 1641673
ucuccaacgauaguccaag

SEQ ID NO: 1641675 - RNA, 19 nt, Artificial Sequence
  Description of Artificial Sequence: Synthetic oligonucleotide
  Sense strand starting at position 1750 of SEQ ID NO: 1561030
uuggacuaucguuggagau

SEQ ID NO: 1641676 - RNA, 19 nt, Artificial Sequence
  Description of Artificial Sequence: Synthetic oligonucleotide
  Antisense strand to SEQ ID NO: 1641675
aucuccaacgauaguccaa

SEQ ID NO: 1641677 - RNA, 19 nt, Artificial Sequence
  Description of Artificial Sequence: Synthetic oligonucleotide
  Sense strand starting at position 1751 of SEQ ID NO: 1561030
uggacuaucguuggagaug

SEQ ID NO: 1641678 - RNA, 19 nt, Artificial Sequence
  Description of Artificial Sequence: Synthetic oligonucleotide
  Antisense strand to SEQ ID NO: 1641677
caucuccaacgauagucca

SEQ ID NO: 1641679 - RNA, 19 nt, Artificial Sequence
  Description of Artificial Sequence: Synthetic oligonucleotide
  Sense strand starting at position 2816 of SEQ ID NO: 1561030
uuugauucuuuguagagag

SEQ ID NO: 1641680 - RNA, 19 nt, Artificial Sequence
  Description of Artificial Sequence: Synthetic oligonucleotide
  Antisense strand to SEQ ID NO: 1641679
cucucuacaaagaaucaaa

SEQ ID NO: 1641681 - RNA, 19 nt, Artificial Sequence
  Description of Artificial Sequence: Synthetic oligonucleotide
  Sense strand starting at position 3187 of SEQ ID NO: 1561030
ccaagauugagguacugca

SEQ ID NO: 1641682 - RNA, 19 nt, Artificial Sequence
  Description of Artificial Sequence: Synthetic oligonucleotide
  Antisense strand to SEQ ID NO: 1641681
ugcaguaccucaaucuugg

SEQ ID NO: 1641683 - RNA, 19 nt, Artificial Sequence
  Description of Artificial Sequence: Synthetic oligonucleotide
  Sense strand starting at position 3266 of SEQ ID NO: 1561030
agguaaugcuuccuugaag

SEQ ID NO: 1641684 - RNA, 19 nt, Artificial Sequence
  Description of Artificial Sequence: Synthetic oligonucleotide
  Antisense strand to SEQ ID NO: 1641683
cuucaaggaagcauuaccu

SEQ ID NO: 1641685 - RNA, 19 nt, Artificial Sequence
  Description of Artificial Sequence: Synthetic oligonucleotide
  Sense strand starting at position 3267 of SEQ ID NO: 1561030
gguaaugcuuccuugaaga

SEQ ID NO: 1641686 - RNA, 19 nt, Artificial Sequence
  Description of Artificial Sequence: Synthetic oligonucleotide
  Antisense strand to SEQ ID NO: 1641685
ucuucaaggaagcauuacc

SEQ ID NO: 1641687 - RNA, 19 nt, Artificial Sequence
  Description of Artificial Sequence: Synthetic oligonucleotide
  Sense strand starting at position 3302 of SEQ ID NO: 1561030
gucuguagauaacauuaga

SEQ ID NO: 1641688 - RNA, 19 nt, Artificial Sequence
  Description of Artificial Sequence: Synthetic oligonucleotide
  Antisense strand to SEQ ID NO: 1641687
ucuaauguuaucuacagac

SEQ ID NO: 1641689 - RNA, 19 nt, Artificial Sequence
  Description of Artificial Sequence: Synthetic oligonucleotide
  Sense strand starting at position 3307 of SEQ ID NO: 1561030
uagauaacauuagauguga

SEQ ID NO: 1641690 - RNA, 19 nt, Artificial Sequence
  Description of Artificial Sequence: Synthetic oligonucleotide
  Antisense strand to SEQ ID NO: 1641689
ucacaucuaauguuaucua

SEQ ID NO: 1641691 - RNA, 19 nt, Artificial Sequence
  Description of Artificial Sequence: Synthetic oligonucleotide
  Sense strand starting at position 3339 of SEQ ID NO: 1561030
uguaaagugcuuuaaacaa

SEQ ID NO: 1641692 - RNA, 19 nt, Artificial Sequence
  Description of Artificial Sequence: Synthetic oligonucleotide
  Antisense strand to SEQ ID NO: 1641691
uuguuuaaagcacuuuaca

SEQ ID NO: 1641693 - RNA, 19 nt, Artificial Sequence
  Description of Artificial Sequence: Synthetic oligonucleotide
  Sense strand starting at position 3378 of SEQ ID NO: 1561030
aguugcuacuacucuaaga

SEQ ID NO: 1641694 - RNA, 19 nt, Artificial Sequence
  Description of Artificial Sequence: Synthetic oligonucleotide
  Antisense strand to SEQ ID NO: 1641693
ucuuagaguaguagcaacu

SEQ ID NO: 1641695 - RNA, 19 nt, Artificial Sequence
  Description of Artificial Sequence: Synthetic oligonucleotide
  Sense strand starting at position 3392 of SEQ ID NO: 1561030
uaagaucuguucucuggga

SEQ ID NO: 1641696 - RNA, 19 nt, Artificial Sequence
  Description of Artificial Sequence: Synthetic oligonucleotide
  Antisense strand to SEQ ID NO: 1641695
ucccagagaacagaucuua

SEQ ID NO: 1641697 - RNA, 19 nt, Artificial Sequence
  Description of Artificial Sequence: Synthetic oligonucleotide
  Sense strand starting at position 3393 of SEQ ID NO: 1561030
aagaucuguucucugggau

SEQ ID NO: 1641698 - RNA, 19 nt, Artificial Sequence
  Description of Artificial Sequence: Synthetic oligonucleotide
  Antisense strand to SEQ ID NO: 1641697
aucccagagaacagaucuu

SEQ ID NO: 1641699 - RNA, 19 nt, Artificial Sequence
  Description of Artificial Sequence: Synthetic oligonucleotide
  Sense strand starting at position 3394 of SEQ ID NO: 1561030
agaucuguucucugggaua

SEQ ID NO: 1641700 - RNA, 19 nt, Artificial Sequence
  Description of Artificial Sequence: Synthetic oligonucleotide
  Antisense strand to SEQ ID NO: 1641699
uaucccagagaacagaucu

SEQ ID NO: 1641701 - RNA, 19 nt, Artificial Sequence
  Description of Artificial Sequence: Synthetic oligonucleotide
  Sense strand starting at position 3396 of SEQ ID NO: 1561030
aucuguucucugggauaau

SEQ ID NO: 1641702 - RNA, 19 nt, Artificial Sequence
  Description of Artificial Sequence: Synthetic oligonucleotide
  Antisense strand to SEQ ID NO: 1641701
auuaucccagagaacagau

SEQ ID NO: 1641703 - RNA, 19 nt, Artificial Sequence
  Description of Artificial Sequence: Synthetic oligonucleotide
  Sense strand starting at position 98 of SEQ ID NO: 1561031
ccuccaaagcugugaggaa

SEQ ID NO: 1641704 - RNA, 19 nt, Artificial Sequence
  Description of Artificial Sequence: Synthetic oligonucleotide
  Antisense strand to SEQ ID NO: 1641703
uuccucacagcuuuggagg

SEQ ID NO: 1641705 - RNA, 19 nt, Artificial Sequence
  Description of Artificial Sequence: Synthetic oligonucleotide
  Sense strand starting at position 99 of SEQ ID NO: 1561031
cuccaaagcugugaggaaa

SEQ ID NO: 1641706 - RNA, 19 nt, Artificial Sequence
  Description of Artificial Sequence: Synthetic oligonucleotide
  Antisense strand to SEQ ID NO: 1641705
uuuccucacagcuuuggag

SEQ ID NO: 1641707 - RNA, 19 nt, Artificial Sequence
  Description of Artificial Sequence: Synthetic oligonucleotide
  Sense strand starting at position 114 of SEQ ID NO: 1561031
gaaacagagcucuguuguu

SEQ ID NO: 1641708 - RNA, 19 nt, Artificial Sequence
  Description of Artificial Sequence: Synthetic oligonucleotide
  Antisense strand to SEQ ID NO: 1641707
aacaacagagcucuguuuc

SEQ ID NO: 1641709 - RNA, 19 nt, Artificial Sequence
  Description of Artificial Sequence: Synthetic oligonucleotide
  Sense strand starting at position 854 of SEQ ID NO: 1561031
gggacuggcucugguucaa

SEQ ID NO: 1641710 - RNA, 19 nt, Artificial Sequence
  Description of Artificial Sequence: Synthetic oligonucleotide
  Antisense strand to SEQ ID NO: 1641709
uugaaccagagccaguccc

SEQ ID NO: 1641711 - RNA, 19 nt, Artificial Sequence
  Description of Artificial Sequence: Synthetic oligonucleotide
  Sense strand starting at position 1049 of SEQ ID NO: 1561031
uugcuaagugcuuagcaga

SEQ ID NO: 1641712 - RNA, 19 nt, Artificial Sequence
  Description of Artificial Sequence: Synthetic oligonucleotide
  Antisense strand to SEQ ID NO: 1641711
ucugcuaagcacuuagcaa

SEQ ID NO: 1641713 - RNA, 19 nt, Artificial Sequence
  Description of Artificial Sequence: Synthetic oligonucleotide
  Sense strand starting at position 1137 of SEQ ID NO: 1561031
ugucuuacccagcauuaua

SEQ ID NO: 1641714 - RNA, 19 nt, Artificial Sequence
  Description of Artificial Sequence: Synthetic oligonucleotide
  Antisense strand to SEQ ID NO: 1641713
uauaaugcuggguaagaca

SEQ ID NO: 1641715 - RNA, 19 nt, Artificial Sequence
  Description of Artificial Sequence: Synthetic oligonucleotide
  Sense strand starting at position 1741 of SEQ ID NO: 1561031
cucguaccuuucugacgau

SEQ ID NO: 1641716 - RNA, 19 nt, Artificial Sequence
  Description of Artificial Sequence: Synthetic oligonucleotide
  Antisense strand to SEQ ID NO: 1641715
aucgucagaaagguacgag

SEQ ID NO: 1641717 - RNA, 19 nt, Artificial Sequence
  Description of Artificial Sequence: Synthetic oligonucleotide
  Sense strand starting at position 1993 of SEQ ID NO: 1561031
ccgggcaucucugcgagaa

SEQ ID NO: 1641718 - RNA, 19 nt, Artificial Sequence
  Description of Artificial Sequence: Synthetic oligonucleotide
  Antisense strand to SEQ ID NO: 1641717
uucucgcagagaugcccgg

SEQ ID NO: 1641719 - RNA, 19 nt, Artificial Sequence
  Description of Artificial Sequence: Synthetic oligonucleotide
  Sense strand starting at position 1994 of SEQ ID NO: 1561031
cgggcaucucugcgagaac

SEQ ID NO: 1641720 - RNA, 19 nt, Artificial Sequence
  Description of Artificial Sequence: Synthetic oligonucleotide
  Antisense strand to SEQ ID NO: 1641719
guucucgcagagaugcccg

SEQ ID NO: 1641721 - RNA, 19 nt, Artificial Sequence
  Description of Artificial Sequence: Synthetic oligonucleotide
  Sense strand starting at position 1995 of SEQ ID NO: 1561031
gggcaucucugcgagaaca

SEQ ID NO: 1641722 - RNA, 19 nt, Artificial Sequence
  Description of Artificial Sequence: Synthetic oligonucleotide
  Antisense strand to SEQ ID NO: 1641721
uguucucgcagagaugccc

SEQ ID NO: 1641723 - RNA, 19 nt, Artificial Sequence
  Description of Artificial Sequence: Synthetic oligonucleotide
  Sense strand starting at position 1997 of SEQ ID NO: 1561031
gcaucucugcgagaacaga

SEQ ID NO: 1641724 - RNA, 19 nt, Artificial Sequence
  Description of Artificial Sequence: Synthetic oligonucleotide
  Antisense strand to SEQ ID NO: 1641723
ucuguucucgcagagaugc

SEQ ID NO: 1641725 - RNA, 19 nt, Artificial Sequence
  Description of Artificial Sequence: Synthetic oligonucleotide
  Sense strand starting at position 2102 of SEQ ID NO: 1561031
ggcucaucgcgcuucucau

SEQ ID NO: 1641726 - RNA, 19 nt, Artificial Sequence
  Description of Artificial Sequence: Synthetic oligonucleotide
  Antisense strand to SEQ ID NO: 1641725
augagaagcgcgaugagcc

SEQ ID NO: 1641727 - RNA, 19 nt, Artificial Sequence
  Description of Artificial Sequence: Synthetic oligonucleotide
  Sense strand starting at position 2103 of SEQ ID NO: 1561031
gcucaucgcgcuucucauu

SEQ ID NO: 1641728 - RNA, 19 nt, Artificial Sequence
  Description of Artificial Sequence: Synthetic oligonucleotide
  Antisense strand to SEQ ID NO: 1641727
aaugagaagcgcgaugagc

SEQ ID NO: 1641729 - RNA, 19 nt, Artificial Sequence
  Description of Artificial Sequence: Synthetic oligonucleotide
  Sense strand starting at position 2109 of SEQ ID NO: 1561031
cgcgcuucucauugugacu

SEQ ID NO: 1641730 - RNA, 19 nt, Artificial Sequence
  Description of Artificial Sequence: Synthetic oligonucleotide
  Antisense strand to SEQ ID NO: 1641729
agucacaaugagaagcgcg

SEQ ID NO: 1641731 - RNA, 19 nt, Artificial Sequence
  Description of Artificial Sequence: Synthetic oligonucleotide
  Sense strand starting at position 2111 of SEQ ID NO: 1561031
cgcuucucauugugacuca

SEQ ID NO: 1641732 - RNA, 19 nt, Artificial Sequence
  Description of Artificial Sequence: Synthetic oligonucleotide
  Antisense strand to SEQ ID NO: 1641731
ugagucacaaugagaagcg

SEQ ID NO: 1641733 - RNA, 19 nt, Artificial Sequence
  Description of Artificial Sequence: Synthetic oligonucleotide
  Sense strand starting at position 2153 of SEQ ID NO: 1561031
ggagacaagucugguguga

SEQ ID NO: 1641734 - RNA, 19 nt, Artificial Sequence
  Description of Artificial Sequence: Synthetic oligonucleotide
  Antisense strand to SEQ ID NO: 1641733
ucacaccagacuugucucc

SEQ ID NO: 1641735 - RNA, 19 nt, Artificial Sequence
  Description of Artificial Sequence: Synthetic oligonucleotide
  Sense strand starting at position 2155 of SEQ ID NO: 1561031
agacaagucuggugugagu

SEQ ID NO: 1641736 - RNA, 19 nt, Artificial Sequence
  Description of Artificial Sequence: Synthetic oligonucleotide
  Antisense strand to SEQ ID NO: 1641735
acucacaccagacuugucu

SEQ ID NO: 1641737 - RNA, 19 nt, Artificial Sequence
  Description of Artificial Sequence: Synthetic oligonucleotide
  Sense strand starting at position 2316 of SEQ ID NO: 1561031
uagacucugucuccugaga

SEQ ID NO: 1641738 - RNA, 19 nt, Artificial Sequence
  Description of Artificial Sequence: Synthetic oligonucleotide
  Antisense strand to SEQ ID NO: 1641737
ucucaggagacagagucua

SEQ ID NO: 1641739 - RNA, 19 nt, Artificial Sequence
  Description of Artificial Sequence: Synthetic oligonucleotide
  Sense strand starting at position 2318 of SEQ ID NO: 1561031
gacucugucuccugagaac

SEQ ID NO: 1641740 - RNA, 19 nt, Artificial Sequence
  Description of Artificial Sequence: Synthetic oligonucleotide
  Antisense strand to SEQ ID NO: 1641739
guucucaggagacagaguc

SEQ ID NO: 1641741 - RNA, 19 nt, Artificial Sequence
  Description of Artificial Sequence: Synthetic oligonucleotide
  Sense strand starting at position 2321 of SEQ ID NO: 1561031
ucugucuccugagaacaaa

SEQ ID NO: 1641742 - RNA, 19 nt, Artificial Sequence
  Description of Artificial Sequence: Synthetic oligonucleotide
  Antisense strand to SEQ ID NO: 1641741
uuuguucucaggagacaga

SEQ ID NO: 1641743 - RNA, 19 nt, Artificial Sequence
  Description of Artificial Sequence: Synthetic oligonucleotide
  Sense strand starting at position 2551 of SEQ ID NO: 1561031
cccggaaccucauacaauu

SEQ ID NO: 1641744 - RNA, 19 nt, Artificial Sequence
  Description of Artificial Sequence: Synthetic oligonucleotide
  Antisense strand to SEQ ID NO: 1641743
aauuguaugagguuccggg

SEQ ID NO: 1641745 - RNA, 19 nt, Artificial Sequence
  Description of Artificial Sequence: Synthetic oligonucleotide
  Sense strand starting at position 2925 of SEQ ID NO: 1561031
gcgacaucgugugaugacu

SEQ ID NO: 1641746 - RNA, 19 nt, Artificial Sequence
  Description of Artificial Sequence: Synthetic oligonucleotide
  Antisense strand to SEQ ID NO: 1641745
agucaucacacgaugucgc

SEQ ID NO: 1641747 - RNA, 19 nt, Artificial Sequence
  Description of Artificial Sequence: Synthetic oligonucleotide
  Sense strand starting at position 2934 of SEQ ID NO: 1561031
ugugaugacuccuggaacu

SEQ ID NO: 1641748 - RNA, 19 nt, Artificial Sequence
  Description of Artificial Sequence: Synthetic oligonucleotide
  Antisense strand to SEQ ID NO: 1641747
aguuccaggagucaucaca

SEQ ID NO: 1641749 - RNA, 19 nt, Artificial Sequence
  Description of Artificial Sequence: Synthetic oligonucleotide
  Sense strand starting at position 2963 of SEQ ID NO: 1561031
aggugaauacccugaccca

SEQ ID NO: 1641750 - RNA, 19 nt, Artificial Sequence
  Description of Artificial Sequence: Synthetic oligonucleotide
  Antisense strand to SEQ ID NO: 1641749
ugggucaggguauucaccu

SEQ ID NO: 1641751 - RNA, 19 nt, Artificial Sequence
  Description of Artificial Sequence: Synthetic oligonucleotide
  Sense strand starting at position 3601 of SEQ ID NO: 1561031
cucugagucugaggucauc

SEQ ID NO: 1641752 - RNA, 19 nt, Artificial Sequence
  Description of Artificial Sequence: Synthetic oligonucleotide
  Antisense strand to SEQ ID NO: 1641751
gaugaccucagacucagag

SEQ ID NO: 1641753 - RNA, 19 nt, Artificial Sequence
  Description of Artificial Sequence: Synthetic oligonucleotide
  Sense strand starting at position 3624 of SEQ ID NO: 1561031
acugcaucguucuggaauc

SEQ ID NO: 1641754 - RNA, 19 nt, Artificial Sequence
  Description of Artificial Sequence: Synthetic oligonucleotide
  Antisense strand to SEQ ID NO: 1641753
gauuccagaacgaugcagu

SEQ ID NO: 1641755 - RNA, 19 nt, Artificial Sequence
  Description of Artificial Sequence: Synthetic oligonucleotide
  Sense strand starting at position 3635 of SEQ ID NO: 1561031
cuggaaucucauugucuca

SEQ ID NO: 1641756 - RNA, 19 nt, Artificial Sequence
  Description of Artificial Sequence: Synthetic oligonucleotide
  Antisense strand to SEQ ID NO: 1641755
ugagacaaugagauuccag

SEQ ID NO: 1641757 - RNA, 19 nt, Artificial Sequence
  Description of Artificial Sequence: Synthetic oligonucleotide
  Sense strand starting at position 3637 of SEQ ID NO: 1561031
ggaaucucauugucucauu

SEQ ID NO: 1641758 - RNA, 19 nt, Artificial Sequence
  Description of Artificial Sequence: Synthetic oligonucleotide
  Antisense strand to SEQ ID NO: 1641757
aaugagacaaugagauucc

SEQ ID NO: 1641759 - RNA, 19 nt, Artificial Sequence
  Description of Artificial Sequence: Synthetic oligonucleotide
  Sense strand starting at position 3711 of SEQ ID NO: 1561031
uugugucugaccugucaau

SEQ ID NO: 1641760 - RNA, 19 nt, Artificial Sequence
  Description of Artificial Sequence: Synthetic oligonucleotide
  Antisense strand to SEQ ID NO: 1641759
auugacaggucagacacaa

SEQ ID NO: 1641761 - RNA, 19 nt, Artificial Sequence
  Description of Artificial Sequence: Synthetic oligonucleotide
  Sense strand starting at position 43 of SEQ ID NO: 1561032
ccuagaauaucauggguuc

SEQ ID NO: 1641762 - RNA, 19 nt, Artificial Sequence
  Description of Artificial Sequence: Synthetic oligonucleotide
  Antisense strand to SEQ ID NO: 1641761
gaacccaugauauucuagg

SEQ ID NO: 1641763 - RNA, 19 nt, Artificial Sequence
  Description of Artificial Sequence: Synthetic oligonucleotide
  Sense strand starting at position 44 of SEQ ID NO: 1561032
cuagaauaucauggguucu

SEQ ID NO: 1641764 - RNA, 19 nt, Artificial Sequence
  Description of Artificial Sequence: Synthetic oligonucleotide
  Antisense strand to SEQ ID NO: 1641763
agaacccaugauauucuag

SEQ ID NO: 1641765 - RNA, 19 nt, Artificial Sequence
  Description of Artificial Sequence: Synthetic oligonucleotide
  Sense strand starting at position 46 of SEQ ID NO: 1561032
agaauaucauggguucugu

SEQ ID NO: 1641766 - RNA, 19 nt, Artificial Sequence
  Description of Artificial Sequence: Synthetic oligonucleotide
  Antisense strand to SEQ ID NO: 1641765
acagaacccaugauauucu

SEQ ID NO: 1641767 - RNA, 19 nt, Artificial Sequence
  Description of Artificial Sequence: Synthetic oligonucleotide
  Sense strand starting at position 72 of SEQ ID NO: 1561032
uggucuccuuucuagaaga

SEQ ID NO: 1641768 - RNA, 19 nt, Artificial Sequence
  Description of Artificial Sequence: Synthetic oligonucleotide
  Antisense strand to SEQ ID NO: 1641767
ucuucuagaaaggagacca

SEQ ID NO: 1641769 - RNA, 19 nt, Artificial Sequence
  Description of Artificial Sequence: Synthetic oligonucleotide
  Sense strand starting at position 175 of SEQ ID NO: 1561032
ucuccauacucacgaugaa

SEQ ID NO: 1641770 - RNA, 19 nt, Artificial Sequence
  Description of Artificial Sequence: Synthetic oligonucleotide
  Antisense strand to SEQ ID NO: 1641769
uucaucgugaguauggaga

SEQ ID NO: 1641771 - RNA, 19 nt, Artificial Sequence
  Description of Artificial Sequence: Synthetic oligonucleotide
  Sense strand starting at position 178 of SEQ ID NO: 1561032
ccauacucacgaugaaucu

SEQ ID NO: 1641772 - RNA, 19 nt, Artificial Sequence
  Description of Artificial Sequence: Synthetic oligonucleotide
  Antisense strand to SEQ ID NO: 1641771
agauucaucgugaguaugg

SEQ ID NO: 1641773 - RNA, 19 nt, Artificial Sequence
  Description of Artificial Sequence: Synthetic oligonucleotide
  Sense strand starting at position 338 of SEQ ID NO: 1561032
gccuuuccacgauuguguu

SEQ ID NO: 1641774 - RNA, 19 nt, Artificial Sequence
  Description of Artificial Sequence: Synthetic oligonucleotide
  Antisense strand to SEQ ID NO: 1641773
aacacaaucguggaaaggc

SEQ ID NO: 1641775 - RNA, 19 nt, Artificial Sequence
  Description of Artificial Sequence: Synthetic oligonucleotide
  Sense strand starting at position 345 of SEQ ID NO: 1561032
cacgauuguguuuggguga

SEQ ID NO: 1641776 - RNA, 19 nt, Artificial Sequence
  Description of Artificial Sequence: Synthetic oligonucleotide
  Antisense strand to SEQ ID NO: 1641775
ucacccaaacacaaucgug

SEQ ID NO: 1641777 - RNA, 19 nt, Artificial Sequence
  Description of Artificial Sequence: Synthetic oligonucleotide
  Sense strand starting at position 350 of SEQ ID NO: 1561032
uuguguuugggugauugga

SEQ ID NO: 1641778 - RNA, 19 nt, Artificial Sequence
  Description of Artificial Sequence: Synthetic oligonucleotide
  Antisense strand to SEQ ID NO: 1641777
uccaaucacccaaacacaa

SEQ ID NO: 1641779 - RNA, 19 nt, Artificial Sequence
  Description of Artificial Sequence: Synthetic oligonucleotide
  Sense strand starting at position 390 of SEQ ID NO: 1561032
cauggaaccucguugagaa

SEQ ID NO: 1641780 - RNA, 19 nt, Artificial Sequence
  Description of Artificial Sequence: Synthetic oligonucleotide
  Antisense strand to SEQ ID NO: 1641779
uucucaacgagguuccaug

SEQ ID NO: 1641781 - RNA, 19 nt, Artificial Sequence
  Description of Artificial Sequence: Synthetic oligonucleotide
  Sense strand starting at position 391 of SEQ ID NO: 1561032
auggaaccucguugagaau

SEQ ID NO: 1641782 - RNA, 19 nt, Artificial Sequence
  Description of Artificial Sequence: Synthetic oligonucleotide
  Antisense strand to SEQ ID NO: 1641781
auucucaacgagguuccau

SEQ ID NO: 1641783 - RNA, 19 nt, Artificial Sequence
  Description of Artificial Sequence: Synthetic oligonucleotide
  Sense strand starting at position 392 of SEQ ID NO: 1561032
uggaaccucguugagaauu

SEQ ID NO: 1641784 - RNA, 19 nt, Artificial Sequence
  Description of Artificial Sequence: Synthetic oligonucleotide
  Antisense strand to SEQ ID NO: 1641783
aauucucaacgagguucca

SEQ ID NO: 1641785 - RNA, 19 nt, Artificial Sequence
  Description of Artificial Sequence: Synthetic oligonucleotide
  Sense strand starting at position 394 of SEQ ID NO: 1561032
gaaccucguugagaauuag

SEQ ID NO: 1641786 - RNA, 19 nt, Artificial Sequence
  Description of Artificial Sequence: Synthetic oligonucleotide
  Antisense strand to SEQ ID NO: 1641785
cuaauucucaacgagguuc

SEQ ID NO: 1641787 - RNA, 19 nt, Artificial Sequence
  Description of Artificial Sequence: Synthetic oligonucleotide
  Sense strand starting at position 505 of SEQ ID NO: 1561032
cagaguuggaccugggaua

SEQ ID NO: 1641788 - RNA, 19 nt, Artificial Sequence
  Description of Artificial Sequence: Synthetic oligonucleotide
  Antisense strand to SEQ ID NO: 1641787
uaucccagguccaacucug

SEQ ID NO: 1641789 - RNA, 19 nt, Artificial Sequence
  Description of Artificial Sequence: Synthetic oligonucleotide
  Sense strand starting at position 592 of SEQ ID NO: 1561032
gcgcguacuccugggcgaa

SEQ ID NO: 1641790 - RNA, 19 nt, Artificial Sequence
  Description of Artificial Sequence: Synthetic oligonucleotide
  Antisense strand to SEQ ID NO: 1641789
uucgcccaggaguacgcgc

SEQ ID NO: 1641791 - RNA, 19 nt, Artificial Sequence
  Description of Artificial Sequence: Synthetic oligonucleotide
  Sense strand starting at position 706 of SEQ ID NO: 1561032
aggugcuucucaggaccaa

SEQ ID NO: 1641792 - RNA, 19 nt, Artificial Sequence
  Description of Artificial Sequence: Synthetic oligonucleotide
  Antisense strand to SEQ ID NO: 1641791
uugguccugagaagcaccu

SEQ ID NO: 1641793 - RNA, 19 nt, Artificial Sequence
  Description of Artificial Sequence: Synthetic oligonucleotide
  Sense strand starting at position 707 of SEQ ID NO: 1561032
ggugcuucucaggaccaaa

SEQ ID NO: 1641794 - RNA, 19 nt, Artificial Sequence
  Description of Artificial Sequence: Synthetic oligonucleotide
  Antisense strand to SEQ ID NO: 1641793
uuugguccugagaagcacc

SEQ ID NO: 1641795 - RNA, 19 nt, Artificial Sequence
  Description of Artificial Sequence: Synthetic oligonucleotide
  Sense strand starting at position 828 of SEQ ID NO: 1561032
guguaaacucucugagccu

SEQ ID NO: 1641796 - RNA, 19 nt, Artificial Sequence
  Description of Artificial Sequence: Synthetic oligonucleotide
  Antisense strand to SEQ ID NO: 1641795
aggcucagagaguuuacac

SEQ ID NO: 1641797 - RNA, 19 nt, Artificial Sequence
  Description of Artificial Sequence: Synthetic oligonucleotide
  Sense strand starting at position 1024 of SEQ ID NO: 1561032
guuccaacuugaguugcau

SEQ ID NO: 1641798 - RNA, 19 nt, Artificial Sequence
  Description of Artificial Sequence: Synthetic oligonucleotide
  Antisense strand to SEQ ID NO: 1641797
augcaacucaaguuggaac

SEQ ID NO: 1641799 - RNA, 19 nt, Artificial Sequence
  Description of Artificial Sequence: Synthetic oligonucleotide
  Sense strand starting at position 1092 of SEQ ID NO: 1561032
gggccuguguuucucagaa

SEQ ID NO: 1641800 - RNA, 19 nt, Artificial Sequence
  Description of Artificial Sequence: Synthetic oligonucleotide
  Antisense strand to SEQ ID NO: 1641799
uucugagaaacacaggccc

SEQ ID NO: 1641801 - RNA, 19 nt, Artificial Sequence
  Description of Artificial Sequence: Synthetic oligonucleotide
  Sense strand starting at position 1094 of SEQ ID NO: 1561032
gccuguguuucucagaaga

SEQ ID NO: 1641802 - RNA, 19 nt, Artificial Sequence
  Description of Artificial Sequence: Synthetic oligonucleotide
  Antisense strand to SEQ ID NO: 1641801
ucuucugagaaacacaggc

SEQ ID NO: 1641803 - RNA, 19 nt, Artificial Sequence
  Description of Artificial Sequence: Synthetic oligonucleotide
  Sense strand starting at position 1096 of SEQ ID NO: 1561032
cuguguuucucagaagauc

SEQ ID NO: 1641804 - RNA, 19 nt, Artificial Sequence
  Description of Artificial Sequence: Synthetic oligonucleotide
  Antisense strand to SEQ ID NO: 1641803
gaucuucugagaaacacag

SEQ ID NO: 1641805 - RNA, 19 nt, Artificial Sequence
  Description of Artificial Sequence: Synthetic oligonucleotide
  Sense strand starting at position 1188 of SEQ ID NO: 1561032
cuggguggcuuccgagaau

SEQ ID NO: 1641806 - RNA, 19 nt, Artificial Sequence
  Description of Artificial Sequence: Synthetic oligonucleotide
  Antisense strand to SEQ ID NO: 1641805
auucucggaagccacccag

SEQ ID NO: 1641807 - RNA, 19 nt, Artificial Sequence
  Description of Artificial Sequence: Synthetic oligonucleotide
  Sense strand starting at position 1191 of SEQ ID NO: 1561032
gguggcuuccgagaaugcu

SEQ ID NO: 1641808 - RNA, 19 nt, Artificial Sequence
  Description of Artificial Sequence: Synthetic oligonucleotide
  Antisense strand to SEQ ID NO: 1641807
agcauucucggaagccacc

SEQ ID NO: 1641809 - RNA, 19 nt, Artificial Sequence
  Description of Artificial Sequence: Synthetic oligonucleotide
  Sense strand starting at position 1194 of SEQ ID NO: 1561032
ggcuuccgagaaugcuuau

SEQ ID NO: 1641810 - RNA, 19 nt, Artificial Sequence
  Description of Artificial Sequence: Synthetic oligonucleotide
  Antisense strand to SEQ ID NO: 1641809
auaagcauucucggaagcc

SEQ ID NO: 1641811 - RNA, 19 nt, Artificial Sequence
  Description of Artificial Sequence: Synthetic oligonucleotide
  Sense strand starting at position 1197 of SEQ ID NO: 1561032
uuccgagaaugcuuauugu

SEQ ID NO: 1641812 - RNA, 19 nt, Artificial Sequence
  Description of Artificial Sequence: Synthetic oligonucleotide
  Antisense strand to SEQ ID NO: 1641811
acaauaagcauucucggaa

SEQ ID NO: 1641813 - RNA, 19 nt, Artificial Sequence
  Description of Artificial Sequence: Synthetic oligonucleotide
  Sense strand starting at position 1579 of SEQ ID NO: 1561032
uuguguccuggagagguua

SEQ ID NO: 1641814 - RNA, 19 nt, Artificial Sequence
  Description of Artificial Sequence: Synthetic oligonucleotide
  Antisense strand to SEQ ID NO: 1641813
uaaccucuccaggacacaa

SEQ ID NO: 1641815 - RNA, 19 nt, Artificial Sequence
  Description of Artificial Sequence: Synthetic oligonucleotide
  Sense strand starting at position 1748 of SEQ ID NO: 1561032
cuguguguuucugagucca

SEQ ID NO: 1641816 - RNA, 19 nt, Artificial Sequence
  Description of Artificial Sequence: Synthetic oligonucleotide
  Antisense strand to SEQ ID NO: 1641815
uggacucagaaacacacag

SEQ ID NO: 1641817 - RNA, 19 nt, Artificial Sequence
  Description of Artificial Sequence: Synthetic oligonucleotide
  Sense strand starting at position 1750 of SEQ ID NO: 1561032
guguguuucugaguccaau

SEQ ID NO: 1641818 - RNA, 19 nt, Artificial Sequence
  Description of Artificial Sequence: Synthetic oligonucleotide
  Antisense strand to SEQ ID NO: 1641817
auuggacucagaaacacac

SEQ ID NO: 1641819 - RNA, 19 nt, Artificial Sequence
  Description of Artificial Sequence: Synthetic oligonucleotide
  Sense strand starting at position 1788 of SEQ ID NO: 1561032
cgcuguguguccuuggauc

SEQ ID NO: 1641820 - RNA, 19 nt, Artificial Sequence
  Description of Artificial Sequence: Synthetic oligonucleotide
  Antisense strand to SEQ ID NO: 1641819
gauccaaggacacacagcg

SEQ ID NO: 1641821 - RNA, 19 nt, Artificial Sequence
  Description of Artificial Sequence: Synthetic oligonucleotide
  Sense strand starting at position 1796 of SEQ ID NO: 1561032
guccuuggaucucugucau

SEQ ID NO: 1641822 - RNA, 19 nt, Artificial Sequence
  Description of Artificial Sequence: Synthetic oligonucleotide
  Antisense strand to SEQ ID NO: 1641821
augacagagauccaaggac

SEQ ID NO: 1641823 - RNA, 19 nt, Artificial Sequence
  Description of Artificial Sequence: Synthetic oligonucleotide
  Sense strand starting at position 2112 of SEQ ID NO: 1561032
gauggaagcucgucugcaa

SEQ ID NO: 1641824 - RNA, 19 nt, Artificial Sequence
  Description of Artificial Sequence: Synthetic oligonucleotide
  Antisense strand to SEQ ID NO: 1641823
uugcagacgagcuuccauc

SEQ ID NO: 1641825 - RNA, 19 nt, Artificial Sequence
  Description of Artificial Sequence: Synthetic oligonucleotide
  Sense strand starting at position 2230 of SEQ ID NO: 1561032
cugugcuucccaggugaua

SEQ ID NO: 1641826 - RNA, 19 nt, Artificial Sequence
  Description of Artificial Sequence: Synthetic oligonucleotide
  Antisense strand to SEQ ID NO: 1641825
uaucaccugggaagcacag

SEQ ID NO: 1641827 - RNA, 19 nt, Artificial Sequence
  Description of Artificial Sequence: Synthetic oligonucleotide
  Sense strand starting at position 3769 of SEQ ID NO: 1561032
ugcccaaagggucaguauu

SEQ ID NO: 1641828 - RNA, 19 nt, Artificial Sequence
  Description of Artificial Sequence: Synthetic oligonucleotide
  Antisense strand to SEQ ID NO: 1641827
aauacugacccuuugggca

SEQ ID NO: 1641829 - RNA, 19 nt, Artificial Sequence
  Description of Artificial Sequence: Synthetic oligonucleotide
  Sense strand starting at position 3811 of SEQ ID NO: 1561032
aacugagguuccgagaaac

SEQ ID NO: 1641830 - RNA, 19 nt, Artificial Sequence
  Description of Artificial Sequence: Synthetic oligonucleotide
  Antisense strand to SEQ ID NO: 1641829
guuucucggaaccucaguu

SEQ ID NO: 1641831 - RNA, 19 nt, Artificial Sequence
  Description of Artificial Sequence: Synthetic oligonucleotide
  Sense strand starting at position 3821 of SEQ ID NO: 1561032
ccgagaaacgaucguguua

SEQ ID NO: 1641832 - RNA, 19 nt, Artificial Sequence
  Description of Artificial Sequence: Synthetic oligonucleotide
  Antisense strand to SEQ ID NO: 1641831
uaacacgaucguuucucgg

SEQ ID NO: 1641833 - RNA, 19 nt, Artificial Sequence
  Description of Artificial Sequence: Synthetic oligonucleotide
  Sense strand starting at position 3823 of SEQ ID NO: 1561032
gagaaacgaucguguuaca

SEQ ID NO: 1641834 - RNA, 19 nt, Artificial Sequence
  Description of Artificial Sequence: Synthetic oligonucleotide
  Antisense strand to SEQ ID NO: 1641833
uguaacacgaucguuucuc

SEQ ID NO: 1641835 - RNA, 19 nt, Artificial Sequence
  Description of Artificial Sequence: Synthetic oligonucleotide
  Sense strand starting at position 3826 of SEQ ID NO: 1561032
aaacgaucguguuacacaa

SEQ ID NO: 1641836 - RNA, 19 nt, Artificial Sequence
  Description of Artificial Sequence: Synthetic oligonucleotide
  Antisense strand to SEQ ID NO: 1641835
uuguguaacacgaucguuu

SEQ ID NO: 1641837 - RNA, 19 nt, Artificial Sequence
  Description of Artificial Sequence: Synthetic oligonucleotide
  Sense strand starting at position 3833 of SEQ ID NO: 1561032
cguguuacacaaggucaga

SEQ ID NO: 1641838 - RNA, 19 nt, Artificial Sequence
  Description of Artificial Sequence: Synthetic oligonucleotide
  Antisense strand to SEQ ID NO: 1641837
ucugaccuuguguaacacg

SEQ ID NO: 1641839 - RNA, 19 nt, Artificial Sequence
  Description of Artificial Sequence: Synthetic oligonucleotide
  Sense strand starting at position 3909 of SEQ ID NO: 1561032
ucguguuuccacuacuacu

SEQ ID NO: 1641840 - RNA, 19 nt, Artificial Sequence
  Description of Artificial Sequence: Synthetic oligonucleotide
  Antisense strand to SEQ ID NO: 1641839
aguaguaguggaaacacga

SEQ ID NO: 1641841 - RNA, 19 nt, Artificial Sequence
  Description of Artificial Sequence: Synthetic oligonucleotide
  Sense strand starting at position 347 of SEQ ID NO: 1561033
augucuacagaacguuuaa

SEQ ID NO: 1641842 - RNA, 19 nt, Artificial Sequence
  Description of Artificial Sequence: Synthetic oligonucleotide
  Antisense strand to SEQ ID NO: 1641841
uuaaacguucuguagacau

SEQ ID NO: 1641843 - RNA, 19 nt, Artificial Sequence
  Description of Artificial Sequence: Synthetic oligonucleotide
  Sense strand starting at position 536 of SEQ ID NO: 1561033
gugaaagucuaauaaugag

SEQ ID NO: 1641844 - RNA, 19 nt, Artificial Sequence
  Description of Artificial Sequence: Synthetic oligonucleotide
  Antisense strand to SEQ ID NO: 1641843
cucauuauuagacuuucac

SEQ ID NO: 1641845 - RNA, 19 nt, Artificial Sequence
  Description of Artificial Sequence: Synthetic oligonucleotide
  Sense strand starting at position 1094 of SEQ ID NO: 1561033
ugugguucuugucucugua

SEQ ID NO: 1641846 - RNA, 19 nt, Artificial Sequence
  Description of Artificial Sequence: Synthetic oligonucleotide
  Antisense strand to SEQ ID NO: 1641845
uacagagacaagaaccaca

SEQ ID NO: 1641847 - RNA, 19 nt, Artificial Sequence
  Description of Artificial Sequence: Synthetic oligonucleotide
  Sense strand starting at position 1097 of SEQ ID NO: 1561033
gguucuugucucuguagca

SEQ ID NO: 1641848 - RNA, 19 nt, Artificial Sequence
  Description of Artificial Sequence: Synthetic oligonucleotide
  Antisense strand to SEQ ID NO: 1641847
ugcuacagagacaagaacc

SEQ ID NO: 1641849 - RNA, 19 nt, Artificial Sequence
  Description of Artificial Sequence: Synthetic oligonucleotide
  Sense strand starting at position 1098 of SEQ ID NO: 1561033
guucuugucucuguagcau

SEQ ID NO: 1641850 - RNA, 19 nt, Artificial Sequence
  Description of Artificial Sequence: Synthetic oligonucleotide
  Antisense strand to SEQ ID NO: 1641849
augcuacagagacaagaac

SEQ ID NO: 1641851 - RNA, 19 nt, Artificial Sequence
  Description of Artificial Sequence: Synthetic oligonucleotide
  Sense strand starting at position 1602 of SEQ ID NO: 1561033
uuaaaucucugccucggaa

SEQ ID NO: 1641852 - RNA, 19 nt, Artificial Sequence
  Description of Artificial Sequence: Synthetic oligonucleotide
  Antisense strand to SEQ ID NO: 1641851
uuccgaggcagagauuuaa

SEQ ID NO: 1641853 - RNA, 19 nt, Artificial Sequence
  Description of Artificial Sequence: Synthetic oligonucleotide
  Sense strand starting at position 1803 of SEQ ID NO: 1561033
aagggaguguuaccuuguu

SEQ ID NO: 1641854 - RNA, 19 nt, Artificial Sequence
  Description of Artificial Sequence: Synthetic oligonucleotide
  Antisense strand to SEQ ID NO: 1641853
aacaagguaacacucccuu

SEQ ID NO: 1641855 - RNA, 19 nt, Artificial Sequence
  Description of Artificial Sequence: Synthetic oligonucleotide
  Sense strand starting at position 1988 of SEQ ID NO: 1561033
gcauuugcaugucgguuua

SEQ ID NO: 1641856 - RNA, 19 nt, Artificial Sequence
  Description of Artificial Sequence: Synthetic oligonucleotide
  Antisense strand to SEQ ID NO: 1641855
uaaaccgacaugcaaaugc

SEQ ID NO: 1641857 - RNA, 19 nt, Artificial Sequence
  Description of Artificial Sequence: Synthetic oligonucleotide
  Sense strand starting at position 1992 of SEQ ID NO: 1561033
uugcaugucgguuuaguca

SEQ ID NO: 1641858 - RNA, 19 nt, Artificial Sequence
  Description of Artificial Sequence: Synthetic oligonucleotide
  Antisense strand to SEQ ID NO: 1641857
ugacuaaaccgacaugcaa

SEQ ID NO: 1641859 - RNA, 19 nt, Artificial Sequence
  Description of Artificial Sequence: Synthetic oligonucleotide
  Sense strand starting at position 2070 of SEQ ID NO: 1561033
cccguaagucagggcaauu

SEQ ID NO: 1641860 - RNA, 19 nt, Artificial Sequence
  Description of Artificial Sequence: Synthetic oligonucleotide
  Antisense strand to SEQ ID NO: 1641859
aauugcccugacuuacggg

SEQ ID NO: 1641861 - RNA, 19 nt, Artificial Sequence
  Description of Artificial Sequence: Synthetic oligonucleotide
  Sense strand starting at position 2091 of SEQ ID NO: 1561033
cggcagugcgaggagaauu

SEQ ID NO: 1641862 - RNA, 19 nt, Artificial Sequence
  Description of Artificial Sequence: Synthetic oligonucleotide
  Antisense strand to SEQ ID NO: 1641861
aauucuccucgcacugccg

SEQ ID NO: 1641863 - RNA, 19 nt, Artificial Sequence
  Description of Artificial Sequence: Synthetic oligonucleotide
  Sense strand starting at position 2615 of SEQ ID NO: 1561033
gugguagcguccugggaaa

SEQ ID NO: 1641864 - RNA, 19 nt, Artificial Sequence
  Description of Artificial Sequence: Synthetic oligonucleotide
  Antisense strand to SEQ ID NO: 1641863
uuucccaggacgcuaccac

SEQ ID NO: 1641865 - RNA, 19 nt, Artificial Sequence
  Description of Artificial Sequence: Synthetic oligonucleotide
  Sense strand starting at position 2635 of SEQ ID NO: 1561033
gaacguucucgcuuuggua

SEQ ID NO: 1641866 - RNA, 19 nt, Artificial Sequence
  Description of Artificial Sequence: Synthetic oligonucleotide
  Antisense strand to SEQ ID NO: 1641865
uaccaaagcgagaacguuc

SEQ ID NO: 1641867 - RNA, 19 nt, Artificial Sequence
  Description of Artificial Sequence: Synthetic oligonucleotide
  Sense strand starting at position 2637 of SEQ ID NO: 1561033
acguucucgcuuugguaga

SEQ ID NO: 1641868 - RNA, 19 nt, Artificial Sequence
  Description of Artificial Sequence: Synthetic oligonucleotide
  Antisense strand to SEQ ID NO: 1641867
ucuaccaaagcgagaacgu

SEQ ID NO: 1641869 - RNA, 19 nt, Artificial Sequence
  Description of Artificial Sequence: Synthetic oligonucleotide
  Sense strand starting at position 2638 of SEQ ID NO: 1561033
cguucucgcuuugguagaa

SEQ ID NO: 1641870 - RNA, 19 nt, Artificial Sequence
  Description of Artificial Sequence: Synthetic oligonucleotide
  Antisense strand to SEQ ID NO: 1641869
uucuaccaaagcgagaacg

SEQ ID NO: 1641871 - RNA, 19 nt, Artificial Sequence
  Description of Artificial Sequence: Synthetic oligonucleotide
  Sense strand starting at position 2639 of SEQ ID NO: 1561033
guucucgcuuugguagaaa

SEQ ID NO: 1641872 - RNA, 19 nt, Artificial Sequence
  Description of Artificial Sequence: Synthetic oligonucleotide
  Antisense strand to SEQ ID NO: 1641871
uuucuaccaaagcgagaac

SEQ ID NO: 1641873 - RNA, 19 nt, Artificial Sequence
  Description of Artificial Sequence: Synthetic oligonucleotide
  Sense strand starting at position 2812 of SEQ ID NO: 1561033
ggucauucucgguguccuu

SEQ ID NO: 1641874 - RNA, 19 nt, Artificial Sequence
  Description of Artificial Sequence: Synthetic oligonucleotide
  Antisense strand to SEQ ID NO: 1641873
aaggacaccgagaaugacc

SEQ ID NO: 1641875 - RNA, 19 nt, Artificial Sequence
  Description of Artificial Sequence: Synthetic oligonucleotide
  Sense strand starting at position 2905 of SEQ ID NO: 1561033
gccuguacucagcgacuga

SEQ ID NO: 1641876 - RNA, 19 nt, Artificial Sequence
  Description of Artificial Sequence: Synthetic oligonucleotide
  Antisense strand to SEQ ID NO: 1641875
ucagucgcugaguacaggc

SEQ ID NO: 1641877 - RNA, 19 nt, Artificial Sequence
  Description of Artificial Sequence: Synthetic oligonucleotide
  Sense strand starting at position 3095 of SEQ ID NO: 1561033
caguucugggcuuguaaga

SEQ ID NO: 1641878 - RNA, 19 nt, Artificial Sequence
  Description of Artificial Sequence: Synthetic oligonucleotide
  Antisense strand to SEQ ID NO: 1641877
ucuuacaagcccagaacug

SEQ ID NO: 1641879 - RNA, 19 nt, Artificial Sequence
  Description of Artificial Sequence: Synthetic oligonucleotide
  Sense strand starting at position 38 of SEQ ID NO: 1561034
cgcccuuucucggcaagaa

SEQ ID NO: 1641880 - RNA, 19 nt, Artificial Sequence
  Description of Artificial Sequence: Synthetic oligonucleotide
  Antisense strand to SEQ ID NO: 1641879
uucuugccgagaaagggcg

SEQ ID NO: 1641881 - RNA, 19 nt, Artificial Sequence
  Description of Artificial Sequence: Synthetic oligonucleotide
  Sense strand starting at position 39 of SEQ ID NO: 1561034
gcccuuucucggcaagaac

SEQ ID NO: 1641882 - RNA, 19 nt, Artificial Sequence
  Description of Artificial Sequence: Synthetic oligonucleotide
  Antisense strand to SEQ ID NO: 1641881
guucuugccgagaaagggc

SEQ ID NO: 1641883 - RNA, 19 nt, Artificial Sequence
  Description of Artificial Sequence: Synthetic oligonucleotide
  Sense strand starting at position 48 of SEQ ID NO: 1561034
cggcaagaacucugaaggu

SEQ ID NO: 1641884 - RNA, 19 nt, Artificial Sequence
  Description of Artificial Sequence: Synthetic oligonucleotide
  Antisense strand to SEQ ID NO: 1641883
accuucagaguucuugccg

SEQ ID NO: 1641885 - RNA, 19 nt, Artificial Sequence
  Description of Artificial Sequence: Synthetic oligonucleotide
  Sense strand starting at position 353 of SEQ ID NO: 1561034
ggaagaaaguuugaagccu

SEQ ID NO: 1641886 - RNA, 19 nt, Artificial Sequence
  Description of Artificial Sequence: Synthetic oligonucleotide
  Antisense strand to SEQ ID NO: 1641885
aggcuucaaacuuucuucc

SEQ ID NO: 1641887 - RNA, 19 nt, Artificial Sequence
  Description of Artificial Sequence: Synthetic oligonucleotide
  Sense strand starting at position 359 of SEQ ID NO: 1561034
aaguuugaagccuguaauc

SEQ ID NO: 1641888 - RNA, 19 nt, Artificial Sequence
  Description of Artificial Sequence: Synthetic oligonucleotide
  Antisense strand to SEQ ID NO: 1641887
gauuacaggcuucaaacuu

SEQ ID NO: 1641889 - RNA, 19 nt, Artificial Sequence
  Description of Artificial Sequence: Synthetic oligonucleotide
  Sense strand starting at position 653 of SEQ ID NO: 1561034
acaggcauuccgggaagaa

SEQ ID NO: 1641890 - RNA, 19 nt, Artificial Sequence
  Description of Artificial Sequence: Synthetic oligonucleotide
  Antisense strand to SEQ ID NO: 1641889
uucuucccggaaugccugu

SEQ ID NO: 1641891 - RNA, 19 nt, Artificial Sequence
  Description of Artificial Sequence: Synthetic oligonucleotide
  Sense strand starting at position 732 of SEQ ID NO: 1561034
ucagaauguuaaucaguuc

SEQ ID NO: 1641892 - RNA, 19 nt, Artificial Sequence
  Description of Artificial Sequence: Synthetic oligonucleotide
  Antisense strand to SEQ ID NO: 1641891
gaacugauuaacauucuga

SEQ ID NO: 1641893 - RNA, 19 nt, Artificial Sequence
  Description of Artificial Sequence: Synthetic oligonucleotide
  Sense strand starting at position 887 of SEQ ID NO: 1561034
ugccuuauucuucgggacu

SEQ ID NO: 1641894 - RNA, 19 nt, Artificial Sequence
  Description of Artificial Sequence: Synthetic oligonucleotide
  Antisense strand to SEQ ID NO: 1641893
agucccgaagaauaaggca

SEQ ID NO: 1641895 - RNA, 19 nt, Artificial Sequence
  Description of Artificial Sequence: Synthetic oligonucleotide
  Sense strand starting at position 888 of SEQ ID NO: 1561034
gccuuauucuucgggacuc

SEQ ID NO: 1641896 - RNA, 19 nt, Artificial Sequence
  Description of Artificial Sequence: Synthetic oligonucleotide
  Antisense strand to SEQ ID NO: 1641895
gagucccgaagaauaaggc

SEQ ID NO: 1641897 - RNA, 19 nt, Artificial Sequence
  Description of Artificial Sequence: Synthetic oligonucleotide
  Sense strand starting at position 889 of SEQ ID NO: 1561034
ccuuauucuucgggacucu

SEQ ID NO: 1641898 - RNA, 19 nt, Artificial Sequence
  Description of Artificial Sequence: Synthetic oligonucleotide
  Antisense strand to SEQ ID NO: 1641897
agagucccgaagaauaagg

SEQ ID NO: 1641899 - RNA, 19 nt, Artificial Sequence
  Description of Artificial Sequence: Synthetic oligonucleotide
  Sense strand starting at position 1496 of SEQ ID NO: 1561034
ggucaaggguuaccagaaa

SEQ ID NO: 1641900 - RNA, 19 nt, Artificial Sequence
  Description of Artificial Sequence: Synthetic oligonucleotide
  Antisense strand to SEQ ID NO: 1641899
uuucugguaacccuugacc

SEQ ID NO: 1641901 - RNA, 19 nt, Artificial Sequence
  Description of Artificial Sequence: Synthetic oligonucleotide
  Sense strand starting at position 1585 of SEQ ID NO: 1561034
gaggguugucguggaaggu

SEQ ID NO: 1641902 - RNA, 19 nt, Artificial Sequence
  Description of Artificial Sequence: Synthetic oligonucleotide
  Antisense strand to SEQ ID NO: 1641901
accuuccacgacaacccuc

SEQ ID NO: 1641903 - RNA, 19 nt, Artificial Sequence
  Description of Artificial Sequence: Synthetic oligonucleotide
  Sense strand starting at position 1586 of SEQ ID NO: 1561034
aggguugucguggaaggua

SEQ ID NO: 1641904 - RNA, 19 nt, Artificial Sequence
  Description of Artificial Sequence: Synthetic oligonucleotide
  Antisense strand to SEQ ID NO: 1641903
uaccuuccacgacaacccu

SEQ ID NO: 1641905 - RNA, 19 nt, Artificial Sequence
  Description of Artificial Sequence: Synthetic oligonucleotide
  Sense strand starting at position 1597 of SEQ ID NO: 1561034
ggaagguaggguuaagguu

SEQ ID NO: 1641906 - RNA, 19 nt, Artificial Sequence
  Description of Artificial Sequence: Synthetic oligonucleotide
  Antisense strand to SEQ ID NO: 1641905
aaccuuaacccuaccuucc

SEQ ID NO: 1641907 - RNA, 19 nt, Artificial Sequence
  Description of Artificial Sequence: Synthetic oligonucleotide
  Sense strand starting at position 2215 of SEQ ID NO: 1561034
ccgugcuggugaaauggaa

SEQ ID NO: 1641908 - RNA, 19 nt, Artificial Sequence
  Description of Artificial Sequence: Synthetic oligonucleotide
  Antisense strand to SEQ ID NO: 1641907
uuccauuucaccagcacgg

SEQ ID NO: 1641909 - RNA, 19 nt, Artificial Sequence
  Description of Artificial Sequence: Synthetic oligonucleotide
  Sense strand starting at position 2229 of SEQ ID NO: 1561034
uggaaucugcuuuguggua

SEQ ID NO: 1641910 - RNA, 19 nt, Artificial Sequence
  Description of Artificial Sequence: Synthetic oligonucleotide
  Antisense strand to SEQ ID NO: 1641909
uaccacaaagcagauucca

SEQ ID NO: 1641911 - RNA, 19 nt, Artificial Sequence
  Description of Artificial Sequence: Synthetic oligonucleotide
  Sense strand starting at position 2231 of SEQ ID NO: 1561034
gaaucugcuuugugguaca

SEQ ID NO: 1641912 - RNA, 19 nt, Artificial Sequence
  Description of Artificial Sequence: Synthetic oligonucleotide
  Antisense strand to SEQ ID NO: 1641911
uguaccacaaagcagauuc

SEQ ID NO: 1641913 - RNA, 19 nt, Artificial Sequence
  Description of Artificial Sequence: Synthetic oligonucleotide
  Sense strand starting at position 2591 of SEQ ID NO: 1561034
uaguuauugcagugagcug

SEQ ID NO: 1641914 - RNA, 19 nt, Artificial Sequence
  Description of Artificial Sequence: Synthetic oligonucleotide
  Antisense strand to SEQ ID NO: 1641913
cagcucacugcaauaacua

SEQ ID NO: 1641915 - RNA, 19 nt, Artificial Sequence
  Description of Artificial Sequence: Synthetic oligonucleotide
  Sense strand starting at position 2965 of SEQ ID NO: 1561034
ugugacuugagccagugaa

SEQ ID NO: 1641916 - RNA, 19 nt, Artificial Sequence
  Description of Artificial Sequence: Synthetic oligonucleotide
  Antisense strand to SEQ ID NO: 1641915
uucacuggcucaagucaca

SEQ ID NO: 1641917 - RNA, 19 nt, Artificial Sequence
  Description of Artificial Sequence: Synthetic oligonucleotide
  Sense strand starting at position 3150 of SEQ ID NO: 1561034
gugacuucuaaucgaugcu

SEQ ID NO: 1641918 - RNA, 19 nt, Artificial Sequence
  Description of Artificial Sequence: Synthetic oligonucleotide
  Antisense strand to SEQ ID NO: 1641917
agcaucgauuagaagucac

SEQ ID NO: 1641919 - RNA, 19 nt, Artificial Sequence
  Description of Artificial Sequence: Synthetic oligonucleotide
  Sense strand starting at position 3178 of SEQ ID NO: 1561034
uuggucaugagcugggaaa

SEQ ID NO: 1641920 - RNA, 19 nt, Artificial Sequence
  Description of Artificial Sequence: Synthetic oligonucleotide
  Antisense strand to SEQ ID NO: 1641919
uuucccagcucaugaccaa

SEQ ID NO: 1641921 - RNA, 19 nt, Artificial Sequence
  Description of Artificial Sequence: Synthetic oligonucleotide
  Sense strand starting at position 3294 of SEQ ID NO: 1561034
gaucucugggaggguugaa

SEQ ID NO: 1641922 - RNA, 19 nt, Artificial Sequence
  Description of Artificial Sequence: Synthetic oligonucleotide
  Antisense strand to SEQ ID NO: 1641921
uucaacccucccagagauc

SEQ ID NO: 1641923 - RNA, 19 nt, Artificial Sequence
  Description of Artificial Sequence: Synthetic oligonucleotide
  Sense strand starting at position 3306 of SEQ ID NO: 1561034
gguugaaaugucugccuag

SEQ ID NO: 1641924 - RNA, 19 nt, Artificial Sequence
  Description of Artificial Sequence: Synthetic oligonucleotide
  Antisense strand to SEQ ID NO: 1641923
cuaggcagacauuucaacc

SEQ ID NO: 1641925 - RNA, 19 nt, Artificial Sequence
  Description of Artificial Sequence: Synthetic oligonucleotide
  Sense strand starting at position 3344 of SEQ ID NO: 1561034
ugcugaagaguguguugaa

SEQ ID NO: 1641926 - RNA, 19 nt, Artificial Sequence
  Description of Artificial Sequence: Synthetic oligonucleotide
  Antisense strand to SEQ ID NO: 1641925
uucaacacacucuucagca

SEQ ID NO: 1641927 - RNA, 19 nt, Artificial Sequence
  Description of Artificial Sequence: Synthetic oligonucleotide
  Sense strand starting at position 3345 of SEQ ID NO: 1561034
gcugaagaguguguugaag

SEQ ID NO: 1641928 - RNA, 19 nt, Artificial Sequence
  Description of Artificial Sequence: Synthetic oligonucleotide
  Antisense strand to SEQ ID NO: 1641927
cuucaacacacucuucagc

SEQ ID NO: 1641929 - RNA, 19 nt, Artificial Sequence
  Description of Artificial Sequence: Synthetic oligonucleotide
  Sense strand starting at position 3347 of SEQ ID NO: 1561034
ugaagaguguguugaagcu

SEQ ID NO: 1641930 - RNA, 19 nt, Artificial Sequence
  Description of Artificial Sequence: Synthetic oligonucleotide
  Antisense strand to SEQ ID NO: 1641929
agcuucaacacacucuuca

SEQ ID NO: 1641931 - RNA, 19 nt, Artificial Sequence
  Description of Artificial Sequence: Synthetic oligonucleotide
  Sense strand starting at position 3387 of SEQ ID NO: 1561034
gaguguaccagguagacaa

SEQ ID NO: 1641932 - RNA, 19 nt, Artificial Sequence
  Description of Artificial Sequence: Synthetic oligonucleotide
  Antisense strand to SEQ ID NO: 1641931
uugucuaccugguacacuc

SEQ ID NO: 1641933 - RNA, 19 nt, Artificial Sequence
  Description of Artificial Sequence: Synthetic oligonucleotide
  Sense strand starting at position 3412 of SEQ ID NO: 1561034
gaagaacaguccgggcaaa

SEQ ID NO: 1641934 - RNA, 19 nt, Artificial Sequence
  Description of Artificial Sequence: Synthetic oligonucleotide
  Antisense strand to SEQ ID NO: 1641933
uuugcccggacuguucuuc

SEQ ID NO: 1641935 - RNA, 19 nt, Artificial Sequence
  Description of Artificial Sequence: Synthetic oligonucleotide
  Sense strand starting at position 3447 of SEQ ID NO: 1561034
agauaauaagcagguuuaa

SEQ ID NO: 1641936 - RNA, 19 nt, Artificial Sequence
  Description of Artificial Sequence: Synthetic oligonucleotide
  Antisense strand to SEQ ID NO: 1641935
uuaaaccugcuuauuaucu

SEQ ID NO: 1641937 - RNA, 19 nt, Artificial Sequence
  Description of Artificial Sequence: Synthetic oligonucleotide
  Sense strand starting at position 3769 of SEQ ID NO: 1561034
gagugagguucggucucaa

SEQ ID NO: 1641938 - RNA, 19 nt, Artificial Sequence
  Description of Artificial Sequence: Synthetic oligonucleotide
  Antisense strand to SEQ ID NO: 1641937
uugagaccgaaccucacuc

SEQ ID NO: 1641939 - RNA, 19 nt, Artificial Sequence
  Description of Artificial Sequence: Synthetic oligonucleotide
  Sense strand starting at position 3852 of SEQ ID NO: 1561034
gggugaaucaccuagguca

SEQ ID NO: 1641940 - RNA, 19 nt, Artificial Sequence
  Description of Artificial Sequence: Synthetic oligonucleotide
  Antisense strand to SEQ ID NO: 1641939
ugaccuaggugauucaccc

SEQ ID NO: 1641941 - RNA, 19 nt, Artificial Sequence
  Description of Artificial Sequence: Synthetic oligonucleotide
  Sense strand starting at position 3854 of SEQ ID NO: 1561034
gugaaucaccuaggucaga

SEQ ID NO: 1641942 - RNA, 19 nt, Artificial Sequence
  Description of Artificial Sequence: Synthetic oligonucleotide
  Antisense strand to SEQ ID NO: 1641941
ucugaccuaggugauucac

SEQ ID NO: 1641943 - RNA, 19 nt, Artificial Sequence
  Description of Artificial Sequence: Synthetic oligonucleotide
  Sense strand starting at position 3855 of SEQ ID NO: 1561034
ugaaucaccuaggucagaa

SEQ ID NO: 1641944 - RNA, 19 nt, Artificial Sequence
  Description of Artificial Sequence: Synthetic oligonucleotide
  Antisense strand to SEQ ID NO: 1641943
uucugaccuaggugauuca

SEQ ID NO: 1641945 - RNA, 19 nt, Artificial Sequence
  Description of Artificial Sequence: Synthetic oligonucleotide
  Sense strand starting at position 63 of SEQ ID NO: 1561035
gucugauacgugcuuugca

SEQ ID NO: 1641946 - RNA, 19 nt, Artificial Sequence
  Description of Artificial Sequence: Synthetic oligonucleotide
  Antisense strand to SEQ ID NO: 1641945
ugcaaagcacguaucagac

SEQ ID NO: 1641947 - RNA, 19 nt, Artificial Sequence
  Description of Artificial Sequence: Synthetic oligonucleotide
  Sense strand starting at position 72 of SEQ ID NO: 1561035
gugcuuugcagauaaggug

SEQ ID NO: 1641948 - RNA, 19 nt, Artificial Sequence
  Description of Artificial Sequence: Synthetic oligonucleotide
  Antisense strand to SEQ ID NO: 1641947
caccuuaucugcaaagcac

SEQ ID NO: 1641949 - RNA, 19 nt, Artificial Sequence
  Description of Artificial Sequence: Synthetic oligonucleotide
  Sense strand starting at position 528 of SEQ ID NO: 1561035
uguucaaggguauggugaa

SEQ ID NO: 1641950 - RNA, 19 nt, Artificial Sequence
  Description of Artificial Sequence: Synthetic oligonucleotide
  Antisense strand to SEQ ID NO: 1641949
uucaccauacccuugaaca

SEQ ID NO: 1641951 - RNA, 19 nt, Artificial Sequence
  Description of Artificial Sequence: Synthetic oligonucleotide
  Sense strand starting at position 540 of SEQ ID NO: 1561035
uggugaacucccuggccaa

SEQ ID NO: 1641952 - RNA, 19 nt, Artificial Sequence
  Description of Artificial Sequence: Synthetic oligonucleotide
  Antisense strand to SEQ ID NO: 1641951
uuggccagggaguucacca

SEQ ID NO: 1641953 - RNA, 19 nt, Artificial Sequence
  Description of Artificial Sequence: Synthetic oligonucleotide
  Sense strand starting at position 541 of SEQ ID NO: 1561035
ggugaacucccuggccaaa

SEQ ID NO: 1641954 - RNA, 19 nt, Artificial Sequence
  Description of Artificial Sequence: Synthetic oligonucleotide
  Antisense strand to SEQ ID NO: 1641953
uuuggccagggaguucacc

SEQ ID NO: 1641955 - RNA, 19 nt, Artificial Sequence
  Description of Artificial Sequence: Synthetic oligonucleotide
  Sense strand starting at position 649 of SEQ ID NO: 1561035
ggugaaugucguggccaaa

SEQ ID NO: 1641956 - RNA, 19 nt, Artificial Sequence
  Description of Artificial Sequence: Synthetic oligonucleotide
  Antisense strand to SEQ ID NO: 1641955
uuuggccacgacauucacc

SEQ ID NO: 1641957 - RNA, 19 nt, Artificial Sequence
  Description of Artificial Sequence: Synthetic oligonucleotide
  Sense strand starting at position 690 of SEQ ID NO: 1561035
ugacuaacgccaugaugga

SEQ ID NO: 1641958 - RNA, 19 nt, Artificial Sequence
  Description of Artificial Sequence: Synthetic oligonucleotide
  Antisense strand to SEQ ID NO: 1641957
uccaucauggcguuaguca

SEQ ID NO: 1641959 - RNA, 19 nt, Artificial Sequence
  Description of Artificial Sequence: Synthetic oligonucleotide
  Sense strand starting at position 1405 of SEQ ID NO: 1561035
gguggacucccuggccaaa

SEQ ID NO: 1641960 - RNA, 19 nt, Artificial Sequence
  Description of Artificial Sequence: Synthetic oligonucleotide
  Antisense strand to SEQ ID NO: 1641959
uuuggccagggaguccacc

SEQ ID NO: 1641961 - RNA, 19 nt, Artificial Sequence
  Description of Artificial Sequence: Synthetic oligonucleotide
  Sense strand starting at position 1611 of SEQ ID NO: 1561035
uguccaauaccaugguuga

SEQ ID NO: 1641962 - RNA, 19 nt, Artificial Sequence
  Description of Artificial Sequence: Synthetic oligonucleotide
  Antisense strand to SEQ ID NO: 1641961
ucaaccaugguauuggaca

SEQ ID NO: 1641963 - RNA, 19 nt, Artificial Sequence
  Description of Artificial Sequence: Synthetic oligonucleotide
  Sense strand starting at position 1612 of SEQ ID NO: 1561035
guccaauaccaugguugau

SEQ ID NO: 1641964 - RNA, 19 nt, Artificial Sequence
  Description of Artificial Sequence: Synthetic oligonucleotide
  Antisense strand to SEQ ID NO: 1641963
aucaaccaugguauuggac

SEQ ID NO: 1641965 - RNA, 19 nt, Artificial Sequence
  Description of Artificial Sequence: Synthetic oligonucleotide
  Sense strand starting at position 1624 of SEQ ID NO: 1561035
gguugaucucaugggcaac

SEQ ID NO: 1641966 - RNA, 19 nt, Artificial Sequence
  Description of Artificial Sequence: Synthetic oligonucleotide
  Antisense strand to SEQ ID NO: 1641965
guugcccaugagaucaacc

SEQ ID NO: 1641967 - RNA, 19 nt, Artificial Sequence
  Description of Artificial Sequence: Synthetic oligonucleotide
  Sense strand starting at position 1914 of SEQ ID NO: 1561035
agacgugcaagaugcauau

SEQ ID NO: 1641968 - RNA, 19 nt, Artificial Sequence
  Description of Artificial Sequence: Synthetic oligonucleotide
  Antisense strand to SEQ ID NO: 1641967
auaugcaucuugcacgucu

SEQ ID NO: 1641969 - RNA, 19 nt, Artificial Sequence
  Description of Artificial Sequence: Synthetic oligonucleotide
  Sense strand starting at position 1918 of SEQ ID NO: 1561035
gugcaagaugcauauugcu

SEQ ID NO: 1641970 - RNA, 19 nt, Artificial Sequence
  Description of Artificial Sequence: Synthetic oligonucleotide
  Antisense strand to SEQ ID NO: 1641969
agcaauaugcaucuugcac

SEQ ID NO: 1641971 - RNA, 19 nt, Artificial Sequence
  Description of Artificial Sequence: Synthetic oligonucleotide
  Sense strand starting at position 1923 of SEQ ID NO: 1561035
agaugcauauugcugggaa

SEQ ID NO: 1641972 - RNA, 19 nt, Artificial Sequence
  Description of Artificial Sequence: Synthetic oligonucleotide
  Antisense strand to SEQ ID NO: 1641971
uucccagcaauaugcaucu

SEQ ID NO: 1641973 - RNA, 19 nt, Artificial Sequence
  Description of Artificial Sequence: Synthetic oligonucleotide
  Sense strand starting at position 1926 of SEQ ID NO: 1561035
ugcauauugcugggaaggu

SEQ ID NO: 1641974 - RNA, 19 nt, Artificial Sequence
  Description of Artificial Sequence: Synthetic oligonucleotide
  Antisense strand to SEQ ID NO: 1641973
accuucccagcaauaugca

SEQ ID NO: 1641975 - RNA, 19 nt, Artificial Sequence
  Description of Artificial Sequence: Synthetic oligonucleotide
  Sense strand starting at position 2071 of SEQ ID NO: 1561035
agguguuucccagggagau

SEQ ID NO: 1641976 - RNA, 19 nt, Artificial Sequence
  Description of Artificial Sequence: Synthetic oligonucleotide
  Antisense strand to SEQ ID NO: 1641975
aucucccugggaaacaccu

SEQ ID NO: 1641977 - RNA, 19 nt, Artificial Sequence
  Description of Artificial Sequence: Synthetic oligonucleotide
  Sense strand starting at position 2072 of SEQ ID NO: 1561035
gguguuucccagggagauu

SEQ ID NO: 1641978 - RNA, 19 nt, Artificial Sequence
  Description of Artificial Sequence: Synthetic oligonucleotide
  Antisense strand to SEQ ID NO: 1641977
aaucucccugggaaacacc

SEQ ID NO: 1641979 - RNA, 19 nt, Artificial Sequence
  Description of Artificial Sequence: Synthetic oligonucleotide
  Sense strand starting at position 2092 of SEQ ID NO: 1561035
ggaguugagcaauggagag

SEQ ID NO: 1641980 - RNA, 19 nt, Artificial Sequence
  Description of Artificial Sequence: Synthetic oligonucleotide
  Antisense strand to SEQ ID NO: 1641979
cucuccauugcucaacucc

SEQ ID NO: 1641981 - RNA, 19 nt, Artificial Sequence
  Description of Artificial Sequence: Synthetic oligonucleotide
  Sense strand starting at position 2123 of SEQ ID NO: 1561035
agggugagucauggaugga

SEQ ID NO: 1641982 - RNA, 19 nt, Artificial Sequence
  Description of Artificial Sequence: Synthetic oligonucleotide
  Antisense strand to SEQ ID NO: 1641981
uccauccaugacucacccu

SEQ ID NO: 1641983 - RNA, 19 nt, Artificial Sequence
  Description of Artificial Sequence: Synthetic oligonucleotide
  Sense strand starting at position 2126 of SEQ ID NO: 1561035
gugagucauggauggagaa

SEQ ID NO: 1641984 - RNA, 19 nt, Artificial Sequence
  Description of Artificial Sequence: Synthetic oligonucleotide
  Antisense strand to SEQ ID NO: 1641983
uucuccauccaugacucac

SEQ ID NO: 1641985 - RNA, 19 nt, Artificial Sequence
  Description of Artificial Sequence: Synthetic oligonucleotide
  Sense strand starting at position 2139 of SEQ ID NO: 1561035
ggagaagaacucuggcauc

SEQ ID NO: 1641986 - RNA, 19 nt, Artificial Sequence
  Description of Artificial Sequence: Synthetic oligonucleotide
  Antisense strand to SEQ ID NO: 1641985
gaugccagaguucuucucc

SEQ ID NO: 1641987 - RNA, 19 nt, Artificial Sequence
  Description of Artificial Sequence: Synthetic oligonucleotide
  Sense strand starting at position 2410 of SEQ ID NO: 1561035
gucaucagaccucguucuu

SEQ ID NO: 1641988 - RNA, 19 nt, Artificial Sequence
  Description of Artificial Sequence: Synthetic oligonucleotide
  Antisense strand to SEQ ID NO: 1641987
aagaacgaggucugaugac

SEQ ID NO: 1641989 - RNA, 19 nt, Artificial Sequence
  Description of Artificial Sequence: Synthetic oligonucleotide
  Sense strand starting at position 2589 of SEQ ID NO: 1561035
auccguacuugacuuaaau

SEQ ID NO: 1641990 - RNA, 19 nt, Artificial Sequence
  Description of Artificial Sequence: Synthetic oligonucleotide
  Antisense strand to SEQ ID NO: 1641989
auuuaagucaaguacggau

SEQ ID NO: 1641991 - RNA, 19 nt, Artificial Sequence
  Description of Artificial Sequence: Synthetic oligonucleotide
  Sense strand starting at position 2633 of SEQ ID NO: 1561035
ugaccauaacauggcauua

SEQ ID NO: 1641992 - RNA, 19 nt, Artificial Sequence
  Description of Artificial Sequence: Synthetic oligonucleotide
  Antisense strand to SEQ ID NO: 1641991
uaaugccauguuaugguca

SEQ ID NO: 1641993 - RNA, 19 nt, Artificial Sequence
  Description of Artificial Sequence: Synthetic oligonucleotide
  Sense strand starting at position 2925 of SEQ ID NO: 1561035
cauagagucccuuguggag

SEQ ID NO: 1641994 - RNA, 19 nt, Artificial Sequence
  Description of Artificial Sequence: Synthetic oligonucleotide
  Antisense strand to SEQ ID NO: 1641993
cuccacaagggacucuaug

SEQ ID NO: 1641995 - RNA, 19 nt, Artificial Sequence
  Description of Artificial Sequence: Synthetic oligonucleotide
  Sense strand starting at position 2937 of SEQ ID NO: 1561035
uguggagugccgcagauuu

SEQ ID NO: 1641996 - RNA, 19 nt, Artificial Sequence
  Description of Artificial Sequence: Synthetic oligonucleotide
  Antisense strand to SEQ ID NO: 1641995
aaaucugcggcacuccaca

SEQ ID NO: 1641997 - RNA, 19 nt, Artificial Sequence
  Description of Artificial Sequence: Synthetic oligonucleotide
  Sense strand starting at position 3051 of SEQ ID NO: 1561035
gacgcagugucuccugaaa

SEQ ID NO: 1641998 - RNA, 19 nt, Artificial Sequence
  Description of Artificial Sequence: Synthetic oligonucleotide
  Antisense strand to SEQ ID NO: 1641997
uuucaggagacacugcguc

SEQ ID NO: 1641999 - RNA, 19 nt, Artificial Sequence
  Description of Artificial Sequence: Synthetic oligonucleotide
  Sense strand starting at position 3216 of SEQ ID NO: 1561035
gacauauuggcucggguug

SEQ ID NO: 1642000 - RNA, 19 nt, Artificial Sequence
  Description of Artificial Sequence: Synthetic oligonucleotide
  Antisense strand to SEQ ID NO: 1641999
caacccgagccaauauguc

SEQ ID NO: 1642001 - RNA, 19 nt, Artificial Sequence
  Description of Artificial Sequence: Synthetic oligonucleotide
  Sense strand starting at position 3254 of SEQ ID NO: 1561035
ucuggccucaggcaugaaa

SEQ ID NO: 1642002 - RNA, 19 nt, Artificial Sequence
  Description of Artificial Sequence: Synthetic oligonucleotide
  Antisense strand to SEQ ID NO: 1642001
uuucaugccugaggccaga

SEQ ID NO: 1642003 - RNA, 19 nt, Artificial Sequence
  Description of Artificial Sequence: Synthetic oligonucleotide
  Sense strand starting at position 3545 of SEQ ID NO: 1561035
gcgagaaucugcacguguu

SEQ ID NO: 1642004 - RNA, 19 nt, Artificial Sequence
  Description of Artificial Sequence: Synthetic oligonucleotide
  Antisense strand to SEQ ID NO: 1642003
aacacgugcagauucucgc

SEQ ID NO: 1642005 - RNA, 19 nt, Artificial Sequence
  Description of Artificial Sequence: Synthetic oligonucleotide
  Sense strand starting at position 3565 of SEQ ID NO: 1561035
ucaggcuuugcucaaacaa

SEQ ID NO: 1642006 - RNA, 19 nt, Artificial Sequence
  Description of Artificial Sequence: Synthetic oligonucleotide
  Antisense strand to SEQ ID NO: 1642005
uuguuugagcaaagccuga

SEQ ID NO: 1642007 - RNA, 19 nt, Artificial Sequence
  Description of Artificial Sequence: Synthetic oligonucleotide
  Sense strand starting at position 3708 of SEQ ID NO: 1561035
gccuauagagggugacuaa

SEQ ID NO: 1642008 - RNA, 19 nt, Artificial Sequence
  Description of Artificial Sequence: Synthetic oligonucleotide
  Antisense strand to SEQ ID NO: 1642007
uuagucacccucuauaggc

SEQ ID NO: 1642009 - RNA, 19 nt, Artificial Sequence
  Description of Artificial Sequence: Synthetic oligonucleotide
  Sense strand starting at position 3744 of SEQ ID NO: 1561035
gcuugagcucaucaaaucu

SEQ ID NO: 1642010 - RNA, 19 nt, Artificial Sequence
  Description of Artificial Sequence: Synthetic oligonucleotide
  Antisense strand to SEQ ID NO: 1642009
agauuugaugagcucaagc

SEQ ID NO: 1642011 - RNA, 19 nt, Artificial Sequence
  Description of Artificial Sequence: Synthetic oligonucleotide
  Sense strand starting at position 3791 of SEQ ID NO: 1561035
agccaaauuccugggcaaa

SEQ ID NO: 1642012 - RNA, 19 nt, Artificial Sequence
  Description of Artificial Sequence: Synthetic oligonucleotide
  Antisense strand to SEQ ID NO: 1642011
uuugcccaggaauuuggcu

SEQ ID NO: 1642013 - RNA, 19 nt, Artificial Sequence
  Description of Artificial Sequence: Synthetic oligonucleotide
  Sense strand starting at position 3792 of SEQ ID NO: 1561035
gccaaauuccugggcaaac

SEQ ID NO: 1642014 - RNA, 19 nt, Artificial Sequence
  Description of Artificial Sequence: Synthetic oligonucleotide
  Antisense strand to SEQ ID NO: 1642013
guuugcccaggaauuuggc

SEQ ID NO: 1642015 - RNA, 19 nt, Artificial Sequence
  Description of Artificial Sequence: Synthetic oligonucleotide
  Sense strand starting at position 3793 of SEQ ID NO: 1561035
ccaaauuccugggcaaacu

SEQ ID NO: 1642016 - RNA, 19 nt, Artificial Sequence
  Description of Artificial Sequence: Synthetic oligonucleotide
  Antisense strand to SEQ ID NO: 1642015
aguuugcccaggaauuugg

SEQ ID NO: 1642017 - RNA, 19 nt, Artificial Sequence
  Description of Artificial Sequence: Synthetic oligonucleotide
  Sense strand starting at position 3804 of SEQ ID NO: 1561035
ggcaaacucaggugugguu

SEQ ID NO: 1642018 - RNA, 19 nt, Artificial Sequence
  Description of Artificial Sequence: Synthetic oligonucleotide
  Antisense strand to SEQ ID NO: 1642017
aaccacaccugaguuugcc

SEQ ID NO: 1642019 - RNA, 19 nt, Artificial Sequence
  Description of Artificial Sequence: Synthetic oligonucleotide
  Sense strand starting at position 3840 of SEQ ID NO: 1561035
ggccgaaaugauggaguuu

SEQ ID NO: 1642020 - RNA, 19 nt, Artificial Sequence
  Description of Artificial Sequence: Synthetic oligonucleotide
  Antisense strand to SEQ ID NO: 1642019
aaacuccaucauuucggcc

SEQ ID NO: 1642021 - RNA, 19 nt, Artificial Sequence
  Description of Artificial Sequence: Synthetic oligonucleotide
  Sense strand starting at position 3890 of SEQ ID NO: 1561035
gugggugaugagugucaga

SEQ ID NO: 1642022 - RNA, 19 nt, Artificial Sequence
  Description of Artificial Sequence: Synthetic oligonucleotide
  Antisense strand to SEQ ID NO: 1642021
ucugacacucaucacccac

SEQ ID NO: 1642023 - RNA, 19 nt, Artificial Sequence
  Description of Artificial Sequence: Synthetic oligonucleotide
  Sense strand starting at position 3936 of SEQ ID NO: 1561035
ugggauuucucccacuuug

SEQ ID NO: 1642024 - RNA, 19 nt, Artificial Sequence
  Description of Artificial Sequence: Synthetic oligonucleotide
  Antisense strand to SEQ ID NO: 1642023
caaagugggagaaauccca

SEQ ID NO: 1642025 - RNA, 19 nt, Artificial Sequence
  Description of Artificial Sequence: Synthetic oligonucleotide
  Sense strand starting at position 9 of SEQ ID NO: 1561036
auuguaaaugcacgaaaua

SEQ ID NO: 1642026 - RNA, 19 nt, Artificial Sequence
  Description of Artificial Sequence: Synthetic oligonucleotide
  Antisense strand to SEQ ID NO: 1642025
uauuucgugcauuuacaau

SEQ ID NO: 1642027 - RNA, 19 nt, Artificial Sequence
  Description of Artificial Sequence: Synthetic oligonucleotide
  Sense strand starting at position 42 of SEQ ID NO: 1561036
agagaauggcugugaauac

SEQ ID NO: 1642028 - RNA, 19 nt, Artificial Sequence
  Description of Artificial Sequence: Synthetic oligonucleotide
  Antisense strand to SEQ ID NO: 1642027
guauucacagccauucucu

SEQ ID NO: 1642029 - RNA, 19 nt, Artificial Sequence
  Description of Artificial Sequence: Synthetic oligonucleotide
  Sense strand starting at position 96 of SEQ ID NO: 1561036
ucaagugcucaauacggau

SEQ ID NO: 1642030 - RNA, 19 nt, Artificial Sequence
  Description of Artificial Sequence: Synthetic oligonucleotide
  Antisense strand to SEQ ID NO: 1642029
auccguauugagcacuuga

SEQ ID NO: 1642031 - RNA, 19 nt, Artificial Sequence
  Description of Artificial Sequence: Synthetic oligonucleotide
  Sense strand starting at position 102 of SEQ ID NO: 1561036
gcucaauacggaugaagag

SEQ ID NO: 1642032 - RNA, 19 nt, Artificial Sequence
  Description of Artificial Sequence: Synthetic oligonucleotide
  Antisense strand to SEQ ID NO: 1642031
cucuucauccguauugagc

SEQ ID NO: 1642033 - RNA, 19 nt, Artificial Sequence
  Description of Artificial Sequence: Synthetic oligonucleotide
  Sense strand starting at position 209 of SEQ ID NO: 1561036
gguccuguucuagauccca

SEQ ID NO: 1642034 - RNA, 19 nt, Artificial Sequence
  Description of Artificial Sequence: Synthetic oligonucleotide
  Antisense strand to SEQ ID NO: 1642033
ugggaucuagaacaggacc

SEQ ID NO: 1642035 - RNA, 19 nt, Artificial Sequence
  Description of Artificial Sequence: Synthetic oligonucleotide
  Sense strand starting at position 509 of SEQ ID NO: 1561036
augcuugcuugcucauuua

SEQ ID NO: 1642036 - RNA, 19 nt, Artificial Sequence
  Description of Artificial Sequence: Synthetic oligonucleotide
  Antisense strand to SEQ ID NO: 1642035
uaaaugagcaagcaagcau

SEQ ID NO: 1642037 - RNA, 19 nt, Artificial Sequence
  Description of Artificial Sequence: Synthetic oligonucleotide
  Sense strand starting at position 512 of SEQ ID NO: 1561036
cuugcuugcucauuuagaa

SEQ ID NO: 1642038 - RNA, 19 nt, Artificial Sequence
  Description of Artificial Sequence: Synthetic oligonucleotide
  Antisense strand to SEQ ID NO: 1642037
uucuaaaugagcaagcaag

SEQ ID NO: 1642039 - RNA, 19 nt, Artificial Sequence
  Description of Artificial Sequence: Synthetic oligonucleotide
  Sense strand starting at position 563 of SEQ ID NO: 1561036
cugagaucuucugaacaga

SEQ ID NO: 1642040 - RNA, 19 nt, Artificial Sequence
  Description of Artificial Sequence: Synthetic oligonucleotide
  Antisense strand to SEQ ID NO: 1642039
ucuguucagaagaucucag

SEQ ID NO: 1642041 - RNA, 19 nt, Artificial Sequence
  Description of Artificial Sequence: Synthetic oligonucleotide
  Sense strand starting at position 579 of SEQ ID NO: 1561036
agaagaaugcucugcagau

SEQ ID NO: 1642042 - RNA, 19 nt, Artificial Sequence
  Description of Artificial Sequence: Synthetic oligonucleotide
  Antisense strand to SEQ ID NO: 1642041
aucugcagagcauucuucu

SEQ ID NO: 1642043 - RNA, 19 nt, Artificial Sequence
  Description of Artificial Sequence: Synthetic oligonucleotide
  Sense strand starting at position 580 of SEQ ID NO: 1561036
gaagaaugcucugcagaua

SEQ ID NO: 1642044 - RNA, 19 nt, Artificial Sequence
  Description of Artificial Sequence: Synthetic oligonucleotide
  Antisense strand to SEQ ID NO: 1642043
uaucugcagagcauucuuc

SEQ ID NO: 1642045 - RNA, 19 nt, Artificial Sequence
  Description of Artificial Sequence: Synthetic oligonucleotide
  Sense strand starting at position 604 of SEQ ID NO: 1561036
agguccuaucuggaucagu

SEQ ID NO: 1642046 - RNA, 19 nt, Artificial Sequence
  Description of Artificial Sequence: Synthetic oligonucleotide
  Antisense strand to SEQ ID NO: 1642045
acugauccagauaggaccu

SEQ ID NO: 1642047 - RNA, 19 nt, Artificial Sequence
  Description of Artificial Sequence: Synthetic oligonucleotide
  Sense strand starting at position 720 of SEQ ID NO: 1561036
caaguaguaaguggaaaug

SEQ ID NO: 1642048 - RNA, 19 nt, Artificial Sequence
  Description of Artificial Sequence: Synthetic oligonucleotide
  Antisense strand to SEQ ID NO: 1642047
cauuuccacuuacuacuug

SEQ ID NO: 1642049 - RNA, 19 nt, Artificial Sequence
  Description of Artificial Sequence: Synthetic oligonucleotide
  Sense strand starting at position 736 of SEQ ID NO: 1561036
augucaauucguggaaggu

SEQ ID NO: 1642050 - RNA, 19 nt, Artificial Sequence
  Description of Artificial Sequence: Synthetic oligonucleotide
  Antisense strand to SEQ ID NO: 1642049
accuuccacgaauugacau

SEQ ID NO: 1642051 - RNA, 19 nt, Artificial Sequence
  Description of Artificial Sequence: Synthetic oligonucleotide
  Sense strand starting at position 737 of SEQ ID NO: 1561036
ugucaauucguggaaggug

SEQ ID NO: 1642052 - RNA, 19 nt, Artificial Sequence
  Description of Artificial Sequence: Synthetic oligonucleotide
  Antisense strand to SEQ ID NO: 1642051
caccuuccacgaauugaca

SEQ ID NO: 1642053 - RNA, 19 nt, Artificial Sequence
  Description of Artificial Sequence: Synthetic oligonucleotide
  Sense strand starting at position 738 of SEQ ID NO: 1561036
gucaauucguggaagguga

SEQ ID NO: 1642054 - RNA, 19 nt, Artificial Sequence
  Description of Artificial Sequence: Synthetic oligonucleotide
  Antisense strand to SEQ ID NO: 1642053
ucaccuuccacgaauugac

SEQ ID NO: 1642055 - RNA, 19 nt, Artificial Sequence
  Description of Artificial Sequence: Synthetic oligonucleotide
  Sense strand starting at position 742 of SEQ ID NO: 1561036
auucguggaaggugaguua

SEQ ID NO: 1642056 - RNA, 19 nt, Artificial Sequence
  Description of Artificial Sequence: Synthetic oligonucleotide
  Antisense strand to SEQ ID NO: 1642055
uaacucaccuuccacgaau

SEQ ID NO: 1642057 - RNA, 19 nt, Artificial Sequence
  Description of Artificial Sequence: Synthetic oligonucleotide
  Sense strand starting at position 884 of SEQ ID NO: 1561036
cuguaauagugggucuaga

SEQ ID NO: 1642058 - RNA, 19 nt, Artificial Sequence
  Description of Artificial Sequence: Synthetic oligonucleotide
  Antisense strand to SEQ ID NO: 1642057
ucuagacccacuauuacag

SEQ ID NO: 1642059 - RNA, 19 nt, Artificial Sequence
  Description of Artificial Sequence: Synthetic oligonucleotide
  Sense strand starting at position 961 of SEQ ID NO: 1561036
caggguaaugcagaaucuu

SEQ ID NO: 1642060 - RNA, 19 nt, Artificial Sequence
  Description of Artificial Sequence: Synthetic oligonucleotide
  Antisense strand to SEQ ID NO: 1642059
aagauucugcauuacccug

SEQ ID NO: 1642061 - RNA, 19 nt, Artificial Sequence
  Description of Artificial Sequence: Synthetic oligonucleotide
  Sense strand starting at position 1017 of SEQ ID NO: 1561036
guauaucuaagcugggcaa

SEQ ID NO: 1642062 - RNA, 19 nt, Artificial Sequence
  Description of Artificial Sequence: Synthetic oligonucleotide
  Antisense strand to SEQ ID NO: 1642061
uugcccagcuuagauauac

SEQ ID NO: 1642063 - RNA, 19 nt, Artificial Sequence
  Description of Artificial Sequence: Synthetic oligonucleotide
  Sense strand starting at position 1045 of SEQ ID NO: 1561036
auucucuuuccguauuauu

SEQ ID NO: 1642064 - RNA, 19 nt, Artificial Sequence
  Description of Artificial Sequence: Synthetic oligonucleotide
  Antisense strand to SEQ ID NO: 1642063
aauaauacggaaagagaau

SEQ ID NO: 1642065 - RNA, 19 nt, Artificial Sequence
  Description of Artificial Sequence: Synthetic oligonucleotide
  Sense strand starting at position 1056 of SEQ ID NO: 1561036
guauuauuauucgccacaa

SEQ ID NO: 1642066 - RNA, 19 nt, Artificial Sequence
  Description of Artificial Sequence: Synthetic oligonucleotide
  Antisense strand to SEQ ID NO: 1642065
uuguggcgaauaauaauac

SEQ ID NO: 1642067 - RNA, 19 nt, Artificial Sequence
  Description of Artificial Sequence: Synthetic oligonucleotide
  Sense strand starting at position 1187 of SEQ ID NO: 1561036
ccugucacccauuauuaga

SEQ ID NO: 1642068 - RNA, 19 nt, Artificial Sequence
  Description of Artificial Sequence: Synthetic oligonucleotide
  Antisense strand to SEQ ID NO: 1642067
ucuaauaaugggugacagg

SEQ ID NO: 1642069 - RNA, 19 nt, Artificial Sequence
  Description of Artificial Sequence: Synthetic oligonucleotide
  Sense strand starting at position 1325 of SEQ ID NO: 1561036
uccuucuaggccugauaaa

SEQ ID NO: 1642070 - RNA, 19 nt, Artificial Sequence
  Description of Artificial Sequence: Synthetic oligonucleotide
  Antisense strand to SEQ ID NO: 1642069
uuuaucaggccuagaagga

SEQ ID NO: 1642071 - RNA, 19 nt, Artificial Sequence
  Description of Artificial Sequence: Synthetic oligonucleotide
  Sense strand starting at position 1326 of SEQ ID NO: 1561036
ccuucuaggccugauaaau

SEQ ID NO: 1642072 - RNA, 19 nt, Artificial Sequence
  Description of Artificial Sequence: Synthetic oligonucleotide
  Antisense strand to SEQ ID NO: 1642071
auuuaucaggccuagaagg

SEQ ID NO: 1642073 - RNA, 19 nt, Artificial Sequence
  Description of Artificial Sequence: Synthetic oligonucleotide
  Sense strand starting at position 1350 of SEQ ID NO: 1561036
cagacuuaugcagaccagu

SEQ ID NO: 1642074 - RNA, 19 nt, Artificial Sequence
  Description of Artificial Sequence: Synthetic oligonucleotide
  Antisense strand to SEQ ID NO: 1642073
acuggucugcauaagucug

SEQ ID NO: 1642075 - RNA, 19 nt, Artificial Sequence
  Description of Artificial Sequence: Synthetic oligonucleotide
  Sense strand starting at position 1425 of SEQ ID NO: 1561036
gccucuagauggcucugaa

SEQ ID NO: 1642076 - RNA, 19 nt, Artificial Sequence
  Description of Artificial Sequence: Synthetic oligonucleotide
  Antisense strand to SEQ ID NO: 1642075
uucagagccaucuagaggc

SEQ ID NO: 1642077 - RNA, 19 nt, Artificial Sequence
  Description of Artificial Sequence: Synthetic oligonucleotide
  Sense strand starting at position 1428 of SEQ ID NO: 1561036
ucuagauggcucugaagau

SEQ ID NO: 1642078 - RNA, 19 nt, Artificial Sequence
  Description of Artificial Sequence: Synthetic oligonucleotide
  Antisense strand to SEQ ID NO: 1642077
aucuucagagccaucuaga

SEQ ID NO: 1642079 - RNA, 19 nt, Artificial Sequence
  Description of Artificial Sequence: Synthetic oligonucleotide
  Sense strand starting at position 2047 of SEQ ID NO: 1561036
cucgguuucccagaagcca

SEQ ID NO: 1642080 - RNA, 19 nt, Artificial Sequence
  Description of Artificial Sequence: Synthetic oligonucleotide
  Antisense strand to SEQ ID NO: 1642079
uggcuucugggaaaccgag

SEQ ID NO: 1642081 - RNA, 19 nt, Artificial Sequence
  Description of Artificial Sequence: Synthetic oligonucleotide
  Sense strand starting at position 2561 of SEQ ID NO: 1561036
gcaggcggaucaucugaua

SEQ ID NO: 1642082 - RNA, 19 nt, Artificial Sequence
  Description of Artificial Sequence: Synthetic oligonucleotide
  Antisense strand to SEQ ID NO: 1642081
uaucagaugauccgccugc

SEQ ID NO: 1642083 - RNA, 19 nt, Artificial Sequence
  Description of Artificial Sequence: Synthetic oligonucleotide
  Sense strand starting at position 2857 of SEQ ID NO: 1561036
uacagagaagucugaauuc

SEQ ID NO: 1642084 - RNA, 19 nt, Artificial Sequence
  Description of Artificial Sequence: Synthetic oligonucleotide
  Antisense strand to SEQ ID NO: 1642083
gaauucagacuucucugua

SEQ ID NO: 1642085 - RNA, 19 nt, Artificial Sequence
  Description of Artificial Sequence: Synthetic oligonucleotide
  Sense strand starting at position 2928 of SEQ ID NO: 1561036
gacucaggagucugauucu

SEQ ID NO: 1642086 - RNA, 19 nt, Artificial Sequence
  Description of Artificial Sequence: Synthetic oligonucleotide
  Antisense strand to SEQ ID NO: 1642085
agaaucagacuccugaguc

SEQ ID NO: 1642087 - RNA, 19 nt, Artificial Sequence
  Description of Artificial Sequence: Synthetic oligonucleotide
  Sense strand starting at position 2966 of SEQ ID NO: 1561036
gucggucucccagacuagu

SEQ ID NO: 1642088 - RNA, 19 nt, Artificial Sequence
  Description of Artificial Sequence: Synthetic oligonucleotide
  Antisense strand to SEQ ID NO: 1642087
acuagucugggagaccgac

SEQ ID NO: 1642089 - RNA, 19 nt, Artificial Sequence
  Description of Artificial Sequence: Synthetic oligonucleotide
  Sense strand starting at position 2976 of SEQ ID NO: 1561036
cagacuaguccuggucuca

SEQ ID NO: 1642090 - RNA, 19 nt, Artificial Sequence
  Description of Artificial Sequence: Synthetic oligonucleotide
  Antisense strand to SEQ ID NO: 1642089
ugagaccaggacuagucug

SEQ ID NO: 1642091 - RNA, 19 nt, Artificial Sequence
  Description of Artificial Sequence: Synthetic oligonucleotide
  Sense strand starting at position 3129 of SEQ ID NO: 1561036
gaaggaaccugucuaccuu

SEQ ID NO: 1642092 - RNA, 19 nt, Artificial Sequence
  Description of Artificial Sequence: Synthetic oligonucleotide
  Antisense strand to SEQ ID NO: 1642091
aagguagacagguuccuuc

SEQ ID NO: 1642093 - RNA, 19 nt, Artificial Sequence
  Description of Artificial Sequence: Synthetic oligonucleotide
  Sense strand starting at position 3455 of SEQ ID NO: 1561036
cggagacucuagcuucuaa

SEQ ID NO: 1642094 - RNA, 19 nt, Artificial Sequence
  Description of Artificial Sequence: Synthetic oligonucleotide
  Antisense strand to SEQ ID NO: 1642093
uuagaagcuagagucuccg

SEQ ID NO: 1642095 - RNA, 19 nt, Artificial Sequence
  Description of Artificial Sequence: Synthetic oligonucleotide
  Sense strand starting at position 3488 of SEQ ID NO: 1561036
ucgaaagcuuggcuaggau

SEQ ID NO: 1642096 - RNA, 19 nt, Artificial Sequence
  Description of Artificial Sequence: Synthetic oligonucleotide
  Antisense strand to SEQ ID NO: 1642095
auccuagccaagcuuucga

SEQ ID NO: 1642097 - RNA, 19 nt, Artificial Sequence
  Description of Artificial Sequence: Synthetic oligonucleotide
  Sense strand starting at position 3780 of SEQ ID NO: 1561036
acaggucucucauuagcau

SEQ ID NO: 1642098 - RNA, 19 nt, Artificial Sequence
  Description of Artificial Sequence: Synthetic oligonucleotide
  Antisense strand to SEQ ID NO: 1642097
augcuaaugagagaccugu

SEQ ID NO: 1642099 - RNA, 19 nt, Artificial Sequence
  Description of Artificial Sequence: Synthetic oligonucleotide
  Sense strand starting at position 3889 of SEQ ID NO: 1561036
cuccuuaaguguccggaga

SEQ ID NO: 1642100 - RNA, 19 nt, Artificial Sequence
  Description of Artificial Sequence: Synthetic oligonucleotide
  Antisense strand to SEQ ID NO: 1642099
ucuccggacacuuaaggag

SEQ ID NO: 1642101 - RNA, 19 nt, Artificial Sequence
  Description of Artificial Sequence: Synthetic oligonucleotide
  Sense strand starting at position 3919 of SEQ ID NO: 1561036
cuugccagagcucaugauu

SEQ ID NO: 1642102 - RNA, 19 nt, Artificial Sequence
  Description of Artificial Sequence: Synthetic oligonucleotide
  Antisense strand to SEQ ID NO: 1642101
aaucaugagcucuggcaag

SEQ ID NO: 1642103 - RNA, 19 nt, Artificial Sequence
  Description of Artificial Sequence: Synthetic oligonucleotide
  Sense strand starting at position 3922 of SEQ ID NO: 1561036
gccagagcucaugauuaug

SEQ ID NO: 1642104 - RNA, 19 nt, Artificial Sequence
  Description of Artificial Sequence: Synthetic oligonucleotide
  Antisense strand to SEQ ID NO: 1642103
cauaaucaugagcucuggc

SEQ ID NO: 1642105 - RNA, 19 nt, Artificial Sequence
  Description of Artificial Sequence: Synthetic oligonucleotide
  Sense strand starting at position 472 of SEQ ID NO: 1561037
gggcuuguuucuuuacaca

SEQ ID NO: 1642106 - RNA, 19 nt, Artificial Sequence
  Description of Artificial Sequence: Synthetic oligonucleotide
  Antisense strand to SEQ ID NO: 1642105
uguguaaagaaacaagccc

SEQ ID NO: 1642107 - RNA, 19 nt, Artificial Sequence
  Description of Artificial Sequence: Synthetic oligonucleotide
  Sense strand starting at position 802 of SEQ ID NO: 1561037
cggcgcuacacguauguau

SEQ ID NO: 1642108 - RNA, 19 nt, Artificial Sequence
  Description of Artificial Sequence: Synthetic oligonucleotide
  Antisense strand to SEQ ID NO: 1642107
auacauacguguagcgccg

SEQ ID NO: 1642109 - RNA, 19 nt, Artificial Sequence
  Description of Artificial Sequence: Synthetic oligonucleotide
  Sense strand starting at position 804 of SEQ ID NO: 1561037
gcgcuacacguauguauuu

SEQ ID NO: 1642110 - RNA, 19 nt, Artificial Sequence
  Description of Artificial Sequence: Synthetic oligonucleotide
  Antisense strand to SEQ ID NO: 1642109
aaauacauacguguagcgc

SEQ ID NO: 1642111 - RNA, 19 nt, Artificial Sequence
  Description of Artificial Sequence: Synthetic oligonucleotide
  Sense strand starting at position 1018 of SEQ ID NO: 1561037
gagugagucuugcuagcuu

SEQ ID NO: 1642112 - RNA, 19 nt, Artificial Sequence
  Description of Artificial Sequence: Synthetic oligonucleotide
  Antisense strand to SEQ ID NO: 1642111
aagcuagcaagacucacuc

SEQ ID NO: 1642113 - RNA, 19 nt, Artificial Sequence
  Description of Artificial Sequence: Synthetic oligonucleotide
  Sense strand starting at position 1033 of SEQ ID NO: 1561037
gcuugcucagccuggagua

SEQ ID NO: 1642114 - RNA, 19 nt, Artificial Sequence
  Description of Artificial Sequence: Synthetic oligonucleotide
  Antisense strand to SEQ ID NO: 1642113
uacuccaggcugagcaagc

SEQ ID NO: 1642115 - RNA, 19 nt, Artificial Sequence
  Description of Artificial Sequence: Synthetic oligonucleotide
  Sense strand starting at position 1310 of SEQ ID NO: 1561037
cggagucgauccucuguuu

SEQ ID NO: 1642116 - RNA, 19 nt, Artificial Sequence
  Description of Artificial Sequence: Synthetic oligonucleotide
  Antisense strand to SEQ ID NO: 1642115
aaacagaggaucgacuccg

SEQ ID NO: 1642117 - RNA, 19 nt, Artificial Sequence
  Description of Artificial Sequence: Synthetic oligonucleotide
  Sense strand starting at position 1344 of SEQ ID NO: 1561037
ggaggccuucucugcaaga

SEQ ID NO: 1642118 - RNA, 19 nt, Artificial Sequence
  Description of Artificial Sequence: Synthetic oligonucleotide
  Antisense strand to SEQ ID NO: 1642117
ucuugcagagaaggccucc

SEQ ID NO: 1642119 - RNA, 19 nt, Artificial Sequence
  Description of Artificial Sequence: Synthetic oligonucleotide
  Sense strand starting at position 1346 of SEQ ID NO: 1561037
aggccuucucugcaagaca

SEQ ID NO: 1642120 - RNA, 19 nt, Artificial Sequence
  Description of Artificial Sequence: Synthetic oligonucleotide
  Antisense strand to SEQ ID NO: 1642119
ugucuugcagagaaggccu

SEQ ID NO: 1642121 - RNA, 19 nt, Artificial Sequence
  Description of Artificial Sequence: Synthetic oligonucleotide
  Sense strand starting at position 1385 of SEQ ID NO: 1561037
ggguagugugugggagaua

SEQ ID NO: 1642122 - RNA, 19 nt, Artificial Sequence
  Description of Artificial Sequence: Synthetic oligonucleotide
  Antisense strand to SEQ ID NO: 1642121
uaucucccacacacuaccc

SEQ ID NO: 1642123 - RNA, 19 nt, Artificial Sequence
  Description of Artificial Sequence: Synthetic oligonucleotide
  Sense strand starting at position 1386 of SEQ ID NO: 1561037
gguagugugugggagauaa

SEQ ID NO: 1642124 - RNA, 19 nt, Artificial Sequence
  Description of Artificial Sequence: Synthetic oligonucleotide
  Antisense strand to SEQ ID NO: 1642123
uuaucucccacacacuacc

SEQ ID NO: 1642125 - RNA, 19 nt, Artificial Sequence
  Description of Artificial Sequence: Synthetic oligonucleotide
  Sense strand starting at position 1388 of SEQ ID NO: 1561037
uagugugugggagauaacu

SEQ ID NO: 1642126 - RNA, 19 nt, Artificial Sequence
  Description of Artificial Sequence: Synthetic oligonucleotide
  Antisense strand to SEQ ID NO: 1642125
aguuaucucccacacacua

SEQ ID NO: 1642127 - RNA, 19 nt, Artificial Sequence
  Description of Artificial Sequence: Synthetic oligonucleotide
  Sense strand starting at position 1890 of SEQ ID NO: 1561037
gaagucugagccuggagaa

SEQ ID NO: 1642128 - RNA, 19 nt, Artificial Sequence
  Description of Artificial Sequence: Synthetic oligonucleotide
  Antisense strand to SEQ ID NO: 1642127
uucuccaggcucagacuuc

SEQ ID NO: 1642129 - RNA, 19 nt, Artificial Sequence
  Description of Artificial Sequence: Synthetic oligonucleotide
  Sense strand starting at position 1926 of SEQ ID NO: 1561037
gcgcgcuuaccugagggau

SEQ ID NO: 1642130 - RNA, 19 nt, Artificial Sequence
  Description of Artificial Sequence: Synthetic oligonucleotide
  Antisense strand to SEQ ID NO: 1642129
aucccucagguaagcgcgc

SEQ ID NO: 1642131 - RNA, 19 nt, Artificial Sequence
  Description of Artificial Sequence: Synthetic oligonucleotide
  Sense strand starting at position 2354 of SEQ ID NO: 1561037
guuccaguucugccuguua

SEQ ID NO: 1642132 - RNA, 19 nt, Artificial Sequence
  Description of Artificial Sequence: Synthetic oligonucleotide
  Antisense strand to SEQ ID NO: 1642131
uaacaggcagaacuggaac

SEQ ID NO: 1642133 - RNA, 19 nt, Artificial Sequence
  Description of Artificial Sequence: Synthetic oligonucleotide
  Sense strand starting at position 2356 of SEQ ID NO: 1561037
uccaguucugccuguuacu

SEQ ID NO: 1642134 - RNA, 19 nt, Artificial Sequence
  Description of Artificial Sequence: Synthetic oligonucleotide
  Antisense strand to SEQ ID NO: 1642133
aguaacaggcagaacugga

SEQ ID NO: 1642135 - RNA, 19 nt, Artificial Sequence
  Description of Artificial Sequence: Synthetic oligonucleotide
  Sense strand starting at position 2415 of SEQ ID NO: 1561037
ccaguaacguaggugaaga

SEQ ID NO: 1642136 - RNA, 19 nt, Artificial Sequence
  Description of Artificial Sequence: Synthetic oligonucleotide
  Antisense strand to SEQ ID NO: 1642135
ucuucaccuacguuacugg

SEQ ID NO: 1642137 - RNA, 19 nt, Artificial Sequence
  Description of Artificial Sequence: Synthetic oligonucleotide
  Sense strand starting at position 2416 of SEQ ID NO: 1561037
caguaacguaggugaagaa

SEQ ID NO: 1642138 - RNA, 19 nt, Artificial Sequence
  Description of Artificial Sequence: Synthetic oligonucleotide
  Antisense strand to SEQ ID NO: 1642137
uucuucaccuacguuacug

SEQ ID NO: 1642139 - RNA, 19 nt, Artificial Sequence
  Description of Artificial Sequence: Synthetic oligonucleotide
  Sense strand starting at position 2560 of SEQ ID NO: 1561037
agcgauuucuggcuaguuu

SEQ ID NO: 1642140 - RNA, 19 nt, Artificial Sequence
  Description of Artificial Sequence: Synthetic oligonucleotide
  Antisense strand to SEQ ID NO: 1642139
aaacuagccagaaaucgcu

SEQ ID NO: 1642141 - RNA, 19 nt, Artificial Sequence
  Description of Artificial Sequence: Synthetic oligonucleotide
  Sense strand starting at position 2626 of SEQ ID NO: 1561037
ugagcaauuuguuacuccu

SEQ ID NO: 1642142 - RNA, 19 nt, Artificial Sequence
  Description of Artificial Sequence: Synthetic oligonucleotide
  Antisense strand to SEQ ID NO: 1642141
aggaguaacaaauugcuca

SEQ ID NO: 1642143 - RNA, 19 nt, Artificial Sequence
  Description of Artificial Sequence: Synthetic oligonucleotide
  Sense strand starting at position 2632 of SEQ ID NO: 1561037
auuuguuacuccuuccagu

SEQ ID NO: 1642144 - RNA, 19 nt, Artificial Sequence
  Description of Artificial Sequence: Synthetic oligonucleotide
  Antisense strand to SEQ ID NO: 1642143
acuggaaggaguaacaaau

SEQ ID NO: 1642145 - RNA, 19 nt, Artificial Sequence
  Description of Artificial Sequence: Synthetic oligonucleotide
  Sense strand starting at position 2645 of SEQ ID NO: 1561037
uccaguuggacagguuuaa

SEQ ID NO: 1642146 - RNA, 19 nt, Artificial Sequence
  Description of Artificial Sequence: Synthetic oligonucleotide
  Antisense strand to SEQ ID NO: 1642145
uuaaaccuguccaacugga

SEQ ID NO: 1642147 - RNA, 19 nt, Artificial Sequence
  Description of Artificial Sequence: Synthetic oligonucleotide
  Sense strand starting at position 2657 of SEQ ID NO: 1561037
gguuuaaccaagugguucu

SEQ ID NO: 1642148 - RNA, 19 nt, Artificial Sequence
  Description of Artificial Sequence: Synthetic oligonucleotide
  Antisense strand to SEQ ID NO: 1642147
agaaccacuugguuaaacc

SEQ ID NO: 1642149 - RNA, 19 nt, Artificial Sequence
  Description of Artificial Sequence: Synthetic oligonucleotide
  Sense strand starting at position 2748 of SEQ ID NO: 1561037
augccagagucuugacaaa

SEQ ID NO: 1642150 - RNA, 19 nt, Artificial Sequence
  Description of Artificial Sequence: Synthetic oligonucleotide
  Antisense strand to SEQ ID NO: 1642149
uuugucaagacucuggcau

SEQ ID NO: 1642151 - RNA, 19 nt, Artificial Sequence
  Description of Artificial Sequence: Synthetic oligonucleotide
  Sense strand starting at position 2837 of SEQ ID NO: 1561037
gguuuaggccuccagaaac

SEQ ID NO: 1642152 - RNA, 19 nt, Artificial Sequence
  Description of Artificial Sequence: Synthetic oligonucleotide
  Antisense strand to SEQ ID NO: 1642151
guuucuggaggccuaaacc

SEQ ID NO: 1642153 - RNA, 19 nt, Artificial Sequence
  Description of Artificial Sequence: Synthetic oligonucleotide
  Sense strand starting at position 2930 of SEQ ID NO: 1561037
gauuauaagcucugugugu

SEQ ID NO: 1642154 - RNA, 19 nt, Artificial Sequence
  Description of Artificial Sequence: Synthetic oligonucleotide
  Antisense strand to SEQ ID NO: 1642153
acacacagagcuuauaauc

SEQ ID NO: 1642155 - RNA, 19 nt, Artificial Sequence
  Description of Artificial Sequence: Synthetic oligonucleotide
  Sense strand starting at position 2931 of SEQ ID NO: 1561037
auuauaagcucuguguguu

SEQ ID NO: 1642156 - RNA, 19 nt, Artificial Sequence
  Description of Artificial Sequence: Synthetic oligonucleotide
  Antisense strand to SEQ ID NO: 1642155
aacacacagagcuuauaau

SEQ ID NO: 1642157 - RNA, 19 nt, Artificial Sequence
  Description of Artificial Sequence: Synthetic oligonucleotide
  Sense strand starting at position 2932 of SEQ ID NO: 1561037
uuauaagcucuguguguuc

SEQ ID NO: 1642158 - RNA, 19 nt, Artificial Sequence
  Description of Artificial Sequence: Synthetic oligonucleotide
  Antisense strand to SEQ ID NO: 1642157
gaacacacagagcuuauaa

SEQ ID NO: 1642159 - RNA, 19 nt, Artificial Sequence
  Description of Artificial Sequence: Synthetic oligonucleotide
  Sense strand starting at position 3019 of SEQ ID NO: 1561037
gaggaaaucucugggauuu

SEQ ID NO: 1642160 - RNA, 19 nt, Artificial Sequence
  Description of Artificial Sequence: Synthetic oligonucleotide
  Antisense strand to SEQ ID NO: 1642159
aaaucccagagauuuccuc

SEQ ID NO: 1642161 - RNA, 19 nt, Artificial Sequence
  Description of Artificial Sequence: Synthetic oligonucleotide
  Sense strand starting at position 3056 of SEQ ID NO: 1561037
cuuggccugucuccagauu

SEQ ID NO: 1642162 - RNA, 19 nt, Artificial Sequence
  Description of Artificial Sequence: Synthetic oligonucleotide
  Antisense strand to SEQ ID NO: 1642161
aaucuggagacaggccaag

SEQ ID NO: 1642163 - RNA, 19 nt, Artificial Sequence
  Description of Artificial Sequence: Synthetic oligonucleotide
  Sense strand starting at position 3057 of SEQ ID NO: 1561037
uuggccugucuccagauua

SEQ ID NO: 1642164 - RNA, 19 nt, Artificial Sequence
  Description of Artificial Sequence: Synthetic oligonucleotide
  Antisense strand to SEQ ID NO: 1642163
uaaucuggagacaggccaa

SEQ ID NO: 1642165 - RNA, 19 nt, Artificial Sequence
  Description of Artificial Sequence: Synthetic oligonucleotide
  Sense strand starting at position 3385 of SEQ ID NO: 1561037
cagccuguuccuggaacuu

SEQ ID NO: 1642166 - RNA, 19 nt, Artificial Sequence
  Description of Artificial Sequence: Synthetic oligonucleotide
  Antisense strand to SEQ ID NO: 1642165
aaguuccaggaacaggcug

SEQ ID NO: 1642167 - RNA, 19 nt, Artificial Sequence
  Description of Artificial Sequence: Synthetic oligonucleotide
  Sense strand starting at position 3447 of SEQ ID NO: 1561037
cagagugugagggaguuua

SEQ ID NO: 1642168 - RNA, 19 nt, Artificial Sequence
  Description of Artificial Sequence: Synthetic oligonucleotide
  Antisense strand to SEQ ID NO: 1642167
uaaacucccucacacucug

SEQ ID NO: 1642169 - RNA, 19 nt, Artificial Sequence
  Description of Artificial Sequence: Synthetic oligonucleotide
  Sense strand starting at position 3455 of SEQ ID NO: 1561037
gagggaguuuauggugaga

SEQ ID NO: 1642170 - RNA, 19 nt, Artificial Sequence
  Description of Artificial Sequence: Synthetic oligonucleotide
  Antisense strand to SEQ ID NO: 1642169
ucucaccauaaacucccuc

SEQ ID NO: 1642171 - RNA, 19 nt, Artificial Sequence
  Description of Artificial Sequence: Synthetic oligonucleotide
  Sense strand starting at position 3457 of SEQ ID NO: 1561037
gggaguuuauggugagaaa

SEQ ID NO: 1642172 - RNA, 19 nt, Artificial Sequence
  Description of Artificial Sequence: Synthetic oligonucleotide
  Antisense strand to SEQ ID NO: 1642171
uuucucaccauaaacuccc

SEQ ID NO: 1642173 - RNA, 19 nt, Artificial Sequence
  Description of Artificial Sequence: Synthetic oligonucleotide
  Sense strand starting at position 3886 of SEQ ID NO: 1561037
aacucagacugcugugagu

SEQ ID NO: 1642174 - RNA, 19 nt, Artificial Sequence
  Description of Artificial Sequence: Synthetic oligonucleotide
  Antisense strand to SEQ ID NO: 1642173
acucacagcagucugaguu

SEQ ID NO: 1642175 - RNA, 19 nt, Artificial Sequence
  Description of Artificial Sequence: Synthetic oligonucleotide
  Sense strand starting at position 3888 of SEQ ID NO: 1561037
cucagacugcugugaguuu

SEQ ID NO: 1642176 - RNA, 19 nt, Artificial Sequence
  Description of Artificial Sequence: Synthetic oligonucleotide
  Antisense strand to SEQ ID NO: 1642175
aaacucacagcagucugag

SEQ ID NO: 1642177 - RNA, 19 nt, Artificial Sequence
  Description of Artificial Sequence: Synthetic oligonucleotide
  Sense strand starting at position 3948 of SEQ ID NO: 1561037
cuggaugccucaugcaaac

SEQ ID NO: 1642178 - RNA, 19 nt, Artificial Sequence
  Description of Artificial Sequence: Synthetic oligonucleotide
  Antisense strand to SEQ ID NO: 1642177
guuugcaugaggcauccag

SEQ ID NO: 1642179 - RNA, 19 nt, Artificial Sequence
  Description of Artificial Sequence: Synthetic oligonucleotide
  Sense strand starting at position 36 of SEQ ID NO: 1561038
gccucaucaguguauugaa

SEQ ID NO: 1642180 - RNA, 19 nt, Artificial Sequence
  Description of Artificial Sequence: Synthetic oligonucleotide
  Antisense strand to SEQ ID NO: 1642179
uucaauacacugaugaggc

SEQ ID NO: 1642181 - RNA, 19 nt, Artificial Sequence
  Description of Artificial Sequence: Synthetic oligonucleotide
  Sense strand starting at position 140 of SEQ ID NO: 1561038
cugugaccucaaugucaau

SEQ ID NO: 1642182 - RNA, 19 nt, Artificial Sequence
  Description of Artificial Sequence: Synthetic oligonucleotide
  Antisense strand to SEQ ID NO: 1642181
auugacauugaggucacag

SEQ ID NO: 1642183 - RNA, 19 nt, Artificial Sequence
  Description of Artificial Sequence: Synthetic oligonucleotide
  Sense strand starting at position 289 of SEQ ID NO: 1561038
gggugugauuucccagccu

SEQ ID NO: 1642184 - RNA, 19 nt, Artificial Sequence
  Description of Artificial Sequence: Synthetic oligonucleotide
  Antisense strand to SEQ ID NO: 1642183
aggcugggaaaucacaccc

SEQ ID NO: 1642185 - RNA, 19 nt, Artificial Sequence
  Description of Artificial Sequence: Synthetic oligonucleotide
  Sense strand starting at position 404 of SEQ ID NO: 1561038
gauggagaaguguguuaag

SEQ ID NO: 1642186 - RNA, 19 nt, Artificial Sequence
  Description of Artificial Sequence: Synthetic oligonucleotide
  Antisense strand to SEQ ID NO: 1642185
cuuaacacacuucuccauc

SEQ ID NO: 1642187 - RNA, 19 nt, Artificial Sequence
  Description of Artificial Sequence: Synthetic oligonucleotide
  Sense strand starting at position 413 of SEQ ID NO: 1561038
guguguuaagguugauuuc

SEQ ID NO: 1642188 - RNA, 19 nt, Artificial Sequence
  Description of Artificial Sequence: Synthetic oligonucleotide
  Antisense strand to SEQ ID NO: 1642187
gaaaucaaccuuaacacac

SEQ ID NO: 1642189 - RNA, 19 nt, Artificial Sequence
  Description of Artificial Sequence: Synthetic oligonucleotide
  Sense strand starting at position 448 of SEQ ID NO: 1561038
ggcauaucgacuggacaca

SEQ ID NO: 1642190 - RNA, 19 nt, Artificial Sequence
  Description of Artificial Sequence: Synthetic oligonucleotide
  Antisense strand to SEQ ID NO: 1642189
uguguccagucgauaugcc

SEQ ID NO: 1642191 - RNA, 19 nt, Artificial Sequence
  Description of Artificial Sequence: Synthetic oligonucleotide
  Sense strand starting at position 877 of SEQ ID NO: 1561038
ggucucuguagugaugaac

SEQ ID NO: 1642192 - RNA, 19 nt, Artificial Sequence
  Description of Artificial Sequence: Synthetic oligonucleotide
  Antisense strand to SEQ ID NO: 1642191
guucaucacuacagagacc

SEQ ID NO: 1642193 - RNA, 19 nt, Artificial Sequence
  Description of Artificial Sequence: Synthetic oligonucleotide
  Sense strand starting at position 1002 of SEQ ID NO: 1561038
gaaggaucuucuucuguug

SEQ ID NO: 1642194 - RNA, 19 nt, Artificial Sequence
  Description of Artificial Sequence: Synthetic oligonucleotide
  Antisense strand to SEQ ID NO: 1642193
caacagaagaagauccuuc

SEQ ID NO: 1642195 - RNA, 19 nt, Artificial Sequence
  Description of Artificial Sequence: Synthetic oligonucleotide
  Sense strand starting at position 1005 of SEQ ID NO: 1561038
ggaucuucuucuguuggaa

SEQ ID NO: 1642196 - RNA, 19 nt, Artificial Sequence
  Description of Artificial Sequence: Synthetic oligonucleotide
  Antisense strand to SEQ ID NO: 1642195
uuccaacagaagaagaucc

SEQ ID NO: 1642197 - RNA, 19 nt, Artificial Sequence
  Description of Artificial Sequence: Synthetic oligonucleotide
  Sense strand starting at position 1168 of SEQ ID NO: 1561038
uugugucuccugcuugagu

SEQ ID NO: 1642198 - RNA, 19 nt, Artificial Sequence
  Description of Artificial Sequence: Synthetic oligonucleotide
  Antisense strand to SEQ ID NO: 1642197
acucaagcaggagacacaa

SEQ ID NO: 1642199 - RNA, 19 nt, Artificial Sequence
  Description of Artificial Sequence: Synthetic oligonucleotide
  Sense strand starting at position 1287 of SEQ ID NO: 1561038
cuguguacucaucaucagu

SEQ ID NO: 1642200 - RNA, 19 nt, Artificial Sequence
  Description of Artificial Sequence: Synthetic oligonucleotide
  Antisense strand to SEQ ID NO: 1642199
acugaugaugaguacacag

SEQ ID NO: 1642201 - RNA, 19 nt, Artificial Sequence
  Description of Artificial Sequence: Synthetic oligonucleotide
  Sense strand starting at position 1612 of SEQ ID NO: 1561038
cuuucugucacggagacau

SEQ ID NO: 1642202 - RNA, 19 nt, Artificial Sequence
  Description of Artificial Sequence: Synthetic oligonucleotide
  Antisense strand to SEQ ID NO: 1642201
augucuccgugacagaaag

SEQ ID NO: 1642203 - RNA, 19 nt, Artificial Sequence
  Description of Artificial Sequence: Synthetic oligonucleotide
  Sense strand starting at position 1745 of SEQ ID NO: 1561038
gcaguuuaucgauauccag

SEQ ID NO: 1642204 - RNA, 19 nt, Artificial Sequence
  Description of Artificial Sequence: Synthetic oligonucleotide
  Antisense strand to SEQ ID NO: 1642203
cuggauaucgauaaacugc

SEQ ID NO: 1642205 - RNA, 19 nt, Artificial Sequence
  Description of Artificial Sequence: Synthetic oligonucleotide
  Sense strand starting at position 1753 of SEQ ID NO: 1561038
ucgauauccaggcaggcau

SEQ ID NO: 1642206 - RNA, 19 nt, Artificial Sequence
  Description of Artificial Sequence: Synthetic oligonucleotide
  Antisense strand to SEQ ID NO: 1642205
augccugccuggauaucga

SEQ ID NO: 1642207 - RNA, 19 nt, Artificial Sequence
  Description of Artificial Sequence: Synthetic oligonucleotide
  Sense strand starting at position 2019 of SEQ ID NO: 1561038
uggcgaugggugagcuuua

SEQ ID NO: 1642208 - RNA, 19 nt, Artificial Sequence
  Description of Artificial Sequence: Synthetic oligonucleotide
  Antisense strand to SEQ ID NO: 1642207
uaaagcucacccaucgcca

SEQ ID NO: 1642209 - RNA, 19 nt, Artificial Sequence
  Description of Artificial Sequence: Synthetic oligonucleotide
  Sense strand starting at position 2024 of SEQ ID NO: 1561038
augggugagcuuuauguau

SEQ ID NO: 1642210 - RNA, 19 nt, Artificial Sequence
  Description of Artificial Sequence: Synthetic oligonucleotide
  Antisense strand to SEQ ID NO: 1642209
auacauaaagcucacccau

SEQ ID NO: 1642211 - RNA, 19 nt, Artificial Sequence
  Description of Artificial Sequence: Synthetic oligonucleotide
  Sense strand starting at position 2030 of SEQ ID NO: 1561038
gagcuuuauguauaucuga

SEQ ID NO: 1642212 - RNA, 19 nt, Artificial Sequence
  Description of Artificial Sequence: Synthetic oligonucleotide
  Antisense strand to SEQ ID NO: 1642211
ucagauauacauaaagcuc

SEQ ID NO: 1642213 - RNA, 19 nt, Artificial Sequence
  Description of Artificial Sequence: Synthetic oligonucleotide
  Sense strand starting at position 2038 of SEQ ID NO: 1561038
uguauaucugaacaaggca

SEQ ID NO: 1642214 - RNA, 19 nt, Artificial Sequence
  Description of Artificial Sequence: Synthetic oligonucleotide
  Antisense strand to SEQ ID NO: 1642213
ugccuuguucagauauaca

SEQ ID NO: 1642215 - RNA, 19 nt, Artificial Sequence
  Description of Artificial Sequence: Synthetic oligonucleotide
  Sense strand starting at position 2248 of SEQ ID NO: 1561038
ccuggagcucccugggauu

SEQ ID NO: 1642216 - RNA, 19 nt, Artificial Sequence
  Description of Artificial Sequence: Synthetic oligonucleotide
  Antisense strand to SEQ ID NO: 1642215
aaucccagggagcuccagg

SEQ ID NO: 1642217 - RNA, 19 nt, Artificial Sequence
  Description of Artificial Sequence: Synthetic oligonucleotide
  Sense strand starting at position 2397 of SEQ ID NO: 1561038
acaaacauuugcuaaguga

SEQ ID NO: 1642218 - RNA, 19 nt, Artificial Sequence
  Description of Artificial Sequence: Synthetic oligonucleotide
  Antisense strand to SEQ ID NO: 1642217
ucacuuagcaaauguuugu

SEQ ID NO: 1642219 - RNA, 19 nt, Artificial Sequence
  Description of Artificial Sequence: Synthetic oligonucleotide
  Sense strand starting at position 2527 of SEQ ID NO: 1561038
ugagauguagcaagugugu

SEQ ID NO: 1642220 - RNA, 19 nt, Artificial Sequence
  Description of Artificial Sequence: Synthetic oligonucleotide
  Antisense strand to SEQ ID NO: 1642219
acacacuugcuacaucuca

SEQ ID NO: 1642221 - RNA, 19 nt, Artificial Sequence
  Description of Artificial Sequence: Synthetic oligonucleotide
  Sense strand starting at position 2538 of SEQ ID NO: 1561038
aaguguguuagggacacau

SEQ ID NO: 1642222 - RNA, 19 nt, Artificial Sequence
  Description of Artificial Sequence: Synthetic oligonucleotide
  Antisense strand to SEQ ID NO: 1642221
augugucccuaacacacuu

SEQ ID NO: 1642223 - RNA, 19 nt, Artificial Sequence
  Description of Artificial Sequence: Synthetic oligonucleotide
  Sense strand starting at position 2540 of SEQ ID NO: 1561038
guguguuagggacacaugu

SEQ ID NO: 1642224 - RNA, 19 nt, Artificial Sequence
  Description of Artificial Sequence: Synthetic oligonucleotide
  Antisense strand to SEQ ID NO: 1642223
acaugugucccuaacacac

SEQ ID NO: 1642225 - RNA, 19 nt, Artificial Sequence
  Description of Artificial Sequence: Synthetic oligonucleotide
  Sense strand starting at position 2542 of SEQ ID NO: 1561038
guguuagggacacauguga

SEQ ID NO: 1642226 - RNA, 19 nt, Artificial Sequence
  Description of Artificial Sequence: Synthetic oligonucleotide
  Antisense strand to SEQ ID NO: 1642225
ucacaugugucccuaacac

SEQ ID NO: 1642227 - RNA, 19 nt, Artificial Sequence
  Description of Artificial Sequence: Synthetic oligonucleotide
  Sense strand starting at position 2751 of SEQ ID NO: 1561038
gucccuucgaucuaagaag

SEQ ID NO: 1642228 - RNA, 19 nt, Artificial Sequence
  Description of Artificial Sequence: Synthetic oligonucleotide
  Antisense strand to SEQ ID NO: 1642227
cuucuuagaucgaagggac

SEQ ID NO: 1642229 - RNA, 19 nt, Artificial Sequence
  Description of Artificial Sequence: Synthetic oligonucleotide
  Sense strand starting at position 2806 of SEQ ID NO: 1561038
gcaucacaggcauaaucua

SEQ ID NO: 1642230 - RNA, 19 nt, Artificial Sequence
  Description of Artificial Sequence: Synthetic oligonucleotide
  Antisense strand to SEQ ID NO: 1642229
uagauuaugccugugaugc

SEQ ID NO: 1642231 - RNA, 19 nt, Artificial Sequence
  Description of Artificial Sequence: Synthetic oligonucleotide
  Sense strand starting at position 2870 of SEQ ID NO: 1561038
aacuuuaacuuguuggaga

SEQ ID NO: 1642232 - RNA, 19 nt, Artificial Sequence
  Description of Artificial Sequence: Synthetic oligonucleotide
  Antisense strand to SEQ ID NO: 1642231
ucuccaacaaguuaaaguu

SEQ ID NO: 1642233 - RNA, 19 nt, Artificial Sequence
  Description of Artificial Sequence: Synthetic oligonucleotide
  Sense strand starting at position 2872 of SEQ ID NO: 1561038
cuuuaacuuguuggagagu

SEQ ID NO: 1642234 - RNA, 19 nt, Artificial Sequence
  Description of Artificial Sequence: Synthetic oligonucleotide
  Antisense strand to SEQ ID NO: 1642233
acucuccaacaaguuaaag

SEQ ID NO: 1642235 - RNA, 19 nt, Artificial Sequence
  Description of Artificial Sequence: Synthetic oligonucleotide
  Sense strand starting at position 2957 of SEQ ID NO: 1561038
gucuuucucccugagcaca

SEQ ID NO: 1642236 - RNA, 19 nt, Artificial Sequence
  Description of Artificial Sequence: Synthetic oligonucleotide
  Antisense strand to SEQ ID NO: 1642235
ugugcucagggagaaagac

SEQ ID NO: 1642237 - RNA, 19 nt, Artificial Sequence
  Description of Artificial Sequence: Synthetic oligonucleotide
  Sense strand starting at position 3487 of SEQ ID NO: 1561038
cguacagaaccucauagua

SEQ ID NO: 1642238 - RNA, 19 nt, Artificial Sequence
  Description of Artificial Sequence: Synthetic oligonucleotide
  Antisense strand to SEQ ID NO: 1642237
uacuaugagguucuguacg

SEQ ID NO: 1642239 - RNA, 19 nt, Artificial Sequence
  Description of Artificial Sequence: Synthetic oligonucleotide
  Sense strand starting at position 3607 of SEQ ID NO: 1561038
uguaaaguugaguggauga

SEQ ID NO: 1642240 - RNA, 19 nt, Artificial Sequence
  Description of Artificial Sequence: Synthetic oligonucleotide
  Antisense strand to SEQ ID NO: 1642239
ucauccacucaacuuuaca

SEQ ID NO: 1642241 - RNA, 19 nt, Artificial Sequence
  Description of Artificial Sequence: Synthetic oligonucleotide
  Sense strand starting at position 3609 of SEQ ID NO: 1561038
uaaaguugaguggaugagu

SEQ ID NO: 1642242 - RNA, 19 nt, Artificial Sequence
  Description of Artificial Sequence: Synthetic oligonucleotide
  Antisense strand to SEQ ID NO: 1642241
acucauccacucaacuuua

SEQ ID NO: 1642243 - RNA, 19 nt, Artificial Sequence
  Description of Artificial Sequence: Synthetic oligonucleotide
  Sense strand starting at position 3617 of SEQ ID NO: 1561038
aguggaugaguugacaguu

SEQ ID NO: 1642244 - RNA, 19 nt, Artificial Sequence
  Description of Artificial Sequence: Synthetic oligonucleotide
  Antisense strand to SEQ ID NO: 1642243
aacugucaacucauccacu

SEQ ID NO: 1642245 - RNA, 19 nt, Artificial Sequence
  Description of Artificial Sequence: Synthetic oligonucleotide
  Sense strand starting at position 3773 of SEQ ID NO: 1561038
gcguccaugcgugcugaga

SEQ ID NO: 1642246 - RNA, 19 nt, Artificial Sequence
  Description of Artificial Sequence: Synthetic oligonucleotide
  Antisense strand to SEQ ID NO: 1642245
ucucagcacgcauggacgc

SEQ ID NO: 1642247 - RNA, 19 nt, Artificial Sequence
  Description of Artificial Sequence: Synthetic oligonucleotide
  Sense strand starting at position 3803 of SEQ ID NO: 1561038
cucuguggccugucauguu

SEQ ID NO: 1642248 - RNA, 19 nt, Artificial Sequence
  Description of Artificial Sequence: Synthetic oligonucleotide
  Antisense strand to SEQ ID NO: 1642247
aacaugacaggccacagag

SEQ ID NO: 1642249 - RNA, 19 nt, Artificial Sequence
  Description of Artificial Sequence: Synthetic oligonucleotide
  Sense strand starting at position 3917 of SEQ ID NO: 1561038
ggguggagggucugugauu

SEQ ID NO: 1642250 - RNA, 19 nt, Artificial Sequence
  Description of Artificial Sequence: Synthetic oligonucleotide
  Antisense strand to SEQ ID NO: 1642249
aaucacagacccuccaccc

SEQ ID NO: 1642251 - RNA, 19 nt, Artificial Sequence
  Description of Artificial Sequence: Synthetic oligonucleotide
  Sense strand starting at position 3918 of SEQ ID NO: 1561038
gguggagggucugugauua

SEQ ID NO: 1642252 - RNA, 19 nt, Artificial Sequence
  Description of Artificial Sequence: Synthetic oligonucleotide
  Antisense strand to SEQ ID NO: 1642251
uaaucacagacccuccacc

SEQ ID NO: 1642253 - RNA, 19 nt, Artificial Sequence
  Description of Artificial Sequence: Synthetic oligonucleotide
  Sense strand starting at position 3922 of SEQ ID NO: 1561038
gagggucugugauuauaug

SEQ ID NO: 1642254 - RNA, 19 nt, Artificial Sequence
  Description of Artificial Sequence: Synthetic oligonucleotide
  Antisense strand to SEQ ID NO: 1642253
cauauaaucacagacccuc

SEQ ID NO: 1642255 - RNA, 19 nt, Artificial Sequence
  Description of Artificial Sequence: Synthetic oligonucleotide
  Sense strand starting at position 3923 of SEQ ID NO: 1561038
agggucugugauuauauga

SEQ ID NO: 1642256 - RNA, 19 nt, Artificial Sequence
  Description of Artificial Sequence: Synthetic oligonucleotide
  Antisense strand to SEQ ID NO: 1642255
ucauauaaucacagacccu

SEQ ID NO: 1642257 - RNA, 19 nt, Artificial Sequence
  Description of Artificial Sequence: Synthetic oligonucleotide
  Sense strand starting at position 3939 of SEQ ID NO: 1561038
ugaauaugagguugugauu

SEQ ID NO: 1642258 - RNA, 19 nt, Artificial Sequence
  Description of Artificial Sequence: Synthetic oligonucleotide
  Antisense strand to SEQ ID NO: 1642257
aaucacaaccucauauuca

SEQ ID NO: 1642259 - RNA, 19 nt, Artificial Sequence
  Description of Artificial Sequence: Synthetic oligonucleotide
  Sense strand starting at position 246 of SEQ ID NO: 1561039
cucaaugauuaccagcaga

SEQ ID NO: 1642260 - RNA, 19 nt, Artificial Sequence
  Description of Artificial Sequence: Synthetic oligonucleotide
  Antisense strand to SEQ ID NO: 1642259
ucugcugguaaucauugag

SEQ ID NO: 1642261 - RNA, 19 nt, Artificial Sequence
  Description of Artificial Sequence: Synthetic oligonucleotide
  Sense strand starting at position 365 of SEQ ID NO: 1561039
guccuuugcuuccagcaau

SEQ ID NO: 1642262 - RNA, 19 nt, Artificial Sequence
  Description of Artificial Sequence: Synthetic oligonucleotide
  Antisense strand to SEQ ID NO: 1642261
auugcuggaagcaaaggac

SEQ ID NO: 1642263 - RNA, 19 nt, Artificial Sequence
  Description of Artificial Sequence: Synthetic oligonucleotide
  Sense strand starting at position 406 of SEQ ID NO: 1561039
uagguagggccuuguacau

SEQ ID NO: 1642264 - RNA, 19 nt, Artificial Sequence
  Description of Artificial Sequence: Synthetic oligonucleotide
  Antisense strand to SEQ ID NO: 1642263
auguacaaggcccuaccua

SEQ ID NO: 1642265 - RNA, 19 nt, Artificial Sequence
  Description of Artificial Sequence: Synthetic oligonucleotide
  Sense strand starting at position 449 of SEQ ID NO: 1561039
caacguugccgguaacuca

SEQ ID NO: 1642266 - RNA, 19 nt, Artificial Sequence
  Description of Artificial Sequence: Synthetic oligonucleotide
  Antisense strand to SEQ ID NO: 1642265
ugaguuaccggcaacguug

SEQ ID NO: 1642267 - RNA, 19 nt, Artificial Sequence
  Description of Artificial Sequence: Synthetic oligonucleotide
  Sense strand starting at position 456 of SEQ ID NO: 1561039
gccgguaacucagacuuua

SEQ ID NO: 1642268 - RNA, 19 nt, Artificial Sequence
  Description of Artificial Sequence: Synthetic oligonucleotide
  Antisense strand to SEQ ID NO: 1642267
uaaagucugaguuaccggc

SEQ ID NO: 1642269 - RNA, 19 nt, Artificial Sequence
  Description of Artificial Sequence: Synthetic oligonucleotide
  Sense strand starting at position 522 of SEQ ID NO: 1561039
caagcaucuaggugguaga

SEQ ID NO: 1642270 - RNA, 19 nt, Artificial Sequence
  Description of Artificial Sequence: Synthetic oligonucleotide
  Antisense strand to SEQ ID NO: 1642269
ucuaccaccuagaugcuug

SEQ ID NO: 1642271 - RNA, 19 nt, Artificial Sequence
  Description of Artificial Sequence: Synthetic oligonucleotide
  Sense strand starting at position 525 of SEQ ID NO: 1561039
gcaucuaggugguagaaug

SEQ ID NO: 1642272 - RNA, 19 nt, Artificial Sequence
  Description of Artificial Sequence: Synthetic oligonucleotide
  Antisense strand to SEQ ID NO: 1642271
cauucuaccaccuagaugc

SEQ ID NO: 1642273 - RNA, 19 nt, Artificial Sequence
  Description of Artificial Sequence: Synthetic oligonucleotide
  Sense strand starting at position 550 of SEQ ID NO: 1561039
ccagcuaaguuagaaguuu

SEQ ID NO: 1642274 - RNA, 19 nt, Artificial Sequence
  Description of Artificial Sequence: Synthetic oligonucleotide
  Antisense strand to SEQ ID NO: 1642273
aaacuucuaacuuagcugg

SEQ ID NO: 1642275 - RNA, 19 nt, Artificial Sequence
  Description of Artificial Sequence: Synthetic oligonucleotide
  Sense strand starting at position 564 of SEQ ID NO: 1561039
aguuuaagguggcagucau

SEQ ID NO: 1642276 - RNA, 19 nt, Artificial Sequence
  Description of Artificial Sequence: Synthetic oligonucleotide
  Antisense strand to SEQ ID NO: 1642275
augacugccaccuuaaacu

SEQ ID NO: 1642277 - RNA, 19 nt, Artificial Sequence
  Description of Artificial Sequence: Synthetic oligonucleotide
  Sense strand starting at position 619 of SEQ ID NO: 1561039
agaaauggguugggagaaa

SEQ ID NO: 1642278 - RNA, 19 nt, Artificial Sequence
  Description of Artificial Sequence: Synthetic oligonucleotide
  Antisense strand to SEQ ID NO: 1642277
uuucucccaacccauuucu

SEQ ID NO: 1642279 - RNA, 19 nt, Artificial Sequence
  Description of Artificial Sequence: Synthetic oligonucleotide
  Sense strand starting at position 1196 of SEQ ID NO: 1561039
gcaagauucucucccggug

SEQ ID NO: 1642280 - RNA, 19 nt, Artificial Sequence
  Description of Artificial Sequence: Synthetic oligonucleotide
  Antisense strand to SEQ ID NO: 1642279
caccgggagagaaucuugc

SEQ ID NO: 1642281 - RNA, 19 nt, Artificial Sequence
  Description of Artificial Sequence: Synthetic oligonucleotide
  Sense strand starting at position 1290 of SEQ ID NO: 1561039
cgcucagucucuuaacucu

SEQ ID NO: 1642282 - RNA, 19 nt, Artificial Sequence
  Description of Artificial Sequence: Synthetic oligonucleotide
  Antisense strand to SEQ ID NO: 1642281
agaguuaagagacugagcg

SEQ ID NO: 1642283 - RNA, 19 nt, Artificial Sequence
  Description of Artificial Sequence: Synthetic oligonucleotide
  Sense strand starting at position 2552 of SEQ ID NO: 1561039
ggaggucauccucaggagu

SEQ ID NO: 1642284 - RNA, 19 nt, Artificial Sequence
  Description of Artificial Sequence: Synthetic oligonucleotide
  Antisense strand to SEQ ID NO: 1642283
acuccugaggaugaccucc

SEQ ID NO: 1642285 - RNA, 19 nt, Artificial Sequence
  Description of Artificial Sequence: Synthetic oligonucleotide
  Sense strand starting at position 2554 of SEQ ID NO: 1561039
aggucauccucaggaguuc

SEQ ID NO: 1642286 - RNA, 19 nt, Artificial Sequence
  Description of Artificial Sequence: Synthetic oligonucleotide
  Antisense strand to SEQ ID NO: 1642285
gaacuccugaggaugaccu

SEQ ID NO: 1642287 - RNA, 19 nt, Artificial Sequence
  Description of Artificial Sequence: Synthetic oligonucleotide
  Sense strand starting at position 3228 of SEQ ID NO: 1561039
agcgauuauccugccgcaa

SEQ ID NO: 1642288 - RNA, 19 nt, Artificial Sequence
  Description of Artificial Sequence: Synthetic oligonucleotide
  Antisense strand to SEQ ID NO: 1642287
uugcggcaggauaaucgcu

SEQ ID NO: 1642289 - RNA, 19 nt, Artificial Sequence
  Description of Artificial Sequence: Synthetic oligonucleotide
  Sense strand starting at position 3229 of SEQ ID NO: 1561039
gcgauuauccugccgcaac

SEQ ID NO: 1642290 - RNA, 19 nt, Artificial Sequence
  Description of Artificial Sequence: Synthetic oligonucleotide
  Antisense strand to SEQ ID NO: 1642289
guugcggcaggauaaucgc

SEQ ID NO: 1642291 - RNA, 19 nt, Artificial Sequence
  Description of Artificial Sequence: Synthetic oligonucleotide
  Sense strand starting at position 3333 of SEQ ID NO: 1561039
ugaccaugcugggauuaca

SEQ ID NO: 1642292 - RNA, 19 nt, Artificial Sequence
  Description of Artificial Sequence: Synthetic oligonucleotide
  Antisense strand to SEQ ID NO: 1642291
uguaaucccagcaugguca

SEQ ID NO: 1642293 - RNA, 19 nt, Artificial Sequence
  Description of Artificial Sequence: Synthetic oligonucleotide
  Sense strand starting at position 3659 of SEQ ID NO: 1561039
uuguaauuccagcauucug

SEQ ID NO: 1642294 - RNA, 19 nt, Artificial Sequence
  Description of Artificial Sequence: Synthetic oligonucleotide
  Antisense strand to SEQ ID NO: 1642293
cagaaugcuggaauuacaa

SEQ ID NO: 1642295 - RNA, 19 nt, Artificial Sequence
  Description of Artificial Sequence: Synthetic oligonucleotide
  Sense strand starting at position 3956 of SEQ ID NO: 1561039
aggauauugucuugugucu

SEQ ID NO: 1642296 - RNA, 19 nt, Artificial Sequence
  Description of Artificial Sequence: Synthetic oligonucleotide
  Antisense strand to SEQ ID NO: 1642295
agacacaagacaauauccu

SEQ ID NO: 1642297 - RNA, 19 nt, Artificial Sequence
  Description of Artificial Sequence: Synthetic oligonucleotide
  Sense strand starting at position 3958 of SEQ ID NO: 1561039
gauauugucuugugucucu

SEQ ID NO: 1642298 - RNA, 19 nt, Artificial Sequence
  Description of Artificial Sequence: Synthetic oligonucleotide
  Antisense strand to SEQ ID NO: 1642297
agagacacaagacaauauc

SEQ ID NO: 1642299 - RNA, 19 nt, Artificial Sequence
  Description of Artificial Sequence: Synthetic oligonucleotide
  Sense strand starting at position 115 of SEQ ID NO: 1561040
uuggucuucuugccuagaa

SEQ ID NO: 1642300 - RNA, 19 nt, Artificial Sequence
  Description of Artificial Sequence: Synthetic oligonucleotide
  Antisense strand to SEQ ID NO: 1642299
uucuaggcaagaagaccaa

SEQ ID NO: 1642301 - RNA, 19 nt, Artificial Sequence
  Description of Artificial Sequence: Synthetic oligonucleotide
  Sense strand starting at position 116 of SEQ ID NO: 1561040
uggucuucuugccuagaag

SEQ ID NO: 1642302 - RNA, 19 nt, Artificial Sequence
  Description of Artificial Sequence: Synthetic oligonucleotide
  Antisense strand to SEQ ID NO: 1642301
cuucuaggcaagaagacca

SEQ ID NO: 1642303 - RNA, 19 nt, Artificial Sequence
  Description of Artificial Sequence: Synthetic oligonucleotide
  Sense strand starting at position 131 of SEQ ID NO: 1561040
gaagccuaucccggcaauu

SEQ ID NO: 1642304 - RNA, 19 nt, Artificial Sequence
  Description of Artificial Sequence: Synthetic oligonucleotide
  Antisense strand to SEQ ID NO: 1642303
aauugccgggauaggcuuc

SEQ ID NO: 1642305 - RNA, 19 nt, Artificial Sequence
  Description of Artificial Sequence: Synthetic oligonucleotide
  Sense strand starting at position 133 of SEQ ID NO: 1561040
agccuaucccggcaauuaa

SEQ ID NO: 1642306 - RNA, 19 nt, Artificial Sequence
  Description of Artificial Sequence: Synthetic oligonucleotide
  Antisense strand to SEQ ID NO: 1642305
uuaauugccgggauaggcu

SEQ ID NO: 1642307 - RNA, 19 nt, Artificial Sequence
  Description of Artificial Sequence: Synthetic oligonucleotide
  Sense strand starting at position 214 of SEQ ID NO: 1561040
ggcagugacuguuucucuu

SEQ ID NO: 1642308 - RNA, 19 nt, Artificial Sequence
  Description of Artificial Sequence: Synthetic oligonucleotide
  Antisense strand to SEQ ID NO: 1642307
aagagaaacagucacugcc

SEQ ID NO: 1642309 - RNA, 19 nt, Artificial Sequence
  Description of Artificial Sequence: Synthetic oligonucleotide
  Sense strand starting at position 320 of SEQ ID NO: 1561040
uuauuuaacugauaugggu

SEQ ID NO: 1642310 - RNA, 19 nt, Artificial Sequence
  Description of Artificial Sequence: Synthetic oligonucleotide
  Antisense strand to SEQ ID NO: 1642309
acccauaucaguuaaauaa

SEQ ID NO: 1642311 - RNA, 19 nt, Artificial Sequence
  Description of Artificial Sequence: Synthetic oligonucleotide
  Sense strand starting at position 324 of SEQ ID NO: 1561040
uuaacugauaugggugcaa

SEQ ID NO: 1642312 - RNA, 19 nt, Artificial Sequence
  Description of Artificial Sequence: Synthetic oligonucleotide
  Antisense strand to SEQ ID NO: 1642311
uugcacccauaucaguuaa

SEQ ID NO: 1642313 - RNA, 19 nt, Artificial Sequence
  Description of Artificial Sequence: Synthetic oligonucleotide
  Sense strand starting at position 326 of SEQ ID NO: 1561040
aacugauaugggugcaaau

SEQ ID NO: 1642314 - RNA, 19 nt, Artificial Sequence
  Description of Artificial Sequence: Synthetic oligonucleotide
  Antisense strand to SEQ ID NO: 1642313
auuugcacccauaucaguu

SEQ ID NO: 1642315 - RNA, 19 nt, Artificial Sequence
  Description of Artificial Sequence: Synthetic oligonucleotide
  Sense strand starting at position 328 of SEQ ID NO: 1561040
cugauaugggugcaaauau

SEQ ID NO: 1642316 - RNA, 19 nt, Artificial Sequence
  Description of Artificial Sequence: Synthetic oligonucleotide
  Antisense strand to SEQ ID NO: 1642315
auauuugcacccauaucag

SEQ ID NO: 1642317 - RNA, 19 nt, Artificial Sequence
  Description of Artificial Sequence: Synthetic oligonucleotide
  Sense strand starting at position 339 of SEQ ID NO: 1561040
gcaaauauagcucagcgau

SEQ ID NO: 1642318 - RNA, 19 nt, Artificial Sequence
  Description of Artificial Sequence: Synthetic oligonucleotide
  Antisense strand to SEQ ID NO: 1642317
aucgcugagcuauauuugc

SEQ ID NO: 1642319 - RNA, 19 nt, Artificial Sequence
  Description of Artificial Sequence: Synthetic oligonucleotide
  Sense strand starting at position 411 of SEQ ID NO: 1561040
gagggaguauaucugugau

SEQ ID NO: 1642320 - RNA, 19 nt, Artificial Sequence
  Description of Artificial Sequence: Synthetic oligonucleotide
  Antisense strand to SEQ ID NO: 1642319
aucacagauauacucccuc

SEQ ID NO: 1642321 - RNA, 19 nt, Artificial Sequence
  Description of Artificial Sequence: Synthetic oligonucleotide
  Sense strand starting at position 413 of SEQ ID NO: 1561040
gggaguauaucugugaucu

SEQ ID NO: 1642322 - RNA, 19 nt, Artificial Sequence
  Description of Artificial Sequence: Synthetic oligonucleotide
  Antisense strand to SEQ ID NO: 1642321
agaucacagauauacuccc

SEQ ID NO: 1642323 - RNA, 19 nt, Artificial Sequence
  Description of Artificial Sequence: Synthetic oligonucleotide
  Sense strand starting at position 414 of SEQ ID NO: 1561040
ggaguauaucugugaucua

SEQ ID NO: 1642324 - RNA, 19 nt, Artificial Sequence
  Description of Artificial Sequence: Synthetic oligonucleotide
  Antisense strand to SEQ ID NO: 1642323
uagaucacagauauacucc

SEQ ID NO: 1642325 - RNA, 19 nt, Artificial Sequence
  Description of Artificial Sequence: Synthetic oligonucleotide
  Sense strand starting at position 417 of SEQ ID NO: 1561040
guauaucugugaucuaugg

SEQ ID NO: 1642326 - RNA, 19 nt, Artificial Sequence
  Description of Artificial Sequence: Synthetic oligonucleotide
  Antisense strand to SEQ ID NO: 1642325
ccauagaucacagauauac

SEQ ID NO: 1642327 - RNA, 19 nt, Artificial Sequence
  Description of Artificial Sequence: Synthetic oligonucleotide
  Sense strand starting at position 462 of SEQ ID NO: 1561040
ggccuugucguucacugua

SEQ ID NO: 1642328 - RNA, 19 nt, Artificial Sequence
  Description of Artificial Sequence: Synthetic oligonucleotide
  Antisense strand to SEQ ID NO: 1642327
uacagugaacgacaaggcc

SEQ ID NO: 1642329 - RNA, 19 nt, Artificial Sequence
  Description of Artificial Sequence: Synthetic oligonucleotide
  Sense strand starting at position 497 of SEQ ID NO: 1561040
ucagccagguuugagaaau

SEQ ID NO: 1642330 - RNA, 19 nt, Artificial Sequence
  Description of Artificial Sequence: Synthetic oligonucleotide
  Antisense strand to SEQ ID NO: 1642329
auuucucaaaccuggcuga

SEQ ID NO: 1642331 - RNA, 19 nt, Artificial Sequence
  Description of Artificial Sequence: Synthetic oligonucleotide
  Sense strand starting at position 507 of SEQ ID NO: 1561040
uugagaaauuuccaggucu

SEQ ID NO: 1642332 - RNA, 19 nt, Artificial Sequence
  Description of Artificial Sequence: Synthetic oligonucleotide
  Antisense strand to SEQ ID NO: 1642331
agaccuggaaauuucucaa

SEQ ID NO: 1642333 - RNA, 19 nt, Artificial Sequence
  Description of Artificial Sequence: Synthetic oligonucleotide
  Sense strand starting at position 522 of SEQ ID NO: 1561040
gucugagacccucacuacu

SEQ ID NO: 1642334 - RNA, 19 nt, Artificial Sequence
  Description of Artificial Sequence: Synthetic oligonucleotide
  Antisense strand to SEQ ID NO: 1642333
aguagugagggucucagac

SEQ ID NO: 1642335 - RNA, 19 nt, Artificial Sequence
  Description of Artificial Sequence: Synthetic oligonucleotide
  Sense strand starting at position 2078 of SEQ ID NO: 1561040
ugucguugcaguuacguaa

SEQ ID NO: 1642336 - RNA, 19 nt, Artificial Sequence
  Description of Artificial Sequence: Synthetic oligonucleotide
  Antisense strand to SEQ ID NO: 1642335
uuacguaacugcaacgaca

SEQ ID NO: 1642337 - RNA, 19 nt, Artificial Sequence
  Description of Artificial Sequence: Synthetic oligonucleotide
  Sense strand starting at position 2203 of SEQ ID NO: 1561040
ggcguuauguguucggacu

SEQ ID NO: 1642338 - RNA, 19 nt, Artificial Sequence
  Description of Artificial Sequence: Synthetic oligonucleotide
  Antisense strand to SEQ ID NO: 1642337
aguccgaacacauaacgcc

SEQ ID NO: 1642339 - RNA, 19 nt, Artificial Sequence
  Description of Artificial Sequence: Synthetic oligonucleotide
  Sense strand starting at position 2204 of SEQ ID NO: 1561040
gcguuauguguucggacuc

SEQ ID NO: 1642340 - RNA, 19 nt, Artificial Sequence
  Description of Artificial Sequence: Synthetic oligonucleotide
  Antisense strand to SEQ ID NO: 1642339
gaguccgaacacauaacgc

SEQ ID NO: 1642341 - RNA, 19 nt, Artificial Sequence
  Description of Artificial Sequence: Synthetic oligonucleotide
  Sense strand starting at position 2265 of SEQ ID NO: 1561040
ccugcauucugggagaaga

SEQ ID NO: 1642342 - RNA, 19 nt, Artificial Sequence
  Description of Artificial Sequence: Synthetic oligonucleotide
  Antisense strand to SEQ ID NO: 1642341
ucuucucccagaaugcagg

SEQ ID NO: 1642343 - RNA, 19 nt, Artificial Sequence
  Description of Artificial Sequence: Synthetic oligonucleotide
  Sense strand starting at position 2948 of SEQ ID NO: 1561040
guguuuggguccuuaccga

SEQ ID NO: 1642344 - RNA, 19 nt, Artificial Sequence
  Description of Artificial Sequence: Synthetic oligonucleotide
  Antisense strand to SEQ ID NO: 1642343
ucgguaaggacccaaacac

SEQ ID NO: 1642345 - RNA, 19 nt, Artificial Sequence
  Description of Artificial Sequence: Synthetic oligonucleotide
  Sense strand starting at position 2956 of SEQ ID NO: 1561040
guccuuaccgacuguuaaa

SEQ ID NO: 1642346 - RNA, 19 nt, Artificial Sequence
  Description of Artificial Sequence: Synthetic oligonucleotide
  Antisense strand to SEQ ID NO: 1642345
uuuaacagucgguaaggac

SEQ ID NO: 1642347 - RNA, 19 nt, Artificial Sequence
  Description of Artificial Sequence: Synthetic oligonucleotide
  Sense strand starting at position 2992 of SEQ ID NO: 1561040
cccugaacagucgacuaga

SEQ ID NO: 1642348 - RNA, 19 nt, Artificial Sequence
  Description of Artificial Sequence: Synthetic oligonucleotide
  Antisense strand to SEQ ID NO: 1642347
ucuagucgacuguucaggg

SEQ ID NO: 1642349 - RNA, 19 nt, Artificial Sequence
  Description of Artificial Sequence: Synthetic oligonucleotide
  Sense strand starting at position 3260 of SEQ ID NO: 1561040
gggauuaggcuuggagucu

SEQ ID NO: 1642350 - RNA, 19 nt, Artificial Sequence
  Description of Artificial Sequence: Synthetic oligonucleotide
  Antisense strand to SEQ ID NO: 1642349
agacuccaagccuaauccc

SEQ ID NO: 1642351 - RNA, 19 nt, Artificial Sequence
  Description of Artificial Sequence: Synthetic oligonucleotide
  Sense strand starting at position 3261 of SEQ ID NO: 1561040
ggauuaggcuuggagucuu

SEQ ID NO: 1642352 - RNA, 19 nt, Artificial Sequence
  Description of Artificial Sequence: Synthetic oligonucleotide
  Antisense strand to SEQ ID NO: 1642351
aagacuccaagccuaaucc

SEQ ID NO: 1642353 - RNA, 19 nt, Artificial Sequence
  Description of Artificial Sequence: Synthetic oligonucleotide
  Sense strand starting at position 3323 of SEQ ID NO: 1561040
agguguauguaucuaucaa

SEQ ID NO: 1642354 - RNA, 19 nt, Artificial Sequence
  Description of Artificial Sequence: Synthetic oligonucleotide
  Antisense strand to SEQ ID NO: 1642353
uugauagauacauacaccu

SEQ ID NO: 1642355 - RNA, 19 nt, Artificial Sequence
  Description of Artificial Sequence: Synthetic oligonucleotide
  Sense strand starting at position 3324 of SEQ ID NO: 1561040
gguguauguaucuaucaaa

SEQ ID NO: 1642356 - RNA, 19 nt, Artificial Sequence
  Description of Artificial Sequence: Synthetic oligonucleotide
  Antisense strand to SEQ ID NO: 1642355
uuugauagauacauacacc

SEQ ID NO: 1642357 - RNA, 19 nt, Artificial Sequence
  Description of Artificial Sequence: Synthetic oligonucleotide
  Sense strand starting at position 3344 of SEQ ID NO: 1561040
auacauguccuagaacggu

SEQ ID NO: 1642358 - RNA, 19 nt, Artificial Sequence
  Description of Artificial Sequence: Synthetic oligonucleotide
  Antisense strand to SEQ ID NO: 1642357
accguucuaggacauguau

SEQ ID NO: 1642359 - RNA, 19 nt, Artificial Sequence
  Description of Artificial Sequence: Synthetic oligonucleotide
  Sense strand starting at position 3449 of SEQ ID NO: 1561040
uggugaaacuucugccucu

SEQ ID NO: 1642360 - RNA, 19 nt, Artificial Sequence
  Description of Artificial Sequence: Synthetic oligonucleotide
  Antisense strand to SEQ ID NO: 1642359
agaggcagaaguuucacca

SEQ ID NO: 1642361 - RNA, 19 nt, Artificial Sequence
  Description of Artificial Sequence: Synthetic oligonucleotide
  Sense strand starting at position 3450 of SEQ ID NO: 1561040
ggugaaacuucugccucua

SEQ ID NO: 1642362 - RNA, 19 nt, Artificial Sequence
  Description of Artificial Sequence: Synthetic oligonucleotide
  Antisense strand to SEQ ID NO: 1642361
uagaggcagaaguuucacc

SEQ ID NO: 1642363 - RNA, 19 nt, Artificial Sequence
  Description of Artificial Sequence: Synthetic oligonucleotide
  Sense strand starting at position 3629 of SEQ ID NO: 1561040
caacauguccagugguuag

SEQ ID NO: 1642364 - RNA, 19 nt, Artificial Sequence
  Description of Artificial Sequence: Synthetic oligonucleotide
  Antisense strand to SEQ ID NO: 1642363
cuaaccacuggacauguug

SEQ ID NO: 1642365 - RNA, 19 nt, Artificial Sequence
  Description of Artificial Sequence: Synthetic oligonucleotide
  Sense strand starting at position 3641 of SEQ ID NO: 1561040
ugguuaggauuacgugaac

SEQ ID NO: 1642366 - RNA, 19 nt, Artificial Sequence
  Description of Artificial Sequence: Synthetic oligonucleotide
  Antisense strand to SEQ ID NO: 1642365
guucacguaauccuaacca

SEQ ID NO: 1642367 - RNA, 19 nt, Artificial Sequence
  Description of Artificial Sequence: Synthetic oligonucleotide
  Sense strand starting at position 3644 of SEQ ID NO: 1561040
uuaggauuacgugaacauc

SEQ ID NO: 1642368 - RNA, 19 nt, Artificial Sequence
  Description of Artificial Sequence: Synthetic oligonucleotide
  Antisense strand to SEQ ID NO: 1642367
gauguucacguaauccuaa

SEQ ID NO: 1642369 - RNA, 19 nt, Artificial Sequence
  Description of Artificial Sequence: Synthetic oligonucleotide
  Sense strand starting at position 3795 of SEQ ID NO: 1561040
ggcccagauuggucuugaa

SEQ ID NO: 1642370 - RNA, 19 nt, Artificial Sequence
  Description of Artificial Sequence: Synthetic oligonucleotide
  Antisense strand to SEQ ID NO: 1642369
uucaagaccaaucugggcc

SEQ ID NO: 1642371 - RNA, 19 nt, Artificial Sequence
  Description of Artificial Sequence: Synthetic oligonucleotide
  Sense strand starting at position 3864 of SEQ ID NO: 1561040
gcuggcuuguacucuggaa

SEQ ID NO: 1642372 - RNA, 19 nt, Artificial Sequence
  Description of Artificial Sequence: Synthetic oligonucleotide
  Antisense strand to SEQ ID NO: 1642371
uuccagaguacaagccagc

SEQ ID NO: 1642373 - RNA, 19 nt, Artificial Sequence
  Description of Artificial Sequence: Synthetic oligonucleotide
  Sense strand starting at position 3866 of SEQ ID NO: 1561040
uggcuuguacucuggaauu

SEQ ID NO: 1642374 - RNA, 19 nt, Artificial Sequence
  Description of Artificial Sequence: Synthetic oligonucleotide
  Antisense strand to SEQ ID NO: 1642373
aauuccagaguacaagcca

SEQ ID NO: 1642375 - RNA, 19 nt, Artificial Sequence
  Description of Artificial Sequence: Synthetic oligonucleotide
  Sense strand starting at position 10 of SEQ ID NO: 1561041
ggaggacugcuugaaugua

SEQ ID NO: 1642376 - RNA, 19 nt, Artificial Sequence
  Description of Artificial Sequence: Synthetic oligonucleotide
  Antisense strand to SEQ ID NO: 1642375
uacauucaagcaguccucc

SEQ ID NO: 1642377 - RNA, 19 nt, Artificial Sequence
  Description of Artificial Sequence: Synthetic oligonucleotide
  Sense strand starting at position 554 of SEQ ID NO: 1561041
gcaagaccuguccgaaaca

SEQ ID NO: 1642378 - RNA, 19 nt, Artificial Sequence
  Description of Artificial Sequence: Synthetic oligonucleotide
  Antisense strand to SEQ ID NO: 1642377
uguuucggacaggucuugc

SEQ ID NO: 1642379 - RNA, 19 nt, Artificial Sequence
  Description of Artificial Sequence: Synthetic oligonucleotide
  Sense strand starting at position 788 of SEQ ID NO: 1561041
aguagaucgaucugcucua

SEQ ID NO: 1642380 - RNA, 19 nt, Artificial Sequence
  Description of Artificial Sequence: Synthetic oligonucleotide
  Antisense strand to SEQ ID NO: 1642379
uagagcagaucgaucuacu

SEQ ID NO: 1642381 - RNA, 19 nt, Artificial Sequence
  Description of Artificial Sequence: Synthetic oligonucleotide
  Sense strand starting at position 1078 of SEQ ID NO: 1561041
gugugagguccucaccagu

SEQ ID NO: 1642382 - RNA, 19 nt, Artificial Sequence
  Description of Artificial Sequence: Synthetic oligonucleotide
  Antisense strand to SEQ ID NO: 1642381
acuggugaggaccucacac

SEQ ID NO: 1642383 - RNA, 19 nt, Artificial Sequence
  Description of Artificial Sequence: Synthetic oligonucleotide
  Sense strand starting at position 1091 of SEQ ID NO: 1561041
accaguaggucacucgaau

SEQ ID NO: 1642384 - RNA, 19 nt, Artificial Sequence
  Description of Artificial Sequence: Synthetic oligonucleotide
  Antisense strand to SEQ ID NO: 1642383
auucgagugaccuacuggu

SEQ ID NO: 1642385 - RNA, 19 nt, Artificial Sequence
  Description of Artificial Sequence: Synthetic oligonucleotide
  Sense strand starting at position 2066 of SEQ ID NO: 1561041
cgaccucgccgaguaauuc

SEQ ID NO: 1642386 - RNA, 19 nt, Artificial Sequence
  Description of Artificial Sequence: Synthetic oligonucleotide
  Antisense strand to SEQ ID NO: 1642385
gaauuacucggcgaggucg

SEQ ID NO: 1642387 - RNA, 19 nt, Artificial Sequence
  Description of Artificial Sequence: Synthetic oligonucleotide
  Sense strand starting at position 2162 of SEQ ID NO: 1561041
agguguucagcauaugugu

SEQ ID NO: 1642388 - RNA, 19 nt, Artificial Sequence
  Description of Artificial Sequence: Synthetic oligonucleotide
  Antisense strand to SEQ ID NO: 1642387
acacauaugcugaacaccu

SEQ ID NO: 1642389 - RNA, 19 nt, Artificial Sequence
  Description of Artificial Sequence: Synthetic oligonucleotide
  Sense strand starting at position 2202 of SEQ ID NO: 1561041
cacuucucugcugggugaa

SEQ ID NO: 1642390 - RNA, 19 nt, Artificial Sequence
  Description of Artificial Sequence: Synthetic oligonucleotide
  Antisense strand to SEQ ID NO: 1642389
uucacccagcagagaagug

SEQ ID NO: 1642391 - RNA, 19 nt, Artificial Sequence
  Description of Artificial Sequence: Synthetic oligonucleotide
  Sense strand starting at position 2203 of SEQ ID NO: 1561041
acuucucugcugggugaau

SEQ ID NO: 1642392 - RNA, 19 nt, Artificial Sequence
  Description of Artificial Sequence: Synthetic oligonucleotide
  Antisense strand to SEQ ID NO: 1642391
auucacccagcagagaagu

SEQ ID NO: 1642393 - RNA, 19 nt, Artificial Sequence
  Description of Artificial Sequence: Synthetic oligonucleotide
  Sense strand starting at position 2204 of SEQ ID NO: 1561041
cuucucugcugggugaauu

SEQ ID NO: 1642394 - RNA, 19 nt, Artificial Sequence
  Description of Artificial Sequence: Synthetic oligonucleotide
  Antisense strand to SEQ ID NO: 1642393
aauucacccagcagagaag

SEQ ID NO: 1642395 - RNA, 19 nt, Artificial Sequence
  Description of Artificial Sequence: Synthetic oligonucleotide
  Sense strand starting at position 2205 of SEQ ID NO: 1561041
uucucugcugggugaauuu

SEQ ID NO: 1642396 - RNA, 19 nt, Artificial Sequence
  Description of Artificial Sequence: Synthetic oligonucleotide
  Antisense strand to SEQ ID NO: 1642395
aaauucacccagcagagaa

SEQ ID NO: 1642397 - RNA, 19 nt, Artificial Sequence
  Description of Artificial Sequence: Synthetic oligonucleotide
  Sense strand starting at position 2397 of SEQ ID NO: 1561041
agagacggcucacuagaaa

SEQ ID NO: 1642398 - RNA, 19 nt, Artificial Sequence
  Description of Artificial Sequence: Synthetic oligonucleotide
  Antisense strand to SEQ ID NO: 1642397
uuucuagugagccgucucu

SEQ ID NO: 1642399 - RNA, 19 nt, Artificial Sequence
  Description of Artificial Sequence: Synthetic oligonucleotide
  Sense strand starting at position 2749 of SEQ ID NO: 1561041
aguacuaggcgcuaaacau

SEQ ID NO: 1642400 - RNA, 19 nt, Artificial Sequence
  Description of Artificial Sequence: Synthetic oligonucleotide
  Antisense strand to SEQ ID NO: 1642399
auguuuagcgccuaguacu

SEQ ID NO: 1642401 - RNA, 19 nt, Artificial Sequence
  Description of Artificial Sequence: Synthetic oligonucleotide
  Sense strand starting at position 2836 of SEQ ID NO: 1561041
gcuuaaccacuuugagaag

SEQ ID NO: 1642402 - RNA, 19 nt, Artificial Sequence
  Description of Artificial Sequence: Synthetic oligonucleotide
  Antisense strand to SEQ ID NO: 1642401
cuucucaaagugguuaagc

SEQ ID NO: 1642403 - RNA, 19 nt, Artificial Sequence
  Description of Artificial Sequence: Synthetic oligonucleotide
  Sense strand starting at position 2842 of SEQ ID NO: 1561041
ccacuuugagaaggaaugu

SEQ ID NO: 1642404 - RNA, 19 nt, Artificial Sequence
  Description of Artificial Sequence: Synthetic oligonucleotide
  Antisense strand to SEQ ID NO: 1642403
acauuccuucucaaagugg

SEQ ID NO: 1642405 - RNA, 19 nt, Artificial Sequence
  Description of Artificial Sequence: Synthetic oligonucleotide
  Sense strand starting at position 2865 of SEQ ID NO: 1561041
cugugagcuccucaaggau

SEQ ID NO: 1642406 - RNA, 19 nt, Artificial Sequence
  Description of Artificial Sequence: Synthetic oligonucleotide
  Antisense strand to SEQ ID NO: 1642405
auccuugaggagcucacag

SEQ ID NO: 1642407 - RNA, 19 nt, Artificial Sequence
  Description of Artificial Sequence: Synthetic oligonucleotide
  Sense strand starting at position 2885 of SEQ ID NO: 1561041
gggucuuguccgucuuguu

SEQ ID NO: 1642408 - RNA, 19 nt, Artificial Sequence
  Description of Artificial Sequence: Synthetic oligonucleotide
  Antisense strand to SEQ ID NO: 1642407
aacaagacggacaagaccc

SEQ ID NO: 1642409 - RNA, 19 nt, Artificial Sequence
  Description of Artificial Sequence: Synthetic oligonucleotide
  Sense strand starting at position 2886 of SEQ ID NO: 1561041
ggucuuguccgucuuguuu

SEQ ID NO: 1642410 - RNA, 19 nt, Artificial Sequence
  Description of Artificial Sequence: Synthetic oligonucleotide
  Antisense strand to SEQ ID NO: 1642409
aaacaagacggacaagacc

SEQ ID NO: 1642411 - RNA, 19 nt, Artificial Sequence
  Description of Artificial Sequence: Synthetic oligonucleotide
  Sense strand starting at position 2930 of SEQ ID NO: 1561041
uaagaucuggcauguagua

SEQ ID NO: 1642412 - RNA, 19 nt, Artificial Sequence
  Description of Artificial Sequence: Synthetic oligonucleotide
  Antisense strand to SEQ ID NO: 1642411
uacuacaugccagaucuua

SEQ ID NO: 1642413 - RNA, 19 nt, Artificial Sequence
  Description of Artificial Sequence: Synthetic oligonucleotide
  Sense strand starting at position 2987 of SEQ ID NO: 1561041
aaggguuagccagguaaag

SEQ ID NO: 1642414 - RNA, 19 nt, Artificial Sequence
  Description of Artificial Sequence: Synthetic oligonucleotide
  Antisense strand to SEQ ID NO: 1642413
cuuuaccuggcuaacccuu

SEQ ID NO: 1642415 - RNA, 19 nt, Artificial Sequence
  Description of Artificial Sequence: Synthetic oligonucleotide
  Sense strand starting at position 2989 of SEQ ID NO: 1561041
ggguuagccagguaaagga

SEQ ID NO: 1642416 - RNA, 19 nt, Artificial Sequence
  Description of Artificial Sequence: Synthetic oligonucleotide
  Antisense strand to SEQ ID NO: 1642415
uccuuuaccuggcuaaccc

SEQ ID NO: 1642417 - RNA, 19 nt, Artificial Sequence
  Description of Artificial Sequence: Synthetic oligonucleotide
  Sense strand starting at position 2996 of SEQ ID NO: 1561041
ccagguaaaggaggaguua

SEQ ID NO: 1642418 - RNA, 19 nt, Artificial Sequence
  Description of Artificial Sequence: Synthetic oligonucleotide
  Antisense strand to SEQ ID NO: 1642417
uaacuccuccuuuaccugg

SEQ ID NO: 1642419 - RNA, 19 nt, Artificial Sequence
  Description of Artificial Sequence: Synthetic oligonucleotide
  Sense strand starting at position 3043 of SEQ ID NO: 1561041
cagugagcacagcaaauau

SEQ ID NO: 1642420 - RNA, 19 nt, Artificial Sequence
  Description of Artificial Sequence: Synthetic oligonucleotide
  Antisense strand to SEQ ID NO: 1642419
auauuugcugugcucacug

SEQ ID NO: 1642421 - RNA, 19 nt, Artificial Sequence
  Description of Artificial Sequence: Synthetic oligonucleotide
  Sense strand starting at position 3055 of SEQ ID NO: 1561041
caaauauggccuuggagua

SEQ ID NO: 1642422 - RNA, 19 nt, Artificial Sequence
  Description of Artificial Sequence: Synthetic oligonucleotide
  Antisense strand to SEQ ID NO: 1642421
uacuccaaggccauauuug

SEQ ID NO: 1642423 - RNA, 19 nt, Artificial Sequence
  Description of Artificial Sequence: Synthetic oligonucleotide
  Sense strand starting at position 3056 of SEQ ID NO: 1561041
aaauauggccuuggaguaa

SEQ ID NO: 1642424 - RNA, 19 nt, Artificial Sequence
  Description of Artificial Sequence: Synthetic oligonucleotide
  Antisense strand to SEQ ID NO: 1642423
uuacuccaaggccauauuu

SEQ ID NO: 1642425 - RNA, 19 nt, Artificial Sequence
  Description of Artificial Sequence: Synthetic oligonucleotide
  Sense strand starting at position 3083 of SEQ ID NO: 1561041
gccauuaaccaaggaucuu

SEQ ID NO: 1642426 - RNA, 19 nt, Artificial Sequence
  Description of Artificial Sequence: Synthetic oligonucleotide
  Antisense strand to SEQ ID NO: 1642425
aagauccuugguuaauggc

SEQ ID NO: 1642427 - RNA, 19 nt, Artificial Sequence
  Description of Artificial Sequence: Synthetic oligonucleotide
  Sense strand starting at position 3385 of SEQ ID NO: 1561041
gucuaacagccugaugguu

SEQ ID NO: 1642428 - RNA, 19 nt, Artificial Sequence
  Description of Artificial Sequence: Synthetic oligonucleotide
  Antisense strand to SEQ ID NO: 1642427
aaccaucaggcuguuagac

SEQ ID NO: 1642429 - RNA, 19 nt, Artificial Sequence
  Description of Artificial Sequence: Synthetic oligonucleotide
  Sense strand starting at position 3427 of SEQ ID NO: 1561041
uccaguguuagagacugau

SEQ ID NO: 1642430 - RNA, 19 nt, Artificial Sequence
  Description of Artificial Sequence: Synthetic oligonucleotide
  Antisense strand to SEQ ID NO: 1642429
aucagucucuaacacugga

SEQ ID NO: 1642431 - RNA, 19 nt, Artificial Sequence
  Description of Artificial Sequence: Synthetic oligonucleotide
  Sense strand starting at position 3710 of SEQ ID NO: 1561041
cuugaaacuuagcuaggua

SEQ ID NO: 1642432 - RNA, 19 nt, Artificial Sequence
  Description of Artificial Sequence: Synthetic oligonucleotide
  Antisense strand to SEQ ID NO: 1642431
uaccuagcuaaguuucaag

SEQ ID NO: 1642433 - RNA, 19 nt, Artificial Sequence
  Description of Artificial Sequence: Synthetic oligonucleotide
  Sense strand starting at position 3858 of SEQ ID NO: 1561041
gcaagacuaugucucuuga

SEQ ID NO: 1642434 - RNA, 19 nt, Artificial Sequence
  Description of Artificial Sequence: Synthetic oligonucleotide
  Antisense strand to SEQ ID NO: 1642433
ucaagagacauagucuugc

SEQ ID NO: 1642435 - RNA, 19 nt, Artificial Sequence
  Description of Artificial Sequence: Synthetic oligonucleotide
  Sense strand starting at position 3902 of SEQ ID NO: 1561041
ggaugugugccaugaacaa

SEQ ID NO: 1642436 - RNA, 19 nt, Artificial Sequence
  Description of Artificial Sequence: Synthetic oligonucleotide
  Antisense strand to SEQ ID NO: 1642435
uuguucauggcacacaucc

SEQ ID NO: 1642437 - RNA, 19 nt, Artificial Sequence
  Description of Artificial Sequence: Synthetic oligonucleotide
  Sense strand starting at position 3924 of SEQ ID NO: 1561041
agaaaccugugauugugua

SEQ ID NO: 1642438 - RNA, 19 nt, Artificial Sequence
  Description of Artificial Sequence: Synthetic oligonucleotide
  Antisense strand to SEQ ID NO: 1642437
uacacaaucacagguuucu

SEQ ID NO: 1642439 - RNA, 19 nt, Artificial Sequence
  Description of Artificial Sequence: Synthetic oligonucleotide
  Sense strand starting at position 3925 of SEQ ID NO: 1561041
gaaaccugugauuguguaa

SEQ ID NO: 1642440 - RNA, 19 nt, Artificial Sequence
  Description of Artificial Sequence: Synthetic oligonucleotide
  Antisense strand to SEQ ID NO: 1642439
uuacacaaucacagguuuc

SEQ ID NO: 1642441 - RNA, 19 nt, Artificial Sequence
  Description of Artificial Sequence: Synthetic oligonucleotide
  Sense strand starting at position 3932 of SEQ ID NO: 1561041
gugauuguguaagucagua

SEQ ID NO: 1642442 - RNA, 19 nt, Artificial Sequence
  Description of Artificial Sequence: Synthetic oligonucleotide
  Antisense strand to SEQ ID NO: 1642441
uacugacuuacacaaucac

SEQ ID NO: 1642443 - RNA, 19 nt, Artificial Sequence
  Description of Artificial Sequence: Synthetic oligonucleotide
  Sense strand starting at position 3934 of SEQ ID NO: 1561041
gauuguguaagucaguaag

SEQ ID NO: 1642444 - RNA, 19 nt, Artificial Sequence
  Description of Artificial Sequence: Synthetic oligonucleotide
  Antisense strand to SEQ ID NO: 1642443
cuuacugacuuacacaauc

SEQ ID NO: 1642445 - RNA, 19 nt, Artificial Sequence
  Description of Artificial Sequence: Synthetic oligonucleotide
  Sense strand starting at position 3936 of SEQ ID NO: 1561041
uuguguaagucaguaagau

SEQ ID NO: 1642446 - RNA, 19 nt, Artificial Sequence
  Description of Artificial Sequence: Synthetic oligonucleotide
  Antisense strand to SEQ ID NO: 1642445
aucuuacugacuuacacaa

SEQ ID NO: 1642447 - RNA, 19 nt, Artificial Sequence
  Description of Artificial Sequence: Synthetic oligonucleotide
  Sense strand starting at position 3937 of SEQ ID NO: 1561041
uguguaagucaguaagauu

SEQ ID NO: 1642448 - RNA, 19 nt, Artificial Sequence
  Description of Artificial Sequence: Synthetic oligonucleotide
  Antisense strand to SEQ ID NO: 1642447
aaucuuacugacuuacaca

SEQ ID NO: 1642449 - RNA, 19 nt, Artificial Sequence
  Description of Artificial Sequence: Synthetic oligonucleotide
  Sense strand starting at position 3940 of SEQ ID NO: 1561041
guaagucaguaagauuuga

SEQ ID NO: 1642450 - RNA, 19 nt, Artificial Sequence
  Description of Artificial Sequence: Synthetic oligonucleotide
  Antisense strand to SEQ ID NO: 1642449
ucaaaucuuacugacuuac

SEQ ID NO: 1642451 - RNA, 19 nt, Artificial Sequence
  Description of Artificial Sequence: Synthetic oligonucleotide
  Sense strand starting at position 3945 of SEQ ID NO: 1561041
ucaguaagauuugagggaa

SEQ ID NO: 1642452 - RNA, 19 nt, Artificial Sequence
  Description of Artificial Sequence: Synthetic oligonucleotide
  Antisense strand to SEQ ID NO: 1642451
uucccucaaaucuuacuga

SEQ ID NO: 1642453 - RNA, 19 nt, Artificial Sequence
  Description of Artificial Sequence: Synthetic oligonucleotide
  Sense strand starting at position 3958 of SEQ ID NO: 1561041
agggaaauuuguuauugca

SEQ ID NO: 1642454 - RNA, 19 nt, Artificial Sequence
  Description of Artificial Sequence: Synthetic oligonucleotide
  Antisense strand to SEQ ID NO: 1642453
ugcaauaacaaauuucccu

SEQ ID NO: 1642455 - RNA, 19 nt, Artificial Sequence
  Description of Artificial Sequence: Synthetic oligonucleotide
  Sense strand starting at position 116 of SEQ ID NO: 1561042
caccuuccuccgggucaaa

SEQ ID NO: 1642456 - RNA, 19 nt, Artificial Sequence
  Description of Artificial Sequence: Synthetic oligonucleotide
  Antisense strand to SEQ ID NO: 1642455
uuugacccggaggaaggug

SEQ ID NO: 1642457 - RNA, 19 nt, Artificial Sequence
  Description of Artificial Sequence: Synthetic oligonucleotide
  Sense strand starting at position 220 of SEQ ID NO: 1561042
gcucauucugcucgucaca

SEQ ID NO: 1642458 - RNA, 19 nt, Artificial Sequence
  Description of Artificial Sequence: Synthetic oligonucleotide
  Antisense strand to SEQ ID NO: 1642457
ugugacgagcagaaugagc

SEQ ID NO: 1642459 - RNA, 19 nt, Artificial Sequence
  Description of Artificial Sequence: Synthetic oligonucleotide
  Sense strand starting at position 222 of SEQ ID NO: 1561042
ucauucugcucgucacaca

SEQ ID NO: 1642460 - RNA, 19 nt, Artificial Sequence
  Description of Artificial Sequence: Synthetic oligonucleotide
  Antisense strand to SEQ ID NO: 1642459
ugugugacgagcagaauga

SEQ ID NO: 1642461 - RNA, 19 nt, Artificial Sequence
  Description of Artificial Sequence: Synthetic oligonucleotide
  Sense strand starting at position 376 of SEQ ID NO: 1561042
gauagugguucaggucuga

SEQ ID NO: 1642462 - RNA, 19 nt, Artificial Sequence
  Description of Artificial Sequence: Synthetic oligonucleotide
  Antisense strand to SEQ ID NO: 1642461
ucagaccugaaccacuauc

SEQ ID NO: 1642463 - RNA, 19 nt, Artificial Sequence
  Description of Artificial Sequence: Synthetic oligonucleotide
  Sense strand starting at position 380 of SEQ ID NO: 1561042
gugguucaggucugaguga

SEQ ID NO: 1642464 - RNA, 19 nt, Artificial Sequence
  Description of Artificial Sequence: Synthetic oligonucleotide
  Antisense strand to SEQ ID NO: 1642463
ucacucagaccugaaccac

SEQ ID NO: 1642465 - RNA, 19 nt, Artificial Sequence
  Description of Artificial Sequence: Synthetic oligonucleotide
  Sense strand starting at position 604 of SEQ ID NO: 1561042
ggcggcuccucaggaaaga

SEQ ID NO: 1642466 - RNA, 19 nt, Artificial Sequence
  Description of Artificial Sequence: Synthetic oligonucleotide
  Antisense strand to SEQ ID NO: 1642465
ucuuuccugaggagccgcc

SEQ ID NO: 1642467 - RNA, 19 nt, Artificial Sequence
  Description of Artificial Sequence: Synthetic oligonucleotide
  Sense strand starting at position 1118 of SEQ ID NO: 1561042
gucaaaggcucuuggaauu

SEQ ID NO: 1642468 - RNA, 19 nt, Artificial Sequence
  Description of Artificial Sequence: Synthetic oligonucleotide
  Antisense strand to SEQ ID NO: 1642467
aauuccaagagccuuugac

SEQ ID NO: 1642469 - RNA, 19 nt, Artificial Sequence
  Description of Artificial Sequence: Synthetic oligonucleotide
  Sense strand starting at position 1517 of SEQ ID NO: 1561042
cucugugacccugguagau

SEQ ID NO: 1642470 - RNA, 19 nt, Artificial Sequence
  Description of Artificial Sequence: Synthetic oligonucleotide
  Antisense strand to SEQ ID NO: 1642469
aucuaccagggucacagag

SEQ ID NO: 1642471 - RNA, 19 nt, Artificial Sequence
  Description of Artificial Sequence: Synthetic oligonucleotide
  Sense strand starting at position 1639 of SEQ ID NO: 1561042
gguaacuuugcagaaacuu

SEQ ID NO: 1642472 - RNA, 19 nt, Artificial Sequence
  Description of Artificial Sequence: Synthetic oligonucleotide
  Antisense strand to SEQ ID NO: 1642471
aaguuucugcaaaguuacc

SEQ ID NO: 1642473 - RNA, 19 nt, Artificial Sequence
  Description of Artificial Sequence: Synthetic oligonucleotide
  Sense strand starting at position 1647 of SEQ ID NO: 1561042
ugcagaaacuucuaggugu

SEQ ID NO: 1642474 - RNA, 19 nt, Artificial Sequence
  Description of Artificial Sequence: Synthetic oligonucleotide
  Antisense strand to SEQ ID NO: 1642473
acaccuagaaguuucugca

SEQ ID NO: 1642475 - RNA, 19 nt, Artificial Sequence
  Description of Artificial Sequence: Synthetic oligonucleotide
  Sense strand starting at position 1649 of SEQ ID NO: 1561042
cagaaacuucuaggugugu

SEQ ID NO: 1642476 - RNA, 19 nt, Artificial Sequence
  Description of Artificial Sequence: Synthetic oligonucleotide
  Antisense strand to SEQ ID NO: 1642475
acacaccuagaaguuucug

SEQ ID NO: 1642477 - RNA, 19 nt, Artificial Sequence
  Description of Artificial Sequence: Synthetic oligonucleotide
  Sense strand starting at position 1685 of SEQ ID NO: 1561042
ccauccagguaaugacaua

SEQ ID NO: 1642478 - RNA, 19 nt, Artificial Sequence
  Description of Artificial Sequence: Synthetic oligonucleotide
  Antisense strand to SEQ ID NO: 1642477
uaugucauuaccuggaugg

SEQ ID NO: 1642479 - RNA, 19 nt, Artificial Sequence
  Description of Artificial Sequence: Synthetic oligonucleotide
  Sense strand starting at position 1696 of SEQ ID NO: 1561042
augacauagcagcggaauu

SEQ ID NO: 1642480 - RNA, 19 nt, Artificial Sequence
  Description of Artificial Sequence: Synthetic oligonucleotide
  Antisense strand to SEQ ID NO: 1642479
aauuccgcugcuaugucau

SEQ ID NO: 1642481 - RNA, 19 nt, Artificial Sequence
  Description of Artificial Sequence: Synthetic oligonucleotide
  Sense strand starting at position 1823 of SEQ ID NO: 1561042
cucguccuucugggaagua

SEQ ID NO: 1642482 - RNA, 19 nt, Artificial Sequence
  Description of Artificial Sequence: Synthetic oligonucleotide
  Antisense strand to SEQ ID NO: 1642481
uacuucccagaaggacgag

SEQ ID NO: 1642483 - RNA, 19 nt, Artificial Sequence
  Description of Artificial Sequence: Synthetic oligonucleotide
  Sense strand starting at position 1824 of SEQ ID NO: 1561042
ucguccuucugggaaguau

SEQ ID NO: 1642484 - RNA, 19 nt, Artificial Sequence
  Description of Artificial Sequence: Synthetic oligonucleotide
  Antisense strand to SEQ ID NO: 1642483
auacuucccagaaggacga

SEQ ID NO: 1642485 - RNA, 19 nt, Artificial Sequence
  Description of Artificial Sequence: Synthetic oligonucleotide
  Sense strand starting at position 1904 of SEQ ID NO: 1561042
ggccuucuggcucagggau

SEQ ID NO: 1642486 - RNA, 19 nt, Artificial Sequence
  Description of Artificial Sequence: Synthetic oligonucleotide
  Antisense strand to SEQ ID NO: 1642485
aucccugagccagaaggcc

SEQ ID NO: 1642487 - RNA, 19 nt, Artificial Sequence
  Description of Artificial Sequence: Synthetic oligonucleotide
  Sense strand starting at position 1940 of SEQ ID NO: 1561042
gaaggugauucgcgacaau

SEQ ID NO: 1642488 - RNA, 19 nt, Artificial Sequence
  Description of Artificial Sequence: Synthetic oligonucleotide
  Antisense strand to SEQ ID NO: 1642487
auugucgcgaaucaccuuc

SEQ ID NO: 1642489 - RNA, 19 nt, Artificial Sequence
  Description of Artificial Sequence: Synthetic oligonucleotide
  Sense strand starting at position 2065 of SEQ ID NO: 1561042
cccggauuccacguguguu

SEQ ID NO: 1642490 - RNA, 19 nt, Artificial Sequence
  Description of Artificial Sequence: Synthetic oligonucleotide
  Antisense strand to SEQ ID NO: 1642489
aacacacguggaauccggg

SEQ ID NO: 1642491 - RNA, 19 nt, Artificial Sequence
  Description of Artificial Sequence: Synthetic oligonucleotide
  Sense strand starting at position 2179 of SEQ ID NO: 1561042
ccagccucucccugggauu

SEQ ID NO: 1642492 - RNA, 19 nt, Artificial Sequence
  Description of Artificial Sequence: Synthetic oligonucleotide
  Antisense strand to SEQ ID NO: 1642491
aaucccagggagaggcugg

SEQ ID NO: 1642493 - RNA, 19 nt, Artificial Sequence
  Description of Artificial Sequence: Synthetic oligonucleotide
  Sense strand starting at position 3304 of SEQ ID NO: 1561042
cugcgaugcagugguauga

SEQ ID NO: 1642494 - RNA, 19 nt, Artificial Sequence
  Description of Artificial Sequence: Synthetic oligonucleotide
  Antisense strand to SEQ ID NO: 1642493
ucauaccacugcaucgcag

SEQ ID NO: 1642495 - RNA, 19 nt, Artificial Sequence
  Description of Artificial Sequence: Synthetic oligonucleotide
  Sense strand starting at position 3633 of SEQ ID NO: 1561042
ucaagaaugcaaugaguua

SEQ ID NO: 1642496 - RNA, 19 nt, Artificial Sequence
  Description of Artificial Sequence: Synthetic oligonucleotide
  Antisense strand to SEQ ID NO: 1642495
uaacucauugcauucuuga

SEQ ID NO: 1642497 - RNA, 19 nt, Artificial Sequence
  Description of Artificial Sequence: Synthetic oligonucleotide
  Sense strand starting at position 3646 of SEQ ID NO: 1561042
gaguuauaauugguccacu

SEQ ID NO: 1642498 - RNA, 19 nt, Artificial Sequence
  Description of Artificial Sequence: Synthetic oligonucleotide
  Antisense strand to SEQ ID NO: 1642497
aguggaccaauuauaacuc

SEQ ID NO: 1642499 - RNA, 19 nt, Artificial Sequence
  Description of Artificial Sequence: Synthetic oligonucleotide
  Sense strand starting at position 3649 of SEQ ID NO: 1561042
uuauaauugguccacugua

SEQ ID NO: 1642500 - RNA, 19 nt, Artificial Sequence
  Description of Artificial Sequence: Synthetic oligonucleotide
  Antisense strand to SEQ ID NO: 1642499
uacaguggaccaauuauaa

SEQ ID NO: 1642501 - RNA, 19 nt, Artificial Sequence
  Description of Artificial Sequence: Synthetic oligonucleotide
  Sense strand starting at position 3772 of SEQ ID NO: 1561042
ggugccaggcauuaucaua

SEQ ID NO: 1642502 - RNA, 19 nt, Artificial Sequence
  Description of Artificial Sequence: Synthetic oligonucleotide
  Antisense strand to SEQ ID NO: 1642501
uaugauaaugccuggcacc

SEQ ID NO: 1642503 - RNA, 19 nt, Artificial Sequence
  Description of Artificial Sequence: Synthetic oligonucleotide
  Sense strand starting at position 545 of SEQ ID NO: 1561043
acuggaaucugguguacag

SEQ ID NO: 1642504 - RNA, 19 nt, Artificial Sequence
  Description of Artificial Sequence: Synthetic oligonucleotide
  Antisense strand to SEQ ID NO: 1642503
cuguacaccagauuccagu

SEQ ID NO: 1642505 - RNA, 19 nt, Artificial Sequence
  Description of Artificial Sequence: Synthetic oligonucleotide
  Sense strand starting at position 598 of SEQ ID NO: 1561043
cugcuuugucgagcaggca

SEQ ID NO: 1642506 - RNA, 19 nt, Artificial Sequence
  Description of Artificial Sequence: Synthetic oligonucleotide
  Antisense strand to SEQ ID NO: 1642505
ugccugcucgacaaagcag

SEQ ID NO: 1642507 - RNA, 19 nt, Artificial Sequence
  Description of Artificial Sequence: Synthetic oligonucleotide
  Sense strand starting at position 623 of SEQ ID NO: 1561043
uuggaaagcugccgacaaa

SEQ ID NO: 1642508 - RNA, 19 nt, Artificial Sequence
  Description of Artificial Sequence: Synthetic oligonucleotide
  Antisense strand to SEQ ID NO: 1642507
uuugucggcagcuuuccaa

SEQ ID NO: 1642509 - RNA, 19 nt, Artificial Sequence
  Description of Artificial Sequence: Synthetic oligonucleotide
  Sense strand starting at position 932 of SEQ ID NO: 1561043
uaaguuucuguagagacga

SEQ ID NO: 1642510 - RNA, 19 nt, Artificial Sequence
  Description of Artificial Sequence: Synthetic oligonucleotide
  Antisense strand to SEQ ID NO: 1642509
ucgucucuacagaaacuua

SEQ ID NO: 1642511 - RNA, 19 nt, Artificial Sequence
  Description of Artificial Sequence: Synthetic oligonucleotide
  Sense strand starting at position 1082 of SEQ ID NO: 1561043
agggauuccugggaggaua

SEQ ID NO: 1642512 - RNA, 19 nt, Artificial Sequence
  Description of Artificial Sequence: Synthetic oligonucleotide
  Antisense strand to SEQ ID NO: 1642511
uauccucccaggaaucccu

SEQ ID NO: 1642513 - RNA, 19 nt, Artificial Sequence
  Description of Artificial Sequence: Synthetic oligonucleotide
  Sense strand starting at position 1204 of SEQ ID NO: 1561043
uccugagacuugcagaaau

SEQ ID NO: 1642514 - RNA, 19 nt, Artificial Sequence
  Description of Artificial Sequence: Synthetic oligonucleotide
  Antisense strand to SEQ ID NO: 1642513
auuucugcaagucucagga

SEQ ID NO: 1642515 - RNA, 19 nt, Artificial Sequence
  Description of Artificial Sequence: Synthetic oligonucleotide
  Sense strand starting at position 1214 of SEQ ID NO: 1561043
ugcagaaauuaagcguguu

SEQ ID NO: 1642516 - RNA, 19 nt, Artificial Sequence
  Description of Artificial Sequence: Synthetic oligonucleotide
  Antisense strand to SEQ ID NO: 1642515
aacacgcuuaauuucugca

SEQ ID NO: 1642517 - RNA, 19 nt, Artificial Sequence
  Description of Artificial Sequence: Synthetic oligonucleotide
  Sense strand starting at position 1215 of SEQ ID NO: 1561043
gcagaaauuaagcguguuc

SEQ ID NO: 1642518 - RNA, 19 nt, Artificial Sequence
  Description of Artificial Sequence: Synthetic oligonucleotide
  Antisense strand to SEQ ID NO: 1642517
gaacacgcuuaauuucugc

SEQ ID NO: 1642519 - RNA, 19 nt, Artificial Sequence
  Description of Artificial Sequence: Synthetic oligonucleotide
  Sense strand starting at position 1220 of SEQ ID NO: 1561043
aauuaagcguguucgguau

SEQ ID NO: 1642520 - RNA, 19 nt, Artificial Sequence
  Description of Artificial Sequence: Synthetic oligonucleotide
  Antisense strand to SEQ ID NO: 1642519
auaccgaacacgcuuaauu

SEQ ID NO: 1642521 - RNA, 19 nt, Artificial Sequence
  Description of Artificial Sequence: Synthetic oligonucleotide
  Sense strand starting at position 1224 of SEQ ID NO: 1561043
aagcguguucgguauugac

SEQ ID NO: 1642522 - RNA, 19 nt, Artificial Sequence
  Description of Artificial Sequence: Synthetic oligonucleotide
  Antisense strand to SEQ ID NO: 1642521
gucaauaccgaacacgcuu

SEQ ID NO: 1642523 - RNA, 19 nt, Artificial Sequence
  Description of Artificial Sequence: Synthetic oligonucleotide
  Sense strand starting at position 1226 of SEQ ID NO: 1561043
gcguguucgguauugacac

SEQ ID NO: 1642524 - RNA, 19 nt, Artificial Sequence
  Description of Artificial Sequence: Synthetic oligonucleotide
  Antisense strand to SEQ ID NO: 1642523
gugucaauaccgaacacgc

SEQ ID NO: 1642525 - RNA, 19 nt, Artificial Sequence
  Description of Artificial Sequence: Synthetic oligonucleotide
  Sense strand starting at position 1227 of SEQ ID NO: 1561043
cguguucgguauugacaca

SEQ ID NO: 1642526 - RNA, 19 nt, Artificial Sequence
  Description of Artificial Sequence: Synthetic oligonucleotide
  Antisense strand to SEQ ID NO: 1642525
ugugucaauaccgaacacg

SEQ ID NO: 1642527 - RNA, 19 nt, Artificial Sequence
  Description of Artificial Sequence: Synthetic oligonucleotide
  Sense strand starting at position 1336 of SEQ ID NO: 1561043
ucaagugcuucugaaacac

SEQ ID NO: 1642528 - RNA, 19 nt, Artificial Sequence
  Description of Artificial Sequence: Synthetic oligonucleotide
  Antisense strand to SEQ ID NO: 1642527
guguuucagaagcacuuga

SEQ ID NO: 1642529 - RNA, 19 nt, Artificial Sequence
  Description of Artificial Sequence: Synthetic oligonucleotide
  Sense strand starting at position 1358 of SEQ ID NO: 1561043
cugagacauucucgaaccu

SEQ ID NO: 1642530 - RNA, 19 nt, Artificial Sequence
  Description of Artificial Sequence: Synthetic oligonucleotide
  Antisense strand to SEQ ID NO: 1642529
agguucgagaaugucucag

SEQ ID NO: 1642531 - RNA, 19 nt, Artificial Sequence
  Description of Artificial Sequence: Synthetic oligonucleotide
  Sense strand starting at position 1359 of SEQ ID NO: 1561043
ugagacauucucgaaccuu

SEQ ID NO: 1642532 - RNA, 19 nt, Artificial Sequence
  Description of Artificial Sequence: Synthetic oligonucleotide
  Antisense strand to SEQ ID NO: 1642531
aagguucgagaaugucuca

SEQ ID NO: 1642533 - RNA, 19 nt, Artificial Sequence
  Description of Artificial Sequence: Synthetic oligonucleotide
  Sense strand starting at position 1400 of SEQ ID NO: 1561043
ccgcgacuguucgggauau

SEQ ID NO: 1642534 - RNA, 19 nt, Artificial Sequence
  Description of Artificial Sequence: Synthetic oligonucleotide
  Antisense strand to SEQ ID NO: 1642533
auaucccgaacagucgcgg

SEQ ID NO: 1642535 - RNA, 19 nt, Artificial Sequence
  Description of Artificial Sequence: Synthetic oligonucleotide
  Sense strand starting at position 1401 of SEQ ID NO: 1561043
cgcgacuguucgggauauu

SEQ ID NO: 1642536 - RNA, 19 nt, Artificial Sequence
  Description of Artificial Sequence: Synthetic oligonucleotide
  Antisense strand to SEQ ID NO: 1642535
aauaucccgaacagucgcg

SEQ ID NO: 1642537 - RNA, 19 nt, Artificial Sequence
  Description of Artificial Sequence: Synthetic oligonucleotide
  Sense strand starting at position 1402 of SEQ ID NO: 1561043
gcgacuguucgggauauug

SEQ ID NO: 1642538 - RNA, 19 nt, Artificial Sequence
  Description of Artificial Sequence: Synthetic oligonucleotide
  Antisense strand to SEQ ID NO: 1642537
caauaucccgaacagucgc

SEQ ID NO: 1642539 - RNA, 19 nt, Artificial Sequence
  Description of Artificial Sequence: Synthetic oligonucleotide
  Sense strand starting at position 1447 of SEQ ID NO: 1561043
agccuuaggucccuuuaca

SEQ ID NO: 1642540 - RNA, 19 nt, Artificial Sequence
  Description of Artificial Sequence: Synthetic oligonucleotide
  Antisense strand to SEQ ID NO: 1642539
uguaaagggaccuaaggcu

SEQ ID NO: 1642541 - RNA, 19 nt, Artificial Sequence
  Description of Artificial Sequence: Synthetic oligonucleotide
  Sense strand starting at position 1763 of SEQ ID NO: 1561043
ugggcuuaccaauaaacga

SEQ ID NO: 1642542 - RNA, 19 nt, Artificial Sequence
  Description of Artificial Sequence: Synthetic oligonucleotide
  Antisense strand to SEQ ID NO: 1642541
ucguuuauugguaagccca

SEQ ID NO: 1642543 - RNA, 19 nt, Artificial Sequence
  Description of Artificial Sequence: Synthetic oligonucleotide
  Sense strand starting at position 2045 of SEQ ID NO: 1561043
uccuguugggcuggagaga

SEQ ID NO: 1642544 - RNA, 19 nt, Artificial Sequence
  Description of Artificial Sequence: Synthetic oligonucleotide
  Antisense strand to SEQ ID NO: 1642543
ucucuccagcccaacagga

SEQ ID NO: 1642545 - RNA, 19 nt, Artificial Sequence
  Description of Artificial Sequence: Synthetic oligonucleotide
  Sense strand starting at position 2056 of SEQ ID NO: 1561043
uggagagagucucgauaca

SEQ ID NO: 1642546 - RNA, 19 nt, Artificial Sequence
  Description of Artificial Sequence: Synthetic oligonucleotide
  Antisense strand to SEQ ID NO: 1642545
uguaucgagacucucucca

SEQ ID NO: 1642547 - RNA, 19 nt, Artificial Sequence
  Description of Artificial Sequence: Synthetic oligonucleotide
  Sense strand starting at position 2378 of SEQ ID NO: 1561043
ggcccacaguugccuuaua

SEQ ID NO: 1642548 - RNA, 19 nt, Artificial Sequence
  Description of Artificial Sequence: Synthetic oligonucleotide
  Antisense strand to SEQ ID NO: 1642547
uauaaggcaacugugggcc

SEQ ID NO: 1642549 - RNA, 19 nt, Artificial Sequence
  Description of Artificial Sequence: Synthetic oligonucleotide
  Sense strand starting at position 2379 of SEQ ID NO: 1561043
gcccacaguugccuuauaa

SEQ ID NO: 1642550 - RNA, 19 nt, Artificial Sequence
  Description of Artificial Sequence: Synthetic oligonucleotide
  Antisense strand to SEQ ID NO: 1642549
uuauaaggcaacugugggc

SEQ ID NO: 1642551 - RNA, 19 nt, Artificial Sequence
  Description of Artificial Sequence: Synthetic oligonucleotide
  Sense strand starting at position 2383 of SEQ ID NO: 1561043
acaguugccuuauaaagac

SEQ ID NO: 1642552 - RNA, 19 nt, Artificial Sequence
  Description of Artificial Sequence: Synthetic oligonucleotide
  Antisense strand to SEQ ID NO: 1642551
gucuuuauaaggcaacugu

SEQ ID NO: 1642553 - RNA, 19 nt, Artificial Sequence
  Description of Artificial Sequence: Synthetic oligonucleotide
  Sense strand starting at position 3565 of SEQ ID NO: 1561043
acuccuguuugggcgacaa

SEQ ID NO: 1642554 - RNA, 19 nt, Artificial Sequence
  Description of Artificial Sequence: Synthetic oligonucleotide
  Antisense strand to SEQ ID NO: 1642553
uugucgcccaaacaggagu

SEQ ID NO: 1642555 - RNA, 19 nt, Artificial Sequence
  Description of Artificial Sequence: Synthetic oligonucleotide
  Sense strand starting at position 3567 of SEQ ID NO: 1561043
uccuguuugggcgacaaga

SEQ ID NO: 1642556 - RNA, 19 nt, Artificial Sequence
  Description of Artificial Sequence: Synthetic oligonucleotide
  Antisense strand to SEQ ID NO: 1642555
ucuugucgcccaaacagga

SEQ ID NO: 1642557 - RNA, 19 nt, Artificial Sequence
  Description of Artificial Sequence: Synthetic oligonucleotide
  Sense strand starting at position 3722 of SEQ ID NO: 1561043
cauggaaagugcuagaaac

SEQ ID NO: 1642558 - RNA, 19 nt, Artificial Sequence
  Description of Artificial Sequence: Synthetic oligonucleotide
  Antisense strand to SEQ ID NO: 1642557
guuucuagcacuuuccaug

SEQ ID NO: 1642559 - RNA, 19 nt, Artificial Sequence
  Description of Artificial Sequence: Synthetic oligonucleotide
  Sense strand starting at position 3798 of SEQ ID NO: 1561043
uuuggaaguuggguguaau

SEQ ID NO: 1642560 - RNA, 19 nt, Artificial Sequence
  Description of Artificial Sequence: Synthetic oligonucleotide
  Antisense strand to SEQ ID NO: 1642559
auuacacccaacuuccaaa

SEQ ID NO: 1642561 - RNA, 19 nt, Artificial Sequence
  Description of Artificial Sequence: Synthetic oligonucleotide
  Sense strand starting at position 3809 of SEQ ID NO: 1561043
gguguaauugccuacagga

SEQ ID NO: 1642562 - RNA, 19 nt, Artificial Sequence
  Description of Artificial Sequence: Synthetic oligonucleotide
  Antisense strand to SEQ ID NO: 1642561
uccuguaggcaauuacacc

SEQ ID NO: 1642563 - RNA, 19 nt, Artificial Sequence
  Description of Artificial Sequence: Synthetic oligonucleotide
  Sense strand starting at position 3811 of SEQ ID NO: 1561043
uguaauugccuacaggaaa

SEQ ID NO: 1642564 - RNA, 19 nt, Artificial Sequence
  Description of Artificial Sequence: Synthetic oligonucleotide
  Antisense strand to SEQ ID NO: 1642563
uuuccuguaggcaauuaca

SEQ ID NO: 1642565 - RNA, 19 nt, Artificial Sequence
  Description of Artificial Sequence: Synthetic oligonucleotide
  Sense strand starting at position 3928 of SEQ ID NO: 1561043
ggagugaucuggcagguag

SEQ ID NO: 1642566 - RNA, 19 nt, Artificial Sequence
  Description of Artificial Sequence: Synthetic oligonucleotide
  Antisense strand to SEQ ID NO: 1642565
cuaccugccagaucacucc

SEQ ID NO: 1642567 - RNA, 19 nt, Artificial Sequence
  Description of Artificial Sequence: Synthetic oligonucleotide
  Sense strand starting at position 3980 of SEQ ID NO: 1561043
cuuccauuagaugguugau

SEQ ID NO: 1642568 - RNA, 19 nt, Artificial Sequence
  Description of Artificial Sequence: Synthetic oligonucleotide
  Antisense strand to SEQ ID NO: 1642567
aucaaccaucuaauggaag

SEQ ID NO: 1642569 - RNA, 19 nt, Artificial Sequence
  Description of Artificial Sequence: Synthetic oligonucleotide
  Sense strand starting at position 3982 of SEQ ID NO: 1561043
uccauuagaugguugaugu

SEQ ID NO: 1642570 - RNA, 19 nt, Artificial Sequence
  Description of Artificial Sequence: Synthetic oligonucleotide
  Antisense strand to SEQ ID NO: 1642569
acaucaaccaucuaaugga

SEQ ID NO: 1642571 - RNA, 19 nt, Artificial Sequence
  Description of Artificial Sequence: Synthetic oligonucleotide
  Sense strand starting at position 471 of SEQ ID NO: 1561044
uuuauugucuacuaugacu

SEQ ID NO: 1642572 - RNA, 19 nt, Artificial Sequence
  Description of Artificial Sequence: Synthetic oligonucleotide
  Antisense strand to SEQ ID NO: 1642571
agucauaguagacaauaaa

SEQ ID NO: 1642573 - RNA, 19 nt, Artificial Sequence
  Description of Artificial Sequence: Synthetic oligonucleotide
  Sense strand starting at position 477 of SEQ ID NO: 1561044
gucuacuaugacuauguuu

SEQ ID NO: 1642574 - RNA, 19 nt, Artificial Sequence
  Description of Artificial Sequence: Synthetic oligonucleotide
  Antisense strand to SEQ ID NO: 1642573
aaacauagucauaguagac

SEQ ID NO: 1642575 - RNA, 19 nt, Artificial Sequence
  Description of Artificial Sequence: Synthetic oligonucleotide
  Sense strand starting at position 583 of SEQ ID NO: 1561044
agagaaggcuccuguaagg

SEQ ID NO: 1642576 - RNA, 19 nt, Artificial Sequence
  Description of Artificial Sequence: Synthetic oligonucleotide
  Antisense strand to SEQ ID NO: 1642575
ccuuacaggagccuucucu

SEQ ID NO: 1642577 - RNA, 19 nt, Artificial Sequence
  Description of Artificial Sequence: Synthetic oligonucleotide
  Sense strand starting at position 593 of SEQ ID NO: 1561044
ccuguaaggaggugacauu

SEQ ID NO: 1642578 - RNA, 19 nt, Artificial Sequence
  Description of Artificial Sequence: Synthetic oligonucleotide
  Antisense strand to SEQ ID NO: 1642577
aaugucaccuccuuacagg

SEQ ID NO: 1642579 - RNA, 19 nt, Artificial Sequence
  Description of Artificial Sequence: Synthetic oligonucleotide
  Sense strand starting at position 633 of SEQ ID NO: 1561044
agaagucagccaugggaga

SEQ ID NO: 1642580 - RNA, 19 nt, Artificial Sequence
  Description of Artificial Sequence: Synthetic oligonucleotide
  Antisense strand to SEQ ID NO: 1642579
ucucccauggcugacuucu

SEQ ID NO: 1642581 - RNA, 19 nt, Artificial Sequence
  Description of Artificial Sequence: Synthetic oligonucleotide
  Sense strand starting at position 718 of SEQ ID NO: 1561044
ugggcuugaacuggaaaga

SEQ ID NO: 1642582 - RNA, 19 nt, Artificial Sequence
  Description of Artificial Sequence: Synthetic oligonucleotide
  Antisense strand to SEQ ID NO: 1642581
ucuuuccaguucaagccca

SEQ ID NO: 1642583 - RNA, 19 nt, Artificial Sequence
  Description of Artificial Sequence: Synthetic oligonucleotide
  Sense strand starting at position 914 of SEQ ID NO: 1561044
cugugagcugauuagguuu

SEQ ID NO: 1642584 - RNA, 19 nt, Artificial Sequence
  Description of Artificial Sequence: Synthetic oligonucleotide
  Antisense strand to SEQ ID NO: 1642583
aaaccuaaucagcucacag

SEQ ID NO: 1642585 - RNA, 19 nt, Artificial Sequence
  Description of Artificial Sequence: Synthetic oligonucleotide
  Sense strand starting at position 922 of SEQ ID NO: 1561044
ugauuagguuuccggaaga

SEQ ID NO: 1642586 - RNA, 19 nt, Artificial Sequence
  Description of Artificial Sequence: Synthetic oligonucleotide
  Antisense strand to SEQ ID NO: 1642585
ucuuccggaaaccuaauca

SEQ ID NO: 1642587 - RNA, 19 nt, Artificial Sequence
  Description of Artificial Sequence: Synthetic oligonucleotide
  Sense strand starting at position 1090 of SEQ ID NO: 1561044
aggacuuauuugggaggca

SEQ ID NO: 1642588 - RNA, 19 nt, Artificial Sequence
  Description of Artificial Sequence: Synthetic oligonucleotide
  Antisense strand to SEQ ID NO: 1642587
ugccucccaaauaaguccu

SEQ ID NO: 1642589 - RNA, 19 nt, Artificial Sequence
  Description of Artificial Sequence: Synthetic oligonucleotide
  Sense strand starting at position 1116 of SEQ ID NO: 1561044
cagggcuugucgggaaauc

SEQ ID NO: 1642590 - RNA, 19 nt, Artificial Sequence
  Description of Artificial Sequence: Synthetic oligonucleotide
  Antisense strand to SEQ ID NO: 1642589
gauuucccgacaagcccug

SEQ ID NO: 1642591 - RNA, 19 nt, Artificial Sequence
  Description of Artificial Sequence: Synthetic oligonucleotide
  Sense strand starting at position 1146 of SEQ ID NO: 1561044
cggguucagucacugagau

SEQ ID NO: 1642592 - RNA, 19 nt, Artificial Sequence
  Description of Artificial Sequence: Synthetic oligonucleotide
  Antisense strand to SEQ ID NO: 1642591
aucucagugacugaacccg

SEQ ID NO: 1642593 - RNA, 19 nt, Artificial Sequence
  Description of Artificial Sequence: Synthetic oligonucleotide
  Sense strand starting at position 1147 of SEQ ID NO: 1561044
ggguucagucacugagaua

SEQ ID NO: 1642594 - RNA, 19 nt, Artificial Sequence
  Description of Artificial Sequence: Synthetic oligonucleotide
  Antisense strand to SEQ ID NO: 1642593
uaucucagugacugaaccc

SEQ ID NO: 1642595 - RNA, 19 nt, Artificial Sequence
  Description of Artificial Sequence: Synthetic oligonucleotide
  Sense strand starting at position 1158 of SEQ ID NO: 1561044
cugagauaaguuugagggu

SEQ ID NO: 1642596 - RNA, 19 nt, Artificial Sequence
  Description of Artificial Sequence: Synthetic oligonucleotide
  Antisense strand to SEQ ID NO: 1642595
acccucaaacuuaucucag

SEQ ID NO: 1642597 - RNA, 19 nt, Artificial Sequence
  Description of Artificial Sequence: Synthetic oligonucleotide
  Sense strand starting at position 1174 of SEQ ID NO: 1561044
gguccacuguucuuggagu

SEQ ID NO: 1642598 - RNA, 19 nt, Artificial Sequence
  Description of Artificial Sequence: Synthetic oligonucleotide
  Antisense strand to SEQ ID NO: 1642597
acuccaagaacaguggacc

SEQ ID NO: 1642599 - RNA, 19 nt, Artificial Sequence
  Description of Artificial Sequence: Synthetic oligonucleotide
  Sense strand starting at position 1485 of SEQ ID NO: 1561044
ccgauucccggcugugauu

SEQ ID NO: 1642600 - RNA, 19 nt, Artificial Sequence
  Description of Artificial Sequence: Synthetic oligonucleotide
  Antisense strand to SEQ ID NO: 1642599
aaucacagccgggaaucgg

SEQ ID NO: 1642601 - RNA, 19 nt, Artificial Sequence
  Description of Artificial Sequence: Synthetic oligonucleotide
  Sense strand starting at position 1775 of SEQ ID NO: 1561044
gaucgaacucugugaagga

SEQ ID NO: 1642602 - RNA, 19 nt, Artificial Sequence
  Description of Artificial Sequence: Synthetic oligonucleotide
  Antisense strand to SEQ ID NO: 1642601
uccuucacagaguucgauc

SEQ ID NO: 1642603 - RNA, 19 nt, Artificial Sequence
  Description of Artificial Sequence: Synthetic oligonucleotide
  Sense strand starting at position 2406 of SEQ ID NO: 1561044
ccuaccucuugacaggaua

SEQ ID NO: 1642604 - RNA, 19 nt, Artificial Sequence
  Description of Artificial Sequence: Synthetic oligonucleotide
  Antisense strand to SEQ ID NO: 1642603
uauccugucaagagguagg

SEQ ID NO: 1642605 - RNA, 19 nt, Artificial Sequence
  Description of Artificial Sequence: Synthetic oligonucleotide
  Sense strand starting at position 2414 of SEQ ID NO: 1561044
uugacaggauacuuuaagu

SEQ ID NO: 1642606 - RNA, 19 nt, Artificial Sequence
  Description of Artificial Sequence: Synthetic oligonucleotide
  Antisense strand to SEQ ID NO: 1642605
acuuaaaguauccugucaa

SEQ ID NO: 1642607 - RNA, 19 nt, Artificial Sequence
  Description of Artificial Sequence: Synthetic oligonucleotide
  Sense strand starting at position 2423 of SEQ ID NO: 1561044
uacuuuaaguaggaucgua

SEQ ID NO: 1642608 - RNA, 19 nt, Artificial Sequence
  Description of Artificial Sequence: Synthetic oligonucleotide
  Antisense strand to SEQ ID NO: 1642607
uacgauccuacuuaaagua

SEQ ID NO: 1642609 - RNA, 19 nt, Artificial Sequence
  Description of Artificial Sequence: Synthetic oligonucleotide
  Sense strand starting at position 2428 of SEQ ID NO: 1561044
uaaguaggaucguaucuau

SEQ ID NO: 1642610 - RNA, 19 nt, Artificial Sequence
  Description of Artificial Sequence: Synthetic oligonucleotide
  Antisense strand to SEQ ID NO: 1642609
auagauacgauccuacuua

SEQ ID NO: 1642611 - RNA, 19 nt, Artificial Sequence
  Description of Artificial Sequence: Synthetic oligonucleotide
  Sense strand starting at position 2431 of SEQ ID NO: 1561044
guaggaucguaucuauaag

SEQ ID NO: 1642612 - RNA, 19 nt, Artificial Sequence
  Description of Artificial Sequence: Synthetic oligonucleotide
  Antisense strand to SEQ ID NO: 1642611
cuuauagauacgauccuac

SEQ ID NO: 1642613 - RNA, 19 nt, Artificial Sequence
  Description of Artificial Sequence: Synthetic oligonucleotide
  Sense strand starting at position 2437 of SEQ ID NO: 1561044
ucguaucuauaagaacaca

SEQ ID NO: 1642614 - RNA, 19 nt, Artificial Sequence
  Description of Artificial Sequence: Synthetic oligonucleotide
  Antisense strand to SEQ ID NO: 1642613
uguguucuuauagauacga

SEQ ID NO: 1642615 - RNA, 19 nt, Artificial Sequence
  Description of Artificial Sequence: Synthetic oligonucleotide
  Sense strand starting at position 2482 of SEQ ID NO: 1561044
guuggacuuaauugugguu

SEQ ID NO: 1642616 - RNA, 19 nt, Artificial Sequence
  Description of Artificial Sequence: Synthetic oligonucleotide
  Antisense strand to SEQ ID NO: 1642615
aaccacaauuaaguccaac

SEQ ID NO: 1642617 - RNA, 19 nt, Artificial Sequence
  Description of Artificial Sequence: Synthetic oligonucleotide
  Sense strand starting at position 2484 of SEQ ID NO: 1561044
uggacuuaauugugguuaa

SEQ ID NO: 1642618 - RNA, 19 nt, Artificial Sequence
  Description of Artificial Sequence: Synthetic oligonucleotide
  Antisense strand to SEQ ID NO: 1642617
uuaaccacaauuaagucca

SEQ ID NO: 1642619 - RNA, 19 nt, Artificial Sequence
  Description of Artificial Sequence: Synthetic oligonucleotide
  Sense strand starting at position 2485 of SEQ ID NO: 1561044
ggacuuaauugugguuaaa

SEQ ID NO: 1642620 - RNA, 19 nt, Artificial Sequence
  Description of Artificial Sequence: Synthetic oligonucleotide
  Antisense strand to SEQ ID NO: 1642619
uuuaaccacaauuaagucc

SEQ ID NO: 1642621 - RNA, 19 nt, Artificial Sequence
  Description of Artificial Sequence: Synthetic oligonucleotide
  Sense strand starting at position 2487 of SEQ ID NO: 1561044
acuuaauugugguuaaagg

SEQ ID NO: 1642622 - RNA, 19 nt, Artificial Sequence
  Description of Artificial Sequence: Synthetic oligonucleotide
  Antisense strand to SEQ ID NO: 1642621
ccuuuaaccacaauuaagu

SEQ ID NO: 1642623 - RNA, 19 nt, Artificial Sequence
  Description of Artificial Sequence: Synthetic oligonucleotide
  Sense strand starting at position 2602 of SEQ ID NO: 1561044
uggucuguuucuccuuuaa

SEQ ID NO: 1642624 - RNA, 19 nt, Artificial Sequence
  Description of Artificial Sequence: Synthetic oligonucleotide
  Antisense strand to SEQ ID NO: 1642623
uuaaaggagaaacagacca

SEQ ID NO: 1642625 - RNA, 19 nt, Artificial Sequence
  Description of Artificial Sequence: Synthetic oligonucleotide
  Sense strand starting at position 2638 of SEQ ID NO: 1561044
ccuaguuuacaggauuguu

SEQ ID NO: 1642626 - RNA, 19 nt, Artificial Sequence
  Description of Artificial Sequence: Synthetic oligonucleotide
  Antisense strand to SEQ ID NO: 1642625
aacaauccuguaaacuagg

SEQ ID NO: 1642627 - RNA, 19 nt, Artificial Sequence
  Description of Artificial Sequence: Synthetic oligonucleotide
  Sense strand starting at position 3032 of SEQ ID NO: 1561044
cgcccagcugcuuauuauu

SEQ ID NO: 1642628 - RNA, 19 nt, Artificial Sequence
  Description of Artificial Sequence: Synthetic oligonucleotide
  Antisense strand to SEQ ID NO: 1642627
aauaauaagcagcugggcg

SEQ ID NO: 1642629 - RNA, 19 nt, Artificial Sequence
  Description of Artificial Sequence: Synthetic oligonucleotide
  Sense strand starting at position 3231 of SEQ ID NO: 1561044
caacguuguuucuuuguua

SEQ ID NO: 1642630 - RNA, 19 nt, Artificial Sequence
  Description of Artificial Sequence: Synthetic oligonucleotide
  Antisense strand to SEQ ID NO: 1642629
uaacaaagaaacaacguug

SEQ ID NO: 1642631 - RNA, 19 nt, Artificial Sequence
  Description of Artificial Sequence: Synthetic oligonucleotide
  Sense strand starting at position 3234 of SEQ ID NO: 1561044
cguuguuucuuuguuagua

SEQ ID NO: 1642632 - RNA, 19 nt, Artificial Sequence
  Description of Artificial Sequence: Synthetic oligonucleotide
  Antisense strand to SEQ ID NO: 1642631
uacuaacaaagaaacaacg

SEQ ID NO: 1642633 - RNA, 19 nt, Artificial Sequence
  Description of Artificial Sequence: Synthetic oligonucleotide
  Sense strand starting at position 3235 of SEQ ID NO: 1561044
guuguuucuuuguuaguag

SEQ ID NO: 1642634 - RNA, 19 nt, Artificial Sequence
  Description of Artificial Sequence: Synthetic oligonucleotide
  Antisense strand to SEQ ID NO: 1642633
cuacuaacaaagaaacaac

SEQ ID NO: 1642635 - RNA, 19 nt, Artificial Sequence
  Description of Artificial Sequence: Synthetic oligonucleotide
  Sense strand starting at position 3249 of SEQ ID NO: 1561044
aguaguaauagcuguugua

SEQ ID NO: 1642636 - RNA, 19 nt, Artificial Sequence
  Description of Artificial Sequence: Synthetic oligonucleotide
  Antisense strand to SEQ ID NO: 1642635
uacaacagcuauuacuacu

SEQ ID NO: 1642637 - RNA, 19 nt, Artificial Sequence
  Description of Artificial Sequence: Synthetic oligonucleotide
  Sense strand starting at position 3393 of SEQ ID NO: 1561044
aauugauaguuguuagcua

SEQ ID NO: 1642638 - RNA, 19 nt, Artificial Sequence
  Description of Artificial Sequence: Synthetic oligonucleotide
  Antisense strand to SEQ ID NO: 1642637
uagcuaacaacuaucaauu

SEQ ID NO: 1642639 - RNA, 19 nt, Artificial Sequence
  Description of Artificial Sequence: Synthetic oligonucleotide
  Sense strand starting at position 3397 of SEQ ID NO: 1561044
gauaguuguuagcuaggca

SEQ ID NO: 1642640 - RNA, 19 nt, Artificial Sequence
  Description of Artificial Sequence: Synthetic oligonucleotide
  Antisense strand to SEQ ID NO: 1642639
ugccuagcuaacaacuauc

SEQ ID NO: 1642641 - RNA, 19 nt, Artificial Sequence
  Description of Artificial Sequence: Synthetic oligonucleotide
  Sense strand starting at position 3398 of SEQ ID NO: 1561044
auaguuguuagcuaggcaa

SEQ ID NO: 1642642 - RNA, 19 nt, Artificial Sequence
  Description of Artificial Sequence: Synthetic oligonucleotide
  Antisense strand to SEQ ID NO: 1642641
uugccuagcuaacaacuau

SEQ ID NO: 1642643 - RNA, 19 nt, Artificial Sequence
  Description of Artificial Sequence: Synthetic oligonucleotide
  Sense strand starting at position 3400 of SEQ ID NO: 1561044
aguuguuagcuaggcaaca

SEQ ID NO: 1642644 - RNA, 19 nt, Artificial Sequence
  Description of Artificial Sequence: Synthetic oligonucleotide
  Antisense strand to SEQ ID NO: 1642643
uguugccuagcuaacaacu

SEQ ID NO: 1642645 - RNA, 19 nt, Artificial Sequence
  Description of Artificial Sequence: Synthetic oligonucleotide
  Sense strand starting at position 3401 of SEQ ID NO: 1561044
guuguuagcuaggcaacaa

SEQ ID NO: 1642646 - RNA, 19 nt, Artificial Sequence
  Description of Artificial Sequence: Synthetic oligonucleotide
  Antisense strand to SEQ ID NO: 1642645
uuguugccuagcuaacaac

SEQ ID NO: 1642647 - RNA, 19 nt, Artificial Sequence
  Description of Artificial Sequence: Synthetic oligonucleotide
  Sense strand starting at position 3419 of SEQ ID NO: 1561044
acuguaauccaguacuuug

SEQ ID NO: 1642648 - RNA, 19 nt, Artificial Sequence
  Description of Artificial Sequence: Synthetic oligonucleotide
  Antisense strand to SEQ ID NO: 1642647
caaaguacuggauuacagu

SEQ ID NO: 1642649 - RNA, 19 nt, Artificial Sequence
  Description of Artificial Sequence: Synthetic oligonucleotide
  Sense strand starting at position 3959 of SEQ ID NO: 1561044
gcugcacucuagucugagu

SEQ ID NO: 1642650 - RNA, 19 nt, Artificial Sequence
  Description of Artificial Sequence: Synthetic oligonucleotide
  Antisense strand to SEQ ID NO: 1642649
acucagacuagagugcagc

SEQ ID NO: 1642651 - RNA, 19 nt, Artificial Sequence
  Description of Artificial Sequence: Synthetic oligonucleotide
  Sense strand starting at position 129 of SEQ ID NO: 1561045
ugucauguacaaugauaca

SEQ ID NO: 1642652 - RNA, 19 nt, Artificial Sequence
  Description of Artificial Sequence: Synthetic oligonucleotide
  Antisense strand to SEQ ID NO: 1642651
uguaucauuguacaugaca

SEQ ID NO: 1642653 - RNA, 19 nt, Artificial Sequence
  Description of Artificial Sequence: Synthetic oligonucleotide
  Sense strand starting at position 167 of SEQ ID NO: 1561045
ggaaguggugcugauguuu

SEQ ID NO: 1642654 - RNA, 19 nt, Artificial Sequence
  Description of Artificial Sequence: Synthetic oligonucleotide
  Antisense strand to SEQ ID NO: 1642653
aaacaucagcaccacuucc

SEQ ID NO: 1642655 - RNA, 19 nt, Artificial Sequence
  Description of Artificial Sequence: Synthetic oligonucleotide
  Sense strand starting at position 172 of SEQ ID NO: 1561045
uggugcugauguuuaggaa

SEQ ID NO: 1642656 - RNA, 19 nt, Artificial Sequence
  Description of Artificial Sequence: Synthetic oligonucleotide
  Antisense strand to SEQ ID NO: 1642655
uuccuaaacaucagcacca

SEQ ID NO: 1642657 - RNA, 19 nt, Artificial Sequence
  Description of Artificial Sequence: Synthetic oligonucleotide
  Sense strand starting at position 489 of SEQ ID NO: 1561045
ggcagagccuggguuucua

SEQ ID NO: 1642658 - RNA, 19 nt, Artificial Sequence
  Description of Artificial Sequence: Synthetic oligonucleotide
  Antisense strand to SEQ ID NO: 1642657
uagaaacccaggcucugcc

SEQ ID NO: 1642659 - RNA, 19 nt, Artificial Sequence
  Description of Artificial Sequence: Synthetic oligonucleotide
  Sense strand starting at position 906 of SEQ ID NO: 1561045
ugauuuccaugaugugauc

SEQ ID NO: 1642660 - RNA, 19 nt, Artificial Sequence
  Description of Artificial Sequence: Synthetic oligonucleotide
  Antisense strand to SEQ ID NO: 1642659
gaucacaucauggaaauca

SEQ ID NO: 1642661 - RNA, 19 nt, Artificial Sequence
  Description of Artificial Sequence: Synthetic oligonucleotide
  Sense strand starting at position 1014 of SEQ ID NO: 1561045
augugucaauguccagaaa

SEQ ID NO: 1642662 - RNA, 19 nt, Artificial Sequence
  Description of Artificial Sequence: Synthetic oligonucleotide
  Antisense strand to SEQ ID NO: 1642661
uuucuggacauugacacau

SEQ ID NO: 1642663 - RNA, 19 nt, Artificial Sequence
  Description of Artificial Sequence: Synthetic oligonucleotide
  Sense strand starting at position 1032 of SEQ ID NO: 1561045
agaagucauccaggccaga

SEQ ID NO: 1642664 - RNA, 19 nt, Artificial Sequence
  Description of Artificial Sequence: Synthetic oligonucleotide
  Antisense strand to SEQ ID NO: 1642663
ucuggccuggaugacuucu

SEQ ID NO: 1642665 - RNA, 19 nt, Artificial Sequence
  Description of Artificial Sequence: Synthetic oligonucleotide
  Sense strand starting at position 1173 of SEQ ID NO: 1561045
uguccagcucccugaggau

SEQ ID NO: 1642666 - RNA, 19 nt, Artificial Sequence
  Description of Artificial Sequence: Synthetic oligonucleotide
  Antisense strand to SEQ ID NO: 1642665
auccucagggagcuggaca

SEQ ID NO: 1642667 - RNA, 19 nt, Artificial Sequence
  Description of Artificial Sequence: Synthetic oligonucleotide
  Sense strand starting at position 1299 of SEQ ID NO: 1561045
ggguguuauggaugaggac

SEQ ID NO: 1642668 - RNA, 19 nt, Artificial Sequence
  Description of Artificial Sequence: Synthetic oligonucleotide
  Antisense strand to SEQ ID NO: 1642667
guccucauccauaacaccc

SEQ ID NO: 1642669 - RNA, 19 nt, Artificial Sequence
  Description of Artificial Sequence: Synthetic oligonucleotide
  Sense strand starting at position 1356 of SEQ ID NO: 1561045
gcuggacuuugucuaggga

SEQ ID NO: 1642670 - RNA, 19 nt, Artificial Sequence
  Description of Artificial Sequence: Synthetic oligonucleotide
  Antisense strand to SEQ ID NO: 1642669
ucccuagacaaaguccagc

SEQ ID NO: 1642671 - RNA, 19 nt, Artificial Sequence
  Description of Artificial Sequence: Synthetic oligonucleotide
  Sense strand starting at position 1359 of SEQ ID NO: 1561045
ggacuuugucuagggagau

SEQ ID NO: 1642672 - RNA, 19 nt, Artificial Sequence
  Description of Artificial Sequence: Synthetic oligonucleotide
  Antisense strand to SEQ ID NO: 1642671
aucucccuagacaaagucc

SEQ ID NO: 1642673 - RNA, 19 nt, Artificial Sequence
  Description of Artificial Sequence: Synthetic oligonucleotide
  Sense strand starting at position 1532 of SEQ ID NO: 1561045
accguagugcuggcucaua

SEQ ID NO: 1642674 - RNA, 19 nt, Artificial Sequence
  Description of Artificial Sequence: Synthetic oligonucleotide
  Antisense strand to SEQ ID NO: 1642673
uaugagccagcacuacggu

SEQ ID NO: 1642675 - RNA, 19 nt, Artificial Sequence
  Description of Artificial Sequence: Synthetic oligonucleotide
  Sense strand starting at position 1562 of SEQ ID NO: 1561045
caggccuauugaguuguua

SEQ ID NO: 1642676 - RNA, 19 nt, Artificial Sequence
  Description of Artificial Sequence: Synthetic oligonucleotide
  Antisense strand to SEQ ID NO: 1642675
uaacaacucaauaggccug

SEQ ID NO: 1642677 - RNA, 19 nt, Artificial Sequence
  Description of Artificial Sequence: Synthetic oligonucleotide
  Sense strand starting at position 1564 of SEQ ID NO: 1561045
ggccuauugaguuguuagu

SEQ ID NO: 1642678 - RNA, 19 nt, Artificial Sequence
  Description of Artificial Sequence: Synthetic oligonucleotide
  Antisense strand to SEQ ID NO: 1642677
acuaacaacucaauaggcc

SEQ ID NO: 1642679 - RNA, 19 nt, Artificial Sequence
  Description of Artificial Sequence: Synthetic oligonucleotide
  Sense strand starting at position 1566 of SEQ ID NO: 1561045
ccuauugaguuguuaguga

SEQ ID NO: 1642680 - RNA, 19 nt, Artificial Sequence
  Description of Artificial Sequence: Synthetic oligonucleotide
  Antisense strand to SEQ ID NO: 1642679
ucacuaacaacucaauagg

SEQ ID NO: 1642681 - RNA, 19 nt, Artificial Sequence
  Description of Artificial Sequence: Synthetic oligonucleotide
  Sense strand starting at position 1594 of SEQ ID NO: 1561045
aucggaaucucaguuuacu

SEQ ID NO: 1642682 - RNA, 19 nt, Artificial Sequence
  Description of Artificial Sequence: Synthetic oligonucleotide
  Antisense strand to SEQ ID NO: 1642681
aguaaacugagauuccgau

SEQ ID NO: 1642683 - RNA, 19 nt, Artificial Sequence
  Description of Artificial Sequence: Synthetic oligonucleotide
  Sense strand starting at position 1622 of SEQ ID NO: 1561045
aaugaaggcugucugaauc

SEQ ID NO: 1642684 - RNA, 19 nt, Artificial Sequence
  Description of Artificial Sequence: Synthetic oligonucleotide
  Antisense strand to SEQ ID NO: 1642683
gauucagacagccuucauu

SEQ ID NO: 1642685 - RNA, 19 nt, Artificial Sequence
  Description of Artificial Sequence: Synthetic oligonucleotide
  Sense strand starting at position 1632 of SEQ ID NO: 1561045
gucugaauccuacaaguuu

SEQ ID NO: 1642686 - RNA, 19 nt, Artificial Sequence
  Description of Artificial Sequence: Synthetic oligonucleotide
  Antisense strand to SEQ ID NO: 1642685
aaacuuguaggauucagac

SEQ ID NO: 1642687 - RNA, 19 nt, Artificial Sequence
  Description of Artificial Sequence: Synthetic oligonucleotide
  Sense strand starting at position 1649 of SEQ ID NO: 1561045
uuaagaaggugaguacaua

SEQ ID NO: 1642688 - RNA, 19 nt, Artificial Sequence
  Description of Artificial Sequence: Synthetic oligonucleotide
  Antisense strand to SEQ ID NO: 1642687
uauguacucaccuucuuaa

SEQ ID NO: 1642689 - RNA, 19 nt, Artificial Sequence
  Description of Artificial Sequence: Synthetic oligonucleotide
  Sense strand starting at position 1691 of SEQ ID NO: 1561045
gcguuacguacagcuagau

SEQ ID NO: 1642690 - RNA, 19 nt, Artificial Sequence
  Description of Artificial Sequence: Synthetic oligonucleotide
  Antisense strand to SEQ ID NO: 1642689
aucuagcuguacguaacgc

SEQ ID NO: 1642691 - RNA, 19 nt, Artificial Sequence
  Description of Artificial Sequence: Synthetic oligonucleotide
  Sense strand starting at position 1945 of SEQ ID NO: 1561045
cugcgugaucaugggaagu

SEQ ID NO: 1642692 - RNA, 19 nt, Artificial Sequence
  Description of Artificial Sequence: Synthetic oligonucleotide
  Antisense strand to SEQ ID NO: 1642691
acuucccaugaucacgcag

SEQ ID NO: 1642693 - RNA, 19 nt, Artificial Sequence
  Description of Artificial Sequence: Synthetic oligonucleotide
  Sense strand starting at position 1960 of SEQ ID NO: 1561045
aagugaucugaaugaguca

SEQ ID NO: 1642694 - RNA, 19 nt, Artificial Sequence
  Description of Artificial Sequence: Synthetic oligonucleotide
  Antisense strand to SEQ ID NO: 1642693
ugacucauucagaucacuu

SEQ ID NO: 1642695 - RNA, 19 nt, Artificial Sequence
  Description of Artificial Sequence: Synthetic oligonucleotide
  Sense strand starting at position 1963 of SEQ ID NO: 1561045
ugaucugaaugagucaauu

SEQ ID NO: 1642696 - RNA, 19 nt, Artificial Sequence
  Description of Artificial Sequence: Synthetic oligonucleotide
  Antisense strand to SEQ ID NO: 1642695
aauugacucauucagauca

SEQ ID NO: 1642697 - RNA, 19 nt, Artificial Sequence
  Description of Artificial Sequence: Synthetic oligonucleotide
  Sense strand starting at position 1975 of SEQ ID NO: 1561045
gucaauucucagggccuca

SEQ ID NO: 1642698 - RNA, 19 nt, Artificial Sequence
  Description of Artificial Sequence: Synthetic oligonucleotide
  Antisense strand to SEQ ID NO: 1642697
ugaggcccugagaauugac

SEQ ID NO: 1642699 - RNA, 19 nt, Artificial Sequence
  Description of Artificial Sequence: Synthetic oligonucleotide
  Sense strand starting at position 2051 of SEQ ID NO: 1561045
ggagaugccacguaucuau

SEQ ID NO: 1642700 - RNA, 19 nt, Artificial Sequence
  Description of Artificial Sequence: Synthetic oligonucleotide
  Antisense strand to SEQ ID NO: 1642699
auagauacguggcaucucc

SEQ ID NO: 1642701 - RNA, 19 nt, Artificial Sequence
  Description of Artificial Sequence: Synthetic oligonucleotide
  Sense strand starting at position 2082 of SEQ ID NO: 1561045
accggaagugcuuaaugaa

SEQ ID NO: 1642702 - RNA, 19 nt, Artificial Sequence
  Description of Artificial Sequence: Synthetic oligonucleotide
  Antisense strand to SEQ ID NO: 1642701
uucauuaagcacuuccggu

SEQ ID NO: 1642703 - RNA, 19 nt, Artificial Sequence
  Description of Artificial Sequence: Synthetic oligonucleotide
  Sense strand starting at position 2089 of SEQ ID NO: 1561045
gugcuuaaugaacaagagu

SEQ ID NO: 1642704 - RNA, 19 nt, Artificial Sequence
  Description of Artificial Sequence: Synthetic oligonucleotide
  Antisense strand to SEQ ID NO: 1642703
acucuuguucauuaagcac

SEQ ID NO: 1642705 - RNA, 19 nt, Artificial Sequence
  Description of Artificial Sequence: Synthetic oligonucleotide
  Sense strand starting at position 2096 of SEQ ID NO: 1561045
augaacaagaguuguguuu

SEQ ID NO: 1642706 - RNA, 19 nt, Artificial Sequence
  Description of Artificial Sequence: Synthetic oligonucleotide
  Antisense strand to SEQ ID NO: 1642705
aaacacaacucuuguucau

SEQ ID NO: 1642707 - RNA, 19 nt, Artificial Sequence
  Description of Artificial Sequence: Synthetic oligonucleotide
  Sense strand starting at position 2259 of SEQ ID NO: 1561045
ggccucgaucaagaguuaa

SEQ ID NO: 1642708 - RNA, 19 nt, Artificial Sequence
  Description of Artificial Sequence: Synthetic oligonucleotide
  Antisense strand to SEQ ID NO: 1642707
uuaacucuugaucgaggcc

SEQ ID NO: 1642709 - RNA, 19 nt, Artificial Sequence
  Description of Artificial Sequence: Synthetic oligonucleotide
  Sense strand starting at position 2269 of SEQ ID NO: 1561045
aagaguuaauugccaguua

SEQ ID NO: 1642710 - RNA, 19 nt, Artificial Sequence
  Description of Artificial Sequence: Synthetic oligonucleotide
  Antisense strand to SEQ ID NO: 1642709
uaacuggcaauuaacucuu

SEQ ID NO: 1642711 - RNA, 19 nt, Artificial Sequence
  Description of Artificial Sequence: Synthetic oligonucleotide
  Sense strand starting at position 2282 of SEQ ID NO: 1561045
caguuauucgcucaacaga

SEQ ID NO: 1642712 - RNA, 19 nt, Artificial Sequence
  Description of Artificial Sequence: Synthetic oligonucleotide
  Antisense strand to SEQ ID NO: 1642711
ucuguugagcgaauaacug

SEQ ID NO: 1642713 - RNA, 19 nt, Artificial Sequence
  Description of Artificial Sequence: Synthetic oligonucleotide
  Sense strand starting at position 2310 of SEQ ID NO: 1561045
ugccuacuauauucgaaau

SEQ ID NO: 1642714 - RNA, 19 nt, Artificial Sequence
  Description of Artificial Sequence: Synthetic oligonucleotide
  Antisense strand to SEQ ID NO: 1642713
auuucgaauauaguaggca

SEQ ID NO: 1642715 - RNA, 19 nt, Artificial Sequence
  Description of Artificial Sequence: Synthetic oligonucleotide
  Sense strand starting at position 2925 of SEQ ID NO: 1561045
gucccucuguuccuugaaa

SEQ ID NO: 1642716 - RNA, 19 nt, Artificial Sequence
  Description of Artificial Sequence: Synthetic oligonucleotide
  Antisense strand to SEQ ID NO: 1642715
uuucaaggaacagagggac

SEQ ID NO: 1642717 - RNA, 19 nt, Artificial Sequence
  Description of Artificial Sequence: Synthetic oligonucleotide
  Sense strand starting at position 2926 of SEQ ID NO: 1561045
ucccucuguuccuugaaag

SEQ ID NO: 1642718 - RNA, 19 nt, Artificial Sequence
  Description of Artificial Sequence: Synthetic oligonucleotide
  Antisense strand to SEQ ID NO: 1642717
cuuucaaggaacagaggga

SEQ ID NO: 1642719 - RNA, 19 nt, Artificial Sequence
  Description of Artificial Sequence: Synthetic oligonucleotide
  Sense strand starting at position 2927 of SEQ ID NO: 1561045
cccucuguuccuugaaagu

SEQ ID NO: 1642720 - RNA, 19 nt, Artificial Sequence
  Description of Artificial Sequence: Synthetic oligonucleotide
  Antisense strand to SEQ ID NO: 1642719
acuuucaaggaacagaggg

SEQ ID NO: 1642721 - RNA, 19 nt, Artificial Sequence
  Description of Artificial Sequence: Synthetic oligonucleotide
  Sense strand starting at position 2946 of SEQ ID NO: 1561045
ccgcgauucuccuuccaaa

SEQ ID NO: 1642722 - RNA, 19 nt, Artificial Sequence
  Description of Artificial Sequence: Synthetic oligonucleotide
  Antisense strand to SEQ ID NO: 1642721
uuuggaaggagaaucgcgg

SEQ ID NO: 1642723 - RNA, 19 nt, Artificial Sequence
  Description of Artificial Sequence: Synthetic oligonucleotide
  Sense strand starting at position 3010 of SEQ ID NO: 1561045
acgacaaugcuccgaucua

SEQ ID NO: 1642724 - RNA, 19 nt, Artificial Sequence
  Description of Artificial Sequence: Synthetic oligonucleotide
  Antisense strand to SEQ ID NO: 1642723
uagaucggagcauugucgu

SEQ ID NO: 1642725 - RNA, 19 nt, Artificial Sequence
  Description of Artificial Sequence: Synthetic oligonucleotide
  Sense strand starting at position 3023 of SEQ ID NO: 1561045
gaucuaguucgggagacua

SEQ ID NO: 1642726 - RNA, 19 nt, Artificial Sequence
  Description of Artificial Sequence: Synthetic oligonucleotide
  Antisense strand to SEQ ID NO: 1642725
uagucucccgaacuagauc

SEQ ID NO: 1642727 - RNA, 19 nt, Artificial Sequence
  Description of Artificial Sequence: Synthetic oligonucleotide
  Sense strand starting at position 3035 of SEQ ID NO: 1561045
gagacuacguauccuaauu

SEQ ID NO: 1642728 - RNA, 19 nt, Artificial Sequence
  Description of Artificial Sequence: Synthetic oligonucleotide
  Antisense strand to SEQ ID NO: 1642727
aauuaggauacguagucuc

SEQ ID NO: 1642729 - RNA, 19 nt, Artificial Sequence
  Description of Artificial Sequence: Synthetic oligonucleotide
  Sense strand starting at position 3130 of SEQ ID NO: 1561045
gcuccaagacccgaacauu

SEQ ID NO: 1642730 - RNA, 19 nt, Artificial Sequence
  Description of Artificial Sequence: Synthetic oligonucleotide
  Antisense strand to SEQ ID NO: 1642729
aauguucgggucuuggagc

SEQ ID NO: 1642731 - RNA, 19 nt, Artificial Sequence
  Description of Artificial Sequence: Synthetic oligonucleotide
  Sense strand starting at position 168 of SEQ ID NO: 1561046
cugcgugaucaugggaagu

SEQ ID NO: 1642732 - RNA, 19 nt, Artificial Sequence
  Description of Artificial Sequence: Synthetic oligonucleotide
  Antisense strand to SEQ ID NO: 1642731
acuucccaugaucacgcag

SEQ ID NO: 1642733 - RNA, 19 nt, Artificial Sequence
  Description of Artificial Sequence: Synthetic oligonucleotide
  Sense strand starting at position 183 of SEQ ID NO: 1561046
aagugaucugaaugaguca

SEQ ID NO: 1642734 - RNA, 19 nt, Artificial Sequence
  Description of Artificial Sequence: Synthetic oligonucleotide
  Antisense strand to SEQ ID NO: 1642733
ugacucauucagaucacuu

SEQ ID NO: 1642735 - RNA, 19 nt, Artificial Sequence
  Description of Artificial Sequence: Synthetic oligonucleotide
  Sense strand starting at position 186 of SEQ ID NO: 1561046
ugaucugaaugagucaauu

SEQ ID NO: 1642736 - RNA, 19 nt, Artificial Sequence
  Description of Artificial Sequence: Synthetic oligonucleotide
  Antisense strand to SEQ ID NO: 1642735
aauugacucauucagauca

SEQ ID NO: 1642737 - RNA, 19 nt, Artificial Sequence
  Description of Artificial Sequence: Synthetic oligonucleotide
  Sense strand starting at position 198 of SEQ ID NO: 1561046
gucaauucucagggccuca

SEQ ID NO: 1642738 - RNA, 19 nt, Artificial Sequence
  Description of Artificial Sequence: Synthetic oligonucleotide
  Antisense strand to SEQ ID NO: 1642737
ugaggcccugagaauugac

SEQ ID NO: 1642739 - RNA, 19 nt, Artificial Sequence
  Description of Artificial Sequence: Synthetic oligonucleotide
  Sense strand starting at position 274 of SEQ ID NO: 1561046
ggagaugccacguaucuau

SEQ ID NO: 1642740 - RNA, 19 nt, Artificial Sequence
  Description of Artificial Sequence: Synthetic oligonucleotide
  Antisense strand to SEQ ID NO: 1642739
auagauacguggcaucucc

SEQ ID NO: 1642741 - RNA, 19 nt, Artificial Sequence
  Description of Artificial Sequence: Synthetic oligonucleotide
  Sense strand starting at position 305 of SEQ ID NO: 1561046
accggaagugcuuaaugaa

SEQ ID NO: 1642742 - RNA, 19 nt, Artificial Sequence
  Description of Artificial Sequence: Synthetic oligonucleotide
  Antisense strand to SEQ ID NO: 1642741
uucauuaagcacuuccggu

SEQ ID NO: 1642743 - RNA, 19 nt, Artificial Sequence
  Description of Artificial Sequence: Synthetic oligonucleotide
  Sense strand starting at position 312 of SEQ ID NO: 1561046
gugcuuaaugaacaagagu

SEQ ID NO: 1642744 - RNA, 19 nt, Artificial Sequence
  Description of Artificial Sequence: Synthetic oligonucleotide
  Antisense strand to SEQ ID NO: 1642743
acucuuguucauuaagcac

SEQ ID NO: 1642745 - RNA, 19 nt, Artificial Sequence
  Description of Artificial Sequence: Synthetic oligonucleotide
  Sense strand starting at position 319 of SEQ ID NO: 1561046
augaacaagaguuguguuu

SEQ ID NO: 1642746 - RNA, 19 nt, Artificial Sequence
  Description of Artificial Sequence: Synthetic oligonucleotide
  Antisense strand to SEQ ID NO: 1642745
aaacacaacucuuguucau

SEQ ID NO: 1642747 - RNA, 19 nt, Artificial Sequence
  Description of Artificial Sequence: Synthetic oligonucleotide
  Sense strand starting at position 482 of SEQ ID NO: 1561046
ggccucgaucaagaguuaa

SEQ ID NO: 1642748 - RNA, 19 nt, Artificial Sequence
  Description of Artificial Sequence: Synthetic oligonucleotide
  Antisense strand to SEQ ID NO: 1642747
uuaacucuugaucgaggcc

SEQ ID NO: 1642749 - RNA, 19 nt, Artificial Sequence
  Description of Artificial Sequence: Synthetic oligonucleotide
  Sense strand starting at position 492 of SEQ ID NO: 1561046
aagaguuaauugccaguua

SEQ ID NO: 1642750 - RNA, 19 nt, Artificial Sequence
  Description of Artificial Sequence: Synthetic oligonucleotide
  Antisense strand to SEQ ID NO: 1642749
uaacuggcaauuaacucuu

SEQ ID NO: 1642751 - RNA, 19 nt, Artificial Sequence
  Description of Artificial Sequence: Synthetic oligonucleotide
  Sense strand starting at position 503 of SEQ ID NO: 1561046
gccaguuauucgcucaaca

SEQ ID NO: 1642752 - RNA, 19 nt, Artificial Sequence
  Description of Artificial Sequence: Synthetic oligonucleotide
  Antisense strand to SEQ ID NO: 1642751
uguugagcgaauaacuggc

SEQ ID NO: 1642753 - RNA, 19 nt, Artificial Sequence
  Description of Artificial Sequence: Synthetic oligonucleotide
  Sense strand starting at position 505 of SEQ ID NO: 1561046
caguuauucgcucaacaga

SEQ ID NO: 1642754 - RNA, 19 nt, Artificial Sequence
  Description of Artificial Sequence: Synthetic oligonucleotide
  Antisense strand to SEQ ID NO: 1642753
ucuguugagcgaauaacug

SEQ ID NO: 1642755 - RNA, 19 nt, Artificial Sequence
  Description of Artificial Sequence: Synthetic oligonucleotide
  Sense strand starting at position 533 of SEQ ID NO: 1561046
ugccuacuauauucgaaau

SEQ ID NO: 1642756 - RNA, 19 nt, Artificial Sequence
  Description of Artificial Sequence: Synthetic oligonucleotide
  Antisense strand to SEQ ID NO: 1642755
auuucgaauauaguaggca

SEQ ID NO: 1642757 - RNA, 19 nt, Artificial Sequence
  Description of Artificial Sequence: Synthetic oligonucleotide
  Sense strand starting at position 1148 of SEQ ID NO: 1561046
gucccucuguuccuugaaa

SEQ ID NO: 1642758 - RNA, 19 nt, Artificial Sequence
  Description of Artificial Sequence: Synthetic oligonucleotide
  Antisense strand to SEQ ID NO: 1642757
uuucaaggaacagagggac

SEQ ID NO: 1642759 - RNA, 19 nt, Artificial Sequence
  Description of Artificial Sequence: Synthetic oligonucleotide
  Sense strand starting at position 1149 of SEQ ID NO: 1561046
ucccucuguuccuugaaag

SEQ ID NO: 1642760 - RNA, 19 nt, Artificial Sequence
  Description of Artificial Sequence: Synthetic oligonucleotide
  Antisense strand to SEQ ID NO: 1642759
cuuucaaggaacagaggga

SEQ ID NO: 1642761 - RNA, 19 nt, Artificial Sequence
  Description of Artificial Sequence: Synthetic oligonucleotide
  Sense strand starting at position 1150 of SEQ ID NO: 1561046
cccucuguuccuugaaagu

SEQ ID NO: 1642762 - RNA, 19 nt, Artificial Sequence
  Description of Artificial Sequence: Synthetic oligonucleotide
  Antisense strand to SEQ ID NO: 1642761
acuuucaaggaacagaggg

SEQ ID NO: 1642763 - RNA, 19 nt, Artificial Sequence
  Description of Artificial Sequence: Synthetic oligonucleotide
  Sense strand starting at position 1160 of SEQ ID NO: 1561046
cuugaaaguccgcgauucu

SEQ ID NO: 1642764 - RNA, 19 nt, Artificial Sequence
  Description of Artificial Sequence: Synthetic oligonucleotide
  Antisense strand to SEQ ID NO: 1642763
agaaucgcggacuuucaag

SEQ ID NO: 1642765 - RNA, 19 nt, Artificial Sequence
  Description of Artificial Sequence: Synthetic oligonucleotide
  Sense strand starting at position 1169 of SEQ ID NO: 1561046
ccgcgauucuccuuccaaa

SEQ ID NO: 1642766 - RNA, 19 nt, Artificial Sequence
  Description of Artificial Sequence: Synthetic oligonucleotide
  Antisense strand to SEQ ID NO: 1642765
uuuggaaggagaaucgcgg

SEQ ID NO: 1642767 - RNA, 19 nt, Artificial Sequence
  Description of Artificial Sequence: Synthetic oligonucleotide
  Sense strand starting at position 1233 of SEQ ID NO: 1561046
acgacaaugcuccgaucua

SEQ ID NO: 1642768 - RNA, 19 nt, Artificial Sequence
  Description of Artificial Sequence: Synthetic oligonucleotide
  Antisense strand to SEQ ID NO: 1642767
uagaucggagcauugucgu

SEQ ID NO: 1642769 - RNA, 19 nt, Artificial Sequence
  Description of Artificial Sequence: Synthetic oligonucleotide
  Sense strand starting at position 1246 of SEQ ID NO: 1561046
gaucuaguucgggagacua

SEQ ID NO: 1642770 - RNA, 19 nt, Artificial Sequence
  Description of Artificial Sequence: Synthetic oligonucleotide
  Antisense strand to SEQ ID NO: 1642769
uagucucccgaacuagauc

SEQ ID NO: 1642771 - RNA, 19 nt, Artificial Sequence
  Description of Artificial Sequence: Synthetic oligonucleotide
  Sense strand starting at position 1258 of SEQ ID NO: 1561046
gagacuacguauccuaauu

SEQ ID NO: 1642772 - RNA, 19 nt, Artificial Sequence
  Description of Artificial Sequence: Synthetic oligonucleotide
  Antisense strand to SEQ ID NO: 1642771
aauuaggauacguagucuc

SEQ ID NO: 1642773 - RNA, 19 nt, Artificial Sequence
  Description of Artificial Sequence: Synthetic oligonucleotide
  Sense strand starting at position 1353 of SEQ ID NO: 1561046
gcuccaagacccgaacauu

SEQ ID NO: 1642774 - RNA, 19 nt, Artificial Sequence
  Description of Artificial Sequence: Synthetic oligonucleotide
  Antisense strand to SEQ ID NO: 1642773
aauguucgggucuuggagc

SEQ ID NO: 1642775 - RNA, 19 nt, Artificial Sequence
  Description of Artificial Sequence: Synthetic oligonucleotide
  Sense strand starting at position 2213 of SEQ ID NO: 1561046
gcuccaagaucgucaccau

SEQ ID NO: 1642776 - RNA, 19 nt, Artificial Sequence
  Description of Artificial Sequence: Synthetic oligonucleotide
  Antisense strand to SEQ ID NO: 1642775
auggugacgaucuuggagc

SEQ ID NO: 1642777 - RNA, 19 nt, Artificial Sequence
  Description of Artificial Sequence: Synthetic oligonucleotide
  Sense strand starting at position 2214 of SEQ ID NO: 1561046
cuccaagaucgucaccauu

SEQ ID NO: 1642778 - RNA, 19 nt, Artificial Sequence
  Description of Artificial Sequence: Synthetic oligonucleotide
  Antisense strand to SEQ ID NO: 1642777
aauggugacgaucuuggag

SEQ ID NO: 1642779 - RNA, 19 nt, Artificial Sequence
  Description of Artificial Sequence: Synthetic oligonucleotide
  Sense strand starting at position 2586 of SEQ ID NO: 1561046
agaugacuccucugcuacu

SEQ ID NO: 1642780 - RNA, 19 nt, Artificial Sequence
  Description of Artificial Sequence: Synthetic oligonucleotide
  Antisense strand to SEQ ID NO: 1642779
aguagcagaggagucaucu

SEQ ID NO: 1642781 - RNA, 19 nt, Artificial Sequence
  Description of Artificial Sequence: Synthetic oligonucleotide
  Sense strand starting at position 2851 of SEQ ID NO: 1561046
guucgcaaacaugacaaua

SEQ ID NO: 1642782 - RNA, 19 nt, Artificial Sequence
  Description of Artificial Sequence: Synthetic oligonucleotide
  Antisense strand to SEQ ID NO: 1642781
uauugucauguuugcgaac

SEQ ID NO: 1642783 - RNA, 19 nt, Artificial Sequence
  Description of Artificial Sequence: Synthetic oligonucleotide
  Sense strand starting at position 2853 of SEQ ID NO: 1561046
ucgcaaacaugacaauaaa

SEQ ID NO: 1642784 - RNA, 19 nt, Artificial Sequence
  Description of Artificial Sequence: Synthetic oligonucleotide
  Antisense strand to SEQ ID NO: 1642783
uuuauugucauguuugcga

SEQ ID NO: 1642785 - RNA, 19 nt, Artificial Sequence
  Description of Artificial Sequence: Synthetic oligonucleotide
  Sense strand starting at position 2874 of SEQ ID NO: 1561046
gccucuggaucuuuauuau

SEQ ID NO: 1642786 - RNA, 19 nt, Artificial Sequence
  Description of Artificial Sequence: Synthetic oligonucleotide
  Antisense strand to SEQ ID NO: 1642785
auaauaaagauccagaggc

SEQ ID NO: 1642787 - RNA, 19 nt, Artificial Sequence
  Description of Artificial Sequence: Synthetic oligonucleotide
  Sense strand starting at position 3332 of SEQ ID NO: 1561046
aagguuuccuccucuccga

SEQ ID NO: 1642788 - RNA, 19 nt, Artificial Sequence
  Description of Artificial Sequence: Synthetic oligonucleotide
  Antisense strand to SEQ ID NO: 1642787
ucggagaggaggaaaccuu

SEQ ID NO: 1642789 - RNA, 19 nt, Artificial Sequence
  Description of Artificial Sequence: Synthetic oligonucleotide
  Sense strand starting at position 3425 of SEQ ID NO: 1561046
ccuggacugucaguuacua

SEQ ID NO: 1642790 - RNA, 19 nt, Artificial Sequence
  Description of Artificial Sequence: Synthetic oligonucleotide
  Antisense strand to SEQ ID NO: 1642789
uaguaacugacaguccagg

SEQ ID NO: 1642791 - RNA, 19 nt, Artificial Sequence
  Description of Artificial Sequence: Synthetic oligonucleotide
  Sense strand starting at position 3471 of SEQ ID NO: 1561046
gcagguaccaaggauaucu

SEQ ID NO: 1642792 - RNA, 19 nt, Artificial Sequence
  Description of Artificial Sequence: Synthetic oligonucleotide
  Antisense strand to SEQ ID NO: 1642791
agauauccuugguaccugc

SEQ ID NO: 1642793 - RNA, 19 nt, Artificial Sequence
  Description of Artificial Sequence: Synthetic oligonucleotide
  Sense strand starting at position 3543 of SEQ ID NO: 1561046
gcaggucccagugaaaguu

SEQ ID NO: 1642794 - RNA, 19 nt, Artificial Sequence
  Description of Artificial Sequence: Synthetic oligonucleotide
  Antisense strand to SEQ ID NO: 1642793
aacuuucacugggaccugc

SEQ ID NO: 1642795 - RNA, 19 nt, Artificial Sequence
  Description of Artificial Sequence: Synthetic oligonucleotide
  Sense strand starting at position 3551 of SEQ ID NO: 1561046
cagugaaaguuugcuaaau

SEQ ID NO: 1642796 - RNA, 19 nt, Artificial Sequence
  Description of Artificial Sequence: Synthetic oligonucleotide
  Antisense strand to SEQ ID NO: 1642795
auuuagcaaacuuucacug

SEQ ID NO: 1642797 - RNA, 19 nt, Artificial Sequence
  Description of Artificial Sequence: Synthetic oligonucleotide
  Sense strand starting at position 3552 of SEQ ID NO: 1561046
agugaaaguuugcuaaaug

SEQ ID NO: 1642798 - RNA, 19 nt, Artificial Sequence
  Description of Artificial Sequence: Synthetic oligonucleotide
  Antisense strand to SEQ ID NO: 1642797
cauuuagcaaacuuucacu

SEQ ID NO: 1642799 - RNA, 19 nt, Artificial Sequence
  Description of Artificial Sequence: Synthetic oligonucleotide
  Sense strand starting at position 3560 of SEQ ID NO: 1561046
uuugcuaaaugcucaggaa

SEQ ID NO: 1642800 - RNA, 19 nt, Artificial Sequence
  Description of Artificial Sequence: Synthetic oligonucleotide
  Antisense strand to SEQ ID NO: 1642799
uuccugagcauuuagcaaa

SEQ ID NO: 1642801 - RNA, 19 nt, Artificial Sequence
  Description of Artificial Sequence: Synthetic oligonucleotide
  Sense strand starting at position 3561 of SEQ ID NO: 1561046
uugcuaaaugcucaggaau

SEQ ID NO: 1642802 - RNA, 19 nt, Artificial Sequence
  Description of Artificial Sequence: Synthetic oligonucleotide
  Antisense strand to SEQ ID NO: 1642801
auuccugagcauuuagcaa

SEQ ID NO: 1642803 - RNA, 19 nt, Artificial Sequence
  Description of Artificial Sequence: Synthetic oligonucleotide
  Sense strand starting at position 3608 of SEQ ID NO: 1561046
cacugcuaguguccugaaa

SEQ ID NO: 1642804 - RNA, 19 nt, Artificial Sequence
  Description of Artificial Sequence: Synthetic oligonucleotide
  Antisense strand to SEQ ID NO: 1642803
uuucaggacacuagcagug

SEQ ID NO: 1642805 - RNA, 19 nt, Artificial Sequence
  Description of Artificial Sequence: Synthetic oligonucleotide
  Sense strand starting at position 3731 of SEQ ID NO: 1561046
aguucuugccgguuggagu

SEQ ID NO: 1642806 - RNA, 19 nt, Artificial Sequence
  Description of Artificial Sequence: Synthetic oligonucleotide
  Antisense strand to SEQ ID NO: 1642805
acuccaaccggcaagaacu

SEQ ID NO: 1642807 - RNA, 19 nt, Artificial Sequence
  Description of Artificial Sequence: Synthetic oligonucleotide
  Sense strand starting at position 3757 of SEQ ID NO: 1561046
ccaagucauccugauguuu

SEQ ID NO: 1642808 - RNA, 19 nt, Artificial Sequence
  Description of Artificial Sequence: Synthetic oligonucleotide
  Antisense strand to SEQ ID NO: 1642807
aaacaucaggaugacuugg

SEQ ID NO: 1642809 - RNA, 19 nt, Artificial Sequence
  Description of Artificial Sequence: Synthetic oligonucleotide
  Sense strand starting at position 3768 of SEQ ID NO: 1561046
ugauguuugcaggauaaau

SEQ ID NO: 1642810 - RNA, 19 nt, Artificial Sequence
  Description of Artificial Sequence: Synthetic oligonucleotide
  Antisense strand to SEQ ID NO: 1642809
auuuauccugcaaacauca

SEQ ID NO: 1642811 - RNA, 19 nt, Artificial Sequence
  Description of Artificial Sequence: Synthetic oligonucleotide
  Sense strand starting at position 77 of SEQ ID NO: 1561047
acaacugauagguguguga

SEQ ID NO: 1642812 - RNA, 19 nt, Artificial Sequence
  Description of Artificial Sequence: Synthetic oligonucleotide
  Antisense strand to SEQ ID NO: 1642811
ucacacaccuaucaguugu

SEQ ID NO: 1642813 - RNA, 19 nt, Artificial Sequence
  Description of Artificial Sequence: Synthetic oligonucleotide
  Sense strand starting at position 79 of SEQ ID NO: 1561047
aacugauaggugugugaga

SEQ ID NO: 1642814 - RNA, 19 nt, Artificial Sequence
  Description of Artificial Sequence: Synthetic oligonucleotide
  Antisense strand to SEQ ID NO: 1642813
ucucacacaccuaucaguu

SEQ ID NO: 1642815 - RNA, 19 nt, Artificial Sequence
  Description of Artificial Sequence: Synthetic oligonucleotide
  Sense strand starting at position 140 of SEQ ID NO: 1561047
aaaucaggcucaugguaaa

SEQ ID NO: 1642816 - RNA, 19 nt, Artificial Sequence
  Description of Artificial Sequence: Synthetic oligonucleotide
  Antisense strand to SEQ ID NO: 1642815
uuuaccaugagccugauuu

SEQ ID NO: 1642817 - RNA, 19 nt, Artificial Sequence
  Description of Artificial Sequence: Synthetic oligonucleotide
  Sense strand starting at position 165 of SEQ ID NO: 1561047
guuaauuagcuuuaaggga

SEQ ID NO: 1642818 - RNA, 19 nt, Artificial Sequence
  Description of Artificial Sequence: Synthetic oligonucleotide
  Antisense strand to SEQ ID NO: 1642817
ucccuuaaagcuaauuaac

SEQ ID NO: 1642819 - RNA, 19 nt, Artificial Sequence
  Description of Artificial Sequence: Synthetic oligonucleotide
  Sense strand starting at position 183 of SEQ ID NO: 1561047
aagauagaaugguacaaga

SEQ ID NO: 1642820 - RNA, 19 nt, Artificial Sequence
  Description of Artificial Sequence: Synthetic oligonucleotide
  Antisense strand to SEQ ID NO: 1642819
ucuuguaccauucuaucuu

SEQ ID NO: 1642821 - RNA, 19 nt, Artificial Sequence
  Description of Artificial Sequence: Synthetic oligonucleotide
  Sense strand starting at position 204 of SEQ ID NO: 1561047
agccuagcugaacauauua

SEQ ID NO: 1642822 - RNA, 19 nt, Artificial Sequence
  Description of Artificial Sequence: Synthetic oligonucleotide
  Antisense strand to SEQ ID NO: 1642821
uaauauguucagcuaggcu

SEQ ID NO: 1642823 - RNA, 19 nt, Artificial Sequence
  Description of Artificial Sequence: Synthetic oligonucleotide
  Sense strand starting at position 377 of SEQ ID NO: 1561047
agcagaugaugucuacaaa

SEQ ID NO: 1642824 - RNA, 19 nt, Artificial Sequence
  Description of Artificial Sequence: Synthetic oligonucleotide
  Antisense strand to SEQ ID NO: 1642823
uuuguagacaucaucugcu

SEQ ID NO: 1642825 - RNA, 19 nt, Artificial Sequence
  Description of Artificial Sequence: Synthetic oligonucleotide
  Sense strand starting at position 378 of SEQ ID NO: 1561047
gcagaugaugucuacaaau

SEQ ID NO: 1642826 - RNA, 19 nt, Artificial Sequence
  Description of Artificial Sequence: Synthetic oligonucleotide
  Antisense strand to SEQ ID NO: 1642825
auuuguagacaucaucugc

SEQ ID NO: 1642827 - RNA, 19 nt, Artificial Sequence
  Description of Artificial Sequence: Synthetic oligonucleotide
  Sense strand starting at position 416 of SEQ ID NO: 1561047
ucuguuacuuacuaaggua

SEQ ID NO: 1642828 - RNA, 19 nt, Artificial Sequence
  Description of Artificial Sequence: Synthetic oligonucleotide
  Antisense strand to SEQ ID NO: 1642827
uaccuuaguaaguaacaga

SEQ ID NO: 1642829 - RNA, 19 nt, Artificial Sequence
  Description of Artificial Sequence: Synthetic oligonucleotide
  Sense strand starting at position 419 of SEQ ID NO: 1561047
guuacuuacuaagguaaag

SEQ ID NO: 1642830 - RNA, 19 nt, Artificial Sequence
  Description of Artificial Sequence: Synthetic oligonucleotide
  Antisense strand to SEQ ID NO: 1642829
cuuuaccuuaguaaguaac

SEQ ID NO: 1642831 - RNA, 19 nt, Artificial Sequence
  Description of Artificial Sequence: Synthetic oligonucleotide
  Sense strand starting at position 716 of SEQ ID NO: 1561047
ggaguaagcugugauugca

SEQ ID NO: 1642832 - RNA, 19 nt, Artificial Sequence
  Description of Artificial Sequence: Synthetic oligonucleotide
  Antisense strand to SEQ ID NO: 1642831
ugcaaucacagcuuacucc

SEQ ID NO: 1642833 - RNA, 19 nt, Artificial Sequence
  Description of Artificial Sequence: Synthetic oligonucleotide
  Sense strand starting at position 950 of SEQ ID NO: 1561047
uuuggugucguccaaggau

SEQ ID NO: 1642834 - RNA, 19 nt, Artificial Sequence
  Description of Artificial Sequence: Synthetic oligonucleotide
  Antisense strand to SEQ ID NO: 1642833
auccuuggacgacaccaaa

SEQ ID NO: 1642835 - RNA, 19 nt, Artificial Sequence
  Description of Artificial Sequence: Synthetic oligonucleotide
  Sense strand starting at position 953 of SEQ ID NO: 1561047
ggugucguccaaggauaca

SEQ ID NO: 1642836 - RNA, 19 nt, Artificial Sequence
  Description of Artificial Sequence: Synthetic oligonucleotide
  Antisense strand to SEQ ID NO: 1642835
uguauccuuggacgacacc

SEQ ID NO: 1642837 - RNA, 19 nt, Artificial Sequence
  Description of Artificial Sequence: Synthetic oligonucleotide
  Sense strand starting at position 1031 of SEQ ID NO: 1561047
ucgccuuuggcaugauguu

SEQ ID NO: 1642838 - RNA, 19 nt, Artificial Sequence
  Description of Artificial Sequence: Synthetic oligonucleotide
  Antisense strand to SEQ ID NO: 1642837
aacaucaugccaaaggcga

SEQ ID NO: 1642839 - RNA, 19 nt, Artificial Sequence
  Description of Artificial Sequence: Synthetic oligonucleotide
  Sense strand starting at position 1121 of SEQ ID NO: 1561047
agguauagaugagcauaca

SEQ ID NO: 1642840 - RNA, 19 nt, Artificial Sequence
  Description of Artificial Sequence: Synthetic oligonucleotide
  Antisense strand to SEQ ID NO: 1642839
uguaugcucaucuauaccu

SEQ ID NO: 1642841 - RNA, 19 nt, Artificial Sequence
  Description of Artificial Sequence: Synthetic oligonucleotide
  Sense strand starting at position 1137 of SEQ ID NO: 1561047
acagaagcguucucggcua

SEQ ID NO: 1642842 - RNA, 19 nt, Artificial Sequence
  Description of Artificial Sequence: Synthetic oligonucleotide
  Antisense strand to SEQ ID NO: 1642841
uagccgagaacgcuucugu

SEQ ID NO: 1642843 - RNA, 19 nt, Artificial Sequence
  Description of Artificial Sequence: Synthetic oligonucleotide
  Sense strand starting at position 1203 of SEQ ID NO: 1561047
caacgaaucuugguuguuu

SEQ ID NO: 1642844 - RNA, 19 nt, Artificial Sequence
  Description of Artificial Sequence: Synthetic oligonucleotide
  Antisense strand to SEQ ID NO: 1642843
aaacaaccaagauucguug

SEQ ID NO: 1642845 - RNA, 19 nt, Artificial Sequence
  Description of Artificial Sequence: Synthetic oligonucleotide
  Sense strand starting at position 1207 of SEQ ID NO: 1561047
gaaucuugguuguuucuuu

SEQ ID NO: 1642846 - RNA, 19 nt, Artificial Sequence
  Description of Artificial Sequence: Synthetic oligonucleotide
  Antisense strand to SEQ ID NO: 1642845
aaagaaacaaccaagauuc

SEQ ID NO: 1642847 - RNA, 19 nt, Artificial Sequence
  Description of Artificial Sequence: Synthetic oligonucleotide
  Sense strand starting at position 1493 of SEQ ID NO: 1561047
aagcgauccucucgaguag

SEQ ID NO: 1642848 - RNA, 19 nt, Artificial Sequence
  Description of Artificial Sequence: Synthetic oligonucleotide
  Antisense strand to SEQ ID NO: 1642847
cuacucgagaggaucgcuu

SEQ ID NO: 1642849 - RNA, 19 nt, Artificial Sequence
  Description of Artificial Sequence: Synthetic oligonucleotide
  Sense strand starting at position 1638 of SEQ ID NO: 1561047
cucccugagcagugagauu

SEQ ID NO: 1642850 - RNA, 19 nt, Artificial Sequence
  Description of Artificial Sequence: Synthetic oligonucleotide
  Antisense strand to SEQ ID NO: 1642849
aaucucacugcucagggag

SEQ ID NO: 1642851 - RNA, 19 nt, Artificial Sequence
  Description of Artificial Sequence: Synthetic oligonucleotide
  Sense strand starting at position 2322 of SEQ ID NO: 1561047
ucaguuuaaugguuaugua

SEQ ID NO: 1642852 - RNA, 19 nt, Artificial Sequence
  Description of Artificial Sequence: Synthetic oligonucleotide
  Antisense strand to SEQ ID NO: 1642851
uacauaaccauuaaacuga

SEQ ID NO: 1642853 - RNA, 19 nt, Artificial Sequence
  Description of Artificial Sequence: Synthetic oligonucleotide
  Sense strand starting at position 2323 of SEQ ID NO: 1561047
caguuuaaugguuauguaa

SEQ ID NO: 1642854 - RNA, 19 nt, Artificial Sequence
  Description of Artificial Sequence: Synthetic oligonucleotide
  Antisense strand to SEQ ID NO: 1642853
uuacauaaccauuaaacug

SEQ ID NO: 1642855 - RNA, 19 nt, Artificial Sequence
  Description of Artificial Sequence: Synthetic oligonucleotide
  Sense strand starting at position 2325 of SEQ ID NO: 1561047
guuuaaugguuauguaaca

SEQ ID NO: 1642856 - RNA, 19 nt, Artificial Sequence
  Description of Artificial Sequence: Synthetic oligonucleotide
  Antisense strand to SEQ ID NO: 1642855
uguuacauaaccauuaaac

SEQ ID NO: 1642857 - RNA, 19 nt, Artificial Sequence
  Description of Artificial Sequence: Synthetic oligonucleotide
  Sense strand starting at position 2474 of SEQ ID NO: 1561047
gugucugcgcccugagaca

SEQ ID NO: 1642858 - RNA, 19 nt, Artificial Sequence
  Description of Artificial Sequence: Synthetic oligonucleotide
  Antisense strand to SEQ ID NO: 1642857
ugucucagggcgcagacac

SEQ ID NO: 1642859 - RNA, 19 nt, Artificial Sequence
  Description of Artificial Sequence: Synthetic oligonucleotide
  Sense strand starting at position 2846 of SEQ ID NO: 1561047
ugaagcugguggugaauuu

SEQ ID NO: 1642860 - RNA, 19 nt, Artificial Sequence
  Description of Artificial Sequence: Synthetic oligonucleotide
  Antisense strand to SEQ ID NO: 1642859
aaauucaccaccagcuuca

SEQ ID NO: 1642861 - RNA, 19 nt, Artificial Sequence
  Description of Artificial Sequence: Synthetic oligonucleotide
  Sense strand starting at position 2867 of SEQ ID NO: 1561047
ucuucuacuuucggacaga

SEQ ID NO: 1642862 - RNA, 19 nt, Artificial Sequence
  Description of Artificial Sequence: Synthetic oligonucleotide
  Antisense strand to SEQ ID NO: 1642861
ucuguccgaaaguagaaga

SEQ ID NO: 1642863 - RNA, 19 nt, Artificial Sequence
  Description of Artificial Sequence: Synthetic oligonucleotide
  Sense strand starting at position 2870 of SEQ ID NO: 1561047
ucuacuuucggacagacga

SEQ ID NO: 1642864 - RNA, 19 nt, Artificial Sequence
  Description of Artificial Sequence: Synthetic oligonucleotide
  Antisense strand to SEQ ID NO: 1642863
ucgucuguccgaaaguaga

SEQ ID NO: 1642865 - RNA, 19 nt, Artificial Sequence
  Description of Artificial Sequence: Synthetic oligonucleotide
  Sense strand starting at position 3017 of SEQ ID NO: 1561047
ugcagagucguccgggaag

SEQ ID NO: 1642866 - RNA, 19 nt, Artificial Sequence
  Description of Artificial Sequence: Synthetic oligonucleotide
  Antisense strand to SEQ ID NO: 1642865
cuucccggacgacucugca

SEQ ID NO: 1642867 - RNA, 19 nt, Artificial Sequence
  Description of Artificial Sequence: Synthetic oligonucleotide
  Sense strand starting at position 3018 of SEQ ID NO: 1561047
gcagagucguccgggaaga

SEQ ID NO: 1642868 - RNA, 19 nt, Artificial Sequence
  Description of Artificial Sequence: Synthetic oligonucleotide
  Antisense strand to SEQ ID NO: 1642867
ucuucccggacgacucugc

SEQ ID NO: 1642869 - RNA, 19 nt, Artificial Sequence
  Description of Artificial Sequence: Synthetic oligonucleotide
  Sense strand starting at position 3019 of SEQ ID NO: 1561047
cagagucguccgggaagag

SEQ ID NO: 1642870 - RNA, 19 nt, Artificial Sequence
  Description of Artificial Sequence: Synthetic oligonucleotide
  Antisense strand to SEQ ID NO: 1642869
cucuucccggacgacucug

SEQ ID NO: 1642871 - RNA, 19 nt, Artificial Sequence
  Description of Artificial Sequence: Synthetic oligonucleotide
  Sense strand starting at position 3370 of SEQ ID NO: 1561047
guagcaugggucuagcauu

SEQ ID NO: 1642872 - RNA, 19 nt, Artificial Sequence
  Description of Artificial Sequence: Synthetic oligonucleotide
  Antisense strand to SEQ ID NO: 1642871
aaugcuagacccaugcuac

SEQ ID NO: 1642873 - RNA, 19 nt, Artificial Sequence
  Description of Artificial Sequence: Synthetic oligonucleotide
  Sense strand starting at position 3376 of SEQ ID NO: 1561047
ugggucuagcauuguuaua

SEQ ID NO: 1642874 - RNA, 19 nt, Artificial Sequence
  Description of Artificial Sequence: Synthetic oligonucleotide
  Antisense strand to SEQ ID NO: 1642873
uauaacaaugcuagaccca

SEQ ID NO: 1642875 - RNA, 19 nt, Artificial Sequence
  Description of Artificial Sequence: Synthetic oligonucleotide
  Sense strand starting at position 3378 of SEQ ID NO: 1561047
ggucuagcauuguuauaug

SEQ ID NO: 1642876 - RNA, 19 nt, Artificial Sequence
  Description of Artificial Sequence: Synthetic oligonucleotide
  Antisense strand to SEQ ID NO: 1642875
cauauaacaaugcuagacc

SEQ ID NO: 1642877 - RNA, 19 nt, Artificial Sequence
  Description of Artificial Sequence: Synthetic oligonucleotide
  Sense strand starting at position 3442 of SEQ ID NO: 1561047
ggguguucuccugggucuu

SEQ ID NO: 1642878 - RNA, 19 nt, Artificial Sequence
  Description of Artificial Sequence: Synthetic oligonucleotide
  Antisense strand to SEQ ID NO: 1642877
aagacccaggagaacaccc

SEQ ID NO: 1642879 - RNA, 19 nt, Artificial Sequence
  Description of Artificial Sequence: Synthetic oligonucleotide
  Sense strand starting at position 3443 of SEQ ID NO: 1561047
gguguucuccugggucuua

SEQ ID NO: 1642880 - RNA, 19 nt, Artificial Sequence
  Description of Artificial Sequence: Synthetic oligonucleotide
  Antisense strand to SEQ ID NO: 1642879
uaagacccaggagaacacc

SEQ ID NO: 1642881 - RNA, 19 nt, Artificial Sequence
  Description of Artificial Sequence: Synthetic oligonucleotide
  Sense strand starting at position 3444 of SEQ ID NO: 1561047
guguucuccugggucuuaa

SEQ ID NO: 1642882 - RNA, 19 nt, Artificial Sequence
  Description of Artificial Sequence: Synthetic oligonucleotide
  Antisense strand to SEQ ID NO: 1642881
uuaagacccaggagaacac

SEQ ID NO: 1642883 - RNA, 19 nt, Artificial Sequence
  Description of Artificial Sequence: Synthetic oligonucleotide
  Sense strand starting at position 3448 of SEQ ID NO: 1561047
ucuccugggucuuaagaga

SEQ ID NO: 1642884 - RNA, 19 nt, Artificial Sequence
  Description of Artificial Sequence: Synthetic oligonucleotide
  Antisense strand to SEQ ID NO: 1642883
ucucuuaagacccaggaga

SEQ ID NO: 1642885 - RNA, 19 nt, Artificial Sequence
  Description of Artificial Sequence: Synthetic oligonucleotide
  Sense strand starting at position 3495 of SEQ ID NO: 1561047
cugcuaguuugcccagagu

SEQ ID NO: 1642886 - RNA, 19 nt, Artificial Sequence
  Description of Artificial Sequence: Synthetic oligonucleotide
  Antisense strand to SEQ ID NO: 1642885
acucugggcaaacuagcag

SEQ ID NO: 1642887 - RNA, 19 nt, Artificial Sequence
  Description of Artificial Sequence: Synthetic oligonucleotide
  Sense strand starting at position 3539 of SEQ ID NO: 1561047
uggcuuaaauaucagaaac

SEQ ID NO: 1642888 - RNA, 19 nt, Artificial Sequence
  Description of Artificial Sequence: Synthetic oligonucleotide
  Antisense strand to SEQ ID NO: 1642887
guuucugauauuuaagcca

SEQ ID NO: 1642889 - RNA, 19 nt, Artificial Sequence
  Description of Artificial Sequence: Synthetic oligonucleotide
  Sense strand starting at position 3669 of SEQ ID NO: 1561047
gguuccuuggcuuguggaa

SEQ ID NO: 1642890 - RNA, 19 nt, Artificial Sequence
  Description of Artificial Sequence: Synthetic oligonucleotide
  Antisense strand to SEQ ID NO: 1642889
uuccacaagccaaggaacc

SEQ ID NO: 1642891 - RNA, 19 nt, Artificial Sequence
  Description of Artificial Sequence: Synthetic oligonucleotide
  Sense strand starting at position 75 of SEQ ID NO: 1561048
ccuucuuagcucgaaauca

SEQ ID NO: 1642892 - RNA, 19 nt, Artificial Sequence
  Description of Artificial Sequence: Synthetic oligonucleotide
  Antisense strand to SEQ ID NO: 1642891
ugauuucgagcuaagaagg

SEQ ID NO: 1642893 - RNA, 19 nt, Artificial Sequence
  Description of Artificial Sequence: Synthetic oligonucleotide
  Sense strand starting at position 195 of SEQ ID NO: 1561048
gauaccuugccugguuuaa

SEQ ID NO: 1642894 - RNA, 19 nt, Artificial Sequence
  Description of Artificial Sequence: Synthetic oligonucleotide
  Antisense strand to SEQ ID NO: 1642893
uuaaaccaggcaagguauc

SEQ ID NO: 1642895 - RNA, 19 nt, Artificial Sequence
  Description of Artificial Sequence: Synthetic oligonucleotide
  Sense strand starting at position 223 of SEQ ID NO: 1561048
accugaggugguuacuauu

SEQ ID NO: 1642896 - RNA, 19 nt, Artificial Sequence
  Description of Artificial Sequence: Synthetic oligonucleotide
  Antisense strand to SEQ ID NO: 1642895
aauaguaaccaccucaggu

SEQ ID NO: 1642897 - RNA, 19 nt, Artificial Sequence
  Description of Artificial Sequence: Synthetic oligonucleotide
  Sense strand starting at position 341 of SEQ ID NO: 1561048
ggcagucugacuugagaag

SEQ ID NO: 1642898 - RNA, 19 nt, Artificial Sequence
  Description of Artificial Sequence: Synthetic oligonucleotide
  Antisense strand to SEQ ID NO: 1642897
cuucucaagucagacugcc

SEQ ID NO: 1642899 - RNA, 19 nt, Artificial Sequence
  Description of Artificial Sequence: Synthetic oligonucleotide
  Sense strand starting at position 375 of SEQ ID NO: 1561048
cccauuucucucugcacga

SEQ ID NO: 1642900 - RNA, 19 nt, Artificial Sequence
  Description of Artificial Sequence: Synthetic oligonucleotide
  Antisense strand to SEQ ID NO: 1642899
ucgugcagagagaaauggg

SEQ ID NO: 1642901 - RNA, 19 nt, Artificial Sequence
  Description of Artificial Sequence: Synthetic oligonucleotide
  Sense strand starting at position 376 of SEQ ID NO: 1561048
ccauuucucucugcacgaa

SEQ ID NO: 1642902 - RNA, 19 nt, Artificial Sequence
  Description of Artificial Sequence: Synthetic oligonucleotide
  Antisense strand to SEQ ID NO: 1642901
uucgugcagagagaaaugg

SEQ ID NO: 1642903 - RNA, 19 nt, Artificial Sequence
  Description of Artificial Sequence: Synthetic oligonucleotide
  Sense strand starting at position 452 of SEQ ID NO: 1561048
gcccaugcuggugaagaau

SEQ ID NO: 1642904 - RNA, 19 nt, Artificial Sequence
  Description of Artificial Sequence: Synthetic oligonucleotide
  Antisense strand to SEQ ID NO: 1642903
auucuucaccagcaugggc

SEQ ID NO: 1642905 - RNA, 19 nt, Artificial Sequence
  Description of Artificial Sequence: Synthetic oligonucleotide
  Sense strand starting at position 461 of SEQ ID NO: 1561048
ggugaagaaucacugaucu

SEQ ID NO: 1642906 - RNA, 19 nt, Artificial Sequence
  Description of Artificial Sequence: Synthetic oligonucleotide
  Antisense strand to SEQ ID NO: 1642905
agaucagugauucuucacc

SEQ ID NO: 1642907 - RNA, 19 nt, Artificial Sequence
  Description of Artificial Sequence: Synthetic oligonucleotide
  Sense strand starting at position 469 of SEQ ID NO: 1561048
aucacugaucuaggguaga

SEQ ID NO: 1642908 - RNA, 19 nt, Artificial Sequence
  Description of Artificial Sequence: Synthetic oligonucleotide
  Antisense strand to SEQ ID NO: 1642907
ucuacccuagaucagugau

SEQ ID NO: 1642909 - RNA, 19 nt, Artificial Sequence
  Description of Artificial Sequence: Synthetic oligonucleotide
  Sense strand starting at position 876 of SEQ ID NO: 1561048
gcacaaaugucaccaagaa

SEQ ID NO: 1642910 - RNA, 19 nt, Artificial Sequence
  Description of Artificial Sequence: Synthetic oligonucleotide
  Antisense strand to SEQ ID NO: 1642909
uucuuggugacauuugugc

SEQ ID NO: 1642911 - RNA, 19 nt, Artificial Sequence
  Description of Artificial Sequence: Synthetic oligonucleotide
  Sense strand starting at position 905 of SEQ ID NO: 1561048
acagaauuguuccugguug

SEQ ID NO: 1642912 - RNA, 19 nt, Artificial Sequence
  Description of Artificial Sequence: Synthetic oligonucleotide
  Antisense strand to SEQ ID NO: 1642911
caaccaggaacaauucugu

SEQ ID NO: 1642913 - RNA, 19 nt, Artificial Sequence
  Description of Artificial Sequence: Synthetic oligonucleotide
  Sense strand starting at position 907 of SEQ ID NO: 1561048
agaauuguuccugguugag

SEQ ID NO: 1642914 - RNA, 19 nt, Artificial Sequence
  Description of Artificial Sequence: Synthetic oligonucleotide
  Antisense strand to SEQ ID NO: 1642913
cucaaccaggaacaauucu

SEQ ID NO: 1642915 - RNA, 19 nt, Artificial Sequence
  Description of Artificial Sequence: Synthetic oligonucleotide
  Sense strand starting at position 959 of SEQ ID NO: 1561048
aaggaauaaucagagacag

SEQ ID NO: 1642916 - RNA, 19 nt, Artificial Sequence
  Description of Artificial Sequence: Synthetic oligonucleotide
  Antisense strand to SEQ ID NO: 1642915
cugucucugauuauuccuu

SEQ ID NO: 1642917 - RNA, 19 nt, Artificial Sequence
  Description of Artificial Sequence: Synthetic oligonucleotide
  Sense strand starting at position 1092 of SEQ ID NO: 1561048
ccaggcaccugaucaaaua

SEQ ID NO: 1642918 - RNA, 19 nt, Artificial Sequence
  Description of Artificial Sequence: Synthetic oligonucleotide
  Antisense strand to SEQ ID NO: 1642917
uauuugaucaggugccugg

SEQ ID NO: 1642919 - RNA, 19 nt, Artificial Sequence
  Description of Artificial Sequence: Synthetic oligonucleotide
  Sense strand starting at position 1110 of SEQ ID NO: 1561048
aauugaauguggguuuauc

SEQ ID NO: 1642920 - RNA, 19 nt, Artificial Sequence
  Description of Artificial Sequence: Synthetic oligonucleotide
  Antisense strand to SEQ ID NO: 1642919
gauaaacccacauucaauu

SEQ ID NO: 1642921 - RNA, 19 nt, Artificial Sequence
  Description of Artificial Sequence: Synthetic oligonucleotide
  Sense strand starting at position 1118 of SEQ ID NO: 1561048
guggguuuauccucauaau

SEQ ID NO: 1642922 - RNA, 19 nt, Artificial Sequence
  Description of Artificial Sequence: Synthetic oligonucleotide
  Antisense strand to SEQ ID NO: 1642921
auuaugaggauaaacccac

SEQ ID NO: 1642923 - RNA, 19 nt, Artificial Sequence
  Description of Artificial Sequence: Synthetic oligonucleotide
  Sense strand starting at position 1119 of SEQ ID NO: 1561048
uggguuuauccucauaaug

SEQ ID NO: 1642924 - RNA, 19 nt, Artificial Sequence
  Description of Artificial Sequence: Synthetic oligonucleotide
  Antisense strand to SEQ ID NO: 1642923
cauuaugaggauaaaccca

SEQ ID NO: 1642925 - RNA, 19 nt, Artificial Sequence
  Description of Artificial Sequence: Synthetic oligonucleotide
  Sense strand starting at position 1180 of SEQ ID NO: 1561048
ggaacaguuugcucagaga

SEQ ID NO: 1642926 - RNA, 19 nt, Artificial Sequence
  Description of Artificial Sequence: Synthetic oligonucleotide
  Antisense strand to SEQ ID NO: 1642925
ucucugagcaaacuguucc

SEQ ID NO: 1642927 - RNA, 19 nt, Artificial Sequence
  Description of Artificial Sequence: Synthetic oligonucleotide
  Sense strand starting at position 1250 of SEQ ID NO: 1561048
gguccugaaucccagauuu

SEQ ID NO: 1642928 - RNA, 19 nt, Artificial Sequence
  Description of Artificial Sequence: Synthetic oligonucleotide
  Antisense strand to SEQ ID NO: 1642927
aaaucugggauucaggacc

SEQ ID NO: 1642929 - RNA, 19 nt, Artificial Sequence
  Description of Artificial Sequence: Synthetic oligonucleotide
  Sense strand starting at position 1281 of SEQ ID NO: 1561048
gcacgauaugcagaagaag

SEQ ID NO: 1642930 - RNA, 19 nt, Artificial Sequence
  Description of Artificial Sequence: Synthetic oligonucleotide
  Antisense strand to SEQ ID NO: 1642929
cuucuucugcauaucgugc

SEQ ID NO: 1642931 - RNA, 19 nt, Artificial Sequence
  Description of Artificial Sequence: Synthetic oligonucleotide
  Sense strand starting at position 1326 of SEQ ID NO: 1561048
ccugcuaauucuuuggagu

SEQ ID NO: 1642932 - RNA, 19 nt, Artificial Sequence
  Description of Artificial Sequence: Synthetic oligonucleotide
  Antisense strand to SEQ ID NO: 1642931
acuccaaagaauuagcagg

SEQ ID NO: 1642933 - RNA, 19 nt, Artificial Sequence
  Description of Artificial Sequence: Synthetic oligonucleotide
  Sense strand starting at position 1541 of SEQ ID NO: 1561048
cgacguuuccaggcgguua

SEQ ID NO: 1642934 - RNA, 19 nt, Artificial Sequence
  Description of Artificial Sequence: Synthetic oligonucleotide
  Antisense strand to SEQ ID NO: 1642933
uaaccgccuggaaacgucg

SEQ ID NO: 1642935 - RNA, 19 nt, Artificial Sequence
  Description of Artificial Sequence: Synthetic oligonucleotide
  Sense strand starting at position 2362 of SEQ ID NO: 1561048
agacguuugugaguauaga

SEQ ID NO: 1642936 - RNA, 19 nt, Artificial Sequence
  Description of Artificial Sequence: Synthetic oligonucleotide
  Antisense strand to SEQ ID NO: 1642935
ucuauacucacaaacgucu

SEQ ID NO: 1642937 - RNA, 19 nt, Artificial Sequence
  Description of Artificial Sequence: Synthetic oligonucleotide
  Sense strand starting at position 2363 of SEQ ID NO: 1561048
gacguuugugaguauagag

SEQ ID NO: 1642938 - RNA, 19 nt, Artificial Sequence
  Description of Artificial Sequence: Synthetic oligonucleotide
  Antisense strand to SEQ ID NO: 1642937
cucuauacucacaaacguc

SEQ ID NO: 1642939 - RNA, 19 nt, Artificial Sequence
  Description of Artificial Sequence: Synthetic oligonucleotide
  Sense strand starting at position 2391 of SEQ ID NO: 1561048
gacagcaggugccuaauau

SEQ ID NO: 1642940 - RNA, 19 nt, Artificial Sequence
  Description of Artificial Sequence: Synthetic oligonucleotide
  Antisense strand to SEQ ID NO: 1642939
auauuaggcaccugcuguc

SEQ ID NO: 1642941 - RNA, 19 nt, Artificial Sequence
  Description of Artificial Sequence: Synthetic oligonucleotide
  Sense strand starting at position 2392 of SEQ ID NO: 1561048
acagcaggugccuaauauu

SEQ ID NO: 1642942 - RNA, 19 nt, Artificial Sequence
  Description of Artificial Sequence: Synthetic oligonucleotide
  Antisense strand to SEQ ID NO: 1642941
aauauuaggcaccugcugu

SEQ ID NO: 1642943 - RNA, 19 nt, Artificial Sequence
  Description of Artificial Sequence: Synthetic oligonucleotide
  Sense strand starting at position 2565 of SEQ ID NO: 1561048
gugugauugucacugggag

SEQ ID NO: 1642944 - RNA, 19 nt, Artificial Sequence
  Description of Artificial Sequence: Synthetic oligonucleotide
  Antisense strand to SEQ ID NO: 1642943
cucccagugacaaucacac

SEQ ID NO: 1642945 - RNA, 19 nt, Artificial Sequence
  Description of Artificial Sequence: Synthetic oligonucleotide
  Sense strand starting at position 2704 of SEQ ID NO: 1561048
cuugguguugcucaagaca

SEQ ID NO: 1642946 - RNA, 19 nt, Artificial Sequence
  Description of Artificial Sequence: Synthetic oligonucleotide
  Antisense strand to SEQ ID NO: 1642945
ugucuugagcaacaccaag

SEQ ID NO: 1642947 - RNA, 19 nt, Artificial Sequence
  Description of Artificial Sequence: Synthetic oligonucleotide
  Sense strand starting at position 2707 of SEQ ID NO: 1561048
gguguugcucaagacaugu

SEQ ID NO: 1642948 - RNA, 19 nt, Artificial Sequence
  Description of Artificial Sequence: Synthetic oligonucleotide
  Antisense strand to SEQ ID NO: 1642947
acaugucuugagcaacacc

SEQ ID NO: 1642949 - RNA, 19 nt, Artificial Sequence
  Description of Artificial Sequence: Synthetic oligonucleotide
  Sense strand starting at position 2713 of SEQ ID NO: 1561048
gcucaagacaugugaugag

SEQ ID NO: 1642950 - RNA, 19 nt, Artificial Sequence
  Description of Artificial Sequence: Synthetic oligonucleotide
  Antisense strand to SEQ ID NO: 1642949
cucaucacaugucuugagc

SEQ ID NO: 1642951 - RNA, 19 nt, Artificial Sequence
  Description of Artificial Sequence: Synthetic oligonucleotide
  Sense strand starting at position 2768 of SEQ ID NO: 1561048
aaguuacaguugccagaaa

SEQ ID NO: 1642952 - RNA, 19 nt, Artificial Sequence
  Description of Artificial Sequence: Synthetic oligonucleotide
  Antisense strand to SEQ ID NO: 1642951
uuucuggcaacuguaacuu

SEQ ID NO: 1642953 - RNA, 19 nt, Artificial Sequence
  Description of Artificial Sequence: Synthetic oligonucleotide
  Sense strand starting at position 2829 of SEQ ID NO: 1561048
gauuaauggcguggauuau

SEQ ID NO: 1642954 - RNA, 19 nt, Artificial Sequence
  Description of Artificial Sequence: Synthetic oligonucleotide
  Antisense strand to SEQ ID NO: 1642953
auaauccacgccauuaauc

SEQ ID NO: 1642955 - RNA, 19 nt, Artificial Sequence
  Description of Artificial Sequence: Synthetic oligonucleotide
  Sense strand starting at position 2830 of SEQ ID NO: 1561048
auuaauggcguggauuauu

SEQ ID NO: 1642956 - RNA, 19 nt, Artificial Sequence
  Description of Artificial Sequence: Synthetic oligonucleotide
  Antisense strand to SEQ ID NO: 1642955
aauaauccacgccauuaau

SEQ ID NO: 1642957 - RNA, 19 nt, Artificial Sequence
  Description of Artificial Sequence: Synthetic oligonucleotide
  Sense strand starting at position 3359 of SEQ ID NO: 1561048
ccuguuauuugacaugaau

SEQ ID NO: 1642958 - RNA, 19 nt, Artificial Sequence
  Description of Artificial Sequence: Synthetic oligonucleotide
  Antisense strand to SEQ ID NO: 1642957
auucaugucaaauaacagg

SEQ ID NO: 1642959 - RNA, 19 nt, Artificial Sequence
  Description of Artificial Sequence: Synthetic oligonucleotide
  Sense strand starting at position 3368 of SEQ ID NO: 1561048
ugacaugaauccguuuacu

SEQ ID NO: 1642960 - RNA, 19 nt, Artificial Sequence
  Description of Artificial Sequence: Synthetic oligonucleotide
  Antisense strand to SEQ ID NO: 1642959
aguaaacggauucauguca

SEQ ID NO: 1642961 - RNA, 19 nt, Artificial Sequence
  Description of Artificial Sequence: Synthetic oligonucleotide
  Sense strand starting at position 3742 of SEQ ID NO: 1561048
uuuaauugauucgucggau

SEQ ID NO: 1642962 - RNA, 19 nt, Artificial Sequence
  Description of Artificial Sequence: Synthetic oligonucleotide
  Antisense strand to SEQ ID NO: 1642961
auccgacgaaucaauuaaa

SEQ ID NO: 1642963 - RNA, 19 nt, Artificial Sequence
  Description of Artificial Sequence: Synthetic oligonucleotide
  Sense strand starting at position 3771 of SEQ ID NO: 1561048
gaaagugggccugggauau

SEQ ID NO: 1642964 - RNA, 19 nt, Artificial Sequence
  Description of Artificial Sequence: Synthetic oligonucleotide
  Antisense strand to SEQ ID NO: 1642963
auaucccaggcccacuuuc

SEQ ID NO: 1642965 - RNA, 19 nt, Artificial Sequence
  Description of Artificial Sequence: Synthetic oligonucleotide
  Sense strand starting at position 3782 of SEQ ID NO: 1561048
ugggauauacaguaagcga

SEQ ID NO: 1642966 - RNA, 19 nt, Artificial Sequence
  Description of Artificial Sequence: Synthetic oligonucleotide
  Antisense strand to SEQ ID NO: 1642965
ucgcuuacuguauauccca

SEQ ID NO: 1642967 - RNA, 19 nt, Artificial Sequence
  Description of Artificial Sequence: Synthetic oligonucleotide
  Sense strand starting at position 3790 of SEQ ID NO: 1561048
acaguaagcgaucaauaau

SEQ ID NO: 1642968 - RNA, 19 nt, Artificial Sequence
  Description of Artificial Sequence: Synthetic oligonucleotide
  Antisense strand to SEQ ID NO: 1642967
auuauugaucgcuuacugu

SEQ ID NO: 1642969 - RNA, 19 nt, Artificial Sequence
  Description of Artificial Sequence: Synthetic oligonucleotide
  Sense strand starting at position 3793 of SEQ ID NO: 1561048
guaagcgaucaauaauaac

SEQ ID NO: 1642970 - RNA, 19 nt, Artificial Sequence
  Description of Artificial Sequence: Synthetic oligonucleotide
  Antisense strand to SEQ ID NO: 1642969
guuauuauugaucgcuuac

SEQ ID NO: 1642971 - RNA, 19 nt, Artificial Sequence
  Description of Artificial Sequence: Synthetic oligonucleotide
  Sense strand starting at position 298 of SEQ ID NO: 1561049
guagcaaugucagcaaaca

SEQ ID NO: 1642972 - RNA, 19 nt, Artificial Sequence
  Description of Artificial Sequence: Synthetic oligonucleotide
  Antisense strand to SEQ ID NO: 1642971
uguuugcugacauugcuac

SEQ ID NO: 1642973 - RNA, 19 nt, Artificial Sequence
  Description of Artificial Sequence: Synthetic oligonucleotide
  Sense strand starting at position 353 of SEQ ID NO: 1561049
ccauacaugugguuaucau

SEQ ID NO: 1642974 - RNA, 19 nt, Artificial Sequence
  Description of Artificial Sequence: Synthetic oligonucleotide
  Antisense strand to SEQ ID NO: 1642973
augauaaccacauguaugg

SEQ ID NO: 1642975 - RNA, 19 nt, Artificial Sequence
  Description of Artificial Sequence: Synthetic oligonucleotide
  Sense strand starting at position 354 of SEQ ID NO: 1561049
cauacaugugguuaucaug

SEQ ID NO: 1642976 - RNA, 19 nt, Artificial Sequence
  Description of Artificial Sequence: Synthetic oligonucleotide
  Antisense strand to SEQ ID NO: 1642975
caugauaaccacauguaug

SEQ ID NO: 1642977 - RNA, 19 nt, Artificial Sequence
  Description of Artificial Sequence: Synthetic oligonucleotide
  Sense strand starting at position 360 of SEQ ID NO: 1561049
ugugguuaucaugaugauu

SEQ ID NO: 1642978 - RNA, 19 nt, Artificial Sequence
  Description of Artificial Sequence: Synthetic oligonucleotide
  Antisense strand to SEQ ID NO: 1642977
aaucaucaugauaaccaca

SEQ ID NO: 1642979 - RNA, 19 nt, Artificial Sequence
  Description of Artificial Sequence: Synthetic oligonucleotide
  Sense strand starting at position 398 of SEQ ID NO: 1561049
uuugguaguuucccgauaa

SEQ ID NO: 1642980 - RNA, 19 nt, Artificial Sequence
  Description of Artificial Sequence: Synthetic oligonucleotide
  Antisense strand to SEQ ID NO: 1642979
uuaucgggaaacuaccaaa

SEQ ID NO: 1642981 - RNA, 19 nt, Artificial Sequence
  Description of Artificial Sequence: Synthetic oligonucleotide
  Sense strand starting at position 402 of SEQ ID NO: 1561049
guaguuucccgauaaucuc

SEQ ID NO: 1642982 - RNA, 19 nt, Artificial Sequence
  Description of Artificial Sequence: Synthetic oligonucleotide
  Antisense strand to SEQ ID NO: 1642981
gagauuaucgggaaacuac

SEQ ID NO: 1642983 - RNA, 19 nt, Artificial Sequence
  Description of Artificial Sequence: Synthetic oligonucleotide
  Sense strand starting at position 460 of SEQ ID NO: 1561049
ggagauuucucuggauggu

SEQ ID NO: 1642984 - RNA, 19 nt, Artificial Sequence
  Description of Artificial Sequence: Synthetic oligonucleotide
  Antisense strand to SEQ ID NO: 1642983
accauccagagaaaucucc

SEQ ID NO: 1642985 - RNA, 19 nt, Artificial Sequence
  Description of Artificial Sequence: Synthetic oligonucleotide
  Sense strand starting at position 484 of SEQ ID NO: 1561049
agaagauaaucugcuucuu

SEQ ID NO: 1642986 - RNA, 19 nt, Artificial Sequence
  Description of Artificial Sequence: Synthetic oligonucleotide
  Antisense strand to SEQ ID NO: 1642985
aagaagcagauuaucuucu

SEQ ID NO: 1642987 - RNA, 19 nt, Artificial Sequence
  Description of Artificial Sequence: Synthetic oligonucleotide
  Sense strand starting at position 558 of SEQ ID NO: 1561049
agaaauuccugccuccuga

SEQ ID NO: 1642988 - RNA, 19 nt, Artificial Sequence
  Description of Artificial Sequence: Synthetic oligonucleotide
  Antisense strand to SEQ ID NO: 1642987
ucaggaggcaggaauuucu

SEQ ID NO: 1642989 - RNA, 19 nt, Artificial Sequence
  Description of Artificial Sequence: Synthetic oligonucleotide
  Sense strand starting at position 689 of SEQ ID NO: 1561049
gcgcacuuccuguuuguca

SEQ ID NO: 1642990 - RNA, 19 nt, Artificial Sequence
  Description of Artificial Sequence: Synthetic oligonucleotide
  Antisense strand to SEQ ID NO: 1642989
ugacaaacaggaagugcgc

SEQ ID NO: 1642991 - RNA, 19 nt, Artificial Sequence
  Description of Artificial Sequence: Synthetic oligonucleotide
  Sense strand starting at position 779 of SEQ ID NO: 1561049
gagugaaguugagucaaug

SEQ ID NO: 1642992 - RNA, 19 nt, Artificial Sequence
  Description of Artificial Sequence: Synthetic oligonucleotide
  Antisense strand to SEQ ID NO: 1642991
cauugacucaacuucacuc

SEQ ID NO: 1642993 - RNA, 19 nt, Artificial Sequence
  Description of Artificial Sequence: Synthetic oligonucleotide
  Sense strand starting at position 868 of SEQ ID NO: 1561049
gccucugaguccuuuggga

SEQ ID NO: 1642994 - RNA, 19 nt, Artificial Sequence
  Description of Artificial Sequence: Synthetic oligonucleotide
  Antisense strand to SEQ ID NO: 1642993
ucccaaaggacucagaggc

SEQ ID NO: 1642995 - RNA, 19 nt, Artificial Sequence
  Description of Artificial Sequence: Synthetic oligonucleotide
  Sense strand starting at position 1117 of SEQ ID NO: 1561049
ggcucuguucuaggaccua

SEQ ID NO: 1642996 - RNA, 19 nt, Artificial Sequence
  Description of Artificial Sequence: Synthetic oligonucleotide
  Antisense strand to SEQ ID NO: 1642995
uagguccuagaacagagcc

SEQ ID NO: 1642997 - RNA, 19 nt, Artificial Sequence
  Description of Artificial Sequence: Synthetic oligonucleotide
  Sense strand starting at position 1243 of SEQ ID NO: 1561049
acagaccauuucuaagagu

SEQ ID NO: 1642998 - RNA, 19 nt, Artificial Sequence
  Description of Artificial Sequence: Synthetic oligonucleotide
  Antisense strand to SEQ ID NO: 1642997
acucuuagaaauggucugu

SEQ ID NO: 1642999 - RNA, 19 nt, Artificial Sequence
  Description of Artificial Sequence: Synthetic oligonucleotide
  Sense strand starting at position 1252 of SEQ ID NO: 1561049
uucuaagaguuaucaauga

SEQ ID NO: 1643000 - RNA, 19 nt, Artificial Sequence
  Description of Artificial Sequence: Synthetic oligonucleotide
  Antisense strand to SEQ ID NO: 1642999
ucauugauaacucuuagaa

SEQ ID NO: 1643001 - RNA, 19 nt, Artificial Sequence
  Description of Artificial Sequence: Synthetic oligonucleotide
  Sense strand starting at position 1256 of SEQ ID NO: 1561049
aagaguuaucaaugaaagu

SEQ ID NO: 1643002 - RNA, 19 nt, Artificial Sequence
  Description of Artificial Sequence: Synthetic oligonucleotide
  Antisense strand to SEQ ID NO: 1643001
acuuucauugauaacucuu

SEQ ID NO: 1643003 - RNA, 19 nt, Artificial Sequence
  Description of Artificial Sequence: Synthetic oligonucleotide
  Sense strand starting at position 1272 of SEQ ID NO: 1561049
agugauaagccagggagau

SEQ ID NO: 1643004 - RNA, 19 nt, Artificial Sequence
  Description of Artificial Sequence: Synthetic oligonucleotide
  Antisense strand to SEQ ID NO: 1643003
aucucccuggcuuaucacu

SEQ ID NO: 1643005 - RNA, 19 nt, Artificial Sequence
  Description of Artificial Sequence: Synthetic oligonucleotide
  Sense strand starting at position 1273 of SEQ ID NO: 1561049
gugauaagccagggagaug

SEQ ID NO: 1643006 - RNA, 19 nt, Artificial Sequence
  Description of Artificial Sequence: Synthetic oligonucleotide
  Antisense strand to SEQ ID NO: 1643005
caucucccuggcuuaucac

SEQ ID NO: 1643007 - RNA, 19 nt, Artificial Sequence
  Description of Artificial Sequence: Synthetic oligonucleotide
  Sense strand starting at position 1278 of SEQ ID NO: 1561049
aagccagggagaugugaua

SEQ ID NO: 1643008 - RNA, 19 nt, Artificial Sequence
  Description of Artificial Sequence: Synthetic oligonucleotide
  Antisense strand to SEQ ID NO: 1643007
uaucacaucucccuggcuu

SEQ ID NO: 1643009 - RNA, 19 nt, Artificial Sequence
  Description of Artificial Sequence: Synthetic oligonucleotide
  Sense strand starting at position 1310 of SEQ ID NO: 1561049
aggacagccucuccuauaa

SEQ ID NO: 1643010 - RNA, 19 nt, Artificial Sequence
  Description of Artificial Sequence: Synthetic oligonucleotide
  Antisense strand to SEQ ID NO: 1643009
uuauaggagaggcuguccu

SEQ ID NO: 1643011 - RNA, 19 nt, Artificial Sequence
  Description of Artificial Sequence: Synthetic oligonucleotide
  Sense strand starting at position 1362 of SEQ ID NO: 1561049
gaggcaguuaggcaaagau

SEQ ID NO: 1643012 - RNA, 19 nt, Artificial Sequence
  Description of Artificial Sequence: Synthetic oligonucleotide
  Antisense strand to SEQ ID NO: 1643011
aucuuugccuaacugccuc

SEQ ID NO: 1643013 - RNA, 19 nt, Artificial Sequence
  Description of Artificial Sequence: Synthetic oligonucleotide
  Sense strand starting at position 1372 of SEQ ID NO: 1561049
ggcaaagauuuggaggagu

SEQ ID NO: 1643014 - RNA, 19 nt, Artificial Sequence
  Description of Artificial Sequence: Synthetic oligonucleotide
  Antisense strand to SEQ ID NO: 1643013
acuccuccaaaucuuugcc

SEQ ID NO: 1643015 - RNA, 19 nt, Artificial Sequence
  Description of Artificial Sequence: Synthetic oligonucleotide
  Sense strand starting at position 1383 of SEQ ID NO: 1561049
ggaggagucgccuggguga

SEQ ID NO: 1643016 - RNA, 19 nt, Artificial Sequence
  Description of Artificial Sequence: Synthetic oligonucleotide
  Antisense strand to SEQ ID NO: 1643015
ucacccaggcgacuccucc

SEQ ID NO: 1643017 - RNA, 19 nt, Artificial Sequence
  Description of Artificial Sequence: Synthetic oligonucleotide
  Sense strand starting at position 1480 of SEQ ID NO: 1561049
gccggaauacgaugaggaa

SEQ ID NO: 1643018 - RNA, 19 nt, Artificial Sequence
  Description of Artificial Sequence: Synthetic oligonucleotide
  Antisense strand to SEQ ID NO: 1643017
uuccucaucguauuccggc

SEQ ID NO: 1643019 - RNA, 19 nt, Artificial Sequence
  Description of Artificial Sequence: Synthetic oligonucleotide
  Sense strand starting at position 1625 of SEQ ID NO: 1561049
gccguuuaagaggaucacu

SEQ ID NO: 1643020 - RNA, 19 nt, Artificial Sequence
  Description of Artificial Sequence: Synthetic oligonucleotide
  Antisense strand to SEQ ID NO: 1643019
agugauccucuuaaacggc

SEQ ID NO: 1643021 - RNA, 19 nt, Artificial Sequence
  Description of Artificial Sequence: Synthetic oligonucleotide
  Sense strand starting at position 1668 of SEQ ID NO: 1561049
uucugugcugcacaggaaa

SEQ ID NO: 1643022 - RNA, 19 nt, Artificial Sequence
  Description of Artificial Sequence: Synthetic oligonucleotide
  Antisense strand to SEQ ID NO: 1643021
uuuccugugcagcacagaa

SEQ ID NO: 1643023 - RNA, 19 nt, Artificial Sequence
  Description of Artificial Sequence: Synthetic oligonucleotide
  Sense strand starting at position 1670 of SEQ ID NO: 1561049
cugugcugcacaggaaaua

SEQ ID NO: 1643024 - RNA, 19 nt, Artificial Sequence
  Description of Artificial Sequence: Synthetic oligonucleotide
  Antisense strand to SEQ ID NO: 1643023
uauuuccugugcagcacag

SEQ ID NO: 1643025 - RNA, 19 nt, Artificial Sequence
  Description of Artificial Sequence: Synthetic oligonucleotide
  Sense strand starting at position 1834 of SEQ ID NO: 1561049
caauaauccugguucugga

SEQ ID NO: 1643026 - RNA, 19 nt, Artificial Sequence
  Description of Artificial Sequence: Synthetic oligonucleotide
  Antisense strand to SEQ ID NO: 1643025
uccagaaccaggauuauug

SEQ ID NO: 1643027 - RNA, 19 nt, Artificial Sequence
  Description of Artificial Sequence: Synthetic oligonucleotide
  Sense strand starting at position 2577 of SEQ ID NO: 1561049
uggagagacguccgggaaa

SEQ ID NO: 1643028 - RNA, 19 nt, Artificial Sequence
  Description of Artificial Sequence: Synthetic oligonucleotide
  Antisense strand to SEQ ID NO: 1643027
uuucccggacgucucucca

SEQ ID NO: 1643029 - RNA, 19 nt, Artificial Sequence
  Description of Artificial Sequence: Synthetic oligonucleotide
  Sense strand starting at position 2671 of SEQ ID NO: 1561049
ggugguuucccagguggga

SEQ ID NO: 1643030 - RNA, 19 nt, Artificial Sequence
  Description of Artificial Sequence: Synthetic oligonucleotide
  Antisense strand to SEQ ID NO: 1643029
ucccaccugggaaaccacc

SEQ ID NO: 1643031 - RNA, 19 nt, Artificial Sequence
  Description of Artificial Sequence: Synthetic oligonucleotide
  Sense strand starting at position 2712 of SEQ ID NO: 1561049
ucgugaugccuggagacga

SEQ ID NO: 1643032 - RNA, 19 nt, Artificial Sequence
  Description of Artificial Sequence: Synthetic oligonucleotide
  Antisense strand to SEQ ID NO: 1643031
ucgucuccaggcaucacga

SEQ ID NO: 1643033 - RNA, 19 nt, Artificial Sequence
  Description of Artificial Sequence: Synthetic oligonucleotide
  Sense strand starting at position 2788 of SEQ ID NO: 1561049
auugaugaguuccucauau

SEQ ID NO: 1643034 - RNA, 19 nt, Artificial Sequence
  Description of Artificial Sequence: Synthetic oligonucleotide
  Antisense strand to SEQ ID NO: 1643033
auaugaggaacucaucaau

SEQ ID NO: 1643035 - RNA, 19 nt, Artificial Sequence
  Description of Artificial Sequence: Synthetic oligonucleotide
  Sense strand starting at position 2790 of SEQ ID NO: 1561049
ugaugaguuccucauauua

SEQ ID NO: 1643036 - RNA, 19 nt, Artificial Sequence
  Description of Artificial Sequence: Synthetic oligonucleotide
  Antisense strand to SEQ ID NO: 1643035
uaauaugaggaacucauca

SEQ ID NO: 1643037 - RNA, 19 nt, Artificial Sequence
  Description of Artificial Sequence: Synthetic oligonucleotide
  Sense strand starting at position 2803 of SEQ ID NO: 1561049
auauuaacaucagucuugu

SEQ ID NO: 1643038 - RNA, 19 nt, Artificial Sequence
  Description of Artificial Sequence: Synthetic oligonucleotide
  Antisense strand to SEQ ID NO: 1643037
acaagacugauguuaauau

SEQ ID NO: 1643039 - RNA, 19 nt, Artificial Sequence
  Description of Artificial Sequence: Synthetic oligonucleotide
  Sense strand starting at position 3307 of SEQ ID NO: 1561049
gcgauucuccggcuguaga

SEQ ID NO: 1643040 - RNA, 19 nt, Artificial Sequence
  Description of Artificial Sequence: Synthetic oligonucleotide
  Antisense strand to SEQ ID NO: 1643039
ucuacagccggagaaucgc

SEQ ID NO: 1643041 - RNA, 19 nt, Artificial Sequence
  Description of Artificial Sequence: Synthetic oligonucleotide
  Sense strand starting at position 3578 of SEQ ID NO: 1561049
aaguuaaccuggcuuguaa

SEQ ID NO: 1643042 - RNA, 19 nt, Artificial Sequence
  Description of Artificial Sequence: Synthetic oligonucleotide
  Antisense strand to SEQ ID NO: 1643041
uuacaagccagguuaacuu

SEQ ID NO: 1643043 - RNA, 19 nt, Artificial Sequence
  Description of Artificial Sequence: Synthetic oligonucleotide
  Sense strand starting at position 3696 of SEQ ID NO: 1561049
ggugaaaguuacucaccca

SEQ ID NO: 1643044 - RNA, 19 nt, Artificial Sequence
  Description of Artificial Sequence: Synthetic oligonucleotide
  Antisense strand to SEQ ID NO: 1643043
ugggugaguaacuuucacc

SEQ ID NO: 1643045 - RNA, 19 nt, Artificial Sequence
  Description of Artificial Sequence: Synthetic oligonucleotide
  Sense strand starting at position 3868 of SEQ ID NO: 1561049
ggaagaaaguuucuuccuu

SEQ ID NO: 1643046 - RNA, 19 nt, Artificial Sequence
  Description of Artificial Sequence: Synthetic oligonucleotide
  Antisense strand to SEQ ID NO: 1643045
aaggaagaaacuuucuucc

SEQ ID NO: 1643047 - RNA, 19 nt, Artificial Sequence
  Description of Artificial Sequence: Synthetic oligonucleotide
  Sense strand starting at position 3951 of SEQ ID NO: 1561049
cgccuccucgugguuauaa

SEQ ID NO: 1643048 - RNA, 19 nt, Artificial Sequence
  Description of Artificial Sequence: Synthetic oligonucleotide
  Antisense strand to SEQ ID NO: 1643047
uuauaaccacgaggaggcg

SEQ ID NO: 1643049 - RNA, 19 nt, Artificial Sequence
  Description of Artificial Sequence: Synthetic oligonucleotide
  Sense strand starting at position 3953 of SEQ ID NO: 1561049
ccuccucgugguuauaaua

SEQ ID NO: 1643050 - RNA, 19 nt, Artificial Sequence
  Description of Artificial Sequence: Synthetic oligonucleotide
  Antisense strand to SEQ ID NO: 1643049
uauuauaaccacgaggagg

SEQ ID NO: 1643051 - RNA, 19 nt, Artificial Sequence
  Description of Artificial Sequence: Synthetic oligonucleotide
  Sense strand starting at position 107 of SEQ ID NO: 1561050
auuugaggcuucuugcauu

SEQ ID NO: 1643052 - RNA, 19 nt, Artificial Sequence
  Description of Artificial Sequence: Synthetic oligonucleotide
  Antisense strand to SEQ ID NO: 1643051
aaugcaagaagccucaaau

SEQ ID NO: 1643053 - RNA, 19 nt, Artificial Sequence
  Description of Artificial Sequence: Synthetic oligonucleotide
  Sense strand starting at position 310 of SEQ ID NO: 1561050
cccacuggugagcaaagau

SEQ ID NO: 1643054 - RNA, 19 nt, Artificial Sequence
  Description of Artificial Sequence: Synthetic oligonucleotide
  Antisense strand to SEQ ID NO: 1643053
aucuuugcucaccaguggg

SEQ ID NO: 1643055 - RNA, 19 nt, Artificial Sequence
  Description of Artificial Sequence: Synthetic oligonucleotide
  Sense strand starting at position 334 of SEQ ID NO: 1561050
cuggcuauuuauuguagua

SEQ ID NO: 1643056 - RNA, 19 nt, Artificial Sequence
  Description of Artificial Sequence: Synthetic oligonucleotide
  Antisense strand to SEQ ID NO: 1643055
uacuacaauaaauagccag

SEQ ID NO: 1643057 - RNA, 19 nt, Artificial Sequence
  Description of Artificial Sequence: Synthetic oligonucleotide
  Sense strand starting at position 336 of SEQ ID NO: 1561050
ggcuauuuauuguaguaau

SEQ ID NO: 1643058 - RNA, 19 nt, Artificial Sequence
  Description of Artificial Sequence: Synthetic oligonucleotide
  Antisense strand to SEQ ID NO: 1643057
auuacuacaauaaauagcc

SEQ ID NO: 1643059 - RNA, 19 nt, Artificial Sequence
  Description of Artificial Sequence: Synthetic oligonucleotide
  Sense strand starting at position 381 of SEQ ID NO: 1561050
agagauaucuaucaacuga

SEQ ID NO: 1643060 - RNA, 19 nt, Artificial Sequence
  Description of Artificial Sequence: Synthetic oligonucleotide
  Antisense strand to SEQ ID NO: 1643059
ucaguugauagauaucucu

SEQ ID NO: 1643061 - RNA, 19 nt, Artificial Sequence
  Description of Artificial Sequence: Synthetic oligonucleotide
  Sense strand starting at position 417 of SEQ ID NO: 1561050
uaugguauaugucauggaa

SEQ ID NO: 1643062 - RNA, 19 nt, Artificial Sequence
  Description of Artificial Sequence: Synthetic oligonucleotide
  Antisense strand to SEQ ID NO: 1643061
uuccaugacauauaccaua

SEQ ID NO: 1643063 - RNA, 19 nt, Artificial Sequence
  Description of Artificial Sequence: Synthetic oligonucleotide
  Sense strand starting at position 420 of SEQ ID NO: 1561050
gguauaugucauggaauga

SEQ ID NO: 1643064 - RNA, 19 nt, Artificial Sequence
  Description of Artificial Sequence: Synthetic oligonucleotide
  Antisense strand to SEQ ID NO: 1643063
ucauuccaugacauauacc

SEQ ID NO: 1643065 - RNA, 19 nt, Artificial Sequence
  Description of Artificial Sequence: Synthetic oligonucleotide
  Sense strand starting at position 480 of SEQ ID NO: 1561050
gguggcuuacgucgauaau

SEQ ID NO: 1643066 - RNA, 19 nt, Artificial Sequence
  Description of Artificial Sequence: Synthetic oligonucleotide
  Antisense strand to SEQ ID NO: 1643065
auuaucgacguaagccacc

SEQ ID NO: 1643067 - RNA, 19 nt, Artificial Sequence
  Description of Artificial Sequence: Synthetic oligonucleotide
  Sense strand starting at position 481 of SEQ ID NO: 1561050
guggcuuacgucgauaauc

SEQ ID NO: 1643068 - RNA, 19 nt, Artificial Sequence
  Description of Artificial Sequence: Synthetic oligonucleotide
  Antisense strand to SEQ ID NO: 1643067
gauuaucgacguaagccac

SEQ ID NO: 1643069 - RNA, 19 nt, Artificial Sequence
  Description of Artificial Sequence: Synthetic oligonucleotide
  Sense strand starting at position 774 of SEQ ID NO: 1561050
auccaagaaguguggagua

SEQ ID NO: 1643070 - RNA, 19 nt, Artificial Sequence
  Description of Artificial Sequence: Synthetic oligonucleotide
  Antisense strand to SEQ ID NO: 1643069
uacuccacacuucuuggau

SEQ ID NO: 1643071 - RNA, 19 nt, Artificial Sequence
  Description of Artificial Sequence: Synthetic oligonucleotide
  Sense strand starting at position 786 of SEQ ID NO: 1561050
uggaguauggucuagagca

SEQ ID NO: 1643072 - RNA, 19 nt, Artificial Sequence
  Description of Artificial Sequence: Synthetic oligonucleotide
  Antisense strand to SEQ ID NO: 1643071
ugcucuagaccauacucca

SEQ ID NO: 1643073 - RNA, 19 nt, Artificial Sequence
  Description of Artificial Sequence: Synthetic oligonucleotide
  Sense strand starting at position 787 of SEQ ID NO: 1561050
ggaguauggucuagagcag

SEQ ID NO: 1643074 - RNA, 19 nt, Artificial Sequence
  Description of Artificial Sequence: Synthetic oligonucleotide
  Antisense strand to SEQ ID NO: 1643073
cugcucuagaccauacucc

SEQ ID NO: 1643075 - RNA, 19 nt, Artificial Sequence
  Description of Artificial Sequence: Synthetic oligonucleotide
  Sense strand starting at position 788 of SEQ ID NO: 1561050
gaguauggucuagagcagu

SEQ ID NO: 1643076 - RNA, 19 nt, Artificial Sequence
  Description of Artificial Sequence: Synthetic oligonucleotide
  Antisense strand to SEQ ID NO: 1643075
acugcucuagaccauacuc

SEQ ID NO: 1643077 - RNA, 19 nt, Artificial Sequence
  Description of Artificial Sequence: Synthetic oligonucleotide
  Sense strand starting at position 1119 of SEQ ID NO: 1561050
gcuccagugugaucuccaa

SEQ ID NO: 1643078 - RNA, 19 nt, Artificial Sequence
  Description of Artificial Sequence: Synthetic oligonucleotide
  Antisense strand to SEQ ID NO: 1643077
uuggagaucacacuggagc

SEQ ID NO: 1643079 - RNA, 19 nt, Artificial Sequence
  Description of Artificial Sequence: Synthetic oligonucleotide
  Sense strand starting at position 1123 of SEQ ID NO: 1561050
cagugugaucuccaagcaa

SEQ ID NO: 1643080 - RNA, 19 nt, Artificial Sequence
  Description of Artificial Sequence: Synthetic oligonucleotide
  Antisense strand to SEQ ID NO: 1643079
uugcuuggagaucacacug

SEQ ID NO: 1643081 - RNA, 19 nt, Artificial Sequence
  Description of Artificial Sequence: Synthetic oligonucleotide
  Sense strand starting at position 1161 of SEQ ID NO: 1561050
gauucuguggcauaugcua

SEQ ID NO: 1643082 - RNA, 19 nt, Artificial Sequence
  Description of Artificial Sequence: Synthetic oligonucleotide
  Antisense strand to SEQ ID NO: 1643081
uagcauaugccacagaauc

SEQ ID NO: 1643083 - RNA, 19 nt, Artificial Sequence
  Description of Artificial Sequence: Synthetic oligonucleotide
  Sense strand starting at position 1358 of SEQ ID NO: 1561050
gaacguaacugcucuagac

SEQ ID NO: 1643084 - RNA, 19 nt, Artificial Sequence
  Description of Artificial Sequence: Synthetic oligonucleotide
  Antisense strand to SEQ ID NO: 1643083
gucuagagcaguuacguuc

SEQ ID NO: 1643085 - RNA, 19 nt, Artificial Sequence
  Description of Artificial Sequence: Synthetic oligonucleotide
  Sense strand starting at position 1362 of SEQ ID NO: 1561050
guaacugcucuagacgcaa

SEQ ID NO: 1643086 - RNA, 19 nt, Artificial Sequence
  Description of Artificial Sequence: Synthetic oligonucleotide
  Antisense strand to SEQ ID NO: 1643085
uugcgucuagagcaguuac

SEQ ID NO: 1643087 - RNA, 19 nt, Artificial Sequence
  Description of Artificial Sequence: Synthetic oligonucleotide
  Sense strand starting at position 1406 of SEQ ID NO: 1561050
gcaagaguccugugucgac

SEQ ID NO: 1643088 - RNA, 19 nt, Artificial Sequence
  Description of Artificial Sequence: Synthetic oligonucleotide
  Antisense strand to SEQ ID NO: 1643087
gucgacacaggacucuugc

SEQ ID NO: 1643089 - RNA, 19 nt, Artificial Sequence
  Description of Artificial Sequence: Synthetic oligonucleotide
  Sense strand starting at position 1755 of SEQ ID NO: 1561050
ccuggcucgccuuguagaa

SEQ ID NO: 1643090 - RNA, 19 nt, Artificial Sequence
  Description of Artificial Sequence: Synthetic oligonucleotide
  Antisense strand to SEQ ID NO: 1643089
uucuacaaggcgagccagg

SEQ ID NO: 1643091 - RNA, 19 nt, Artificial Sequence
  Description of Artificial Sequence: Synthetic oligonucleotide
  Sense strand starting at position 2118 of SEQ ID NO: 1561050
gccucugucagugaguuga

SEQ ID NO: 1643092 - RNA, 19 nt, Artificial Sequence
  Description of Artificial Sequence: Synthetic oligonucleotide
  Antisense strand to SEQ ID NO: 1643091
ucaacucacugacagaggc

SEQ ID NO: 1643093 - RNA, 19 nt, Artificial Sequence
  Description of Artificial Sequence: Synthetic oligonucleotide
  Sense strand starting at position 2277 of SEQ ID NO: 1561050
ucagauuccuguuuacuca

SEQ ID NO: 1643094 - RNA, 19 nt, Artificial Sequence
  Description of Artificial Sequence: Synthetic oligonucleotide
  Antisense strand to SEQ ID NO: 1643093
ugaguaaacaggaaucuga

SEQ ID NO: 1643095 - RNA, 19 nt, Artificial Sequence
  Description of Artificial Sequence: Synthetic oligonucleotide
  Sense strand starting at position 2302 of SEQ ID NO: 1561050
cuaaauccaguucgucuaa

SEQ ID NO: 1643096 - RNA, 19 nt, Artificial Sequence
  Description of Artificial Sequence: Synthetic oligonucleotide
  Antisense strand to SEQ ID NO: 1643095
uuagacgaacuggauuuag

SEQ ID NO: 1643097 - RNA, 19 nt, Artificial Sequence
  Description of Artificial Sequence: Synthetic oligonucleotide
  Sense strand starting at position 2304 of SEQ ID NO: 1561050
aaauccaguucgucuaagu

SEQ ID NO: 1643098 - RNA, 19 nt, Artificial Sequence
  Description of Artificial Sequence: Synthetic oligonucleotide
  Antisense strand to SEQ ID NO: 1643097
acuuagacgaacuggauuu

SEQ ID NO: 1643099 - RNA, 19 nt, Artificial Sequence
  Description of Artificial Sequence: Synthetic oligonucleotide
  Sense strand starting at position 2630 of SEQ ID NO: 1561050
acuggucucacagguauga

SEQ ID NO: 1643100 - RNA, 19 nt, Artificial Sequence
  Description of Artificial Sequence: Synthetic oligonucleotide
  Antisense strand to SEQ ID NO: 1643099
ucauaccugugagaccagu

SEQ ID NO: 1643101 - RNA, 19 nt, Artificial Sequence
  Description of Artificial Sequence: Synthetic oligonucleotide
  Sense strand starting at position 2804 of SEQ ID NO: 1561050
ccagaaagaugcuucuaga

SEQ ID NO: 1643102 - RNA, 19 nt, Artificial Sequence
  Description of Artificial Sequence: Synthetic oligonucleotide
  Antisense strand to SEQ ID NO: 1643101
ucuagaagcaucuuucugg

SEQ ID NO: 1643103 - RNA, 19 nt, Artificial Sequence
  Description of Artificial Sequence: Synthetic oligonucleotide
  Sense strand starting at position 2807 of SEQ ID NO: 1561050
gaaagaugcuucuagaaug

SEQ ID NO: 1643104 - RNA, 19 nt, Artificial Sequence
  Description of Artificial Sequence: Synthetic oligonucleotide
  Antisense strand to SEQ ID NO: 1643103
cauucuagaagcaucuuuc

SEQ ID NO: 1643105 - RNA, 19 nt, Artificial Sequence
  Description of Artificial Sequence: Synthetic oligonucleotide
  Sense strand starting at position 2812 of SEQ ID NO: 1561050
augcuucuagaaugcaauu

SEQ ID NO: 1643106 - RNA, 19 nt, Artificial Sequence
  Description of Artificial Sequence: Synthetic oligonucleotide
  Antisense strand to SEQ ID NO: 1643105
aauugcauucuagaagcau

SEQ ID NO: 1643107 - RNA, 19 nt, Artificial Sequence
  Description of Artificial Sequence: Synthetic oligonucleotide
  Sense strand starting at position 3212 of SEQ ID NO: 1561050
ccugguaaauaugaucagu

SEQ ID NO: 1643108 - RNA, 19 nt, Artificial Sequence
  Description of Artificial Sequence: Synthetic oligonucleotide
  Antisense strand to SEQ ID NO: 1643107
acugaucauauuuaccagg

SEQ ID NO: 1643109 - RNA, 19 nt, Artificial Sequence
  Description of Artificial Sequence: Synthetic oligonucleotide
  Sense strand starting at position 3263 of SEQ ID NO: 1561050
gaguccuacccucgccaga

SEQ ID NO: 1643110 - RNA, 19 nt, Artificial Sequence
  Description of Artificial Sequence: Synthetic oligonucleotide
  Antisense strand to SEQ ID NO: 1643109
ucuggcgaggguaggacuc

SEQ ID NO: 1643111 - RNA, 19 nt, Artificial Sequence
  Description of Artificial Sequence: Synthetic oligonucleotide
  Sense strand starting at position 3344 of SEQ ID NO: 1561050
cuguaauugcuuuaaggaa

SEQ ID NO: 1643112 - RNA, 19 nt, Artificial Sequence
  Description of Artificial Sequence: Synthetic oligonucleotide
  Antisense strand to SEQ ID NO: 1643111
uuccuuaaagcaauuacag

SEQ ID NO: 1643113 - RNA, 19 nt, Artificial Sequence
  Description of Artificial Sequence: Synthetic oligonucleotide
  Sense strand starting at position 3372 of SEQ ID NO: 1561050
guuguaggcacuugauauu

SEQ ID NO: 1643114 - RNA, 19 nt, Artificial Sequence
  Description of Artificial Sequence: Synthetic oligonucleotide
  Antisense strand to SEQ ID NO: 1643113
aauaucaagugccuacaac

SEQ ID NO: 1643115 - RNA, 19 nt, Artificial Sequence
  Description of Artificial Sequence: Synthetic oligonucleotide
  Sense strand starting at position 3443 of SEQ ID NO: 1561050
aguauaaauuagccaggaa

SEQ ID NO: 1643116 - RNA, 19 nt, Artificial Sequence
  Description of Artificial Sequence: Synthetic oligonucleotide
  Antisense strand to SEQ ID NO: 1643115
uuccuggcuaauuuauacu

SEQ ID NO: 1643117 - RNA, 19 nt, Artificial Sequence
  Description of Artificial Sequence: Synthetic oligonucleotide
  Sense strand starting at position 3503 of SEQ ID NO: 1561050
gugccaauuuccugaggau

SEQ ID NO: 1643118 - RNA, 19 nt, Artificial Sequence
  Description of Artificial Sequence: Synthetic oligonucleotide
  Antisense strand to SEQ ID NO: 1643117
auccucaggaaauuggcac

SEQ ID NO: 1643119 - RNA, 19 nt, Artificial Sequence
  Description of Artificial Sequence: Synthetic oligonucleotide
  Sense strand starting at position 3506 of SEQ ID NO: 1561050
ccaauuuccugaggauuaa

SEQ ID NO: 1643120 - RNA, 19 nt, Artificial Sequence
  Description of Artificial Sequence: Synthetic oligonucleotide
  Antisense strand to SEQ ID NO: 1643119
uuaauccucaggaaauugg

SEQ ID NO: 1643121 - RNA, 19 nt, Artificial Sequence
  Description of Artificial Sequence: Synthetic oligonucleotide
  Sense strand starting at position 3621 of SEQ ID NO: 1561050
auuguucuuguagaaagca

SEQ ID NO: 1643122 - RNA, 19 nt, Artificial Sequence
  Description of Artificial Sequence: Synthetic oligonucleotide
  Antisense strand to SEQ ID NO: 1643121
ugcuuucuacaagaacaau

SEQ ID NO: 1643123 - RNA, 19 nt, Artificial Sequence
  Description of Artificial Sequence: Synthetic oligonucleotide
  Sense strand starting at position 3662 of SEQ ID NO: 1561050
gcuauauuuagccgauguc

SEQ ID NO: 1643124 - RNA, 19 nt, Artificial Sequence
  Description of Artificial Sequence: Synthetic oligonucleotide
  Antisense strand to SEQ ID NO: 1643123
gacaucggcuaaauauagc

SEQ ID NO: 1643125 - RNA, 19 nt, Artificial Sequence
  Description of Artificial Sequence: Synthetic oligonucleotide
  Sense strand starting at position 3675 of SEQ ID NO: 1561050
gaugucccauuaggauaaa

SEQ ID NO: 1643126 - RNA, 19 nt, Artificial Sequence
  Description of Artificial Sequence: Synthetic oligonucleotide
  Antisense strand to SEQ ID NO: 1643125
uuuauccuaaugggacauc

SEQ ID NO: 1643127 - RNA, 19 nt, Artificial Sequence
  Description of Artificial Sequence: Synthetic oligonucleotide
  Sense strand starting at position 3755 of SEQ ID NO: 1561050
aaauguucuggugacguaa

SEQ ID NO: 1643128 - RNA, 19 nt, Artificial Sequence
  Description of Artificial Sequence: Synthetic oligonucleotide
  Antisense strand to SEQ ID NO: 1643127
uuacgucaccagaacauuu

SEQ ID NO: 1643129 - RNA, 19 nt, Artificial Sequence
  Description of Artificial Sequence: Synthetic oligonucleotide
  Sense strand starting at position 3921 of SEQ ID NO: 1561050
cggauaugucaaugggcga

SEQ ID NO: 1643130 - RNA, 19 nt, Artificial Sequence
  Description of Artificial Sequence: Synthetic oligonucleotide
  Antisense strand to SEQ ID NO: 1643129
ucgcccauugacauauccg

SEQ ID NO: 1643131 - RNA, 19 nt, Artificial Sequence
  Description of Artificial Sequence: Synthetic oligonucleotide
  Sense strand starting at position 257 of SEQ ID NO: 1561051
auuugaggcuucuugcauu

SEQ ID NO: 1643132 - RNA, 19 nt, Artificial Sequence
  Description of Artificial Sequence: Synthetic oligonucleotide
  Antisense strand to SEQ ID NO: 1643131
aaugcaagaagccucaaau

SEQ ID NO: 1643133 - RNA, 19 nt, Artificial Sequence
  Description of Artificial Sequence: Synthetic oligonucleotide
  Sense strand starting at position 460 of SEQ ID NO: 1561051
cccacuggugagcaaagau

SEQ ID NO: 1643134 - RNA, 19 nt, Artificial Sequence
  Description of Artificial Sequence: Synthetic oligonucleotide
  Antisense strand to SEQ ID NO: 1643133
aucuuugcucaccaguggg

SEQ ID NO: 1643135 - RNA, 19 nt, Artificial Sequence
  Description of Artificial Sequence: Synthetic oligonucleotide
  Sense strand starting at position 484 of SEQ ID NO: 1561051
cuggcuauuuauuguagua

SEQ ID NO: 1643136 - RNA, 19 nt, Artificial Sequence
  Description of Artificial Sequence: Synthetic oligonucleotide
  Antisense strand to SEQ ID NO: 1643135
uacuacaauaaauagccag

SEQ ID NO: 1643137 - RNA, 19 nt, Artificial Sequence
  Description of Artificial Sequence: Synthetic oligonucleotide
  Sense strand starting at position 486 of SEQ ID NO: 1561051
ggcuauuuauuguaguaau

SEQ ID NO: 1643138 - RNA, 19 nt, Artificial Sequence
  Description of Artificial Sequence: Synthetic oligonucleotide
  Antisense strand to SEQ ID NO: 1643137
auuacuacaauaaauagcc

SEQ ID NO: 1643139 - RNA, 19 nt, Artificial Sequence
  Description of Artificial Sequence: Synthetic oligonucleotide
  Sense strand starting at position 531 of SEQ ID NO: 1561051
agagauaucuaucaacuga

SEQ ID NO: 1643140 - RNA, 19 nt, Artificial Sequence
  Description of Artificial Sequence: Synthetic oligonucleotide
  Antisense strand to SEQ ID NO: 1643139
ucaguugauagauaucucu

SEQ ID NO: 1643141 - RNA, 19 nt, Artificial Sequence
  Description of Artificial Sequence: Synthetic oligonucleotide
  Sense strand starting at position 567 of SEQ ID NO: 1561051
uaugguauaugucauggaa

SEQ ID NO: 1643142 - RNA, 19 nt, Artificial Sequence
  Description of Artificial Sequence: Synthetic oligonucleotide
  Antisense strand to SEQ ID NO: 1643141
uuccaugacauauaccaua

SEQ ID NO: 1643143 - RNA, 19 nt, Artificial Sequence
  Description of Artificial Sequence: Synthetic oligonucleotide
  Sense strand starting at position 570 of SEQ ID NO: 1561051
gguauaugucauggaauga

SEQ ID NO: 1643144 - RNA, 19 nt, Artificial Sequence
  Description of Artificial Sequence: Synthetic oligonucleotide
  Antisense strand to SEQ ID NO: 1643143
ucauuccaugacauauacc

SEQ ID NO: 1643145 - RNA, 19 nt, Artificial Sequence
  Description of Artificial Sequence: Synthetic oligonucleotide
  Sense strand starting at position 630 of SEQ ID NO: 1561051
gguggcuuacgucgauaau

SEQ ID NO: 1643146 - RNA, 19 nt, Artificial Sequence
  Description of Artificial Sequence: Synthetic oligonucleotide
  Antisense strand to SEQ ID NO: 1643145
auuaucgacguaagccacc

SEQ ID NO: 1643147 - RNA, 19 nt, Artificial Sequence
  Description of Artificial Sequence: Synthetic oligonucleotide
  Sense strand starting at position 631 of SEQ ID NO: 1561051
guggcuuacgucgauaauc

SEQ ID NO: 1643148 - RNA, 19 nt, Artificial Sequence
  Description of Artificial Sequence: Synthetic oligonucleotide
  Antisense strand to SEQ ID NO: 1643147
gauuaucgacguaagccac

SEQ ID NO: 1643149 - RNA, 19 nt, Artificial Sequence
  Description of Artificial Sequence: Synthetic oligonucleotide
  Sense strand starting at position 924 of SEQ ID NO: 1561051
auccaagaaguguggagua

SEQ ID NO: 1643150 - RNA, 19 nt, Artificial Sequence
  Description of Artificial Sequence: Synthetic oligonucleotide
  Antisense strand to SEQ ID NO: 1643149
uacuccacacuucuuggau

SEQ ID NO: 1643151 - RNA, 19 nt, Artificial Sequence
  Description of Artificial Sequence: Synthetic oligonucleotide
  Sense strand starting at position 936 of SEQ ID NO: 1561051
uggaguauggucuagagca

SEQ ID NO: 1643152 - RNA, 19 nt, Artificial Sequence
  Description of Artificial Sequence: Synthetic oligonucleotide
  Antisense strand to SEQ ID NO: 1643151
ugcucuagaccauacucca

SEQ ID NO: 1643153 - RNA, 19 nt, Artificial Sequence
  Description of Artificial Sequence: Synthetic oligonucleotide
  Sense strand starting at position 937 of SEQ ID NO: 1561051
ggaguauggucuagagcag

SEQ ID NO: 1643154 - RNA, 19 nt, Artificial Sequence
  Description of Artificial Sequence: Synthetic oligonucleotide
  Antisense strand to SEQ ID NO: 1643153
cugcucuagaccauacucc

SEQ ID NO: 1643155 - RNA, 19 nt, Artificial Sequence
  Description of Artificial Sequence: Synthetic oligonucleotide
  Sense strand starting at position 938 of SEQ ID NO: 1561051
gaguauggucuagagcagu

SEQ ID NO: 1643156 - RNA, 19 nt, Artificial Sequence
  Description of Artificial Sequence: Synthetic oligonucleotide
  Antisense strand to SEQ ID NO: 1643155
acugcucuagaccauacuc

SEQ ID NO: 1643157 - RNA, 19 nt, Artificial Sequence
  Description of Artificial Sequence: Synthetic oligonucleotide
  Sense strand starting at position 1269 of SEQ ID NO: 1561051
gcuccagugugaucuccaa

SEQ ID NO: 1643158 - RNA, 19 nt, Artificial Sequence
  Description of Artificial Sequence: Synthetic oligonucleotide
  Antisense strand to SEQ ID NO: 1643157
uuggagaucacacuggagc

SEQ ID NO: 1643159 - RNA, 19 nt, Artificial Sequence
  Description of Artificial Sequence: Synthetic oligonucleotide
  Sense strand starting at position 1273 of SEQ ID NO: 1561051
cagugugaucuccaagcaa

SEQ ID NO: 1643160 - RNA, 19 nt, Artificial Sequence
  Description of Artificial Sequence: Synthetic oligonucleotide
  Antisense strand to SEQ ID NO: 1643159
uugcuuggagaucacacug

SEQ ID NO: 1643161 - RNA, 19 nt, Artificial Sequence
  Description of Artificial Sequence: Synthetic oligonucleotide
  Sense strand starting at position 1311 of SEQ ID NO: 1561051
gauucuguggcauaugcua

SEQ ID NO: 1643162 - RNA, 19 nt, Artificial Sequence
  Description of Artificial Sequence: Synthetic oligonucleotide
  Antisense strand to SEQ ID NO: 1643161
uagcauaugccacagaauc

SEQ ID NO: 1643163 - RNA, 19 nt, Artificial Sequence
  Description of Artificial Sequence: Synthetic oligonucleotide
  Sense strand starting at position 1508 of SEQ ID NO: 1561051
gaacguaacugcucuagac

SEQ ID NO: 1643164 - RNA, 19 nt, Artificial Sequence
  Description of Artificial Sequence: Synthetic oligonucleotide
  Antisense strand to SEQ ID NO: 1643163
gucuagagcaguuacguuc

SEQ ID NO: 1643165 - RNA, 19 nt, Artificial Sequence
  Description of Artificial Sequence: Synthetic oligonucleotide
  Sense strand starting at position 1512 of SEQ ID NO: 1561051
guaacugcucuagacgcaa

SEQ ID NO: 1643166 - RNA, 19 nt, Artificial Sequence
  Description of Artificial Sequence: Synthetic oligonucleotide
  Antisense strand to SEQ ID NO: 1643165
uugcgucuagagcaguuac

SEQ ID NO: 1643167 - RNA, 19 nt, Artificial Sequence
  Description of Artificial Sequence: Synthetic oligonucleotide
  Sense strand starting at position 1556 of SEQ ID NO: 1561051
gcaagaguccugugucgac

SEQ ID NO: 1643168 - RNA, 19 nt, Artificial Sequence
  Description of Artificial Sequence: Synthetic oligonucleotide
  Antisense strand to SEQ ID NO: 1643167
gucgacacaggacucuugc

SEQ ID NO: 1643169 - RNA, 19 nt, Artificial Sequence
  Description of Artificial Sequence: Synthetic oligonucleotide
  Sense strand starting at position 1905 of SEQ ID NO: 1561051
ccuggcucgccuuguagaa

SEQ ID NO: 1643170 - RNA, 19 nt, Artificial Sequence
  Description of Artificial Sequence: Synthetic oligonucleotide
  Antisense strand to SEQ ID NO: 1643169
uucuacaaggcgagccagg

SEQ ID NO: 1643171 - RNA, 19 nt, Artificial Sequence
  Description of Artificial Sequence: Synthetic oligonucleotide
  Sense strand starting at position 2266 of SEQ ID NO: 1561051
ccgccucugucagugaguu

SEQ ID NO: 1643172 - RNA, 19 nt, Artificial Sequence
  Description of Artificial Sequence: Synthetic oligonucleotide
  Antisense strand to SEQ ID NO: 1643171
aacucacugacagaggcgg

SEQ ID NO: 1643173 - RNA, 19 nt, Artificial Sequence
  Description of Artificial Sequence: Synthetic oligonucleotide
  Sense strand starting at position 2268 of SEQ ID NO: 1561051
gccucugucagugaguuga

SEQ ID NO: 1643174 - RNA, 19 nt, Artificial Sequence
  Description of Artificial Sequence: Synthetic oligonucleotide
  Antisense strand to SEQ ID NO: 1643173
ucaacucacugacagaggc

SEQ ID NO: 1643175 - RNA, 19 nt, Artificial Sequence
  Description of Artificial Sequence: Synthetic oligonucleotide
  Sense strand starting at position 2427 of SEQ ID NO: 1561051
ucagauuccuguuuacuca

SEQ ID NO: 1643176 - RNA, 19 nt, Artificial Sequence
  Description of Artificial Sequence: Synthetic oligonucleotide
  Antisense strand to SEQ ID NO: 1643175
ugaguaaacaggaaucuga

SEQ ID NO: 1643177 - RNA, 19 nt, Artificial Sequence
  Description of Artificial Sequence: Synthetic oligonucleotide
  Sense strand starting at position 2452 of SEQ ID NO: 1561051
cuaaauccaguucgucuaa

SEQ ID NO: 1643178 - RNA, 19 nt, Artificial Sequence
  Description of Artificial Sequence: Synthetic oligonucleotide
  Antisense strand to SEQ ID NO: 1643177
uuagacgaacuggauuuag

SEQ ID NO: 1643179 - RNA, 19 nt, Artificial Sequence
  Description of Artificial Sequence: Synthetic oligonucleotide
  Sense strand starting at position 2454 of SEQ ID NO: 1561051
aaauccaguucgucuaagu

SEQ ID NO: 1643180 - RNA, 19 nt, Artificial Sequence
  Description of Artificial Sequence: Synthetic oligonucleotide
  Antisense strand to SEQ ID NO: 1643179
acuuagacgaacuggauuu

SEQ ID NO: 1643181 - RNA, 19 nt, Artificial Sequence
  Description of Artificial Sequence: Synthetic oligonucleotide
  Sense strand starting at position 2780 of SEQ ID NO: 1561051
acuggucucacagguauga

SEQ ID NO: 1643182 - RNA, 19 nt, Artificial Sequence
  Description of Artificial Sequence: Synthetic oligonucleotide
  Antisense strand to SEQ ID NO: 1643181
ucauaccugugagaccagu

SEQ ID NO: 1643183 - RNA, 19 nt, Artificial Sequence
  Description of Artificial Sequence: Synthetic oligonucleotide
  Sense strand starting at position 2954 of SEQ ID NO: 1561051
ccagaaagaugcuucuaga

SEQ ID NO: 1643184 - RNA, 19 nt, Artificial Sequence
  Description of Artificial Sequence: Synthetic oligonucleotide
  Antisense strand to SEQ ID NO: 1643183
ucuagaagcaucuuucugg

SEQ ID NO: 1643185 - RNA, 19 nt, Artificial Sequence
  Description of Artificial Sequence: Synthetic oligonucleotide
  Sense strand starting at position 2957 of SEQ ID NO: 1561051
gaaagaugcuucuagaaug

SEQ ID NO: 1643186 - RNA, 19 nt, Artificial Sequence
  Description of Artificial Sequence: Synthetic oligonucleotide
  Antisense strand to SEQ ID NO: 1643185
cauucuagaagcaucuuuc

SEQ ID NO: 1643187 - RNA, 19 nt, Artificial Sequence
  Description of Artificial Sequence: Synthetic oligonucleotide
  Sense strand starting at position 2962 of SEQ ID NO: 1561051
augcuucuagaaugcaauu

SEQ ID NO: 1643188 - RNA, 19 nt, Artificial Sequence
  Description of Artificial Sequence: Synthetic oligonucleotide
  Antisense strand to SEQ ID NO: 1643187
aauugcauucuagaagcau

SEQ ID NO: 1643189 - RNA, 19 nt, Artificial Sequence
  Description of Artificial Sequence: Synthetic oligonucleotide
  Sense strand starting at position 3362 of SEQ ID NO: 1561051
ccugguaaauaugaucagu

SEQ ID NO: 1643190 - RNA, 19 nt, Artificial Sequence
  Description of Artificial Sequence: Synthetic oligonucleotide
  Antisense strand to SEQ ID NO: 1643189
acugaucauauuuaccagg

SEQ ID NO: 1643191 - RNA, 19 nt, Artificial Sequence
  Description of Artificial Sequence: Synthetic oligonucleotide
  Sense strand starting at position 3413 of SEQ ID NO: 1561051
gaguccuacccucgccaga

SEQ ID NO: 1643192 - RNA, 19 nt, Artificial Sequence
  Description of Artificial Sequence: Synthetic oligonucleotide
  Antisense strand to SEQ ID NO: 1643191
ucuggcgaggguaggacuc

SEQ ID NO: 1643193 - RNA, 19 nt, Artificial Sequence
  Description of Artificial Sequence: Synthetic oligonucleotide
  Sense strand starting at position 3494 of SEQ ID NO: 1561051
cuguaauugcuuuaaggaa

SEQ ID NO: 1643194 - RNA, 19 nt, Artificial Sequence
  Description of Artificial Sequence: Synthetic oligonucleotide
  Antisense strand to SEQ ID NO: 1643193
uuccuuaaagcaauuacag

SEQ ID NO: 1643195 - RNA, 19 nt, Artificial Sequence
  Description of Artificial Sequence: Synthetic oligonucleotide
  Sense strand starting at position 3522 of SEQ ID NO: 1561051
guuguaggcacuugauauu

SEQ ID NO: 1643196 - RNA, 19 nt, Artificial Sequence
  Description of Artificial Sequence: Synthetic oligonucleotide
  Antisense strand to SEQ ID NO: 1643195
aauaucaagugccuacaac

SEQ ID NO: 1643197 - RNA, 19 nt, Artificial Sequence
  Description of Artificial Sequence: Synthetic oligonucleotide
  Sense strand starting at position 3593 of SEQ ID NO: 1561051
aguauaaauuagccaggaa

SEQ ID NO: 1643198 - RNA, 19 nt, Artificial Sequence
  Description of Artificial Sequence: Synthetic oligonucleotide
  Antisense strand to SEQ ID NO: 1643197
uuccuggcuaauuuauacu

SEQ ID NO: 1643199 - RNA, 19 nt, Artificial Sequence
  Description of Artificial Sequence: Synthetic oligonucleotide
  Sense strand starting at position 3653 of SEQ ID NO: 1561051
gugccaauuuccugaggau

SEQ ID NO: 1643200 - RNA, 19 nt, Artificial Sequence
  Description of Artificial Sequence: Synthetic oligonucleotide
  Antisense strand to SEQ ID NO: 1643199
auccucaggaaauuggcac

SEQ ID NO: 1643201 - RNA, 19 nt, Artificial Sequence
  Description of Artificial Sequence: Synthetic oligonucleotide
  Sense strand starting at position 3656 of SEQ ID NO: 1561051
ccaauuuccugaggauuaa

SEQ ID NO: 1643202 - RNA, 19 nt, Artificial Sequence
  Description of Artificial Sequence: Synthetic oligonucleotide
  Antisense strand to SEQ ID NO: 1643201
uuaauccucaggaaauugg

SEQ ID NO: 1643203 - RNA, 19 nt, Artificial Sequence
  Description of Artificial Sequence: Synthetic oligonucleotide
  Sense strand starting at position 3771 of SEQ ID NO: 1561051
auuguucuuguagaaagca

SEQ ID NO: 1643204 - RNA, 19 nt, Artificial Sequence
  Description of Artificial Sequence: Synthetic oligonucleotide
  Antisense strand to SEQ ID NO: 1643203
ugcuuucuacaagaacaau

SEQ ID NO: 1643205 - RNA, 19 nt, Artificial Sequence
  Description of Artificial Sequence: Synthetic oligonucleotide
  Sense strand starting at position 3812 of SEQ ID NO: 1561051
gcuauauuuagccgauguc

SEQ ID NO: 1643206 - RNA, 19 nt, Artificial Sequence
  Description of Artificial Sequence: Synthetic oligonucleotide
  Antisense strand to SEQ ID NO: 1643205
gacaucggcuaaauauagc

SEQ ID NO: 1643207 - RNA, 19 nt, Artificial Sequence
  Description of Artificial Sequence: Synthetic oligonucleotide
  Sense strand starting at position 3825 of SEQ ID NO: 1561051
gaugucccauuaggauaaa

SEQ ID NO: 1643208 - RNA, 19 nt, Artificial Sequence
  Description of Artificial Sequence: Synthetic oligonucleotide
  Antisense strand to SEQ ID NO: 1643207
uuuauccuaaugggacauc

SEQ ID NO: 1643209 - RNA, 19 nt, Artificial Sequence
  Description of Artificial Sequence: Synthetic oligonucleotide
  Sense strand starting at position 3905 of SEQ ID NO: 1561051
aaauguucuggugacguaa

SEQ ID NO: 1643210 - RNA, 19 nt, Artificial Sequence
  Description of Artificial Sequence: Synthetic oligonucleotide
  Antisense strand to SEQ ID NO: 1643209
uuacgucaccagaacauuu

SEQ ID NO: 1643211 - RNA, 19 nt, Artificial Sequence
  Description of Artificial Sequence: Synthetic oligonucleotide
  Sense strand starting at position 21 of SEQ ID NO: 1561052
caaaguggaccgugaaagu

SEQ ID NO: 1643212 - RNA, 19 nt, Artificial Sequence
  Description of Artificial Sequence: Synthetic oligonucleotide
  Antisense strand to SEQ ID NO: 1643211
acuuucacgguccacuuug

SEQ ID NO: 1643213 - RNA, 19 nt, Artificial Sequence
  Description of Artificial Sequence: Synthetic oligonucleotide
  Sense strand starting at position 31 of SEQ ID NO: 1561052
cgugaaagucuggagggau

SEQ ID NO: 1643214 - RNA, 19 nt, Artificial Sequence
  Description of Artificial Sequence: Synthetic oligonucleotide
  Antisense strand to SEQ ID NO: 1643213
aucccuccagacuuucacg

SEQ ID NO: 1643215 - RNA, 19 nt, Artificial Sequence
  Description of Artificial Sequence: Synthetic oligonucleotide
  Sense strand starting at position 32 of SEQ ID NO: 1561052
gugaaagucuggagggaug

SEQ ID NO: 1643216 - RNA, 19 nt, Artificial Sequence
  Description of Artificial Sequence: Synthetic oligonucleotide
  Antisense strand to SEQ ID NO: 1643215
caucccuccagacuuucac

SEQ ID NO: 1643217 - RNA, 19 nt, Artificial Sequence
  Description of Artificial Sequence: Synthetic oligonucleotide
  Sense strand starting at position 185 of SEQ ID NO: 1561052
agcucucaccaucgagaca

SEQ ID NO: 1643218 - RNA, 19 nt, Artificial Sequence
  Description of Artificial Sequence: Synthetic oligonucleotide
  Antisense strand to SEQ ID NO: 1643217
ugucucgauggugagagcu

SEQ ID NO: 1643219 - RNA, 19 nt, Artificial Sequence
  Description of Artificial Sequence: Synthetic oligonucleotide
  Sense strand starting at position 293 of SEQ ID NO: 1561052
agauucaggcuaugagguu

SEQ ID NO: 1643220 - RNA, 19 nt, Artificial Sequence
  Description of Artificial Sequence: Synthetic oligonucleotide
  Antisense strand to SEQ ID NO: 1643219
aaccucauagccugaaucu

SEQ ID NO: 1643221 - RNA, 19 nt, Artificial Sequence
  Description of Artificial Sequence: Synthetic oligonucleotide
  Sense strand starting at position 299 of SEQ ID NO: 1561052
aggcuaugagguugggaga

SEQ ID NO: 1643222 - RNA, 19 nt, Artificial Sequence
  Description of Artificial Sequence: Synthetic oligonucleotide
  Antisense strand to SEQ ID NO: 1643221
ucucccaaccucauagccu

SEQ ID NO: 1643223 - RNA, 19 nt, Artificial Sequence
  Description of Artificial Sequence: Synthetic oligonucleotide
  Sense strand starting at position 300 of SEQ ID NO: 1561052
ggcuaugagguugggagaa

SEQ ID NO: 1643224 - RNA, 19 nt, Artificial Sequence
  Description of Artificial Sequence: Synthetic oligonucleotide
  Antisense strand to SEQ ID NO: 1643223
uucucccaaccucauagcc

SEQ ID NO: 1643225 - RNA, 19 nt, Artificial Sequence
  Description of Artificial Sequence: Synthetic oligonucleotide
  Sense strand starting at position 302 of SEQ ID NO: 1561052
cuaugagguugggagaaau

SEQ ID NO: 1643226 - RNA, 19 nt, Artificial Sequence
  Description of Artificial Sequence: Synthetic oligonucleotide
  Antisense strand to SEQ ID NO: 1643225
auuucucccaaccucauag

SEQ ID NO: 1643227 - RNA, 19 nt, Artificial Sequence
  Description of Artificial Sequence: Synthetic oligonucleotide
  Sense strand starting at position 313 of SEQ ID NO: 1561052
ggagaaauguagccugucu

SEQ ID NO: 1643228 - RNA, 19 nt, Artificial Sequence
  Description of Artificial Sequence: Synthetic oligonucleotide
  Antisense strand to SEQ ID NO: 1643227
agacaggcuacauuucucc

SEQ ID NO: 1643229 - RNA, 19 nt, Artificial Sequence
  Description of Artificial Sequence: Synthetic oligonucleotide
  Sense strand starting at position 315 of SEQ ID NO: 1561052
agaaauguagccugucuuu

SEQ ID NO: 1643230 - RNA, 19 nt, Artificial Sequence
  Description of Artificial Sequence: Synthetic oligonucleotide
  Antisense strand to SEQ ID NO: 1643229
aaagacaggcuacauuucu

SEQ ID NO: 1643231 - RNA, 19 nt, Artificial Sequence
  Description of Artificial Sequence: Synthetic oligonucleotide
  Sense strand starting at position 318 of SEQ ID NO: 1561052
aauguagccugucuuugaa

SEQ ID NO: 1643232 - RNA, 19 nt, Artificial Sequence
  Description of Artificial Sequence: Synthetic oligonucleotide
  Antisense strand to SEQ ID NO: 1643231
uucaaagacaggcuacauu

SEQ ID NO: 1643233 - RNA, 19 nt, Artificial Sequence
  Description of Artificial Sequence: Synthetic oligonucleotide
  Sense strand starting at position 320 of SEQ ID NO: 1561052
uguagccugucuuugaaau

SEQ ID NO: 1643234 - RNA, 19 nt, Artificial Sequence
  Description of Artificial Sequence: Synthetic oligonucleotide
  Antisense strand to SEQ ID NO: 1643233
auuucaaagacaggcuaca

SEQ ID NO: 1643235 - RNA, 19 nt, Artificial Sequence
  Description of Artificial Sequence: Synthetic oligonucleotide
  Sense strand starting at position 321 of SEQ ID NO: 1561052
guagccugucuuugaaaua

SEQ ID NO: 1643236 - RNA, 19 nt, Artificial Sequence
  Description of Artificial Sequence: Synthetic oligonucleotide
  Antisense strand to SEQ ID NO: 1643235
uauuucaaagacaggcuac

SEQ ID NO: 1643237 - RNA, 19 nt, Artificial Sequence
  Description of Artificial Sequence: Synthetic oligonucleotide
  Sense strand starting at position 396 of SEQ ID NO: 1561052
agaggccuuggauggauau

SEQ ID NO: 1643238 - RNA, 19 nt, Artificial Sequence
  Description of Artificial Sequence: Synthetic oligonucleotide
  Antisense strand to SEQ ID NO: 1643237
auauccauccaaggccucu

SEQ ID NO: 1643239 - RNA, 19 nt, Artificial Sequence
  Description of Artificial Sequence: Synthetic oligonucleotide
  Sense strand starting at position 538 of SEQ ID NO: 1561052
gguauuugugguugucuca

SEQ ID NO: 1643240 - RNA, 19 nt, Artificial Sequence
  Description of Artificial Sequence: Synthetic oligonucleotide
  Antisense strand to SEQ ID NO: 1643239
ugagacaaccacaaauacc

SEQ ID NO: 1643241 - RNA, 19 nt, Artificial Sequence
  Description of Artificial Sequence: Synthetic oligonucleotide
  Sense strand starting at position 541 of SEQ ID NO: 1561052
auuugugguugucucaaau

SEQ ID NO: 1643242 - RNA, 19 nt, Artificial Sequence
  Description of Artificial Sequence: Synthetic oligonucleotide
  Antisense strand to SEQ ID NO: 1643241
auuugagacaaccacaaau

SEQ ID NO: 1643243 - RNA, 19 nt, Artificial Sequence
  Description of Artificial Sequence: Synthetic oligonucleotide
  Sense strand starting at position 547 of SEQ ID NO: 1561052
gguugucucaaauguggua

SEQ ID NO: 1643244 - RNA, 19 nt, Artificial Sequence
  Description of Artificial Sequence: Synthetic oligonucleotide
  Antisense strand to SEQ ID NO: 1643243
uaccacauuugagacaacc

SEQ ID NO: 1643245 - RNA, 19 nt, Artificial Sequence
  Description of Artificial Sequence: Synthetic oligonucleotide
  Sense strand starting at position 647 of SEQ ID NO: 1561052
gagagaaagugguugggua

SEQ ID NO: 1643246 - RNA, 19 nt, Artificial Sequence
  Description of Artificial Sequence: Synthetic oligonucleotide
  Antisense strand to SEQ ID NO: 1643245
uacccaaccacuuucucuc

SEQ ID NO: 1643247 - RNA, 19 nt, Artificial Sequence
  Description of Artificial Sequence: Synthetic oligonucleotide
  Sense strand starting at position 695 of SEQ ID NO: 1561052
gauagaugccagcaggguu

SEQ ID NO: 1643248 - RNA, 19 nt, Artificial Sequence
  Description of Artificial Sequence: Synthetic oligonucleotide
  Antisense strand to SEQ ID NO: 1643247
aacccugcuggcaucuauc

SEQ ID NO: 1643249 - RNA, 19 nt, Artificial Sequence
  Description of Artificial Sequence: Synthetic oligonucleotide
  Sense strand starting at position 971 of SEQ ID NO: 1561052
ccgacagugcuggguauua

SEQ ID NO: 1643250 - RNA, 19 nt, Artificial Sequence
  Description of Artificial Sequence: Synthetic oligonucleotide
  Antisense strand to SEQ ID NO: 1643249
uaauacccagcacugucgg

SEQ ID NO: 1643251 - RNA, 19 nt, Artificial Sequence
  Description of Artificial Sequence: Synthetic oligonucleotide
  Sense strand starting at position 973 of SEQ ID NO: 1561052
gacagugcuggguauuaug

SEQ ID NO: 1643252 - RNA, 19 nt, Artificial Sequence
  Description of Artificial Sequence: Synthetic oligonucleotide
  Antisense strand to SEQ ID NO: 1643251
cauaauacccagcacuguc

SEQ ID NO: 1643253 - RNA, 19 nt, Artificial Sequence
  Description of Artificial Sequence: Synthetic oligonucleotide
  Sense strand starting at position 1060 of SEQ ID NO: 1561052
ugccuacuguaauugggaa

SEQ ID NO: 1643254 - RNA, 19 nt, Artificial Sequence
  Description of Artificial Sequence: Synthetic oligonucleotide
  Antisense strand to SEQ ID NO: 1643253
uucccaauuacaguaggca

SEQ ID NO: 1643255 - RNA, 19 nt, Artificial Sequence
  Description of Artificial Sequence: Synthetic oligonucleotide
  Sense strand starting at position 1061 of SEQ ID NO: 1561052
gccuacuguaauugggaau

SEQ ID NO: 1643256 - RNA, 19 nt, Artificial Sequence
  Description of Artificial Sequence: Synthetic oligonucleotide
  Antisense strand to SEQ ID NO: 1643255
auucccaauuacaguaggc

SEQ ID NO: 1643257 - RNA, 19 nt, Artificial Sequence
  Description of Artificial Sequence: Synthetic oligonucleotide
  Sense strand starting at position 1117 of SEQ ID NO: 1561052
aggaaagugacuuggccaa

SEQ ID NO: 1643258 - RNA, 19 nt, Artificial Sequence
  Description of Artificial Sequence: Synthetic oligonucleotide
  Antisense strand to SEQ ID NO: 1643257
uuggccaagucacuuuccu

SEQ ID NO: 1643259 - RNA, 19 nt, Artificial Sequence
  Description of Artificial Sequence: Synthetic oligonucleotide
  Sense strand starting at position 1136 of SEQ ID NO: 1561052
ggccacuuagcuggucaga

SEQ ID NO: 1643260 - RNA, 19 nt, Artificial Sequence
  Description of Artificial Sequence: Synthetic oligonucleotide
  Antisense strand to SEQ ID NO: 1643259
ucugaccagcuaaguggcc

SEQ ID NO: 1643261 - RNA, 19 nt, Artificial Sequence
  Description of Artificial Sequence: Synthetic oligonucleotide
  Sense strand starting at position 1138 of SEQ ID NO: 1561052
ccacuuagcuggucagaag

SEQ ID NO: 1643262 - RNA, 19 nt, Artificial Sequence
  Description of Artificial Sequence: Synthetic oligonucleotide
  Antisense strand to SEQ ID NO: 1643261
cuucugaccagcuaagugg

SEQ ID NO: 1643263 - RNA, 19 nt, Artificial Sequence
  Description of Artificial Sequence: Synthetic oligonucleotide
  Sense strand starting at position 1155 of SEQ ID NO: 1561052
agcagaacagaugguaauu

SEQ ID NO: 1643264 - RNA, 19 nt, Artificial Sequence
  Description of Artificial Sequence: Synthetic oligonucleotide
  Antisense strand to SEQ ID NO: 1643263
aauuaccaucuguucugcu

SEQ ID NO: 1643265 - RNA, 19 nt, Artificial Sequence
  Description of Artificial Sequence: Synthetic oligonucleotide
  Sense strand starting at position 1187 of SEQ ID NO: 1561052
cucugacuucccugugaug

SEQ ID NO: 1643266 - RNA, 19 nt, Artificial Sequence
  Description of Artificial Sequence: Synthetic oligonucleotide
  Antisense strand to SEQ ID NO: 1643265
caucacagggaagucagag

SEQ ID NO: 1643267 - RNA, 19 nt, Artificial Sequence
  Description of Artificial Sequence: Synthetic oligonucleotide
  Sense strand starting at position 1247 of SEQ ID NO: 1561052
agguuucgaguguguuaaa

SEQ ID NO: 1643268 - RNA, 19 nt, Artificial Sequence
  Description of Artificial Sequence: Synthetic oligonucleotide
  Antisense strand to SEQ ID NO: 1643267
uuuaacacacucgaaaccu

SEQ ID NO: 1643269 - RNA, 19 nt, Artificial Sequence
  Description of Artificial Sequence: Synthetic oligonucleotide
  Sense strand starting at position 1293 of SEQ ID NO: 1561052
gggcaugccuucucuuauc

SEQ ID NO: 1643270 - RNA, 19 nt, Artificial Sequence
  Description of Artificial Sequence: Synthetic oligonucleotide
  Antisense strand to SEQ ID NO: 1643269
gauaagagaaggcaugccc

SEQ ID NO: 1643271 - RNA, 19 nt, Artificial Sequence
  Description of Artificial Sequence: Synthetic oligonucleotide
  Sense strand starting at position 1298 of SEQ ID NO: 1561052
ugccuucucuuaucaguga

SEQ ID NO: 1643272 - RNA, 19 nt, Artificial Sequence
  Description of Artificial Sequence: Synthetic oligonucleotide
  Antisense strand to SEQ ID NO: 1643271
ucacugauaagagaaggca

SEQ ID NO: 1643273 - RNA, 19 nt, Artificial Sequence
  Description of Artificial Sequence: Synthetic oligonucleotide
  Sense strand starting at position 1492 of SEQ ID NO: 1561052
gcugcuuggccguccagau

SEQ ID NO: 1643274 - RNA, 19 nt, Artificial Sequence
  Description of Artificial Sequence: Synthetic oligonucleotide
  Antisense strand to SEQ ID NO: 1643273
aucuggacggccaagcagc

SEQ ID NO: 1643275 - RNA, 19 nt, Artificial Sequence
  Description of Artificial Sequence: Synthetic oligonucleotide
  Sense strand starting at position 1631 of SEQ ID NO: 1561052
gggugauuccugggaggau

SEQ ID NO: 1643276 - RNA, 19 nt, Artificial Sequence
  Description of Artificial Sequence: Synthetic oligonucleotide
  Antisense strand to SEQ ID NO: 1643275
auccucccaggaaucaccc

SEQ ID NO: 1643277 - RNA, 19 nt, Artificial Sequence
  Description of Artificial Sequence: Synthetic oligonucleotide
  Sense strand starting at position 2497 of SEQ ID NO: 1561052
cugacacugagauguagua

SEQ ID NO: 1643278 - RNA, 19 nt, Artificial Sequence
  Description of Artificial Sequence: Synthetic oligonucleotide
  Antisense strand to SEQ ID NO: 1643277
uacuacaucucagugucag

SEQ ID NO: 1643279 - RNA, 19 nt, Artificial Sequence
  Description of Artificial Sequence: Synthetic oligonucleotide
  Sense strand starting at position 2652 of SEQ ID NO: 1561052
ggugucaugggcagagcau

SEQ ID NO: 1643280 - RNA, 19 nt, Artificial Sequence
  Description of Artificial Sequence: Synthetic oligonucleotide
  Antisense strand to SEQ ID NO: 1643279
augcucugcccaugacacc

SEQ ID NO: 1643281 - RNA, 19 nt, Artificial Sequence
  Description of Artificial Sequence: Synthetic oligonucleotide
  Sense strand starting at position 2653 of SEQ ID NO: 1561052
gugucaugggcagagcauu

SEQ ID NO: 1643282 - RNA, 19 nt, Artificial Sequence
  Description of Artificial Sequence: Synthetic oligonucleotide
  Antisense strand to SEQ ID NO: 1643281
aaugcucugcccaugacac

SEQ ID NO: 1643283 - RNA, 19 nt, Artificial Sequence
  Description of Artificial Sequence: Synthetic oligonucleotide
  Sense strand starting at position 2766 of SEQ ID NO: 1561052
gggagugcuguccagguga

SEQ ID NO: 1643284 - RNA, 19 nt, Artificial Sequence
  Description of Artificial Sequence: Synthetic oligonucleotide
  Antisense strand to SEQ ID NO: 1643283
ucaccuggacagcacuccc

SEQ ID NO: 1643285 - RNA, 19 nt, Artificial Sequence
  Description of Artificial Sequence: Synthetic oligonucleotide
  Sense strand starting at position 2768 of SEQ ID NO: 1561052
gagugcuguccaggugaca

SEQ ID NO: 1643286 - RNA, 19 nt, Artificial Sequence
  Description of Artificial Sequence: Synthetic oligonucleotide
  Antisense strand to SEQ ID NO: 1643285
ugucaccuggacagcacuc

SEQ ID NO: 1643287 - RNA, 19 nt, Artificial Sequence
  Description of Artificial Sequence: Synthetic oligonucleotide
  Sense strand starting at position 2964 of SEQ ID NO: 1561052
ucucuagauccuugcuguu

SEQ ID NO: 1643288 - RNA, 19 nt, Artificial Sequence
  Description of Artificial Sequence: Synthetic oligonucleotide
  Antisense strand to SEQ ID NO: 1643287
aacagcaaggaucuagaga

SEQ ID NO: 1643289 - RNA, 19 nt, Artificial Sequence
  Description of Artificial Sequence: Synthetic oligonucleotide
  Sense strand starting at position 3231 of SEQ ID NO: 1561052
ggagaguuccaggaggugu

SEQ ID NO: 1643290 - RNA, 19 nt, Artificial Sequence
  Description of Artificial Sequence: Synthetic oligonucleotide
  Antisense strand to SEQ ID NO: 1643289
acaccuccuggaacucucc

SEQ ID NO: 1643291 - RNA, 19 nt, Artificial Sequence
  Description of Artificial Sequence: Synthetic oligonucleotide
  Sense strand starting at position 26 of SEQ ID NO: 1561053
cugugcaucugagucuaaa

SEQ ID NO: 1643292 - RNA, 19 nt, Artificial Sequence
  Description of Artificial Sequence: Synthetic oligonucleotide
  Antisense strand to SEQ ID NO: 1643291
uuuagacucagaugcacag

SEQ ID NO: 1643293 - RNA, 19 nt, Artificial Sequence
  Description of Artificial Sequence: Synthetic oligonucleotide
  Sense strand starting at position 29 of SEQ ID NO: 1561053
ugcaucugagucuaaaguu

SEQ ID NO: 1643294 - RNA, 19 nt, Artificial Sequence
  Description of Artificial Sequence: Synthetic oligonucleotide
  Antisense strand to SEQ ID NO: 1643293
aacuuuagacucagaugca

SEQ ID NO: 1643295 - RNA, 19 nt, Artificial Sequence
  Description of Artificial Sequence: Synthetic oligonucleotide
  Sense strand starting at position 44 of SEQ ID NO: 1561053
aguuccuucuccuuacaga

SEQ ID NO: 1643296 - RNA, 19 nt, Artificial Sequence
  Description of Artificial Sequence: Synthetic oligonucleotide
  Antisense strand to SEQ ID NO: 1643295
ucuguaaggagaaggaacu

SEQ ID NO: 1643297 - RNA, 19 nt, Artificial Sequence
  Description of Artificial Sequence: Synthetic oligonucleotide
  Sense strand starting at position 81 of SEQ ID NO: 1561053
gccucaucuugacuagguu

SEQ ID NO: 1643298 - RNA, 19 nt, Artificial Sequence
  Description of Artificial Sequence: Synthetic oligonucleotide
  Antisense strand to SEQ ID NO: 1643297
aaccuagucaagaugaggc

SEQ ID NO: 1643299 - RNA, 19 nt, Artificial Sequence
  Description of Artificial Sequence: Synthetic oligonucleotide
  Sense strand starting at position 82 of SEQ ID NO: 1561053
ccucaucuugacuagguua

SEQ ID NO: 1643300 - RNA, 19 nt, Artificial Sequence
  Description of Artificial Sequence: Synthetic oligonucleotide
  Antisense strand to SEQ ID NO: 1643299
uaaccuagucaagaugagg

SEQ ID NO: 1643301 - RNA, 19 nt, Artificial Sequence
  Description of Artificial Sequence: Synthetic oligonucleotide
  Sense strand starting at position 84 of SEQ ID NO: 1561053
ucaucuugacuagguuaca

SEQ ID NO: 1643302 - RNA, 19 nt, Artificial Sequence
  Description of Artificial Sequence: Synthetic oligonucleotide
  Antisense strand to SEQ ID NO: 1643301
uguaaccuagucaagauga

SEQ ID NO: 1643303 - RNA, 19 nt, Artificial Sequence
  Description of Artificial Sequence: Synthetic oligonucleotide
  Sense strand starting at position 94 of SEQ ID NO: 1561053
uagguuacaucugcaagga

SEQ ID NO: 1643304 - RNA, 19 nt, Artificial Sequence
  Description of Artificial Sequence: Synthetic oligonucleotide
  Antisense strand to SEQ ID NO: 1643303
uccuugcagauguaaccua

SEQ ID NO: 1643305 - RNA, 19 nt, Artificial Sequence
  Description of Artificial Sequence: Synthetic oligonucleotide
  Sense strand starting at position 110 of SEQ ID NO: 1561053
ggacccuguucccaauaua

SEQ ID NO: 1643306 - RNA, 19 nt, Artificial Sequence
  Description of Artificial Sequence: Synthetic oligonucleotide
  Antisense strand to SEQ ID NO: 1643305
uauauugggaacagggucc

SEQ ID NO: 1643307 - RNA, 19 nt, Artificial Sequence
  Description of Artificial Sequence: Synthetic oligonucleotide
  Sense strand starting at position 131 of SEQ ID NO: 1561053
guaauaaggucagacuccu

SEQ ID NO: 1643308 - RNA, 19 nt, Artificial Sequence
  Description of Artificial Sequence: Synthetic oligonucleotide
  Antisense strand to SEQ ID NO: 1643307
aggagucugaccuuauuac

SEQ ID NO: 1643309 - RNA, 19 nt, Artificial Sequence
  Description of Artificial Sequence: Synthetic oligonucleotide
  Sense strand starting at position 639 of SEQ ID NO: 1561053
cuucucaacucaguguaga

SEQ ID NO: 1643310 - RNA, 19 nt, Artificial Sequence
  Description of Artificial Sequence: Synthetic oligonucleotide
  Antisense strand to SEQ ID NO: 1643309
ucuacacugaguugagaag

SEQ ID NO: 1643311 - RNA, 19 nt, Artificial Sequence
  Description of Artificial Sequence: Synthetic oligonucleotide
  Sense strand starting at position 722 of SEQ ID NO: 1561053
uaauguuccuggccgcaga

SEQ ID NO: 1643312 - RNA, 19 nt, Artificial Sequence
  Description of Artificial Sequence: Synthetic oligonucleotide
  Antisense strand to SEQ ID NO: 1643311
ucugcggccaggaacauua

SEQ ID NO: 1643313 - RNA, 19 nt, Artificial Sequence
  Description of Artificial Sequence: Synthetic oligonucleotide
  Sense strand starting at position 779 of SEQ ID NO: 1561053
gcgggaguggcugaucauu

SEQ ID NO: 1643314 - RNA, 19 nt, Artificial Sequence
  Description of Artificial Sequence: Synthetic oligonucleotide
  Antisense strand to SEQ ID NO: 1643313
aaugaucagccacucccgc

SEQ ID NO: 1643315 - RNA, 19 nt, Artificial Sequence
  Description of Artificial Sequence: Synthetic oligonucleotide
  Sense strand starting at position 1170 of SEQ ID NO: 1561053
cccgucugucauucgugaa

SEQ ID NO: 1643316 - RNA, 19 nt, Artificial Sequence
  Description of Artificial Sequence: Synthetic oligonucleotide
  Antisense strand to SEQ ID NO: 1643315
uucacgaaugacagacggg

SEQ ID NO: 1643317 - RNA, 19 nt, Artificial Sequence
  Description of Artificial Sequence: Synthetic oligonucleotide
  Sense strand starting at position 1171 of SEQ ID NO: 1561053
ccgucugucauucgugaac

SEQ ID NO: 1643318 - RNA, 19 nt, Artificial Sequence
  Description of Artificial Sequence: Synthetic oligonucleotide
  Antisense strand to SEQ ID NO: 1643317
guucacgaaugacagacgg

SEQ ID NO: 1643319 - RNA, 19 nt, Artificial Sequence
  Description of Artificial Sequence: Synthetic oligonucleotide
  Sense strand starting at position 1173 of SEQ ID NO: 1561053
gucugucauucgugaacag

SEQ ID NO: 1643320 - RNA, 19 nt, Artificial Sequence
  Description of Artificial Sequence: Synthetic oligonucleotide
  Antisense strand to SEQ ID NO: 1643319
cuguucacgaaugacagac

SEQ ID NO: 1643321 - RNA, 19 nt, Artificial Sequence
  Description of Artificial Sequence: Synthetic oligonucleotide
  Sense strand starting at position 1592 of SEQ ID NO: 1561053
gcgcggguuuguggaugaa

SEQ ID NO: 1643322 - RNA, 19 nt, Artificial Sequence
  Description of Artificial Sequence: Synthetic oligonucleotide
  Antisense strand to SEQ ID NO: 1643321
uucauccacaaacccgcgc

SEQ ID NO: 1643323 - RNA, 19 nt, Artificial Sequence
  Description of Artificial Sequence: Synthetic oligonucleotide
  Sense strand starting at position 2337 of SEQ ID NO: 1561053
uggagaagcuuagaaauuc

SEQ ID NO: 1643324 - RNA, 19 nt, Artificial Sequence
  Description of Artificial Sequence: Synthetic oligonucleotide
  Antisense strand to SEQ ID NO: 1643323
gaauuucuaagcuucucca

SEQ ID NO: 1643325 - RNA, 19 nt, Artificial Sequence
  Description of Artificial Sequence: Synthetic oligonucleotide
  Sense strand starting at position 2457 of SEQ ID NO: 1561053
uccguuguugcagcuagaa

SEQ ID NO: 1643326 - RNA, 19 nt, Artificial Sequence
  Description of Artificial Sequence: Synthetic oligonucleotide
  Antisense strand to SEQ ID NO: 1643325
uucuagcugcaacaacgga

SEQ ID NO: 1643327 - RNA, 19 nt, Artificial Sequence
  Description of Artificial Sequence: Synthetic oligonucleotide
  Sense strand starting at position 2650 of SEQ ID NO: 1561053
cucaguuucuccggcugua

SEQ ID NO: 1643328 - RNA, 19 nt, Artificial Sequence
  Description of Artificial Sequence: Synthetic oligonucleotide
  Antisense strand to SEQ ID NO: 1643327
uacagccggagaaacugag

SEQ ID NO: 1643329 - RNA, 19 nt, Artificial Sequence
  Description of Artificial Sequence: Synthetic oligonucleotide
  Sense strand starting at position 2940 of SEQ ID NO: 1561053
ggcugauugccgggaacaa

SEQ ID NO: 1643330 - RNA, 19 nt, Artificial Sequence
  Description of Artificial Sequence: Synthetic oligonucleotide
  Antisense strand to SEQ ID NO: 1643329
uuguucccggcaaucagcc

SEQ ID NO: 1643331 - RNA, 19 nt, Artificial Sequence
  Description of Artificial Sequence: Synthetic oligonucleotide
  Sense strand starting at position 2941 of SEQ ID NO: 1561053
gcugauugccgggaacaaa

SEQ ID NO: 1643332 - RNA, 19 nt, Artificial Sequence
  Description of Artificial Sequence: Synthetic oligonucleotide
  Antisense strand to SEQ ID NO: 1643331
uuuguucccggcaaucagc

SEQ ID NO: 1643333 - RNA, 19 nt, Artificial Sequence
  Description of Artificial Sequence: Synthetic oligonucleotide
  Sense strand starting at position 3014 of SEQ ID NO: 1561053
cggagcccgaucgauaauu

SEQ ID NO: 1643334 - RNA, 19 nt, Artificial Sequence
  Description of Artificial Sequence: Synthetic oligonucleotide
  Antisense strand to SEQ ID NO: 1643333
aauuaucgaucgggcuccg

SEQ ID NO: 1643335 - RNA, 19 nt, Artificial Sequence
  Description of Artificial Sequence: Synthetic oligonucleotide
  Sense strand starting at position 3254 of SEQ ID NO: 1561053
gggugcguguccaggcaua

SEQ ID NO: 1643336 - RNA, 19 nt, Artificial Sequence
  Description of Artificial Sequence: Synthetic oligonucleotide
  Antisense strand to SEQ ID NO: 1643335
uaugccuggacacgcaccc

SEQ ID NO: 1643337 - RNA, 19 nt, Artificial Sequence
  Description of Artificial Sequence: Synthetic oligonucleotide
  Sense strand starting at position 3256 of SEQ ID NO: 1561053
gugcguguccaggcauaug

SEQ ID NO: 1643338 - RNA, 19 nt, Artificial Sequence
  Description of Artificial Sequence: Synthetic oligonucleotide
  Antisense strand to SEQ ID NO: 1643337
cauaugccuggacacgcac

SEQ ID NO: 1643339 - RNA, 19 nt, Artificial Sequence
  Description of Artificial Sequence: Synthetic oligonucleotide
  Sense strand starting at position 3458 of SEQ ID NO: 1561053
cucccaagcuccgggauua

SEQ ID NO: 1643340 - RNA, 19 nt, Artificial Sequence
  Description of Artificial Sequence: Synthetic oligonucleotide
  Antisense strand to SEQ ID NO: 1643339
uaaucccggagcuugggag

SEQ ID NO: 1643341 - RNA, 19 nt, Artificial Sequence
  Description of Artificial Sequence: Synthetic oligonucleotide
  Sense strand starting at position 3471 of SEQ ID NO: 1561053
ggauuagggucuuucugga

SEQ ID NO: 1643342 - RNA, 19 nt, Artificial Sequence
  Description of Artificial Sequence: Synthetic oligonucleotide
  Antisense strand to SEQ ID NO: 1643341
uccagaaagacccuaaucc

SEQ ID NO: 1643343 - RNA, 19 nt, Artificial Sequence
  Description of Artificial Sequence: Synthetic oligonucleotide
  Sense strand starting at position 3694 of SEQ ID NO: 1561053
accauuuccucucaguaga

SEQ ID NO: 1643344 - RNA, 19 nt, Artificial Sequence
  Description of Artificial Sequence: Synthetic oligonucleotide
  Antisense strand to SEQ ID NO: 1643343
ucuacugagaggaaauggu

SEQ ID NO: 1643345 - RNA, 19 nt, Artificial Sequence
  Description of Artificial Sequence: Synthetic oligonucleotide
  Sense strand starting at position 3720 of SEQ ID NO: 1561053
gguccugaguugcuaugaa

SEQ ID NO: 1643346 - RNA, 19 nt, Artificial Sequence
  Description of Artificial Sequence: Synthetic oligonucleotide
  Antisense strand to SEQ ID NO: 1643345
uucauagcaacucaggacc

SEQ ID NO: 1643347 - RNA, 19 nt, Artificial Sequence
  Description of Artificial Sequence: Synthetic oligonucleotide
  Sense strand starting at position 3730 of SEQ ID NO: 1561053
ugcuaugaagccuagauga

SEQ ID NO: 1643348 - RNA, 19 nt, Artificial Sequence
  Description of Artificial Sequence: Synthetic oligonucleotide
  Antisense strand to SEQ ID NO: 1643347
ucaucuaggcuucauagca

SEQ ID NO: 1643349 - RNA, 19 nt, Artificial Sequence
  Description of Artificial Sequence: Synthetic oligonucleotide
  Sense strand starting at position 3778 of SEQ ID NO: 1561053
agcuacugauggcagauau

SEQ ID NO: 1643350 - RNA, 19 nt, Artificial Sequence
  Description of Artificial Sequence: Synthetic oligonucleotide
  Antisense strand to SEQ ID NO: 1643349
auaucugccaucaguagcu

SEQ ID NO: 1643351 - RNA, 19 nt, Artificial Sequence
  Description of Artificial Sequence: Synthetic oligonucleotide
  Sense strand starting at position 3785 of SEQ ID NO: 1561053
gauggcagauauuagaaua

SEQ ID NO: 1643352 - RNA, 19 nt, Artificial Sequence
  Description of Artificial Sequence: Synthetic oligonucleotide
  Antisense strand to SEQ ID NO: 1643351
uauucuaauaucugccauc

SEQ ID NO: 1643353 - RNA, 19 nt, Artificial Sequence
  Description of Artificial Sequence: Synthetic oligonucleotide
  Sense strand starting at position 2087 of SEQ ID NO: 1561054
gucagcugucguugucuga

SEQ ID NO: 1643354 - RNA, 19 nt, Artificial Sequence
  Description of Artificial Sequence: Synthetic oligonucleotide
  Antisense strand to SEQ ID NO: 1643353
ucagacaacgacagcugac

SEQ ID NO: 1643355 - RNA, 19 nt, Artificial Sequence
  Description of Artificial Sequence: Synthetic oligonucleotide
  Sense strand starting at position 2093 of SEQ ID NO: 1561054
ugucguugucugaggguga

SEQ ID NO: 1643356 - RNA, 19 nt, Artificial Sequence
  Description of Artificial Sequence: Synthetic oligonucleotide
  Antisense strand to SEQ ID NO: 1643355
ucacccucagacaacgaca

SEQ ID NO: 1643357 - RNA, 19 nt, Artificial Sequence
  Description of Artificial Sequence: Synthetic oligonucleotide
  Sense strand starting at position 2307 of SEQ ID NO: 1561054
ggucauagcuuggagagca

SEQ ID NO: 1643358 - RNA, 19 nt, Artificial Sequence
  Description of Artificial Sequence: Synthetic oligonucleotide
  Antisense strand to SEQ ID NO: 1643357
ugcucuccaagcuaugacc

SEQ ID NO: 1643359 - RNA, 19 nt, Artificial Sequence
  Description of Artificial Sequence: Synthetic oligonucleotide
  Sense strand starting at position 2409 of SEQ ID NO: 1561054
cugucacucccugagucuu

SEQ ID NO: 1643360 - RNA, 19 nt, Artificial Sequence
  Description of Artificial Sequence: Synthetic oligonucleotide
  Antisense strand to SEQ ID NO: 1643359
aagacucagggagugacag

SEQ ID NO: 1643361 - RNA, 19 nt, Artificial Sequence
  Description of Artificial Sequence: Synthetic oligonucleotide
  Sense strand starting at position 2439 of SEQ ID NO: 1561054
uuugaaagaugugguuucu

SEQ ID NO: 1643362 - RNA, 19 nt, Artificial Sequence
  Description of Artificial Sequence: Synthetic oligonucleotide
  Antisense strand to SEQ ID NO: 1643361
agaaaccacaucuuucaaa

SEQ ID NO: 1643363 - RNA, 19 nt, Artificial Sequence
  Description of Artificial Sequence: Synthetic oligonucleotide
  Sense strand starting at position 2448 of SEQ ID NO: 1561054
ugugguuucuaacaggaaa

SEQ ID NO: 1643364 - RNA, 19 nt, Artificial Sequence
  Description of Artificial Sequence: Synthetic oligonucleotide
  Antisense strand to SEQ ID NO: 1643363
uuuccuguuagaaaccaca

SEQ ID NO: 1643365 - RNA, 19 nt, Artificial Sequence
  Description of Artificial Sequence: Synthetic oligonucleotide
  Sense strand starting at position 2585 of SEQ ID NO: 1561054
agcugauucugccugcaca

SEQ ID NO: 1643366 - RNA, 19 nt, Artificial Sequence
  Description of Artificial Sequence: Synthetic oligonucleotide
  Antisense strand to SEQ ID NO: 1643365
ugugcaggcagaaucagcu

SEQ ID NO: 1643367 - RNA, 19 nt, Artificial Sequence
  Description of Artificial Sequence: Synthetic oligonucleotide
  Sense strand starting at position 2586 of SEQ ID NO: 1561054
gcugauucugccugcacau

SEQ ID NO: 1643368 - RNA, 19 nt, Artificial Sequence
  Description of Artificial Sequence: Synthetic oligonucleotide
  Antisense strand to SEQ ID NO: 1643367
augugcaggcagaaucagc

SEQ ID NO: 1643369 - RNA, 19 nt, Artificial Sequence
  Description of Artificial Sequence: Synthetic oligonucleotide
  Sense strand starting at position 2940 of SEQ ID NO: 1561054
cacgaugagcuccauuauc

SEQ ID NO: 1643370 - RNA, 19 nt, Artificial Sequence
  Description of Artificial Sequence: Synthetic oligonucleotide
  Antisense strand to SEQ ID NO: 1643369
gauaauggagcucaucgug

SEQ ID NO: 1643371 - RNA, 19 nt, Artificial Sequence
  Description of Artificial Sequence: Synthetic oligonucleotide
  Sense strand starting at position 2945 of SEQ ID NO: 1561054
ugagcuccauuauccagau

SEQ ID NO: 1643372 - RNA, 19 nt, Artificial Sequence
  Description of Artificial Sequence: Synthetic oligonucleotide
  Antisense strand to SEQ ID NO: 1643371
aucuggauaauggagcuca

SEQ ID NO: 1643373 - RNA, 19 nt, Artificial Sequence
  Description of Artificial Sequence: Synthetic oligonucleotide
  Sense strand starting at position 3179 of SEQ ID NO: 1561054
gcggguaauuguccugcuu

SEQ ID NO: 1643374 - RNA, 19 nt, Artificial Sequence
  Description of Artificial Sequence: Synthetic oligonucleotide
  Antisense strand to SEQ ID NO: 1643373
aagcaggacaauuacccgc

SEQ ID NO: 1643375 - RNA, 19 nt, Artificial Sequence
  Description of Artificial Sequence: Synthetic oligonucleotide
  Sense strand starting at position 3181 of SEQ ID NO: 1561054
ggguaauuguccugcuuuc

SEQ ID NO: 1643376 - RNA, 19 nt, Artificial Sequence
  Description of Artificial Sequence: Synthetic oligonucleotide
  Antisense strand to SEQ ID NO: 1643375
gaaagcaggacaauuaccc

SEQ ID NO: 1643377 - RNA, 19 nt, Artificial Sequence
  Description of Artificial Sequence: Synthetic oligonucleotide
  Sense strand starting at position 3239 of SEQ ID NO: 1561054
guugacagaucucaucaaa

SEQ ID NO: 1643378 - RNA, 19 nt, Artificial Sequence
  Description of Artificial Sequence: Synthetic oligonucleotide
  Antisense strand to SEQ ID NO: 1643377
uuugaugagaucugucaac

SEQ ID NO: 1643379 - RNA, 19 nt, Artificial Sequence
  Description of Artificial Sequence: Synthetic oligonucleotide
  Sense strand starting at position 3263 of SEQ ID NO: 1561054
gucgucucccugccggaua

SEQ ID NO: 1643380 - RNA, 19 nt, Artificial Sequence
  Description of Artificial Sequence: Synthetic oligonucleotide
  Antisense strand to SEQ ID NO: 1643379
uauccggcagggagacgac

SEQ ID NO: 1643381 - RNA, 19 nt, Artificial Sequence
  Description of Artificial Sequence: Synthetic oligonucleotide
  Sense strand starting at position 3282 of SEQ ID NO: 1561054
aaacuagaugucugaggua

SEQ ID NO: 1643382 - RNA, 19 nt, Artificial Sequence
  Description of Artificial Sequence: Synthetic oligonucleotide
  Antisense strand to SEQ ID NO: 1643381
uaccucagacaucuaguuu

SEQ ID NO: 1643383 - RNA, 19 nt, Artificial Sequence
  Description of Artificial Sequence: Synthetic oligonucleotide
  Sense strand starting at position 3285 of SEQ ID NO: 1561054
cuagaugucugagguauaa

SEQ ID NO: 1643384 - RNA, 19 nt, Artificial Sequence
  Description of Artificial Sequence: Synthetic oligonucleotide
  Antisense strand to SEQ ID NO: 1643383
uuauaccucagacaucuag

SEQ ID NO: 1643385 - RNA, 19 nt, Artificial Sequence
  Description of Artificial Sequence: Synthetic oligonucleotide
  Sense strand starting at position 3325 of SEQ ID NO: 1561054
auuacaaucugugucagga

SEQ ID NO: 1643386 - RNA, 19 nt, Artificial Sequence
  Description of Artificial Sequence: Synthetic oligonucleotide
  Antisense strand to SEQ ID NO: 1643385
uccugacacagauuguaau

SEQ ID NO: 1643387 - RNA, 19 nt, Artificial Sequence
  Description of Artificial Sequence: Synthetic oligonucleotide
  Sense strand starting at position 3327 of SEQ ID NO: 1561054
uacaaucugugucaggaau

SEQ ID NO: 1643388 - RNA, 19 nt, Artificial Sequence
  Description of Artificial Sequence: Synthetic oligonucleotide
  Antisense strand to SEQ ID NO: 1643387
auuccugacacagauugua

SEQ ID NO: 1643389 - RNA, 19 nt, Artificial Sequence
  Description of Artificial Sequence: Synthetic oligonucleotide
  Sense strand starting at position 3329 of SEQ ID NO: 1561054
caaucugugucaggaauag

SEQ ID NO: 1643390 - RNA, 19 nt, Artificial Sequence
  Description of Artificial Sequence: Synthetic oligonucleotide
  Antisense strand to SEQ ID NO: 1643389
cuauuccugacacagauug

SEQ ID NO: 1643391 - RNA, 19 nt, Artificial Sequence
  Description of Artificial Sequence: Synthetic oligonucleotide
  Sense strand starting at position 3333 of SEQ ID NO: 1561054
cugugucaggaauagcaau

SEQ ID NO: 1643392 - RNA, 19 nt, Artificial Sequence
  Description of Artificial Sequence: Synthetic oligonucleotide
  Antisense strand to SEQ ID NO: 1643391
auugcuauuccugacacag

SEQ ID NO: 1643393 - RNA, 19 nt, Artificial Sequence
  Description of Artificial Sequence: Synthetic oligonucleotide
  Sense strand starting at position 3365 of SEQ ID NO: 1561054
gccggaaucaaacggcauu

SEQ ID NO: 1643394 - RNA, 19 nt, Artificial Sequence
  Description of Artificial Sequence: Synthetic oligonucleotide
  Antisense strand to SEQ ID NO: 1643393
aaugccguuugauuccggc

SEQ ID NO: 1643395 - RNA, 19 nt, Artificial Sequence
  Description of Artificial Sequence: Synthetic oligonucleotide
  Sense strand starting at position 3381 of SEQ ID NO: 1561054
auuugacuuuccugugcuu

SEQ ID NO: 1643396 - RNA, 19 nt, Artificial Sequence
  Description of Artificial Sequence: Synthetic oligonucleotide
  Antisense strand to SEQ ID NO: 1643395
aagcacaggaaagucaaau

SEQ ID NO: 1643397 - RNA, 19 nt, Artificial Sequence
  Description of Artificial Sequence: Synthetic oligonucleotide
  Sense strand starting at position 3550 of SEQ ID NO: 1561054
cacguaaccuugugagauu

SEQ ID NO: 1643398 - RNA, 19 nt, Artificial Sequence
  Description of Artificial Sequence: Synthetic oligonucleotide
  Antisense strand to SEQ ID NO: 1643397
aaucucacaagguuacgug

SEQ ID NO: 1643399 - RNA, 19 nt, Artificial Sequence
  Description of Artificial Sequence: Synthetic oligonucleotide
  Sense strand starting at position 3551 of SEQ ID NO: 1561054
acguaaccuugugagauuu

SEQ ID NO: 1643400 - RNA, 19 nt, Artificial Sequence
  Description of Artificial Sequence: Synthetic oligonucleotide
  Antisense strand to SEQ ID NO: 1643399
aaaucucacaagguuacgu

SEQ ID NO: 1643401 - RNA, 19 nt, Artificial Sequence
  Description of Artificial Sequence: Synthetic oligonucleotide
  Sense strand starting at position 310 of SEQ ID NO: 1561055
agcaauccuacggaucgaa

SEQ ID NO: 1643402 - RNA, 19 nt, Artificial Sequence
  Description of Artificial Sequence: Synthetic oligonucleotide
  Antisense strand to SEQ ID NO: 1643401
uucgauccguaggauugcu

SEQ ID NO: 1643403 - RNA, 19 nt, Artificial Sequence
  Description of Artificial Sequence: Synthetic oligonucleotide
  Sense strand starting at position 664 of SEQ ID NO: 1561055
cacagaucucugcgugguu

SEQ ID NO: 1643404 - RNA, 19 nt, Artificial Sequence
  Description of Artificial Sequence: Synthetic oligonucleotide
  Antisense strand to SEQ ID NO: 1643403
aaccacgcagagaucugug

SEQ ID NO: 1643405 - RNA, 19 nt, Artificial Sequence
  Description of Artificial Sequence: Synthetic oligonucleotide
  Sense strand starting at position 719 of SEQ ID NO: 1561055
ucggaucacuuccucuaau

SEQ ID NO: 1643406 - RNA, 19 nt, Artificial Sequence
  Description of Artificial Sequence: Synthetic oligonucleotide
  Antisense strand to SEQ ID NO: 1643405
auuagaggaagugauccga

SEQ ID NO: 1643407 - RNA, 19 nt, Artificial Sequence
  Description of Artificial Sequence: Synthetic oligonucleotide
  Sense strand starting at position 720 of SEQ ID NO: 1561055
cggaucacuuccucuaauc

SEQ ID NO: 1643408 - RNA, 19 nt, Artificial Sequence
  Description of Artificial Sequence: Synthetic oligonucleotide
  Antisense strand to SEQ ID NO: 1643407
gauuagaggaagugauccg

SEQ ID NO: 1643409 - RNA, 19 nt, Artificial Sequence
  Description of Artificial Sequence: Synthetic oligonucleotide
  Sense strand starting at position 753 of SEQ ID NO: 1561055
ucaacacuuuccgcugauu

SEQ ID NO: 1643410 - RNA, 19 nt, Artificial Sequence
  Description of Artificial Sequence: Synthetic oligonucleotide
  Antisense strand to SEQ ID NO: 1643409
aaucagcggaaaguguuga

SEQ ID NO: 1643411 - RNA, 19 nt, Artificial Sequence
  Description of Artificial Sequence: Synthetic oligonucleotide
  Sense strand starting at position 820 of SEQ ID NO: 1561055
ggccacugauaguuaauga

SEQ ID NO: 1643412 - RNA, 19 nt, Artificial Sequence
  Description of Artificial Sequence: Synthetic oligonucleotide
  Antisense strand to SEQ ID NO: 1643411
ucauuaacuaucaguggcc

SEQ ID NO: 1643413 - RNA, 19 nt, Artificial Sequence
  Description of Artificial Sequence: Synthetic oligonucleotide
  Sense strand starting at position 827 of SEQ ID NO: 1561055
gauaguuaaugagcccuua

SEQ ID NO: 1643414 - RNA, 19 nt, Artificial Sequence
  Description of Artificial Sequence: Synthetic oligonucleotide
  Antisense strand to SEQ ID NO: 1643413
uaagggcucauuaacuauc

SEQ ID NO: 1643415 - RNA, 19 nt, Artificial Sequence
  Description of Artificial Sequence: Synthetic oligonucleotide
  Sense strand starting at position 866 of SEQ ID NO: 1561055
cgaaucaacucaguuaauu

SEQ ID NO: 1643416 - RNA, 19 nt, Artificial Sequence
  Description of Artificial Sequence: Synthetic oligonucleotide
  Antisense strand to SEQ ID NO: 1643415
aauuaacugaguugauucg

SEQ ID NO: 1643417 - RNA, 19 nt, Artificial Sequence
  Description of Artificial Sequence: Synthetic oligonucleotide
  Sense strand starting at position 902 of SEQ ID NO: 1561055
ggacgaugauuagucucau

SEQ ID NO: 1643418 - RNA, 19 nt, Artificial Sequence
  Description of Artificial Sequence: Synthetic oligonucleotide
  Antisense strand to SEQ ID NO: 1643417
augagacuaaucaucgucc

SEQ ID NO: 1643419 - RNA, 19 nt, Artificial Sequence
  Description of Artificial Sequence: Synthetic oligonucleotide
  Sense strand starting at position 903 of SEQ ID NO: 1561055
gacgaugauuagucucauu

SEQ ID NO: 1643420 - RNA, 19 nt, Artificial Sequence
  Description of Artificial Sequence: Synthetic oligonucleotide
  Antisense strand to SEQ ID NO: 1643419
aaugagacuaaucaucguc

SEQ ID NO: 1643421 - RNA, 19 nt, Artificial Sequence
  Description of Artificial Sequence: Synthetic oligonucleotide
  Sense strand starting at position 906 of SEQ ID NO: 1561055
gaugauuagucucauugug

SEQ ID NO: 1643422 - RNA, 19 nt, Artificial Sequence
  Description of Artificial Sequence: Synthetic oligonucleotide
  Antisense strand to SEQ ID NO: 1643421
cacaaugagacuaaucauc

SEQ ID NO: 1643423 - RNA, 19 nt, Artificial Sequence
  Description of Artificial Sequence: Synthetic oligonucleotide
  Sense strand starting at position 915 of SEQ ID NO: 1561055
ucucauugugcggacagga

SEQ ID NO: 1643424 - RNA, 19 nt, Artificial Sequence
  Description of Artificial Sequence: Synthetic oligonucleotide
  Antisense strand to SEQ ID NO: 1643423
uccuguccgcacaaugaga

SEQ ID NO: 1643425 - RNA, 19 nt, Artificial Sequence
  Description of Artificial Sequence: Synthetic oligonucleotide
  Sense strand starting at position 978 of SEQ ID NO: 1561055
gccuguaggcugugaacuu

SEQ ID NO: 1643426 - RNA, 19 nt, Artificial Sequence
  Description of Artificial Sequence: Synthetic oligonucleotide
  Antisense strand to SEQ ID NO: 1643425
aaguucacagccuacaggc

SEQ ID NO: 1643427 - RNA, 19 nt, Artificial Sequence
  Description of Artificial Sequence: Synthetic oligonucleotide
  Sense strand starting at position 1083 of SEQ ID NO: 1561055
ucaagaaauaugugucgaa

SEQ ID NO: 1643428 - RNA, 19 nt, Artificial Sequence
  Description of Artificial Sequence: Synthetic oligonucleotide
  Antisense strand to SEQ ID NO: 1643427
uucgacacauauuucuuga

SEQ ID NO: 1643429 - RNA, 19 nt, Artificial Sequence
  Description of Artificial Sequence: Synthetic oligonucleotide
  Sense strand starting at position 1084 of SEQ ID NO: 1561055
caagaaauaugugucgaau

SEQ ID NO: 1643430 - RNA, 19 nt, Artificial Sequence
  Description of Artificial Sequence: Synthetic oligonucleotide
  Antisense strand to SEQ ID NO: 1643429
auucgacacauauuucuug

SEQ ID NO: 1643431 - RNA, 19 nt, Artificial Sequence
  Description of Artificial Sequence: Synthetic oligonucleotide
  Sense strand starting at position 1086 of SEQ ID NO: 1561055
agaaauaugugucgaauga

SEQ ID NO: 1643432 - RNA, 19 nt, Artificial Sequence
  Description of Artificial Sequence: Synthetic oligonucleotide
  Antisense strand to SEQ ID NO: 1643431
ucauucgacacauauuucu

SEQ ID NO: 1643433 - RNA, 19 nt, Artificial Sequence
  Description of Artificial Sequence: Synthetic oligonucleotide
  Sense strand starting at position 1730 of SEQ ID NO: 1561055
ggcccaugacaucguagua

SEQ ID NO: 1643434 - RNA, 19 nt, Artificial Sequence
  Description of Artificial Sequence: Synthetic oligonucleotide
  Antisense strand to SEQ ID NO: 1643433
uacuacgaugucaugggcc

SEQ ID NO: 1643435 - RNA, 19 nt, Artificial Sequence
  Description of Artificial Sequence: Synthetic oligonucleotide
  Sense strand starting at position 1741 of SEQ ID NO: 1561055
ucguaguagccguggcaga

SEQ ID NO: 1643436 - RNA, 19 nt, Artificial Sequence
  Description of Artificial Sequence: Synthetic oligonucleotide
  Antisense strand to SEQ ID NO: 1643435
ucugccacggcuacuacga

SEQ ID NO: 1643437 - RNA, 19 nt, Artificial Sequence
  Description of Artificial Sequence: Synthetic oligonucleotide
  Sense strand starting at position 2239 of SEQ ID NO: 1561055
gcgacgaugggagaguaau

SEQ ID NO: 1643438 - RNA, 19 nt, Artificial Sequence
  Description of Artificial Sequence: Synthetic oligonucleotide
  Antisense strand to SEQ ID NO: 1643437
auuacucucccaucgucgc

SEQ ID NO: 1643439 - RNA, 19 nt, Artificial Sequence
  Description of Artificial Sequence: Synthetic oligonucleotide
  Sense strand starting at position 2311 of SEQ ID NO: 1561055
ccgggaucaggcgagagau

SEQ ID NO: 1643440 - RNA, 19 nt, Artificial Sequence
  Description of Artificial Sequence: Synthetic oligonucleotide
  Antisense strand to SEQ ID NO: 1643439
aucucucgccugaucccgg

SEQ ID NO: 1643441 - RNA, 19 nt, Artificial Sequence
  Description of Artificial Sequence: Synthetic oligonucleotide
  Sense strand starting at position 2324 of SEQ ID NO: 1561055
agagaugaaugcgggagaa

SEQ ID NO: 1643442 - RNA, 19 nt, Artificial Sequence
  Description of Artificial Sequence: Synthetic oligonucleotide
  Antisense strand to SEQ ID NO: 1643441
uucucccgcauucaucucu

SEQ ID NO: 1643443 - RNA, 19 nt, Artificial Sequence
  Description of Artificial Sequence: Synthetic oligonucleotide
  Sense strand starting at position 2407 of SEQ ID NO: 1561055
gcgcgauguaaggagaaga

SEQ ID NO: 1643444 - RNA, 19 nt, Artificial Sequence
  Description of Artificial Sequence: Synthetic oligonucleotide
  Antisense strand to SEQ ID NO: 1643443
ucuucuccuuacaucgcgc

SEQ ID NO: 1643445 - RNA, 19 nt, Artificial Sequence
  Description of Artificial Sequence: Synthetic oligonucleotide
  Sense strand starting at position 2640 of SEQ ID NO: 1561055
gagagaaguugagaauuug

SEQ ID NO: 1643446 - RNA, 19 nt, Artificial Sequence
  Description of Artificial Sequence: Synthetic oligonucleotide
  Antisense strand to SEQ ID NO: 1643445
caaauucucaacuucucuc

SEQ ID NO: 1643447 - RNA, 19 nt, Artificial Sequence
  Description of Artificial Sequence: Synthetic oligonucleotide
  Sense strand starting at position 2646 of SEQ ID NO: 1561055
aguugagaauuugaguuua

SEQ ID NO: 1643448 - RNA, 19 nt, Artificial Sequence
  Description of Artificial Sequence: Synthetic oligonucleotide
  Antisense strand to SEQ ID NO: 1643447
uaaacucaaauucucaacu

SEQ ID NO: 1643449 - RNA, 19 nt, Artificial Sequence
  Description of Artificial Sequence: Synthetic oligonucleotide
  Sense strand starting at position 2815 of SEQ ID NO: 1561055
gugacaauguaagauguuu

SEQ ID NO: 1643450 - RNA, 19 nt, Artificial Sequence
  Description of Artificial Sequence: Synthetic oligonucleotide
  Antisense strand to SEQ ID NO: 1643449
aaacaucuuacauugucac

SEQ ID NO: 1643451 - RNA, 19 nt, Artificial Sequence
  Description of Artificial Sequence: Synthetic oligonucleotide
  Sense strand starting at position 2938 of SEQ ID NO: 1561055
uucucucccuuaguuagau

SEQ ID NO: 1643452 - RNA, 19 nt, Artificial Sequence
  Description of Artificial Sequence: Synthetic oligonucleotide
  Antisense strand to SEQ ID NO: 1643451
aucuaacuaagggagagaa

SEQ ID NO: 1643453 - RNA, 19 nt, Artificial Sequence
  Description of Artificial Sequence: Synthetic oligonucleotide
  Sense strand starting at position 2942 of SEQ ID NO: 1561055
cucccuuaguuagaucuga

SEQ ID NO: 1643454 - RNA, 19 nt, Artificial Sequence
  Description of Artificial Sequence: Synthetic oligonucleotide
  Antisense strand to SEQ ID NO: 1643453
ucagaucuaacuaagggag

SEQ ID NO: 1643455 - RNA, 19 nt, Artificial Sequence
  Description of Artificial Sequence: Synthetic oligonucleotide
  Sense strand starting at position 2947 of SEQ ID NO: 1561055
uuaguuagaucugauaauc

SEQ ID NO: 1643456 - RNA, 19 nt, Artificial Sequence
  Description of Artificial Sequence: Synthetic oligonucleotide
  Antisense strand to SEQ ID NO: 1643455
gauuaucagaucuaacuaa

SEQ ID NO: 1643457 - RNA, 19 nt, Artificial Sequence
  Description of Artificial Sequence: Synthetic oligonucleotide
  Sense strand starting at position 3151 of SEQ ID NO: 1561055
cugacaggcucuuaucuaa

SEQ ID NO: 1643458 - RNA, 19 nt, Artificial Sequence
  Description of Artificial Sequence: Synthetic oligonucleotide
  Antisense strand to SEQ ID NO: 1643457
uuagauaagagccugucag

SEQ ID NO: 1643459 - RNA, 19 nt, Artificial Sequence
  Description of Artificial Sequence: Synthetic oligonucleotide
  Sense strand starting at position 3206 of SEQ ID NO: 1561055
ggauaaggaugguuaucuc

SEQ ID NO: 1643460 - RNA, 19 nt, Artificial Sequence
  Description of Artificial Sequence: Synthetic oligonucleotide
  Antisense strand to SEQ ID NO: 1643459
gagauaaccauccuuaucc

SEQ ID NO: 1643461 - RNA, 19 nt, Artificial Sequence
  Description of Artificial Sequence: Synthetic oligonucleotide
  Sense strand starting at position 3209 of SEQ ID NO: 1561055
uaaggaugguuaucucuga

SEQ ID NO: 1643462 - RNA, 19 nt, Artificial Sequence
  Description of Artificial Sequence: Synthetic oligonucleotide
  Antisense strand to SEQ ID NO: 1643461
ucagagauaaccauccuua

SEQ ID NO: 1643463 - RNA, 19 nt, Artificial Sequence
  Description of Artificial Sequence: Synthetic oligonucleotide
  Sense strand starting at position 3213 of SEQ ID NO: 1561055
gaugguuaucucugagugg

SEQ ID NO: 1643464 - RNA, 19 nt, Artificial Sequence
  Description of Artificial Sequence: Synthetic oligonucleotide
  Antisense strand to SEQ ID NO: 1643463
ccacucagagauaaccauc

SEQ ID NO: 1643465 - RNA, 19 nt, Artificial Sequence
  Description of Artificial Sequence: Synthetic oligonucleotide
  Sense strand starting at position 3216 of SEQ ID NO: 1561055
gguuaucucugagugguca

SEQ ID NO: 1643466 - RNA, 19 nt, Artificial Sequence
  Description of Artificial Sequence: Synthetic oligonucleotide
  Antisense strand to SEQ ID NO: 1643465
ugaccacucagagauaacc

SEQ ID NO: 1643467 - RNA, 19 nt, Artificial Sequence
  Description of Artificial Sequence: Synthetic oligonucleotide
  Sense strand starting at position 3281 of SEQ ID NO: 1561055
uggcauauugcaggugaaa

SEQ ID NO: 1643468 - RNA, 19 nt, Artificial Sequence
  Description of Artificial Sequence: Synthetic oligonucleotide
  Antisense strand to SEQ ID NO: 1643467
uuucaccugcaauaugcca

SEQ ID NO: 1643469 - RNA, 19 nt, Artificial Sequence
  Description of Artificial Sequence: Synthetic oligonucleotide
  Sense strand starting at position 3283 of SEQ ID NO: 1561055
gcauauugcaggugaaaua

SEQ ID NO: 1643470 - RNA, 19 nt, Artificial Sequence
  Description of Artificial Sequence: Synthetic oligonucleotide
  Antisense strand to SEQ ID NO: 1643469
uauuucaccugcaauaugc

SEQ ID NO: 1643471 - RNA, 19 nt, Artificial Sequence
  Description of Artificial Sequence: Synthetic oligonucleotide
  Sense strand starting at position 3284 of SEQ ID NO: 1561055
cauauugcaggugaaauau

SEQ ID NO: 1643472 - RNA, 19 nt, Artificial Sequence
  Description of Artificial Sequence: Synthetic oligonucleotide
  Antisense strand to SEQ ID NO: 1643471
auauuucaccugcaauaug

SEQ ID NO: 1643473 - RNA, 19 nt, Artificial Sequence
  Description of Artificial Sequence: Synthetic oligonucleotide
  Sense strand starting at position 3290 of SEQ ID NO: 1561055
gcaggugaaauaugaaagu

SEQ ID NO: 1643474 - RNA, 19 nt, Artificial Sequence
  Description of Artificial Sequence: Synthetic oligonucleotide
  Antisense strand to SEQ ID NO: 1643473
acuuucauauuucaccugc

SEQ ID NO: 1643475 - RNA, 19 nt, Artificial Sequence
  Description of Artificial Sequence: Synthetic oligonucleotide
  Sense strand starting at position 3412 of SEQ ID NO: 1561055
ugggcaaauugcucaagca

SEQ ID NO: 1643476 - RNA, 19 nt, Artificial Sequence
  Description of Artificial Sequence: Synthetic oligonucleotide
  Antisense strand to SEQ ID NO: 1643475
ugcuugagcaauuugccca

SEQ ID NO: 1643477 - RNA, 19 nt, Artificial Sequence
  Description of Artificial Sequence: Synthetic oligonucleotide
  Sense strand starting at position 3819 of SEQ ID NO: 1561055
gaaggaaacgucugagcuc

SEQ ID NO: 1643478 - RNA, 19 nt, Artificial Sequence
  Description of Artificial Sequence: Synthetic oligonucleotide
  Antisense strand to SEQ ID NO: 1643477
gagcucagacguuuccuuc

SEQ ID NO: 1643479 - RNA, 19 nt, Artificial Sequence
  Description of Artificial Sequence: Synthetic oligonucleotide
  Sense strand starting at position 3903 of SEQ ID NO: 1561055
gcaagaaccugaucugaac

SEQ ID NO: 1643480 - RNA, 19 nt, Artificial Sequence
  Description of Artificial Sequence: Synthetic oligonucleotide
  Antisense strand to SEQ ID NO: 1643479
guucagaucagguucuugc

SEQ ID NO: 1643481 - RNA, 19 nt, Artificial Sequence
  Description of Artificial Sequence: Synthetic oligonucleotide
  Sense strand starting at position 17 of SEQ ID NO: 1561056
cgaagaaucccaggucuuc

SEQ ID NO: 1643482 - RNA, 19 nt, Artificial Sequence
  Description of Artificial Sequence: Synthetic oligonucleotide
  Antisense strand to SEQ ID NO: 1643481
gaagaccugggauucuucg

SEQ ID NO: 1643483 - RNA, 19 nt, Artificial Sequence
  Description of Artificial Sequence: Synthetic oligonucleotide
  Sense strand starting at position 97 of SEQ ID NO: 1561056
ccuucugagccucaagagu

SEQ ID NO: 1643484 - RNA, 19 nt, Artificial Sequence
  Description of Artificial Sequence: Synthetic oligonucleotide
  Antisense strand to SEQ ID NO: 1643483
acucuugaggcucagaagg

SEQ ID NO: 1643485 - RNA, 19 nt, Artificial Sequence
  Description of Artificial Sequence: Synthetic oligonucleotide
  Sense strand starting at position 121 of SEQ ID NO: 1561056
ggcccauugucucauggga

SEQ ID NO: 1643486 - RNA, 19 nt, Artificial Sequence
  Description of Artificial Sequence: Synthetic oligonucleotide
  Antisense strand to SEQ ID NO: 1643485
ucccaugagacaaugggcc

SEQ ID NO: 1643487 - RNA, 19 nt, Artificial Sequence
  Description of Artificial Sequence: Synthetic oligonucleotide
  Sense strand starting at position 123 of SEQ ID NO: 1561056
cccauugucucaugggaaa

SEQ ID NO: 1643488 - RNA, 19 nt, Artificial Sequence
  Description of Artificial Sequence: Synthetic oligonucleotide
  Antisense strand to SEQ ID NO: 1643487
uuucccaugagacaauggg

SEQ ID NO: 1643489 - RNA, 19 nt, Artificial Sequence
  Description of Artificial Sequence: Synthetic oligonucleotide
  Sense strand starting at position 135 of SEQ ID NO: 1561056
ugggaaaugcuguguccaa

SEQ ID NO: 1643490 - RNA, 19 nt, Artificial Sequence
  Description of Artificial Sequence: Synthetic oligonucleotide
  Antisense strand to SEQ ID NO: 1643489
uuggacacagcauuuccca

SEQ ID NO: 1643491 - RNA, 19 nt, Artificial Sequence
  Description of Artificial Sequence: Synthetic oligonucleotide
  Sense strand starting at position 174 of SEQ ID NO: 1561056
ccaagcaucugauagggaa

SEQ ID NO: 1643492 - RNA, 19 nt, Artificial Sequence
  Description of Artificial Sequence: Synthetic oligonucleotide
  Antisense strand to SEQ ID NO: 1643491
uucccuaucagaugcuugg

SEQ ID NO: 1643493 - RNA, 19 nt, Artificial Sequence
  Description of Artificial Sequence: Synthetic oligonucleotide
  Sense strand starting at position 285 of SEQ ID NO: 1561056
ccuccauuccauugggagu

SEQ ID NO: 1643494 - RNA, 19 nt, Artificial Sequence
  Description of Artificial Sequence: Synthetic oligonucleotide
  Antisense strand to SEQ ID NO: 1643493
acucccaauggaauggagg

SEQ ID NO: 1643495 - RNA, 19 nt, Artificial Sequence
  Description of Artificial Sequence: Synthetic oligonucleotide
  Sense strand starting at position 403 of SEQ ID NO: 1561056
gacuuaaaggcugggacuu

SEQ ID NO: 1643496 - RNA, 19 nt, Artificial Sequence
  Description of Artificial Sequence: Synthetic oligonucleotide
  Antisense strand to SEQ ID NO: 1643495
aagucccagccuuuaaguc

SEQ ID NO: 1643497 - RNA, 19 nt, Artificial Sequence
  Description of Artificial Sequence: Synthetic oligonucleotide
  Sense strand starting at position 404 of SEQ ID NO: 1561056
acuuaaaggcugggacuua

SEQ ID NO: 1643498 - RNA, 19 nt, Artificial Sequence
  Description of Artificial Sequence: Synthetic oligonucleotide
  Antisense strand to SEQ ID NO: 1643497
uaagucccagccuuuaagu

SEQ ID NO: 1643499 - RNA, 19 nt, Artificial Sequence
  Description of Artificial Sequence: Synthetic oligonucleotide
  Sense strand starting at position 577 of SEQ ID NO: 1561056
cagguagcaucacagaguu

SEQ ID NO: 1643500 - RNA, 19 nt, Artificial Sequence
  Description of Artificial Sequence: Synthetic oligonucleotide
  Antisense strand to SEQ ID NO: 1643499
aacucugugaugcuaccug

SEQ ID NO: 1643501 - RNA, 19 nt, Artificial Sequence
  Description of Artificial Sequence: Synthetic oligonucleotide
  Sense strand starting at position 748 of SEQ ID NO: 1561056
agagaaugcugagagggua

SEQ ID NO: 1643502 - RNA, 19 nt, Artificial Sequence
  Description of Artificial Sequence: Synthetic oligonucleotide
  Antisense strand to SEQ ID NO: 1643501
uacccucucagcauucucu

SEQ ID NO: 1643503 - RNA, 19 nt, Artificial Sequence
  Description of Artificial Sequence: Synthetic oligonucleotide
  Sense strand starting at position 751 of SEQ ID NO: 1561056
gaaugcugagaggguaauu

SEQ ID NO: 1643504 - RNA, 19 nt, Artificial Sequence
  Description of Artificial Sequence: Synthetic oligonucleotide
  Antisense strand to SEQ ID NO: 1643503
aauuacccucucagcauuc

SEQ ID NO: 1643505 - RNA, 19 nt, Artificial Sequence
  Description of Artificial Sequence: Synthetic oligonucleotide
  Sense strand starting at position 817 of SEQ ID NO: 1561056
uaaagaugcuaaggaguga

SEQ ID NO: 1643506 - RNA, 19 nt, Artificial Sequence
  Description of Artificial Sequence: Synthetic oligonucleotide
  Antisense strand to SEQ ID NO: 1643505
ucacuccuuagcaucuuua

SEQ ID NO: 1643507 - RNA, 19 nt, Artificial Sequence
  Description of Artificial Sequence: Synthetic oligonucleotide
  Sense strand starting at position 821 of SEQ ID NO: 1561056
gaugcuaaggagugaugau

SEQ ID NO: 1643508 - RNA, 19 nt, Artificial Sequence
  Description of Artificial Sequence: Synthetic oligonucleotide
  Antisense strand to SEQ ID NO: 1643507
aucaucacuccuuagcauc

SEQ ID NO: 1643509 - RNA, 19 nt, Artificial Sequence
  Description of Artificial Sequence: Synthetic oligonucleotide
  Sense strand starting at position 830 of SEQ ID NO: 1561056
gagugaugauaugggugga

SEQ ID NO: 1643510 - RNA, 19 nt, Artificial Sequence
  Description of Artificial Sequence: Synthetic oligonucleotide
  Antisense strand to SEQ ID NO: 1643509
uccacccauaucaucacuc

SEQ ID NO: 1643511 - RNA, 19 nt, Artificial Sequence
  Description of Artificial Sequence: Synthetic oligonucleotide
  Sense strand starting at position 836 of SEQ ID NO: 1561056
ugauauggguggaggaaau

SEQ ID NO: 1643512 - RNA, 19 nt, Artificial Sequence
  Description of Artificial Sequence: Synthetic oligonucleotide
  Antisense strand to SEQ ID NO: 1643511
auuuccuccacccauauca

SEQ ID NO: 1643513 - RNA, 19 nt, Artificial Sequence
  Description of Artificial Sequence: Synthetic oligonucleotide
  Sense strand starting at position 1100 of SEQ ID NO: 1561056
ugaucaagguucugaauga

SEQ ID NO: 1643514 - RNA, 19 nt, Artificial Sequence
  Description of Artificial Sequence: Synthetic oligonucleotide
  Antisense strand to SEQ ID NO: 1643513
ucauucagaaccuugauca

SEQ ID NO: 1643515 - RNA, 19 nt, Artificial Sequence
  Description of Artificial Sequence: Synthetic oligonucleotide
  Sense strand starting at position 1101 of SEQ ID NO: 1561056
gaucaagguucugaaugag

SEQ ID NO: 1643516 - RNA, 19 nt, Artificial Sequence
  Description of Artificial Sequence: Synthetic oligonucleotide
  Antisense strand to SEQ ID NO: 1643515
cucauucagaaccuugauc

SEQ ID NO: 1643517 - RNA, 19 nt, Artificial Sequence
  Description of Artificial Sequence: Synthetic oligonucleotide
  Sense strand starting at position 1107 of SEQ ID NO: 1561056
gguucugaaugagaauucu

SEQ ID NO: 1643518 - RNA, 19 nt, Artificial Sequence
  Description of Artificial Sequence: Synthetic oligonucleotide
  Antisense strand to SEQ ID NO: 1643517
agaauucucauucagaacc

SEQ ID NO: 1643519 - RNA, 19 nt, Artificial Sequence
  Description of Artificial Sequence: Synthetic oligonucleotide
  Sense strand starting at position 1116 of SEQ ID NO: 1561056
ugagaauucuaauagaaug

SEQ ID NO: 1643520 - RNA, 19 nt, Artificial Sequence
  Description of Artificial Sequence: Synthetic oligonucleotide
  Antisense strand to SEQ ID NO: 1643519
cauucuauuagaauucuca

SEQ ID NO: 1643521 - RNA, 19 nt, Artificial Sequence
  Description of Artificial Sequence: Synthetic oligonucleotide
  Sense strand starting at position 1286 of SEQ ID NO: 1561056
cgaugaagaucugcgggaa

SEQ ID NO: 1643522 - RNA, 19 nt, Artificial Sequence
  Description of Artificial Sequence: Synthetic oligonucleotide
  Antisense strand to SEQ ID NO: 1643521
uucccgcagaucuucaucg

SEQ ID NO: 1643523 - RNA, 19 nt, Artificial Sequence
  Description of Artificial Sequence: Synthetic oligonucleotide
  Sense strand starting at position 1287 of SEQ ID NO: 1561056
gaugaagaucugcgggaaa

SEQ ID NO: 1643524 - RNA, 19 nt, Artificial Sequence
  Description of Artificial Sequence: Synthetic oligonucleotide
  Antisense strand to SEQ ID NO: 1643523
uuucccgcagaucuucauc

SEQ ID NO: 1643525 - RNA, 19 nt, Artificial Sequence
  Description of Artificial Sequence: Synthetic oligonucleotide
  Sense strand starting at position 1391 of SEQ ID NO: 1561056
ucaguucuuguccgacuca

SEQ ID NO: 1643526 - RNA, 19 nt, Artificial Sequence
  Description of Artificial Sequence: Synthetic oligonucleotide
  Antisense strand to SEQ ID NO: 1643525
ugagucggacaagaacuga

SEQ ID NO: 1643527 - RNA, 19 nt, Artificial Sequence
  Description of Artificial Sequence: Synthetic oligonucleotide
  Sense strand starting at position 1765 of SEQ ID NO: 1561056
cggagcaacccuugaugga

SEQ ID NO: 1643528 - RNA, 19 nt, Artificial Sequence
  Description of Artificial Sequence: Synthetic oligonucleotide
  Antisense strand to SEQ ID NO: 1643527
uccaucaaggguugcuccg

SEQ ID NO: 1643529 - RNA, 19 nt, Artificial Sequence
  Description of Artificial Sequence: Synthetic oligonucleotide
  Sense strand starting at position 2072 of SEQ ID NO: 1561056
ugcccaucgcgguuaacuu

SEQ ID NO: 1643530 - RNA, 19 nt, Artificial Sequence
  Description of Artificial Sequence: Synthetic oligonucleotide
  Antisense strand to SEQ ID NO: 1643529
aaguuaaccgcgaugggca

SEQ ID NO: 1643531 - RNA, 19 nt, Artificial Sequence
  Description of Artificial Sequence: Synthetic oligonucleotide
  Sense strand starting at position 2157 of SEQ ID NO: 1561056
gaaguuuauuacgaagcau

SEQ ID NO: 1643532 - RNA, 19 nt, Artificial Sequence
  Description of Artificial Sequence: Synthetic oligonucleotide
  Antisense strand to SEQ ID NO: 1643531
augcuucguaauaaacuuc

SEQ ID NO: 1643533 - RNA, 19 nt, Artificial Sequence
  Description of Artificial Sequence: Synthetic oligonucleotide
  Sense strand starting at position 2166 of SEQ ID NO: 1561056
uacgaagcauaacgaaaua

SEQ ID NO: 1643534 - RNA, 19 nt, Artificial Sequence
  Description of Artificial Sequence: Synthetic oligonucleotide
  Antisense strand to SEQ ID NO: 1643533
uauuucguuaugcuucgua

SEQ ID NO: 1643535 - RNA, 19 nt, Artificial Sequence
  Description of Artificial Sequence: Synthetic oligonucleotide
  Sense strand starting at position 2250 of SEQ ID NO: 1561056
aaggguacaucuggauguu

SEQ ID NO: 1643536 - RNA, 19 nt, Artificial Sequence
  Description of Artificial Sequence: Synthetic oligonucleotide
  Antisense strand to SEQ ID NO: 1643535
aacauccagauguacccuu

SEQ ID NO: 1643537 - RNA, 19 nt, Artificial Sequence
  Description of Artificial Sequence: Synthetic oligonucleotide
  Sense strand starting at position 3487 of SEQ ID NO: 1561056
gcuggaauaauaggugaau

SEQ ID NO: 1643538 - RNA, 19 nt, Artificial Sequence
  Description of Artificial Sequence: Synthetic oligonucleotide
  Antisense strand to SEQ ID NO: 1643537
auucaccuauuauuccagc

SEQ ID NO: 1643539 - RNA, 19 nt, Artificial Sequence
  Description of Artificial Sequence: Synthetic oligonucleotide
  Sense strand starting at position 3566 of SEQ ID NO: 1561056
ugaugaugcaguuacauag

SEQ ID NO: 1643540 - RNA, 19 nt, Artificial Sequence
  Description of Artificial Sequence: Synthetic oligonucleotide
  Antisense strand to SEQ ID NO: 1643539
cuauguaacugcaucauca

SEQ ID NO: 1643541 - RNA, 19 nt, Artificial Sequence
  Description of Artificial Sequence: Synthetic oligonucleotide
  Sense strand starting at position 3573 of SEQ ID NO: 1561056
gcaguuacauagcaauaug

SEQ ID NO: 1643542 - RNA, 19 nt, Artificial Sequence
  Description of Artificial Sequence: Synthetic oligonucleotide
  Antisense strand to SEQ ID NO: 1643541
cauauugcuauguaacugc

SEQ ID NO: 1643543 - RNA, 19 nt, Artificial Sequence
  Description of Artificial Sequence: Synthetic oligonucleotide
  Sense strand starting at position 3618 of SEQ ID NO: 1561056
guggauuaauucccuuaaa

SEQ ID NO: 1643544 - RNA, 19 nt, Artificial Sequence
  Description of Artificial Sequence: Synthetic oligonucleotide
  Antisense strand to SEQ ID NO: 1643543
uuuaagggaauuaauccac

SEQ ID NO: 1643545 - RNA, 19 nt, Artificial Sequence
  Description of Artificial Sequence: Synthetic oligonucleotide
  Sense strand starting at position 3640 of SEQ ID NO: 1561056
augcaauaggauuguauau

SEQ ID NO: 1643546 - RNA, 19 nt, Artificial Sequence
  Description of Artificial Sequence: Synthetic oligonucleotide
  Antisense strand to SEQ ID NO: 1643545
auauacaauccuauugcau

SEQ ID NO: 1643547 - RNA, 19 nt, Artificial Sequence
  Description of Artificial Sequence: Synthetic oligonucleotide
  Sense strand starting at position 3642 of SEQ ID NO: 1561056
gcaauaggauuguauauac

SEQ ID NO: 1643548 - RNA, 19 nt, Artificial Sequence
  Description of Artificial Sequence: Synthetic oligonucleotide
  Antisense strand to SEQ ID NO: 1643547
guauauacaauccuauugc

SEQ ID NO: 1643549 - RNA, 19 nt, Artificial Sequence
  Description of Artificial Sequence: Synthetic oligonucleotide
  Sense strand starting at position 3713 of SEQ ID NO: 1561056
cuacuagagcacugauauu

SEQ ID NO: 1643550 - RNA, 19 nt, Artificial Sequence
  Description of Artificial Sequence: Synthetic oligonucleotide
  Antisense strand to SEQ ID NO: 1643549
aauaucagugcucuaguag

SEQ ID NO: 1643551 - RNA, 19 nt, Artificial Sequence
  Description of Artificial Sequence: Synthetic oligonucleotide
  Sense strand starting at position 3739 of SEQ ID NO: 1561056
cccugugcuaaguaucagu

SEQ ID NO: 1643552 - RNA, 19 nt, Artificial Sequence
  Description of Artificial Sequence: Synthetic oligonucleotide
  Antisense strand to SEQ ID NO: 1643551
acugauacuuagcacaggg

SEQ ID NO: 1643553 - RNA, 19 nt, Artificial Sequence
  Description of Artificial Sequence: Synthetic oligonucleotide
  Sense strand starting at position 3744 of SEQ ID NO: 1561056
ugcuaaguaucaguuuauc

SEQ ID NO: 1643554 - RNA, 19 nt, Artificial Sequence
  Description of Artificial Sequence: Synthetic oligonucleotide
  Antisense strand to SEQ ID NO: 1643553
gauaaacugauacuuagca

SEQ ID NO: 1643555 - RNA, 19 nt, Artificial Sequence
  Description of Artificial Sequence: Synthetic oligonucleotide
  Sense strand starting at position 3749 of SEQ ID NO: 1561056
aguaucaguuuaucaugua

SEQ ID NO: 1643556 - RNA, 19 nt, Artificial Sequence
  Description of Artificial Sequence: Synthetic oligonucleotide
  Antisense strand to SEQ ID NO: 1643555
uacaugauaaacugauacu

SEQ ID NO: 1643557 - RNA, 19 nt, Artificial Sequence
  Description of Artificial Sequence: Synthetic oligonucleotide
  Sense strand starting at position 3800 of SEQ ID NO: 1561056
guaacccuaugauaagaga

SEQ ID NO: 1643558 - RNA, 19 nt, Artificial Sequence
  Description of Artificial Sequence: Synthetic oligonucleotide
  Antisense strand to SEQ ID NO: 1643557
ucucuuaucauaggguuac

SEQ ID NO: 1643559 - RNA, 19 nt, Artificial Sequence
  Description of Artificial Sequence: Synthetic oligonucleotide
  Sense strand starting at position 3803 of SEQ ID NO: 1561056
acccuaugauaagagacuu

SEQ ID NO: 1643560 - RNA, 19 nt, Artificial Sequence
  Description of Artificial Sequence: Synthetic oligonucleotide
  Antisense strand to SEQ ID NO: 1643559
aagucucuuaucauagggu

SEQ ID NO: 1643561 - RNA, 19 nt, Artificial Sequence
  Description of Artificial Sequence: Synthetic oligonucleotide
  Sense strand starting at position 323 of SEQ ID NO: 1561057
cuuccagguaugggacauu

SEQ ID NO: 1643562 - RNA, 19 nt, Artificial Sequence
  Description of Artificial Sequence: Synthetic oligonucleotide
  Antisense strand to SEQ ID NO: 1643561
aaugucccauaccuggaag

SEQ ID NO: 1643563 - RNA, 19 nt, Artificial Sequence
  Description of Artificial Sequence: Synthetic oligonucleotide
  Sense strand starting at position 509 of SEQ ID NO: 1561057
ggcguguugucacgugaaa

SEQ ID NO: 1643564 - RNA, 19 nt, Artificial Sequence
  Description of Artificial Sequence: Synthetic oligonucleotide
  Antisense strand to SEQ ID NO: 1643563
uuucacgugacaacacgcc

SEQ ID NO: 1643565 - RNA, 19 nt, Artificial Sequence
  Description of Artificial Sequence: Synthetic oligonucleotide
  Sense strand starting at position 510 of SEQ ID NO: 1561057
gcguguugucacgugaaau

SEQ ID NO: 1643566 - RNA, 19 nt, Artificial Sequence
  Description of Artificial Sequence: Synthetic oligonucleotide
  Antisense strand to SEQ ID NO: 1643565
auuucacgugacaacacgc

SEQ ID NO: 1643567 - RNA, 19 nt, Artificial Sequence
  Description of Artificial Sequence: Synthetic oligonucleotide
  Sense strand starting at position 511 of SEQ ID NO: 1561057
cguguugucacgugaaaug

SEQ ID NO: 1643568 - RNA, 19 nt, Artificial Sequence
  Description of Artificial Sequence: Synthetic oligonucleotide
  Antisense strand to SEQ ID NO: 1643567
cauuucacgugacaacacg

SEQ ID NO: 1643569 - RNA, 19 nt, Artificial Sequence
  Description of Artificial Sequence: Synthetic oligonucleotide
  Sense strand starting at position 520 of SEQ ID NO: 1561057
acgugaaaugcugauaaca

SEQ ID NO: 1643570 - RNA, 19 nt, Artificial Sequence
  Description of Artificial Sequence: Synthetic oligonucleotide
  Antisense strand to SEQ ID NO: 1643569
uguuaucagcauuucacgu

SEQ ID NO: 1643571 - RNA, 19 nt, Artificial Sequence
  Description of Artificial Sequence: Synthetic oligonucleotide
  Sense strand starting at position 522 of SEQ ID NO: 1561057
gugaaaugcugauaacaag

SEQ ID NO: 1643572 - RNA, 19 nt, Artificial Sequence
  Description of Artificial Sequence: Synthetic oligonucleotide
  Antisense strand to SEQ ID NO: 1643571
cuuguuaucagcauuucac

SEQ ID NO: 1643573 - RNA, 19 nt, Artificial Sequence
  Description of Artificial Sequence: Synthetic oligonucleotide
  Sense strand starting at position 637 of SEQ ID NO: 1561057
ugggacuaucccgggaaga

SEQ ID NO: 1643574 - RNA, 19 nt, Artificial Sequence
  Description of Artificial Sequence: Synthetic oligonucleotide
  Antisense strand to SEQ ID NO: 1643573
ucuucccgggauaguccca

SEQ ID NO: 1643575 - RNA, 19 nt, Artificial Sequence
  Description of Artificial Sequence: Synthetic oligonucleotide
  Sense strand starting at position 638 of SEQ ID NO: 1561057
gggacuaucccgggaagac

SEQ ID NO: 1643576 - RNA, 19 nt, Artificial Sequence
  Description of Artificial Sequence: Synthetic oligonucleotide
  Antisense strand to SEQ ID NO: 1643575
gucuucccgggauaguccc

SEQ ID NO: 1643577 - RNA, 19 nt, Artificial Sequence
  Description of Artificial Sequence: Synthetic oligonucleotide
  Sense strand starting at position 1126 of SEQ ID NO: 1561057
acaucaggcuucugaguca

SEQ ID NO: 1643578 - RNA, 19 nt, Artificial Sequence
  Description of Artificial Sequence: Synthetic oligonucleotide
  Antisense strand to SEQ ID NO: 1643577
ugacucagaagccugaugu

SEQ ID NO: 1643579 - RNA, 19 nt, Artificial Sequence
  Description of Artificial Sequence: Synthetic oligonucleotide
  Sense strand starting at position 1622 of SEQ ID NO: 1561057
cugcacucguauccagaau

SEQ ID NO: 1643580 - RNA, 19 nt, Artificial Sequence
  Description of Artificial Sequence: Synthetic oligonucleotide
  Antisense strand to SEQ ID NO: 1643579
auucuggauacgagugcag

SEQ ID NO: 1643581 - RNA, 19 nt, Artificial Sequence
  Description of Artificial Sequence: Synthetic oligonucleotide
  Sense strand starting at position 1769 of SEQ ID NO: 1561057
gcaguagcaucuccgcaua

SEQ ID NO: 1643582 - RNA, 19 nt, Artificial Sequence
  Description of Artificial Sequence: Synthetic oligonucleotide
  Antisense strand to SEQ ID NO: 1643581
uaugcggagaugcuacugc

SEQ ID NO: 1643583 - RNA, 19 nt, Artificial Sequence
  Description of Artificial Sequence: Synthetic oligonucleotide
  Sense strand starting at position 1772 of SEQ ID NO: 1561057
guagcaucuccgcauagga

SEQ ID NO: 1643584 - RNA, 19 nt, Artificial Sequence
  Description of Artificial Sequence: Synthetic oligonucleotide
  Antisense strand to SEQ ID NO: 1643583
uccuaugcggagaugcuac

SEQ ID NO: 1643585 - RNA, 19 nt, Artificial Sequence
  Description of Artificial Sequence: Synthetic oligonucleotide
  Sense strand starting at position 1891 of SEQ ID NO: 1561057
gggccugaugcaugaaaug

SEQ ID NO: 1643586 - RNA, 19 nt, Artificial Sequence
  Description of Artificial Sequence: Synthetic oligonucleotide
  Antisense strand to SEQ ID NO: 1643585
cauuucaugcaucaggccc

SEQ ID NO: 1643587 - RNA, 19 nt, Artificial Sequence
  Description of Artificial Sequence: Synthetic oligonucleotide
  Sense strand starting at position 1896 of SEQ ID NO: 1561057
ugaugcaugaaaugagcuu

SEQ ID NO: 1643588 - RNA, 19 nt, Artificial Sequence
  Description of Artificial Sequence: Synthetic oligonucleotide
  Antisense strand to SEQ ID NO: 1643587
aagcucauuucaugcauca

SEQ ID NO: 1643589 - RNA, 19 nt, Artificial Sequence
  Description of Artificial Sequence: Synthetic oligonucleotide
  Sense strand starting at position 2021 of SEQ ID NO: 1561057
uugagcugguccuuccaga

SEQ ID NO: 1643590 - RNA, 19 nt, Artificial Sequence
  Description of Artificial Sequence: Synthetic oligonucleotide
  Antisense strand to SEQ ID NO: 1643589
ucuggaaggaccagcucaa

SEQ ID NO: 1643591 - RNA, 19 nt, Artificial Sequence
  Description of Artificial Sequence: Synthetic oligonucleotide
  Sense strand starting at position 2036 of SEQ ID NO: 1561057
cagagcucccuguguagga

SEQ ID NO: 1643592 - RNA, 19 nt, Artificial Sequence
  Description of Artificial Sequence: Synthetic oligonucleotide
  Antisense strand to SEQ ID NO: 1643591
uccuacacagggagcucug

SEQ ID NO: 1643593 - RNA, 19 nt, Artificial Sequence
  Description of Artificial Sequence: Synthetic oligonucleotide
  Sense strand starting at position 2059 of SEQ ID NO: 1561057
agggcaggcuugugucuau

SEQ ID NO: 1643594 - RNA, 19 nt, Artificial Sequence
  Description of Artificial Sequence: Synthetic oligonucleotide
  Antisense strand to SEQ ID NO: 1643593
auagacacaagccugcccu

SEQ ID NO: 1643595 - RNA, 19 nt, Artificial Sequence
  Description of Artificial Sequence: Synthetic oligonucleotide
  Sense strand starting at position 2128 of SEQ ID NO: 1561057
ggcccugggucaucggaaa

SEQ ID NO: 1643596 - RNA, 19 nt, Artificial Sequence
  Description of Artificial Sequence: Synthetic oligonucleotide
  Antisense strand to SEQ ID NO: 1643595
uuuccgaugacccagggcc

SEQ ID NO: 1643597 - RNA, 19 nt, Artificial Sequence
  Description of Artificial Sequence: Synthetic oligonucleotide
  Sense strand starting at position 2154 of SEQ ID NO: 1561057
gugagaaguccacagugag

SEQ ID NO: 1643598 - RNA, 19 nt, Artificial Sequence
  Description of Artificial Sequence: Synthetic oligonucleotide
  Antisense strand to SEQ ID NO: 1643597
cucacuguggacuucucac

SEQ ID NO: 1643599 - RNA, 19 nt, Artificial Sequence
  Description of Artificial Sequence: Synthetic oligonucleotide
  Sense strand starting at position 2319 of SEQ ID NO: 1561057
ugguauaaguauguccgaa

SEQ ID NO: 1643600 - RNA, 19 nt, Artificial Sequence
  Description of Artificial Sequence: Synthetic oligonucleotide
  Antisense strand to SEQ ID NO: 1643599
uucggacauacuuauacca

SEQ ID NO: 1643601 - RNA, 19 nt, Artificial Sequence
  Description of Artificial Sequence: Synthetic oligonucleotide
  Sense strand starting at position 2334 of SEQ ID NO: 1561057
cgaaaugcugcaugggaua

SEQ ID NO: 1643602 - RNA, 19 nt, Artificial Sequence
  Description of Artificial Sequence: Synthetic oligonucleotide
  Antisense strand to SEQ ID NO: 1643601
uaucccaugcagcauuucg

SEQ ID NO: 1643603 - RNA, 19 nt, Artificial Sequence
  Description of Artificial Sequence: Synthetic oligonucleotide
  Sense strand starting at position 2347 of SEQ ID NO: 1561057
gggauauacuuauaccaga

SEQ ID NO: 1643604 - RNA, 19 nt, Artificial Sequence
  Description of Artificial Sequence: Synthetic oligonucleotide
  Antisense strand to SEQ ID NO: 1643603
ucugguauaaguauauccc

SEQ ID NO: 1643605 - RNA, 19 nt, Artificial Sequence
  Description of Artificial Sequence: Synthetic oligonucleotide
  Sense strand starting at position 2523 of SEQ ID NO: 1561057
uccugagucugggcuuaca

SEQ ID NO: 1643606 - RNA, 19 nt, Artificial Sequence
  Description of Artificial Sequence: Synthetic oligonucleotide
  Antisense strand to SEQ ID NO: 1643605
uguaagcccagacucagga

SEQ ID NO: 1643607 - RNA, 19 nt, Artificial Sequence
  Description of Artificial Sequence: Synthetic oligonucleotide
  Sense strand starting at position 2711 of SEQ ID NO: 1561057
uuuaacugagcauguugaa

SEQ ID NO: 1643608 - RNA, 19 nt, Artificial Sequence
  Description of Artificial Sequence: Synthetic oligonucleotide
  Antisense strand to SEQ ID NO: 1643607
uucaacaugcucaguuaaa

SEQ ID NO: 1643609 - RNA, 19 nt, Artificial Sequence
  Description of Artificial Sequence: Synthetic oligonucleotide
  Sense strand starting at position 2714 of SEQ ID NO: 1561057
aacugagcauguugaauuu

SEQ ID NO: 1643610 - RNA, 19 nt, Artificial Sequence
  Description of Artificial Sequence: Synthetic oligonucleotide
  Antisense strand to SEQ ID NO: 1643609
aaauucaacaugcucaguu

SEQ ID NO: 1643611 - RNA, 19 nt, Artificial Sequence
  Description of Artificial Sequence: Synthetic oligonucleotide
  Sense strand starting at position 2925 of SEQ ID NO: 1561057
gcuaaugcugaugggaaga

SEQ ID NO: 1643612 - RNA, 19 nt, Artificial Sequence
  Description of Artificial Sequence: Synthetic oligonucleotide
  Antisense strand to SEQ ID NO: 1643611
ucuucccaucagcauuagc

SEQ ID NO: 1643613 - RNA, 19 nt, Artificial Sequence
  Description of Artificial Sequence: Synthetic oligonucleotide
  Sense strand starting at position 3002 of SEQ ID NO: 1561057
uuugcaaugaauggaguaa

SEQ ID NO: 1643614 - RNA, 19 nt, Artificial Sequence
  Description of Artificial Sequence: Synthetic oligonucleotide
  Antisense strand to SEQ ID NO: 1643613
uuacuccauucauugcaaa

SEQ ID NO: 1643615 - RNA, 19 nt, Artificial Sequence
  Description of Artificial Sequence: Synthetic oligonucleotide
  Sense strand starting at position 3045 of SEQ ID NO: 1561057
cugagcucuuccugaaaug

SEQ ID NO: 1643616 - RNA, 19 nt, Artificial Sequence
  Description of Artificial Sequence: Synthetic oligonucleotide
  Antisense strand to SEQ ID NO: 1643615
cauuucaggaagagcucag

SEQ ID NO: 1643617 - RNA, 19 nt, Artificial Sequence
  Description of Artificial Sequence: Synthetic oligonucleotide
  Sense strand starting at position 3046 of SEQ ID NO: 1561057
ugagcucuuccugaaauga

SEQ ID NO: 1643618 - RNA, 19 nt, Artificial Sequence
  Description of Artificial Sequence: Synthetic oligonucleotide
  Antisense strand to SEQ ID NO: 1643617
ucauuucaggaagagcuca

SEQ ID NO: 1643619 - RNA, 19 nt, Artificial Sequence
  Description of Artificial Sequence: Synthetic oligonucleotide
  Sense strand starting at position 3109 of SEQ ID NO: 1561057
ccacauaccuuggguauca

SEQ ID NO: 1643620 - RNA, 19 nt, Artificial Sequence
  Description of Artificial Sequence: Synthetic oligonucleotide
  Antisense strand to SEQ ID NO: 1643619
ugauacccaagguaugugg

SEQ ID NO: 1643621 - RNA, 19 nt, Artificial Sequence
  Description of Artificial Sequence: Synthetic oligonucleotide
  Sense strand starting at position 3153 of SEQ ID NO: 1561057
aggugaauccuccauggug

SEQ ID NO: 1643622 - RNA, 19 nt, Artificial Sequence
  Description of Artificial Sequence: Synthetic oligonucleotide
  Antisense strand to SEQ ID NO: 1643621
caccauggaggauucaccu

SEQ ID NO: 1643623 - RNA, 19 nt, Artificial Sequence
  Description of Artificial Sequence: Synthetic oligonucleotide
  Sense strand starting at position 3155 of SEQ ID NO: 1561057
gugaauccuccauggugag

SEQ ID NO: 1643624 - RNA, 19 nt, Artificial Sequence
  Description of Artificial Sequence: Synthetic oligonucleotide
  Antisense strand to SEQ ID NO: 1643623
cucaccauggaggauucac

SEQ ID NO: 1643625 - RNA, 19 nt, Artificial Sequence
  Description of Artificial Sequence: Synthetic oligonucleotide
  Sense strand starting at position 3156 of SEQ ID NO: 1561057
ugaauccuccauggugagu

SEQ ID NO: 1643626 - RNA, 19 nt, Artificial Sequence
  Description of Artificial Sequence: Synthetic oligonucleotide
  Antisense strand to SEQ ID NO: 1643625
acucaccauggaggauuca

SEQ ID NO: 1643627 - RNA, 19 nt, Artificial Sequence
  Description of Artificial Sequence: Synthetic oligonucleotide
  Sense strand starting at position 3201 of SEQ ID NO: 1561057
ugaagauucuuagaaacaa

SEQ ID NO: 1643628 - RNA, 19 nt, Artificial Sequence
  Description of Artificial Sequence: Synthetic oligonucleotide
  Antisense strand to SEQ ID NO: 1643627
uuguuucuaagaaucuuca

SEQ ID NO: 1643629 - RNA, 19 nt, Artificial Sequence
  Description of Artificial Sequence: Synthetic oligonucleotide
  Sense strand starting at position 3580 of SEQ ID NO: 1561057
gacagagguguuuguuugu

SEQ ID NO: 1643630 - RNA, 19 nt, Artificial Sequence
  Description of Artificial Sequence: Synthetic oligonucleotide
  Antisense strand to SEQ ID NO: 1643629
acaaacaaacaccucuguc

SEQ ID NO: 1643631 - RNA, 19 nt, Artificial Sequence
  Description of Artificial Sequence: Synthetic oligonucleotide
  Sense strand starting at position 428 of SEQ ID NO: 1561058
ugacguuucccuggaguuc

SEQ ID NO: 1643632 - RNA, 19 nt, Artificial Sequence
  Description of Artificial Sequence: Synthetic oligonucleotide
  Antisense strand to SEQ ID NO: 1643631
gaacuccagggaaacguca

SEQ ID NO: 1643633 - RNA, 19 nt, Artificial Sequence
  Description of Artificial Sequence: Synthetic oligonucleotide
  Sense strand starting at position 605 of SEQ ID NO: 1561058
cguguugucaugugaaaug

SEQ ID NO: 1643634 - RNA, 19 nt, Artificial Sequence
  Description of Artificial Sequence: Synthetic oligonucleotide
  Antisense strand to SEQ ID NO: 1643633
cauuucacaugacaacacg

SEQ ID NO: 1643635 - RNA, 19 nt, Artificial Sequence
  Description of Artificial Sequence: Synthetic oligonucleotide
  Sense strand starting at position 610 of SEQ ID NO: 1561058
ugucaugugaaaugcugau

SEQ ID NO: 1643636 - RNA, 19 nt, Artificial Sequence
  Description of Artificial Sequence: Synthetic oligonucleotide
  Antisense strand to SEQ ID NO: 1643635
aucagcauuucacaugaca

SEQ ID NO: 1643637 - RNA, 19 nt, Artificial Sequence
  Description of Artificial Sequence: Synthetic oligonucleotide
  Sense strand starting at position 616 of SEQ ID NO: 1561058
gugaaaugcugauaauaag

SEQ ID NO: 1643638 - RNA, 19 nt, Artificial Sequence
  Description of Artificial Sequence: Synthetic oligonucleotide
  Antisense strand to SEQ ID NO: 1643637
cuuauuaucagcauuucac

SEQ ID NO: 1643639 - RNA, 19 nt, Artificial Sequence
  Description of Artificial Sequence: Synthetic oligonucleotide
  Sense strand starting at position 1228 of SEQ ID NO: 1561058
acaucaggcuucuuaguca

SEQ ID NO: 1643640 - RNA, 19 nt, Artificial Sequence
  Description of Artificial Sequence: Synthetic oligonucleotide
  Antisense strand to SEQ ID NO: 1643639
ugacuaagaagccugaugu

SEQ ID NO: 1643641 - RNA, 19 nt, Artificial Sequence
  Description of Artificial Sequence: Synthetic oligonucleotide
  Sense strand starting at position 1396 of SEQ ID NO: 1561058
gaacgcauugcucaggaaa

SEQ ID NO: 1643642 - RNA, 19 nt, Artificial Sequence
  Description of Artificial Sequence: Synthetic oligonucleotide
  Antisense strand to SEQ ID NO: 1643641
uuuccugagcaaugcguuc

SEQ ID NO: 1643643 - RNA, 19 nt, Artificial Sequence
  Description of Artificial Sequence: Synthetic oligonucleotide
  Sense strand starting at position 1398 of SEQ ID NO: 1561058
acgcauugcucaggaaacu

SEQ ID NO: 1643644 - RNA, 19 nt, Artificial Sequence
  Description of Artificial Sequence: Synthetic oligonucleotide
  Antisense strand to SEQ ID NO: 1643643
aguuuccugagcaaugcgu

SEQ ID NO: 1643645 - RNA, 19 nt, Artificial Sequence
  Description of Artificial Sequence: Synthetic oligonucleotide
  Sense strand starting at position 1399 of SEQ ID NO: 1561058
cgcauugcucaggaaacua

SEQ ID NO: 1643646 - RNA, 19 nt, Artificial Sequence
  Description of Artificial Sequence: Synthetic oligonucleotide
  Antisense strand to SEQ ID NO: 1643645
uaguuuccugagcaaugcg

SEQ ID NO: 1643647 - RNA, 19 nt, Artificial Sequence
  Description of Artificial Sequence: Synthetic oligonucleotide
  Sense strand starting at position 1725 of SEQ ID NO: 1561058
gcacuugaagacuguaacu

SEQ ID NO: 1643648 - RNA, 19 nt, Artificial Sequence
  Description of Artificial Sequence: Synthetic oligonucleotide
  Antisense strand to SEQ ID NO: 1643647
aguuacagucuucaagugc

SEQ ID NO: 1643649 - RNA, 19 nt, Artificial Sequence
  Description of Artificial Sequence: Synthetic oligonucleotide
  Sense strand starting at position 1734 of SEQ ID NO: 1561058
gacuguaacugggauccuu

SEQ ID NO: 1643650 - RNA, 19 nt, Artificial Sequence
  Description of Artificial Sequence: Synthetic oligonucleotide
  Antisense strand to SEQ ID NO: 1643649
aaggaucccaguuacaguc

SEQ ID NO: 1643651 - RNA, 19 nt, Artificial Sequence
  Description of Artificial Sequence: Synthetic oligonucleotide
  Sense strand starting at position 2005 of SEQ ID NO: 1561058
ccgcuauguccugaaagcu

SEQ ID NO: 1643652 - RNA, 19 nt, Artificial Sequence
  Description of Artificial Sequence: Synthetic oligonucleotide
  Antisense strand to SEQ ID NO: 1643651
agcuuucaggacauagcgg

SEQ ID NO: 1643653 - RNA, 19 nt, Artificial Sequence
  Description of Artificial Sequence: Synthetic oligonucleotide
  Sense strand starting at position 2014 of SEQ ID NO: 1561058
ccugaaagcucgcuuccca

SEQ ID NO: 1643654 - RNA, 19 nt, Artificial Sequence
  Description of Artificial Sequence: Synthetic oligonucleotide
  Antisense strand to SEQ ID NO: 1643653
ugggaagcgagcuuucagg

SEQ ID NO: 1643655 - RNA, 19 nt, Artificial Sequence
  Description of Artificial Sequence: Synthetic oligonucleotide
  Sense strand starting at position 2272 of SEQ ID NO: 1561058
ggcuuugcaccacguauua

SEQ ID NO: 1643656 - RNA, 19 nt, Artificial Sequence
  Description of Artificial Sequence: Synthetic oligonucleotide
  Antisense strand to SEQ ID NO: 1643655
uaauacguggugcaaagcc

SEQ ID NO: 1643657 - RNA, 19 nt, Artificial Sequence
  Description of Artificial Sequence: Synthetic oligonucleotide
  Sense strand starting at position 2283 of SEQ ID NO: 1561058
acguauuauugcuguaucu

SEQ ID NO: 1643658 - RNA, 19 nt, Artificial Sequence
  Description of Artificial Sequence: Synthetic oligonucleotide
  Antisense strand to SEQ ID NO: 1643657
agauacagcaauaauacgu

SEQ ID NO: 1643659 - RNA, 19 nt, Artificial Sequence
  Description of Artificial Sequence: Synthetic oligonucleotide
  Sense strand starting at position 2290 of SEQ ID NO: 1561058
auugcuguaucuccacaga

SEQ ID NO: 1643660 - RNA, 19 nt, Artificial Sequence
  Description of Artificial Sequence: Synthetic oligonucleotide
  Antisense strand to SEQ ID NO: 1643659
ucuguggagauacagcaau

SEQ ID NO: 1643661 - RNA, 19 nt, Artificial Sequence
  Description of Artificial Sequence: Synthetic oligonucleotide
  Sense strand starting at position 2342 of SEQ ID NO: 1561058
gcugcaucuacgugaccaa

SEQ ID NO: 1643662 - RNA, 19 nt, Artificial Sequence
  Description of Artificial Sequence: Synthetic oligonucleotide
  Antisense strand to SEQ ID NO: 1643661
uuggucacguagaugcagc

SEQ ID NO: 1643663 - RNA, 19 nt, Artificial Sequence
  Description of Artificial Sequence: Synthetic oligonucleotide
  Sense strand starting at position 2407 of SEQ ID NO: 1561058
gguggcaauacuugcugua

SEQ ID NO: 1643664 - RNA, 19 nt, Artificial Sequence
  Description of Artificial Sequence: Synthetic oligonucleotide
  Antisense strand to SEQ ID NO: 1643663
uacagcaaguauugccacc

SEQ ID NO: 1643665 - RNA, 19 nt, Artificial Sequence
  Description of Artificial Sequence: Synthetic oligonucleotide
  Sense strand starting at position 2410 of SEQ ID NO: 1561058
ggcaauacuugcuguaugu

SEQ ID NO: 1643666 - RNA, 19 nt, Artificial Sequence
  Description of Artificial Sequence: Synthetic oligonucleotide
  Antisense strand to SEQ ID NO: 1643665
acauacagcaaguauugcc

SEQ ID NO: 1643667 - RNA, 19 nt, Artificial Sequence
  Description of Artificial Sequence: Synthetic oligonucleotide
  Sense strand starting at position 2419 of SEQ ID NO: 1561058
ugcuguauguugucacuca

SEQ ID NO: 1643668 - RNA, 19 nt, Artificial Sequence
  Description of Artificial Sequence: Synthetic oligonucleotide
  Antisense strand to SEQ ID NO: 1643667
ugagugacaacauacagca

SEQ ID NO: 1643669 - RNA, 19 nt, Artificial Sequence
  Description of Artificial Sequence: Synthetic oligonucleotide
  Sense strand starting at position 2420 of SEQ ID NO: 1561058
gcuguauguugucacucau

SEQ ID NO: 1643670 - RNA, 19 nt, Artificial Sequence
  Description of Artificial Sequence: Synthetic oligonucleotide
  Antisense strand to SEQ ID NO: 1643669
augagugacaacauacagc

SEQ ID NO: 1643671 - RNA, 19 nt, Artificial Sequence
  Description of Artificial Sequence: Synthetic oligonucleotide
  Sense strand starting at position 2449 of SEQ ID NO: 1561058
agcauuaagcgcuuucugu

SEQ ID NO: 1643672 - RNA, 19 nt, Artificial Sequence
  Description of Artificial Sequence: Synthetic oligonucleotide
  Antisense strand to SEQ ID NO: 1643671
acagaaagcgcuuaaugcu

SEQ ID NO: 1643673 - RNA, 19 nt, Artificial Sequence
  Description of Artificial Sequence: Synthetic oligonucleotide
  Sense strand starting at position 2450 of SEQ ID NO: 1561058
gcauuaagcgcuuucugua

SEQ ID NO: 1643674 - RNA, 19 nt, Artificial Sequence
  Description of Artificial Sequence: Synthetic oligonucleotide
  Antisense strand to SEQ ID NO: 1643673
uacagaaagcgcuuaaugc

SEQ ID NO: 1643675 - RNA, 19 nt, Artificial Sequence
  Description of Artificial Sequence: Synthetic oligonucleotide
  Sense strand starting at position 2453 of SEQ ID NO: 1561058
uuaagcgcuuucuguauga

SEQ ID NO: 1643676 - RNA, 19 nt, Artificial Sequence
  Description of Artificial Sequence: Synthetic oligonucleotide
  Antisense strand to SEQ ID NO: 1643675
ucauacagaaagcgcuuaa

SEQ ID NO: 1643677 - RNA, 19 nt, Artificial Sequence
  Description of Artificial Sequence: Synthetic oligonucleotide
  Sense strand starting at position 2455 of SEQ ID NO: 1561058
aagcgcuuucuguaugacu

SEQ ID NO: 1643678 - RNA, 19 nt, Artificial Sequence
  Description of Artificial Sequence: Synthetic oligonucleotide
  Antisense strand to SEQ ID NO: 1643677
agucauacagaaagcgcuu

SEQ ID NO: 1643679 - RNA, 19 nt, Artificial Sequence
  Description of Artificial Sequence: Synthetic oligonucleotide
  Sense strand starting at position 2514 of SEQ ID NO: 1561058
ucuggauccuguccuauga

SEQ ID NO: 1643680 - RNA, 19 nt, Artificial Sequence
  Description of Artificial Sequence: Synthetic oligonucleotide
  Antisense strand to SEQ ID NO: 1643679
ucauaggacaggauccaga

SEQ ID NO: 1643681 - RNA, 19 nt, Artificial Sequence
  Description of Artificial Sequence: Synthetic oligonucleotide
  Sense strand starting at position 2533 of SEQ ID NO: 1561058
accuuucuccuuuguugau

SEQ ID NO: 1643682 - RNA, 19 nt, Artificial Sequence
  Description of Artificial Sequence: Synthetic oligonucleotide
  Antisense strand to SEQ ID NO: 1643681
aucaacaaaggagaaaggu

SEQ ID NO: 1643683 - RNA, 19 nt, Artificial Sequence
  Description of Artificial Sequence: Synthetic oligonucleotide
  Sense strand starting at position 3167 of SEQ ID NO: 1561058
cugugucuggcuuguugau

SEQ ID NO: 1643684 - RNA, 19 nt, Artificial Sequence
  Description of Artificial Sequence: Synthetic oligonucleotide
  Antisense strand to SEQ ID NO: 1643683
aucaacaagccagacacag

SEQ ID NO: 1643685 - RNA, 19 nt, Artificial Sequence
  Description of Artificial Sequence: Synthetic oligonucleotide
  Sense strand starting at position 3436 of SEQ ID NO: 1561058
gucccaacauccugggauu

SEQ ID NO: 1643686 - RNA, 19 nt, Artificial Sequence
  Description of Artificial Sequence: Synthetic oligonucleotide
  Antisense strand to SEQ ID NO: 1643685
aaucccaggauguugggac

SEQ ID NO: 1643687 - RNA, 19 nt, Artificial Sequence
  Description of Artificial Sequence: Synthetic oligonucleotide
  Sense strand starting at position 3557 of SEQ ID NO: 1561058
uugugccaugcauagaaua

SEQ ID NO: 1643688 - RNA, 19 nt, Artificial Sequence
  Description of Artificial Sequence: Synthetic oligonucleotide
  Antisense strand to SEQ ID NO: 1643687
uauucuaugcauggcacaa

SEQ ID NO: 1643689 - RNA, 19 nt, Artificial Sequence
  Description of Artificial Sequence: Synthetic oligonucleotide
  Sense strand starting at position 3559 of SEQ ID NO: 1561058
gugccaugcauagaauaug

SEQ ID NO: 1643690 - RNA, 19 nt, Artificial Sequence
  Description of Artificial Sequence: Synthetic oligonucleotide
  Antisense strand to SEQ ID NO: 1643689
cauauucuaugcauggcac

SEQ ID NO: 1643691 - RNA, 19 nt, Artificial Sequence
  Description of Artificial Sequence: Synthetic oligonucleotide
  Sense strand starting at position 3565 of SEQ ID NO: 1561058
ugcauagaauaugguauaa

SEQ ID NO: 1643692 - RNA, 19 nt, Artificial Sequence
  Description of Artificial Sequence: Synthetic oligonucleotide
  Antisense strand to SEQ ID NO: 1643691
uuauaccauauucuaugca

SEQ ID NO: 1643693 - RNA, 19 nt, Artificial Sequence
  Description of Artificial Sequence: Synthetic oligonucleotide
  Sense strand starting at position 3578 of SEQ ID NO: 1561058
guauaaucaagucagggua

SEQ ID NO: 1643694 - RNA, 19 nt, Artificial Sequence
  Description of Artificial Sequence: Synthetic oligonucleotide
  Antisense strand to SEQ ID NO: 1643693
uacccugacuugauuauac

SEQ ID NO: 1643695 - RNA, 19 nt, Artificial Sequence
  Description of Artificial Sequence: Synthetic oligonucleotide
  Sense strand starting at position 40 of SEQ ID NO: 1561059
auguaaacuuguccaucuu

SEQ ID NO: 1643696 - RNA, 19 nt, Artificial Sequence
  Description of Artificial Sequence: Synthetic oligonucleotide
  Antisense strand to SEQ ID NO: 1643695
aagauggacaaguuuacau

SEQ ID NO: 1643697 - RNA, 19 nt, Artificial Sequence
  Description of Artificial Sequence: Synthetic oligonucleotide
  Sense strand starting at position 41 of SEQ ID NO: 1561059
uguaaacuuguccaucuuu

SEQ ID NO: 1643698 - RNA, 19 nt, Artificial Sequence
  Description of Artificial Sequence: Synthetic oligonucleotide
  Antisense strand to SEQ ID NO: 1643697
aaagauggacaaguuuaca

SEQ ID NO: 1643699 - RNA, 19 nt, Artificial Sequence
  Description of Artificial Sequence: Synthetic oligonucleotide
  Sense strand starting at position 146 of SEQ ID NO: 1561059
uuagauauuccuuguggga

SEQ ID NO: 1643700 - RNA, 19 nt, Artificial Sequence
  Description of Artificial Sequence: Synthetic oligonucleotide
  Antisense strand to SEQ ID NO: 1643699
ucccacaaggaauaucuaa

SEQ ID NO: 1643701 - RNA, 19 nt, Artificial Sequence
  Description of Artificial Sequence: Synthetic oligonucleotide
  Sense strand starting at position 189 of SEQ ID NO: 1561059
guguuugugcuguaggaua

SEQ ID NO: 1643702 - RNA, 19 nt, Artificial Sequence
  Description of Artificial Sequence: Synthetic oligonucleotide
  Antisense strand to SEQ ID NO: 1643701
uauccuacagcacaaacac

SEQ ID NO: 1643703 - RNA, 19 nt, Artificial Sequence
  Description of Artificial Sequence: Synthetic oligonucleotide
  Sense strand starting at position 214 of SEQ ID NO: 1561059
gugccaugaucuuccauua

SEQ ID NO: 1643704 - RNA, 19 nt, Artificial Sequence
  Description of Artificial Sequence: Synthetic oligonucleotide
  Antisense strand to SEQ ID NO: 1643703
uaauggaagaucauggcac

SEQ ID NO: 1643705 - RNA, 19 nt, Artificial Sequence
  Description of Artificial Sequence: Synthetic oligonucleotide
  Sense strand starting at position 397 of SEQ ID NO: 1561059
cagacucugcugugcauua

SEQ ID NO: 1643706 - RNA, 19 nt, Artificial Sequence
  Description of Artificial Sequence: Synthetic oligonucleotide
  Antisense strand to SEQ ID NO: 1643705
uaaugcacagcagagucug

SEQ ID NO: 1643707 - RNA, 19 nt, Artificial Sequence
  Description of Artificial Sequence: Synthetic oligonucleotide
  Sense strand starting at position 399 of SEQ ID NO: 1561059
gacucugcugugcauuaua

SEQ ID NO: 1643708 - RNA, 19 nt, Artificial Sequence
  Description of Artificial Sequence: Synthetic oligonucleotide
  Antisense strand to SEQ ID NO: 1643707
uauaaugcacagcagaguc

SEQ ID NO: 1643709 - RNA, 19 nt, Artificial Sequence
  Description of Artificial Sequence: Synthetic oligonucleotide
  Sense strand starting at position 402 of SEQ ID NO: 1561059
ucugcugugcauuauaaau

SEQ ID NO: 1643710 - RNA, 19 nt, Artificial Sequence
  Description of Artificial Sequence: Synthetic oligonucleotide
  Antisense strand to SEQ ID NO: 1643709
auuuauaaugcacagcaga

SEQ ID NO: 1643711 - RNA, 19 nt, Artificial Sequence
  Description of Artificial Sequence: Synthetic oligonucleotide
  Sense strand starting at position 404 of SEQ ID NO: 1561059
ugcugugcauuauaaauuu

SEQ ID NO: 1643712 - RNA, 19 nt, Artificial Sequence
  Description of Artificial Sequence: Synthetic oligonucleotide
  Antisense strand to SEQ ID NO: 1643711
aaauuuauaaugcacagca

SEQ ID NO: 1643713 - RNA, 19 nt, Artificial Sequence
  Description of Artificial Sequence: Synthetic oligonucleotide
  Sense strand starting at position 424 of SEQ ID NO: 1561059
ugcccaugugacuauagua

SEQ ID NO: 1643714 - RNA, 19 nt, Artificial Sequence
  Description of Artificial Sequence: Synthetic oligonucleotide
  Antisense strand to SEQ ID NO: 1643713
uacuauagucacaugggca

SEQ ID NO: 1643715 - RNA, 19 nt, Artificial Sequence
  Description of Artificial Sequence: Synthetic oligonucleotide
  Sense strand starting at position 779 of SEQ ID NO: 1561059
gugccaucuccuuggaaga

SEQ ID NO: 1643716 - RNA, 19 nt, Artificial Sequence
  Description of Artificial Sequence: Synthetic oligonucleotide
  Antisense strand to SEQ ID NO: 1643715
ucuuccaaggagauggcac

SEQ ID NO: 1643717 - RNA, 19 nt, Artificial Sequence
  Description of Artificial Sequence: Synthetic oligonucleotide
  Sense strand starting at position 1156 of SEQ ID NO: 1561059
ucgaggagcgagugauagu

SEQ ID NO: 1643718 - RNA, 19 nt, Artificial Sequence
  Description of Artificial Sequence: Synthetic oligonucleotide
  Antisense strand to SEQ ID NO: 1643717
acuaucacucgcuccucga

SEQ ID NO: 1643719 - RNA, 19 nt, Artificial Sequence
  Description of Artificial Sequence: Synthetic oligonucleotide
  Sense strand starting at position 1545 of SEQ ID NO: 1561059
gcuugucauauauguaguu

SEQ ID NO: 1643720 - RNA, 19 nt, Artificial Sequence
  Description of Artificial Sequence: Synthetic oligonucleotide
  Antisense strand to SEQ ID NO: 1643719
aacuacauauaugacaagc

SEQ ID NO: 1643721 - RNA, 19 nt, Artificial Sequence
  Description of Artificial Sequence: Synthetic oligonucleotide
  Sense strand starting at position 1550 of SEQ ID NO: 1561059
ucauauauguaguuccauu

SEQ ID NO: 1643722 - RNA, 19 nt, Artificial Sequence
  Description of Artificial Sequence: Synthetic oligonucleotide
  Antisense strand to SEQ ID NO: 1643721
aauggaacuacauauauga

SEQ ID NO: 1643723 - RNA, 19 nt, Artificial Sequence
  Description of Artificial Sequence: Synthetic oligonucleotide
  Sense strand starting at position 1593 of SEQ ID NO: 1561059
aguaguacuucccugaauc

SEQ ID NO: 1643724 - RNA, 19 nt, Artificial Sequence
  Description of Artificial Sequence: Synthetic oligonucleotide
  Antisense strand to SEQ ID NO: 1643723
gauucagggaaguacuacu

SEQ ID NO: 1643725 - RNA, 19 nt, Artificial Sequence
  Description of Artificial Sequence: Synthetic oligonucleotide
  Sense strand starting at position 1594 of SEQ ID NO: 1561059
guaguacuucccugaaucc

SEQ ID NO: 1643726 - RNA, 19 nt, Artificial Sequence
  Description of Artificial Sequence: Synthetic oligonucleotide
  Antisense strand to SEQ ID NO: 1643725
ggauucagggaaguacuac

SEQ ID NO: 1643727 - RNA, 19 nt, Artificial Sequence
  Description of Artificial Sequence: Synthetic oligonucleotide
  Sense strand starting at position 1671 of SEQ ID NO: 1561059
ggaggaaucgaccgugggu

SEQ ID NO: 1643728 - RNA, 19 nt, Artificial Sequence
  Description of Artificial Sequence: Synthetic oligonucleotide
  Antisense strand to SEQ ID NO: 1643727
acccacggucgauuccucc

SEQ ID NO: 1643729 - RNA, 19 nt, Artificial Sequence
  Description of Artificial Sequence: Synthetic oligonucleotide
  Sense strand starting at position 1673 of SEQ ID NO: 1561059
aggaaucgaccguggguau

SEQ ID NO: 1643730 - RNA, 19 nt, Artificial Sequence
  Description of Artificial Sequence: Synthetic oligonucleotide
  Antisense strand to SEQ ID NO: 1643729
auacccacggucgauuccu

SEQ ID NO: 1643731 - RNA, 19 nt, Artificial Sequence
  Description of Artificial Sequence: Synthetic oligonucleotide
  Sense strand starting at position 1717 of SEQ ID NO: 1561059
guuuguggccacuggaaua

SEQ ID NO: 1643732 - RNA, 19 nt, Artificial Sequence
  Description of Artificial Sequence: Synthetic oligonucleotide
  Antisense strand to SEQ ID NO: 1643731
uauuccaguggccacaaac

SEQ ID NO: 1643733 - RNA, 19 nt, Artificial Sequence
  Description of Artificial Sequence: Synthetic oligonucleotide
  Sense strand starting at position 1727 of SEQ ID NO: 1561059
acuggaauaucccauggua

SEQ ID NO: 1643734 - RNA, 19 nt, Artificial Sequence
  Description of Artificial Sequence: Synthetic oligonucleotide
  Antisense strand to SEQ ID NO: 1643733
uaccaugggauauuccagu

SEQ ID NO: 1643735 - RNA, 19 nt, Artificial Sequence
  Description of Artificial Sequence: Synthetic oligonucleotide
  Sense strand starting at position 1729 of SEQ ID NO: 1561059
uggaauaucccaugguaua

SEQ ID NO: 1643736 - RNA, 19 nt, Artificial Sequence
  Description of Artificial Sequence: Synthetic oligonucleotide
  Antisense strand to SEQ ID NO: 1643735
uauaccaugggauauucca

SEQ ID NO: 1643737 - RNA, 19 nt, Artificial Sequence
  Description of Artificial Sequence: Synthetic oligonucleotide
  Sense strand starting at position 1730 of SEQ ID NO: 1561059
ggaauaucccaugguauau

SEQ ID NO: 1643738 - RNA, 19 nt, Artificial Sequence
  Description of Artificial Sequence: Synthetic oligonucleotide
  Antisense strand to SEQ ID NO: 1643737
auauaccaugggauauucc

SEQ ID NO: 1643739 - RNA, 19 nt, Artificial Sequence
  Description of Artificial Sequence: Synthetic oligonucleotide
  Sense strand starting at position 2320 of SEQ ID NO: 1561059
ugagcaucuaaauguggau

SEQ ID NO: 1643740 - RNA, 19 nt, Artificial Sequence
  Description of Artificial Sequence: Synthetic oligonucleotide
  Antisense strand to SEQ ID NO: 1643739
auccacauuuagaugcuca

SEQ ID NO: 1643741 - RNA, 19 nt, Artificial Sequence
  Description of Artificial Sequence: Synthetic oligonucleotide
  Sense strand starting at position 2419 of SEQ ID NO: 1561059
uugguuugcgccaggaagu

SEQ ID NO: 1643742 - RNA, 19 nt, Artificial Sequence
  Description of Artificial Sequence: Synthetic oligonucleotide
  Antisense strand to SEQ ID NO: 1643741
acuuccuggcgcaaaccaa

SEQ ID NO: 1643743 - RNA, 19 nt, Artificial Sequence
  Description of Artificial Sequence: Synthetic oligonucleotide
  Sense strand starting at position 2524 of SEQ ID NO: 1561059
uuugacaauguguggagau

SEQ ID NO: 1643744 - RNA, 19 nt, Artificial Sequence
  Description of Artificial Sequence: Synthetic oligonucleotide
  Antisense strand to SEQ ID NO: 1643743
aucuccacacauugucaaa

SEQ ID NO: 1643745 - RNA, 19 nt, Artificial Sequence
  Description of Artificial Sequence: Synthetic oligonucleotide
  Sense strand starting at position 2536 of SEQ ID NO: 1561059
uggagauaauugucucgcu

SEQ ID NO: 1643746 - RNA, 19 nt, Artificial Sequence
  Description of Artificial Sequence: Synthetic oligonucleotide
  Antisense strand to SEQ ID NO: 1643745
agcgagacaauuaucucca

SEQ ID NO: 1643747 - RNA, 19 nt, Artificial Sequence
  Description of Artificial Sequence: Synthetic oligonucleotide
  Sense strand starting at position 2928 of SEQ ID NO: 1561059
gagagcuggucauauuuau

SEQ ID NO: 1643748 - RNA, 19 nt, Artificial Sequence
  Description of Artificial Sequence: Synthetic oligonucleotide
  Antisense strand to SEQ ID NO: 1643747
auaaauaugaccagcucuc

SEQ ID NO: 1643749 - RNA, 19 nt, Artificial Sequence
  Description of Artificial Sequence: Synthetic oligonucleotide
  Sense strand starting at position 2981 of SEQ ID NO: 1561059
gacguaugucccugcauca

SEQ ID NO: 1643750 - RNA, 19 nt, Artificial Sequence
  Description of Artificial Sequence: Synthetic oligonucleotide
  Antisense strand to SEQ ID NO: 1643749
ugaugcagggacauacguc

SEQ ID NO: 1643751 - RNA, 19 nt, Artificial Sequence
  Description of Artificial Sequence: Synthetic oligonucleotide
  Sense strand starting at position 3011 of SEQ ID NO: 1561059
gucucugaugcucagggua

SEQ ID NO: 1643752 - RNA, 19 nt, Artificial Sequence
  Description of Artificial Sequence: Synthetic oligonucleotide
  Antisense strand to SEQ ID NO: 1643751
uacccugagcaucagagac

SEQ ID NO: 1643753 - RNA, 19 nt, Artificial Sequence
  Description of Artificial Sequence: Synthetic oligonucleotide
  Sense strand starting at position 3253 of SEQ ID NO: 1561059
ucugcauugucagcaggua

SEQ ID NO: 1643754 - RNA, 19 nt, Artificial Sequence
  Description of Artificial Sequence: Synthetic oligonucleotide
  Antisense strand to SEQ ID NO: 1643753
uaccugcugacaaugcaga

SEQ ID NO: 1643755 - RNA, 19 nt, Artificial Sequence
  Description of Artificial Sequence: Synthetic oligonucleotide
  Sense strand starting at position 3254 of SEQ ID NO: 1561059
cugcauugucagcagguaa

SEQ ID NO: 1643756 - RNA, 19 nt, Artificial Sequence
  Description of Artificial Sequence: Synthetic oligonucleotide
  Antisense strand to SEQ ID NO: 1643755
uuaccugcugacaaugcag

SEQ ID NO: 1643757 - RNA, 19 nt, Artificial Sequence
  Description of Artificial Sequence: Synthetic oligonucleotide
  Sense strand starting at position 3386 of SEQ ID NO: 1561059
caggguucuucucucagga

SEQ ID NO: 1643758 - RNA, 19 nt, Artificial Sequence
  Description of Artificial Sequence: Synthetic oligonucleotide
  Antisense strand to SEQ ID NO: 1643757
uccugagagaagaacccug

SEQ ID NO: 1643759 - RNA, 19 nt, Artificial Sequence
  Description of Artificial Sequence: Synthetic oligonucleotide
  Sense strand starting at position 3388 of SEQ ID NO: 1561059
ggguucuucucucaggaac

SEQ ID NO: 1643760 - RNA, 19 nt, Artificial Sequence
  Description of Artificial Sequence: Synthetic oligonucleotide
  Antisense strand to SEQ ID NO: 1643759
guuccugagagaagaaccc

SEQ ID NO: 1643761 - RNA, 19 nt, Artificial Sequence
  Description of Artificial Sequence: Synthetic oligonucleotide
  Sense strand starting at position 3411 of SEQ ID NO: 1561059
aacucaagauuucgaggaa

SEQ ID NO: 1643762 - RNA, 19 nt, Artificial Sequence
  Description of Artificial Sequence: Synthetic oligonucleotide
  Antisense strand to SEQ ID NO: 1643761
uuccucgaaaucuugaguu

SEQ ID NO: 1643763 - RNA, 19 nt, Artificial Sequence
  Description of Artificial Sequence: Synthetic oligonucleotide
  Sense strand starting at position 3412 of SEQ ID NO: 1561059
acucaagauuucgaggaag

SEQ ID NO: 1643764 - RNA, 19 nt, Artificial Sequence
  Description of Artificial Sequence: Synthetic oligonucleotide
  Antisense strand to SEQ ID NO: 1643763
cuuccucgaaaucuugagu

SEQ ID NO: 1643765 - RNA, 19 nt, Artificial Sequence
  Description of Artificial Sequence: Synthetic oligonucleotide
  Sense strand starting at position 3688 of SEQ ID NO: 1561059
uggccagaccuaugaagua

SEQ ID NO: 1643766 - RNA, 19 nt, Artificial Sequence
  Description of Artificial Sequence: Synthetic oligonucleotide
  Antisense strand to SEQ ID NO: 1643765
uacuucauaggucuggcca

SEQ ID NO: 1643767 - RNA, 19 nt, Artificial Sequence
  Description of Artificial Sequence: Synthetic oligonucleotide
  Sense strand starting at position 3736 of SEQ ID NO: 1561059
aggugacacuaggauauaa

SEQ ID NO: 1643768 - RNA, 19 nt, Artificial Sequence
  Description of Artificial Sequence: Synthetic oligonucleotide
  Antisense strand to SEQ ID NO: 1643767
uuauauccuagugucaccu

SEQ ID NO: 1643769 - RNA, 19 nt, Artificial Sequence
  Description of Artificial Sequence: Synthetic oligonucleotide
  Sense strand starting at position 3849 of SEQ ID NO: 1561059
cccaaagagucacugugua

SEQ ID NO: 1643770 - RNA, 19 nt, Artificial Sequence
  Description of Artificial Sequence: Synthetic oligonucleotide
  Antisense strand to SEQ ID NO: 1643769
uacacagugacucuuuggg

SEQ ID NO: 1643771 - RNA, 19 nt, Artificial Sequence
  Description of Artificial Sequence: Synthetic oligonucleotide
  Sense strand starting at position 3880 of SEQ ID NO: 1561059
ugaggcuccugauaucuga

SEQ ID NO: 1643772 - RNA, 19 nt, Artificial Sequence
  Description of Artificial Sequence: Synthetic oligonucleotide
  Antisense strand to SEQ ID NO: 1643771
ucagauaucaggagccuca

SEQ ID NO: 1643773 - RNA, 19 nt, Artificial Sequence
  Description of Artificial Sequence: Synthetic oligonucleotide
  Sense strand starting at position 3964 of SEQ ID NO: 1561059
ggaaucagucucgggagga

SEQ ID NO: 1643774 - RNA, 19 nt, Artificial Sequence
  Description of Artificial Sequence: Synthetic oligonucleotide
  Antisense strand to SEQ ID NO: 1643773
uccucccgagacugauucc

SEQ ID NO: 1643775 - RNA, 19 nt, Artificial Sequence
  Description of Artificial Sequence: Synthetic oligonucleotide
  Sense strand starting at position 154 of SEQ ID NO: 1561060
ucauauauguaguuccauu

SEQ ID NO: 1643776 - RNA, 19 nt, Artificial Sequence
  Description of Artificial Sequence: Synthetic oligonucleotide
  Antisense strand to SEQ ID NO: 1643775
aauggaacuacauauauga

SEQ ID NO: 1643777 - RNA, 19 nt, Artificial Sequence
  Description of Artificial Sequence: Synthetic oligonucleotide
  Sense strand starting at position 197 of SEQ ID NO: 1561060
aguaguacuucccugaauc

SEQ ID NO: 1643778 - RNA, 19 nt, Artificial Sequence
  Description of Artificial Sequence: Synthetic oligonucleotide
  Antisense strand to SEQ ID NO: 1643777
gauucagggaaguacuacu

SEQ ID NO: 1643779 - RNA, 19 nt, Artificial Sequence
  Description of Artificial Sequence: Synthetic oligonucleotide
  Sense strand starting at position 198 of SEQ ID NO: 1561060
guaguacuucccugaaucc

SEQ ID NO: 1643780 - RNA, 19 nt, Artificial Sequence
  Description of Artificial Sequence: Synthetic oligonucleotide
  Antisense strand to SEQ ID NO: 1643779
ggauucagggaaguacuac

SEQ ID NO: 1643781 - RNA, 19 nt, Artificial Sequence
  Description of Artificial Sequence: Synthetic oligonucleotide
  Sense strand starting at position 275 of SEQ ID NO: 1561060
ggaggaaucgaccgugggu

SEQ ID NO: 1643782 - RNA, 19 nt, Artificial Sequence
  Description of Artificial Sequence: Synthetic oligonucleotide
  Antisense strand to SEQ ID NO: 1643781
acccacggucgauuccucc

SEQ ID NO: 1643783 - RNA, 19 nt, Artificial Sequence
  Description of Artificial Sequence: Synthetic oligonucleotide
  Sense strand starting at position 277 of SEQ ID NO: 1561060
aggaaucgaccguggguau

SEQ ID NO: 1643784 - RNA, 19 nt, Artificial Sequence
  Description of Artificial Sequence: Synthetic oligonucleotide
  Antisense strand to SEQ ID NO: 1643783
auacccacggucgauuccu

SEQ ID NO: 1643785 - RNA, 19 nt, Artificial Sequence
  Description of Artificial Sequence: Synthetic oligonucleotide
  Sense strand starting at position 321 of SEQ ID NO: 1561060
guuuguggccacuggaaua

SEQ ID NO: 1643786 - RNA, 19 nt, Artificial Sequence
  Description of Artificial Sequence: Synthetic oligonucleotide
  Antisense strand to SEQ ID NO: 1643785
uauuccaguggccacaaac

SEQ ID NO: 1643787 - RNA, 19 nt, Artificial Sequence
  Description of Artificial Sequence: Synthetic oligonucleotide
  Sense strand starting at position 333 of SEQ ID NO: 1561060
uggaauaucccaugguaua

SEQ ID NO: 1643788 - RNA, 19 nt, Artificial Sequence
  Description of Artificial Sequence: Synthetic oligonucleotide
  Antisense strand to SEQ ID NO: 1643787
uauaccaugggauauucca

SEQ ID NO: 1643789 - RNA, 19 nt, Artificial Sequence
  Description of Artificial Sequence: Synthetic oligonucleotide
  Sense strand starting at position 334 of SEQ ID NO: 1561060
ggaauaucccaugguauau

SEQ ID NO: 1643790 - RNA, 19 nt, Artificial Sequence
  Description of Artificial Sequence: Synthetic oligonucleotide
  Antisense strand to SEQ ID NO: 1643789
auauaccaugggauauucc

SEQ ID NO: 1643791 - RNA, 19 nt, Artificial Sequence
  Description of Artificial Sequence: Synthetic oligonucleotide
  Sense strand starting at position 924 of SEQ ID NO: 1561060
ugagcaucuaaauguggau

SEQ ID NO: 1643792 - RNA, 19 nt, Artificial Sequence
  Description of Artificial Sequence: Synthetic oligonucleotide
  Antisense strand to SEQ ID NO: 1643791
auccacauuuagaugcuca

SEQ ID NO: 1643793 - RNA, 19 nt, Artificial Sequence
  Description of Artificial Sequence: Synthetic oligonucleotide
  Sense strand starting at position 1023 of SEQ ID NO: 1561060
uugguuugcgccaggaagu

SEQ ID NO: 1643794 - RNA, 19 nt, Artificial Sequence
  Description of Artificial Sequence: Synthetic oligonucleotide
  Antisense strand to SEQ ID NO: 1643793
acuuccuggcgcaaaccaa

SEQ ID NO: 1643795 - RNA, 19 nt, Artificial Sequence
  Description of Artificial Sequence: Synthetic oligonucleotide
  Sense strand starting at position 1128 of SEQ ID NO: 1561060
uuugacaauguguggagau

SEQ ID NO: 1643796 - RNA, 19 nt, Artificial Sequence
  Description of Artificial Sequence: Synthetic oligonucleotide
  Antisense strand to SEQ ID NO: 1643795
aucuccacacauugucaaa

SEQ ID NO: 1643797 - RNA, 19 nt, Artificial Sequence
  Description of Artificial Sequence: Synthetic oligonucleotide
  Sense strand starting at position 1140 of SEQ ID NO: 1561060
uggagauaauugucucgcu

SEQ ID NO: 1643798 - RNA, 19 nt, Artificial Sequence
  Description of Artificial Sequence: Synthetic oligonucleotide
  Antisense strand to SEQ ID NO: 1643797
agcgagacaauuaucucca

SEQ ID NO: 1643799 - RNA, 19 nt, Artificial Sequence
  Description of Artificial Sequence: Synthetic oligonucleotide
  Sense strand starting at position 1532 of SEQ ID NO: 1561060
gagagcuggucauauuuau

SEQ ID NO: 1643800 - RNA, 19 nt, Artificial Sequence
  Description of Artificial Sequence: Synthetic oligonucleotide
  Antisense strand to SEQ ID NO: 1643799
auaaauaugaccagcucuc

SEQ ID NO: 1643801 - RNA, 19 nt, Artificial Sequence
  Description of Artificial Sequence: Synthetic oligonucleotide
  Sense strand starting at position 1615 of SEQ ID NO: 1561060
gucucugaugcucagggua

SEQ ID NO: 1643802 - RNA, 19 nt, Artificial Sequence
  Description of Artificial Sequence: Synthetic oligonucleotide
  Antisense strand to SEQ ID NO: 1643801
uacccugagcaucagagac

SEQ ID NO: 1643803 - RNA, 19 nt, Artificial Sequence
  Description of Artificial Sequence: Synthetic oligonucleotide
  Sense strand starting at position 1858 of SEQ ID NO: 1561060
cugcauugucagcagguaa

SEQ ID NO: 1643804 - RNA, 19 nt, Artificial Sequence
  Description of Artificial Sequence: Synthetic oligonucleotide
  Antisense strand to SEQ ID NO: 1643803
uuaccugcugacaaugcag

SEQ ID NO: 1643805 - RNA, 19 nt, Artificial Sequence
  Description of Artificial Sequence: Synthetic oligonucleotide
  Sense strand starting at position 1990 of SEQ ID NO: 1561060
caggguucuucucucagga

SEQ ID NO: 1643806 - RNA, 19 nt, Artificial Sequence
  Description of Artificial Sequence: Synthetic oligonucleotide
  Antisense strand to SEQ ID NO: 1643805
uccugagagaagaacccug

SEQ ID NO: 1643807 - RNA, 19 nt, Artificial Sequence
  Description of Artificial Sequence: Synthetic oligonucleotide
  Sense strand starting at position 2015 of SEQ ID NO: 1561060
aacucaagauuucgaggaa

SEQ ID NO: 1643808 - RNA, 19 nt, Artificial Sequence
  Description of Artificial Sequence: Synthetic oligonucleotide
  Antisense strand to SEQ ID NO: 1643807
uuccucgaaaucuugaguu

SEQ ID NO: 1643809 - RNA, 19 nt, Artificial Sequence
  Description of Artificial Sequence: Synthetic oligonucleotide
  Sense strand starting at position 2016 of SEQ ID NO: 1561060
acucaagauuucgaggaag

SEQ ID NO: 1643810 - RNA, 19 nt, Artificial Sequence
  Description of Artificial Sequence: Synthetic oligonucleotide
  Antisense strand to SEQ ID NO: 1643809
cuuccucgaaaucuugagu

SEQ ID NO: 1643811 - RNA, 19 nt, Artificial Sequence
  Description of Artificial Sequence: Synthetic oligonucleotide
  Sense strand starting at position 2292 of SEQ ID NO: 1561060
uggccagaccuaugaagua

SEQ ID NO: 1643812 - RNA, 19 nt, Artificial Sequence
  Description of Artificial Sequence: Synthetic oligonucleotide
  Antisense strand to SEQ ID NO: 1643811
uacuucauaggucuggcca

SEQ ID NO: 1643813 - RNA, 19 nt, Artificial Sequence
  Description of Artificial Sequence: Synthetic oligonucleotide
  Sense strand starting at position 2340 of SEQ ID NO: 1561060
aggugacacuaggauauaa

SEQ ID NO: 1643814 - RNA, 19 nt, Artificial Sequence
  Description of Artificial Sequence: Synthetic oligonucleotide
  Antisense strand to SEQ ID NO: 1643813
uuauauccuagugucaccu

SEQ ID NO: 1643815 - RNA, 19 nt, Artificial Sequence
  Description of Artificial Sequence: Synthetic oligonucleotide
  Sense strand starting at position 2453 of SEQ ID NO: 1561060
cccaaagagucacugugua

SEQ ID NO: 1643816 - RNA, 19 nt, Artificial Sequence
  Description of Artificial Sequence: Synthetic oligonucleotide
  Antisense strand to SEQ ID NO: 1643815
uacacagugacucuuuggg

SEQ ID NO: 1643817 - RNA, 19 nt, Artificial Sequence
  Description of Artificial Sequence: Synthetic oligonucleotide
  Sense strand starting at position 2568 of SEQ ID NO: 1561060
ggaaucagucucgggagga

SEQ ID NO: 1643818 - RNA, 19 nt, Artificial Sequence
  Description of Artificial Sequence: Synthetic oligonucleotide
  Antisense strand to SEQ ID NO: 1643817
uccucccgagacugauucc

SEQ ID NO: 1643819 - RNA, 19 nt, Artificial Sequence
  Description of Artificial Sequence: Synthetic oligonucleotide
  Sense strand starting at position 2617 of SEQ ID NO: 1561060
gaggauuccguguguugau

SEQ ID NO: 1643820 - RNA, 19 nt, Artificial Sequence
  Description of Artificial Sequence: Synthetic oligonucleotide
  Antisense strand to SEQ ID NO: 1643819
aucaacacacggaauccuc

SEQ ID NO: 1643821 - RNA, 19 nt, Artificial Sequence
  Description of Artificial Sequence: Synthetic oligonucleotide
  Sense strand starting at position 2618 of SEQ ID NO: 1561060
aggauuccguguguugaua

SEQ ID NO: 1643822 - RNA, 19 nt, Artificial Sequence
  Description of Artificial Sequence: Synthetic oligonucleotide
  Antisense strand to SEQ ID NO: 1643821
uaucaacacacggaauccu

SEQ ID NO: 1643823 - RNA, 19 nt, Artificial Sequence
  Description of Artificial Sequence: Synthetic oligonucleotide
  Sense strand starting at position 2686 of SEQ ID NO: 1561060
uaaggcugugacuguugua

SEQ ID NO: 1643824 - RNA, 19 nt, Artificial Sequence
  Description of Artificial Sequence: Synthetic oligonucleotide
  Antisense strand to SEQ ID NO: 1643823
uacaacagucacagccuua

SEQ ID NO: 1643825 - RNA, 19 nt, Artificial Sequence
  Description of Artificial Sequence: Synthetic oligonucleotide
  Sense strand starting at position 2721 of SEQ ID NO: 1561060
ggaggaauguuggauggga

SEQ ID NO: 1643826 - RNA, 19 nt, Artificial Sequence
  Description of Artificial Sequence: Synthetic oligonucleotide
  Antisense strand to SEQ ID NO: 1643825
ucccauccaacauuccucc

SEQ ID NO: 1643827 - RNA, 19 nt, Artificial Sequence
  Description of Artificial Sequence: Synthetic oligonucleotide
  Sense strand starting at position 2936 of SEQ ID NO: 1561060
uggcguguccacgcucaau

SEQ ID NO: 1643828 - RNA, 19 nt, Artificial Sequence
  Description of Artificial Sequence: Synthetic oligonucleotide
  Antisense strand to SEQ ID NO: 1643827
auugagcguggacacgcca

SEQ ID NO: 1643829 - RNA, 19 nt, Artificial Sequence
  Description of Artificial Sequence: Synthetic oligonucleotide
  Sense strand starting at position 2938 of SEQ ID NO: 1561060
gcguguccacgcucaauga

SEQ ID NO: 1643830 - RNA, 19 nt, Artificial Sequence
  Description of Artificial Sequence: Synthetic oligonucleotide
  Antisense strand to SEQ ID NO: 1643829
ucauugagcguggacacgc

SEQ ID NO: 1643831 - RNA, 19 nt, Artificial Sequence
  Description of Artificial Sequence: Synthetic oligonucleotide
  Sense strand starting at position 3019 of SEQ ID NO: 1561060
augcuauguacugggagga

SEQ ID NO: 1643832 - RNA, 19 nt, Artificial Sequence
  Description of Artificial Sequence: Synthetic oligonucleotide
  Antisense strand to SEQ ID NO: 1643831
uccucccaguacauagcau

SEQ ID NO: 1643833 - RNA, 19 nt, Artificial Sequence
  Description of Artificial Sequence: Synthetic oligonucleotide
  Sense strand starting at position 3020 of SEQ ID NO: 1561060
ugcuauguacugggaggaa

SEQ ID NO: 1643834 - RNA, 19 nt, Artificial Sequence
  Description of Artificial Sequence: Synthetic oligonucleotide
  Antisense strand to SEQ ID NO: 1643833
uuccucccaguacauagca

SEQ ID NO: 1643835 - RNA, 19 nt, Artificial Sequence
  Description of Artificial Sequence: Synthetic oligonucleotide
  Sense strand starting at position 3291 of SEQ ID NO: 1561060
gcaguuccuccugaagaug

SEQ ID NO: 1643836 - RNA, 19 nt, Artificial Sequence
  Description of Artificial Sequence: Synthetic oligonucleotide
  Antisense strand to SEQ ID NO: 1643835
caucuucaggaggaacugc

SEQ ID NO: 1643837 - RNA, 19 nt, Artificial Sequence
  Description of Artificial Sequence: Synthetic oligonucleotide
  Sense strand starting at position 3495 of SEQ ID NO: 1561060
gcccauaaccuggaguaga

SEQ ID NO: 1643838 - RNA, 19 nt, Artificial Sequence
  Description of Artificial Sequence: Synthetic oligonucleotide
  Antisense strand to SEQ ID NO: 1643837
ucuacuccagguuaugggc

SEQ ID NO: 1643839 - RNA, 19 nt, Artificial Sequence
  Description of Artificial Sequence: Synthetic oligonucleotide
  Sense strand starting at position 3512 of SEQ ID NO: 1561060
gagucaguuggcugugaua

SEQ ID NO: 1643840 - RNA, 19 nt, Artificial Sequence
  Description of Artificial Sequence: Synthetic oligonucleotide
  Antisense strand to SEQ ID NO: 1643839
uaucacagccaacugacuc

SEQ ID NO: 1643841 - RNA, 19 nt, Artificial Sequence
  Description of Artificial Sequence: Synthetic oligonucleotide
  Sense strand starting at position 3514 of SEQ ID NO: 1561060
gucaguuggcugugauaau

SEQ ID NO: 1643842 - RNA, 19 nt, Artificial Sequence
  Description of Artificial Sequence: Synthetic oligonucleotide
  Antisense strand to SEQ ID NO: 1643841
auuaucacagccaacugac

SEQ ID NO: 1643843 - RNA, 19 nt, Artificial Sequence
  Description of Artificial Sequence: Synthetic oligonucleotide
  Sense strand starting at position 3663 of SEQ ID NO: 1561060
acuuucuucccguaaggac

SEQ ID NO: 1643844 - RNA, 19 nt, Artificial Sequence
  Description of Artificial Sequence: Synthetic oligonucleotide
  Antisense strand to SEQ ID NO: 1643843
guccuuacgggaagaaagu

SEQ ID NO: 1643845 - RNA, 19 nt, Artificial Sequence
  Description of Artificial Sequence: Synthetic oligonucleotide
  Sense strand starting at position 3686 of SEQ ID NO: 1561060
gcagcaucucaaugggaag

SEQ ID NO: 1643846 - RNA, 19 nt, Artificial Sequence
  Description of Artificial Sequence: Synthetic oligonucleotide
  Antisense strand to SEQ ID NO: 1643845
cuucccauugagaugcugc

SEQ ID NO: 1643847 - RNA, 19 nt, Artificial Sequence
  Description of Artificial Sequence: Synthetic oligonucleotide
  Sense strand starting at position 3815 of SEQ ID NO: 1561060
acguuugaaccacauauga

SEQ ID NO: 1643848 - RNA, 19 nt, Artificial Sequence
  Description of Artificial Sequence: Synthetic oligonucleotide
  Antisense strand to SEQ ID NO: 1643847
ucauaugugguucaaacgu

SEQ ID NO: 1643849 - RNA, 19 nt, Artificial Sequence
  Description of Artificial Sequence: Synthetic oligonucleotide
  Sense strand starting at position 3866 of SEQ ID NO: 1561060
uuccauaauuuggagagga

SEQ ID NO: 1643850 - RNA, 19 nt, Artificial Sequence
  Description of Artificial Sequence: Synthetic oligonucleotide
  Antisense strand to SEQ ID NO: 1643849
uccucuccaaauuauggaa

SEQ ID NO: 1643851 - RNA, 19 nt, Artificial Sequence
  Description of Artificial Sequence: Synthetic oligonucleotide
  Sense strand starting at position 3973 of SEQ ID NO: 1561060
auuagaaggcaugguguuu

SEQ ID NO: 1643852 - RNA, 19 nt, Artificial Sequence
  Description of Artificial Sequence: Synthetic oligonucleotide
  Antisense strand to SEQ ID NO: 1643851
aaacaccaugccuucuaau

SEQ ID NO: 1643853 - RNA, 19 nt, Artificial Sequence
  Description of Artificial Sequence: Synthetic oligonucleotide
  Sense strand starting at position 3978 of SEQ ID NO: 1561060
aaggcaugguguuuagaua

SEQ ID NO: 1643854 - RNA, 19 nt, Artificial Sequence
  Description of Artificial Sequence: Synthetic oligonucleotide
  Antisense strand to SEQ ID NO: 1643853
uaucuaaacaccaugccuu

SEQ ID NO: 1643855 - RNA, 19 nt, Artificial Sequence
  Description of Artificial Sequence: Synthetic oligonucleotide
  Sense strand starting at position 66 of SEQ ID NO: 1561061
gacgaucaguuagagauga

SEQ ID NO: 1643856 - RNA, 19 nt, Artificial Sequence
  Description of Artificial Sequence: Synthetic oligonucleotide
  Antisense strand to SEQ ID NO: 1643855
ucaucucuaacugaucguc

SEQ ID NO: 1643857 - RNA, 19 nt, Artificial Sequence
  Description of Artificial Sequence: Synthetic oligonucleotide
  Sense strand starting at position 70 of SEQ ID NO: 1561061
aucaguuagagaugaagca

SEQ ID NO: 1643858 - RNA, 19 nt, Artificial Sequence
  Description of Artificial Sequence: Synthetic oligonucleotide
  Antisense strand to SEQ ID NO: 1643857
ugcuucaucucuaacugau

SEQ ID NO: 1643859 - RNA, 19 nt, Artificial Sequence
  Description of Artificial Sequence: Synthetic oligonucleotide
  Sense strand starting at position 141 of SEQ ID NO: 1561061
gcguguccugaguacucaa

SEQ ID NO: 1643860 - RNA, 19 nt, Artificial Sequence
  Description of Artificial Sequence: Synthetic oligonucleotide
  Antisense strand to SEQ ID NO: 1643859
uugaguacucaggacacgc

SEQ ID NO: 1643861 - RNA, 19 nt, Artificial Sequence
  Description of Artificial Sequence: Synthetic oligonucleotide
  Sense strand starting at position 144 of SEQ ID NO: 1561061
uguccugaguacucaaacu

SEQ ID NO: 1643862 - RNA, 19 nt, Artificial Sequence
  Description of Artificial Sequence: Synthetic oligonucleotide
  Antisense strand to SEQ ID NO: 1643861
aguuugaguacucaggaca

SEQ ID NO: 1643863 - RNA, 19 nt, Artificial Sequence
  Description of Artificial Sequence: Synthetic oligonucleotide
  Sense strand starting at position 213 of SEQ ID NO: 1561061
guggaaagucgcuguucag

SEQ ID NO: 1643864 - RNA, 19 nt, Artificial Sequence
  Description of Artificial Sequence: Synthetic oligonucleotide
  Antisense strand to SEQ ID NO: 1643863
cugaacagcgacuuuccac

SEQ ID NO: 1643865 - RNA, 19 nt, Artificial Sequence
  Description of Artificial Sequence: Synthetic oligonucleotide
  Sense strand starting at position 311 of SEQ ID NO: 1561061
gcugaacuguacucuuuaa

SEQ ID NO: 1643866 - RNA, 19 nt, Artificial Sequence
  Description of Artificial Sequence: Synthetic oligonucleotide
  Antisense strand to SEQ ID NO: 1643865
uuaaagaguacaguucagc

SEQ ID NO: 1643867 - RNA, 19 nt, Artificial Sequence
  Description of Artificial Sequence: Synthetic oligonucleotide
  Sense strand starting at position 332 of SEQ ID NO: 1561061
uggcuaagaugacaaauuu

SEQ ID NO: 1643868 - RNA, 19 nt, Artificial Sequence
  Description of Artificial Sequence: Synthetic oligonucleotide
  Antisense strand to SEQ ID NO: 1643867
aaauuugucaucuuagcca

SEQ ID NO: 1643869 - RNA, 19 nt, Artificial Sequence
  Description of Artificial Sequence: Synthetic oligonucleotide
  Sense strand starting at position 421 of SEQ ID NO: 1561061
aaagaaauacuaggucugu

SEQ ID NO: 1643870 - RNA, 19 nt, Artificial Sequence
  Description of Artificial Sequence: Synthetic oligonucleotide
  Antisense strand to SEQ ID NO: 1643869
acagaccuaguauuucuuu

SEQ ID NO: 1643871 - RNA, 19 nt, Artificial Sequence
  Description of Artificial Sequence: Synthetic oligonucleotide
  Sense strand starting at position 422 of SEQ ID NO: 1561061
aagaaauacuaggucuguu

SEQ ID NO: 1643872 - RNA, 19 nt, Artificial Sequence
  Description of Artificial Sequence: Synthetic oligonucleotide
  Antisense strand to SEQ ID NO: 1643871
aacagaccuaguauuucuu

SEQ ID NO: 1643873 - RNA, 19 nt, Artificial Sequence
  Description of Artificial Sequence: Synthetic oligonucleotide
  Sense strand starting at position 436 of SEQ ID NO: 1561061
cuguucgugcaagaucuua

SEQ ID NO: 1643874 - RNA, 19 nt, Artificial Sequence
  Description of Artificial Sequence: Synthetic oligonucleotide
  Antisense strand to SEQ ID NO: 1643873
uaagaucuugcacgaacag

SEQ ID NO: 1643875 - RNA, 19 nt, Artificial Sequence
  Description of Artificial Sequence: Synthetic oligonucleotide
  Sense strand starting at position 447 of SEQ ID NO: 1561061
agaucuuagugacugggau

SEQ ID NO: 1643876 - RNA, 19 nt, Artificial Sequence
  Description of Artificial Sequence: Synthetic oligonucleotide
  Antisense strand to SEQ ID NO: 1643875
aucccagucacuaagaucu

SEQ ID NO: 1643877 - RNA, 19 nt, Artificial Sequence
  Description of Artificial Sequence: Synthetic oligonucleotide
  Sense strand starting at position 448 of SEQ ID NO: 1561061
gaucuuagugacugggauu

SEQ ID NO: 1643878 - RNA, 19 nt, Artificial Sequence
  Description of Artificial Sequence: Synthetic oligonucleotide
  Antisense strand to SEQ ID NO: 1643877
aaucccagucacuaagauc

SEQ ID NO: 1643879 - RNA, 19 nt, Artificial Sequence
  Description of Artificial Sequence: Synthetic oligonucleotide
  Sense strand starting at position 535 of SEQ ID NO: 1561061
gcugaacccugagcuaaua

SEQ ID NO: 1643880 - RNA, 19 nt, Artificial Sequence
  Description of Artificial Sequence: Synthetic oligonucleotide
  Antisense strand to SEQ ID NO: 1643879
uauuagcucaggguucagc

SEQ ID NO: 1643881 - RNA, 19 nt, Artificial Sequence
  Description of Artificial Sequence: Synthetic oligonucleotide
  Sense strand starting at position 604 of SEQ ID NO: 1561061
cugugccauuucugaagaa

SEQ ID NO: 1643882 - RNA, 19 nt, Artificial Sequence
  Description of Artificial Sequence: Synthetic oligonucleotide
  Antisense strand to SEQ ID NO: 1643881
uucuucagaaauggcacag

SEQ ID NO: 1643883 - RNA, 19 nt, Artificial Sequence
  Description of Artificial Sequence: Synthetic oligonucleotide
  Sense strand starting at position 605 of SEQ ID NO: 1561061
ugugccauuucugaagaag

SEQ ID NO: 1643884 - RNA, 19 nt, Artificial Sequence
  Description of Artificial Sequence: Synthetic oligonucleotide
  Antisense strand to SEQ ID NO: 1643883
cuucuucagaaauggcaca

SEQ ID NO: 1643885 - RNA, 19 nt, Artificial Sequence
  Description of Artificial Sequence: Synthetic oligonucleotide
  Sense strand starting at position 789 of SEQ ID NO: 1561061
ugguuaucauucucuuucu

SEQ ID NO: 1643886 - RNA, 19 nt, Artificial Sequence
  Description of Artificial Sequence: Synthetic oligonucleotide
  Antisense strand to SEQ ID NO: 1643885
agaaagagaaugauaacca

SEQ ID NO: 1643887 - RNA, 19 nt, Artificial Sequence
  Description of Artificial Sequence: Synthetic oligonucleotide
  Sense strand starting at position 951 of SEQ ID NO: 1561061
ggcguuucaccugacaggu

SEQ ID NO: 1643888 - RNA, 19 nt, Artificial Sequence
  Description of Artificial Sequence: Synthetic oligonucleotide
  Antisense strand to SEQ ID NO: 1643887
accugucaggugaaacgcc

SEQ ID NO: 1643889 - RNA, 19 nt, Artificial Sequence
  Description of Artificial Sequence: Synthetic oligonucleotide
  Sense strand starting at position 2133 of SEQ ID NO: 1561061
cuuguccagacuuguaagu

SEQ ID NO: 1643890 - RNA, 19 nt, Artificial Sequence
  Description of Artificial Sequence: Synthetic oligonucleotide
  Antisense strand to SEQ ID NO: 1643889
acuuacaagucuggacaag

SEQ ID NO: 1643891 - RNA, 19 nt, Artificial Sequence
  Description of Artificial Sequence: Synthetic oligonucleotide
  Sense strand starting at position 2138 of SEQ ID NO: 1561061
ccagacuuguaagucuaga

SEQ ID NO: 1643892 - RNA, 19 nt, Artificial Sequence
  Description of Artificial Sequence: Synthetic oligonucleotide
  Antisense strand to SEQ ID NO: 1643891
ucuagacuuacaagucugg

SEQ ID NO: 1643893 - RNA, 19 nt, Artificial Sequence
  Description of Artificial Sequence: Synthetic oligonucleotide
  Sense strand starting at position 2184 of SEQ ID NO: 1561061
gcagcacuuuccuuaugca

SEQ ID NO: 1643894 - RNA, 19 nt, Artificial Sequence
  Description of Artificial Sequence: Synthetic oligonucleotide
  Antisense strand to SEQ ID NO: 1643893
ugcauaaggaaagugcugc

SEQ ID NO: 1643895 - RNA, 19 nt, Artificial Sequence
  Description of Artificial Sequence: Synthetic oligonucleotide
  Sense strand starting at position 2198 of SEQ ID NO: 1561061
augcaccuuugucuacaua

SEQ ID NO: 1643896 - RNA, 19 nt, Artificial Sequence
  Description of Artificial Sequence: Synthetic oligonucleotide
  Antisense strand to SEQ ID NO: 1643895
uauguagacaaaggugcau

SEQ ID NO: 1643897 - RNA, 19 nt, Artificial Sequence
  Description of Artificial Sequence: Synthetic oligonucleotide
  Sense strand starting at position 2377 of SEQ ID NO: 1561061
gcaaguugucagggacaaa

SEQ ID NO: 1643898 - RNA, 19 nt, Artificial Sequence
  Description of Artificial Sequence: Synthetic oligonucleotide
  Antisense strand to SEQ ID NO: 1643897
uuugucccugacaacuugc

SEQ ID NO: 1643899 - RNA, 19 nt, Artificial Sequence
  Description of Artificial Sequence: Synthetic oligonucleotide
  Sense strand starting at position 2418 of SEQ ID NO: 1561061
guccuuagcagucaagaga

SEQ ID NO: 1643900 - RNA, 19 nt, Artificial Sequence
  Description of Artificial Sequence: Synthetic oligonucleotide
  Antisense strand to SEQ ID NO: 1643899
ucucuugacugcuaaggac

SEQ ID NO: 1643901 - RNA, 19 nt, Artificial Sequence
  Description of Artificial Sequence: Synthetic oligonucleotide
  Sense strand starting at position 2539 of SEQ ID NO: 1561061
gcuugagagccgggcauuu

SEQ ID NO: 1643902 - RNA, 19 nt, Artificial Sequence
  Description of Artificial Sequence: Synthetic oligonucleotide
  Antisense strand to SEQ ID NO: 1643901
aaaugcccggcucucaagc

SEQ ID NO: 1643903 - RNA, 19 nt, Artificial Sequence
  Description of Artificial Sequence: Synthetic oligonucleotide
  Sense strand starting at position 2552 of SEQ ID NO: 1561061
gcauuugaaaugugaacgu

SEQ ID NO: 1643904 - RNA, 19 nt, Artificial Sequence
  Description of Artificial Sequence: Synthetic oligonucleotide
  Antisense strand to SEQ ID NO: 1643903
acguucacauuucaaaugc

SEQ ID NO: 1643905 - RNA, 19 nt, Artificial Sequence
  Description of Artificial Sequence: Synthetic oligonucleotide
  Sense strand starting at position 2559 of SEQ ID NO: 1561061
aaaugugaacguugaggau

SEQ ID NO: 1643906 - RNA, 19 nt, Artificial Sequence
  Description of Artificial Sequence: Synthetic oligonucleotide
  Antisense strand to SEQ ID NO: 1643905
auccucaacguucacauuu

SEQ ID NO: 1643907 - RNA, 19 nt, Artificial Sequence
  Description of Artificial Sequence: Synthetic oligonucleotide
  Sense strand starting at position 2579 of SEQ ID NO: 1561061
uggaauaccaagugugaac

SEQ ID NO: 1643908 - RNA, 19 nt, Artificial Sequence
  Description of Artificial Sequence: Synthetic oligonucleotide
  Antisense strand to SEQ ID NO: 1643907
guucacacuugguauucca

SEQ ID NO: 1643909 - RNA, 19 nt, Artificial Sequence
  Description of Artificial Sequence: Synthetic oligonucleotide
  Sense strand starting at position 2657 of SEQ ID NO: 1561061
ucaguuugcucagcugaaa

SEQ ID NO: 1643910 - RNA, 19 nt, Artificial Sequence
  Description of Artificial Sequence: Synthetic oligonucleotide
  Antisense strand to SEQ ID NO: 1643909
uuucagcugagcaaacuga

SEQ ID NO: 1643911 - RNA, 19 nt, Artificial Sequence
  Description of Artificial Sequence: Synthetic oligonucleotide
  Sense strand starting at position 2678 of SEQ ID NO: 1561061
ugcagacaauaauagaauu

SEQ ID NO: 1643912 - RNA, 19 nt, Artificial Sequence
  Description of Artificial Sequence: Synthetic oligonucleotide
  Antisense strand to SEQ ID NO: 1643911
aauucuauuauugucugca

SEQ ID NO: 1643913 - RNA, 19 nt, Artificial Sequence
  Description of Artificial Sequence: Synthetic oligonucleotide
  Sense strand starting at position 2705 of SEQ ID NO: 1561061
gggauucagugaggucuca

SEQ ID NO: 1643914 - RNA, 19 nt, Artificial Sequence
  Description of Artificial Sequence: Synthetic oligonucleotide
  Antisense strand to SEQ ID NO: 1643913
ugagaccucacugaauccc

SEQ ID NO: 1643915 - RNA, 19 nt, Artificial Sequence
  Description of Artificial Sequence: Synthetic oligonucleotide
  Sense strand starting at position 2714 of SEQ ID NO: 1561061
ugaggucucauguguaaag

SEQ ID NO: 1643916 - RNA, 19 nt, Artificial Sequence
  Description of Artificial Sequence: Synthetic oligonucleotide
  Antisense strand to SEQ ID NO: 1643915
cuuuacacaugagaccuca

SEQ ID NO: 1643917 - RNA, 19 nt, Artificial Sequence
  Description of Artificial Sequence: Synthetic oligonucleotide
  Sense strand starting at position 2715 of SEQ ID NO: 1561061
gaggucucauguguaaagu

SEQ ID NO: 1643918 - RNA, 19 nt, Artificial Sequence
  Description of Artificial Sequence: Synthetic oligonucleotide
  Antisense strand to SEQ ID NO: 1643917
acuuuacacaugagaccuc

SEQ ID NO: 1643919 - RNA, 19 nt, Artificial Sequence
  Description of Artificial Sequence: Synthetic oligonucleotide
  Sense strand starting at position 2716 of SEQ ID NO: 1561061
aggucucauguguaaagug

SEQ ID NO: 1643920 - RNA, 19 nt, Artificial Sequence
  Description of Artificial Sequence: Synthetic oligonucleotide
  Antisense strand to SEQ ID NO: 1643919
cacuuuacacaugagaccu

SEQ ID NO: 1643921 - RNA, 19 nt, Artificial Sequence
  Description of Artificial Sequence: Synthetic oligonucleotide
  Sense strand starting at position 2838 of SEQ ID NO: 1561061
aggauaaacucuuaggaug

SEQ ID NO: 1643922 - RNA, 19 nt, Artificial Sequence
  Description of Artificial Sequence: Synthetic oligonucleotide
  Antisense strand to SEQ ID NO: 1643921
cauccuaagaguuuauccu

SEQ ID NO: 1643923 - RNA, 19 nt, Artificial Sequence
  Description of Artificial Sequence: Synthetic oligonucleotide
  Sense strand starting at position 2840 of SEQ ID NO: 1561061
gauaaacucuuaggaugag

SEQ ID NO: 1643924 - RNA, 19 nt, Artificial Sequence
  Description of Artificial Sequence: Synthetic oligonucleotide
  Antisense strand to SEQ ID NO: 1643923
cucauccuaagaguuuauc

SEQ ID NO: 1643925 - RNA, 19 nt, Artificial Sequence
  Description of Artificial Sequence: Synthetic oligonucleotide
  Sense strand starting at position 2841 of SEQ ID NO: 1561061
auaaacucuuaggaugaga

SEQ ID NO: 1643926 - RNA, 19 nt, Artificial Sequence
  Description of Artificial Sequence: Synthetic oligonucleotide
  Antisense strand to SEQ ID NO: 1643925
ucucauccuaagaguuuau

SEQ ID NO: 1643927 - RNA, 19 nt, Artificial Sequence
  Description of Artificial Sequence: Synthetic oligonucleotide
  Sense strand starting at position 3668 of SEQ ID NO: 1561061
guaugacaggcaugaugau

SEQ ID NO: 1643928 - RNA, 19 nt, Artificial Sequence
  Description of Artificial Sequence: Synthetic oligonucleotide
  Antisense strand to SEQ ID NO: 1643927
aucaucaugccugucauac

SEQ ID NO: 1643929 - RNA, 19 nt, Artificial Sequence
  Description of Artificial Sequence: Synthetic oligonucleotide
  Sense strand starting at position 3762 of SEQ ID NO: 1561061
gaaugaguccacugguauc

SEQ ID NO: 1643930 - RNA, 19 nt, Artificial Sequence
  Description of Artificial Sequence: Synthetic oligonucleotide
  Antisense strand to SEQ ID NO: 1643929
gauaccaguggacucauuc

SEQ ID NO: 1643931 - RNA, 19 nt, Artificial Sequence
  Description of Artificial Sequence: Synthetic oligonucleotide
  Sense strand starting at position 3847 of SEQ ID NO: 1561061
gccauaugccagcauugag

SEQ ID NO: 1643932 - RNA, 19 nt, Artificial Sequence
  Description of Artificial Sequence: Synthetic oligonucleotide
  Antisense strand to SEQ ID NO: 1643931
cucaaugcuggcauauggc

SEQ ID NO: 1643933 - RNA, 19 nt, Artificial Sequence
  Description of Artificial Sequence: Synthetic oligonucleotide
  Sense strand starting at position 3908 of SEQ ID NO: 1561061
guguccugggucugaucau

SEQ ID NO: 1643934 - RNA, 19 nt, Artificial Sequence
  Description of Artificial Sequence: Synthetic oligonucleotide
  Antisense strand to SEQ ID NO: 1643933
augaucagacccaggacac

SEQ ID NO: 1643935 - RNA, 19 nt, Artificial Sequence
  Description of Artificial Sequence: Synthetic oligonucleotide
  Sense strand starting at position 3 of SEQ ID NO: 1561062
cuuagugacuguggaaaga

SEQ ID NO: 1643936 - RNA, 19 nt, Artificial Sequence
  Description of Artificial Sequence: Synthetic oligonucleotide
  Antisense strand to SEQ ID NO: 1643935
ucuuuccacagucacuaag

SEQ ID NO: 1643937 - RNA, 19 nt, Artificial Sequence
  Description of Artificial Sequence: Synthetic oligonucleotide
  Sense strand starting at position 154 of SEQ ID NO: 1561062
gguguaucugcauaugugu

SEQ ID NO: 1643938 - RNA, 19 nt, Artificial Sequence
  Description of Artificial Sequence: Synthetic oligonucleotide
  Antisense strand to SEQ ID NO: 1643937
acacauaugcagauacacc

SEQ ID NO: 1643939 - RNA, 19 nt, Artificial Sequence
  Description of Artificial Sequence: Synthetic oligonucleotide
  Sense strand starting at position 303 of SEQ ID NO: 1561062
ugguguauugcauguguau

SEQ ID NO: 1643940 - RNA, 19 nt, Artificial Sequence
  Description of Artificial Sequence: Synthetic oligonucleotide
  Antisense strand to SEQ ID NO: 1643939
auacacaugcaauacacca

SEQ ID NO: 1643941 - RNA, 19 nt, Artificial Sequence
  Description of Artificial Sequence: Synthetic oligonucleotide
  Sense strand starting at position 397 of SEQ ID NO: 1561062
gugcauaugugccugcaca

SEQ ID NO: 1643942 - RNA, 19 nt, Artificial Sequence
  Description of Artificial Sequence: Synthetic oligonucleotide
  Antisense strand to SEQ ID NO: 1643941
ugugcaggcacauaugcac

SEQ ID NO: 1643943 - RNA, 19 nt, Artificial Sequence
  Description of Artificial Sequence: Synthetic oligonucleotide
  Sense strand starting at position 398 of SEQ ID NO: 1561062
ugcauaugugccugcacau

SEQ ID NO: 1643944 - RNA, 19 nt, Artificial Sequence
  Description of Artificial Sequence: Synthetic oligonucleotide
  Antisense strand to SEQ ID NO: 1643943
augugcaggcacauaugca

SEQ ID NO: 1643945 - RNA, 19 nt, Artificial Sequence
  Description of Artificial Sequence: Synthetic oligonucleotide
  Sense strand starting at position 437 of SEQ ID NO: 1561062
gccagaaggcaguaauucu

SEQ ID NO: 1643946 - RNA, 19 nt, Artificial Sequence
  Description of Artificial Sequence: Synthetic oligonucleotide
  Antisense strand to SEQ ID NO: 1643945
agaauuacugccuucuggc

SEQ ID NO: 1643947 - RNA, 19 nt, Artificial Sequence
  Description of Artificial Sequence: Synthetic oligonucleotide
  Sense strand starting at position 444 of SEQ ID NO: 1561062
ggcaguaauucucauucuu

SEQ ID NO: 1643948 - RNA, 19 nt, Artificial Sequence
  Description of Artificial Sequence: Synthetic oligonucleotide
  Antisense strand to SEQ ID NO: 1643947
aagaaugagaauuacugcc

SEQ ID NO: 1643949 - RNA, 19 nt, Artificial Sequence
  Description of Artificial Sequence: Synthetic oligonucleotide
  Sense strand starting at position 549 of SEQ ID NO: 1561062
ggaggucuuuccuaccuau

SEQ ID NO: 1643950 - RNA, 19 nt, Artificial Sequence
  Description of Artificial Sequence: Synthetic oligonucleotide
  Antisense strand to SEQ ID NO: 1643949
auagguaggaaagaccucc

SEQ ID NO: 1643951 - RNA, 19 nt, Artificial Sequence
  Description of Artificial Sequence: Synthetic oligonucleotide
  Sense strand starting at position 583 of SEQ ID NO: 1561062
ggugauggucuguggagca

SEQ ID NO: 1643952 - RNA, 19 nt, Artificial Sequence
  Description of Artificial Sequence: Synthetic oligonucleotide
  Antisense strand to SEQ ID NO: 1643951
ugcuccacagaccaucacc

SEQ ID NO: 1643953 - RNA, 19 nt, Artificial Sequence
  Description of Artificial Sequence: Synthetic oligonucleotide
  Sense strand starting at position 593 of SEQ ID NO: 1561062
uguggagcaucugggauaa

SEQ ID NO: 1643954 - RNA, 19 nt, Artificial Sequence
  Description of Artificial Sequence: Synthetic oligonucleotide
  Antisense strand to SEQ ID NO: 1643953
uuaucccagaugcuccaca

SEQ ID NO: 1643955 - RNA, 19 nt, Artificial Sequence
  Description of Artificial Sequence: Synthetic oligonucleotide
  Sense strand starting at position 752 of SEQ ID NO: 1561062
acacaagguuucucaaguu

SEQ ID NO: 1643956 - RNA, 19 nt, Artificial Sequence
  Description of Artificial Sequence: Synthetic oligonucleotide
  Antisense strand to SEQ ID NO: 1643955
aacuugagaaaccuugugu

SEQ ID NO: 1643957 - RNA, 19 nt, Artificial Sequence
  Description of Artificial Sequence: Synthetic oligonucleotide
  Sense strand starting at position 932 of SEQ ID NO: 1561062
ggcguuucaucugacaggu

SEQ ID NO: 1643958 - RNA, 19 nt, Artificial Sequence
  Description of Artificial Sequence: Synthetic oligonucleotide
  Antisense strand to SEQ ID NO: 1643957
accugucagaugaaacgcc

SEQ ID NO: 1643959 - RNA, 19 nt, Artificial Sequence
  Description of Artificial Sequence: Synthetic oligonucleotide
  Sense strand starting at position 934 of SEQ ID NO: 1561062
cguuucaucugacagguga

SEQ ID NO: 1643960 - RNA, 19 nt, Artificial Sequence
  Description of Artificial Sequence: Synthetic oligonucleotide
  Antisense strand to SEQ ID NO: 1643959
ucaccugucagaugaaacg

SEQ ID NO: 1643961 - RNA, 19 nt, Artificial Sequence
  Description of Artificial Sequence: Synthetic oligonucleotide
  Sense strand starting at position 938 of SEQ ID NO: 1561062
ucaucugacaggugagguu

SEQ ID NO: 1643962 - RNA, 19 nt, Artificial Sequence
  Description of Artificial Sequence: Synthetic oligonucleotide
  Antisense strand to SEQ ID NO: 1643961
aaccucaccugucagauga

SEQ ID NO: 1643963 - RNA, 19 nt, Artificial Sequence
  Description of Artificial Sequence: Synthetic oligonucleotide
  Sense strand starting at position 2218 of SEQ ID NO: 1561062
aagggcuuguccuggugau

SEQ ID NO: 1643964 - RNA, 19 nt, Artificial Sequence
  Description of Artificial Sequence: Synthetic oligonucleotide
  Antisense strand to SEQ ID NO: 1643963
aucaccaggacaagcccuu

SEQ ID NO: 1643965 - RNA, 19 nt, Artificial Sequence
  Description of Artificial Sequence: Synthetic oligonucleotide
  Sense strand starting at position 2274 of SEQ ID NO: 1561062
augaaacauucuggaaaua

SEQ ID NO: 1643966 - RNA, 19 nt, Artificial Sequence
  Description of Artificial Sequence: Synthetic oligonucleotide
  Antisense strand to SEQ ID NO: 1643965
uauuuccagaauguuucau

SEQ ID NO: 1643967 - RNA, 19 nt, Artificial Sequence
  Description of Artificial Sequence: Synthetic oligonucleotide
  Sense strand starting at position 2693 of SEQ ID NO: 1561062
gaagcacucuuauguuaag

SEQ ID NO: 1643968 - RNA, 19 nt, Artificial Sequence
  Description of Artificial Sequence: Synthetic oligonucleotide
  Antisense strand to SEQ ID NO: 1643967
cuuaacauaagagugcuuc

SEQ ID NO: 1643969 - RNA, 19 nt, Artificial Sequence
  Description of Artificial Sequence: Synthetic oligonucleotide
  Sense strand starting at position 2696 of SEQ ID NO: 1561062
gcacucuuauguuaagaag

SEQ ID NO: 1643970 - RNA, 19 nt, Artificial Sequence
  Description of Artificial Sequence: Synthetic oligonucleotide
  Antisense strand to SEQ ID NO: 1643969
cuucuuaacauaagagugc

SEQ ID NO: 1643971 - RNA, 19 nt, Artificial Sequence
  Description of Artificial Sequence: Synthetic oligonucleotide
  Sense strand starting at position 2699 of SEQ ID NO: 1561062
cucuuauguuaagaagauu

SEQ ID NO: 1643972 - RNA, 19 nt, Artificial Sequence
  Description of Artificial Sequence: Synthetic oligonucleotide
  Antisense strand to SEQ ID NO: 1643971
aaucuucuuaacauaagag

SEQ ID NO: 1643973 - RNA, 19 nt, Artificial Sequence
  Description of Artificial Sequence: Synthetic oligonucleotide
  Sense strand starting at position 2708 of SEQ ID NO: 1561062
uaagaagauucuugggaca

SEQ ID NO: 1643974 - RNA, 19 nt, Artificial Sequence
  Description of Artificial Sequence: Synthetic oligonucleotide
  Antisense strand to SEQ ID NO: 1643973
ugucccaagaaucuucuua

SEQ ID NO: 1643975 - RNA, 19 nt, Artificial Sequence
  Description of Artificial Sequence: Synthetic oligonucleotide
  Sense strand starting at position 2710 of SEQ ID NO: 1561062
agaagauucuugggacaca

SEQ ID NO: 1643976 - RNA, 19 nt, Artificial Sequence
  Description of Artificial Sequence: Synthetic oligonucleotide
  Antisense strand to SEQ ID NO: 1643975
ugugucccaagaaucuucu

SEQ ID NO: 1643977 - RNA, 19 nt, Artificial Sequence
  Description of Artificial Sequence: Synthetic oligonucleotide
  Sense strand starting at position 2737 of SEQ ID NO: 1561062
cacuuugggucuugaugga

SEQ ID NO: 1643978 - RNA, 19 nt, Artificial Sequence
  Description of Artificial Sequence: Synthetic oligonucleotide
  Antisense strand to SEQ ID NO: 1643977
uccaucaagacccaaagug

SEQ ID NO: 1643979 - RNA, 19 nt, Artificial Sequence
  Description of Artificial Sequence: Synthetic oligonucleotide
  Sense strand starting at position 2801 of SEQ ID NO: 1561062
gccucauccuauuaaggag

SEQ ID NO: 1643980 - RNA, 19 nt, Artificial Sequence
  Description of Artificial Sequence: Synthetic oligonucleotide
  Antisense strand to SEQ ID NO: 1643979
cuccuuaauaggaugaggc

SEQ ID NO: 1643981 - RNA, 19 nt, Artificial Sequence
  Description of Artificial Sequence: Synthetic oligonucleotide
  Sense strand starting at position 2847 of SEQ ID NO: 1561062
gcugaugaagcucaaucuu

SEQ ID NO: 1643982 - RNA, 19 nt, Artificial Sequence
  Description of Artificial Sequence: Synthetic oligonucleotide
  Antisense strand to SEQ ID NO: 1643981
aagauugagcuucaucagc

SEQ ID NO: 1643983 - RNA, 19 nt, Artificial Sequence
  Description of Artificial Sequence: Synthetic oligonucleotide
  Sense strand starting at position 2913 of SEQ ID NO: 1561062
ccacgcaauguguggaaau

SEQ ID NO: 1643984 - RNA, 19 nt, Artificial Sequence
  Description of Artificial Sequence: Synthetic oligonucleotide
  Antisense strand to SEQ ID NO: 1643983
auuuccacacauugcgugg

SEQ ID NO: 1643985 - RNA, 19 nt, Artificial Sequence
  Description of Artificial Sequence: Synthetic oligonucleotide
  Sense strand starting at position 2914 of SEQ ID NO: 1561062
cacgcaauguguggaaaua

SEQ ID NO: 1643986 - RNA, 19 nt, Artificial Sequence
  Description of Artificial Sequence: Synthetic oligonucleotide
  Antisense strand to SEQ ID NO: 1643985
uauuuccacacauugcgug

SEQ ID NO: 1643987 - RNA, 19 nt, Artificial Sequence
  Description of Artificial Sequence: Synthetic oligonucleotide
  Sense strand starting at position 2915 of SEQ ID NO: 1561062
acgcaauguguggaaauaa

SEQ ID NO: 1643988 - RNA, 19 nt, Artificial Sequence
  Description of Artificial Sequence: Synthetic oligonucleotide
  Antisense strand to SEQ ID NO: 1643987
uuauuuccacacauugcgu

SEQ ID NO: 1643989 - RNA, 19 nt, Artificial Sequence
  Description of Artificial Sequence: Synthetic oligonucleotide
  Sense strand starting at position 3010 of SEQ ID NO: 1561062
ucacauuccgauuaaugug

SEQ ID NO: 1643990 - RNA, 19 nt, Artificial Sequence
  Description of Artificial Sequence: Synthetic oligonucleotide
  Antisense strand to SEQ ID NO: 1643989
cacauuaaucggaauguga

SEQ ID NO: 1643991 - RNA, 19 nt, Artificial Sequence
  Description of Artificial Sequence: Synthetic oligonucleotide
  Sense strand starting at position 3016 of SEQ ID NO: 1561062
uccgauuaauguguuguga

SEQ ID NO: 1643992 - RNA, 19 nt, Artificial Sequence
  Description of Artificial Sequence: Synthetic oligonucleotide
  Antisense strand to SEQ ID NO: 1643991
ucacaacacauuaaucgga

SEQ ID NO: 1643993 - RNA, 19 nt, Artificial Sequence
  Description of Artificial Sequence: Synthetic oligonucleotide
  Sense strand starting at position 3018 of SEQ ID NO: 1561062
cgauuaauguguugugaga

SEQ ID NO: 1643994 - RNA, 19 nt, Artificial Sequence
  Description of Artificial Sequence: Synthetic oligonucleotide
  Antisense strand to SEQ ID NO: 1643993
ucucacaacacauuaaucg

SEQ ID NO: 1643995 - RNA, 19 nt, Artificial Sequence
  Description of Artificial Sequence: Synthetic oligonucleotide
  Sense strand starting at position 3020 of SEQ ID NO: 1561062
auuaauguguugugagaau

SEQ ID NO: 1643996 - RNA, 19 nt, Artificial Sequence
  Description of Artificial Sequence: Synthetic oligonucleotide
  Antisense strand to SEQ ID NO: 1643995
auucucacaacacauuaau

SEQ ID NO: 1643997 - RNA, 19 nt, Artificial Sequence
  Description of Artificial Sequence: Synthetic oligonucleotide
  Sense strand starting at position 3154 of SEQ ID NO: 1561062
ccaauauuggccggguaca

SEQ ID NO: 1643998 - RNA, 19 nt, Artificial Sequence
  Description of Artificial Sequence: Synthetic oligonucleotide
  Antisense strand to SEQ ID NO: 1643997
uguacccggccaauauugg

SEQ ID NO: 1643999 - RNA, 19 nt, Artificial Sequence
  Description of Artificial Sequence: Synthetic oligonucleotide
  Sense strand starting at position 3533 of SEQ ID NO: 1561062
gguagacuauacuauuaac

SEQ ID NO: 1644000 - RNA, 19 nt, Artificial Sequence
  Description of Artificial Sequence: Synthetic oligonucleotide
  Antisense strand to SEQ ID NO: 1643999
guuaauaguauagucuacc

SEQ ID NO: 1644001 - RNA, 19 nt, Artificial Sequence
  Description of Artificial Sequence: Synthetic oligonucleotide
  Sense strand starting at position 3636 of SEQ ID NO: 1561062
ucauccuaugugugccaaa

SEQ ID NO: 1644002 - RNA, 19 nt, Artificial Sequence
  Description of Artificial Sequence: Synthetic oligonucleotide
  Antisense strand to SEQ ID NO: 1644001
uuuggcacacauaggauga

SEQ ID NO: 1644003 - RNA, 19 nt, Artificial Sequence
  Description of Artificial Sequence: Synthetic oligonucleotide
  Sense strand starting at position 3639 of SEQ ID NO: 1561062
uccuaugugugccaaauuu

SEQ ID NO: 1644004 - RNA, 19 nt, Artificial Sequence
  Description of Artificial Sequence: Synthetic oligonucleotide
  Antisense strand to SEQ ID NO: 1644003
aaauuuggcacacauagga

SEQ ID NO: 1644005 - RNA, 19 nt, Artificial Sequence
  Description of Artificial Sequence: Synthetic oligonucleotide
  Sense strand starting at position 3805 of SEQ ID NO: 1561062
uugcaagacucuugauauc

SEQ ID NO: 1644006 - RNA, 19 nt, Artificial Sequence
  Description of Artificial Sequence: Synthetic oligonucleotide
  Antisense strand to SEQ ID NO: 1644005
gauaucaagagucuugcaa

SEQ ID NO: 1644007 - RNA, 19 nt, Artificial Sequence
  Description of Artificial Sequence: Synthetic oligonucleotide
  Sense strand starting at position 3815 of SEQ ID NO: 1561062
cuugauaucugaucgccuu

SEQ ID NO: 1644008 - RNA, 19 nt, Artificial Sequence
  Description of Artificial Sequence: Synthetic oligonucleotide
  Antisense strand to SEQ ID NO: 1644007
aaggcgaucagauaucaag

SEQ ID NO: 1644009 - RNA, 19 nt, Artificial Sequence
  Description of Artificial Sequence: Synthetic oligonucleotide
  Sense strand starting at position 3865 of SEQ ID NO: 1561062
cuugguaucugaucaugcu

SEQ ID NO: 1644010 - RNA, 19 nt, Artificial Sequence
  Description of Artificial Sequence: Synthetic oligonucleotide
  Antisense strand to SEQ ID NO: 1644009
agcaugaucagauaccaag

SEQ ID NO: 1644011 - RNA, 19 nt, Artificial Sequence
  Description of Artificial Sequence: Synthetic oligonucleotide
  Sense strand starting at position 3919 of SEQ ID NO: 1561062
uagaaagaaucccgguauc

SEQ ID NO: 1644012 - RNA, 19 nt, Artificial Sequence
  Description of Artificial Sequence: Synthetic oligonucleotide
  Antisense strand to SEQ ID NO: 1644011
gauaccgggauucuuucua

SEQ ID NO: 1644013 - RNA, 19 nt, Artificial Sequence
  Description of Artificial Sequence: Synthetic oligonucleotide
  Sense strand starting at position 3922 of SEQ ID NO: 1561062
aaagaaucccgguaucuuc

SEQ ID NO: 1644014 - RNA, 19 nt, Artificial Sequence
  Description of Artificial Sequence: Synthetic oligonucleotide
  Antisense strand to SEQ ID NO: 1644013
gaagauaccgggauucuuu

SEQ ID NO: 1644015 - RNA, 19 nt, Artificial Sequence
  Description of Artificial Sequence: Synthetic oligonucleotide
  Sense strand starting at position 1194 of SEQ ID NO: 1561063
gcccaacaugcuuaauugu

SEQ ID NO: 1644016 - RNA, 19 nt, Artificial Sequence
  Description of Artificial Sequence: Synthetic oligonucleotide
  Antisense strand to SEQ ID NO: 1644015
acaauuaagcauguugggc

SEQ ID NO: 1644017 - RNA, 19 nt, Artificial Sequence
  Description of Artificial Sequence: Synthetic oligonucleotide
  Sense strand starting at position 1327 of SEQ ID NO: 1561063
gaagauguauaaccguauu

SEQ ID NO: 1644018 - RNA, 19 nt, Artificial Sequence
  Description of Artificial Sequence: Synthetic oligonucleotide
  Antisense strand to SEQ ID NO: 1644017
aauacgguuauacaucuuc

SEQ ID NO: 1644019 - RNA, 19 nt, Artificial Sequence
  Description of Artificial Sequence: Synthetic oligonucleotide
  Sense strand starting at position 1859 of SEQ ID NO: 1561063
gcgugaucucggcuguuca

SEQ ID NO: 1644020 - RNA, 19 nt, Artificial Sequence
  Description of Artificial Sequence: Synthetic oligonucleotide
  Antisense strand to SEQ ID NO: 1644019
ugaacagccgagaucacgc

SEQ ID NO: 1644021 - RNA, 19 nt, Artificial Sequence
  Description of Artificial Sequence: Synthetic oligonucleotide
  Sense strand starting at position 2014 of SEQ ID NO: 1561063
gcuuccugugagcaacaga

SEQ ID NO: 1644022 - RNA, 19 nt, Artificial Sequence
  Description of Artificial Sequence: Synthetic oligonucleotide
  Antisense strand to SEQ ID NO: 1644021
ucuguugcucacaggaagc

SEQ ID NO: 1644023 - RNA, 19 nt, Artificial Sequence
  Description of Artificial Sequence: Synthetic oligonucleotide
  Sense strand starting at position 2055 of SEQ ID NO: 1561063
gcaucugaggaaugcgaaa

SEQ ID NO: 1644024 - RNA, 19 nt, Artificial Sequence
  Description of Artificial Sequence: Synthetic oligonucleotide
  Antisense strand to SEQ ID NO: 1644023
uuucgcauuccucagaugc

SEQ ID NO: 1644025 - RNA, 19 nt, Artificial Sequence
  Description of Artificial Sequence: Synthetic oligonucleotide
  Sense strand starting at position 2187 of SEQ ID NO: 1561063
aagucaguccugcaggaua

SEQ ID NO: 1644026 - RNA, 19 nt, Artificial Sequence
  Description of Artificial Sequence: Synthetic oligonucleotide
  Antisense strand to SEQ ID NO: 1644025
uauccugcaggacugacuu

SEQ ID NO: 1644027 - RNA, 19 nt, Artificial Sequence
  Description of Artificial Sequence: Synthetic oligonucleotide
  Sense strand starting at position 2271 of SEQ ID NO: 1561063
gugggugauagccacucau

SEQ ID NO: 1644028 - RNA, 19 nt, Artificial Sequence
  Description of Artificial Sequence: Synthetic oligonucleotide
  Antisense strand to SEQ ID NO: 1644027
augaguggcuaucacccac

SEQ ID NO: 1644029 - RNA, 19 nt, Artificial Sequence
  Description of Artificial Sequence: Synthetic oligonucleotide
  Sense strand starting at position 2384 of SEQ ID NO: 1561063
ggucccuacccuugagaug

SEQ ID NO: 1644030 - RNA, 19 nt, Artificial Sequence
  Description of Artificial Sequence: Synthetic oligonucleotide
  Antisense strand to SEQ ID NO: 1644029
caucucaaggguagggacc

SEQ ID NO: 1644031 - RNA, 19 nt, Artificial Sequence
  Description of Artificial Sequence: Synthetic oligonucleotide
  Sense strand starting at position 2385 of SEQ ID NO: 1561063
gucccuacccuugagauga

SEQ ID NO: 1644032 - RNA, 19 nt, Artificial Sequence
  Description of Artificial Sequence: Synthetic oligonucleotide
  Antisense strand to SEQ ID NO: 1644031
ucaucucaaggguagggac

SEQ ID NO: 1644033 - RNA, 19 nt, Artificial Sequence
  Description of Artificial Sequence: Synthetic oligonucleotide
  Sense strand starting at position 2542 of SEQ ID NO: 1561063
cagcuaguacgcugauuua

SEQ ID NO: 1644034 - RNA, 19 nt, Artificial Sequence
  Description of Artificial Sequence: Synthetic oligonucleotide
  Antisense strand to SEQ ID NO: 1644033
uaaaucagcguacuagcug

SEQ ID NO: 1644035 - RNA, 19 nt, Artificial Sequence
  Description of Artificial Sequence: Synthetic oligonucleotide
  Sense strand starting at position 2733 of SEQ ID NO: 1561063
agcaauuucuuuccuguga

SEQ ID NO: 1644036 - RNA, 19 nt, Artificial Sequence
  Description of Artificial Sequence: Synthetic oligonucleotide
  Antisense strand to SEQ ID NO: 1644035
ucacaggaaagaaauugcu

SEQ ID NO: 1644037 - RNA, 19 nt, Artificial Sequence
  Description of Artificial Sequence: Synthetic oligonucleotide
  Sense strand starting at position 2734 of SEQ ID NO: 1561063
gcaauuucuuuccugugaa

SEQ ID NO: 1644038 - RNA, 19 nt, Artificial Sequence
  Description of Artificial Sequence: Synthetic oligonucleotide
  Antisense strand to SEQ ID NO: 1644037
uucacaggaaagaaauugc

SEQ ID NO: 1644039 - RNA, 19 nt, Artificial Sequence
  Description of Artificial Sequence: Synthetic oligonucleotide
  Sense strand starting at position 2786 of SEQ ID NO: 1561063
agacauauuucuggacaac

SEQ ID NO: 1644040 - RNA, 19 nt, Artificial Sequence
  Description of Artificial Sequence: Synthetic oligonucleotide
  Antisense strand to SEQ ID NO: 1644039
guuguccagaaauaugucu

SEQ ID NO: 1644041 - RNA, 19 nt, Artificial Sequence
  Description of Artificial Sequence: Synthetic oligonucleotide
  Sense strand starting at position 2894 of SEQ ID NO: 1561063
cucuaauaccuaugaggua

SEQ ID NO: 1644042 - RNA, 19 nt, Artificial Sequence
  Description of Artificial Sequence: Synthetic oligonucleotide
  Antisense strand to SEQ ID NO: 1644041
uaccucauagguauuagag

SEQ ID NO: 1644043 - RNA, 19 nt, Artificial Sequence
  Description of Artificial Sequence: Synthetic oligonucleotide
  Sense strand starting at position 2997 of SEQ ID NO: 1561063
augcguaaugauuauguca

SEQ ID NO: 1644044 - RNA, 19 nt, Artificial Sequence
  Description of Artificial Sequence: Synthetic oligonucleotide
  Antisense strand to SEQ ID NO: 1644043
ugacauaaucauuacgcau

SEQ ID NO: 1644045 - RNA, 19 nt, Artificial Sequence
  Description of Artificial Sequence: Synthetic oligonucleotide
  Sense strand starting at position 3000 of SEQ ID NO: 1561063
cguaaugauuaugucagga

SEQ ID NO: 1644046 - RNA, 19 nt, Artificial Sequence
  Description of Artificial Sequence: Synthetic oligonucleotide
  Antisense strand to SEQ ID NO: 1644045
uccugacauaaucauuacg

SEQ ID NO: 1644047 - RNA, 19 nt, Artificial Sequence
  Description of Artificial Sequence: Synthetic oligonucleotide
  Sense strand starting at position 3016 of SEQ ID NO: 1561063
ggauauuuagaguguccgu

SEQ ID NO: 1644048 - RNA, 19 nt, Artificial Sequence
  Description of Artificial Sequence: Synthetic oligonucleotide
  Antisense strand to SEQ ID NO: 1644047
acggacacucuaaauaucc

SEQ ID NO: 1644049 - RNA, 19 nt, Artificial Sequence
  Description of Artificial Sequence: Synthetic oligonucleotide
  Sense strand starting at position 3080 of SEQ ID NO: 1561063
gcucucuaacgcugaauuu

SEQ ID NO: 1644050 - RNA, 19 nt, Artificial Sequence
  Description of Artificial Sequence: Synthetic oligonucleotide
  Antisense strand to SEQ ID NO: 1644049
aaauucagcguuagagagc

SEQ ID NO: 1644051 - RNA, 19 nt, Artificial Sequence
  Description of Artificial Sequence: Synthetic oligonucleotide
  Sense strand starting at position 3414 of SEQ ID NO: 1561063
gguuccauaucucugauau

SEQ ID NO: 1644052 - RNA, 19 nt, Artificial Sequence
  Description of Artificial Sequence: Synthetic oligonucleotide
  Antisense strand to SEQ ID NO: 1644051
auaucagagauauggaacc

SEQ ID NO: 1644053 - RNA, 19 nt, Artificial Sequence
  Description of Artificial Sequence: Synthetic oligonucleotide
  Sense strand starting at position 3415 of SEQ ID NO: 1561063
guuccauaucucugauauu

SEQ ID NO: 1644054 - RNA, 19 nt, Artificial Sequence
  Description of Artificial Sequence: Synthetic oligonucleotide
  Antisense strand to SEQ ID NO: 1644053
aauaucagagauauggaac

SEQ ID NO: 1644055 - RNA, 19 nt, Artificial Sequence
  Description of Artificial Sequence: Synthetic oligonucleotide
  Sense strand starting at position 3432 of SEQ ID NO: 1561063
uugugaauagugcagcaaa

SEQ ID NO: 1644056 - RNA, 19 nt, Artificial Sequence
  Description of Artificial Sequence: Synthetic oligonucleotide
  Antisense strand to SEQ ID NO: 1644055
uuugcugcacuauucacaa

SEQ ID NO: 1644057 - RNA, 19 nt, Artificial Sequence
  Description of Artificial Sequence: Synthetic oligonucleotide
  Sense strand starting at position 3456 of SEQ ID NO: 1561063
ugugaaugcagguaucucu

SEQ ID NO: 1644058 - RNA, 19 nt, Artificial Sequence
  Description of Artificial Sequence: Synthetic oligonucleotide
  Antisense strand to SEQ ID NO: 1644057
agagauaccugcauucaca

SEQ ID NO: 1644059 - RNA, 19 nt, Artificial Sequence
  Description of Artificial Sequence: Synthetic oligonucleotide
  Sense strand starting at position 3516 of SEQ ID NO: 1561063
gugggauugcuugagugau

SEQ ID NO: 1644060 - RNA, 19 nt, Artificial Sequence
  Description of Artificial Sequence: Synthetic oligonucleotide
  Antisense strand to SEQ ID NO: 1644059
aucacucaagcaaucccac

SEQ ID NO: 1644061 - RNA, 19 nt, Artificial Sequence
  Description of Artificial Sequence: Synthetic oligonucleotide
  Sense strand starting at position 3520 of SEQ ID NO: 1561063
gauugcuugagugaucgaa

SEQ ID NO: 1644062 - RNA, 19 nt, Artificial Sequence
  Description of Artificial Sequence: Synthetic oligonucleotide
  Antisense strand to SEQ ID NO: 1644061
uucgaucacucaagcaauc

SEQ ID NO: 1644063 - RNA, 19 nt, Artificial Sequence
  Description of Artificial Sequence: Synthetic oligonucleotide
  Sense strand starting at position 3524 of SEQ ID NO: 1561063
gcuugagugaucgaauagu

SEQ ID NO: 1644064 - RNA, 19 nt, Artificial Sequence
  Description of Artificial Sequence: Synthetic oligonucleotide
  Antisense strand to SEQ ID NO: 1644063
acuauucgaucacucaagc

SEQ ID NO: 1644065 - RNA, 19 nt, Artificial Sequence
  Description of Artificial Sequence: Synthetic oligonucleotide
  Sense strand starting at position 3562 of SEQ ID NO: 1561063
gagaaauguccauaguguu

SEQ ID NO: 1644066 - RNA, 19 nt, Artificial Sequence
  Description of Artificial Sequence: Synthetic oligonucleotide
  Antisense strand to SEQ ID NO: 1644065
aacacuauggacauuucuc

SEQ ID NO: 1644067 - RNA, 19 nt, Artificial Sequence
  Description of Artificial Sequence: Synthetic oligonucleotide
  Sense strand starting at position 3621 of SEQ ID NO: 1561063
acagaagaguuaucuuucu

SEQ ID NO: 1644068 - RNA, 19 nt, Artificial Sequence
  Description of Artificial Sequence: Synthetic oligonucleotide
  Antisense strand to SEQ ID NO: 1644067
agaaagauaacucuucugu

SEQ ID NO: 1644069 - RNA, 19 nt, Artificial Sequence
  Description of Artificial Sequence: Synthetic oligonucleotide
  Sense strand starting at position 3626 of SEQ ID NO: 1561063
agaguuaucuuucuccuca

SEQ ID NO: 1644070 - RNA, 19 nt, Artificial Sequence
  Description of Artificial Sequence: Synthetic oligonucleotide
  Antisense strand to SEQ ID NO: 1644069
ugaggagaaagauaacucu

SEQ ID NO: 1644071 - RNA, 19 nt, Artificial Sequence
  Description of Artificial Sequence: Synthetic oligonucleotide
  Sense strand starting at position 3683 of SEQ ID NO: 1561063
uagucauucugacugggua

SEQ ID NO: 1644072 - RNA, 19 nt, Artificial Sequence
  Description of Artificial Sequence: Synthetic oligonucleotide
  Antisense strand to SEQ ID NO: 1644071
uacccagucagaaugacua

SEQ ID NO: 1644073 - RNA, 19 nt, Artificial Sequence
  Description of Artificial Sequence: Synthetic oligonucleotide
  Sense strand starting at position 3684 of SEQ ID NO: 1561063
agucauucugacuggguaa

SEQ ID NO: 1644074 - RNA, 19 nt, Artificial Sequence
  Description of Artificial Sequence: Synthetic oligonucleotide
  Antisense strand to SEQ ID NO: 1644073
uuacccagucagaaugacu

SEQ ID NO: 1644075 - RNA, 19 nt, Artificial Sequence
  Description of Artificial Sequence: Synthetic oligonucleotide
  Sense strand starting at position 3686 of SEQ ID NO: 1561063
ucauucugacuggguaaga

SEQ ID NO: 1644076 - RNA, 19 nt, Artificial Sequence
  Description of Artificial Sequence: Synthetic oligonucleotide
  Antisense strand to SEQ ID NO: 1644075
ucuuacccagucagaauga

SEQ ID NO: 1644077 - RNA, 19 nt, Artificial Sequence
  Description of Artificial Sequence: Synthetic oligonucleotide
  Sense strand starting at position 3696 of SEQ ID NO: 1561063
uggguaagacgguaucuca

SEQ ID NO: 1644078 - RNA, 19 nt, Artificial Sequence
  Description of Artificial Sequence: Synthetic oligonucleotide
  Antisense strand to SEQ ID NO: 1644077
ugagauaccgucuuaccca

SEQ ID NO: 1644079 - RNA, 19 nt, Artificial Sequence
  Description of Artificial Sequence: Synthetic oligonucleotide
  Sense strand starting at position 3744 of SEQ ID NO: 1561063
auuagugacgcugaccauu

SEQ ID NO: 1644080 - RNA, 19 nt, Artificial Sequence
  Description of Artificial Sequence: Synthetic oligonucleotide
  Antisense strand to SEQ ID NO: 1644079
aauggucagcgucacuaau

SEQ ID NO: 1644081 - RNA, 19 nt, Artificial Sequence
  Description of Artificial Sequence: Synthetic oligonucleotide
  Sense strand starting at position 3765 of SEQ ID NO: 1561063
gucguauuggcuguucuua

SEQ ID NO: 1644082 - RNA, 19 nt, Artificial Sequence
  Description of Artificial Sequence: Synthetic oligonucleotide
  Antisense strand to SEQ ID NO: 1644081
uaagaacagccaauacgac

SEQ ID NO: 1644083 - RNA, 19 nt, Artificial Sequence
  Description of Artificial Sequence: Synthetic oligonucleotide
  Sense strand starting at position 3766 of SEQ ID NO: 1561063
ucguauuggcuguucuuau

SEQ ID NO: 1644084 - RNA, 19 nt, Artificial Sequence
  Description of Artificial Sequence: Synthetic oligonucleotide
  Antisense strand to SEQ ID NO: 1644083
auaagaacagccaauacga

SEQ ID NO: 1644085 - RNA, 19 nt, Artificial Sequence
  Description of Artificial Sequence: Synthetic oligonucleotide
  Sense strand starting at position 3779 of SEQ ID NO: 1561063
ucuuauguauucuuugaga

SEQ ID NO: 1644086 - RNA, 19 nt, Artificial Sequence
  Description of Artificial Sequence: Synthetic oligonucleotide
  Antisense strand to SEQ ID NO: 1644085
ucucaaagaauacauaaga

SEQ ID NO: 1644087 - RNA, 19 nt, Artificial Sequence
  Description of Artificial Sequence: Synthetic oligonucleotide
  Sense strand starting at position 3781 of SEQ ID NO: 1561063
uuauguauucuuugagaac

SEQ ID NO: 1644088 - RNA, 19 nt, Artificial Sequence
  Description of Artificial Sequence: Synthetic oligonucleotide
  Antisense strand to SEQ ID NO: 1644087
guucucaaagaauacauaa

SEQ ID NO: 1644089 - RNA, 19 nt, Artificial Sequence
  Description of Artificial Sequence: Synthetic oligonucleotide
  Sense strand starting at position 3869 of SEQ ID NO: 1561063
ccuuguauagucuggauau

SEQ ID NO: 1644090 - RNA, 19 nt, Artificial Sequence
  Description of Artificial Sequence: Synthetic oligonucleotide
  Antisense strand to SEQ ID NO: 1644089
auauccagacuauacaagg

SEQ ID NO: 1644091 - RNA, 19 nt, Artificial Sequence
  Description of Artificial Sequence: Synthetic oligonucleotide
  Sense strand starting at position 3900 of SEQ ID NO: 1561063
agaagaauaguuugcgaau

SEQ ID NO: 1644092 - RNA, 19 nt, Artificial Sequence
  Description of Artificial Sequence: Synthetic oligonucleotide
  Antisense strand to SEQ ID NO: 1644091
auucgcaaacuauucuucu

SEQ ID NO: 1644093 - RNA, 19 nt, Artificial Sequence
  Description of Artificial Sequence: Synthetic oligonucleotide
  Sense strand starting at position 3901 of SEQ ID NO: 1561063
gaagaauaguuugcgaaua

SEQ ID NO: 1644094 - RNA, 19 nt, Artificial Sequence
  Description of Artificial Sequence: Synthetic oligonucleotide
  Antisense strand to SEQ ID NO: 1644093
uauucgcaaacuauucuuc

SEQ ID NO: 1644095 - RNA, 19 nt, Artificial Sequence
  Description of Artificial Sequence: Synthetic oligonucleotide
  Sense strand starting at position 89 of SEQ ID NO: 1561064
ugugccuuaucugucacau

SEQ ID NO: 1644096 - RNA, 19 nt, Artificial Sequence
  Description of Artificial Sequence: Synthetic oligonucleotide
  Antisense strand to SEQ ID NO: 1644095
augugacagauaaggcaca

SEQ ID NO: 1644097 - RNA, 19 nt, Artificial Sequence
  Description of Artificial Sequence: Synthetic oligonucleotide
  Sense strand starting at position 165 of SEQ ID NO: 1561064
aguaguaguuccucaaauc

SEQ ID NO: 1644098 - RNA, 19 nt, Artificial Sequence
  Description of Artificial Sequence: Synthetic oligonucleotide
  Antisense strand to SEQ ID NO: 1644097
gauuugaggaacuacuacu

SEQ ID NO: 1644099 - RNA, 19 nt, Artificial Sequence
  Description of Artificial Sequence: Synthetic oligonucleotide
  Sense strand starting at position 273 of SEQ ID NO: 1561064
uuccauuugggauguuugu

SEQ ID NO: 1644100 - RNA, 19 nt, Artificial Sequence
  Description of Artificial Sequence: Synthetic oligonucleotide
  Antisense strand to SEQ ID NO: 1644099
acaaacaucccaaauggaa

SEQ ID NO: 1644101 - RNA, 19 nt, Artificial Sequence
  Description of Artificial Sequence: Synthetic oligonucleotide
  Sense strand starting at position 299 of SEQ ID NO: 1561064
ggauuauuccauuguauau

SEQ ID NO: 1644102 - RNA, 19 nt, Artificial Sequence
  Description of Artificial Sequence: Synthetic oligonucleotide
  Antisense strand to SEQ ID NO: 1644101
auauacaauggaauaaucc

SEQ ID NO: 1644103 - RNA, 19 nt, Artificial Sequence
  Description of Artificial Sequence: Synthetic oligonucleotide
  Sense strand starting at position 309 of SEQ ID NO: 1561064
auuguauauugaucccuuu

SEQ ID NO: 1644104 - RNA, 19 nt, Artificial Sequence
  Description of Artificial Sequence: Synthetic oligonucleotide
  Antisense strand to SEQ ID NO: 1644103
aaagggaucaauauacaau

SEQ ID NO: 1644105 - RNA, 19 nt, Artificial Sequence
  Description of Artificial Sequence: Synthetic oligonucleotide
  Sense strand starting at position 312 of SEQ ID NO: 1561064
guauauugaucccuuucuu

SEQ ID NO: 1644106 - RNA, 19 nt, Artificial Sequence
  Description of Artificial Sequence: Synthetic oligonucleotide
  Antisense strand to SEQ ID NO: 1644105
aagaaagggaucaauauac

SEQ ID NO: 1644107 - RNA, 19 nt, Artificial Sequence
  Description of Artificial Sequence: Synthetic oligonucleotide
  Sense strand starting at position 350 of SEQ ID NO: 1561064
gggcuagagucaguucagu

SEQ ID NO: 1644108 - RNA, 19 nt, Artificial Sequence
  Description of Artificial Sequence: Synthetic oligonucleotide
  Antisense strand to SEQ ID NO: 1644107
acugaacugacucuagccc

SEQ ID NO: 1644109 - RNA, 19 nt, Artificial Sequence
  Description of Artificial Sequence: Synthetic oligonucleotide
  Sense strand starting at position 355 of SEQ ID NO: 1561064
agagucaguucaguuguaa

SEQ ID NO: 1644110 - RNA, 19 nt, Artificial Sequence
  Description of Artificial Sequence: Synthetic oligonucleotide
  Antisense strand to SEQ ID NO: 1644109
uuacaacugaacugacucu

SEQ ID NO: 1644111 - RNA, 19 nt, Artificial Sequence
  Description of Artificial Sequence: Synthetic oligonucleotide
  Sense strand starting at position 364 of SEQ ID NO: 1561064
ucaguuguaauaggguuaa

SEQ ID NO: 1644112 - RNA, 19 nt, Artificial Sequence
  Description of Artificial Sequence: Synthetic oligonucleotide
  Antisense strand to SEQ ID NO: 1644111
uuaacccuauuacaacuga

SEQ ID NO: 1644113 - RNA, 19 nt, Artificial Sequence
  Description of Artificial Sequence: Synthetic oligonucleotide
  Sense strand starting at position 573 of SEQ ID NO: 1561064
cuccuugugugagcagaga

SEQ ID NO: 1644114 - RNA, 19 nt, Artificial Sequence
  Description of Artificial Sequence: Synthetic oligonucleotide
  Antisense strand to SEQ ID NO: 1644113
ucucugcucacacaaggag

SEQ ID NO: 1644115 - RNA, 19 nt, Artificial Sequence
  Description of Artificial Sequence: Synthetic oligonucleotide
  Sense strand starting at position 900 of SEQ ID NO: 1561064
ugagcaucuaaauguggau

SEQ ID NO: 1644116 - RNA, 19 nt, Artificial Sequence
  Description of Artificial Sequence: Synthetic oligonucleotide
  Antisense strand to SEQ ID NO: 1644115
auccacauuuagaugcuca

SEQ ID NO: 1644117 - RNA, 19 nt, Artificial Sequence
  Description of Artificial Sequence: Synthetic oligonucleotide
  Sense strand starting at position 999 of SEQ ID NO: 1561064
uugguuugcgccaggaagu

SEQ ID NO: 1644118 - RNA, 19 nt, Artificial Sequence
  Description of Artificial Sequence: Synthetic oligonucleotide
  Antisense strand to SEQ ID NO: 1644117
acuuccuggcgcaaaccaa

SEQ ID NO: 1644119 - RNA, 19 nt, Artificial Sequence
  Description of Artificial Sequence: Synthetic oligonucleotide
  Sense strand starting at position 1103 of SEQ ID NO: 1561064
guuuaacaauguguggaga

SEQ ID NO: 1644120 - RNA, 19 nt, Artificial Sequence
  Description of Artificial Sequence: Synthetic oligonucleotide
  Antisense strand to SEQ ID NO: 1644119
ucuccacacauuguuaaac

SEQ ID NO: 1644121 - RNA, 19 nt, Artificial Sequence
  Description of Artificial Sequence: Synthetic oligonucleotide
  Sense strand starting at position 1104 of SEQ ID NO: 1561064
uuuaacaauguguggagau

SEQ ID NO: 1644122 - RNA, 19 nt, Artificial Sequence
  Description of Artificial Sequence: Synthetic oligonucleotide
  Antisense strand to SEQ ID NO: 1644121
aucuccacacauuguuaaa

SEQ ID NO: 1644123 - RNA, 19 nt, Artificial Sequence
  Description of Artificial Sequence: Synthetic oligonucleotide
  Sense strand starting at position 1116 of SEQ ID NO: 1561064
uggagauaauuguuauugu

SEQ ID NO: 1644124 - RNA, 19 nt, Artificial Sequence
  Description of Artificial Sequence: Synthetic oligonucleotide
  Antisense strand to SEQ ID NO: 1644123
acaauaacaauuaucucca

SEQ ID NO: 1644125 - RNA, 19 nt, Artificial Sequence
  Description of Artificial Sequence: Synthetic oligonucleotide
  Sense strand starting at position 1127 of SEQ ID NO: 1561064
guuauugucucacugcaug

SEQ ID NO: 1644126 - RNA, 19 nt, Artificial Sequence
  Description of Artificial Sequence: Synthetic oligonucleotide
  Antisense strand to SEQ ID NO: 1644125
caugcagugagacaauaac

SEQ ID NO: 1644127 - RNA, 19 nt, Artificial Sequence
  Description of Artificial Sequence: Synthetic oligonucleotide
  Sense strand starting at position 1491 of SEQ ID NO: 1561064
gugccuuaccugucacguu

SEQ ID NO: 1644128 - RNA, 19 nt, Artificial Sequence
  Description of Artificial Sequence: Synthetic oligonucleotide
  Antisense strand to SEQ ID NO: 1644127
aacgugacagguaaggcac

SEQ ID NO: 1644129 - RNA, 19 nt, Artificial Sequence
  Description of Artificial Sequence: Synthetic oligonucleotide
  Sense strand starting at position 2618 of SEQ ID NO: 1561064
ggcugugaaggugaggauu

SEQ ID NO: 1644130 - RNA, 19 nt, Artificial Sequence
  Description of Artificial Sequence: Synthetic oligonucleotide
  Antisense strand to SEQ ID NO: 1644129
aauccucaccuucacagcc

SEQ ID NO: 1644131 - RNA, 19 nt, Artificial Sequence
  Description of Artificial Sequence: Synthetic oligonucleotide
  Sense strand starting at position 2630 of SEQ ID NO: 1561064
gaggauugcgccuguugau

SEQ ID NO: 1644132 - RNA, 19 nt, Artificial Sequence
  Description of Artificial Sequence: Synthetic oligonucleotide
  Antisense strand to SEQ ID NO: 1644131
aucaacaggcgcaauccuc

SEQ ID NO: 1644133 - RNA, 19 nt, Artificial Sequence
  Description of Artificial Sequence: Synthetic oligonucleotide
  Sense strand starting at position 2699 of SEQ ID NO: 1561064
ugaggcugugauuguugua

SEQ ID NO: 1644134 - RNA, 19 nt, Artificial Sequence
  Description of Artificial Sequence: Synthetic oligonucleotide
  Antisense strand to SEQ ID NO: 1644133
uacaacaaucacagccuca

SEQ ID NO: 1644135 - RNA, 19 nt, Artificial Sequence
  Description of Artificial Sequence: Synthetic oligonucleotide
  Sense strand starting at position 2734 of SEQ ID NO: 1561064
acaggaaagucauaaggga

SEQ ID NO: 1644136 - RNA, 19 nt, Artificial Sequence
  Description of Artificial Sequence: Synthetic oligonucleotide
  Antisense strand to SEQ ID NO: 1644135
ucccuuaugacuuuccugu

SEQ ID NO: 1644137 - RNA, 19 nt, Artificial Sequence
  Description of Artificial Sequence: Synthetic oligonucleotide
  Sense strand starting at position 2968 of SEQ ID NO: 1561064
cucagugaugggcgcgauu

SEQ ID NO: 1644138 - RNA, 19 nt, Artificial Sequence
  Description of Artificial Sequence: Synthetic oligonucleotide
  Antisense strand to SEQ ID NO: 1644137
aaucgcgcccaucacugag

SEQ ID NO: 1644139 - RNA, 19 nt, Artificial Sequence
  Description of Artificial Sequence: Synthetic oligonucleotide
  Sense strand starting at position 3233 of SEQ ID NO: 1561064
ucaagucugucccuugaaa

SEQ ID NO: 1644140 - RNA, 19 nt, Artificial Sequence
  Description of Artificial Sequence: Synthetic oligonucleotide
  Antisense strand to SEQ ID NO: 1644139
uuucaagggacagacuuga

SEQ ID NO: 1644141 - RNA, 19 nt, Artificial Sequence
  Description of Artificial Sequence: Synthetic oligonucleotide
  Sense strand starting at position 3235 of SEQ ID NO: 1561064
aagucugucccuugaaaug

SEQ ID NO: 1644142 - RNA, 19 nt, Artificial Sequence
  Description of Artificial Sequence: Synthetic oligonucleotide
  Antisense strand to SEQ ID NO: 1644141
cauuucaagggacagacuu

SEQ ID NO: 1644143 - RNA, 19 nt, Artificial Sequence
  Description of Artificial Sequence: Synthetic oligonucleotide
  Sense strand starting at position 3351 of SEQ ID NO: 1561064
ugauaauagucuuccugcu

SEQ ID NO: 1644144 - RNA, 19 nt, Artificial Sequence
  Description of Artificial Sequence: Synthetic oligonucleotide
  Antisense strand to SEQ ID NO: 1644143
agcaggaagacuauuauca

SEQ ID NO: 1644145 - RNA, 19 nt, Artificial Sequence
  Description of Artificial Sequence: Synthetic oligonucleotide
  Sense strand starting at position 3391 of SEQ ID NO: 1561064
ggcacaugcugccuugaaa

SEQ ID NO: 1644146 - RNA, 19 nt, Artificial Sequence
  Description of Artificial Sequence: Synthetic oligonucleotide
  Antisense strand to SEQ ID NO: 1644145
uuucaaggcagcaugugcc

SEQ ID NO: 1644147 - RNA, 19 nt, Artificial Sequence
  Description of Artificial Sequence: Synthetic oligonucleotide
  Sense strand starting at position 3530 of SEQ ID NO: 1561064
uagagaucauuuggcugua

SEQ ID NO: 1644148 - RNA, 19 nt, Artificial Sequence
  Description of Artificial Sequence: Synthetic oligonucleotide
  Antisense strand to SEQ ID NO: 1644147
uacagccaaaugaucucua

SEQ ID NO: 1644149 - RNA, 19 nt, Artificial Sequence
  Description of Artificial Sequence: Synthetic oligonucleotide
  Sense strand starting at position 3542 of SEQ ID NO: 1561064
ggcuguaacgauugagaga

SEQ ID NO: 1644150 - RNA, 19 nt, Artificial Sequence
  Description of Artificial Sequence: Synthetic oligonucleotide
  Antisense strand to SEQ ID NO: 1644149
ucucucaaucguuacagcc

SEQ ID NO: 1644151 - RNA, 19 nt, Artificial Sequence
  Description of Artificial Sequence: Synthetic oligonucleotide
  Sense strand starting at position 3543 of SEQ ID NO: 1561064
gcuguaacgauugagagag

SEQ ID NO: 1644152 - RNA, 19 nt, Artificial Sequence
  Description of Artificial Sequence: Synthetic oligonucleotide
  Antisense strand to SEQ ID NO: 1644151
cucucucaaucguuacagc

SEQ ID NO: 1644153 - RNA, 19 nt, Artificial Sequence
  Description of Artificial Sequence: Synthetic oligonucleotide
  Sense strand starting at position 3626 of SEQ ID NO: 1561064
gcuaguaucucauccugca

SEQ ID NO: 1644154 - RNA, 19 nt, Artificial Sequence
  Description of Artificial Sequence: Synthetic oligonucleotide
  Antisense strand to SEQ ID NO: 1644153
ugcaggaugagauacuagc

SEQ ID NO: 1644155 - RNA, 19 nt, Artificial Sequence
  Description of Artificial Sequence: Synthetic oligonucleotide
  Sense strand starting at position 3696 of SEQ ID NO: 1561064
uaaggauauuugcaguauc

SEQ ID NO: 1644156 - RNA, 19 nt, Artificial Sequence
  Description of Artificial Sequence: Synthetic oligonucleotide
  Antisense strand to SEQ ID NO: 1644155
gauacugcaaauauccuua

SEQ ID NO: 1644157 - RNA, 19 nt, Artificial Sequence
  Description of Artificial Sequence: Synthetic oligonucleotide
  Sense strand starting at position 3722 of SEQ ID NO: 1561064
gcagaaguguuaccggaug

SEQ ID NO: 1644158 - RNA, 19 nt, Artificial Sequence
  Description of Artificial Sequence: Synthetic oligonucleotide
  Antisense strand to SEQ ID NO: 1644157
cauccgguaacacuucugc

SEQ ID NO: 1644159 - RNA, 19 nt, Artificial Sequence
  Description of Artificial Sequence: Synthetic oligonucleotide
  Sense strand starting at position 3724 of SEQ ID NO: 1561064
agaaguguuaccggauggu

SEQ ID NO: 1644160 - RNA, 19 nt, Artificial Sequence
  Description of Artificial Sequence: Synthetic oligonucleotide
  Antisense strand to SEQ ID NO: 1644159
accauccgguaacacuucu

SEQ ID NO: 1644161 - RNA, 19 nt, Artificial Sequence
  Description of Artificial Sequence: Synthetic oligonucleotide
  Sense strand starting at position 3757 of SEQ ID NO: 1561064
ggcucuuggugucuuaaac

SEQ ID NO: 1644162 - RNA, 19 nt, Artificial Sequence
  Description of Artificial Sequence: Synthetic oligonucleotide
  Antisense strand to SEQ ID NO: 1644161
guuuaagacaccaagagcc

SEQ ID NO: 1644163 - RNA, 19 nt, Artificial Sequence
  Description of Artificial Sequence: Synthetic oligonucleotide
  Sense strand starting at position 3773 of SEQ ID NO: 1561064
aacaaagaauuggaugaga

SEQ ID NO: 1644164 - RNA, 19 nt, Artificial Sequence
  Description of Artificial Sequence: Synthetic oligonucleotide
  Antisense strand to SEQ ID NO: 1644163
ucucauccaauucuuuguu

SEQ ID NO: 1644165 - RNA, 19 nt, Artificial Sequence
  Description of Artificial Sequence: Synthetic oligonucleotide
  Sense strand starting at position 3819 of SEQ ID NO: 1561064
gcaguuuauuaagcacagu

SEQ ID NO: 1644166 - RNA, 19 nt, Artificial Sequence
  Description of Artificial Sequence: Synthetic oligonucleotide
  Antisense strand to SEQ ID NO: 1644165
acugugcuuaauaaacugc

SEQ ID NO: 1644167 - RNA, 19 nt, Artificial Sequence
  Description of Artificial Sequence: Synthetic oligonucleotide
  Sense strand starting at position 3863 of SEQ ID NO: 1561064
aacugaucucuaugaggug

SEQ ID NO: 1644168 - RNA, 19 nt, Artificial Sequence
  Description of Artificial Sequence: Synthetic oligonucleotide
  Antisense strand to SEQ ID NO: 1644167
caccucauagagaucaguu

SEQ ID NO: 1644169 - RNA, 19 nt, Artificial Sequence
  Description of Artificial Sequence: Synthetic oligonucleotide
  Sense strand starting at position 3864 of SEQ ID NO: 1561064
acugaucucuaugagguga

SEQ ID NO: 1644170 - RNA, 19 nt, Artificial Sequence
  Description of Artificial Sequence: Synthetic oligonucleotide
  Antisense strand to SEQ ID NO: 1644169
ucaccucauagagaucagu

SEQ ID NO: 1644171 - RNA, 19 nt, Artificial Sequence
  Description of Artificial Sequence: Synthetic oligonucleotide
  Sense strand starting at position 3868 of SEQ ID NO: 1561064
aucucuaugaggugagauc

SEQ ID NO: 1644172 - RNA, 19 nt, Artificial Sequence
  Description of Artificial Sequence: Synthetic oligonucleotide
  Antisense strand to SEQ ID NO: 1644171
gaucucaccucauagagau

SEQ ID NO: 1644173 - RNA, 19 nt, Artificial Sequence
  Description of Artificial Sequence: Synthetic oligonucleotide
  Sense strand starting at position 3877 of SEQ ID NO: 1561064
aggugagaucagcauuacu

SEQ ID NO: 1644174 - RNA, 19 nt, Artificial Sequence
  Description of Artificial Sequence: Synthetic oligonucleotide
  Antisense strand to SEQ ID NO: 1644173
aguaaugcugaucucaccu

SEQ ID NO: 1644175 - RNA, 19 nt, Artificial Sequence
  Description of Artificial Sequence: Synthetic oligonucleotide
  Sense strand starting at position 19 of SEQ ID NO: 1561065
uagauauuccuguggaagu

SEQ ID NO: 1644176 - RNA, 19 nt, Artificial Sequence
  Description of Artificial Sequence: Synthetic oligonucleotide
  Antisense strand to SEQ ID NO: 1644175
acuuccacaggaauaucua

SEQ ID NO: 1644177 - RNA, 19 nt, Artificial Sequence
  Description of Artificial Sequence: Synthetic oligonucleotide
  Sense strand starting at position 21 of SEQ ID NO: 1561065
gauauuccuguggaaguag

SEQ ID NO: 1644178 - RNA, 19 nt, Artificial Sequence
  Description of Artificial Sequence: Synthetic oligonucleotide
  Antisense strand to SEQ ID NO: 1644177
cuacuuccacaggaauauc

SEQ ID NO: 1644179 - RNA, 19 nt, Artificial Sequence
  Description of Artificial Sequence: Synthetic oligonucleotide
  Sense strand starting at position 59 of SEQ ID NO: 1561065
acaguuucugcggaaggau

SEQ ID NO: 1644180 - RNA, 19 nt, Artificial Sequence
  Description of Artificial Sequence: Synthetic oligonucleotide
  Antisense strand to SEQ ID NO: 1644179
auccuuccgcagaaacugu

SEQ ID NO: 1644181 - RNA, 19 nt, Artificial Sequence
  Description of Artificial Sequence: Synthetic oligonucleotide
  Sense strand starting at position 62 of SEQ ID NO: 1561065
guuucugcggaaggauauu

SEQ ID NO: 1644182 - RNA, 19 nt, Artificial Sequence
  Description of Artificial Sequence: Synthetic oligonucleotide
  Antisense strand to SEQ ID NO: 1644181
aauauccuuccgcagaaac

SEQ ID NO: 1644183 - RNA, 19 nt, Artificial Sequence
  Description of Artificial Sequence: Synthetic oligonucleotide
  Sense strand starting at position 119 of SEQ ID NO: 1561065
aguccaucugugcagugaa

SEQ ID NO: 1644184 - RNA, 19 nt, Artificial Sequence
  Description of Artificial Sequence: Synthetic oligonucleotide
  Antisense strand to SEQ ID NO: 1644183
uucacugcacagauggacu

SEQ ID NO: 1644185 - RNA, 19 nt, Artificial Sequence
  Description of Artificial Sequence: Synthetic oligonucleotide
  Sense strand starting at position 122 of SEQ ID NO: 1561065
ccaucugugcagugaaauc

SEQ ID NO: 1644186 - RNA, 19 nt, Artificial Sequence
  Description of Artificial Sequence: Synthetic oligonucleotide
  Antisense strand to SEQ ID NO: 1644185
gauuucacugcacagaugg

SEQ ID NO: 1644187 - RNA, 19 nt, Artificial Sequence
  Description of Artificial Sequence: Synthetic oligonucleotide
  Sense strand starting at position 164 of SEQ ID NO: 1561065
uggacagucucacuacgau

SEQ ID NO: 1644188 - RNA, 19 nt, Artificial Sequence
  Description of Artificial Sequence: Synthetic oligonucleotide
  Antisense strand to SEQ ID NO: 1644187
aucguagugagacugucca

SEQ ID NO: 1644189 - RNA, 19 nt, Artificial Sequence
  Description of Artificial Sequence: Synthetic oligonucleotide
  Sense strand starting at position 170 of SEQ ID NO: 1561065
gucucacuacgaugucaaa

SEQ ID NO: 1644190 - RNA, 19 nt, Artificial Sequence
  Description of Artificial Sequence: Synthetic oligonucleotide
  Antisense strand to SEQ ID NO: 1644189
uuugacaucguagugagac

SEQ ID NO: 1644191 - RNA, 19 nt, Artificial Sequence
  Description of Artificial Sequence: Synthetic oligonucleotide
  Sense strand starting at position 321 of SEQ ID NO: 1561065
cuguaucaucugggcagaa

SEQ ID NO: 1644192 - RNA, 19 nt, Artificial Sequence
  Description of Artificial Sequence: Synthetic oligonucleotide
  Antisense strand to SEQ ID NO: 1644191
uucugcccagaugauacag

SEQ ID NO: 1644193 - RNA, 19 nt, Artificial Sequence
  Description of Artificial Sequence: Synthetic oligonucleotide
  Sense strand starting at position 322 of SEQ ID NO: 1561065
uguaucaucugggcagaag

SEQ ID NO: 1644194 - RNA, 19 nt, Artificial Sequence
  Description of Artificial Sequence: Synthetic oligonucleotide
  Antisense strand to SEQ ID NO: 1644193
cuucugcccagaugauaca

SEQ ID NO: 1644195 - RNA, 19 nt, Artificial Sequence
  Description of Artificial Sequence: Synthetic oligonucleotide
  Sense strand starting at position 323 of SEQ ID NO: 1561065
guaucaucugggcagaagu

SEQ ID NO: 1644196 - RNA, 19 nt, Artificial Sequence
  Description of Artificial Sequence: Synthetic oligonucleotide
  Antisense strand to SEQ ID NO: 1644195
acuucugcccagaugauac

SEQ ID NO: 1644197 - RNA, 19 nt, Artificial Sequence
  Description of Artificial Sequence: Synthetic oligonucleotide
  Sense strand starting at position 338 of SEQ ID NO: 1561065
aaguacuuagaucgaaacu

SEQ ID NO: 1644198 - RNA, 19 nt, Artificial Sequence
  Description of Artificial Sequence: Synthetic oligonucleotide
  Antisense strand to SEQ ID NO: 1644197
aguuucgaucuaaguacuu

SEQ ID NO: 1644199 - RNA, 19 nt, Artificial Sequence
  Description of Artificial Sequence: Synthetic oligonucleotide
  Sense strand starting at position 392 of SEQ ID NO: 1561065
ucaggagaugccugacaag

SEQ ID NO: 1644200 - RNA, 19 nt, Artificial Sequence
  Description of Artificial Sequence: Synthetic oligonucleotide
  Antisense strand to SEQ ID NO: 1644199
cuugucaggcaucuccuga

SEQ ID NO: 1644201 - RNA, 19 nt, Artificial Sequence
  Description of Artificial Sequence: Synthetic oligonucleotide
  Sense strand starting at position 395 of SEQ ID NO: 1561065
ggagaugccugacaagaaa

SEQ ID NO: 1644202 - RNA, 19 nt, Artificial Sequence
  Description of Artificial Sequence: Synthetic oligonucleotide
  Antisense strand to SEQ ID NO: 1644201
uuucuugucaggcaucucc

SEQ ID NO: 1644203 - RNA, 19 nt, Artificial Sequence
  Description of Artificial Sequence: Synthetic oligonucleotide
  Sense strand starting at position 415 of SEQ ID NO: 1561065
uugaaagucuggucccaaa

SEQ ID NO: 1644204 - RNA, 19 nt, Artificial Sequence
  Description of Artificial Sequence: Synthetic oligonucleotide
  Antisense strand to SEQ ID NO: 1644203
uuugggaccagacuuucaa

SEQ ID NO: 1644205 - RNA, 19 nt, Artificial Sequence
  Description of Artificial Sequence: Synthetic oligonucleotide
  Sense strand starting at position 468 of SEQ ID NO: 1561065
cugauccagcugugugaau

SEQ ID NO: 1644206 - RNA, 19 nt, Artificial Sequence
  Description of Artificial Sequence: Synthetic oligonucleotide
  Antisense strand to SEQ ID NO: 1644205
auucacacagcuggaucag

SEQ ID NO: 1644207 - RNA, 19 nt, Artificial Sequence
  Description of Artificial Sequence: Synthetic oligonucleotide
  Sense strand starting at position 519 of SEQ ID NO: 1561065
ggguguguggaggagucua

SEQ ID NO: 1644208 - RNA, 19 nt, Artificial Sequence
  Description of Artificial Sequence: Synthetic oligonucleotide
  Antisense strand to SEQ ID NO: 1644207
uagacuccuccacacaccc

SEQ ID NO: 1644209 - RNA, 19 nt, Artificial Sequence
  Description of Artificial Sequence: Synthetic oligonucleotide
  Sense strand starting at position 732 of SEQ ID NO: 1561065
guggcaucuccuuggaaga

SEQ ID NO: 1644210 - RNA, 19 nt, Artificial Sequence
  Description of Artificial Sequence: Synthetic oligonucleotide
  Antisense strand to SEQ ID NO: 1644209
ucuuccaaggagaugccac

SEQ ID NO: 1644211 - RNA, 19 nt, Artificial Sequence
  Description of Artificial Sequence: Synthetic oligonucleotide
  Sense strand starting at position 1613 of SEQ ID NO: 1561065
gcagucguugcuccaaaug

SEQ ID NO: 1644212 - RNA, 19 nt, Artificial Sequence
  Description of Artificial Sequence: Synthetic oligonucleotide
  Antisense strand to SEQ ID NO: 1644211
cauuuggagcaacgacugc

SEQ ID NO: 1644213 - RNA, 19 nt, Artificial Sequence
  Description of Artificial Sequence: Synthetic oligonucleotide
  Sense strand starting at position 1928 of SEQ ID NO: 1561065
cagcaugucuggguuugaa

SEQ ID NO: 1644214 - RNA, 19 nt, Artificial Sequence
  Description of Artificial Sequence: Synthetic oligonucleotide
  Antisense strand to SEQ ID NO: 1644213
uucaaacccagacaugcug

SEQ ID NO: 1644215 - RNA, 19 nt, Artificial Sequence
  Description of Artificial Sequence: Synthetic oligonucleotide
  Sense strand starting at position 1979 of SEQ ID NO: 1561065
caggguucuucucucagaa

SEQ ID NO: 1644216 - RNA, 19 nt, Artificial Sequence
  Description of Artificial Sequence: Synthetic oligonucleotide
  Antisense strand to SEQ ID NO: 1644215
uucugagagaagaacccug

SEQ ID NO: 1644217 - RNA, 19 nt, Artificial Sequence
  Description of Artificial Sequence: Synthetic oligonucleotide
  Sense strand starting at position 2102 of SEQ ID NO: 1561065
cgggucaguccugggagau

SEQ ID NO: 1644218 - RNA, 19 nt, Artificial Sequence
  Description of Artificial Sequence: Synthetic oligonucleotide
  Antisense strand to SEQ ID NO: 1644217
aucucccaggacugacccg

SEQ ID NO: 1644219 - RNA, 19 nt, Artificial Sequence
  Description of Artificial Sequence: Synthetic oligonucleotide
  Sense strand starting at position 2103 of SEQ ID NO: 1561065
gggucaguccugggagauc

SEQ ID NO: 1644220 - RNA, 19 nt, Artificial Sequence
  Description of Artificial Sequence: Synthetic oligonucleotide
  Antisense strand to SEQ ID NO: 1644219
gaucucccaggacugaccc

SEQ ID NO: 1644221 - RNA, 19 nt, Artificial Sequence
  Description of Artificial Sequence: Synthetic oligonucleotide
  Sense strand starting at position 2172 of SEQ ID NO: 1561065
gugagaaacucauccagau

SEQ ID NO: 1644222 - RNA, 19 nt, Artificial Sequence
  Description of Artificial Sequence: Synthetic oligonucleotide
  Antisense strand to SEQ ID NO: 1644221
aucuggaugaguuucucac

SEQ ID NO: 1644223 - RNA, 19 nt, Artificial Sequence
  Description of Artificial Sequence: Synthetic oligonucleotide
  Sense strand starting at position 2265 of SEQ ID NO: 1561065
aggugaaauugggucccau

SEQ ID NO: 1644224 - RNA, 19 nt, Artificial Sequence
  Description of Artificial Sequence: Synthetic oligonucleotide
  Antisense strand to SEQ ID NO: 1644223
augggacccaauuucaccu

SEQ ID NO: 1644225 - RNA, 19 nt, Artificial Sequence
  Description of Artificial Sequence: Synthetic oligonucleotide
  Sense strand starting at position 2318 of SEQ ID NO: 1561065
acuguuuguggaggucaua

SEQ ID NO: 1644226 - RNA, 19 nt, Artificial Sequence
  Description of Artificial Sequence: Synthetic oligonucleotide
  Antisense strand to SEQ ID NO: 1644225
uaugaccuccacaaacagu

SEQ ID NO: 1644227 - RNA, 19 nt, Artificial Sequence
  Description of Artificial Sequence: Synthetic oligonucleotide
  Sense strand starting at position 2474 of SEQ ID NO: 1561065
cacuguccucaaggaguca

SEQ ID NO: 1644228 - RNA, 19 nt, Artificial Sequence
  Description of Artificial Sequence: Synthetic oligonucleotide
  Antisense strand to SEQ ID NO: 1644227
ugacuccuugaggacagug

SEQ ID NO: 1644229 - RNA, 19 nt, Artificial Sequence
  Description of Artificial Sequence: Synthetic oligonucleotide
  Sense strand starting at position 2645 of SEQ ID NO: 1561065
gaggauucugcauguugau

SEQ ID NO: 1644230 - RNA, 19 nt, Artificial Sequence
  Description of Artificial Sequence: Synthetic oligonucleotide
  Antisense strand to SEQ ID NO: 1644229
aucaacaugcagaauccuc

SEQ ID NO: 1644231 - RNA, 19 nt, Artificial Sequence
  Description of Artificial Sequence: Synthetic oligonucleotide
  Sense strand starting at position 2754 of SEQ ID NO: 1561065
ggagaaaugucagaaggga

SEQ ID NO: 1644232 - RNA, 19 nt, Artificial Sequence
  Description of Artificial Sequence: Synthetic oligonucleotide
  Antisense strand to SEQ ID NO: 1644231
ucccuucugacauuucucc

SEQ ID NO: 1644233 - RNA, 19 nt, Artificial Sequence
  Description of Artificial Sequence: Synthetic oligonucleotide
  Sense strand starting at position 2814 of SEQ ID NO: 1561065
cagcuaucuggguaucaga

SEQ ID NO: 1644234 - RNA, 19 nt, Artificial Sequence
  Description of Artificial Sequence: Synthetic oligonucleotide
  Antisense strand to SEQ ID NO: 1644233
ucugauacccagauagcug

SEQ ID NO: 1644235 - RNA, 19 nt, Artificial Sequence
  Description of Artificial Sequence: Synthetic oligonucleotide
  Sense strand starting at position 2822 of SEQ ID NO: 1561065
uggguaucagaauggguuu

SEQ ID NO: 1644236 - RNA, 19 nt, Artificial Sequence
  Description of Artificial Sequence: Synthetic oligonucleotide
  Antisense strand to SEQ ID NO: 1644235
aaacccauucugauaccca

SEQ ID NO: 1644237 - RNA, 19 nt, Artificial Sequence
  Description of Artificial Sequence: Synthetic oligonucleotide
  Sense strand starting at position 2825 of SEQ ID NO: 1561065
guaucagaauggguuucuu

SEQ ID NO: 1644238 - RNA, 19 nt, Artificial Sequence
  Description of Artificial Sequence: Synthetic oligonucleotide
  Antisense strand to SEQ ID NO: 1644237
aagaaacccauucugauac

SEQ ID NO: 1644239 - RNA, 19 nt, Artificial Sequence
  Description of Artificial Sequence: Synthetic oligonucleotide
  Sense strand starting at position 3682 of SEQ ID NO: 1561065
ugcaaauugccucaaugcu

SEQ ID NO: 1644240 - RNA, 19 nt, Artificial Sequence
  Description of Artificial Sequence: Synthetic oligonucleotide
  Antisense strand to SEQ ID NO: 1644239
agcauugaggcaauuugca

SEQ ID NO: 1644241 - RNA, 19 nt, Artificial Sequence
  Description of Artificial Sequence: Synthetic oligonucleotide
  Sense strand starting at position 3713 of SEQ ID NO: 1561065
uuuauuaucugagcaggcu

SEQ ID NO: 1644242 - RNA, 19 nt, Artificial Sequence
  Description of Artificial Sequence: Synthetic oligonucleotide
  Antisense strand to SEQ ID NO: 1644241
agccugcucagauaauaaa

SEQ ID NO: 1644243 - RNA, 19 nt, Artificial Sequence
  Description of Artificial Sequence: Synthetic oligonucleotide
  Sense strand starting at position 3758 of SEQ ID NO: 1561065
ucugaagacuuuguauaca

SEQ ID NO: 1644244 - RNA, 19 nt, Artificial Sequence
  Description of Artificial Sequence: Synthetic oligonucleotide
  Antisense strand to SEQ ID NO: 1644243
uguauacaaagucuucaga

SEQ ID NO: 1644245 - RNA, 19 nt, Artificial Sequence
  Description of Artificial Sequence: Synthetic oligonucleotide
  Sense strand starting at position 3845 of SEQ ID NO: 1561065
uacuuauaaccuggaguag

SEQ ID NO: 1644246 - RNA, 19 nt, Artificial Sequence
  Description of Artificial Sequence: Synthetic oligonucleotide
  Antisense strand to SEQ ID NO: 1644245
cuacuccagguuauaagua

SEQ ID NO: 1644247 - RNA, 19 nt, Artificial Sequence
  Description of Artificial Sequence: Synthetic oligonucleotide
  Sense strand starting at position 3862 of SEQ ID NO: 1561065
agaucauucggcugugaua

SEQ ID NO: 1644248 - RNA, 19 nt, Artificial Sequence
  Description of Artificial Sequence: Synthetic oligonucleotide
  Antisense strand to SEQ ID NO: 1644247
uaucacagccgaaugaucu

SEQ ID NO: 1644249 - RNA, 19 nt, Artificial Sequence
  Description of Artificial Sequence: Synthetic oligonucleotide
  Sense strand starting at position 3864 of SEQ ID NO: 1561065
aucauucggcugugauaau

SEQ ID NO: 1644250 - RNA, 19 nt, Artificial Sequence
  Description of Artificial Sequence: Synthetic oligonucleotide
  Antisense strand to SEQ ID NO: 1644249
auuaucacagccgaaugau

SEQ ID NO: 1644251 - RNA, 19 nt, Artificial Sequence
  Description of Artificial Sequence: Synthetic oligonucleotide
  Sense strand starting at position 3871 of SEQ ID NO: 1561065
ggcugugauaauugagaag

SEQ ID NO: 1644252 - RNA, 19 nt, Artificial Sequence
  Description of Artificial Sequence: Synthetic oligonucleotide
  Antisense strand to SEQ ID NO: 1644251
cuucucaauuaucacagcc

SEQ ID NO: 1644253 - RNA, 19 nt, Artificial Sequence
  Description of Artificial Sequence: Synthetic oligonucleotide
  Sense strand starting at position 3874 of SEQ ID NO: 1561065
ugugauaauugagaaggga

SEQ ID NO: 1644254 - RNA, 19 nt, Artificial Sequence
  Description of Artificial Sequence: Synthetic oligonucleotide
  Antisense strand to SEQ ID NO: 1644253
ucccuucucaauuaucaca

SEQ ID NO: 1644255 - RNA, 19 nt, Artificial Sequence
  Description of Artificial Sequence: Synthetic oligonucleotide
  Sense strand starting at position 10 of SEQ ID NO: 1561066
ccgcuucaucgagaacagu

SEQ ID NO: 1644256 - RNA, 19 nt, Artificial Sequence
  Description of Artificial Sequence: Synthetic oligonucleotide
  Antisense strand to SEQ ID NO: 1644255
acuguucucgaugaagcgg

SEQ ID NO: 1644257 - RNA, 19 nt, Artificial Sequence
  Description of Artificial Sequence: Synthetic oligonucleotide
  Sense strand starting at position 24 of SEQ ID NO: 1561066
acaguuugggcuuaucuuu

SEQ ID NO: 1644258 - RNA, 19 nt, Artificial Sequence
  Description of Artificial Sequence: Synthetic oligonucleotide
  Antisense strand to SEQ ID NO: 1644257
aaagauaagcccaaacugu

SEQ ID NO: 1644259 - RNA, 19 nt, Artificial Sequence
  Description of Artificial Sequence: Synthetic oligonucleotide
  Sense strand starting at position 103 of SEQ ID NO: 1561066
cuuagauauuccuguggaa

SEQ ID NO: 1644260 - RNA, 19 nt, Artificial Sequence
  Description of Artificial Sequence: Synthetic oligonucleotide
  Antisense strand to SEQ ID NO: 1644259
uuccacaggaauaucuaag

SEQ ID NO: 1644261 - RNA, 19 nt, Artificial Sequence
  Description of Artificial Sequence: Synthetic oligonucleotide
  Sense strand starting at position 105 of SEQ ID NO: 1561066
uagauauuccuguggaagu

SEQ ID NO: 1644262 - RNA, 19 nt, Artificial Sequence
  Description of Artificial Sequence: Synthetic oligonucleotide
  Antisense strand to SEQ ID NO: 1644261
acuuccacaggaauaucua

SEQ ID NO: 1644263 - RNA, 19 nt, Artificial Sequence
  Description of Artificial Sequence: Synthetic oligonucleotide
  Sense strand starting at position 107 of SEQ ID NO: 1561066
gauauuccuguggaaguag

SEQ ID NO: 1644264 - RNA, 19 nt, Artificial Sequence
  Description of Artificial Sequence: Synthetic oligonucleotide
  Antisense strand to SEQ ID NO: 1644263
cuacuuccacaggaauauc

SEQ ID NO: 1644265 - RNA, 19 nt, Artificial Sequence
  Description of Artificial Sequence: Synthetic oligonucleotide
  Sense strand starting at position 128 of SEQ ID NO: 1561066
acaagauuguucuauccug

SEQ ID NO: 1644266 - RNA, 19 nt, Artificial Sequence
  Description of Artificial Sequence: Synthetic oligonucleotide
  Antisense strand to SEQ ID NO: 1644265
caggauagaacaaucuugu

SEQ ID NO: 1644267 - RNA, 19 nt, Artificial Sequence
  Description of Artificial Sequence: Synthetic oligonucleotide
  Sense strand starting at position 157 of SEQ ID NO: 1561066
aaauuagugccgugaucuu

SEQ ID NO: 1644268 - RNA, 19 nt, Artificial Sequence
  Description of Artificial Sequence: Synthetic oligonucleotide
  Antisense strand to SEQ ID NO: 1644267
aagaucacggcacuaauuu

SEQ ID NO: 1644269 - RNA, 19 nt, Artificial Sequence
  Description of Artificial Sequence: Synthetic oligonucleotide
  Sense strand starting at position 364 of SEQ ID NO: 1561066
gagagccuuugcucugcaa

SEQ ID NO: 1644270 - RNA, 19 nt, Artificial Sequence
  Description of Artificial Sequence: Synthetic oligonucleotide
  Antisense strand to SEQ ID NO: 1644269
uugcagagcaaaggcucuc

SEQ ID NO: 1644271 - RNA, 19 nt, Artificial Sequence
  Description of Artificial Sequence: Synthetic oligonucleotide
  Sense strand starting at position 367 of SEQ ID NO: 1561066
agccuuugcucugcaauuu

SEQ ID NO: 1644272 - RNA, 19 nt, Artificial Sequence
  Description of Artificial Sequence: Synthetic oligonucleotide
  Antisense strand to SEQ ID NO: 1644271
aaauugcagagcaaaggcu

SEQ ID NO: 1644273 - RNA, 19 nt, Artificial Sequence
  Description of Artificial Sequence: Synthetic oligonucleotide
  Sense strand starting at position 406 of SEQ ID NO: 1561066
uuaucaccuguccagaagu

SEQ ID NO: 1644274 - RNA, 19 nt, Artificial Sequence
  Description of Artificial Sequence: Synthetic oligonucleotide
  Antisense strand to SEQ ID NO: 1644273
acuucuggacaggugauaa

SEQ ID NO: 1644275 - RNA, 19 nt, Artificial Sequence
  Description of Artificial Sequence: Synthetic oligonucleotide
  Sense strand starting at position 423 of SEQ ID NO: 1561066
guacuuagaucagaacuau

SEQ ID NO: 1644276 - RNA, 19 nt, Artificial Sequence
  Description of Artificial Sequence: Synthetic oligonucleotide
  Antisense strand to SEQ ID NO: 1644275
auaguucugaucuaaguac

SEQ ID NO: 1644277 - RNA, 19 nt, Artificial Sequence
  Description of Artificial Sequence: Synthetic oligonucleotide
  Sense strand starting at position 453 of SEQ ID NO: 1561066
agauaaggguggagaugua

SEQ ID NO: 1644278 - RNA, 19 nt, Artificial Sequence
  Description of Artificial Sequence: Synthetic oligonucleotide
  Antisense strand to SEQ ID NO: 1644277
uacaucuccacccuuaucu

SEQ ID NO: 1644279 - RNA, 19 nt, Artificial Sequence
  Description of Artificial Sequence: Synthetic oligonucleotide
  Sense strand starting at position 504 of SEQ ID NO: 1561066
cugguccugcugugugaau

SEQ ID NO: 1644280 - RNA, 19 nt, Artificial Sequence
  Description of Artificial Sequence: Synthetic oligonucleotide
  Antisense strand to SEQ ID NO: 1644279
auucacacagcaggaccag

SEQ ID NO: 1644281 - RNA, 19 nt, Artificial Sequence
  Description of Artificial Sequence: Synthetic oligonucleotide
  Sense strand starting at position 648 of SEQ ID NO: 1561066
ggacaucccuguuugccaa

SEQ ID NO: 1644282 - RNA, 19 nt, Artificial Sequence
  Description of Artificial Sequence: Synthetic oligonucleotide
  Antisense strand to SEQ ID NO: 1644281
uuggcaaacagggaugucc

SEQ ID NO: 1644283 - RNA, 19 nt, Artificial Sequence
  Description of Artificial Sequence: Synthetic oligonucleotide
  Sense strand starting at position 671 of SEQ ID NO: 1561066
aguccagguugaggaauaa

SEQ ID NO: 1644284 - RNA, 19 nt, Artificial Sequence
  Description of Artificial Sequence: Synthetic oligonucleotide
  Antisense strand to SEQ ID NO: 1644283
uuauuccucaaccuggacu

SEQ ID NO: 1644285 - RNA, 19 nt, Artificial Sequence
  Description of Artificial Sequence: Synthetic oligonucleotide
  Sense strand starting at position 2282 of SEQ ID NO: 1561066
uguggauaucugcguagcu

SEQ ID NO: 1644286 - RNA, 19 nt, Artificial Sequence
  Description of Artificial Sequence: Synthetic oligonucleotide
  Antisense strand to SEQ ID NO: 1644285
agcuacgcagauauccaca

SEQ ID NO: 1644287 - RNA, 19 nt, Artificial Sequence
  Description of Artificial Sequence: Synthetic oligonucleotide
  Sense strand starting at position 2284 of SEQ ID NO: 1561066
uggauaucugcguagcuca

SEQ ID NO: 1644288 - RNA, 19 nt, Artificial Sequence
  Description of Artificial Sequence: Synthetic oligonucleotide
  Antisense strand to SEQ ID NO: 1644287
ugagcuacgcagauaucca

SEQ ID NO: 1644289 - RNA, 19 nt, Artificial Sequence
  Description of Artificial Sequence: Synthetic oligonucleotide
  Sense strand starting at position 2556 of SEQ ID NO: 1561066
gguucaaucucaggaggac

SEQ ID NO: 1644290 - RNA, 19 nt, Artificial Sequence
  Description of Artificial Sequence: Synthetic oligonucleotide
  Antisense strand to SEQ ID NO: 1644289
guccuccugagauugaacc

SEQ ID NO: 1644291 - RNA, 19 nt, Artificial Sequence
  Description of Artificial Sequence: Synthetic oligonucleotide
  Sense strand starting at position 2600 of SEQ ID NO: 1561066
aggugaggauucuaugugu

SEQ ID NO: 1644292 - RNA, 19 nt, Artificial Sequence
  Description of Artificial Sequence: Synthetic oligonucleotide
  Antisense strand to SEQ ID NO: 1644291
acacauagaauccucaccu

SEQ ID NO: 1644293 - RNA, 19 nt, Artificial Sequence
  Description of Artificial Sequence: Synthetic oligonucleotide
  Sense strand starting at position 2603 of SEQ ID NO: 1561066
ugaggauucuauguguuga

SEQ ID NO: 1644294 - RNA, 19 nt, Artificial Sequence
  Description of Artificial Sequence: Synthetic oligonucleotide
  Antisense strand to SEQ ID NO: 1644293
ucaacacauagaauccuca

SEQ ID NO: 1644295 - RNA, 19 nt, Artificial Sequence
  Description of Artificial Sequence: Synthetic oligonucleotide
  Sense strand starting at position 2604 of SEQ ID NO: 1561066
gaggauucuauguguugau

SEQ ID NO: 1644296 - RNA, 19 nt, Artificial Sequence
  Description of Artificial Sequence: Synthetic oligonucleotide
  Antisense strand to SEQ ID NO: 1644295
aucaacacauagaauccuc

SEQ ID NO: 1644297 - RNA, 19 nt, Artificial Sequence
  Description of Artificial Sequence: Synthetic oligonucleotide
  Sense strand starting at position 2605 of SEQ ID NO: 1561066
aggauucuauguguugaua

SEQ ID NO: 1644298 - RNA, 19 nt, Artificial Sequence
  Description of Artificial Sequence: Synthetic oligonucleotide
  Antisense strand to SEQ ID NO: 1644297
uaucaacacauagaauccu

SEQ ID NO: 1644299 - RNA, 19 nt, Artificial Sequence
  Description of Artificial Sequence: Synthetic oligonucleotide
  Sense strand starting at position 2655 of SEQ ID NO: 1561066
gcaggaggucugggaaacu

SEQ ID NO: 1644300 - RNA, 19 nt, Artificial Sequence
  Description of Artificial Sequence: Synthetic oligonucleotide
  Antisense strand to SEQ ID NO: 1644299
aguuucccagaccuccugc

SEQ ID NO: 1644301 - RNA, 19 nt, Artificial Sequence
  Description of Artificial Sequence: Synthetic oligonucleotide
  Sense strand starting at position 2673 of SEQ ID NO: 1561066
ugaggcugugacuguugua

SEQ ID NO: 1644302 - RNA, 19 nt, Artificial Sequence
  Description of Artificial Sequence: Synthetic oligonucleotide
  Antisense strand to SEQ ID NO: 1644301
uacaacagucacagccuca

SEQ ID NO: 1644303 - RNA, 19 nt, Artificial Sequence
  Description of Artificial Sequence: Synthetic oligonucleotide
  Sense strand starting at position 2708 of SEQ ID NO: 1561066
ggaggaaauucggaagaaa

SEQ ID NO: 1644304 - RNA, 19 nt, Artificial Sequence
  Description of Artificial Sequence: Synthetic oligonucleotide
  Antisense strand to SEQ ID NO: 1644303
uuucuuccgaauuuccucc

SEQ ID NO: 1644305 - RNA, 19 nt, Artificial Sequence
  Description of Artificial Sequence: Synthetic oligonucleotide
  Sense strand starting at position 3035 of SEQ ID NO: 1561066
gggaguauccuguguggug

SEQ ID NO: 1644306 - RNA, 19 nt, Artificial Sequence
  Description of Artificial Sequence: Synthetic oligonucleotide
  Antisense strand to SEQ ID NO: 1644305
caccacacaggauacuccc

SEQ ID NO: 1644307 - RNA, 19 nt, Artificial Sequence
  Description of Artificial Sequence: Synthetic oligonucleotide
  Sense strand starting at position 3037 of SEQ ID NO: 1561066
gaguauccuguguggugga

SEQ ID NO: 1644308 - RNA, 19 nt, Artificial Sequence
  Description of Artificial Sequence: Synthetic oligonucleotide
  Antisense strand to SEQ ID NO: 1644307
uccaccacacaggauacuc

SEQ ID NO: 1644309 - RNA, 19 nt, Artificial Sequence
  Description of Artificial Sequence: Synthetic oligonucleotide
  Sense strand starting at position 3059 of SEQ ID NO: 1561066
uccuuagaccgaugucagu

SEQ ID NO: 1644310 - RNA, 19 nt, Artificial Sequence
  Description of Artificial Sequence: Synthetic oligonucleotide
  Antisense strand to SEQ ID NO: 1644309
acugacaucggucuaagga

SEQ ID NO: 1644311 - RNA, 19 nt, Artificial Sequence
  Description of Artificial Sequence: Synthetic oligonucleotide
  Sense strand starting at position 3150 of SEQ ID NO: 1561066
gcgguuuacacauaugaac

SEQ ID NO: 1644312 - RNA, 19 nt, Artificial Sequence
  Description of Artificial Sequence: Synthetic oligonucleotide
  Antisense strand to SEQ ID NO: 1644311
guucauauguguaaaccgc

SEQ ID NO: 1644313 - RNA, 19 nt, Artificial Sequence
  Description of Artificial Sequence: Synthetic oligonucleotide
  Sense strand starting at position 3164 of SEQ ID NO: 1561066
ugaacaugcuuagagaaac

SEQ ID NO: 1644314 - RNA, 19 nt, Artificial Sequence
  Description of Artificial Sequence: Synthetic oligonucleotide
  Antisense strand to SEQ ID NO: 1644313
guuucucuaagcauguuca

SEQ ID NO: 1644315 - RNA, 19 nt, Artificial Sequence
  Description of Artificial Sequence: Synthetic oligonucleotide
  Sense strand starting at position 3280 of SEQ ID NO: 1561066
gcuaauggucuccaugcuu

SEQ ID NO: 1644316 - RNA, 19 nt, Artificial Sequence
  Description of Artificial Sequence: Synthetic oligonucleotide
  Antisense strand to SEQ ID NO: 1644315
aagcauggagaccauuagc

SEQ ID NO: 1644317 - RNA, 19 nt, Artificial Sequence
  Description of Artificial Sequence: Synthetic oligonucleotide
  Sense strand starting at position 3320 of SEQ ID NO: 1561066
gugcacguugccgugaaua

SEQ ID NO: 1644318 - RNA, 19 nt, Artificial Sequence
  Description of Artificial Sequence: Synthetic oligonucleotide
  Antisense strand to SEQ ID NO: 1644317
uauucacggcaacgugcac

SEQ ID NO: 1644319 - RNA, 19 nt, Artificial Sequence
  Description of Artificial Sequence: Synthetic oligonucleotide
  Sense strand starting at position 3426 of SEQ ID NO: 1561066
aguguuguccugcaucugu

SEQ ID NO: 1644320 - RNA, 19 nt, Artificial Sequence
  Description of Artificial Sequence: Synthetic oligonucleotide
  Antisense strand to SEQ ID NO: 1644319
acagaugcaggacaacacu

SEQ ID NO: 1644321 - RNA, 19 nt, Artificial Sequence
  Description of Artificial Sequence: Synthetic oligonucleotide
  Sense strand starting at position 3816 of SEQ ID NO: 1561066
aggguagaagcgugugaga

SEQ ID NO: 1644322 - RNA, 19 nt, Artificial Sequence
  Description of Artificial Sequence: Synthetic oligonucleotide
  Antisense strand to SEQ ID NO: 1644321
ucucacacgcuucuacccu

SEQ ID NO: 1644323 - RNA, 19 nt, Artificial Sequence
  Description of Artificial Sequence: Synthetic oligonucleotide
  Sense strand starting at position 3818 of SEQ ID NO: 1561066
gguagaagcgugugagauu

SEQ ID NO: 1644324 - RNA, 19 nt, Artificial Sequence
  Description of Artificial Sequence: Synthetic oligonucleotide
  Antisense strand to SEQ ID NO: 1644323
aaucucacacgcuucuacc

SEQ ID NO: 1644325 - RNA, 19 nt, Artificial Sequence
  Description of Artificial Sequence: Synthetic oligonucleotide
  Sense strand starting at position 3827 of SEQ ID NO: 1561066
gugugagauucuguuccca

SEQ ID NO: 1644326 - RNA, 19 nt, Artificial Sequence
  Description of Artificial Sequence: Synthetic oligonucleotide
  Antisense strand to SEQ ID NO: 1644325
ugggaacagaaucucacac

SEQ ID NO: 1644327 - RNA, 19 nt, Artificial Sequence
  Description of Artificial Sequence: Synthetic oligonucleotide
  Sense strand starting at position 3829 of SEQ ID NO: 1561066
gugagauucuguucccagg

SEQ ID NO: 1644328 - RNA, 19 nt, Artificial Sequence
  Description of Artificial Sequence: Synthetic oligonucleotide
  Antisense strand to SEQ ID NO: 1644327
ccugggaacagaaucucac

SEQ ID NO: 1644329 - RNA, 19 nt, Artificial Sequence
  Description of Artificial Sequence: Synthetic oligonucleotide
  Sense strand starting at position 3896 of SEQ ID NO: 1561066
gcagcuguccugcaacuca

SEQ ID NO: 1644330 - RNA, 19 nt, Artificial Sequence
  Description of Artificial Sequence: Synthetic oligonucleotide
  Antisense strand to SEQ ID NO: 1644329
ugaguugcaggacagcugc

SEQ ID NO: 1644331 - RNA, 19 nt, Artificial Sequence
  Description of Artificial Sequence: Synthetic oligonucleotide
  Sense strand starting at position 3931 of SEQ ID NO: 1561066
agggaaaugugcugaaauc

SEQ ID NO: 1644332 - RNA, 19 nt, Artificial Sequence
  Description of Artificial Sequence: Synthetic oligonucleotide
  Antisense strand to SEQ ID NO: 1644331
gauuucagcacauuucccu

SEQ ID NO: 1644333 - RNA, 19 nt, Artificial Sequence
  Description of Artificial Sequence: Synthetic oligonucleotide
  Sense strand starting at position 3940 of SEQ ID NO: 1561066
ugcugaaaucgcagugggu

SEQ ID NO: 1644334 - RNA, 19 nt, Artificial Sequence
  Description of Artificial Sequence: Synthetic oligonucleotide
  Antisense strand to SEQ ID NO: 1644333
acccacugcgauuucagca

SEQ ID NO: 1644335 - RNA, 19 nt, Artificial Sequence
  Description of Artificial Sequence: Synthetic oligonucleotide
  Sense strand starting at position 54 of SEQ ID NO: 1561067
gugucaggauuauuauauc

SEQ ID NO: 1644336 - RNA, 19 nt, Artificial Sequence
  Description of Artificial Sequence: Synthetic oligonucleotide
  Antisense strand to SEQ ID NO: 1644335
gauauaauaauccugacac

SEQ ID NO: 1644337 - RNA, 19 nt, Artificial Sequence
  Description of Artificial Sequence: Synthetic oligonucleotide
  Sense strand starting at position 114 of SEQ ID NO: 1561067
uugucucuccauuggaaau

SEQ ID NO: 1644338 - RNA, 19 nt, Artificial Sequence
  Description of Artificial Sequence: Synthetic oligonucleotide
  Antisense strand to SEQ ID NO: 1644337
auuuccaauggagagacaa

SEQ ID NO: 1644339 - RNA, 19 nt, Artificial Sequence
  Description of Artificial Sequence: Synthetic oligonucleotide
  Sense strand starting at position 238 of SEQ ID NO: 1561067
ccagauauccuguacuguu

SEQ ID NO: 1644340 - RNA, 19 nt, Artificial Sequence
  Description of Artificial Sequence: Synthetic oligonucleotide
  Antisense strand to SEQ ID NO: 1644339
aacaguacaggauaucugg

SEQ ID NO: 1644341 - RNA, 19 nt, Artificial Sequence
  Description of Artificial Sequence: Synthetic oligonucleotide
  Sense strand starting at position 292 of SEQ ID NO: 1561067
auugguuccuauuuagcau

SEQ ID NO: 1644342 - RNA, 19 nt, Artificial Sequence
  Description of Artificial Sequence: Synthetic oligonucleotide
  Antisense strand to SEQ ID NO: 1644341
augcuaaauaggaaccaau

SEQ ID NO: 1644343 - RNA, 19 nt, Artificial Sequence
  Description of Artificial Sequence: Synthetic oligonucleotide
  Sense strand starting at position 295 of SEQ ID NO: 1561067
gguuccuauuuagcauauu

SEQ ID NO: 1644344 - RNA, 19 nt, Artificial Sequence
  Description of Artificial Sequence: Synthetic oligonucleotide
  Antisense strand to SEQ ID NO: 1644343
aauaugcuaaauaggaacc

SEQ ID NO: 1644345 - RNA, 19 nt, Artificial Sequence
  Description of Artificial Sequence: Synthetic oligonucleotide
  Sense strand starting at position 444 of SEQ ID NO: 1561067
uuuacauagucuguccaaa

SEQ ID NO: 1644346 - RNA, 19 nt, Artificial Sequence
  Description of Artificial Sequence: Synthetic oligonucleotide
  Antisense strand to SEQ ID NO: 1644345
uuuggacagacuauguaaa

SEQ ID NO: 1644347 - RNA, 19 nt, Artificial Sequence
  Description of Artificial Sequence: Synthetic oligonucleotide
  Sense strand starting at position 480 of SEQ ID NO: 1561067
aaaguuucgccugaaucuc

SEQ ID NO: 1644348 - RNA, 19 nt, Artificial Sequence
  Description of Artificial Sequence: Synthetic oligonucleotide
  Antisense strand to SEQ ID NO: 1644347
gagauucaggcgaaacuuu

SEQ ID NO: 1644349 - RNA, 19 nt, Artificial Sequence
  Description of Artificial Sequence: Synthetic oligonucleotide
  Sense strand starting at position 521 of SEQ ID NO: 1561067
uucgcaaucuaaccauaga

SEQ ID NO: 1644350 - RNA, 19 nt, Artificial Sequence
  Description of Artificial Sequence: Synthetic oligonucleotide
  Antisense strand to SEQ ID NO: 1644349
ucuaugguuagauugcgaa

SEQ ID NO: 1644351 - RNA, 19 nt, Artificial Sequence
  Description of Artificial Sequence: Synthetic oligonucleotide
  Sense strand starting at position 706 of SEQ ID NO: 1561067
ucuugauuagaucacaugu

SEQ ID NO: 1644352 - RNA, 19 nt, Artificial Sequence
  Description of Artificial Sequence: Synthetic oligonucleotide
  Antisense strand to SEQ ID NO: 1644351
acaugugaucuaaucaaga

SEQ ID NO: 1644353 - RNA, 19 nt, Artificial Sequence
  Description of Artificial Sequence: Synthetic oligonucleotide
  Sense strand starting at position 879 of SEQ ID NO: 1561067
cuaagagugcuccacugag

SEQ ID NO: 1644354 - RNA, 19 nt, Artificial Sequence
  Description of Artificial Sequence: Synthetic oligonucleotide
  Antisense strand to SEQ ID NO: 1644353
cucaguggagcacucuuag

SEQ ID NO: 1644355 - RNA, 19 nt, Artificial Sequence
  Description of Artificial Sequence: Synthetic oligonucleotide
  Sense strand starting at position 891 of SEQ ID NO: 1561067
cacugagaccuuuguuuag

SEQ ID NO: 1644356 - RNA, 19 nt, Artificial Sequence
  Description of Artificial Sequence: Synthetic oligonucleotide
  Antisense strand to SEQ ID NO: 1644355
cuaaacaaaggucucagug

SEQ ID NO: 1644357 - RNA, 19 nt, Artificial Sequence
  Description of Artificial Sequence: Synthetic oligonucleotide
  Sense strand starting at position 893 of SEQ ID NO: 1561067
cugagaccuuuguuuagac

SEQ ID NO: 1644358 - RNA, 19 nt, Artificial Sequence
  Description of Artificial Sequence: Synthetic oligonucleotide
  Antisense strand to SEQ ID NO: 1644357
gucuaaacaaaggucucag

SEQ ID NO: 1644359 - RNA, 19 nt, Artificial Sequence
  Description of Artificial Sequence: Synthetic oligonucleotide
  Sense strand starting at position 894 of SEQ ID NO: 1561067
ugagaccuuuguuuagacu

SEQ ID NO: 1644360 - RNA, 19 nt, Artificial Sequence
  Description of Artificial Sequence: Synthetic oligonucleotide
  Antisense strand to SEQ ID NO: 1644359
agucuaaacaaaggucuca

SEQ ID NO: 1644361 - RNA, 19 nt, Artificial Sequence
  Description of Artificial Sequence: Synthetic oligonucleotide
  Sense strand starting at position 903 of SEQ ID NO: 1561067
uguuuagacucccucaaug

SEQ ID NO: 1644362 - RNA, 19 nt, Artificial Sequence
  Description of Artificial Sequence: Synthetic oligonucleotide
  Antisense strand to SEQ ID NO: 1644361
cauugagggagucuaaaca

SEQ ID NO: 1644363 - RNA, 19 nt, Artificial Sequence
  Description of Artificial Sequence: Synthetic oligonucleotide
  Sense strand starting at position 1607 of SEQ ID NO: 1561067
uguuauacucgugauuacu

SEQ ID NO: 1644364 - RNA, 19 nt, Artificial Sequence
  Description of Artificial Sequence: Synthetic oligonucleotide
  Antisense strand to SEQ ID NO: 1644363
aguaaucacgaguauaaca

SEQ ID NO: 1644365 - RNA, 19 nt, Artificial Sequence
  Description of Artificial Sequence: Synthetic oligonucleotide
  Sense strand starting at position 1617 of SEQ ID NO: 1561067
gugauuacuguuuacuaca

SEQ ID NO: 1644366 - RNA, 19 nt, Artificial Sequence
  Description of Artificial Sequence: Synthetic oligonucleotide
  Antisense strand to SEQ ID NO: 1644365
uguaguaaacaguaaucac

SEQ ID NO: 1644367 - RNA, 19 nt, Artificial Sequence
  Description of Artificial Sequence: Synthetic oligonucleotide
  Sense strand starting at position 1752 of SEQ ID NO: 1561067
agcuuuccuggugauaaug

SEQ ID NO: 1644368 - RNA, 19 nt, Artificial Sequence
  Description of Artificial Sequence: Synthetic oligonucleotide
  Antisense strand to SEQ ID NO: 1644367
cauuaucaccaggaaagcu

SEQ ID NO: 1644369 - RNA, 19 nt, Artificial Sequence
  Description of Artificial Sequence: Synthetic oligonucleotide
  Sense strand starting at position 1760 of SEQ ID NO: 1561067
uggugauaaugugugacaa

SEQ ID NO: 1644370 - RNA, 19 nt, Artificial Sequence
  Description of Artificial Sequence: Synthetic oligonucleotide
  Antisense strand to SEQ ID NO: 1644369
uugucacacauuaucacca

SEQ ID NO: 1644371 - RNA, 19 nt, Artificial Sequence
  Description of Artificial Sequence: Synthetic oligonucleotide
  Sense strand starting at position 1761 of SEQ ID NO: 1561067
ggugauaaugugugacaau

SEQ ID NO: 1644372 - RNA, 19 nt, Artificial Sequence
  Description of Artificial Sequence: Synthetic oligonucleotide
  Antisense strand to SEQ ID NO: 1644371
auugucacacauuaucacc

SEQ ID NO: 1644373 - RNA, 19 nt, Artificial Sequence
  Description of Artificial Sequence: Synthetic oligonucleotide
  Sense strand starting at position 1773 of SEQ ID NO: 1561067
ugacaauaugcauaguacu

SEQ ID NO: 1644374 - RNA, 19 nt, Artificial Sequence
  Description of Artificial Sequence: Synthetic oligonucleotide
  Antisense strand to SEQ ID NO: 1644373
aguacuaugcauauuguca

SEQ ID NO: 1644375 - RNA, 19 nt, Artificial Sequence
  Description of Artificial Sequence: Synthetic oligonucleotide
  Sense strand starting at position 2080 of SEQ ID NO: 1561067
cccuaugaggugugacauu

SEQ ID NO: 1644376 - RNA, 19 nt, Artificial Sequence
  Description of Artificial Sequence: Synthetic oligonucleotide
  Antisense strand to SEQ ID NO: 1644375
aaugucacaccucauaggg

SEQ ID NO: 1644377 - RNA, 19 nt, Artificial Sequence
  Description of Artificial Sequence: Synthetic oligonucleotide
  Sense strand starting at position 2107 of SEQ ID NO: 1561067
uagggagugucuuccagaa

SEQ ID NO: 1644378 - RNA, 19 nt, Artificial Sequence
  Description of Artificial Sequence: Synthetic oligonucleotide
  Antisense strand to SEQ ID NO: 1644377
uucuggaagacacucccua

SEQ ID NO: 1644379 - RNA, 19 nt, Artificial Sequence
  Description of Artificial Sequence: Synthetic oligonucleotide
  Sense strand starting at position 2111 of SEQ ID NO: 1561067
gagugucuuccagaagcca

SEQ ID NO: 1644380 - RNA, 19 nt, Artificial Sequence
  Description of Artificial Sequence: Synthetic oligonucleotide
  Antisense strand to SEQ ID NO: 1644379
uggcuucuggaagacacuc

SEQ ID NO: 1644381 - RNA, 19 nt, Artificial Sequence
  Description of Artificial Sequence: Synthetic oligonucleotide
  Sense strand starting at position 2158 of SEQ ID NO: 1561067
aagguuaaguuccuuagua

SEQ ID NO: 1644382 - RNA, 19 nt, Artificial Sequence
  Description of Artificial Sequence: Synthetic oligonucleotide
  Antisense strand to SEQ ID NO: 1644381
uacuaaggaacuuaaccuu

SEQ ID NO: 1644383 - RNA, 19 nt, Artificial Sequence
  Description of Artificial Sequence: Synthetic oligonucleotide
  Sense strand starting at position 2160 of SEQ ID NO: 1561067
gguuaaguuccuuaguaca

SEQ ID NO: 1644384 - RNA, 19 nt, Artificial Sequence
  Description of Artificial Sequence: Synthetic oligonucleotide
  Antisense strand to SEQ ID NO: 1644383
uguacuaaggaacuuaacc

SEQ ID NO: 1644385 - RNA, 19 nt, Artificial Sequence
  Description of Artificial Sequence: Synthetic oligonucleotide
  Sense strand starting at position 2162 of SEQ ID NO: 1561067
uuaaguuccuuaguacaca

SEQ ID NO: 1644386 - RNA, 19 nt, Artificial Sequence
  Description of Artificial Sequence: Synthetic oligonucleotide
  Antisense strand to SEQ ID NO: 1644385
uguguacuaaggaacuuaa

SEQ ID NO: 1644387 - RNA, 19 nt, Artificial Sequence
  Description of Artificial Sequence: Synthetic oligonucleotide
  Sense strand starting at position 2209 of SEQ ID NO: 1561067
cgaucucuauguuugagag

SEQ ID NO: 1644388 - RNA, 19 nt, Artificial Sequence
  Description of Artificial Sequence: Synthetic oligonucleotide
  Antisense strand to SEQ ID NO: 1644387
cucucaaacauagagaucg

SEQ ID NO: 1644389 - RNA, 19 nt, Artificial Sequence
  Description of Artificial Sequence: Synthetic oligonucleotide
  Sense strand starting at position 2210 of SEQ ID NO: 1561067
gaucucuauguuugagagu

SEQ ID NO: 1644390 - RNA, 19 nt, Artificial Sequence
  Description of Artificial Sequence: Synthetic oligonucleotide
  Antisense strand to SEQ ID NO: 1644389
acucucaaacauagagauc

SEQ ID NO: 1644391 - RNA, 19 nt, Artificial Sequence
  Description of Artificial Sequence: Synthetic oligonucleotide
  Sense strand starting at position 2217 of SEQ ID NO: 1561067
auguuugagagugggagau

SEQ ID NO: 1644392 - RNA, 19 nt, Artificial Sequence
  Description of Artificial Sequence: Synthetic oligonucleotide
  Antisense strand to SEQ ID NO: 1644391
aucucccacucucaaacau

SEQ ID NO: 1644393 - RNA, 19 nt, Artificial Sequence
  Description of Artificial Sequence: Synthetic oligonucleotide
  Sense strand starting at position 2223 of SEQ ID NO: 1561067
gagagugggagauguguuu

SEQ ID NO: 1644394 - RNA, 19 nt, Artificial Sequence
  Description of Artificial Sequence: Synthetic oligonucleotide
  Antisense strand to SEQ ID NO: 1644393
aaacacaucucccacucuc

SEQ ID NO: 1644395 - RNA, 19 nt, Artificial Sequence
  Description of Artificial Sequence: Synthetic oligonucleotide
  Sense strand starting at position 2612 of SEQ ID NO: 1561067
uggguauaugcucauuaua

SEQ ID NO: 1644396 - RNA, 19 nt, Artificial Sequence
  Description of Artificial Sequence: Synthetic oligonucleotide
  Antisense strand to SEQ ID NO: 1644395
uauaaugagcauauaccca

SEQ ID NO: 1644397 - RNA, 19 nt, Artificial Sequence
  Description of Artificial Sequence: Synthetic oligonucleotide
  Sense strand starting at position 2615 of SEQ ID NO: 1561067
guauaugcucauuauacca

SEQ ID NO: 1644398 - RNA, 19 nt, Artificial Sequence
  Description of Artificial Sequence: Synthetic oligonucleotide
  Antisense strand to SEQ ID NO: 1644397
ugguauaaugagcauauac

SEQ ID NO: 1644399 - RNA, 19 nt, Artificial Sequence
  Description of Artificial Sequence: Synthetic oligonucleotide
  Sense strand starting at position 2838 of SEQ ID NO: 1561067
ugguuagagcagugaucag

SEQ ID NO: 1644400 - RNA, 19 nt, Artificial Sequence
  Description of Artificial Sequence: Synthetic oligonucleotide
  Antisense strand to SEQ ID NO: 1644399
cugaucacugcucuaacca

SEQ ID NO: 1644401 - RNA, 19 nt, Artificial Sequence
  Description of Artificial Sequence: Synthetic oligonucleotide
  Sense strand starting at position 2930 of SEQ ID NO: 1561067
auacuuaagguguacgaca

SEQ ID NO: 1644402 - RNA, 19 nt, Artificial Sequence
  Description of Artificial Sequence: Synthetic oligonucleotide
  Antisense strand to SEQ ID NO: 1644401
ugucguacaccuuaaguau

SEQ ID NO: 1644403 - RNA, 19 nt, Artificial Sequence
  Description of Artificial Sequence: Synthetic oligonucleotide
  Sense strand starting at position 3332 of SEQ ID NO: 1561067
uuauuuacguugcugcaaa

SEQ ID NO: 1644404 - RNA, 19 nt, Artificial Sequence
  Description of Artificial Sequence: Synthetic oligonucleotide
  Antisense strand to SEQ ID NO: 1644403
uuugcagcaacguaaauaa

SEQ ID NO: 1644405 - RNA, 19 nt, Artificial Sequence
  Description of Artificial Sequence: Synthetic oligonucleotide
  Sense strand starting at position 3454 of SEQ ID NO: 1561067
gcugcuuuaagugaaauga

SEQ ID NO: 1644406 - RNA, 19 nt, Artificial Sequence
  Description of Artificial Sequence: Synthetic oligonucleotide
  Antisense strand to SEQ ID NO: 1644405
ucauuucacuuaaagcagc

SEQ ID NO: 1644407 - RNA, 19 nt, Artificial Sequence
  Description of Artificial Sequence: Synthetic oligonucleotide
  Sense strand starting at position 3527 of SEQ ID NO: 1561067
acugguacuggcugggaau

SEQ ID NO: 1644408 - RNA, 19 nt, Artificial Sequence
  Description of Artificial Sequence: Synthetic oligonucleotide
  Antisense strand to SEQ ID NO: 1644407
auucccagccaguaccagu

SEQ ID NO: 1644409 - RNA, 19 nt, Artificial Sequence
  Description of Artificial Sequence: Synthetic oligonucleotide
  Sense strand starting at position 3528 of SEQ ID NO: 1561067
cugguacuggcugggaauu

SEQ ID NO: 1644410 - RNA, 19 nt, Artificial Sequence
  Description of Artificial Sequence: Synthetic oligonucleotide
  Antisense strand to SEQ ID NO: 1644409
aauucccagccaguaccag

SEQ ID NO: 1644411 - RNA, 19 nt, Artificial Sequence
  Description of Artificial Sequence: Synthetic oligonucleotide
  Sense strand starting at position 3692 of SEQ ID NO: 1561067
gugggcuauggugaauaau

SEQ ID NO: 1644412 - RNA, 19 nt, Artificial Sequence
  Description of Artificial Sequence: Synthetic oligonucleotide
  Antisense strand to SEQ ID NO: 1644411
auuauucaccauagcccac

SEQ ID NO: 1644413 - RNA, 19 nt, Artificial Sequence
  Description of Artificial Sequence: Synthetic oligonucleotide
  Sense strand starting at position 3969 of SEQ ID NO: 1561067
ugauaucugugguuugaau

SEQ ID NO: 1644414 - RNA, 19 nt, Artificial Sequence
  Description of Artificial Sequence: Synthetic oligonucleotide
  Antisense strand to SEQ ID NO: 1644413
auucaaaccacagauauca

SEQ ID NO: 1644415 - RNA, 19 nt, Artificial Sequence
  Description of Artificial Sequence: Synthetic oligonucleotide
  Sense strand starting at position 410 of SEQ ID NO: 1561068
agagaauacugacaucgcu

SEQ ID NO: 1644416 - RNA, 19 nt, Artificial Sequence
  Description of Artificial Sequence: Synthetic oligonucleotide
  Antisense strand to SEQ ID NO: 1644415
agcgaugucaguauucucu

SEQ ID NO: 1644417 - RNA, 19 nt, Artificial Sequence
  Description of Artificial Sequence: Synthetic oligonucleotide
  Sense strand starting at position 522 of SEQ ID NO: 1561068
gccaaaguccucuaagcaa

SEQ ID NO: 1644418 - RNA, 19 nt, Artificial Sequence
  Description of Artificial Sequence: Synthetic oligonucleotide
  Antisense strand to SEQ ID NO: 1644417
uugcuuagaggacuuuggc

SEQ ID NO: 1644419 - RNA, 19 nt, Artificial Sequence
  Description of Artificial Sequence: Synthetic oligonucleotide
  Sense strand starting at position 529 of SEQ ID NO: 1561068
uccucuaagcaaugugaaa

SEQ ID NO: 1644420 - RNA, 19 nt, Artificial Sequence
  Description of Artificial Sequence: Synthetic oligonucleotide
  Antisense strand to SEQ ID NO: 1644419
uuucacauugcuuagagga

SEQ ID NO: 1644421 - RNA, 19 nt, Artificial Sequence
  Description of Artificial Sequence: Synthetic oligonucleotide
  Sense strand starting at position 588 of SEQ ID NO: 1561068
agguuuccaucugagcaaa

SEQ ID NO: 1644422 - RNA, 19 nt, Artificial Sequence
  Description of Artificial Sequence: Synthetic oligonucleotide
  Antisense strand to SEQ ID NO: 1644421
uuugcucagauggaaaccu

SEQ ID NO: 1644423 - RNA, 19 nt, Artificial Sequence
  Description of Artificial Sequence: Synthetic oligonucleotide
  Sense strand starting at position 590 of SEQ ID NO: 1561068
guuuccaucugagcaaaca

SEQ ID NO: 1644424 - RNA, 19 nt, Artificial Sequence
  Description of Artificial Sequence: Synthetic oligonucleotide
  Antisense strand to SEQ ID NO: 1644423
uguuugcucagauggaaac

SEQ ID NO: 1644425 - RNA, 19 nt, Artificial Sequence
  Description of Artificial Sequence: Synthetic oligonucleotide
  Sense strand starting at position 751 of SEQ ID NO: 1561068
ccaccauguuuccuaagag

SEQ ID NO: 1644426 - RNA, 19 nt, Artificial Sequence
  Description of Artificial Sequence: Synthetic oligonucleotide
  Antisense strand to SEQ ID NO: 1644425
cucuuaggaaacauggugg

SEQ ID NO: 1644427 - RNA, 19 nt, Artificial Sequence
  Description of Artificial Sequence: Synthetic oligonucleotide
  Sense strand starting at position 784 of SEQ ID NO: 1561068
guaagcaugugacuuccaa

SEQ ID NO: 1644428 - RNA, 19 nt, Artificial Sequence
  Description of Artificial Sequence: Synthetic oligonucleotide
  Antisense strand to SEQ ID NO: 1644427
uuggaagucacaugcuuac

SEQ ID NO: 1644429 - RNA, 19 nt, Artificial Sequence
  Description of Artificial Sequence: Synthetic oligonucleotide
  Sense strand starting at position 788 of SEQ ID NO: 1561068
gcaugugacuuccaagaau

SEQ ID NO: 1644430 - RNA, 19 nt, Artificial Sequence
  Description of Artificial Sequence: Synthetic oligonucleotide
  Antisense strand to SEQ ID NO: 1644429
auucuuggaagucacaugc

SEQ ID NO: 1644431 - RNA, 19 nt, Artificial Sequence
  Description of Artificial Sequence: Synthetic oligonucleotide
  Sense strand starting at position 817 of SEQ ID NO: 1561068
gggucugaguucuagugac

SEQ ID NO: 1644432 - RNA, 19 nt, Artificial Sequence
  Description of Artificial Sequence: Synthetic oligonucleotide
  Antisense strand to SEQ ID NO: 1644431
gucacuagaacucagaccc

SEQ ID NO: 1644433 - RNA, 19 nt, Artificial Sequence
  Description of Artificial Sequence: Synthetic oligonucleotide
  Sense strand starting at position 875 of SEQ ID NO: 1561068
cucagugagucuccuauaa

SEQ ID NO: 1644434 - RNA, 19 nt, Artificial Sequence
  Description of Artificial Sequence: Synthetic oligonucleotide
  Antisense strand to SEQ ID NO: 1644433
uuauaggagacucacugag

SEQ ID NO: 1644435 - RNA, 19 nt, Artificial Sequence
  Description of Artificial Sequence: Synthetic oligonucleotide
  Sense strand starting at position 1060 of SEQ ID NO: 1561068
gaagcaucuugaggacaag

SEQ ID NO: 1644436 - RNA, 19 nt, Artificial Sequence
  Description of Artificial Sequence: Synthetic oligonucleotide
  Antisense strand to SEQ ID NO: 1644435
cuuguccucaagaugcuuc

SEQ ID NO: 1644437 - RNA, 19 nt, Artificial Sequence
  Description of Artificial Sequence: Synthetic oligonucleotide
  Sense strand starting at position 1350 of SEQ ID NO: 1561068
gagcuagggcucugagaga

SEQ ID NO: 1644438 - RNA, 19 nt, Artificial Sequence
  Description of Artificial Sequence: Synthetic oligonucleotide
  Antisense strand to SEQ ID NO: 1644437
ucucucagagcccuagcuc

SEQ ID NO: 1644439 - RNA, 19 nt, Artificial Sequence
  Description of Artificial Sequence: Synthetic oligonucleotide
  Sense strand starting at position 1586 of SEQ ID NO: 1561068
ggcgucuucuaccugcaga

SEQ ID NO: 1644440 - RNA, 19 nt, Artificial Sequence
  Description of Artificial Sequence: Synthetic oligonucleotide
  Antisense strand to SEQ ID NO: 1644439
ucugcagguagaagacgcc

SEQ ID NO: 1644441 - RNA, 19 nt, Artificial Sequence
  Description of Artificial Sequence: Synthetic oligonucleotide
  Sense strand starting at position 2066 of SEQ ID NO: 1561068
ggcggugcucuuugaggga

SEQ ID NO: 1644442 - RNA, 19 nt, Artificial Sequence
  Description of Artificial Sequence: Synthetic oligonucleotide
  Antisense strand to SEQ ID NO: 1644441
ucccucaaagagcaccgcc

SEQ ID NO: 1644443 - RNA, 19 nt, Artificial Sequence
  Description of Artificial Sequence: Synthetic oligonucleotide
  Sense strand starting at position 2079 of SEQ ID NO: 1561068
gagggacucuucugaagac

SEQ ID NO: 1644444 - RNA, 19 nt, Artificial Sequence
  Description of Artificial Sequence: Synthetic oligonucleotide
  Antisense strand to SEQ ID NO: 1644443
gucuucagaagagucccuc

SEQ ID NO: 1644445 - RNA, 19 nt, Artificial Sequence
  Description of Artificial Sequence: Synthetic oligonucleotide
  Sense strand starting at position 2091 of SEQ ID NO: 1561068
ugaagaccuucuccuuaag

SEQ ID NO: 1644446 - RNA, 19 nt, Artificial Sequence
  Description of Artificial Sequence: Synthetic oligonucleotide
  Antisense strand to SEQ ID NO: 1644445
cuuaaggagaaggucuuca

SEQ ID NO: 1644447 - RNA, 19 nt, Artificial Sequence
  Description of Artificial Sequence: Synthetic oligonucleotide
  Sense strand starting at position 2100 of SEQ ID NO: 1561068
ucuccuuaagauugguauc

SEQ ID NO: 1644448 - RNA, 19 nt, Artificial Sequence
  Description of Artificial Sequence: Synthetic oligonucleotide
  Antisense strand to SEQ ID NO: 1644447
gauaccaaucuuaaggaga

SEQ ID NO: 1644449 - RNA, 19 nt, Artificial Sequence
  Description of Artificial Sequence: Synthetic oligonucleotide
  Sense strand starting at position 2102 of SEQ ID NO: 1561068
uccuuaagauugguaucau

SEQ ID NO: 1644450 - RNA, 19 nt, Artificial Sequence
  Description of Artificial Sequence: Synthetic oligonucleotide
  Antisense strand to SEQ ID NO: 1644449
augauaccaaucuuaagga

SEQ ID NO: 1644451 - RNA, 19 nt, Artificial Sequence
  Description of Artificial Sequence: Synthetic oligonucleotide
  Sense strand starting at position 2103 of SEQ ID NO: 1561068
ccuuaagauugguaucaua

SEQ ID NO: 1644452 - RNA, 19 nt, Artificial Sequence
  Description of Artificial Sequence: Synthetic oligonucleotide
  Antisense strand to SEQ ID NO: 1644451
uaugauaccaaucuuaagg

SEQ ID NO: 1644453 - RNA, 19 nt, Artificial Sequence
  Description of Artificial Sequence: Synthetic oligonucleotide
  Sense strand starting at position 2344 of SEQ ID NO: 1561068
gccugcuuucgccuuacaa

SEQ ID NO: 1644454 - RNA, 19 nt, Artificial Sequence
  Description of Artificial Sequence: Synthetic oligonucleotide
  Antisense strand to SEQ ID NO: 1644453
uuguaaggcgaaagcaggc

SEQ ID NO: 1644455 - RNA, 19 nt, Artificial Sequence
  Description of Artificial Sequence: Synthetic oligonucleotide
  Sense strand starting at position 2346 of SEQ ID NO: 1561068
cugcuuucgccuuacaaca

SEQ ID NO: 1644456 - RNA, 19 nt, Artificial Sequence
  Description of Artificial Sequence: Synthetic oligonucleotide
  Antisense strand to SEQ ID NO: 1644455
uguuguaaggcgaaagcag

SEQ ID NO: 1644457 - RNA, 19 nt, Artificial Sequence
  Description of Artificial Sequence: Synthetic oligonucleotide
  Sense strand starting at position 2364 of SEQ ID NO: 1561068
agaguagguaguugcuaaa

SEQ ID NO: 1644458 - RNA, 19 nt, Artificial Sequence
  Description of Artificial Sequence: Synthetic oligonucleotide
  Antisense strand to SEQ ID NO: 1644457
uuuagcaacuaccuacucu

SEQ ID NO: 1644459 - RNA, 19 nt, Artificial Sequence
  Description of Artificial Sequence: Synthetic oligonucleotide
  Sense strand starting at position 2367 of SEQ ID NO: 1561068
guagguaguugcuaaagau

SEQ ID NO: 1644460 - RNA, 19 nt, Artificial Sequence
  Description of Artificial Sequence: Synthetic oligonucleotide
  Antisense strand to SEQ ID NO: 1644459
aucuuuagcaacuaccuac

SEQ ID NO: 1644461 - RNA, 19 nt, Artificial Sequence
  Description of Artificial Sequence: Synthetic oligonucleotide
  Sense strand starting at position 2376 of SEQ ID NO: 1561068
ugcuaaagauccuacagau

SEQ ID NO: 1644462 - RNA, 19 nt, Artificial Sequence
  Description of Artificial Sequence: Synthetic oligonucleotide
  Antisense strand to SEQ ID NO: 1644461
aucuguaggaucuuuagca

SEQ ID NO: 1644463 - RNA, 19 nt, Artificial Sequence
  Description of Artificial Sequence: Synthetic oligonucleotide
  Sense strand starting at position 2394 of SEQ ID NO: 1561068
ucugcagacccugaaguau

SEQ ID NO: 1644464 - RNA, 19 nt, Artificial Sequence
  Description of Artificial Sequence: Synthetic oligonucleotide
  Antisense strand to SEQ ID NO: 1644463
auacuucagggucugcaga

SEQ ID NO: 1644465 - RNA, 19 nt, Artificial Sequence
  Description of Artificial Sequence: Synthetic oligonucleotide
  Sense strand starting at position 2409 of SEQ ID NO: 1561068
guauuuacgaucuggccuu

SEQ ID NO: 1644466 - RNA, 19 nt, Artificial Sequence
  Description of Artificial Sequence: Synthetic oligonucleotide
  Antisense strand to SEQ ID NO: 1644465
aaggccagaucguaaauac

SEQ ID NO: 1644467 - RNA, 19 nt, Artificial Sequence
  Description of Artificial Sequence: Synthetic oligonucleotide
  Sense strand starting at position 2505 of SEQ ID NO: 1561068
agggccuugcguggugaau

SEQ ID NO: 1644468 - RNA, 19 nt, Artificial Sequence
  Description of Artificial Sequence: Synthetic oligonucleotide
  Antisense strand to SEQ ID NO: 1644467
auucaccacgcaaggcccu

SEQ ID NO: 1644469 - RNA, 19 nt, Artificial Sequence
  Description of Artificial Sequence: Synthetic oligonucleotide
  Sense strand starting at position 2506 of SEQ ID NO: 1561068
gggccuugcguggugaauu

SEQ ID NO: 1644470 - RNA, 19 nt, Artificial Sequence
  Description of Artificial Sequence: Synthetic oligonucleotide
  Antisense strand to SEQ ID NO: 1644469
aauucaccacgcaaggccc

SEQ ID NO: 1644471 - RNA, 19 nt, Artificial Sequence
  Description of Artificial Sequence: Synthetic oligonucleotide
  Sense strand starting at position 2529 of SEQ ID NO: 1561068
cuaaauggccuuuaaguua

SEQ ID NO: 1644472 - RNA, 19 nt, Artificial Sequence
  Description of Artificial Sequence: Synthetic oligonucleotide
  Antisense strand to SEQ ID NO: 1644471
uaacuuaaaggccauuuag

SEQ ID NO: 1644473 - RNA, 19 nt, Artificial Sequence
  Description of Artificial Sequence: Synthetic oligonucleotide
  Sense strand starting at position 2537 of SEQ ID NO: 1561068
ccuuuaaguuaguccuacu

SEQ ID NO: 1644474 - RNA, 19 nt, Artificial Sequence
  Description of Artificial Sequence: Synthetic oligonucleotide
  Antisense strand to SEQ ID NO: 1644473
aguaggacuaacuuaaagg

SEQ ID NO: 1644475 - RNA, 19 nt, Artificial Sequence
  Description of Artificial Sequence: Synthetic oligonucleotide
  Sense strand starting at position 2859 of SEQ ID NO: 1561068
gguacuuucucagcccuga

SEQ ID NO: 1644476 - RNA, 19 nt, Artificial Sequence
  Description of Artificial Sequence: Synthetic oligonucleotide
  Antisense strand to SEQ ID NO: 1644475
ucagggcugagaaaguacc

SEQ ID NO: 1644477 - RNA, 19 nt, Artificial Sequence
  Description of Artificial Sequence: Synthetic oligonucleotide
  Sense strand starting at position 3136 of SEQ ID NO: 1561068
aggucuggaguuggagauu

SEQ ID NO: 1644478 - RNA, 19 nt, Artificial Sequence
  Description of Artificial Sequence: Synthetic oligonucleotide
  Antisense strand to SEQ ID NO: 1644477
aaucuccaacuccagaccu

SEQ ID NO: 1644479 - RNA, 19 nt, Artificial Sequence
  Description of Artificial Sequence: Synthetic oligonucleotide
  Sense strand starting at position 3647 of SEQ ID NO: 1561068
uccuauuucuaaugagaug

SEQ ID NO: 1644480 - RNA, 19 nt, Artificial Sequence
  Description of Artificial Sequence: Synthetic oligonucleotide
  Antisense strand to SEQ ID NO: 1644479
caucucauuagaaauagga

SEQ ID NO: 1644481 - RNA, 19 nt, Artificial Sequence
  Description of Artificial Sequence: Synthetic oligonucleotide
  Sense strand starting at position 3690 of SEQ ID NO: 1561068
cugucagaauugguccuua

SEQ ID NO: 1644482 - RNA, 19 nt, Artificial Sequence
  Description of Artificial Sequence: Synthetic oligonucleotide
  Antisense strand to SEQ ID NO: 1644481
uaaggaccaauucugacag

SEQ ID NO: 1644483 - RNA, 19 nt, Artificial Sequence
  Description of Artificial Sequence: Synthetic oligonucleotide
  Sense strand starting at position 3694 of SEQ ID NO: 1561068
cagaauugguccuuaggaa

SEQ ID NO: 1644484 - RNA, 19 nt, Artificial Sequence
  Description of Artificial Sequence: Synthetic oligonucleotide
  Antisense strand to SEQ ID NO: 1644483
uuccuaaggaccaauucug

SEQ ID NO: 1644485 - RNA, 19 nt, Artificial Sequence
  Description of Artificial Sequence: Synthetic oligonucleotide
  Sense strand starting at position 3821 of SEQ ID NO: 1561068
uuuccuuugccagaaguac

SEQ ID NO: 1644486 - RNA, 19 nt, Artificial Sequence
  Description of Artificial Sequence: Synthetic oligonucleotide
  Antisense strand to SEQ ID NO: 1644485
guacuucuggcaaaggaaa

SEQ ID NO: 1644487 - RNA, 19 nt, Artificial Sequence
  Description of Artificial Sequence: Synthetic oligonucleotide
  Sense strand starting at position 3840 of SEQ ID NO: 1561068
ugucaugccucuuuguuau

SEQ ID NO: 1644488 - RNA, 19 nt, Artificial Sequence
  Description of Artificial Sequence: Synthetic oligonucleotide
  Antisense strand to SEQ ID NO: 1644487
auaacaaagaggcaugaca

SEQ ID NO: 1644489 - RNA, 19 nt, Artificial Sequence
  Description of Artificial Sequence: Synthetic oligonucleotide
  Sense strand starting at position 3943 of SEQ ID NO: 1561068
cccucagucccuuguauuu

SEQ ID NO: 1644490 - RNA, 19 nt, Artificial Sequence
  Description of Artificial Sequence: Synthetic oligonucleotide
  Antisense strand to SEQ ID NO: 1644489
aaauacaagggacugaggg

SEQ ID NO: 1644491 - RNA, 19 nt, Artificial Sequence
  Description of Artificial Sequence: Synthetic oligonucleotide
  Sense strand starting at position 3973 of SEQ ID NO: 1561068
uguguccgucucuaauaca

SEQ ID NO: 1644492 - RNA, 19 nt, Artificial Sequence
  Description of Artificial Sequence: Synthetic oligonucleotide
  Antisense strand to SEQ ID NO: 1644491
uguauuagagacggacaca

SEQ ID NO: 1644493 - RNA, 19 nt, Artificial Sequence
  Description of Artificial Sequence: Synthetic oligonucleotide
  Sense strand starting at position 3976 of SEQ ID NO: 1561068
guccgucucuaauacaaau

SEQ ID NO: 1644494 - RNA, 19 nt, Artificial Sequence
  Description of Artificial Sequence: Synthetic oligonucleotide
  Antisense strand to SEQ ID NO: 1644493
auuuguauuagagacggac

SEQ ID NO: 1644495 - RNA, 19 nt, Artificial Sequence
  Description of Artificial Sequence: Synthetic oligonucleotide
  Sense strand starting at position 9 of SEQ ID NO: 1561069
acuugagugcuguggcaca

SEQ ID NO: 1644496 - RNA, 19 nt, Artificial Sequence
  Description of Artificial Sequence: Synthetic oligonucleotide
  Antisense strand to SEQ ID NO: 1644495
ugugccacagcacucaagu

SEQ ID NO: 1644497 - RNA, 19 nt, Artificial Sequence
  Description of Artificial Sequence: Synthetic oligonucleotide
  Sense strand starting at position 87 of SEQ ID NO: 1561069
ccacguagcuaggaauaua

SEQ ID NO: 1644498 - RNA, 19 nt, Artificial Sequence
  Description of Artificial Sequence: Synthetic oligonucleotide
  Antisense strand to SEQ ID NO: 1644497
uauauuccuagcuacgugg

SEQ ID NO: 1644499 - RNA, 19 nt, Artificial Sequence
  Description of Artificial Sequence: Synthetic oligonucleotide
  Sense strand starting at position 589 of SEQ ID NO: 1561069
auuaauguagccugggcaa

SEQ ID NO: 1644500 - RNA, 19 nt, Artificial Sequence
  Description of Artificial Sequence: Synthetic oligonucleotide
  Antisense strand to SEQ ID NO: 1644499
uugcccaggcuacauuaau

SEQ ID NO: 1644501 - RNA, 19 nt, Artificial Sequence
  Description of Artificial Sequence: Synthetic oligonucleotide
  Sense strand starting at position 591 of SEQ ID NO: 1561069
uaauguagccugggcaaua

SEQ ID NO: 1644502 - RNA, 19 nt, Artificial Sequence
  Description of Artificial Sequence: Synthetic oligonucleotide
  Antisense strand to SEQ ID NO: 1644501
uauugcccaggcuacauua

SEQ ID NO: 1644503 - RNA, 19 nt, Artificial Sequence
  Description of Artificial Sequence: Synthetic oligonucleotide
  Sense strand starting at position 793 of SEQ ID NO: 1561069
guaguauggacuugugguu

SEQ ID NO: 1644504 - RNA, 19 nt, Artificial Sequence
  Description of Artificial Sequence: Synthetic oligonucleotide
  Antisense strand to SEQ ID NO: 1644503
aaccacaaguccauacuac

SEQ ID NO: 1644505 - RNA, 19 nt, Artificial Sequence
  Description of Artificial Sequence: Synthetic oligonucleotide
  Sense strand starting at position 1351 of SEQ ID NO: 1561069
guuggaaugugcugcaauu

SEQ ID NO: 1644506 - RNA, 19 nt, Artificial Sequence
  Description of Artificial Sequence: Synthetic oligonucleotide
  Antisense strand to SEQ ID NO: 1644505
aauugcagcacauuccaac

SEQ ID NO: 1644507 - RNA, 19 nt, Artificial Sequence
  Description of Artificial Sequence: Synthetic oligonucleotide
  Sense strand starting at position 1413 of SEQ ID NO: 1561069
augcaugucccauggagaa

SEQ ID NO: 1644508 - RNA, 19 nt, Artificial Sequence
  Description of Artificial Sequence: Synthetic oligonucleotide
  Antisense strand to SEQ ID NO: 1644507
uucuccaugggacaugcau

SEQ ID NO: 1644509 - RNA, 19 nt, Artificial Sequence
  Description of Artificial Sequence: Synthetic oligonucleotide
  Sense strand starting at position 2093 of SEQ ID NO: 1561069
uugguaaauucucucugca

SEQ ID NO: 1644510 - RNA, 19 nt, Artificial Sequence
  Description of Artificial Sequence: Synthetic oligonucleotide
  Antisense strand to SEQ ID NO: 1644509
ugcagagagaauuuaccaa

SEQ ID NO: 1644511 - RNA, 19 nt, Artificial Sequence
  Description of Artificial Sequence: Synthetic oligonucleotide
  Sense strand starting at position 2095 of SEQ ID NO: 1561069
gguaaauucucucugcaaa

SEQ ID NO: 1644512 - RNA, 19 nt, Artificial Sequence
  Description of Artificial Sequence: Synthetic oligonucleotide
  Antisense strand to SEQ ID NO: 1644511
uuugcagagagaauuuacc

SEQ ID NO: 1644513 - RNA, 19 nt, Artificial Sequence
  Description of Artificial Sequence: Synthetic oligonucleotide
  Sense strand starting at position 2096 of SEQ ID NO: 1561069
guaaauucucucugcaaag

SEQ ID NO: 1644514 - RNA, 19 nt, Artificial Sequence
  Description of Artificial Sequence: Synthetic oligonucleotide
  Antisense strand to SEQ ID NO: 1644513
cuuugcagagagaauuuac

SEQ ID NO: 1644515 - RNA, 19 nt, Artificial Sequence
  Description of Artificial Sequence: Synthetic oligonucleotide
  Sense strand starting at position 2170 of SEQ ID NO: 1561069
cugccuuuguggugagaaa

SEQ ID NO: 1644516 - RNA, 19 nt, Artificial Sequence
  Description of Artificial Sequence: Synthetic oligonucleotide
  Antisense strand to SEQ ID NO: 1644515
uuucucaccacaaaggcag

SEQ ID NO: 1644517 - RNA, 19 nt, Artificial Sequence
  Description of Artificial Sequence: Synthetic oligonucleotide
  Sense strand starting at position 2214 of SEQ ID NO: 1561069
aaugguugugucuguguga

SEQ ID NO: 1644518 - RNA, 19 nt, Artificial Sequence
  Description of Artificial Sequence: Synthetic oligonucleotide
  Antisense strand to SEQ ID NO: 1644517
ucacacagacacaaccauu

SEQ ID NO: 1644519 - RNA, 19 nt, Artificial Sequence
  Description of Artificial Sequence: Synthetic oligonucleotide
  Sense strand starting at position 2219 of SEQ ID NO: 1561069
uugugucugugugacagua

SEQ ID NO: 1644520 - RNA, 19 nt, Artificial Sequence
  Description of Artificial Sequence: Synthetic oligonucleotide
  Antisense strand to SEQ ID NO: 1644519
uacugucacacagacacaa

SEQ ID NO: 1644521 - RNA, 19 nt, Artificial Sequence
  Description of Artificial Sequence: Synthetic oligonucleotide
  Sense strand starting at position 2221 of SEQ ID NO: 1561069
gugucugugugacaguaaa

SEQ ID NO: 1644522 - RNA, 19 nt, Artificial Sequence
  Description of Artificial Sequence: Synthetic oligonucleotide
  Antisense strand to SEQ ID NO: 1644521
uuuacugucacacagacac

SEQ ID NO: 1644523 - RNA, 19 nt, Artificial Sequence
  Description of Artificial Sequence: Synthetic oligonucleotide
  Sense strand starting at position 2432 of SEQ ID NO: 1561069
gcagaaucauggcagcaau

SEQ ID NO: 1644524 - RNA, 19 nt, Artificial Sequence
  Description of Artificial Sequence: Synthetic oligonucleotide
  Antisense strand to SEQ ID NO: 1644523
auugcugccaugauucugc

SEQ ID NO: 1644525 - RNA, 19 nt, Artificial Sequence
  Description of Artificial Sequence: Synthetic oligonucleotide
  Sense strand starting at position 2487 of SEQ ID NO: 1561069
ccacguuaucccuggcacu

SEQ ID NO: 1644526 - RNA, 19 nt, Artificial Sequence
  Description of Artificial Sequence: Synthetic oligonucleotide
  Antisense strand to SEQ ID NO: 1644525
agugccagggauaacgugg

SEQ ID NO: 1644527 - RNA, 19 nt, Artificial Sequence
  Description of Artificial Sequence: Synthetic oligonucleotide
  Sense strand starting at position 2676 of SEQ ID NO: 1561069
gcaccaugucaacgaacau

SEQ ID NO: 1644528 - RNA, 19 nt, Artificial Sequence
  Description of Artificial Sequence: Synthetic oligonucleotide
  Antisense strand to SEQ ID NO: 1644527
auguucguugacauggugc

SEQ ID NO: 1644529 - RNA, 19 nt, Artificial Sequence
  Description of Artificial Sequence: Synthetic oligonucleotide
  Sense strand starting at position 2709 of SEQ ID NO: 1561069
gcgcuaccuccuugcagau

SEQ ID NO: 1644530 - RNA, 19 nt, Artificial Sequence
  Description of Artificial Sequence: Synthetic oligonucleotide
  Antisense strand to SEQ ID NO: 1644529
aucugcaaggagguagcgc

SEQ ID NO: 1644531 - RNA, 19 nt, Artificial Sequence
  Description of Artificial Sequence: Synthetic oligonucleotide
  Sense strand starting at position 3000 of SEQ ID NO: 1561069
ucauguggacauuacaagu

SEQ ID NO: 1644532 - RNA, 19 nt, Artificial Sequence
  Description of Artificial Sequence: Synthetic oligonucleotide
  Antisense strand to SEQ ID NO: 1644531
acuuguaauguccacauga

SEQ ID NO: 1644533 - RNA, 19 nt, Artificial Sequence
  Description of Artificial Sequence: Synthetic oligonucleotide
  Sense strand starting at position 3036 of SEQ ID NO: 1561069
caacaucauggaugcgaau

SEQ ID NO: 1644534 - RNA, 19 nt, Artificial Sequence
  Description of Artificial Sequence: Synthetic oligonucleotide
  Antisense strand to SEQ ID NO: 1644533
auucgcauccaugauguug

SEQ ID NO: 1644535 - RNA, 19 nt, Artificial Sequence
  Description of Artificial Sequence: Synthetic oligonucleotide
  Sense strand starting at position 3038 of SEQ ID NO: 1561069
acaucauggaugcgaauga

SEQ ID NO: 1644536 - RNA, 19 nt, Artificial Sequence
  Description of Artificial Sequence: Synthetic oligonucleotide
  Antisense strand to SEQ ID NO: 1644535
ucauucgcauccaugaugu

SEQ ID NO: 1644537 - RNA, 19 nt, Artificial Sequence
  Description of Artificial Sequence: Synthetic oligonucleotide
  Sense strand starting at position 3176 of SEQ ID NO: 1561069
acaguaaggcuuugaaaua

SEQ ID NO: 1644538 - RNA, 19 nt, Artificial Sequence
  Description of Artificial Sequence: Synthetic oligonucleotide
  Antisense strand to SEQ ID NO: 1644537
uauuucaaagccuuacugu

SEQ ID NO: 1644539 - RNA, 19 nt, Artificial Sequence
  Description of Artificial Sequence: Synthetic oligonucleotide
  Sense strand starting at position 3177 of SEQ ID NO: 1561069
caguaaggcuuugaaauac

SEQ ID NO: 1644540 - RNA, 19 nt, Artificial Sequence
  Description of Artificial Sequence: Synthetic oligonucleotide
  Antisense strand to SEQ ID NO: 1644539
guauuucaaagccuuacug

SEQ ID NO: 1644541 - RNA, 19 nt, Artificial Sequence
  Description of Artificial Sequence: Synthetic oligonucleotide
  Sense strand starting at position 42 of SEQ ID NO: 1561070
gggccaaugaaaugguguu

SEQ ID NO: 1644542 - RNA, 19 nt, Artificial Sequence
  Description of Artificial Sequence: Synthetic oligonucleotide
  Antisense strand to SEQ ID NO: 1644541
aacaccauuucauuggccc

SEQ ID NO: 1644543 - RNA, 19 nt, Artificial Sequence
  Description of Artificial Sequence: Synthetic oligonucleotide
  Sense strand starting at position 43 of SEQ ID NO: 1561070
ggccaaugaaaugguguuu

SEQ ID NO: 1644544 - RNA, 19 nt, Artificial Sequence
  Description of Artificial Sequence: Synthetic oligonucleotide
  Antisense strand to SEQ ID NO: 1644543
aaacaccauuucauuggcc

SEQ ID NO: 1644545 - RNA, 19 nt, Artificial Sequence
  Description of Artificial Sequence: Synthetic oligonucleotide
  Sense strand starting at position 48 of SEQ ID NO: 1561070
augaaaugguguuucuaug

SEQ ID NO: 1644546 - RNA, 19 nt, Artificial Sequence
  Description of Artificial Sequence: Synthetic oligonucleotide
  Antisense strand to SEQ ID NO: 1644545
cauagaaacaccauuucau

SEQ ID NO: 1644547 - RNA, 19 nt, Artificial Sequence
  Description of Artificial Sequence: Synthetic oligonucleotide
  Sense strand starting at position 86 of SEQ ID NO: 1561070
cuugcuaguugacuggaua

SEQ ID NO: 1644548 - RNA, 19 nt, Artificial Sequence
  Description of Artificial Sequence: Synthetic oligonucleotide
  Antisense strand to SEQ ID NO: 1644547
uauccagucaacuagcaag

SEQ ID NO: 1644549 - RNA, 19 nt, Artificial Sequence
  Description of Artificial Sequence: Synthetic oligonucleotide
  Sense strand starting at position 87 of SEQ ID NO: 1561070
uugcuaguugacuggauau

SEQ ID NO: 1644550 - RNA, 19 nt, Artificial Sequence
  Description of Artificial Sequence: Synthetic oligonucleotide
  Antisense strand to SEQ ID NO: 1644549
auauccagucaacuagcaa

SEQ ID NO: 1644551 - RNA, 19 nt, Artificial Sequence
  Description of Artificial Sequence: Synthetic oligonucleotide
  Sense strand starting at position 219 of SEQ ID NO: 1561070
guuggacaugcugaguuua

SEQ ID NO: 1644552 - RNA, 19 nt, Artificial Sequence
  Description of Artificial Sequence: Synthetic oligonucleotide
  Antisense strand to SEQ ID NO: 1644551
uaaacucagcauguccaac

SEQ ID NO: 1644553 - RNA, 19 nt, Artificial Sequence
  Description of Artificial Sequence: Synthetic oligonucleotide
  Sense strand starting at position 232 of SEQ ID NO: 1561070
aguuuauggugcccaagaa

SEQ ID NO: 1644554 - RNA, 19 nt, Artificial Sequence
  Description of Artificial Sequence: Synthetic oligonucleotide
  Antisense strand to SEQ ID NO: 1644553
uucuugggcaccauaaacu

SEQ ID NO: 1644555 - RNA, 19 nt, Artificial Sequence
  Description of Artificial Sequence: Synthetic oligonucleotide
  Sense strand starting at position 233 of SEQ ID NO: 1561070
guuuauggugcccaagaaa

SEQ ID NO: 1644556 - RNA, 19 nt, Artificial Sequence
  Description of Artificial Sequence: Synthetic oligonucleotide
  Antisense strand to SEQ ID NO: 1644555
uuucuugggcaccauaaac

SEQ ID NO: 1644557 - RNA, 19 nt, Artificial Sequence
  Description of Artificial Sequence: Synthetic oligonucleotide
  Sense strand starting at position 469 of SEQ ID NO: 1561070
acuauaguguguuccauaa

SEQ ID NO: 1644558 - RNA, 19 nt, Artificial Sequence
  Description of Artificial Sequence: Synthetic oligonucleotide
  Antisense strand to SEQ ID NO: 1644557
uuauggaacacacuauagu

SEQ ID NO: 1644559 - RNA, 19 nt, Artificial Sequence
  Description of Artificial Sequence: Synthetic oligonucleotide
  Sense strand starting at position 656 of SEQ ID NO: 1561070
ugugcaaagcacuaaacau

SEQ ID NO: 1644560 - RNA, 19 nt, Artificial Sequence
  Description of Artificial Sequence: Synthetic oligonucleotide
  Antisense strand to SEQ ID NO: 1644559
auguuuagugcuuugcaca

SEQ ID NO: 1644561 - RNA, 19 nt, Artificial Sequence
  Description of Artificial Sequence: Synthetic oligonucleotide
  Sense strand starting at position 823 of SEQ ID NO: 1561070
gauggagaauauugaagaa

SEQ ID NO: 1644562 - RNA, 19 nt, Artificial Sequence
  Description of Artificial Sequence: Synthetic oligonucleotide
  Antisense strand to SEQ ID NO: 1644561
uucuucaauauucuccauc

SEQ ID NO: 1644563 - RNA, 19 nt, Artificial Sequence
  Description of Artificial Sequence: Synthetic oligonucleotide
  Sense strand starting at position 856 of SEQ ID NO: 1561070
aagagcugcuacuuaguga

SEQ ID NO: 1644564 - RNA, 19 nt, Artificial Sequence
  Description of Artificial Sequence: Synthetic oligonucleotide
  Antisense strand to SEQ ID NO: 1644563
ucacuaaguagcagcucuu

SEQ ID NO: 1644565 - RNA, 19 nt, Artificial Sequence
  Description of Artificial Sequence: Synthetic oligonucleotide
  Sense strand starting at position 861 of SEQ ID NO: 1561070
cugcuacuuagugagagau

SEQ ID NO: 1644566 - RNA, 19 nt, Artificial Sequence
  Description of Artificial Sequence: Synthetic oligonucleotide
  Antisense strand to SEQ ID NO: 1644565
aucucucacuaaguagcag

SEQ ID NO: 1644567 - RNA, 19 nt, Artificial Sequence
  Description of Artificial Sequence: Synthetic oligonucleotide
  Sense strand starting at position 873 of SEQ ID NO: 1561070
gagagauggcgcuggacua

SEQ ID NO: 1644568 - RNA, 19 nt, Artificial Sequence
  Description of Artificial Sequence: Synthetic oligonucleotide
  Antisense strand to SEQ ID NO: 1644567
uaguccagcgccaucucuc

SEQ ID NO: 1644569 - RNA, 19 nt, Artificial Sequence
  Description of Artificial Sequence: Synthetic oligonucleotide
  Sense strand starting at position 913 of SEQ ID NO: 1561070
cuuacaacccuuugagagu

SEQ ID NO: 1644570 - RNA, 19 nt, Artificial Sequence
  Description of Artificial Sequence: Synthetic oligonucleotide
  Antisense strand to SEQ ID NO: 1644569
acucucaaaggguuguaag

SEQ ID NO: 1644571 - RNA, 19 nt, Artificial Sequence
  Description of Artificial Sequence: Synthetic oligonucleotide
  Sense strand starting at position 919 of SEQ ID NO: 1561070
acccuuugagagugaucuu

SEQ ID NO: 1644572 - RNA, 19 nt, Artificial Sequence
  Description of Artificial Sequence: Synthetic oligonucleotide
  Antisense strand to SEQ ID NO: 1644571
aagaucacucucaaagggu

SEQ ID NO: 1644573 - RNA, 19 nt, Artificial Sequence
  Description of Artificial Sequence: Synthetic oligonucleotide
  Sense strand starting at position 922 of SEQ ID NO: 1561070
cuuugagagugaucuuguu

SEQ ID NO: 1644574 - RNA, 19 nt, Artificial Sequence
  Description of Artificial Sequence: Synthetic oligonucleotide
  Antisense strand to SEQ ID NO: 1644573
aacaagaucacucucaaag

SEQ ID NO: 1644575 - RNA, 19 nt, Artificial Sequence
  Description of Artificial Sequence: Synthetic oligonucleotide
  Sense strand starting at position 1093 of SEQ ID NO: 1561070
guaccauuuacugagcguu

SEQ ID NO: 1644576 - RNA, 19 nt, Artificial Sequence
  Description of Artificial Sequence: Synthetic oligonucleotide
  Antisense strand to SEQ ID NO: 1644575
aacgcucaguaaaugguac

SEQ ID NO: 1644577 - RNA, 19 nt, Artificial Sequence
  Description of Artificial Sequence: Synthetic oligonucleotide
  Sense strand starting at position 1095 of SEQ ID NO: 1561070
accauuuacugagcguuau

SEQ ID NO: 1644578 - RNA, 19 nt, Artificial Sequence
  Description of Artificial Sequence: Synthetic oligonucleotide
  Antisense strand to SEQ ID NO: 1644577
auaacgcucaguaaauggu

SEQ ID NO: 1644579 - RNA, 19 nt, Artificial Sequence
  Description of Artificial Sequence: Synthetic oligonucleotide
  Sense strand starting at position 1096 of SEQ ID NO: 1561070
ccauuuacugagcguuaua

SEQ ID NO: 1644580 - RNA, 19 nt, Artificial Sequence
  Description of Artificial Sequence: Synthetic oligonucleotide
  Antisense strand to SEQ ID NO: 1644579
uauaacgcucaguaaaugg

SEQ ID NO: 1644581 - RNA, 19 nt, Artificial Sequence
  Description of Artificial Sequence: Synthetic oligonucleotide
  Sense strand starting at position 1144 of SEQ ID NO: 1561070
augguauucucacugcauc

SEQ ID NO: 1644582 - RNA, 19 nt, Artificial Sequence
  Description of Artificial Sequence: Synthetic oligonucleotide
  Antisense strand to SEQ ID NO: 1644581
gaugcagugagaauaccau

SEQ ID NO: 1644583 - RNA, 19 nt, Artificial Sequence
  Description of Artificial Sequence: Synthetic oligonucleotide
  Sense strand starting at position 1181 of SEQ ID NO: 1561070
agugguugcuauuuaaauc

SEQ ID NO: 1644584 - RNA, 19 nt, Artificial Sequence
  Description of Artificial Sequence: Synthetic oligonucleotide
  Antisense strand to SEQ ID NO: 1644583
gauuuaaauagcaaccacu

SEQ ID NO: 1644585 - RNA, 19 nt, Artificial Sequence
  Description of Artificial Sequence: Synthetic oligonucleotide
  Sense strand starting at position 1372 of SEQ ID NO: 1561070
ggacucaccucuuuacaug

SEQ ID NO: 1644586 - RNA, 19 nt, Artificial Sequence
  Description of Artificial Sequence: Synthetic oligonucleotide
  Antisense strand to SEQ ID NO: 1644585
cauguaaagaggugagucc

SEQ ID NO: 1644587 - RNA, 19 nt, Artificial Sequence
  Description of Artificial Sequence: Synthetic oligonucleotide
  Sense strand starting at position 1414 of SEQ ID NO: 1561070
cuaugcaaucgauaacauc

SEQ ID NO: 1644588 - RNA, 19 nt, Artificial Sequence
  Description of Artificial Sequence: Synthetic oligonucleotide
  Antisense strand to SEQ ID NO: 1644587
gauguuaucgauugcauag

SEQ ID NO: 1644589 - RNA, 19 nt, Artificial Sequence
  Description of Artificial Sequence: Synthetic oligonucleotide
  Sense strand starting at position 2612 of SEQ ID NO: 1561070
ggcggaguccucucgcaac

SEQ ID NO: 1644590 - RNA, 19 nt, Artificial Sequence
  Description of Artificial Sequence: Synthetic oligonucleotide
  Antisense strand to SEQ ID NO: 1644589
guugcgagaggacuccgcc

SEQ ID NO: 1644591 - RNA, 19 nt, Artificial Sequence
  Description of Artificial Sequence: Synthetic oligonucleotide
  Sense strand starting at position 2917 of SEQ ID NO: 1561070
ucgcacauuccugagggua

SEQ ID NO: 1644592 - RNA, 19 nt, Artificial Sequence
  Description of Artificial Sequence: Synthetic oligonucleotide
  Antisense strand to SEQ ID NO: 1644591
uacccucaggaaugugcga

SEQ ID NO: 1644593 - RNA, 19 nt, Artificial Sequence
  Description of Artificial Sequence: Synthetic oligonucleotide
  Sense strand starting at position 2920 of SEQ ID NO: 1561070
cacauuccugaggguaacu

SEQ ID NO: 1644594 - RNA, 19 nt, Artificial Sequence
  Description of Artificial Sequence: Synthetic oligonucleotide
  Antisense strand to SEQ ID NO: 1644593
aguuacccucaggaaugug

SEQ ID NO: 1644595 - RNA, 19 nt, Artificial Sequence
  Description of Artificial Sequence: Synthetic oligonucleotide
  Sense strand starting at position 2932 of SEQ ID NO: 1561070
gguaacuaguguuuguaga

SEQ ID NO: 1644596 - RNA, 19 nt, Artificial Sequence
  Description of Artificial Sequence: Synthetic oligonucleotide
  Antisense strand to SEQ ID NO: 1644595
ucuacaaacacuaguuacc

SEQ ID NO: 1644597 - RNA, 19 nt, Artificial Sequence
  Description of Artificial Sequence: Synthetic oligonucleotide
  Sense strand starting at position 2951 of SEQ ID NO: 1561070
guaccuacaccuugggaaa

SEQ ID NO: 1644598 - RNA, 19 nt, Artificial Sequence
  Description of Artificial Sequence: Synthetic oligonucleotide
  Antisense strand to SEQ ID NO: 1644597
uuucccaagguguagguac

SEQ ID NO: 1644599 - RNA, 19 nt, Artificial Sequence
  Description of Artificial Sequence: Synthetic oligonucleotide
  Sense strand starting at position 2954 of SEQ ID NO: 1561070
ccuacaccuugggaaauuu

SEQ ID NO: 1644600 - RNA, 19 nt, Artificial Sequence
  Description of Artificial Sequence: Synthetic oligonucleotide
  Antisense strand to SEQ ID NO: 1644599
aaauuucccaagguguagg

SEQ ID NO: 1644601 - RNA, 19 nt, Artificial Sequence
  Description of Artificial Sequence: Synthetic oligonucleotide
  Sense strand starting at position 2981 of SEQ ID NO: 1561070
uuuaauccaccuggugaca

SEQ ID NO: 1644602 - RNA, 19 nt, Artificial Sequence
  Description of Artificial Sequence: Synthetic oligonucleotide
  Antisense strand to SEQ ID NO: 1644601
ugucaccagguggauuaaa

SEQ ID NO: 1644603 - RNA, 19 nt, Artificial Sequence
  Description of Artificial Sequence: Synthetic oligonucleotide
  Sense strand starting at position 3052 of SEQ ID NO: 1561070
gccacuccuccauaagagu

SEQ ID NO: 1644604 - RNA, 19 nt, Artificial Sequence
  Description of Artificial Sequence: Synthetic oligonucleotide
  Antisense strand to SEQ ID NO: 1644603
acucuuauggaggaguggc

SEQ ID NO: 1644605 - RNA, 19 nt, Artificial Sequence
  Description of Artificial Sequence: Synthetic oligonucleotide
  Sense strand starting at position 3065 of SEQ ID NO: 1561070
aagaguuaccgagggaauu

SEQ ID NO: 1644606 - RNA, 19 nt, Artificial Sequence
  Description of Artificial Sequence: Synthetic oligonucleotide
  Antisense strand to SEQ ID NO: 1644605
aauucccucgguaacucuu

SEQ ID NO: 1644607 - RNA, 19 nt, Artificial Sequence
  Description of Artificial Sequence: Synthetic oligonucleotide
  Sense strand starting at position 3066 of SEQ ID NO: 1561070
agaguuaccgagggaauug

SEQ ID NO: 1644608 - RNA, 19 nt, Artificial Sequence
  Description of Artificial Sequence: Synthetic oligonucleotide
  Antisense strand to SEQ ID NO: 1644607
caauucccucgguaacucu

SEQ ID NO: 1644609 - RNA, 19 nt, Artificial Sequence
  Description of Artificial Sequence: Synthetic oligonucleotide
  Sense strand starting at position 3142 of SEQ ID NO: 1561070
gccugccuucuaggaagau

SEQ ID NO: 1644610 - RNA, 19 nt, Artificial Sequence
  Description of Artificial Sequence: Synthetic oligonucleotide
  Antisense strand to SEQ ID NO: 1644609
aucuuccuagaaggcaggc

SEQ ID NO: 1644611 - RNA, 19 nt, Artificial Sequence
  Description of Artificial Sequence: Synthetic oligonucleotide
  Sense strand starting at position 3179 of SEQ ID NO: 1561070
cugggaagcauauguuucu

SEQ ID NO: 1644612 - RNA, 19 nt, Artificial Sequence
  Description of Artificial Sequence: Synthetic oligonucleotide
  Antisense strand to SEQ ID NO: 1644611
agaaacauaugcuucccag

SEQ ID NO: 1644613 - RNA, 19 nt, Artificial Sequence
  Description of Artificial Sequence: Synthetic oligonucleotide
  Sense strand starting at position 3190 of SEQ ID NO: 1561070
auguuucuuccugggagag

SEQ ID NO: 1644614 - RNA, 19 nt, Artificial Sequence
  Description of Artificial Sequence: Synthetic oligonucleotide
  Antisense strand to SEQ ID NO: 1644613
cucucccaggaagaaacau

SEQ ID NO: 1644615 - RNA, 19 nt, Artificial Sequence
  Description of Artificial Sequence: Synthetic oligonucleotide
  Sense strand starting at position 3255 of SEQ ID NO: 1561070
augucagguugggugauua

SEQ ID NO: 1644616 - RNA, 19 nt, Artificial Sequence
  Description of Artificial Sequence: Synthetic oligonucleotide
  Antisense strand to SEQ ID NO: 1644615
uaaucacccaaccugacau

SEQ ID NO: 1644617 - RNA, 19 nt, Artificial Sequence
  Description of Artificial Sequence: Synthetic oligonucleotide
  Sense strand starting at position 3372 of SEQ ID NO: 1561070
gagcaauacuagcuaagag

SEQ ID NO: 1644618 - RNA, 19 nt, Artificial Sequence
  Description of Artificial Sequence: Synthetic oligonucleotide
  Antisense strand to SEQ ID NO: 1644617
cucuuagcuaguauugcuc

SEQ ID NO: 1644619 - RNA, 19 nt, Artificial Sequence
  Description of Artificial Sequence: Synthetic oligonucleotide
  Sense strand starting at position 3627 of SEQ ID NO: 1561070
gcagaacccugucucuuua

SEQ ID NO: 1644620 - RNA, 19 nt, Artificial Sequence
  Description of Artificial Sequence: Synthetic oligonucleotide
  Antisense strand to SEQ ID NO: 1644619
uaaagagacaggguucugc

SEQ ID NO: 1644621 - RNA, 19 nt, Artificial Sequence
  Description of Artificial Sequence: Synthetic oligonucleotide
  Sense strand starting at position 92 of SEQ ID NO: 1561071
ucagucuccugaguuauug

SEQ ID NO: 1644622 - RNA, 19 nt, Artificial Sequence
  Description of Artificial Sequence: Synthetic oligonucleotide
  Antisense strand to SEQ ID NO: 1644621
caauaacucaggagacuga

SEQ ID NO: 1644623 - RNA, 19 nt, Artificial Sequence
  Description of Artificial Sequence: Synthetic oligonucleotide
  Sense strand starting at position 96 of SEQ ID NO: 1561071
ucuccugaguuauuggaau

SEQ ID NO: 1644624 - RNA, 19 nt, Artificial Sequence
  Description of Artificial Sequence: Synthetic oligonucleotide
  Antisense strand to SEQ ID NO: 1644623
auuccaauaacucaggaga

SEQ ID NO: 1644625 - RNA, 19 nt, Artificial Sequence
  Description of Artificial Sequence: Synthetic oligonucleotide
  Sense strand starting at position 145 of SEQ ID NO: 1561071
ugaguuacuuucgucauca

SEQ ID NO: 1644626 - RNA, 19 nt, Artificial Sequence
  Description of Artificial Sequence: Synthetic oligonucleotide
  Antisense strand to SEQ ID NO: 1644625
ugaugacgaaaguaacuca

SEQ ID NO: 1644627 - RNA, 19 nt, Artificial Sequence
  Description of Artificial Sequence: Synthetic oligonucleotide
  Sense strand starting at position 146 of SEQ ID NO: 1561071
gaguuacuuucgucaucac

SEQ ID NO: 1644628 - RNA, 19 nt, Artificial Sequence
  Description of Artificial Sequence: Synthetic oligonucleotide
  Antisense strand to SEQ ID NO: 1644627
gugaugacgaaaguaacuc

SEQ ID NO: 1644629 - RNA, 19 nt, Artificial Sequence
  Description of Artificial Sequence: Synthetic oligonucleotide
  Sense strand starting at position 184 of SEQ ID NO: 1561071
ccaucacuuguccacgaga

SEQ ID NO: 1644630 - RNA, 19 nt, Artificial Sequence
  Description of Artificial Sequence: Synthetic oligonucleotide
  Antisense strand to SEQ ID NO: 1644629
ucucguggacaagugaugg

SEQ ID NO: 1644631 - RNA, 19 nt, Artificial Sequence
  Description of Artificial Sequence: Synthetic oligonucleotide
  Sense strand starting at position 186 of SEQ ID NO: 1561071
aucacuuguccacgagauc

SEQ ID NO: 1644632 - RNA, 19 nt, Artificial Sequence
  Description of Artificial Sequence: Synthetic oligonucleotide
  Antisense strand to SEQ ID NO: 1644631
gaucucguggacaagugau

SEQ ID NO: 1644633 - RNA, 19 nt, Artificial Sequence
  Description of Artificial Sequence: Synthetic oligonucleotide
  Sense strand starting at position 187 of SEQ ID NO: 1561071
ucacuuguccacgagaucu

SEQ ID NO: 1644634 - RNA, 19 nt, Artificial Sequence
  Description of Artificial Sequence: Synthetic oligonucleotide
  Antisense strand to SEQ ID NO: 1644633
agaucucguggacaaguga

SEQ ID NO: 1644635 - RNA, 19 nt, Artificial Sequence
  Description of Artificial Sequence: Synthetic oligonucleotide
  Sense strand starting at position 250 of SEQ ID NO: 1561071
ggacaaaugugguucagaa

SEQ ID NO: 1644636 - RNA, 19 nt, Artificial Sequence
  Description of Artificial Sequence: Synthetic oligonucleotide
  Antisense strand to SEQ ID NO: 1644635
uucugaaccacauuugucc

SEQ ID NO: 1644637 - RNA, 19 nt, Artificial Sequence
  Description of Artificial Sequence: Synthetic oligonucleotide
  Sense strand starting at position 319 of SEQ ID NO: 1561071
ggacuugaggcuggaaacu

SEQ ID NO: 1644638 - RNA, 19 nt, Artificial Sequence
  Description of Artificial Sequence: Synthetic oligonucleotide
  Antisense strand to SEQ ID NO: 1644637
aguuuccagccucaagucc

SEQ ID NO: 1644639 - RNA, 19 nt, Artificial Sequence
  Description of Artificial Sequence: Synthetic oligonucleotide
  Sense strand starting at position 330 of SEQ ID NO: 1561071
uggaaacucuucucugaca

SEQ ID NO: 1644640 - RNA, 19 nt, Artificial Sequence
  Description of Artificial Sequence: Synthetic oligonucleotide
  Antisense strand to SEQ ID NO: 1644639
ugucagagaagaguuucca

SEQ ID NO: 1644641 - RNA, 19 nt, Artificial Sequence
  Description of Artificial Sequence: Synthetic oligonucleotide
  Sense strand starting at position 622 of SEQ ID NO: 1561071
ggguucaaauggucaguga

SEQ ID NO: 1644642 - RNA, 19 nt, Artificial Sequence
  Description of Artificial Sequence: Synthetic oligonucleotide
  Antisense strand to SEQ ID NO: 1644641
ucacugaccauuugaaccc

SEQ ID NO: 1644643 - RNA, 19 nt, Artificial Sequence
  Description of Artificial Sequence: Synthetic oligonucleotide
  Sense strand starting at position 752 of SEQ ID NO: 1561071
cgggagaggugauuaguga

SEQ ID NO: 1644644 - RNA, 19 nt, Artificial Sequence
  Description of Artificial Sequence: Synthetic oligonucleotide
  Antisense strand to SEQ ID NO: 1644643
ucacuaaucaccucucccg

SEQ ID NO: 1644645 - RNA, 19 nt, Artificial Sequence
  Description of Artificial Sequence: Synthetic oligonucleotide
  Sense strand starting at position 912 of SEQ ID NO: 1561071
uguuucuggcccugacuua

SEQ ID NO: 1644646 - RNA, 19 nt, Artificial Sequence
  Description of Artificial Sequence: Synthetic oligonucleotide
  Antisense strand to SEQ ID NO: 1644645
uaagucagggccagaaaca

SEQ ID NO: 1644647 - RNA, 19 nt, Artificial Sequence
  Description of Artificial Sequence: Synthetic oligonucleotide
  Sense strand starting at position 1135 of SEQ ID NO: 1561071
ggguuagauuuacaaggca

SEQ ID NO: 1644648 - RNA, 19 nt, Artificial Sequence
  Description of Artificial Sequence: Synthetic oligonucleotide
  Antisense strand to SEQ ID NO: 1644647
ugccuuguaaaucuaaccc

SEQ ID NO: 1644649 - RNA, 19 nt, Artificial Sequence
  Description of Artificial Sequence: Synthetic oligonucleotide
  Sense strand starting at position 1154 of SEQ ID NO: 1561071
gagggaaguuuagaaagga

SEQ ID NO: 1644650 - RNA, 19 nt, Artificial Sequence
  Description of Artificial Sequence: Synthetic oligonucleotide
  Antisense strand to SEQ ID NO: 1644649
uccuuucuaaacuucccuc

SEQ ID NO: 1644651 - RNA, 19 nt, Artificial Sequence
  Description of Artificial Sequence: Synthetic oligonucleotide
  Sense strand starting at position 1312 of SEQ ID NO: 1561071
ucugguugccucuaacaau

SEQ ID NO: 1644652 - RNA, 19 nt, Artificial Sequence
  Description of Artificial Sequence: Synthetic oligonucleotide
  Antisense strand to SEQ ID NO: 1644651
auuguuagaggcaaccaga

SEQ ID NO: 1644653 - RNA, 19 nt, Artificial Sequence
  Description of Artificial Sequence: Synthetic oligonucleotide
  Sense strand starting at position 1402 of SEQ ID NO: 1561071
cgagaaacacgcgaucauu

SEQ ID NO: 1644654 - RNA, 19 nt, Artificial Sequence
  Description of Artificial Sequence: Synthetic oligonucleotide
  Antisense strand to SEQ ID NO: 1644653
aaugaucgcguguuucucg

SEQ ID NO: 1644655 - RNA, 19 nt, Artificial Sequence
  Description of Artificial Sequence: Synthetic oligonucleotide
  Sense strand starting at position 1491 of SEQ ID NO: 1561071
gauacagaucgcuaagcaa

SEQ ID NO: 1644656 - RNA, 19 nt, Artificial Sequence
  Description of Artificial Sequence: Synthetic oligonucleotide
  Antisense strand to SEQ ID NO: 1644655
uugcuuagcgaucuguauc

SEQ ID NO: 1644657 - RNA, 19 nt, Artificial Sequence
  Description of Artificial Sequence: Synthetic oligonucleotide
  Sense strand starting at position 1696 of SEQ ID NO: 1561071
cgcucugucccgucaccaa

SEQ ID NO: 1644658 - RNA, 19 nt, Artificial Sequence
  Description of Artificial Sequence: Synthetic oligonucleotide
  Antisense strand to SEQ ID NO: 1644657
uuggugacgggacagagcg

SEQ ID NO: 1644659 - RNA, 19 nt, Artificial Sequence
  Description of Artificial Sequence: Synthetic oligonucleotide
  Sense strand starting at position 1765 of SEQ ID NO: 1561071
ccgugacggcaccagaaau

SEQ ID NO: 1644660 - RNA, 19 nt, Artificial Sequence
  Description of Artificial Sequence: Synthetic oligonucleotide
  Antisense strand to SEQ ID NO: 1644659
auuucuggugccgucacgg

SEQ ID NO: 1644661 - RNA, 19 nt, Artificial Sequence
  Description of Artificial Sequence: Synthetic oligonucleotide
  Sense strand starting at position 1980 of SEQ ID NO: 1561071
uguaguccucccgaauacu

SEQ ID NO: 1644662 - RNA, 19 nt, Artificial Sequence
  Description of Artificial Sequence: Synthetic oligonucleotide
  Antisense strand to SEQ ID NO: 1644661
aguauucgggaggacuaca

SEQ ID NO: 1644663 - RNA, 19 nt, Artificial Sequence
  Description of Artificial Sequence: Synthetic oligonucleotide
  Sense strand starting at position 1991 of SEQ ID NO: 1561071
cgaauacucugauugguca

SEQ ID NO: 1644664 - RNA, 19 nt, Artificial Sequence
  Description of Artificial Sequence: Synthetic oligonucleotide
  Antisense strand to SEQ ID NO: 1644663
ugaccaaucagaguauucg

SEQ ID NO: 1644665 - RNA, 19 nt, Artificial Sequence
  Description of Artificial Sequence: Synthetic oligonucleotide
  Sense strand starting at position 1995 of SEQ ID NO: 1561071
uacucugauuggucaggau

SEQ ID NO: 1644666 - RNA, 19 nt, Artificial Sequence
  Description of Artificial Sequence: Synthetic oligonucleotide
  Antisense strand to SEQ ID NO: 1644665
auccugaccaaucagagua

SEQ ID NO: 1644667 - RNA, 19 nt, Artificial Sequence
  Description of Artificial Sequence: Synthetic oligonucleotide
  Sense strand starting at position 2044 of SEQ ID NO: 1561071
gcauauuaucauuggguga

SEQ ID NO: 1644668 - RNA, 19 nt, Artificial Sequence
  Description of Artificial Sequence: Synthetic oligonucleotide
  Antisense strand to SEQ ID NO: 1644667
ucacccaaugauaauaugc

SEQ ID NO: 1644669 - RNA, 19 nt, Artificial Sequence
  Description of Artificial Sequence: Synthetic oligonucleotide
  Sense strand starting at position 2047 of SEQ ID NO: 1561071
uauuaucauugggugaauc

SEQ ID NO: 1644670 - RNA, 19 nt, Artificial Sequence
  Description of Artificial Sequence: Synthetic oligonucleotide
  Antisense strand to SEQ ID NO: 1644669
gauucacccaaugauaaua

SEQ ID NO: 1644671 - RNA, 19 nt, Artificial Sequence
  Description of Artificial Sequence: Synthetic oligonucleotide
  Sense strand starting at position 2048 of SEQ ID NO: 1561071
auuaucauugggugaauca

SEQ ID NO: 1644672 - RNA, 19 nt, Artificial Sequence
  Description of Artificial Sequence: Synthetic oligonucleotide
  Antisense strand to SEQ ID NO: 1644671
ugauucacccaaugauaau

SEQ ID NO: 1644673 - RNA, 19 nt, Artificial Sequence
  Description of Artificial Sequence: Synthetic oligonucleotide
  Sense strand starting at position 2391 of SEQ ID NO: 1561071
gcgucacauuccucauuaa

SEQ ID NO: 1644674 - RNA, 19 nt, Artificial Sequence
  Description of Artificial Sequence: Synthetic oligonucleotide
  Antisense strand to SEQ ID NO: 1644673
uuaaugaggaaugugacgc

SEQ ID NO: 1644675 - RNA, 19 nt, Artificial Sequence
  Description of Artificial Sequence: Synthetic oligonucleotide
  Sense strand starting at position 2442 of SEQ ID NO: 1561071
uccuaaaucugacuuccga

SEQ ID NO: 1644676 - RNA, 19 nt, Artificial Sequence
  Description of Artificial Sequence: Synthetic oligonucleotide
  Antisense strand to SEQ ID NO: 1644675
ucggaagucagauuuagga

SEQ ID NO: 1644677 - RNA, 19 nt, Artificial Sequence
  Description of Artificial Sequence: Synthetic oligonucleotide
  Sense strand starting at position 2449 of SEQ ID NO: 1561071
ucugacuuccgaugcugaa

SEQ ID NO: 1644678 - RNA, 19 nt, Artificial Sequence
  Description of Artificial Sequence: Synthetic oligonucleotide
  Antisense strand to SEQ ID NO: 1644677
uucagcaucggaagucaga

SEQ ID NO: 1644679 - RNA, 19 nt, Artificial Sequence
  Description of Artificial Sequence: Synthetic oligonucleotide
  Sense strand starting at position 2651 of SEQ ID NO: 1561071
ggcuucuccugacuucuaa

SEQ ID NO: 1644680 - RNA, 19 nt, Artificial Sequence
  Description of Artificial Sequence: Synthetic oligonucleotide
  Antisense strand to SEQ ID NO: 1644679
uuagaagucaggagaagcc

SEQ ID NO: 1644681 - RNA, 19 nt, Artificial Sequence
  Description of Artificial Sequence: Synthetic oligonucleotide
  Sense strand starting at position 2688 of SEQ ID NO: 1561071
gauucuuaguucccgauuu

SEQ ID NO: 1644682 - RNA, 19 nt, Artificial Sequence
  Description of Artificial Sequence: Synthetic oligonucleotide
  Antisense strand to SEQ ID NO: 1644681
aaaucgggaacuaagaauc

SEQ ID NO: 1644683 - RNA, 19 nt, Artificial Sequence
  Description of Artificial Sequence: Synthetic oligonucleotide
  Sense strand starting at position 2731 of SEQ ID NO: 1561071
auuaauacuuggucccuga

SEQ ID NO: 1644684 - RNA, 19 nt, Artificial Sequence
  Description of Artificial Sequence: Synthetic oligonucleotide
  Antisense strand to SEQ ID NO: 1644683
ucagggaccaaguauuaau

SEQ ID NO: 1644685 - RNA, 19 nt, Artificial Sequence
  Description of Artificial Sequence: Synthetic oligonucleotide
  Sense strand starting at position 2752 of SEQ ID NO: 1561071
cuaagauccugucuucuga

SEQ ID NO: 1644686 - RNA, 19 nt, Artificial Sequence
  Description of Artificial Sequence: Synthetic oligonucleotide
  Antisense strand to SEQ ID NO: 1644685
ucagaagacaggaucuuag

SEQ ID NO: 1644687 - RNA, 19 nt, Artificial Sequence
  Description of Artificial Sequence: Synthetic oligonucleotide
  Sense strand starting at position 2945 of SEQ ID NO: 1561071
uuaggugcuagugauaaag

SEQ ID NO: 1644688 - RNA, 19 nt, Artificial Sequence
  Description of Artificial Sequence: Synthetic oligonucleotide
  Antisense strand to SEQ ID NO: 1644687
cuuuaucacuagcaccuaa

SEQ ID NO: 1644689 - RNA, 19 nt, Artificial Sequence
  Description of Artificial Sequence: Synthetic oligonucleotide
  Sense strand starting at position 2992 of SEQ ID NO: 1561071
gcccuuguggagcauacau

SEQ ID NO: 1644690 - RNA, 19 nt, Artificial Sequence
  Description of Artificial Sequence: Synthetic oligonucleotide
  Antisense strand to SEQ ID NO: 1644689
auguaugcuccacaagggc

SEQ ID NO: 1644691 - RNA, 19 nt, Artificial Sequence
  Description of Artificial Sequence: Synthetic oligonucleotide
  Sense strand starting at position 3126 of SEQ ID NO: 1561071
gaaauaaagucagagguag

SEQ ID NO: 1644692 - RNA, 19 nt, Artificial Sequence
  Description of Artificial Sequence: Synthetic oligonucleotide
  Antisense strand to SEQ ID NO: 1644691
cuaccucugacuuuauuuc

SEQ ID NO: 1644693 - RNA, 19 nt, Artificial Sequence
  Description of Artificial Sequence: Synthetic oligonucleotide
  Sense strand starting at position 3134 of SEQ ID NO: 1561071
gucagagguaguuaaguac

SEQ ID NO: 1644694 - RNA, 19 nt, Artificial Sequence
  Description of Artificial Sequence: Synthetic oligonucleotide
  Antisense strand to SEQ ID NO: 1644693
guacuuaacuaccucugac

SEQ ID NO: 1644695 - RNA, 19 nt, Artificial Sequence
  Description of Artificial Sequence: Synthetic oligonucleotide
  Sense strand starting at position 3137 of SEQ ID NO: 1561071
agagguaguuaaguacuuu

SEQ ID NO: 1644696 - RNA, 19 nt, Artificial Sequence
  Description of Artificial Sequence: Synthetic oligonucleotide
  Antisense strand to SEQ ID NO: 1644695
aaaguacuuaacuaccucu

SEQ ID NO: 1644697 - RNA, 19 nt, Artificial Sequence
  Description of Artificial Sequence: Synthetic oligonucleotide
  Sense strand starting at position 3143 of SEQ ID NO: 1561071
aguuaaguacuuuggagaa

SEQ ID NO: 1644698 - RNA, 19 nt, Artificial Sequence
  Description of Artificial Sequence: Synthetic oligonucleotide
  Antisense strand to SEQ ID NO: 1644697
uucuccaaaguacuuaacu

SEQ ID NO: 1644699 - RNA, 19 nt, Artificial Sequence
  Description of Artificial Sequence: Synthetic oligonucleotide
  Sense strand starting at position 3877 of SEQ ID NO: 1561071
cgcuguggccucucagagu

SEQ ID NO: 1644700 - RNA, 19 nt, Artificial Sequence
  Description of Artificial Sequence: Synthetic oligonucleotide
  Antisense strand to SEQ ID NO: 1644699
acucugagaggccacagcg

SEQ ID NO: 1644701 - RNA, 19 nt, Artificial Sequence
  Description of Artificial Sequence: Synthetic oligonucleotide
  Sense strand starting at position 3 of SEQ ID NO: 1561072
cugaguuacuuucuuucuu

SEQ ID NO: 1644702 - RNA, 19 nt, Artificial Sequence
  Description of Artificial Sequence: Synthetic oligonucleotide
  Antisense strand to SEQ ID NO: 1644701
aagaaagaaaguaacucag

SEQ ID NO: 1644703 - RNA, 19 nt, Artificial Sequence
  Description of Artificial Sequence: Synthetic oligonucleotide
  Sense strand starting at position 131 of SEQ ID NO: 1561072
ucagucuccugaguuauug

SEQ ID NO: 1644704 - RNA, 19 nt, Artificial Sequence
  Description of Artificial Sequence: Synthetic oligonucleotide
  Antisense strand to SEQ ID NO: 1644703
caauaacucaggagacuga

SEQ ID NO: 1644705 - RNA, 19 nt, Artificial Sequence
  Description of Artificial Sequence: Synthetic oligonucleotide
  Sense strand starting at position 135 of SEQ ID NO: 1561072
ucuccugaguuauuggaau

SEQ ID NO: 1644706 - RNA, 19 nt, Artificial Sequence
  Description of Artificial Sequence: Synthetic oligonucleotide
  Antisense strand to SEQ ID NO: 1644705
auuccaauaacucaggaga

SEQ ID NO: 1644707 - RNA, 19 nt, Artificial Sequence
  Description of Artificial Sequence: Synthetic oligonucleotide
  Sense strand starting at position 184 of SEQ ID NO: 1561072
ugaguuacuuucgucauca

SEQ ID NO: 1644708 - RNA, 19 nt, Artificial Sequence
  Description of Artificial Sequence: Synthetic oligonucleotide
  Antisense strand to SEQ ID NO: 1644707
ugaugacgaaaguaacuca

SEQ ID NO: 1644709 - RNA, 19 nt, Artificial Sequence
  Description of Artificial Sequence: Synthetic oligonucleotide
  Sense strand starting at position 185 of SEQ ID NO: 1561072
gaguuacuuucgucaucac

SEQ ID NO: 1644710 - RNA, 19 nt, Artificial Sequence
  Description of Artificial Sequence: Synthetic oligonucleotide
  Antisense strand to SEQ ID NO: 1644709
gugaugacgaaaguaacuc

SEQ ID NO: 1644711 - RNA, 19 nt, Artificial Sequence
  Description of Artificial Sequence: Synthetic oligonucleotide
  Sense strand starting at position 223 of SEQ ID NO: 1561072
ccaucacuuguccacgaga

SEQ ID NO: 1644712 - RNA, 19 nt, Artificial Sequence
  Description of Artificial Sequence: Synthetic oligonucleotide
  Antisense strand to SEQ ID NO: 1644711
ucucguggacaagugaugg

SEQ ID NO: 1644713 - RNA, 19 nt, Artificial Sequence
  Description of Artificial Sequence: Synthetic oligonucleotide
  Sense strand starting at position 225 of SEQ ID NO: 1561072
aucacuuguccacgagauc

SEQ ID NO: 1644714 - RNA, 19 nt, Artificial Sequence
  Description of Artificial Sequence: Synthetic oligonucleotide
  Antisense strand to SEQ ID NO: 1644713
gaucucguggacaagugau

SEQ ID NO: 1644715 - RNA, 19 nt, Artificial Sequence
  Description of Artificial Sequence: Synthetic oligonucleotide
  Sense strand starting at position 226 of SEQ ID NO: 1561072
ucacuuguccacgagaucu

SEQ ID NO: 1644716 - RNA, 19 nt, Artificial Sequence
  Description of Artificial Sequence: Synthetic oligonucleotide
  Antisense strand to SEQ ID NO: 1644715
agaucucguggacaaguga

SEQ ID NO: 1644717 - RNA, 19 nt, Artificial Sequence
  Description of Artificial Sequence: Synthetic oligonucleotide
  Sense strand starting at position 289 of SEQ ID NO: 1561072
ggacaaaugugguucagaa

SEQ ID NO: 1644718 - RNA, 19 nt, Artificial Sequence
  Description of Artificial Sequence: Synthetic oligonucleotide
  Antisense strand to SEQ ID NO: 1644717
uucugaaccacauuugucc

SEQ ID NO: 1644719 - RNA, 19 nt, Artificial Sequence
  Description of Artificial Sequence: Synthetic oligonucleotide
  Sense strand starting at position 358 of SEQ ID NO: 1561072
ggacuugaggcuggaaacu

SEQ ID NO: 1644720 - RNA, 19 nt, Artificial Sequence
  Description of Artificial Sequence: Synthetic oligonucleotide
  Antisense strand to SEQ ID NO: 1644719
aguuuccagccucaagucc

SEQ ID NO: 1644721 - RNA, 19 nt, Artificial Sequence
  Description of Artificial Sequence: Synthetic oligonucleotide
  Sense strand starting at position 369 of SEQ ID NO: 1561072
uggaaacucuucucugaca

SEQ ID NO: 1644722 - RNA, 19 nt, Artificial Sequence
  Description of Artificial Sequence: Synthetic oligonucleotide
  Antisense strand to SEQ ID NO: 1644721
ugucagagaagaguuucca

SEQ ID NO: 1644723 - RNA, 19 nt, Artificial Sequence
  Description of Artificial Sequence: Synthetic oligonucleotide
  Sense strand starting at position 661 of SEQ ID NO: 1561072
ggguucaaauggucaguga

SEQ ID NO: 1644724 - RNA, 19 nt, Artificial Sequence
  Description of Artificial Sequence: Synthetic oligonucleotide
  Antisense strand to SEQ ID NO: 1644723
ucacugaccauuugaaccc

SEQ ID NO: 1644725 - RNA, 19 nt, Artificial Sequence
  Description of Artificial Sequence: Synthetic oligonucleotide
  Sense strand starting at position 791 of SEQ ID NO: 1561072
cgggagaggugauuaguga

SEQ ID NO: 1644726 - RNA, 19 nt, Artificial Sequence
  Description of Artificial Sequence: Synthetic oligonucleotide
  Antisense strand to SEQ ID NO: 1644725
ucacuaaucaccucucccg

SEQ ID NO: 1644727 - RNA, 19 nt, Artificial Sequence
  Description of Artificial Sequence: Synthetic oligonucleotide
  Sense strand starting at position 951 of SEQ ID NO: 1561072
uguuucuggcccugacuua

SEQ ID NO: 1644728 - RNA, 19 nt, Artificial Sequence
  Description of Artificial Sequence: Synthetic oligonucleotide
  Antisense strand to SEQ ID NO: 1644727
uaagucagggccagaaaca

SEQ ID NO: 1644729 - RNA, 19 nt, Artificial Sequence
  Description of Artificial Sequence: Synthetic oligonucleotide
  Sense strand starting at position 1174 of SEQ ID NO: 1561072
ggguuagauuuacaaggca

SEQ ID NO: 1644730 - RNA, 19 nt, Artificial Sequence
  Description of Artificial Sequence: Synthetic oligonucleotide
  Antisense strand to SEQ ID NO: 1644729
ugccuuguaaaucuaaccc

SEQ ID NO: 1644731 - RNA, 19 nt, Artificial Sequence
  Description of Artificial Sequence: Synthetic oligonucleotide
  Sense strand starting at position 1193 of SEQ ID NO: 1561072
gagggaaguuuagaaagga

SEQ ID NO: 1644732 - RNA, 19 nt, Artificial Sequence
  Description of Artificial Sequence: Synthetic oligonucleotide
  Antisense strand to SEQ ID NO: 1644731
uccuuucuaaacuucccuc

SEQ ID NO: 1644733 - RNA, 19 nt, Artificial Sequence
  Description of Artificial Sequence: Synthetic oligonucleotide
  Sense strand starting at position 1351 of SEQ ID NO: 1561072
ucugguugccucuaacaau

SEQ ID NO: 1644734 - RNA, 19 nt, Artificial Sequence
  Description of Artificial Sequence: Synthetic oligonucleotide
  Antisense strand to SEQ ID NO: 1644733
auuguuagaggcaaccaga

SEQ ID NO: 1644735 - RNA, 19 nt, Artificial Sequence
  Description of Artificial Sequence: Synthetic oligonucleotide
  Sense strand starting at position 1441 of SEQ ID NO: 1561072
cgagaaacacgcgaucauu

SEQ ID NO: 1644736 - RNA, 19 nt, Artificial Sequence
  Description of Artificial Sequence: Synthetic oligonucleotide
  Antisense strand to SEQ ID NO: 1644735
aaugaucgcguguuucucg

SEQ ID NO: 1644737 - RNA, 19 nt, Artificial Sequence
  Description of Artificial Sequence: Synthetic oligonucleotide
  Sense strand starting at position 1530 of SEQ ID NO: 1561072
gauacagaucgcuaagcaa

SEQ ID NO: 1644738 - RNA, 19 nt, Artificial Sequence
  Description of Artificial Sequence: Synthetic oligonucleotide
  Antisense strand to SEQ ID NO: 1644737
uugcuuagcgaucuguauc

SEQ ID NO: 1644739 - RNA, 19 nt, Artificial Sequence
  Description of Artificial Sequence: Synthetic oligonucleotide
  Sense strand starting at position 1735 of SEQ ID NO: 1561072
cgcucugucccgucaccaa

SEQ ID NO: 1644740 - RNA, 19 nt, Artificial Sequence
  Description of Artificial Sequence: Synthetic oligonucleotide
  Antisense strand to SEQ ID NO: 1644739
uuggugacgggacagagcg

SEQ ID NO: 1644741 - RNA, 19 nt, Artificial Sequence
  Description of Artificial Sequence: Synthetic oligonucleotide
  Sense strand starting at position 1804 of SEQ ID NO: 1561072
ccgugacggcaccagaaau

SEQ ID NO: 1644742 - RNA, 19 nt, Artificial Sequence
  Description of Artificial Sequence: Synthetic oligonucleotide
  Antisense strand to SEQ ID NO: 1644741
auuucuggugccgucacgg

SEQ ID NO: 1644743 - RNA, 19 nt, Artificial Sequence
  Description of Artificial Sequence: Synthetic oligonucleotide
  Sense strand starting at position 2019 of SEQ ID NO: 1561072
uguaguccucccgaauacu

SEQ ID NO: 1644744 - RNA, 19 nt, Artificial Sequence
  Description of Artificial Sequence: Synthetic oligonucleotide
  Antisense strand to SEQ ID NO: 1644743
aguauucgggaggacuaca

SEQ ID NO: 1644745 - RNA, 19 nt, Artificial Sequence
  Description of Artificial Sequence: Synthetic oligonucleotide
  Sense strand starting at position 2030 of SEQ ID NO: 1561072
cgaauacucugauugguca

SEQ ID NO: 1644746 - RNA, 19 nt, Artificial Sequence
  Description of Artificial Sequence: Synthetic oligonucleotide
  Antisense strand to SEQ ID NO: 1644745
ugaccaaucagaguauucg

SEQ ID NO: 1644747 - RNA, 19 nt, Artificial Sequence
  Description of Artificial Sequence: Synthetic oligonucleotide
  Sense strand starting at position 2034 of SEQ ID NO: 1561072
uacucugauuggucaggau

SEQ ID NO: 1644748 - RNA, 19 nt, Artificial Sequence
  Description of Artificial Sequence: Synthetic oligonucleotide
  Antisense strand to SEQ ID NO: 1644747
auccugaccaaucagagua

SEQ ID NO: 1644749 - RNA, 19 nt, Artificial Sequence
  Description of Artificial Sequence: Synthetic oligonucleotide
  Sense strand starting at position 2083 of SEQ ID NO: 1561072
gcauauuaucauuggguga

SEQ ID NO: 1644750 - RNA, 19 nt, Artificial Sequence
  Description of Artificial Sequence: Synthetic oligonucleotide
  Antisense strand to SEQ ID NO: 1644749
ucacccaaugauaauaugc

SEQ ID NO: 1644751 - RNA, 19 nt, Artificial Sequence
  Description of Artificial Sequence: Synthetic oligonucleotide
  Sense strand starting at position 2086 of SEQ ID NO: 1561072
uauuaucauugggugaauc

SEQ ID NO: 1644752 - RNA, 19 nt, Artificial Sequence
  Description of Artificial Sequence: Synthetic oligonucleotide
  Antisense strand to SEQ ID NO: 1644751
gauucacccaaugauaaua

SEQ ID NO: 1644753 - RNA, 19 nt, Artificial Sequence
  Description of Artificial Sequence: Synthetic oligonucleotide
  Sense strand starting at position 2087 of SEQ ID NO: 1561072
auuaucauugggugaauca

SEQ ID NO: 1644754 - RNA, 19 nt, Artificial Sequence
  Description of Artificial Sequence: Synthetic oligonucleotide
  Antisense strand to SEQ ID NO: 1644753
ugauucacccaaugauaau

SEQ ID NO: 1644755 - RNA, 19 nt, Artificial Sequence
  Description of Artificial Sequence: Synthetic oligonucleotide
  Sense strand starting at position 2481 of SEQ ID NO: 1561072
uccuaaaucugacuuccga

SEQ ID NO: 1644756 - RNA, 19 nt, Artificial Sequence
  Description of Artificial Sequence: Synthetic oligonucleotide
  Antisense strand to SEQ ID NO: 1644755
ucggaagucagauuuagga

SEQ ID NO: 1644757 - RNA, 19 nt, Artificial Sequence
  Description of Artificial Sequence: Synthetic oligonucleotide
  Sense strand starting at position 2488 of SEQ ID NO: 1561072
ucugacuuccgaugcugaa

SEQ ID NO: 1644758 - RNA, 19 nt, Artificial Sequence
  Description of Artificial Sequence: Synthetic oligonucleotide
  Antisense strand to SEQ ID NO: 1644757
uucagcaucggaagucaga

SEQ ID NO: 1644759 - RNA, 19 nt, Artificial Sequence
  Description of Artificial Sequence: Synthetic oligonucleotide
  Sense strand starting at position 2690 of SEQ ID NO: 1561072
ggcuucuccugacuucuaa

SEQ ID NO: 1644760 - RNA, 19 nt, Artificial Sequence
  Description of Artificial Sequence: Synthetic oligonucleotide
  Antisense strand to SEQ ID NO: 1644759
uuagaagucaggagaagcc

SEQ ID NO: 1644761 - RNA, 19 nt, Artificial Sequence
  Description of Artificial Sequence: Synthetic oligonucleotide
  Sense strand starting at position 2727 of SEQ ID NO: 1561072
gauucuuaguucccgauuu

SEQ ID NO: 1644762 - RNA, 19 nt, Artificial Sequence
  Description of Artificial Sequence: Synthetic oligonucleotide
  Antisense strand to SEQ ID NO: 1644761
aaaucgggaacuaagaauc

SEQ ID NO: 1644763 - RNA, 19 nt, Artificial Sequence
  Description of Artificial Sequence: Synthetic oligonucleotide
  Sense strand starting at position 2770 of SEQ ID NO: 1561072
auuaauacuuggucccuga

SEQ ID NO: 1644764 - RNA, 19 nt, Artificial Sequence
  Description of Artificial Sequence: Synthetic oligonucleotide
  Antisense strand to SEQ ID NO: 1644763
ucagggaccaaguauuaau

SEQ ID NO: 1644765 - RNA, 19 nt, Artificial Sequence
  Description of Artificial Sequence: Synthetic oligonucleotide
  Sense strand starting at position 2791 of SEQ ID NO: 1561072
cuaagauccugucuucuga

SEQ ID NO: 1644766 - RNA, 19 nt, Artificial Sequence
  Description of Artificial Sequence: Synthetic oligonucleotide
  Antisense strand to SEQ ID NO: 1644765
ucagaagacaggaucuuag

SEQ ID NO: 1644767 - RNA, 19 nt, Artificial Sequence
  Description of Artificial Sequence: Synthetic oligonucleotide
  Sense strand starting at position 2984 of SEQ ID NO: 1561072
uuaggugcuagugauaaag

SEQ ID NO: 1644768 - RNA, 19 nt, Artificial Sequence
  Description of Artificial Sequence: Synthetic oligonucleotide
  Antisense strand to SEQ ID NO: 1644767
cuuuaucacuagcaccuaa

SEQ ID NO: 1644769 - RNA, 19 nt, Artificial Sequence
  Description of Artificial Sequence: Synthetic oligonucleotide
  Sense strand starting at position 3031 of SEQ ID NO: 1561072
gcccuuguggagcauacau

SEQ ID NO: 1644770 - RNA, 19 nt, Artificial Sequence
  Description of Artificial Sequence: Synthetic oligonucleotide
  Antisense strand to SEQ ID NO: 1644769
auguaugcuccacaagggc

SEQ ID NO: 1644771 - RNA, 19 nt, Artificial Sequence
  Description of Artificial Sequence: Synthetic oligonucleotide
  Sense strand starting at position 3165 of SEQ ID NO: 1561072
gaaauaaagucagagguag

SEQ ID NO: 1644772 - RNA, 19 nt, Artificial Sequence
  Description of Artificial Sequence: Synthetic oligonucleotide
  Antisense strand to SEQ ID NO: 1644771
cuaccucugacuuuauuuc

SEQ ID NO: 1644773 - RNA, 19 nt, Artificial Sequence
  Description of Artificial Sequence: Synthetic oligonucleotide
  Sense strand starting at position 3173 of SEQ ID NO: 1561072
gucagagguaguuaaguac

SEQ ID NO: 1644774 - RNA, 19 nt, Artificial Sequence
  Description of Artificial Sequence: Synthetic oligonucleotide
  Antisense strand to SEQ ID NO: 1644773
guacuuaacuaccucugac

SEQ ID NO: 1644775 - RNA, 19 nt, Artificial Sequence
  Description of Artificial Sequence: Synthetic oligonucleotide
  Sense strand starting at position 3176 of SEQ ID NO: 1561072
agagguaguuaaguacuuu

SEQ ID NO: 1644776 - RNA, 19 nt, Artificial Sequence
  Description of Artificial Sequence: Synthetic oligonucleotide
  Antisense strand to SEQ ID NO: 1644775
aaaguacuuaacuaccucu

SEQ ID NO: 1644777 - RNA, 19 nt, Artificial Sequence
  Description of Artificial Sequence: Synthetic oligonucleotide
  Sense strand starting at position 3182 of SEQ ID NO: 1561072
aguuaaguacuuuggagaa

SEQ ID NO: 1644778 - RNA, 19 nt, Artificial Sequence
  Description of Artificial Sequence: Synthetic oligonucleotide
  Antisense strand to SEQ ID NO: 1644777
uucuccaaaguacuuaacu

SEQ ID NO: 1644779 - RNA, 19 nt, Artificial Sequence
  Description of Artificial Sequence: Synthetic oligonucleotide
  Sense strand starting at position 3916 of SEQ ID NO: 1561072
cgcuguggccucucagagu

SEQ ID NO: 1644780 - RNA, 19 nt, Artificial Sequence
  Description of Artificial Sequence: Synthetic oligonucleotide
  Antisense strand to SEQ ID NO: 1644779
acucugagaggccacagcg

SEQ ID NO: 1644781 - RNA, 19 nt, Artificial Sequence
  Description of Artificial Sequence: Synthetic oligonucleotide
  Sense strand starting at position 83 of SEQ ID NO: 1561073
gcagauggauguguucuca

SEQ ID NO: 1644782 - RNA, 19 nt, Artificial Sequence
  Description of Artificial Sequence: Synthetic oligonucleotide
  Antisense strand to SEQ ID NO: 1644781
ugagaacacauccaucugc

SEQ ID NO: 1644783 - RNA, 19 nt, Artificial Sequence
  Description of Artificial Sequence: Synthetic oligonucleotide
  Sense strand starting at position 96 of SEQ ID NO: 1561073
uucucauucccagaugugu

SEQ ID NO: 1644784 - RNA, 19 nt, Artificial Sequence
  Description of Artificial Sequence: Synthetic oligonucleotide
  Antisense strand to SEQ ID NO: 1644783
acacaucugggaaugagaa

SEQ ID NO: 1644785 - RNA, 19 nt, Artificial Sequence
  Description of Artificial Sequence: Synthetic oligonucleotide
  Sense strand starting at position 393 of SEQ ID NO: 1561073
cccugucuugccugaggga

SEQ ID NO: 1644786 - RNA, 19 nt, Artificial Sequence
  Description of Artificial Sequence: Synthetic oligonucleotide
  Antisense strand to SEQ ID NO: 1644785
ucccucaggcaagacaggg

SEQ ID NO: 1644787 - RNA, 19 nt, Artificial Sequence
  Description of Artificial Sequence: Synthetic oligonucleotide
  Sense strand starting at position 704 of SEQ ID NO: 1561073
uguaacuuguggcuuagau

SEQ ID NO: 1644788 - RNA, 19 nt, Artificial Sequence
  Description of Artificial Sequence: Synthetic oligonucleotide
  Antisense strand to SEQ ID NO: 1644787
aucuaagccacaaguuaca

SEQ ID NO: 1644789 - RNA, 19 nt, Artificial Sequence
  Description of Artificial Sequence: Synthetic oligonucleotide
  Sense strand starting at position 706 of SEQ ID NO: 1561073
uaacuuguggcuuagaugu

SEQ ID NO: 1644790 - RNA, 19 nt, Artificial Sequence
  Description of Artificial Sequence: Synthetic oligonucleotide
  Antisense strand to SEQ ID NO: 1644789
acaucuaagccacaaguua

SEQ ID NO: 1644791 - RNA, 19 nt, Artificial Sequence
  Description of Artificial Sequence: Synthetic oligonucleotide
  Sense strand starting at position 779 of SEQ ID NO: 1561073
gucagucucccuuacuaga

SEQ ID NO: 1644792 - RNA, 19 nt, Artificial Sequence
  Description of Artificial Sequence: Synthetic oligonucleotide
  Antisense strand to SEQ ID NO: 1644791
ucuaguaagggagacugac

SEQ ID NO: 1644793 - RNA, 19 nt, Artificial Sequence
  Description of Artificial Sequence: Synthetic oligonucleotide
  Sense strand starting at position 873 of SEQ ID NO: 1561073
ucuauaaauguugguggaa

SEQ ID NO: 1644794 - RNA, 19 nt, Artificial Sequence
  Description of Artificial Sequence: Synthetic oligonucleotide
  Antisense strand to SEQ ID NO: 1644793
uuccaccaacauuuauaga

SEQ ID NO: 1644795 - RNA, 19 nt, Artificial Sequence
  Description of Artificial Sequence: Synthetic oligonucleotide
  Sense strand starting at position 874 of SEQ ID NO: 1561073
cuauaaauguugguggaau

SEQ ID NO: 1644796 - RNA, 19 nt, Artificial Sequence
  Description of Artificial Sequence: Synthetic oligonucleotide
  Antisense strand to SEQ ID NO: 1644795
auuccaccaacauuuauag

SEQ ID NO: 1644797 - RNA, 19 nt, Artificial Sequence
  Description of Artificial Sequence: Synthetic oligonucleotide
  Sense strand starting at position 875 of SEQ ID NO: 1561073
uauaaauguugguggaaua

SEQ ID NO: 1644798 - RNA, 19 nt, Artificial Sequence
  Description of Artificial Sequence: Synthetic oligonucleotide
  Antisense strand to SEQ ID NO: 1644797
uauuccaccaacauuuaua

SEQ ID NO: 1644799 - RNA, 19 nt, Artificial Sequence
  Description of Artificial Sequence: Synthetic oligonucleotide
  Sense strand starting at position 1263 of SEQ ID NO: 1561073
accaucagcgcucauuaaa

SEQ ID NO: 1644800 - RNA, 19 nt, Artificial Sequence
  Description of Artificial Sequence: Synthetic oligonucleotide
  Antisense strand to SEQ ID NO: 1644799
uuuaaugagcgcugauggu

SEQ ID NO: 1644801 - RNA, 19 nt, Artificial Sequence
  Description of Artificial Sequence: Synthetic oligonucleotide
  Sense strand starting at position 1270 of SEQ ID NO: 1561073
gcgcucauuaaaugcauga

SEQ ID NO: 1644802 - RNA, 19 nt, Artificial Sequence
  Description of Artificial Sequence: Synthetic oligonucleotide
  Antisense strand to SEQ ID NO: 1644801
ucaugcauuuaaugagcgc

SEQ ID NO: 1644803 - RNA, 19 nt, Artificial Sequence
  Description of Artificial Sequence: Synthetic oligonucleotide
  Sense strand starting at position 1274 of SEQ ID NO: 1561073
ucauuaaaugcaugaguca

SEQ ID NO: 1644804 - RNA, 19 nt, Artificial Sequence
  Description of Artificial Sequence: Synthetic oligonucleotide
  Antisense strand to SEQ ID NO: 1644803
ugacucaugcauuuaauga

SEQ ID NO: 1644805 - RNA, 19 nt, Artificial Sequence
  Description of Artificial Sequence: Synthetic oligonucleotide
  Sense strand starting at position 1277 of SEQ ID NO: 1561073
uuaaaugcaugagucagaa

SEQ ID NO: 1644806 - RNA, 19 nt, Artificial Sequence
  Description of Artificial Sequence: Synthetic oligonucleotide
  Antisense strand to SEQ ID NO: 1644805
uucugacucaugcauuuaa

SEQ ID NO: 1644807 - RNA, 19 nt, Artificial Sequence
  Description of Artificial Sequence: Synthetic oligonucleotide
  Sense strand starting at position 1281 of SEQ ID NO: 1561073
augcaugagucagaaugca

SEQ ID NO: 1644808 - RNA, 19 nt, Artificial Sequence
  Description of Artificial Sequence: Synthetic oligonucleotide
  Antisense strand to SEQ ID NO: 1644807
ugcauucugacucaugcau

SEQ ID NO: 1644809 - RNA, 19 nt, Artificial Sequence
  Description of Artificial Sequence: Synthetic oligonucleotide
  Sense strand starting at position 1444 of SEQ ID NO: 1561073
gagggaucuuucuggcaca

SEQ ID NO: 1644810 - RNA, 19 nt, Artificial Sequence
  Description of Artificial Sequence: Synthetic oligonucleotide
  Antisense strand to SEQ ID NO: 1644809
ugugccagaaagaucccuc

SEQ ID NO: 1644811 - RNA, 19 nt, Artificial Sequence
  Description of Artificial Sequence: Synthetic oligonucleotide
  Sense strand starting at position 1579 of SEQ ID NO: 1561073
gccuaaucguucuccaggu

SEQ ID NO: 1644812 - RNA, 19 nt, Artificial Sequence
  Description of Artificial Sequence: Synthetic oligonucleotide
  Antisense strand to SEQ ID NO: 1644811
accuggagaacgauuaggc

SEQ ID NO: 1644813 - RNA, 19 nt, Artificial Sequence
  Description of Artificial Sequence: Synthetic oligonucleotide
  Sense strand starting at position 1583 of SEQ ID NO: 1561073
aaucguucuccaggugugu

SEQ ID NO: 1644814 - RNA, 19 nt, Artificial Sequence
  Description of Artificial Sequence: Synthetic oligonucleotide
  Antisense strand to SEQ ID NO: 1644813
acacaccuggagaacgauu

SEQ ID NO: 1644815 - RNA, 19 nt, Artificial Sequence
  Description of Artificial Sequence: Synthetic oligonucleotide
  Sense strand starting at position 1584 of SEQ ID NO: 1561073
aucguucuccagguguguu

SEQ ID NO: 1644816 - RNA, 19 nt, Artificial Sequence
  Description of Artificial Sequence: Synthetic oligonucleotide
  Antisense strand to SEQ ID NO: 1644815
aacacaccuggagaacgau

SEQ ID NO: 1644817 - RNA, 19 nt, Artificial Sequence
  Description of Artificial Sequence: Synthetic oligonucleotide
  Sense strand starting at position 1587 of SEQ ID NO: 1561073
guucuccagguguguuuau

SEQ ID NO: 1644818 - RNA, 19 nt, Artificial Sequence
  Description of Artificial Sequence: Synthetic oligonucleotide
  Antisense strand to SEQ ID NO: 1644817
auaaacacaccuggagaac

SEQ ID NO: 1644819 - RNA, 19 nt, Artificial Sequence
  Description of Artificial Sequence: Synthetic oligonucleotide
  Sense strand starting at position 1922 of SEQ ID NO: 1561073
ccgcguaauucaccgacau

SEQ ID NO: 1644820 - RNA, 19 nt, Artificial Sequence
  Description of Artificial Sequence: Synthetic oligonucleotide
  Antisense strand to SEQ ID NO: 1644819
augucggugaauuacgcgg

SEQ ID NO: 1644821 - RNA, 19 nt, Artificial Sequence
  Description of Artificial Sequence: Synthetic oligonucleotide
  Sense strand starting at position 1923 of SEQ ID NO: 1561073
cgcguaauucaccgacauc

SEQ ID NO: 1644822 - RNA, 19 nt, Artificial Sequence
  Description of Artificial Sequence: Synthetic oligonucleotide
  Antisense strand to SEQ ID NO: 1644821
gaugucggugaauuacgcg

SEQ ID NO: 1644823 - RNA, 19 nt, Artificial Sequence
  Description of Artificial Sequence: Synthetic oligonucleotide
  Sense strand starting at position 1964 of SEQ ID NO: 1561073
uaaaguuucccuuguugag

SEQ ID NO: 1644824 - RNA, 19 nt, Artificial Sequence
  Description of Artificial Sequence: Synthetic oligonucleotide
  Antisense strand to SEQ ID NO: 1644823
cucaacaagggaaacuuua

SEQ ID NO: 1644825 - RNA, 19 nt, Artificial Sequence
  Description of Artificial Sequence: Synthetic oligonucleotide
  Sense strand starting at position 2205 of SEQ ID NO: 1561073
acgugagaguucuccaguc

SEQ ID NO: 1644826 - RNA, 19 nt, Artificial Sequence
  Description of Artificial Sequence: Synthetic oligonucleotide
  Antisense strand to SEQ ID NO: 1644825
gacuggagaacucucacgu

SEQ ID NO: 1644827 - RNA, 19 nt, Artificial Sequence
  Description of Artificial Sequence: Synthetic oligonucleotide
  Sense strand starting at position 2278 of SEQ ID NO: 1561073
uuaguaaauuccguaagga

SEQ ID NO: 1644828 - RNA, 19 nt, Artificial Sequence
  Description of Artificial Sequence: Synthetic oligonucleotide
  Antisense strand to SEQ ID NO: 1644827
uccuuacggaauuuacuaa

SEQ ID NO: 1644829 - RNA, 19 nt, Artificial Sequence
  Description of Artificial Sequence: Synthetic oligonucleotide
  Sense strand starting at position 2279 of SEQ ID NO: 1561073
uaguaaauuccguaaggac

SEQ ID NO: 1644830 - RNA, 19 nt, Artificial Sequence
  Description of Artificial Sequence: Synthetic oligonucleotide
  Antisense strand to SEQ ID NO: 1644829
guccuuacggaauuuacua

SEQ ID NO: 1644831 - RNA, 19 nt, Artificial Sequence
  Description of Artificial Sequence: Synthetic oligonucleotide
  Sense strand starting at position 2332 of SEQ ID NO: 1561073
uugaaugccacgcagaguu

SEQ ID NO: 1644832 - RNA, 19 nt, Artificial Sequence
  Description of Artificial Sequence: Synthetic oligonucleotide
  Antisense strand to SEQ ID NO: 1644831
aacucugcguggcauucaa

SEQ ID NO: 1644833 - RNA, 19 nt, Artificial Sequence
  Description of Artificial Sequence: Synthetic oligonucleotide
  Sense strand starting at position 2340 of SEQ ID NO: 1561073
cacgcagaguuaccugaau

SEQ ID NO: 1644834 - RNA, 19 nt, Artificial Sequence
  Description of Artificial Sequence: Synthetic oligonucleotide
  Antisense strand to SEQ ID NO: 1644833
auucagguaacucugcgug

SEQ ID NO: 1644835 - RNA, 19 nt, Artificial Sequence
  Description of Artificial Sequence: Synthetic oligonucleotide
  Sense strand starting at position 2342 of SEQ ID NO: 1561073
cgcagaguuaccugaauau

SEQ ID NO: 1644836 - RNA, 19 nt, Artificial Sequence
  Description of Artificial Sequence: Synthetic oligonucleotide
  Antisense strand to SEQ ID NO: 1644835
auauucagguaacucugcg

SEQ ID NO: 1644837 - RNA, 19 nt, Artificial Sequence
  Description of Artificial Sequence: Synthetic oligonucleotide
  Sense strand starting at position 2676 of SEQ ID NO: 1561073
cggccaaguuaucugagua

SEQ ID NO: 1644838 - RNA, 19 nt, Artificial Sequence
  Description of Artificial Sequence: Synthetic oligonucleotide
  Antisense strand to SEQ ID NO: 1644837
uacucagauaacuuggccg

SEQ ID NO: 1644839 - RNA, 19 nt, Artificial Sequence
  Description of Artificial Sequence: Synthetic oligonucleotide
  Sense strand starting at position 2677 of SEQ ID NO: 1561073
ggccaaguuaucugaguau

SEQ ID NO: 1644840 - RNA, 19 nt, Artificial Sequence
  Description of Artificial Sequence: Synthetic oligonucleotide
  Antisense strand to SEQ ID NO: 1644839
auacucagauaacuuggcc

SEQ ID NO: 1644841 - RNA, 19 nt, Artificial Sequence
  Description of Artificial Sequence: Synthetic oligonucleotide
  Sense strand starting at position 2692 of SEQ ID NO: 1561073
guaucauccaacuggaggu

SEQ ID NO: 1644842 - RNA, 19 nt, Artificial Sequence
  Description of Artificial Sequence: Synthetic oligonucleotide
  Antisense strand to SEQ ID NO: 1644841
accuccaguuggaugauac

SEQ ID NO: 1644843 - RNA, 19 nt, Artificial Sequence
  Description of Artificial Sequence: Synthetic oligonucleotide
  Sense strand starting at position 2729 of SEQ ID NO: 1561073
gguccugcucaaggucaau

SEQ ID NO: 1644844 - RNA, 19 nt, Artificial Sequence
  Description of Artificial Sequence: Synthetic oligonucleotide
  Antisense strand to SEQ ID NO: 1644843
auugaccuugagcaggacc

SEQ ID NO: 1644845 - RNA, 19 nt, Artificial Sequence
  Description of Artificial Sequence: Synthetic oligonucleotide
  Sense strand starting at position 3434 of SEQ ID NO: 1561073
gagcauggcuccuuccaga

SEQ ID NO: 1644846 - RNA, 19 nt, Artificial Sequence
  Description of Artificial Sequence: Synthetic oligonucleotide
  Antisense strand to SEQ ID NO: 1644845
ucuggaaggagccaugcuc

SEQ ID NO: 1644847 - RNA, 19 nt, Artificial Sequence
  Description of Artificial Sequence: Synthetic oligonucleotide
  Sense strand starting at position 3455 of SEQ ID NO: 1561073
cugaaaucaguccagugau

SEQ ID NO: 1644848 - RNA, 19 nt, Artificial Sequence
  Description of Artificial Sequence: Synthetic oligonucleotide
  Antisense strand to SEQ ID NO: 1644847
aucacuggacugauuucag

SEQ ID NO: 1644849 - RNA, 19 nt, Artificial Sequence
  Description of Artificial Sequence: Synthetic oligonucleotide
  Sense strand starting at position 3458 of SEQ ID NO: 1561073
aaaucaguccagugaugau

SEQ ID NO: 1644850 - RNA, 19 nt, Artificial Sequence
  Description of Artificial Sequence: Synthetic oligonucleotide
  Antisense strand to SEQ ID NO: 1644849
aucaucacuggacugauuu

SEQ ID NO: 1644851 - RNA, 19 nt, Artificial Sequence
  Description of Artificial Sequence: Synthetic oligonucleotide
  Sense strand starting at position 3467 of SEQ ID NO: 1561073
cagugaugauagggaagau

SEQ ID NO: 1644852 - RNA, 19 nt, Artificial Sequence
  Description of Artificial Sequence: Synthetic oligonucleotide
  Antisense strand to SEQ ID NO: 1644851
aucuucccuaucaucacug

SEQ ID NO: 1644853 - RNA, 19 nt, Artificial Sequence
  Description of Artificial Sequence: Synthetic oligonucleotide
  Sense strand starting at position 3479 of SEQ ID NO: 1561073
ggaagaucgugggugucuu

SEQ ID NO: 1644854 - RNA, 19 nt, Artificial Sequence
  Description of Artificial Sequence: Synthetic oligonucleotide
  Antisense strand to SEQ ID NO: 1644853
aagacacccacgaucuucc

SEQ ID NO: 1644855 - RNA, 19 nt, Artificial Sequence
  Description of Artificial Sequence: Synthetic oligonucleotide
  Sense strand starting at position 3773 of SEQ ID NO: 1561073
agcccuuguaugugggaga

SEQ ID NO: 1644856 - RNA, 19 nt, Artificial Sequence
  Description of Artificial Sequence: Synthetic oligonucleotide
  Antisense strand to SEQ ID NO: 1644855
ucucccacauacaagggcu

SEQ ID NO: 1644857 - RNA, 19 nt, Artificial Sequence
  Description of Artificial Sequence: Synthetic oligonucleotide
  Sense strand starting at position 3776 of SEQ ID NO: 1561073
ccuuguaugugggagaaag

SEQ ID NO: 1644858 - RNA, 19 nt, Artificial Sequence
  Description of Artificial Sequence: Synthetic oligonucleotide
  Antisense strand to SEQ ID NO: 1644857
cuuucucccacauacaagg

SEQ ID NO: 1644859 - RNA, 19 nt, Artificial Sequence
  Description of Artificial Sequence: Synthetic oligonucleotide
  Sense strand starting at position 3974 of SEQ ID NO: 1561073
gcaagcagcuuccuaaauu

SEQ ID NO: 1644860 - RNA, 19 nt, Artificial Sequence
  Description of Artificial Sequence: Synthetic oligonucleotide
  Antisense strand to SEQ ID NO: 1644859
aauuuaggaagcugcuugc

SEQ ID NO: 1644861 - RNA, 19 nt, Artificial Sequence
  Description of Artificial Sequence: Synthetic oligonucleotide
  Sense strand starting at position 3 of SEQ ID NO: 1561074
ggcccaaguuucgguggau

SEQ ID NO: 1644862 - RNA, 19 nt, Artificial Sequence
  Description of Artificial Sequence: Synthetic oligonucleotide
  Antisense strand to SEQ ID NO: 1644861
auccaccgaaacuugggcc

SEQ ID NO: 1644863 - RNA, 19 nt, Artificial Sequence
  Description of Artificial Sequence: Synthetic oligonucleotide
  Sense strand starting at position 4 of SEQ ID NO: 1561074
gcccaaguuucgguggauc

SEQ ID NO: 1644864 - RNA, 19 nt, Artificial Sequence
  Description of Artificial Sequence: Synthetic oligonucleotide
  Antisense strand to SEQ ID NO: 1644863
gauccaccgaaacuugggc

SEQ ID NO: 1644865 - RNA, 19 nt, Artificial Sequence
  Description of Artificial Sequence: Synthetic oligonucleotide
  Sense strand starting at position 6 of SEQ ID NO: 1561074
ccaaguuucgguggaucau

SEQ ID NO: 1644866 - RNA, 19 nt, Artificial Sequence
  Description of Artificial Sequence: Synthetic oligonucleotide
  Antisense strand to SEQ ID NO: 1644865
augauccaccgaaacuugg

SEQ ID NO: 1644867 - RNA, 19 nt, Artificial Sequence
  Description of Artificial Sequence: Synthetic oligonucleotide
  Sense strand starting at position 7 of SEQ ID NO: 1561074
caaguuucgguggaucauu

SEQ ID NO: 1644868 - RNA, 19 nt, Artificial Sequence
  Description of Artificial Sequence: Synthetic oligonucleotide
  Antisense strand to SEQ ID NO: 1644867
aaugauccaccgaaacuug

SEQ ID NO: 1644869 - RNA, 19 nt, Artificial Sequence
  Description of Artificial Sequence: Synthetic oligonucleotide
  Sense strand starting at position 312 of SEQ ID NO: 1561074
aggagaaggguuuggguua

SEQ ID NO: 1644870 - RNA, 19 nt, Artificial Sequence
  Description of Artificial Sequence: Synthetic oligonucleotide
  Antisense strand to SEQ ID NO: 1644869
uaacccaaacccuucuccu

SEQ ID NO: 1644871 - RNA, 19 nt, Artificial Sequence
  Description of Artificial Sequence: Synthetic oligonucleotide
  Sense strand starting at position 345 of SEQ ID NO: 1561074
cugggaaagguucacguuu

SEQ ID NO: 1644872 - RNA, 19 nt, Artificial Sequence
  Description of Artificial Sequence: Synthetic oligonucleotide
  Antisense strand to SEQ ID NO: 1644871
aaacgugaaccuuucccag

SEQ ID NO: 1644873 - RNA, 19 nt, Artificial Sequence
  Description of Artificial Sequence: Synthetic oligonucleotide
  Sense strand starting at position 428 of SEQ ID NO: 1561074
aagaguaacggucagugaa

SEQ ID NO: 1644874 - RNA, 19 nt, Artificial Sequence
  Description of Artificial Sequence: Synthetic oligonucleotide
  Antisense strand to SEQ ID NO: 1644873
uucacugaccguuacucuu

SEQ ID NO: 1644875 - RNA, 19 nt, Artificial Sequence
  Description of Artificial Sequence: Synthetic oligonucleotide
  Sense strand starting at position 430 of SEQ ID NO: 1561074
gaguaacggucagugaaga

SEQ ID NO: 1644876 - RNA, 19 nt, Artificial Sequence
  Description of Artificial Sequence: Synthetic oligonucleotide
  Antisense strand to SEQ ID NO: 1644875
ucuucacugaccguuacuc

SEQ ID NO: 1644877 - RNA, 19 nt, Artificial Sequence
  Description of Artificial Sequence: Synthetic oligonucleotide
  Sense strand starting at position 431 of SEQ ID NO: 1561074
aguaacggucagugaagaa

SEQ ID NO: 1644878 - RNA, 19 nt, Artificial Sequence
  Description of Artificial Sequence: Synthetic oligonucleotide
  Antisense strand to SEQ ID NO: 1644877
uucuucacugaccguuacu

SEQ ID NO: 1644879 - RNA, 19 nt, Artificial Sequence
  Description of Artificial Sequence: Synthetic oligonucleotide
  Sense strand starting at position 677 of SEQ ID NO: 1561074
ugagcuggucccgggagau

SEQ ID NO: 1644880 - RNA, 19 nt, Artificial Sequence
  Description of Artificial Sequence: Synthetic oligonucleotide
  Antisense strand to SEQ ID NO: 1644879
aucucccgggaccagcuca

SEQ ID NO: 1644881 - RNA, 19 nt, Artificial Sequence
  Description of Artificial Sequence: Synthetic oligonucleotide
  Sense strand starting at position 969 of SEQ ID NO: 1561074
gggagcgcuccuugaagca

SEQ ID NO: 1644882 - RNA, 19 nt, Artificial Sequence
  Description of Artificial Sequence: Synthetic oligonucleotide
  Antisense strand to SEQ ID NO: 1644881
ugcuucaaggagcgcuccc

SEQ ID NO: 1644883 - RNA, 19 nt, Artificial Sequence
  Description of Artificial Sequence: Synthetic oligonucleotide
  Sense strand starting at position 1032 of SEQ ID NO: 1561074
acuucuugcgcagucgaua

SEQ ID NO: 1644884 - RNA, 19 nt, Artificial Sequence
  Description of Artificial Sequence: Synthetic oligonucleotide
  Antisense strand to SEQ ID NO: 1644883
uaucgacugcgcaagaagu

SEQ ID NO: 1644885 - RNA, 19 nt, Artificial Sequence
  Description of Artificial Sequence: Synthetic oligonucleotide
  Sense strand starting at position 1818 of SEQ ID NO: 1561074
cugugauucucccuuuguu

SEQ ID NO: 1644886 - RNA, 19 nt, Artificial Sequence
  Description of Artificial Sequence: Synthetic oligonucleotide
  Antisense strand to SEQ ID NO: 1644885
aacaaagggagaaucacag

SEQ ID NO: 1644887 - RNA, 19 nt, Artificial Sequence
  Description of Artificial Sequence: Synthetic oligonucleotide
  Sense strand starting at position 2112 of SEQ ID NO: 1561074
gcuagaaaguuugcagcaa

SEQ ID NO: 1644888 - RNA, 19 nt, Artificial Sequence
  Description of Artificial Sequence: Synthetic oligonucleotide
  Antisense strand to SEQ ID NO: 1644887
uugcugcaaacuuucuagc

SEQ ID NO: 1644889 - RNA, 19 nt, Artificial Sequence
  Description of Artificial Sequence: Synthetic oligonucleotide
  Sense strand starting at position 2116 of SEQ ID NO: 1561074
gaaaguuugcagcaacuuu

SEQ ID NO: 1644890 - RNA, 19 nt, Artificial Sequence
  Description of Artificial Sequence: Synthetic oligonucleotide
  Antisense strand to SEQ ID NO: 1644889
aaaguugcugcaaacuuuc

SEQ ID NO: 1644891 - RNA, 19 nt, Artificial Sequence
  Description of Artificial Sequence: Synthetic oligonucleotide
  Sense strand starting at position 2540 of SEQ ID NO: 1561074
gacaauaaauaccgaggaa

SEQ ID NO: 1644892 - RNA, 19 nt, Artificial Sequence
  Description of Artificial Sequence: Synthetic oligonucleotide
  Antisense strand to SEQ ID NO: 1644891
uuccucgguauuuauuguc

SEQ ID NO: 1644893 - RNA, 19 nt, Artificial Sequence
  Description of Artificial Sequence: Synthetic oligonucleotide
  Sense strand starting at position 2543 of SEQ ID NO: 1561074
aauaaauaccgaggaaugu

SEQ ID NO: 1644894 - RNA, 19 nt, Artificial Sequence
  Description of Artificial Sequence: Synthetic oligonucleotide
  Antisense strand to SEQ ID NO: 1644893
acauuccucgguauuuauu

SEQ ID NO: 1644895 - RNA, 19 nt, Artificial Sequence
  Description of Artificial Sequence: Synthetic oligonucleotide
  Sense strand starting at position 2756 of SEQ ID NO: 1561074
cgaguaagcaggcagagau

SEQ ID NO: 1644896 - RNA, 19 nt, Artificial Sequence
  Description of Artificial Sequence: Synthetic oligonucleotide
  Antisense strand to SEQ ID NO: 1644895
aucucugccugcuuacucg

SEQ ID NO: 1644897 - RNA, 19 nt, Artificial Sequence
  Description of Artificial Sequence: Synthetic oligonucleotide
  Sense strand starting at position 2798 of SEQ ID NO: 1561074
gggcgucaugcacaagaaa

SEQ ID NO: 1644898 - RNA, 19 nt, Artificial Sequence
  Description of Artificial Sequence: Synthetic oligonucleotide
  Antisense strand to SEQ ID NO: 1644897
uuucuugugcaugacgccc

SEQ ID NO: 1644899 - RNA, 19 nt, Artificial Sequence
  Description of Artificial Sequence: Synthetic oligonucleotide
  Sense strand starting at position 2809 of SEQ ID NO: 1561074
acaagaaagcuuugcacuu

SEQ ID NO: 1644900 - RNA, 19 nt, Artificial Sequence
  Description of Artificial Sequence: Synthetic oligonucleotide
  Antisense strand to SEQ ID NO: 1644899
aagugcaaagcuuucuugu

SEQ ID NO: 1644901 - RNA, 19 nt, Artificial Sequence
  Description of Artificial Sequence: Synthetic oligonucleotide
  Sense strand starting at position 2943 of SEQ ID NO: 1561074
aaagaaauggucugugauc

SEQ ID NO: 1644902 - RNA, 19 nt, Artificial Sequence
  Description of Artificial Sequence: Synthetic oligonucleotide
  Antisense strand to SEQ ID NO: 1644901
gaucacagaccauuucuuu

SEQ ID NO: 1644903 - RNA, 19 nt, Artificial Sequence
  Description of Artificial Sequence: Synthetic oligonucleotide
  Sense strand starting at position 3231 of SEQ ID NO: 1561074
cgaagacaguucuaggguu

SEQ ID NO: 1644904 - RNA, 19 nt, Artificial Sequence
  Description of Artificial Sequence: Synthetic oligonucleotide
  Antisense strand to SEQ ID NO: 1644903
aacccuagaacugucuucg

SEQ ID NO: 1644905 - RNA, 19 nt, Artificial Sequence
  Description of Artificial Sequence: Synthetic oligonucleotide
  Sense strand starting at position 3522 of SEQ ID NO: 1561074
gccuacagcuguuguuagu

SEQ ID NO: 1644906 - RNA, 19 nt, Artificial Sequence
  Description of Artificial Sequence: Synthetic oligonucleotide
  Antisense strand to SEQ ID NO: 1644905
acuaacaacagcuguaggc

SEQ ID NO: 1644907 - RNA, 19 nt, Artificial Sequence
  Description of Artificial Sequence: Synthetic oligonucleotide
  Sense strand starting at position 3601 of SEQ ID NO: 1561074
uugauuggcugcccgaaga

SEQ ID NO: 1644908 - RNA, 19 nt, Artificial Sequence
  Description of Artificial Sequence: Synthetic oligonucleotide
  Antisense strand to SEQ ID NO: 1644907
ucuucgggcagccaaucaa

SEQ ID NO: 1644909 - RNA, 19 nt, Artificial Sequence
  Description of Artificial Sequence: Synthetic oligonucleotide
  Sense strand starting at position 3911 of SEQ ID NO: 1561074
gagguuaucuagggagauc

SEQ ID NO: 1644910 - RNA, 19 nt, Artificial Sequence
  Description of Artificial Sequence: Synthetic oligonucleotide
  Antisense strand to SEQ ID NO: 1644909
gaucucccuagauaaccuc

SEQ ID NO: 1644911 - RNA, 19 nt, Artificial Sequence
  Description of Artificial Sequence: Synthetic oligonucleotide
  Sense strand starting at position 62 of SEQ ID NO: 1561075
cccaucuuugucuagagga

SEQ ID NO: 1644912 - RNA, 19 nt, Artificial Sequence
  Description of Artificial Sequence: Synthetic oligonucleotide
  Antisense strand to SEQ ID NO: 1644911
uccucuagacaaagauggg

SEQ ID NO: 1644913 - RNA, 19 nt, Artificial Sequence
  Description of Artificial Sequence: Synthetic oligonucleotide
  Sense strand starting at position 64 of SEQ ID NO: 1561075
caucuuugucuagaggauu

SEQ ID NO: 1644914 - RNA, 19 nt, Artificial Sequence
  Description of Artificial Sequence: Synthetic oligonucleotide
  Antisense strand to SEQ ID NO: 1644913
aauccucuagacaaagaug

SEQ ID NO: 1644915 - RNA, 19 nt, Artificial Sequence
  Description of Artificial Sequence: Synthetic oligonucleotide
  Sense strand starting at position 91 of SEQ ID NO: 1561075
ucaaccuguugucucuaau

SEQ ID NO: 1644916 - RNA, 19 nt, Artificial Sequence
  Description of Artificial Sequence: Synthetic oligonucleotide
  Antisense strand to SEQ ID NO: 1644915
auuagagacaacagguuga

SEQ ID NO: 1644917 - RNA, 19 nt, Artificial Sequence
  Description of Artificial Sequence: Synthetic oligonucleotide
  Sense strand starting at position 94 of SEQ ID NO: 1561075
accuguugucucuaauaug

SEQ ID NO: 1644918 - RNA, 19 nt, Artificial Sequence
  Description of Artificial Sequence: Synthetic oligonucleotide
  Antisense strand to SEQ ID NO: 1644917
cauauuagagacaacaggu

SEQ ID NO: 1644919 - RNA, 19 nt, Artificial Sequence
  Description of Artificial Sequence: Synthetic oligonucleotide
  Sense strand starting at position 179 of SEQ ID NO: 1561075
gcacaaacucccugcugau

SEQ ID NO: 1644920 - RNA, 19 nt, Artificial Sequence
  Description of Artificial Sequence: Synthetic oligonucleotide
  Antisense strand to SEQ ID NO: 1644919
aucagcagggaguuugugc

SEQ ID NO: 1644921 - RNA, 19 nt, Artificial Sequence
  Description of Artificial Sequence: Synthetic oligonucleotide
  Sense strand starting at position 262 of SEQ ID NO: 1561075
gagauugacugugagaaac

SEQ ID NO: 1644922 - RNA, 19 nt, Artificial Sequence
  Description of Artificial Sequence: Synthetic oligonucleotide
  Antisense strand to SEQ ID NO: 1644921
guuucucacagucaaucuc

SEQ ID NO: 1644923 - RNA, 19 nt, Artificial Sequence
  Description of Artificial Sequence: Synthetic oligonucleotide
  Sense strand starting at position 421 of SEQ ID NO: 1561075
uugagaaacucgugaaagg

SEQ ID NO: 1644924 - RNA, 19 nt, Artificial Sequence
  Description of Artificial Sequence: Synthetic oligonucleotide
  Antisense strand to SEQ ID NO: 1644923
ccuuucacgaguuucucaa

SEQ ID NO: 1644925 - RNA, 19 nt, Artificial Sequence
  Description of Artificial Sequence: Synthetic oligonucleotide
  Sense strand starting at position 570 of SEQ ID NO: 1561075
gccuuauucuugucucuca

SEQ ID NO: 1644926 - RNA, 19 nt, Artificial Sequence
  Description of Artificial Sequence: Synthetic oligonucleotide
  Antisense strand to SEQ ID NO: 1644925
ugagagacaagaauaaggc

SEQ ID NO: 1644927 - RNA, 19 nt, Artificial Sequence
  Description of Artificial Sequence: Synthetic oligonucleotide
  Sense strand starting at position 575 of SEQ ID NO: 1561075
auucuugucucucauguua

SEQ ID NO: 1644928 - RNA, 19 nt, Artificial Sequence
  Description of Artificial Sequence: Synthetic oligonucleotide
  Antisense strand to SEQ ID NO: 1644927
uaacaugagagacaagaau

SEQ ID NO: 1644929 - RNA, 19 nt, Artificial Sequence
  Description of Artificial Sequence: Synthetic oligonucleotide
  Sense strand starting at position 580 of SEQ ID NO: 1561075
ugucucucauguuacuaga

SEQ ID NO: 1644930 - RNA, 19 nt, Artificial Sequence
  Description of Artificial Sequence: Synthetic oligonucleotide
  Antisense strand to SEQ ID NO: 1644929
ucuaguaacaugagagaca

SEQ ID NO: 1644931 - RNA, 19 nt, Artificial Sequence
  Description of Artificial Sequence: Synthetic oligonucleotide
  Sense strand starting at position 624 of SEQ ID NO: 1561075
ggugaucugcagcaagcaa

SEQ ID NO: 1644932 - RNA, 19 nt, Artificial Sequence
  Description of Artificial Sequence: Synthetic oligonucleotide
  Antisense strand to SEQ ID NO: 1644931
uugcuugcugcagaucacc

SEQ ID NO: 1644933 - RNA, 19 nt, Artificial Sequence
  Description of Artificial Sequence: Synthetic oligonucleotide
  Sense strand starting at position 635 of SEQ ID NO: 1561075
gcaagcaagacugauguua

SEQ ID NO: 1644934 - RNA, 19 nt, Artificial Sequence
  Description of Artificial Sequence: Synthetic oligonucleotide
  Antisense strand to SEQ ID NO: 1644933
uaacaucagucuugcuugc

SEQ ID NO: 1644935 - RNA, 19 nt, Artificial Sequence
  Description of Artificial Sequence: Synthetic oligonucleotide
  Sense strand starting at position 637 of SEQ ID NO: 1561075
aagcaagacugauguuaga

SEQ ID NO: 1644936 - RNA, 19 nt, Artificial Sequence
  Description of Artificial Sequence: Synthetic oligonucleotide
  Antisense strand to SEQ ID NO: 1644935
ucuaacaucagucuugcuu

SEQ ID NO: 1644937 - RNA, 19 nt, Artificial Sequence
  Description of Artificial Sequence: Synthetic oligonucleotide
  Sense strand starting at position 640 of SEQ ID NO: 1561075
caagacugauguuagacuu

SEQ ID NO: 1644938 - RNA, 19 nt, Artificial Sequence
  Description of Artificial Sequence: Synthetic oligonucleotide
  Antisense strand to SEQ ID NO: 1644937
aagucuaacaucagucuug

SEQ ID NO: 1644939 - RNA, 19 nt, Artificial Sequence
  Description of Artificial Sequence: Synthetic oligonucleotide
  Sense strand starting at position 789 of SEQ ID NO: 1561075
cgugcacuguggccagaua

SEQ ID NO: 1644940 - RNA, 19 nt, Artificial Sequence
  Description of Artificial Sequence: Synthetic oligonucleotide
  Antisense strand to SEQ ID NO: 1644939
uaucuggccacagugcacg

SEQ ID NO: 1644941 - RNA, 19 nt, Artificial Sequence
  Description of Artificial Sequence: Synthetic oligonucleotide
  Sense strand starting at position 790 of SEQ ID NO: 1561075
gugcacuguggccagauau

SEQ ID NO: 1644942 - RNA, 19 nt, Artificial Sequence
  Description of Artificial Sequence: Synthetic oligonucleotide
  Antisense strand to SEQ ID NO: 1644941
auaucuggccacagugcac

SEQ ID NO: 1644943 - RNA, 19 nt, Artificial Sequence
  Description of Artificial Sequence: Synthetic oligonucleotide
  Sense strand starting at position 822 of SEQ ID NO: 1561075
uccgcagcugaguaauuua

SEQ ID NO: 1644944 - RNA, 19 nt, Artificial Sequence
  Description of Artificial Sequence: Synthetic oligonucleotide
  Antisense strand to SEQ ID NO: 1644943
uaaauuacucagcugcgga

SEQ ID NO: 1644945 - RNA, 19 nt, Artificial Sequence
  Description of Artificial Sequence: Synthetic oligonucleotide
  Sense strand starting at position 825 of SEQ ID NO: 1561075
gcagcugaguaauuuaucu

SEQ ID NO: 1644946 - RNA, 19 nt, Artificial Sequence
  Description of Artificial Sequence: Synthetic oligonucleotide
  Antisense strand to SEQ ID NO: 1644945
agauaaauuacucagcugc

SEQ ID NO: 1644947 - RNA, 19 nt, Artificial Sequence
  Description of Artificial Sequence: Synthetic oligonucleotide
  Sense strand starting at position 832 of SEQ ID NO: 1561075
aguaauuuaucugacuuag

SEQ ID NO: 1644948 - RNA, 19 nt, Artificial Sequence
  Description of Artificial Sequence: Synthetic oligonucleotide
  Antisense strand to SEQ ID NO: 1644947
cuaagucagauaaauuacu

SEQ ID NO: 1644949 - RNA, 19 nt, Artificial Sequence
  Description of Artificial Sequence: Synthetic oligonucleotide
  Sense strand starting at position 892 of SEQ ID NO: 1561075
uccagauuauccugaggga

SEQ ID NO: 1644950 - RNA, 19 nt, Artificial Sequence
  Description of Artificial Sequence: Synthetic oligonucleotide
  Antisense strand to SEQ ID NO: 1644949
ucccucaggauaaucugga

SEQ ID NO: 1644951 - RNA, 19 nt, Artificial Sequence
  Description of Artificial Sequence: Synthetic oligonucleotide
  Sense strand starting at position 895 of SEQ ID NO: 1561075
agauuauccugagggacac

SEQ ID NO: 1644952 - RNA, 19 nt, Artificial Sequence
  Description of Artificial Sequence: Synthetic oligonucleotide
  Antisense strand to SEQ ID NO: 1644951
gugucccucaggauaaucu

SEQ ID NO: 1644953 - RNA, 19 nt, Artificial Sequence
  Description of Artificial Sequence: Synthetic oligonucleotide
  Sense strand starting at position 964 of SEQ ID NO: 1561075
cagccuguauccuuuggga

SEQ ID NO: 1644954 - RNA, 19 nt, Artificial Sequence
  Description of Artificial Sequence: Synthetic oligonucleotide
  Antisense strand to SEQ ID NO: 1644953
ucccaaaggauacaggcug

SEQ ID NO: 1644955 - RNA, 19 nt, Artificial Sequence
  Description of Artificial Sequence: Synthetic oligonucleotide
  Sense strand starting at position 966 of SEQ ID NO: 1561075
gccuguauccuuugggaag

SEQ ID NO: 1644956 - RNA, 19 nt, Artificial Sequence
  Description of Artificial Sequence: Synthetic oligonucleotide
  Antisense strand to SEQ ID NO: 1644955
cuucccaaaggauacaggc

SEQ ID NO: 1644957 - RNA, 19 nt, Artificial Sequence
  Description of Artificial Sequence: Synthetic oligonucleotide
  Sense strand starting at position 1109 of SEQ ID NO: 1561075
ccgcuuuagcugcagauua

SEQ ID NO: 1644958 - RNA, 19 nt, Artificial Sequence
  Description of Artificial Sequence: Synthetic oligonucleotide
  Antisense strand to SEQ ID NO: 1644957
uaaucugcagcuaaagcgg

SEQ ID NO: 1644959 - RNA, 19 nt, Artificial Sequence
  Description of Artificial Sequence: Synthetic oligonucleotide
  Sense strand starting at position 1111 of SEQ ID NO: 1561075
gcuuuagcugcagauuaaa

SEQ ID NO: 1644960 - RNA, 19 nt, Artificial Sequence
  Description of Artificial Sequence: Synthetic oligonucleotide
  Antisense strand to SEQ ID NO: 1644959
uuuaaucugcagcuaaagc

SEQ ID NO: 1644961 - RNA, 19 nt, Artificial Sequence
  Description of Artificial Sequence: Synthetic oligonucleotide
  Sense strand starting at position 1174 of SEQ ID NO: 1561075
gacccauggugggagaauu

SEQ ID NO: 1644962 - RNA, 19 nt, Artificial Sequence
  Description of Artificial Sequence: Synthetic oligonucleotide
  Antisense strand to SEQ ID NO: 1644961
aauucucccaccauggguc

SEQ ID NO: 1644963 - RNA, 19 nt, Artificial Sequence
  Description of Artificial Sequence: Synthetic oligonucleotide
  Sense strand starting at position 1283 of SEQ ID NO: 1561075
ugagucaggaguugauaga

SEQ ID NO: 1644964 - RNA, 19 nt, Artificial Sequence
  Description of Artificial Sequence: Synthetic oligonucleotide
  Antisense strand to SEQ ID NO: 1644963
ucuaucaacuccugacuca

SEQ ID NO: 1644965 - RNA, 19 nt, Artificial Sequence
  Description of Artificial Sequence: Synthetic oligonucleotide
  Sense strand starting at position 2302 of SEQ ID NO: 1561075
cuaauugcgucccuuacaa

SEQ ID NO: 1644966 - RNA, 19 nt, Artificial Sequence
  Description of Artificial Sequence: Synthetic oligonucleotide
  Antisense strand to SEQ ID NO: 1644965
uuguaagggacgcaauuag

SEQ ID NO: 1644967 - RNA, 19 nt, Artificial Sequence
  Description of Artificial Sequence: Synthetic oligonucleotide
  Sense strand starting at position 2321 of SEQ ID NO: 1561075
uccugucuucucugacuuu

SEQ ID NO: 1644968 - RNA, 19 nt, Artificial Sequence
  Description of Artificial Sequence: Synthetic oligonucleotide
  Antisense strand to SEQ ID NO: 1644967
aaagucagagaagacagga

SEQ ID NO: 1644969 - RNA, 19 nt, Artificial Sequence
  Description of Artificial Sequence: Synthetic oligonucleotide
  Sense strand starting at position 2427 of SEQ ID NO: 1561075
uagucucauccagggaguu

SEQ ID NO: 1644970 - RNA, 19 nt, Artificial Sequence
  Description of Artificial Sequence: Synthetic oligonucleotide
  Antisense strand to SEQ ID NO: 1644969
aacucccuggaugagacua

SEQ ID NO: 1644971 - RNA, 19 nt, Artificial Sequence
  Description of Artificial Sequence: Synthetic oligonucleotide
  Sense strand starting at position 2645 of SEQ ID NO: 1561075
uugcuucucucccugaguu

SEQ ID NO: 1644972 - RNA, 19 nt, Artificial Sequence
  Description of Artificial Sequence: Synthetic oligonucleotide
  Antisense strand to SEQ ID NO: 1644971
aacucagggagagaagcaa

SEQ ID NO: 1644973 - RNA, 19 nt, Artificial Sequence
  Description of Artificial Sequence: Synthetic oligonucleotide
  Sense strand starting at position 2646 of SEQ ID NO: 1561075
ugcuucucucccugaguuu

SEQ ID NO: 1644974 - RNA, 19 nt, Artificial Sequence
  Description of Artificial Sequence: Synthetic oligonucleotide
  Antisense strand to SEQ ID NO: 1644973
aaacucagggagagaagca

SEQ ID NO: 1644975 - RNA, 19 nt, Artificial Sequence
  Description of Artificial Sequence: Synthetic oligonucleotide
  Sense strand starting at position 2765 of SEQ ID NO: 1561075
guguuauuucucugcuccu

SEQ ID NO: 1644976 - RNA, 19 nt, Artificial Sequence
  Description of Artificial Sequence: Synthetic oligonucleotide
  Antisense strand to SEQ ID NO: 1644975
aggagcagagaaauaacac

SEQ ID NO: 1644977 - RNA, 19 nt, Artificial Sequence
  Description of Artificial Sequence: Synthetic oligonucleotide
  Sense strand starting at position 2787 of SEQ ID NO: 1561075
ggaucuguccgcgcucuga

SEQ ID NO: 1644978 - RNA, 19 nt, Artificial Sequence
  Description of Artificial Sequence: Synthetic oligonucleotide
  Antisense strand to SEQ ID NO: 1644977
ucagagcgcggacagaucc

SEQ ID NO: 1644979 - RNA, 19 nt, Artificial Sequence
  Description of Artificial Sequence: Synthetic oligonucleotide
  Sense strand starting at position 2798 of SEQ ID NO: 1561075
cgcucugaguucuucccua

SEQ ID NO: 1644980 - RNA, 19 nt, Artificial Sequence
  Description of Artificial Sequence: Synthetic oligonucleotide
  Antisense strand to SEQ ID NO: 1644979
uagggaagaacucagagcg

SEQ ID NO: 1644981 - RNA, 19 nt, Artificial Sequence
  Description of Artificial Sequence: Synthetic oligonucleotide
  Sense strand starting at position 2942 of SEQ ID NO: 1561075
ggaucugucgcugaccuga

SEQ ID NO: 1644982 - RNA, 19 nt, Artificial Sequence
  Description of Artificial Sequence: Synthetic oligonucleotide
  Antisense strand to SEQ ID NO: 1644981
ucaggucagcgacagaucc

SEQ ID NO: 1644983 - RNA, 19 nt, Artificial Sequence
  Description of Artificial Sequence: Synthetic oligonucleotide
  Sense strand starting at position 3074 of SEQ ID NO: 1561075
aucuguuccugccaucuga

SEQ ID NO: 1644984 - RNA, 19 nt, Artificial Sequence
  Description of Artificial Sequence: Synthetic oligonucleotide
  Antisense strand to SEQ ID NO: 1644983
ucagauggcaggaacagau

SEQ ID NO: 1644985 - RNA, 19 nt, Artificial Sequence
  Description of Artificial Sequence: Synthetic oligonucleotide
  Sense strand starting at position 3731 of SEQ ID NO: 1561075
cgcaaaugcauuugguauu

SEQ ID NO: 1644986 - RNA, 19 nt, Artificial Sequence
  Description of Artificial Sequence: Synthetic oligonucleotide
  Antisense strand to SEQ ID NO: 1644985
aauaccaaaugcauuugcg

SEQ ID NO: 1644987 - RNA, 19 nt, Artificial Sequence
  Description of Artificial Sequence: Synthetic oligonucleotide
  Sense strand starting at position 3732 of SEQ ID NO: 1561075
gcaaaugcauuugguauua

SEQ ID NO: 1644988 - RNA, 19 nt, Artificial Sequence
  Description of Artificial Sequence: Synthetic oligonucleotide
  Antisense strand to SEQ ID NO: 1644987
uaauaccaaaugcauuugc

SEQ ID NO: 1644989 - RNA, 19 nt, Artificial Sequence
  Description of Artificial Sequence: Synthetic oligonucleotide
  Sense strand starting at position 3885 of SEQ ID NO: 1561075
gucucacagcuuugagaaa

SEQ ID NO: 1644990 - RNA, 19 nt, Artificial Sequence
  Description of Artificial Sequence: Synthetic oligonucleotide
  Antisense strand to SEQ ID NO: 1644989
uuucucaaagcugugagac

SEQ ID NO: 1644991 - RNA, 19 nt, Artificial Sequence
  Description of Artificial Sequence: Synthetic oligonucleotide
  Sense strand starting at position 150 of SEQ ID NO: 1561076
uggccugugcuugacacaa

SEQ ID NO: 1644992 - RNA, 19 nt, Artificial Sequence
  Description of Artificial Sequence: Synthetic oligonucleotide
  Antisense strand to SEQ ID NO: 1644991
uugugucaagcacaggcca

SEQ ID NO: 1644993 - RNA, 19 nt, Artificial Sequence
  Description of Artificial Sequence: Synthetic oligonucleotide
  Sense strand starting at position 418 of SEQ ID NO: 1561076
gguuaagguucaguaguau

SEQ ID NO: 1644994 - RNA, 19 nt, Artificial Sequence
  Description of Artificial Sequence: Synthetic oligonucleotide
  Antisense strand to SEQ ID NO: 1644993
auacuacugaaccuuaacc

SEQ ID NO: 1644995 - RNA, 19 nt, Artificial Sequence
  Description of Artificial Sequence: Synthetic oligonucleotide
  Sense strand starting at position 424 of SEQ ID NO: 1561076
gguucaguaguaugggaca

SEQ ID NO: 1644996 - RNA, 19 nt, Artificial Sequence
  Description of Artificial Sequence: Synthetic oligonucleotide
  Antisense strand to SEQ ID NO: 1644995
ugucccauacuacugaacc

SEQ ID NO: 1644997 - RNA, 19 nt, Artificial Sequence
  Description of Artificial Sequence: Synthetic oligonucleotide
  Sense strand starting at position 462 of SEQ ID NO: 1561076
caugcaucacgguacagua

SEQ ID NO: 1644998 - RNA, 19 nt, Artificial Sequence
  Description of Artificial Sequence: Synthetic oligonucleotide
  Antisense strand to SEQ ID NO: 1644997
uacuguaccgugaugcaug

SEQ ID NO: 1644999 - RNA, 19 nt, Artificial Sequence
  Description of Artificial Sequence: Synthetic oligonucleotide
  Sense strand starting at position 485 of SEQ ID NO: 1561076
aacgucaugguagaggaau

SEQ ID NO: 1645000 - RNA, 19 nt, Artificial Sequence
  Description of Artificial Sequence: Synthetic oligonucleotide
  Antisense strand to SEQ ID NO: 1644999
auuccucuaccaugacguu

SEQ ID NO: 1645001 - RNA, 19 nt, Artificial Sequence
  Description of Artificial Sequence: Synthetic oligonucleotide
  Sense strand starting at position 486 of SEQ ID NO: 1561076
acgucaugguagaggaaug

SEQ ID NO: 1645002 - RNA, 19 nt, Artificial Sequence
  Description of Artificial Sequence: Synthetic oligonucleotide
  Antisense strand to SEQ ID NO: 1645001
cauuccucuaccaugacgu

SEQ ID NO: 1645003 - RNA, 19 nt, Artificial Sequence
  Description of Artificial Sequence: Synthetic oligonucleotide
  Sense strand starting at position 487 of SEQ ID NO: 1561076
cgucaugguagaggaauga

SEQ ID NO: 1645004 - RNA, 19 nt, Artificial Sequence
  Description of Artificial Sequence: Synthetic oligonucleotide
  Antisense strand to SEQ ID NO: 1645003
ucauuccucuaccaugacg

SEQ ID NO: 1645005 - RNA, 19 nt, Artificial Sequence
  Description of Artificial Sequence: Synthetic oligonucleotide
  Sense strand starting at position 491 of SEQ ID NO: 1561076
augguagaggaaugaguuu

SEQ ID NO: 1645006 - RNA, 19 nt, Artificial Sequence
  Description of Artificial Sequence: Synthetic oligonucleotide
  Antisense strand to SEQ ID NO: 1645005
aaacucauuccucuaccau

SEQ ID NO: 1645007 - RNA, 19 nt, Artificial Sequence
  Description of Artificial Sequence: Synthetic oligonucleotide
  Sense strand starting at position 686 of SEQ ID NO: 1561076
cacuuaaauccaggaggua

SEQ ID NO: 1645008 - RNA, 19 nt, Artificial Sequence
  Description of Artificial Sequence: Synthetic oligonucleotide
  Antisense strand to SEQ ID NO: 1645007
uaccuccuggauuuaagug

SEQ ID NO: 1645009 - RNA, 19 nt, Artificial Sequence
  Description of Artificial Sequence: Synthetic oligonucleotide
  Sense strand starting at position 793 of SEQ ID NO: 1561076
auuggugugugaccacaua

SEQ ID NO: 1645010 - RNA, 19 nt, Artificial Sequence
  Description of Artificial Sequence: Synthetic oligonucleotide
  Antisense strand to SEQ ID NO: 1645009
uauguggucacacaccaau

SEQ ID NO: 1645011 - RNA, 19 nt, Artificial Sequence
  Description of Artificial Sequence: Synthetic oligonucleotide
  Sense strand starting at position 802 of SEQ ID NO: 1561076
ugaccacauagguguguau

SEQ ID NO: 1645012 - RNA, 19 nt, Artificial Sequence
  Description of Artificial Sequence: Synthetic oligonucleotide
  Antisense strand to SEQ ID NO: 1645011
auacacaccuaugugguca

SEQ ID NO: 1645013 - RNA, 19 nt, Artificial Sequence
  Description of Artificial Sequence: Synthetic oligonucleotide
  Sense strand starting at position 827 of SEQ ID NO: 1561076
guguauugugugcucuuga

SEQ ID NO: 1645014 - RNA, 19 nt, Artificial Sequence
  Description of Artificial Sequence: Synthetic oligonucleotide
  Antisense strand to SEQ ID NO: 1645013
ucaagagcacacaauacac

SEQ ID NO: 1645015 - RNA, 19 nt, Artificial Sequence
  Description of Artificial Sequence: Synthetic oligonucleotide
  Sense strand starting at position 838 of SEQ ID NO: 1561076
gcucuugagccuguguuua

SEQ ID NO: 1645016 - RNA, 19 nt, Artificial Sequence
  Description of Artificial Sequence: Synthetic oligonucleotide
  Antisense strand to SEQ ID NO: 1645015
uaaacacaggcucaagagc

SEQ ID NO: 1645017 - RNA, 19 nt, Artificial Sequence
  Description of Artificial Sequence: Synthetic oligonucleotide
  Sense strand starting at position 840 of SEQ ID NO: 1561076
ucuugagccuguguuuaga

SEQ ID NO: 1645018 - RNA, 19 nt, Artificial Sequence
  Description of Artificial Sequence: Synthetic oligonucleotide
  Antisense strand to SEQ ID NO: 1645017
ucuaaacacaggcucaaga

SEQ ID NO: 1645019 - RNA, 19 nt, Artificial Sequence
  Description of Artificial Sequence: Synthetic oligonucleotide
  Sense strand starting at position 881 of SEQ ID NO: 1561076
acugaauggcugugcuaca

SEQ ID NO: 1645020 - RNA, 19 nt, Artificial Sequence
  Description of Artificial Sequence: Synthetic oligonucleotide
  Antisense strand to SEQ ID NO: 1645019
uguagcacagccauucagu

SEQ ID NO: 1645021 - RNA, 19 nt, Artificial Sequence
  Description of Artificial Sequence: Synthetic oligonucleotide
  Sense strand starting at position 922 of SEQ ID NO: 1561076
guguguaugaccgcuggua

SEQ ID NO: 1645022 - RNA, 19 nt, Artificial Sequence
  Description of Artificial Sequence: Synthetic oligonucleotide
  Antisense strand to SEQ ID NO: 1645021
uaccagcggucauacacac

SEQ ID NO: 1645023 - RNA, 19 nt, Artificial Sequence
  Description of Artificial Sequence: Synthetic oligonucleotide
  Sense strand starting at position 1001 of SEQ ID NO: 1561076
agcuguaugucauuugguu

SEQ ID NO: 1645024 - RNA, 19 nt, Artificial Sequence
  Description of Artificial Sequence: Synthetic oligonucleotide
  Antisense strand to SEQ ID NO: 1645023
aaccaaaugacauacagcu

SEQ ID NO: 1645025 - RNA, 19 nt, Artificial Sequence
  Description of Artificial Sequence: Synthetic oligonucleotide
  Sense strand starting at position 1003 of SEQ ID NO: 1561076
cuguaugucauuugguuau

SEQ ID NO: 1645026 - RNA, 19 nt, Artificial Sequence
  Description of Artificial Sequence: Synthetic oligonucleotide
  Antisense strand to SEQ ID NO: 1645025
auaaccaaaugacauacag

SEQ ID NO: 1645027 - RNA, 19 nt, Artificial Sequence
  Description of Artificial Sequence: Synthetic oligonucleotide
  Sense strand starting at position 1072 of SEQ ID NO: 1561076
ggaggccugugcucauaaa

SEQ ID NO: 1645028 - RNA, 19 nt, Artificial Sequence
  Description of Artificial Sequence: Synthetic oligonucleotide
  Antisense strand to SEQ ID NO: 1645027
uuuaugagcacaggccucc

SEQ ID NO: 1645029 - RNA, 19 nt, Artificial Sequence
  Description of Artificial Sequence: Synthetic oligonucleotide
  Sense strand starting at position 1265 of SEQ ID NO: 1561076
aacccuguuccgugacuca

SEQ ID NO: 1645030 - RNA, 19 nt, Artificial Sequence
  Description of Artificial Sequence: Synthetic oligonucleotide
  Antisense strand to SEQ ID NO: 1645029
ugagucacggaacaggguu

SEQ ID NO: 1645031 - RNA, 19 nt, Artificial Sequence
  Description of Artificial Sequence: Synthetic oligonucleotide
  Sense strand starting at position 1275 of SEQ ID NO: 1561076
cgugacucaucauuuccuu

SEQ ID NO: 1645032 - RNA, 19 nt, Artificial Sequence
  Description of Artificial Sequence: Synthetic oligonucleotide
  Antisense strand to SEQ ID NO: 1645031
aaggaaaugaugagucacg

SEQ ID NO: 1645033 - RNA, 19 nt, Artificial Sequence
  Description of Artificial Sequence: Synthetic oligonucleotide
  Sense strand starting at position 1672 of SEQ ID NO: 1561076
gugggaguuacucagaucu

SEQ ID NO: 1645034 - RNA, 19 nt, Artificial Sequence
  Description of Artificial Sequence: Synthetic oligonucleotide
  Antisense strand to SEQ ID NO: 1645033
agaucugaguaacucccac

SEQ ID NO: 1645035 - RNA, 19 nt, Artificial Sequence
  Description of Artificial Sequence: Synthetic oligonucleotide
  Sense strand starting at position 2007 of SEQ ID NO: 1561076
gagggaagucucugcucca

SEQ ID NO: 1645036 - RNA, 19 nt, Artificial Sequence
  Description of Artificial Sequence: Synthetic oligonucleotide
  Antisense strand to SEQ ID NO: 1645035
uggagcagagacuucccuc

SEQ ID NO: 1645037 - RNA, 19 nt, Artificial Sequence
  Description of Artificial Sequence: Synthetic oligonucleotide
  Sense strand starting at position 2102 of SEQ ID NO: 1561076
gggagcugaccucgcaaga

SEQ ID NO: 1645038 - RNA, 19 nt, Artificial Sequence
  Description of Artificial Sequence: Synthetic oligonucleotide
  Antisense strand to SEQ ID NO: 1645037
ucuugcgaggucagcuccc

SEQ ID NO: 1645039 - RNA, 19 nt, Artificial Sequence
  Description of Artificial Sequence: Synthetic oligonucleotide
  Sense strand starting at position 2366 of SEQ ID NO: 1561076
gaugaucauccgcagcaga

SEQ ID NO: 1645040 - RNA, 19 nt, Artificial Sequence
  Description of Artificial Sequence: Synthetic oligonucleotide
  Antisense strand to SEQ ID NO: 1645039
ucugcugcggaugaucauc

SEQ ID NO: 1645041 - RNA, 19 nt, Artificial Sequence
  Description of Artificial Sequence: Synthetic oligonucleotide
  Sense strand starting at position 2751 of SEQ ID NO: 1561076
guuccuaggacugaguuga

SEQ ID NO: 1645042 - RNA, 19 nt, Artificial Sequence
  Description of Artificial Sequence: Synthetic oligonucleotide
  Antisense strand to SEQ ID NO: 1645041
ucaacucaguccuaggaac

SEQ ID NO: 1645043 - RNA, 19 nt, Artificial Sequence
  Description of Artificial Sequence: Synthetic oligonucleotide
  Sense strand starting at position 2755 of SEQ ID NO: 1561076
cuaggacugaguugaguaa

SEQ ID NO: 1645044 - RNA, 19 nt, Artificial Sequence
  Description of Artificial Sequence: Synthetic oligonucleotide
  Antisense strand to SEQ ID NO: 1645043
uuacucaacucaguccuag

SEQ ID NO: 1645045 - RNA, 19 nt, Artificial Sequence
  Description of Artificial Sequence: Synthetic oligonucleotide
  Sense strand starting at position 2973 of SEQ ID NO: 1561076
acgagaguuucucugggug

SEQ ID NO: 1645046 - RNA, 19 nt, Artificial Sequence
  Description of Artificial Sequence: Synthetic oligonucleotide
  Antisense strand to SEQ ID NO: 1645045
cacccagagaaacucucgu

SEQ ID NO: 1645047 - RNA, 19 nt, Artificial Sequence
  Description of Artificial Sequence: Synthetic oligonucleotide
  Sense strand starting at position 2976 of SEQ ID NO: 1561076
agaguuucucuggguggga

SEQ ID NO: 1645048 - RNA, 19 nt, Artificial Sequence
  Description of Artificial Sequence: Synthetic oligonucleotide
  Antisense strand to SEQ ID NO: 1645047
ucccacccagagaaacucu

SEQ ID NO: 1645049 - RNA, 19 nt, Artificial Sequence
  Description of Artificial Sequence: Synthetic oligonucleotide
  Sense strand starting at position 3261 of SEQ ID NO: 1561076
gcgguuaccagccagagaa

SEQ ID NO: 1645050 - RNA, 19 nt, Artificial Sequence
  Description of Artificial Sequence: Synthetic oligonucleotide
  Antisense strand to SEQ ID NO: 1645049
uucucuggcugguaaccgc

SEQ ID NO: 1645051 - RNA, 19 nt, Artificial Sequence
  Description of Artificial Sequence: Synthetic oligonucleotide
  Sense strand starting at position 3546 of SEQ ID NO: 1561076
gcuguuucccgccaaagga

SEQ ID NO: 1645052 - RNA, 19 nt, Artificial Sequence
  Description of Artificial Sequence: Synthetic oligonucleotide
  Antisense strand to SEQ ID NO: 1645051
uccuuuggcgggaaacagc

SEQ ID NO: 1645053 - RNA, 19 nt, Artificial Sequence
  Description of Artificial Sequence: Synthetic oligonucleotide
  Sense strand starting at position 3637 of SEQ ID NO: 1561076
gugguccucggugauucau

SEQ ID NO: 1645054 - RNA, 19 nt, Artificial Sequence
  Description of Artificial Sequence: Synthetic oligonucleotide
  Antisense strand to SEQ ID NO: 1645053
augaaucaccgaggaccac

SEQ ID NO: 1645055 - RNA, 19 nt, Artificial Sequence
  Description of Artificial Sequence: Synthetic oligonucleotide
  Sense strand starting at position 3639 of SEQ ID NO: 1561076
gguccucggugauucauuu

SEQ ID NO: 1645056 - RNA, 19 nt, Artificial Sequence
  Description of Artificial Sequence: Synthetic oligonucleotide
  Antisense strand to SEQ ID NO: 1645055
aaaugaaucaccgaggacc

SEQ ID NO: 1645057 - RNA, 19 nt, Artificial Sequence
  Description of Artificial Sequence: Synthetic oligonucleotide
  Sense strand starting at position 3679 of SEQ ID NO: 1561076
acuccucagcccugaguuu

SEQ ID NO: 1645058 - RNA, 19 nt, Artificial Sequence
  Description of Artificial Sequence: Synthetic oligonucleotide
  Antisense strand to SEQ ID NO: 1645057
aaacucagggcugaggagu

SEQ ID NO: 1645059 - RNA, 19 nt, Artificial Sequence
  Description of Artificial Sequence: Synthetic oligonucleotide
  Sense strand starting at position 3688 of SEQ ID NO: 1561076
cccugaguuuggucuuuag

SEQ ID NO: 1645060 - RNA, 19 nt, Artificial Sequence
  Description of Artificial Sequence: Synthetic oligonucleotide
  Antisense strand to SEQ ID NO: 1645059
cuaaagaccaaacucaggg

SEQ ID NO: 1645061 - RNA, 19 nt, Artificial Sequence
  Description of Artificial Sequence: Synthetic oligonucleotide
  Sense strand starting at position 3702 of SEQ ID NO: 1561076
uuuagucgccucugagaac

SEQ ID NO: 1645062 - RNA, 19 nt, Artificial Sequence
  Description of Artificial Sequence: Synthetic oligonucleotide
  Antisense strand to SEQ ID NO: 1645061
guucucagaggcgacuaaa

SEQ ID NO: 1645063 - RNA, 19 nt, Artificial Sequence
  Description of Artificial Sequence: Synthetic oligonucleotide
  Sense strand starting at position 3734 of SEQ ID NO: 1561076
auauaaagugcagguguua

SEQ ID NO: 1645064 - RNA, 19 nt, Artificial Sequence
  Description of Artificial Sequence: Synthetic oligonucleotide
  Antisense strand to SEQ ID NO: 1645063
uaacaccugcacuuuauau

SEQ ID NO: 1645065 - RNA, 19 nt, Artificial Sequence
  Description of Artificial Sequence: Synthetic oligonucleotide
  Sense strand starting at position 3762 of SEQ ID NO: 1561076
gucucauaugauugcugua

SEQ ID NO: 1645066 - RNA, 19 nt, Artificial Sequence
  Description of Artificial Sequence: Synthetic oligonucleotide
  Antisense strand to SEQ ID NO: 1645065
uacagcaaucauaugagac

SEQ ID NO: 1645067 - RNA, 19 nt, Artificial Sequence
  Description of Artificial Sequence: Synthetic oligonucleotide
  Sense strand starting at position 3764 of SEQ ID NO: 1561076
cucauaugauugcuguaag

SEQ ID NO: 1645068 - RNA, 19 nt, Artificial Sequence
  Description of Artificial Sequence: Synthetic oligonucleotide
  Antisense strand to SEQ ID NO: 1645067
cuuacagcaaucauaugag

SEQ ID NO: 1645069 - RNA, 19 nt, Artificial Sequence
  Description of Artificial Sequence: Synthetic oligonucleotide
  Sense strand starting at position 3767 of SEQ ID NO: 1561076
auaugauugcuguaagauu

SEQ ID NO: 1645070 - RNA, 19 nt, Artificial Sequence
  Description of Artificial Sequence: Synthetic oligonucleotide
  Antisense strand to SEQ ID NO: 1645069
aaucuuacagcaaucauau

SEQ ID NO: 1645071 - RNA, 19 nt, Artificial Sequence
  Description of Artificial Sequence: Synthetic oligonucleotide
  Sense strand starting at position 42 of SEQ ID NO: 1561077
ugugcaacagccuagaaau

SEQ ID NO: 1645072 - RNA, 19 nt, Artificial Sequence
  Description of Artificial Sequence: Synthetic oligonucleotide
  Antisense strand to SEQ ID NO: 1645071
auuucuaggcuguugcaca

SEQ ID NO: 1645073 - RNA, 19 nt, Artificial Sequence
  Description of Artificial Sequence: Synthetic oligonucleotide
  Sense strand starting at position 52 of SEQ ID NO: 1561077
ccuagaaaugagugcaacu

SEQ ID NO: 1645074 - RNA, 19 nt, Artificial Sequence
  Description of Artificial Sequence: Synthetic oligonucleotide
  Antisense strand to SEQ ID NO: 1645073
aguugcacucauuucuagg

SEQ ID NO: 1645075 - RNA, 19 nt, Artificial Sequence
  Description of Artificial Sequence: Synthetic oligonucleotide
  Sense strand starting at position 94 of SEQ ID NO: 1561077
aucuacuguggcuagagua

SEQ ID NO: 1645076 - RNA, 19 nt, Artificial Sequence
  Description of Artificial Sequence: Synthetic oligonucleotide
  Antisense strand to SEQ ID NO: 1645075
uacucuagccacaguagau

SEQ ID NO: 1645077 - RNA, 19 nt, Artificial Sequence
  Description of Artificial Sequence: Synthetic oligonucleotide
  Sense strand starting at position 101 of SEQ ID NO: 1561077
guggcuagaguagaauaau

SEQ ID NO: 1645078 - RNA, 19 nt, Artificial Sequence
  Description of Artificial Sequence: Synthetic oligonucleotide
  Antisense strand to SEQ ID NO: 1645077
auuauucuacucuagccac

SEQ ID NO: 1645079 - RNA, 19 nt, Artificial Sequence
  Description of Artificial Sequence: Synthetic oligonucleotide
  Sense strand starting at position 112 of SEQ ID NO: 1561077
agaauaaucugggcagggu

SEQ ID NO: 1645080 - RNA, 19 nt, Artificial Sequence
  Description of Artificial Sequence: Synthetic oligonucleotide
  Antisense strand to SEQ ID NO: 1645079
acccugcccagauuauucu

SEQ ID NO: 1645081 - RNA, 19 nt, Artificial Sequence
  Description of Artificial Sequence: Synthetic oligonucleotide
  Sense strand starting at position 121 of SEQ ID NO: 1561077
ugggcagggucacuaguua

SEQ ID NO: 1645082 - RNA, 19 nt, Artificial Sequence
  Description of Artificial Sequence: Synthetic oligonucleotide
  Antisense strand to SEQ ID NO: 1645081
uaacuagugacccugccca

SEQ ID NO: 1645083 - RNA, 19 nt, Artificial Sequence
  Description of Artificial Sequence: Synthetic oligonucleotide
  Sense strand starting at position 125 of SEQ ID NO: 1561077
cagggucacuaguuaagga

SEQ ID NO: 1645084 - RNA, 19 nt, Artificial Sequence
  Description of Artificial Sequence: Synthetic oligonucleotide
  Antisense strand to SEQ ID NO: 1645083
uccuuaacuagugacccug

SEQ ID NO: 1645085 - RNA, 19 nt, Artificial Sequence
  Description of Artificial Sequence: Synthetic oligonucleotide
  Sense strand starting at position 180 of SEQ ID NO: 1561077
cagggagcccuuggucaua

SEQ ID NO: 1645086 - RNA, 19 nt, Artificial Sequence
  Description of Artificial Sequence: Synthetic oligonucleotide
  Antisense strand to SEQ ID NO: 1645085
uaugaccaagggcucccug

SEQ ID NO: 1645087 - RNA, 19 nt, Artificial Sequence
  Description of Artificial Sequence: Synthetic oligonucleotide
  Sense strand starting at position 182 of SEQ ID NO: 1561077
gggagcccuuggucauaga

SEQ ID NO: 1645088 - RNA, 19 nt, Artificial Sequence
  Description of Artificial Sequence: Synthetic oligonucleotide
  Antisense strand to SEQ ID NO: 1645087
ucuaugaccaagggcuccc

SEQ ID NO: 1645089 - RNA, 19 nt, Artificial Sequence
  Description of Artificial Sequence: Synthetic oligonucleotide
  Sense strand starting at position 217 of SEQ ID NO: 1561077
ggacuuucuccugaaggca

SEQ ID NO: 1645090 - RNA, 19 nt, Artificial Sequence
  Description of Artificial Sequence: Synthetic oligonucleotide
  Antisense strand to SEQ ID NO: 1645089
ugccuucaggagaaagucc

SEQ ID NO: 1645091 - RNA, 19 nt, Artificial Sequence
  Description of Artificial Sequence: Synthetic oligonucleotide
  Sense strand starting at position 268 of SEQ ID NO: 1561077
gagauagggucacauuugu

SEQ ID NO: 1645092 - RNA, 19 nt, Artificial Sequence
  Description of Artificial Sequence: Synthetic oligonucleotide
  Antisense strand to SEQ ID NO: 1645091
acaaaugugacccuaucuc

SEQ ID NO: 1645093 - RNA, 19 nt, Artificial Sequence
  Description of Artificial Sequence: Synthetic oligonucleotide
  Sense strand starting at position 895 of SEQ ID NO: 1561077
gagagauccugugucagaa

SEQ ID NO: 1645094 - RNA, 19 nt, Artificial Sequence
  Description of Artificial Sequence: Synthetic oligonucleotide
  Antisense strand to SEQ ID NO: 1645093
uucugacacaggaucucuc

SEQ ID NO: 1645095 - RNA, 19 nt, Artificial Sequence
  Description of Artificial Sequence: Synthetic oligonucleotide
  Sense strand starting at position 1226 of SEQ ID NO: 1561077
ccugguuccggugauauuc

SEQ ID NO: 1645096 - RNA, 19 nt, Artificial Sequence
  Description of Artificial Sequence: Synthetic oligonucleotide
  Antisense strand to SEQ ID NO: 1645095
gaauaucaccggaaccagg

SEQ ID NO: 1645097 - RNA, 19 nt, Artificial Sequence
  Description of Artificial Sequence: Synthetic oligonucleotide
  Sense strand starting at position 1479 of SEQ ID NO: 1561077
gucacacagcuagaauuaa

SEQ ID NO: 1645098 - RNA, 19 nt, Artificial Sequence
  Description of Artificial Sequence: Synthetic oligonucleotide
  Antisense strand to SEQ ID NO: 1645097
uuaauucuagcugugugac

SEQ ID NO: 1645099 - RNA, 19 nt, Artificial Sequence
  Description of Artificial Sequence: Synthetic oligonucleotide
  Sense strand starting at position 1518 of SEQ ID NO: 1561077
cccguauucucauugacau

SEQ ID NO: 1645100 - RNA, 19 nt, Artificial Sequence
  Description of Artificial Sequence: Synthetic oligonucleotide
  Antisense strand to SEQ ID NO: 1645099
augucaaugagaauacggg

SEQ ID NO: 1645101 - RNA, 19 nt, Artificial Sequence
  Description of Artificial Sequence: Synthetic oligonucleotide
  Sense strand starting at position 1519 of SEQ ID NO: 1561077
ccguauucucauugacaug

SEQ ID NO: 1645102 - RNA, 19 nt, Artificial Sequence
  Description of Artificial Sequence: Synthetic oligonucleotide
  Antisense strand to SEQ ID NO: 1645101
caugucaaugagaauacgg

SEQ ID NO: 1645103 - RNA, 19 nt, Artificial Sequence
  Description of Artificial Sequence: Synthetic oligonucleotide
  Sense strand starting at position 1672 of SEQ ID NO: 1561077
ggaagauauuucugcagag

SEQ ID NO: 1645104 - RNA, 19 nt, Artificial Sequence
  Description of Artificial Sequence: Synthetic oligonucleotide
  Antisense strand to SEQ ID NO: 1645103
cucugcagaaauaucuucc

SEQ ID NO: 1645105 - RNA, 19 nt, Artificial Sequence
  Description of Artificial Sequence: Synthetic oligonucleotide
  Sense strand starting at position 2079 of SEQ ID NO: 1561077
gggaggaucuggguguguu

SEQ ID NO: 1645106 - RNA, 19 nt, Artificial Sequence
  Description of Artificial Sequence: Synthetic oligonucleotide
  Antisense strand to SEQ ID NO: 1645105
aacacacccagauccuccc

SEQ ID NO: 1645107 - RNA, 19 nt, Artificial Sequence
  Description of Artificial Sequence: Synthetic oligonucleotide
  Sense strand starting at position 2080 of SEQ ID NO: 1561077
ggaggaucuggguguguug

SEQ ID NO: 1645108 - RNA, 19 nt, Artificial Sequence
  Description of Artificial Sequence: Synthetic oligonucleotide
  Antisense strand to SEQ ID NO: 1645107
caacacacccagauccucc

SEQ ID NO: 1645109 - RNA, 19 nt, Artificial Sequence
  Description of Artificial Sequence: Synthetic oligonucleotide
  Sense strand starting at position 2149 of SEQ ID NO: 1561077
augcaucuguguuuacaag

SEQ ID NO: 1645110 - RNA, 19 nt, Artificial Sequence
  Description of Artificial Sequence: Synthetic oligonucleotide
  Antisense strand to SEQ ID NO: 1645109
cuuguaaacacagaugcau

SEQ ID NO: 1645111 - RNA, 19 nt, Artificial Sequence
  Description of Artificial Sequence: Synthetic oligonucleotide
  Sense strand starting at position 2187 of SEQ ID NO: 1561077
gacagugucugccuuaaga

SEQ ID NO: 1645112 - RNA, 19 nt, Artificial Sequence
  Description of Artificial Sequence: Synthetic oligonucleotide
  Antisense strand to SEQ ID NO: 1645111
ucuuaaggcagacacuguc

SEQ ID NO: 1645113 - RNA, 19 nt, Artificial Sequence
  Description of Artificial Sequence: Synthetic oligonucleotide
  Sense strand starting at position 2189 of SEQ ID NO: 1561077
cagugucugccuuaagaug

SEQ ID NO: 1645114 - RNA, 19 nt, Artificial Sequence
  Description of Artificial Sequence: Synthetic oligonucleotide
  Antisense strand to SEQ ID NO: 1645113
caucuuaaggcagacacug

SEQ ID NO: 1645115 - RNA, 19 nt, Artificial Sequence
  Description of Artificial Sequence: Synthetic oligonucleotide
  Sense strand starting at position 2561 of SEQ ID NO: 1561077
uggccugugcuugacacaa

SEQ ID NO: 1645116 - RNA, 19 nt, Artificial Sequence
  Description of Artificial Sequence: Synthetic oligonucleotide
  Antisense strand to SEQ ID NO: 1645115
uugugucaagcacaggcca

SEQ ID NO: 1645117 - RNA, 19 nt, Artificial Sequence
  Description of Artificial Sequence: Synthetic oligonucleotide
  Sense strand starting at position 2829 of SEQ ID NO: 1561077
gguuaagguucaguaguau

SEQ ID NO: 1645118 - RNA, 19 nt, Artificial Sequence
  Description of Artificial Sequence: Synthetic oligonucleotide
  Antisense strand to SEQ ID NO: 1645117
auacuacugaaccuuaacc

SEQ ID NO: 1645119 - RNA, 19 nt, Artificial Sequence
  Description of Artificial Sequence: Synthetic oligonucleotide
  Sense strand starting at position 2835 of SEQ ID NO: 1561077
gguucaguaguaugggaca

SEQ ID NO: 1645120 - RNA, 19 nt, Artificial Sequence
  Description of Artificial Sequence: Synthetic oligonucleotide
  Antisense strand to SEQ ID NO: 1645119
ugucccauacuacugaacc

SEQ ID NO: 1645121 - RNA, 19 nt, Artificial Sequence
  Description of Artificial Sequence: Synthetic oligonucleotide
  Sense strand starting at position 2873 of SEQ ID NO: 1561077
caugcaucacgguacagua

SEQ ID NO: 1645122 - RNA, 19 nt, Artificial Sequence
  Description of Artificial Sequence: Synthetic oligonucleotide
  Antisense strand to SEQ ID NO: 1645121
uacuguaccgugaugcaug

SEQ ID NO: 1645123 - RNA, 19 nt, Artificial Sequence
  Description of Artificial Sequence: Synthetic oligonucleotide
  Sense strand starting at position 2896 of SEQ ID NO: 1561077
aacgucaugguagaggaau

SEQ ID NO: 1645124 - RNA, 19 nt, Artificial Sequence
  Description of Artificial Sequence: Synthetic oligonucleotide
  Antisense strand to SEQ ID NO: 1645123
auuccucuaccaugacguu

SEQ ID NO: 1645125 - RNA, 19 nt, Artificial Sequence
  Description of Artificial Sequence: Synthetic oligonucleotide
  Sense strand starting at position 2897 of SEQ ID NO: 1561077
acgucaugguagaggaaug

SEQ ID NO: 1645126 - RNA, 19 nt, Artificial Sequence
  Description of Artificial Sequence: Synthetic oligonucleotide
  Antisense strand to SEQ ID NO: 1645125
cauuccucuaccaugacgu

SEQ ID NO: 1645127 - RNA, 19 nt, Artificial Sequence
  Description of Artificial Sequence: Synthetic oligonucleotide
  Sense strand starting at position 2898 of SEQ ID NO: 1561077
cgucaugguagaggaauga

SEQ ID NO: 1645128 - RNA, 19 nt, Artificial Sequence
  Description of Artificial Sequence: Synthetic oligonucleotide
  Antisense strand to SEQ ID NO: 1645127
ucauuccucuaccaugacg

SEQ ID NO: 1645129 - RNA, 19 nt, Artificial Sequence
  Description of Artificial Sequence: Synthetic oligonucleotide
  Sense strand starting at position 2902 of SEQ ID NO: 1561077
augguagaggaaugaguuu

SEQ ID NO: 1645130 - RNA, 19 nt, Artificial Sequence
  Description of Artificial Sequence: Synthetic oligonucleotide
  Antisense strand to SEQ ID NO: 1645129
aaacucauuccucuaccau

SEQ ID NO: 1645131 - RNA, 19 nt, Artificial Sequence
  Description of Artificial Sequence: Synthetic oligonucleotide
  Sense strand starting at position 3097 of SEQ ID NO: 1561077
cacuuaaauccaggaggua

SEQ ID NO: 1645132 - RNA, 19 nt, Artificial Sequence
  Description of Artificial Sequence: Synthetic oligonucleotide
  Antisense strand to SEQ ID NO: 1645131
uaccuccuggauuuaagug

SEQ ID NO: 1645133 - RNA, 19 nt, Artificial Sequence
  Description of Artificial Sequence: Synthetic oligonucleotide
  Sense strand starting at position 3204 of SEQ ID NO: 1561077
auuggugugugaccacaua

SEQ ID NO: 1645134 - RNA, 19 nt, Artificial Sequence
  Description of Artificial Sequence: Synthetic oligonucleotide
  Antisense strand to SEQ ID NO: 1645133
uauguggucacacaccaau

SEQ ID NO: 1645135 - RNA, 19 nt, Artificial Sequence
  Description of Artificial Sequence: Synthetic oligonucleotide
  Sense strand starting at position 3213 of SEQ ID NO: 1561077
ugaccacauagguguguau

SEQ ID NO: 1645136 - RNA, 19 nt, Artificial Sequence
  Description of Artificial Sequence: Synthetic oligonucleotide
  Antisense strand to SEQ ID NO: 1645135
auacacaccuaugugguca

SEQ ID NO: 1645137 - RNA, 19 nt, Artificial Sequence
  Description of Artificial Sequence: Synthetic oligonucleotide
  Sense strand starting at position 3238 of SEQ ID NO: 1561077
guguauugugugcucuuga

SEQ ID NO: 1645138 - RNA, 19 nt, Artificial Sequence
  Description of Artificial Sequence: Synthetic oligonucleotide
  Antisense strand to SEQ ID NO: 1645137
ucaagagcacacaauacac

SEQ ID NO: 1645139 - RNA, 19 nt, Artificial Sequence
  Description of Artificial Sequence: Synthetic oligonucleotide
  Sense strand starting at position 3249 of SEQ ID NO: 1561077
gcucuugagccuguguuua

SEQ ID NO: 1645140 - RNA, 19 nt, Artificial Sequence
  Description of Artificial Sequence: Synthetic oligonucleotide
  Antisense strand to SEQ ID NO: 1645139
uaaacacaggcucaagagc

SEQ ID NO: 1645141 - RNA, 19 nt, Artificial Sequence
  Description of Artificial Sequence: Synthetic oligonucleotide
  Sense strand starting at position 3333 of SEQ ID NO: 1561077
guguguaugaccgcuggua

SEQ ID NO: 1645142 - RNA, 19 nt, Artificial Sequence
  Description of Artificial Sequence: Synthetic oligonucleotide
  Antisense strand to SEQ ID NO: 1645141
uaccagcggucauacacac

SEQ ID NO: 1645143 - RNA, 19 nt, Artificial Sequence
  Description of Artificial Sequence: Synthetic oligonucleotide
  Sense strand starting at position 3412 of SEQ ID NO: 1561077
agcuguaugucauuugguu

SEQ ID NO: 1645144 - RNA, 19 nt, Artificial Sequence
  Description of Artificial Sequence: Synthetic oligonucleotide
  Antisense strand to SEQ ID NO: 1645143
aaccaaaugacauacagcu

SEQ ID NO: 1645145 - RNA, 19 nt, Artificial Sequence
  Description of Artificial Sequence: Synthetic oligonucleotide
  Sense strand starting at position 3414 of SEQ ID NO: 1561077
cuguaugucauuugguuau

SEQ ID NO: 1645146 - RNA, 19 nt, Artificial Sequence
  Description of Artificial Sequence: Synthetic oligonucleotide
  Antisense strand to SEQ ID NO: 1645145
auaaccaaaugacauacag

SEQ ID NO: 1645147 - RNA, 19 nt, Artificial Sequence
  Description of Artificial Sequence: Synthetic oligonucleotide
  Sense strand starting at position 3483 of SEQ ID NO: 1561077
ggaggccugugcucauaaa

SEQ ID NO: 1645148 - RNA, 19 nt, Artificial Sequence
  Description of Artificial Sequence: Synthetic oligonucleotide
  Antisense strand to SEQ ID NO: 1645147
uuuaugagcacaggccucc

SEQ ID NO: 1645149 - RNA, 19 nt, Artificial Sequence
  Description of Artificial Sequence: Synthetic oligonucleotide
  Sense strand starting at position 3686 of SEQ ID NO: 1561077
cgugacucaucauuuccuu

SEQ ID NO: 1645150 - RNA, 19 nt, Artificial Sequence
  Description of Artificial Sequence: Synthetic oligonucleotide
  Antisense strand to SEQ ID NO: 1645149
aaggaaaugaugagucacg

SEQ ID NO: 1645151 - RNA, 19 nt, Artificial Sequence
  Description of Artificial Sequence: Synthetic oligonucleotide
  Sense strand starting at position 315 of SEQ ID NO: 1561078
ccugguuauguccgaguga

SEQ ID NO: 1645152 - RNA, 19 nt, Artificial Sequence
  Description of Artificial Sequence: Synthetic oligonucleotide
  Antisense strand to SEQ ID NO: 1645151
ucacucggacauaaccagg

SEQ ID NO: 1645153 - RNA, 19 nt, Artificial Sequence
  Description of Artificial Sequence: Synthetic oligonucleotide
  Sense strand starting at position 375 of SEQ ID NO: 1561078
gugggaguuacucagaucu

SEQ ID NO: 1645154 - RNA, 19 nt, Artificial Sequence
  Description of Artificial Sequence: Synthetic oligonucleotide
  Antisense strand to SEQ ID NO: 1645153
agaucugaguaacucccac

SEQ ID NO: 1645155 - RNA, 19 nt, Artificial Sequence
  Description of Artificial Sequence: Synthetic oligonucleotide
  Sense strand starting at position 377 of SEQ ID NO: 1561078
gggaguuacucagaucuca

SEQ ID NO: 1645156 - RNA, 19 nt, Artificial Sequence
  Description of Artificial Sequence: Synthetic oligonucleotide
  Antisense strand to SEQ ID NO: 1645155
ugagaucugaguaacuccc

SEQ ID NO: 1645157 - RNA, 19 nt, Artificial Sequence
  Description of Artificial Sequence: Synthetic oligonucleotide
  Sense strand starting at position 710 of SEQ ID NO: 1561078
gagggaagucucugcucca

SEQ ID NO: 1645158 - RNA, 19 nt, Artificial Sequence
  Description of Artificial Sequence: Synthetic oligonucleotide
  Antisense strand to SEQ ID NO: 1645157
uggagcagagacuucccuc

SEQ ID NO: 1645159 - RNA, 19 nt, Artificial Sequence
  Description of Artificial Sequence: Synthetic oligonucleotide
  Sense strand starting at position 805 of SEQ ID NO: 1561078
gggagcugaccucgcaaga

SEQ ID NO: 1645160 - RNA, 19 nt, Artificial Sequence
  Description of Artificial Sequence: Synthetic oligonucleotide
  Antisense strand to SEQ ID NO: 1645159
ucuugcgaggucagcuccc

SEQ ID NO: 1645161 - RNA, 19 nt, Artificial Sequence
  Description of Artificial Sequence: Synthetic oligonucleotide
  Sense strand starting at position 1069 of SEQ ID NO: 1561078
gaugaucauccgcagcaga

SEQ ID NO: 1645162 - RNA, 19 nt, Artificial Sequence
  Description of Artificial Sequence: Synthetic oligonucleotide
  Antisense strand to SEQ ID NO: 1645161
ucugcugcggaugaucauc

SEQ ID NO: 1645163 - RNA, 19 nt, Artificial Sequence
  Description of Artificial Sequence: Synthetic oligonucleotide
  Sense strand starting at position 1454 of SEQ ID NO: 1561078
guuccuaggacugaguuga

SEQ ID NO: 1645164 - RNA, 19 nt, Artificial Sequence
  Description of Artificial Sequence: Synthetic oligonucleotide
  Antisense strand to SEQ ID NO: 1645163
ucaacucaguccuaggaac

SEQ ID NO: 1645165 - RNA, 19 nt, Artificial Sequence
  Description of Artificial Sequence: Synthetic oligonucleotide
  Sense strand starting at position 1458 of SEQ ID NO: 1561078
cuaggacugaguugaguaa

SEQ ID NO: 1645166 - RNA, 19 nt, Artificial Sequence
  Description of Artificial Sequence: Synthetic oligonucleotide
  Antisense strand to SEQ ID NO: 1645165
uuacucaacucaguccuag

SEQ ID NO: 1645167 - RNA, 19 nt, Artificial Sequence
  Description of Artificial Sequence: Synthetic oligonucleotide
  Sense strand starting at position 1505 of SEQ ID NO: 1561078
gcuccuuagaguugugagu

SEQ ID NO: 1645168 - RNA, 19 nt, Artificial Sequence
  Description of Artificial Sequence: Synthetic oligonucleotide
  Antisense strand to SEQ ID NO: 1645167
acucacaacucuaaggagc

SEQ ID NO: 1645169 - RNA, 19 nt, Artificial Sequence
  Description of Artificial Sequence: Synthetic oligonucleotide
  Sense strand starting at position 1676 of SEQ ID NO: 1561078
acgagaguuucucugggug

SEQ ID NO: 1645170 - RNA, 19 nt, Artificial Sequence
  Description of Artificial Sequence: Synthetic oligonucleotide
  Antisense strand to SEQ ID NO: 1645169
cacccagagaaacucucgu

SEQ ID NO: 1645171 - RNA, 19 nt, Artificial Sequence
  Description of Artificial Sequence: Synthetic oligonucleotide
  Sense strand starting at position 1679 of SEQ ID NO: 1561078
agaguuucucuggguggga

SEQ ID NO: 1645172 - RNA, 19 nt, Artificial Sequence
  Description of Artificial Sequence: Synthetic oligonucleotide
  Antisense strand to SEQ ID NO: 1645171
ucccacccagagaaacucu

SEQ ID NO: 1645173 - RNA, 19 nt, Artificial Sequence
  Description of Artificial Sequence: Synthetic oligonucleotide
  Sense strand starting at position 1964 of SEQ ID NO: 1561078
gcgguuaccagccagagaa

SEQ ID NO: 1645174 - RNA, 19 nt, Artificial Sequence
  Description of Artificial Sequence: Synthetic oligonucleotide
  Antisense strand to SEQ ID NO: 1645173
uucucuggcugguaaccgc

SEQ ID NO: 1645175 - RNA, 19 nt, Artificial Sequence
  Description of Artificial Sequence: Synthetic oligonucleotide
  Sense strand starting at position 2249 of SEQ ID NO: 1561078
gcuguuucccgccaaagga

SEQ ID NO: 1645176 - RNA, 19 nt, Artificial Sequence
  Description of Artificial Sequence: Synthetic oligonucleotide
  Antisense strand to SEQ ID NO: 1645175
uccuuuggcgggaaacagc

SEQ ID NO: 1645177 - RNA, 19 nt, Artificial Sequence
  Description of Artificial Sequence: Synthetic oligonucleotide
  Sense strand starting at position 2315 of SEQ ID NO: 1561078
gugcgagggucgcuagaaa

SEQ ID NO: 1645178 - RNA, 19 nt, Artificial Sequence
  Description of Artificial Sequence: Synthetic oligonucleotide
  Antisense strand to SEQ ID NO: 1645177
uuucuagcgacccucgcac

SEQ ID NO: 1645179 - RNA, 19 nt, Artificial Sequence
  Description of Artificial Sequence: Synthetic oligonucleotide
  Sense strand starting at position 2337 of SEQ ID NO: 1561078
ccggugguccucggugauu

SEQ ID NO: 1645180 - RNA, 19 nt, Artificial Sequence
  Description of Artificial Sequence: Synthetic oligonucleotide
  Antisense strand to SEQ ID NO: 1645179
aaucaccgaggaccaccgg

SEQ ID NO: 1645181 - RNA, 19 nt, Artificial Sequence
  Description of Artificial Sequence: Synthetic oligonucleotide
  Sense strand starting at position 2339 of SEQ ID NO: 1561078
ggugguccucggugauuca

SEQ ID NO: 1645182 - RNA, 19 nt, Artificial Sequence
  Description of Artificial Sequence: Synthetic oligonucleotide
  Antisense strand to SEQ ID NO: 1645181
ugaaucaccgaggaccacc

SEQ ID NO: 1645183 - RNA, 19 nt, Artificial Sequence
  Description of Artificial Sequence: Synthetic oligonucleotide
  Sense strand starting at position 2340 of SEQ ID NO: 1561078
gugguccucggugauucau

SEQ ID NO: 1645184 - RNA, 19 nt, Artificial Sequence
  Description of Artificial Sequence: Synthetic oligonucleotide
  Antisense strand to SEQ ID NO: 1645183
augaaucaccgaggaccac

SEQ ID NO: 1645185 - RNA, 19 nt, Artificial Sequence
  Description of Artificial Sequence: Synthetic oligonucleotide
  Sense strand starting at position 2342 of SEQ ID NO: 1561078
gguccucggugauucauuu

SEQ ID NO: 1645186 - RNA, 19 nt, Artificial Sequence
  Description of Artificial Sequence: Synthetic oligonucleotide
  Antisense strand to SEQ ID NO: 1645185
aaaugaaucaccgaggacc

SEQ ID NO: 1645187 - RNA, 19 nt, Artificial Sequence
  Description of Artificial Sequence: Synthetic oligonucleotide
  Sense strand starting at position 2382 of SEQ ID NO: 1561078
acuccucagcccugaguuu

SEQ ID NO: 1645188 - RNA, 19 nt, Artificial Sequence
  Description of Artificial Sequence: Synthetic oligonucleotide
  Antisense strand to SEQ ID NO: 1645187
aaacucagggcugaggagu

SEQ ID NO: 1645189 - RNA, 19 nt, Artificial Sequence
  Description of Artificial Sequence: Synthetic oligonucleotide
  Sense strand starting at position 2391 of SEQ ID NO: 1561078
cccugaguuuggucuuuag

SEQ ID NO: 1645190 - RNA, 19 nt, Artificial Sequence
  Description of Artificial Sequence: Synthetic oligonucleotide
  Antisense strand to SEQ ID NO: 1645189
cuaaagaccaaacucaggg

SEQ ID NO: 1645191 - RNA, 19 nt, Artificial Sequence
  Description of Artificial Sequence: Synthetic oligonucleotide
  Sense strand starting at position 2401 of SEQ ID NO: 1561078
ggucuuuagucgccucuga

SEQ ID NO: 1645192 - RNA, 19 nt, Artificial Sequence
  Description of Artificial Sequence: Synthetic oligonucleotide
  Antisense strand to SEQ ID NO: 1645191
ucagaggcgacuaaagacc

SEQ ID NO: 1645193 - RNA, 19 nt, Artificial Sequence
  Description of Artificial Sequence: Synthetic oligonucleotide
  Sense strand starting at position 2405 of SEQ ID NO: 1561078
uuuagucgccucugagaac

SEQ ID NO: 1645194 - RNA, 19 nt, Artificial Sequence
  Description of Artificial Sequence: Synthetic oligonucleotide
  Antisense strand to SEQ ID NO: 1645193
guucucagaggcgacuaaa

SEQ ID NO: 1645195 - RNA, 19 nt, Artificial Sequence
  Description of Artificial Sequence: Synthetic oligonucleotide
  Sense strand starting at position 2437 of SEQ ID NO: 1561078
auauaaagugcagguguua

SEQ ID NO: 1645196 - RNA, 19 nt, Artificial Sequence
  Description of Artificial Sequence: Synthetic oligonucleotide
  Antisense strand to SEQ ID NO: 1645195
uaacaccugcacuuuauau

SEQ ID NO: 1645197 - RNA, 19 nt, Artificial Sequence
  Description of Artificial Sequence: Synthetic oligonucleotide
  Sense strand starting at position 2465 of SEQ ID NO: 1561078
gucucauaugauugcugua

SEQ ID NO: 1645198 - RNA, 19 nt, Artificial Sequence
  Description of Artificial Sequence: Synthetic oligonucleotide
  Antisense strand to SEQ ID NO: 1645197
uacagcaaucauaugagac

SEQ ID NO: 1645199 - RNA, 19 nt, Artificial Sequence
  Description of Artificial Sequence: Synthetic oligonucleotide
  Sense strand starting at position 2467 of SEQ ID NO: 1561078
cucauaugauugcuguaag

SEQ ID NO: 1645200 - RNA, 19 nt, Artificial Sequence
  Description of Artificial Sequence: Synthetic oligonucleotide
  Antisense strand to SEQ ID NO: 1645199
cuuacagcaaucauaugag

SEQ ID NO: 1645201 - RNA, 19 nt, Artificial Sequence
  Description of Artificial Sequence: Synthetic oligonucleotide
  Sense strand starting at position 2470 of SEQ ID NO: 1561078
auaugauugcuguaagauu

SEQ ID NO: 1645202 - RNA, 19 nt, Artificial Sequence
  Description of Artificial Sequence: Synthetic oligonucleotide
  Antisense strand to SEQ ID NO: 1645201
aaucuuacagcaaucauau

SEQ ID NO: 1645203 - RNA, 19 nt, Artificial Sequence
  Description of Artificial Sequence: Synthetic oligonucleotide
  Sense strand starting at position 2813 of SEQ ID NO: 1561078
cccaaauucucuguuagug

SEQ ID NO: 1645204 - RNA, 19 nt, Artificial Sequence
  Description of Artificial Sequence: Synthetic oligonucleotide
  Antisense strand to SEQ ID NO: 1645203
cacuaacagagaauuuggg

SEQ ID NO: 1645205 - RNA, 19 nt, Artificial Sequence
  Description of Artificial Sequence: Synthetic oligonucleotide
  Sense strand starting at position 2837 of SEQ ID NO: 1561078
uugggagguuaacaaugaa

SEQ ID NO: 1645206 - RNA, 19 nt, Artificial Sequence
  Description of Artificial Sequence: Synthetic oligonucleotide
  Antisense strand to SEQ ID NO: 1645205
uucauuguuaaccucccaa

SEQ ID NO: 1645207 - RNA, 19 nt, Artificial Sequence
  Description of Artificial Sequence: Synthetic oligonucleotide
  Sense strand starting at position 2870 of SEQ ID NO: 1561078
uccaccugacaguguugaa

SEQ ID NO: 1645208 - RNA, 19 nt, Artificial Sequence
  Description of Artificial Sequence: Synthetic oligonucleotide
  Antisense strand to SEQ ID NO: 1645207
uucaacacugucaggugga

SEQ ID NO: 1645209 - RNA, 19 nt, Artificial Sequence
  Description of Artificial Sequence: Synthetic oligonucleotide
  Sense strand starting at position 2873 of SEQ ID NO: 1561078
accugacaguguugaaauc

SEQ ID NO: 1645210 - RNA, 19 nt, Artificial Sequence
  Description of Artificial Sequence: Synthetic oligonucleotide
  Antisense strand to SEQ ID NO: 1645209
gauuucaacacugucaggu

SEQ ID NO: 1645211 - RNA, 19 nt, Artificial Sequence
  Description of Artificial Sequence: Synthetic oligonucleotide
  Sense strand starting at position 2910 of SEQ ID NO: 1561078
cuagccuguucugugacau

SEQ ID NO: 1645212 - RNA, 19 nt, Artificial Sequence
  Description of Artificial Sequence: Synthetic oligonucleotide
  Antisense strand to SEQ ID NO: 1645211
augucacagaacaggcuag

SEQ ID NO: 1645213 - RNA, 19 nt, Artificial Sequence
  Description of Artificial Sequence: Synthetic oligonucleotide
  Sense strand starting at position 2911 of SEQ ID NO: 1561078
uagccuguucugugacauu

SEQ ID NO: 1645214 - RNA, 19 nt, Artificial Sequence
  Description of Artificial Sequence: Synthetic oligonucleotide
  Antisense strand to SEQ ID NO: 1645213
aaugucacagaacaggcua

SEQ ID NO: 1645215 - RNA, 19 nt, Artificial Sequence
  Description of Artificial Sequence: Synthetic oligonucleotide
  Sense strand starting at position 2950 of SEQ ID NO: 1561078
aaagauuguagugguaaug

SEQ ID NO: 1645216 - RNA, 19 nt, Artificial Sequence
  Description of Artificial Sequence: Synthetic oligonucleotide
  Antisense strand to SEQ ID NO: 1645215
cauuaccacuacaaucuuu

SEQ ID NO: 1645217 - RNA, 19 nt, Artificial Sequence
  Description of Artificial Sequence: Synthetic oligonucleotide
  Sense strand starting at position 3038 of SEQ ID NO: 1561078
auauguguaaaugggaaua

SEQ ID NO: 1645218 - RNA, 19 nt, Artificial Sequence
  Description of Artificial Sequence: Synthetic oligonucleotide
  Antisense strand to SEQ ID NO: 1645217
uauucccauuuacacauau

SEQ ID NO: 1645219 - RNA, 19 nt, Artificial Sequence
  Description of Artificial Sequence: Synthetic oligonucleotide
  Sense strand starting at position 3049 of SEQ ID NO: 1561078
ugggaauaauaauaaguca

SEQ ID NO: 1645220 - RNA, 19 nt, Artificial Sequence
  Description of Artificial Sequence: Synthetic oligonucleotide
  Antisense strand to SEQ ID NO: 1645219
ugacuuauuauuauuccca

SEQ ID NO: 1645221 - RNA, 19 nt, Artificial Sequence
  Description of Artificial Sequence: Synthetic oligonucleotide
  Sense strand starting at position 3064 of SEQ ID NO: 1561078
gucauaccgccuugagugu

SEQ ID NO: 1645222 - RNA, 19 nt, Artificial Sequence
  Description of Artificial Sequence: Synthetic oligonucleotide
  Antisense strand to SEQ ID NO: 1645221
acacucaaggcgguaugac

SEQ ID NO: 1645223 - RNA, 19 nt, Artificial Sequence
  Description of Artificial Sequence: Synthetic oligonucleotide
  Sense strand starting at position 3081 of SEQ ID NO: 1561078
guugcaaggguucaaauga

SEQ ID NO: 1645224 - RNA, 19 nt, Artificial Sequence
  Description of Artificial Sequence: Synthetic oligonucleotide
  Antisense strand to SEQ ID NO: 1645223
ucauuugaacccuugcaac

SEQ ID NO: 1645225 - RNA, 19 nt, Artificial Sequence
  Description of Artificial Sequence: Synthetic oligonucleotide
  Sense strand starting at position 3149 of SEQ ID NO: 1561078
ggaguugaugcgggcagau

SEQ ID NO: 1645226 - RNA, 19 nt, Artificial Sequence
  Description of Artificial Sequence: Synthetic oligonucleotide
  Antisense strand to SEQ ID NO: 1645225
aucugcccgcaucaacucc

SEQ ID NO: 1645227 - RNA, 19 nt, Artificial Sequence
  Description of Artificial Sequence: Synthetic oligonucleotide
  Sense strand starting at position 3492 of SEQ ID NO: 1561078
cugcgauugcuguuauugu

SEQ ID NO: 1645228 - RNA, 19 nt, Artificial Sequence
  Description of Artificial Sequence: Synthetic oligonucleotide
  Antisense strand to SEQ ID NO: 1645227
acaauaacagcaaucgcag

SEQ ID NO: 1645229 - RNA, 19 nt, Artificial Sequence
  Description of Artificial Sequence: Synthetic oligonucleotide
  Sense strand starting at position 3623 of SEQ ID NO: 1561078
cuaugaucgugcccacauu

SEQ ID NO: 1645230 - RNA, 19 nt, Artificial Sequence
  Description of Artificial Sequence: Synthetic oligonucleotide
  Antisense strand to SEQ ID NO: 1645229
aaugugggcacgaucauag

SEQ ID NO: 1645231 - RNA, 19 nt, Artificial Sequence
  Description of Artificial Sequence: Synthetic oligonucleotide
  Sense strand starting at position 92 of SEQ ID NO: 1561079
ugccaacugugguugauaa

SEQ ID NO: 1645232 - RNA, 19 nt, Artificial Sequence
  Description of Artificial Sequence: Synthetic oligonucleotide
  Antisense strand to SEQ ID NO: 1645231
uuaucaaccacaguuggca

SEQ ID NO: 1645233 - RNA, 19 nt, Artificial Sequence
  Description of Artificial Sequence: Synthetic oligonucleotide
  Sense strand starting at position 93 of SEQ ID NO: 1561079
gccaacugugguugauaaa

SEQ ID NO: 1645234 - RNA, 19 nt, Artificial Sequence
  Description of Artificial Sequence: Synthetic oligonucleotide
  Antisense strand to SEQ ID NO: 1645233
uuuaucaaccacaguuggc

SEQ ID NO: 1645235 - RNA, 19 nt, Artificial Sequence
  Description of Artificial Sequence: Synthetic oligonucleotide
  Sense strand starting at position 152 of SEQ ID NO: 1561079
aaugcuacagugugagaau

SEQ ID NO: 1645236 - RNA, 19 nt, Artificial Sequence
  Description of Artificial Sequence: Synthetic oligonucleotide
  Antisense strand to SEQ ID NO: 1645235
auucucacacuguagcauu

SEQ ID NO: 1645237 - RNA, 19 nt, Artificial Sequence
  Description of Artificial Sequence: Synthetic oligonucleotide
  Sense strand starting at position 161 of SEQ ID NO: 1561079
gugugagaaugucuuacua

SEQ ID NO: 1645238 - RNA, 19 nt, Artificial Sequence
  Description of Artificial Sequence: Synthetic oligonucleotide
  Antisense strand to SEQ ID NO: 1645237
uaguaagacauucucacac

SEQ ID NO: 1645239 - RNA, 19 nt, Artificial Sequence
  Description of Artificial Sequence: Synthetic oligonucleotide
  Sense strand starting at position 163 of SEQ ID NO: 1561079
gugagaaugucuuacuauc

SEQ ID NO: 1645240 - RNA, 19 nt, Artificial Sequence
  Description of Artificial Sequence: Synthetic oligonucleotide
  Antisense strand to SEQ ID NO: 1645239
gauaguaagacauucucac

SEQ ID NO: 1645241 - RNA, 19 nt, Artificial Sequence
  Description of Artificial Sequence: Synthetic oligonucleotide
  Sense strand starting at position 194 of SEQ ID NO: 1561079
uccugucugcaucacuuau

SEQ ID NO: 1645242 - RNA, 19 nt, Artificial Sequence
  Description of Artificial Sequence: Synthetic oligonucleotide
  Antisense strand to SEQ ID NO: 1645241
auaagugaugcagacagga

SEQ ID NO: 1645243 - RNA, 19 nt, Artificial Sequence
  Description of Artificial Sequence: Synthetic oligonucleotide
  Sense strand starting at position 262 of SEQ ID NO: 1561079
aauguuugacuugaaaugu

SEQ ID NO: 1645244 - RNA, 19 nt, Artificial Sequence
  Description of Artificial Sequence: Synthetic oligonucleotide
  Antisense strand to SEQ ID NO: 1645243
acauuucaagucaaacauu

SEQ ID NO: 1645245 - RNA, 19 nt, Artificial Sequence
  Description of Artificial Sequence: Synthetic oligonucleotide
  Sense strand starting at position 271 of SEQ ID NO: 1561079
cuugaaaugugaucuuaga

SEQ ID NO: 1645246 - RNA, 19 nt, Artificial Sequence
  Description of Artificial Sequence: Synthetic oligonucleotide
  Antisense strand to SEQ ID NO: 1645245
ucuaagaucacauuucaag

SEQ ID NO: 1645247 - RNA, 19 nt, Artificial Sequence
  Description of Artificial Sequence: Synthetic oligonucleotide
  Sense strand starting at position 389 of SEQ ID NO: 1561079
uggguuuccugcucagaaa

SEQ ID NO: 1645248 - RNA, 19 nt, Artificial Sequence
  Description of Artificial Sequence: Synthetic oligonucleotide
  Antisense strand to SEQ ID NO: 1645247
uuucugagcaggaaaccca

SEQ ID NO: 1645249 - RNA, 19 nt, Artificial Sequence
  Description of Artificial Sequence: Synthetic oligonucleotide
  Sense strand starting at position 414 of SEQ ID NO: 1561079
cuucuaguguucccaguuu

SEQ ID NO: 1645250 - RNA, 19 nt, Artificial Sequence
  Description of Artificial Sequence: Synthetic oligonucleotide
  Antisense strand to SEQ ID NO: 1645249
aaacugggaacacuagaag

SEQ ID NO: 1645251 - RNA, 19 nt, Artificial Sequence
  Description of Artificial Sequence: Synthetic oligonucleotide
  Sense strand starting at position 483 of SEQ ID NO: 1561079
ucuagacacuuagaucuga

SEQ ID NO: 1645252 - RNA, 19 nt, Artificial Sequence
  Description of Artificial Sequence: Synthetic oligonucleotide
  Antisense strand to SEQ ID NO: 1645251
ucagaucuaagugucuaga

SEQ ID NO: 1645253 - RNA, 19 nt, Artificial Sequence
  Description of Artificial Sequence: Synthetic oligonucleotide
  Sense strand starting at position 488 of SEQ ID NO: 1561079
acacuuagaucugaugaga

SEQ ID NO: 1645254 - RNA, 19 nt, Artificial Sequence
  Description of Artificial Sequence: Synthetic oligonucleotide
  Antisense strand to SEQ ID NO: 1645253
ucucaucagaucuaagugu

SEQ ID NO: 1645255 - RNA, 19 nt, Artificial Sequence
  Description of Artificial Sequence: Synthetic oligonucleotide
  Sense strand starting at position 603 of SEQ ID NO: 1561079
cuaugcuagccagaggagu

SEQ ID NO: 1645256 - RNA, 19 nt, Artificial Sequence
  Description of Artificial Sequence: Synthetic oligonucleotide
  Antisense strand to SEQ ID NO: 1645255
acuccucuggcuagcauag

SEQ ID NO: 1645257 - RNA, 19 nt, Artificial Sequence
  Description of Artificial Sequence: Synthetic oligonucleotide
  Sense strand starting at position 911 of SEQ ID NO: 1561079
ggcacacaguuguacaauu

SEQ ID NO: 1645258 - RNA, 19 nt, Artificial Sequence
  Description of Artificial Sequence: Synthetic oligonucleotide
  Antisense strand to SEQ ID NO: 1645257
aauuguacaacugugugcc

SEQ ID NO: 1645259 - RNA, 19 nt, Artificial Sequence
  Description of Artificial Sequence: Synthetic oligonucleotide
  Sense strand starting at position 1121 of SEQ ID NO: 1561079
ugaauuaaaucuuacagag

SEQ ID NO: 1645260 - RNA, 19 nt, Artificial Sequence
  Description of Artificial Sequence: Synthetic oligonucleotide
  Antisense strand to SEQ ID NO: 1645259
cucuguaagauuuaauuca

SEQ ID NO: 1645261 - RNA, 19 nt, Artificial Sequence
  Description of Artificial Sequence: Synthetic oligonucleotide
  Sense strand starting at position 1139 of SEQ ID NO: 1561079
ggcagugacagccauacaa

SEQ ID NO: 1645262 - RNA, 19 nt, Artificial Sequence
  Description of Artificial Sequence: Synthetic oligonucleotide
  Antisense strand to SEQ ID NO: 1645261
uuguauggcugucacugcc

SEQ ID NO: 1645263 - RNA, 19 nt, Artificial Sequence
  Description of Artificial Sequence: Synthetic oligonucleotide
  Sense strand starting at position 1403 of SEQ ID NO: 1561079
aucugaaauuggugaaaua

SEQ ID NO: 1645264 - RNA, 19 nt, Artificial Sequence
  Description of Artificial Sequence: Synthetic oligonucleotide
  Antisense strand to SEQ ID NO: 1645263
uauuucaccaauuucagau

SEQ ID NO: 1645265 - RNA, 19 nt, Artificial Sequence
  Description of Artificial Sequence: Synthetic oligonucleotide
  Sense strand starting at position 1440 of SEQ ID NO: 1561079
gcaaccgagcccuauaaau

SEQ ID NO: 1645266 - RNA, 19 nt, Artificial Sequence
  Description of Artificial Sequence: Synthetic oligonucleotide
  Antisense strand to SEQ ID NO: 1645265
auuuauagggcucgguugc

SEQ ID NO: 1645267 - RNA, 19 nt, Artificial Sequence
  Description of Artificial Sequence: Synthetic oligonucleotide
  Sense strand starting at position 2455 of SEQ ID NO: 1561079
ccuggcuuccuccgcuaaa

SEQ ID NO: 1645268 - RNA, 19 nt, Artificial Sequence
  Description of Artificial Sequence: Synthetic oligonucleotide
  Antisense strand to SEQ ID NO: 1645267
uuuagcggaggaagccagg

SEQ ID NO: 1645269 - RNA, 19 nt, Artificial Sequence
  Description of Artificial Sequence: Synthetic oligonucleotide
  Sense strand starting at position 2458 of SEQ ID NO: 1561079
ggcuuccuccgcuaaacaa

SEQ ID NO: 1645270 - RNA, 19 nt, Artificial Sequence
  Description of Artificial Sequence: Synthetic oligonucleotide
  Antisense strand to SEQ ID NO: 1645269
uuguuuagcggaggaagcc

SEQ ID NO: 1645271 - RNA, 19 nt, Artificial Sequence
  Description of Artificial Sequence: Synthetic oligonucleotide
  Sense strand starting at position 2537 of SEQ ID NO: 1561079
cuggaaaugcuccgugcca

SEQ ID NO: 1645272 - RNA, 19 nt, Artificial Sequence
  Description of Artificial Sequence: Synthetic oligonucleotide
  Antisense strand to SEQ ID NO: 1645271
uggcacggagcauuuccag

SEQ ID NO: 1645273 - RNA, 19 nt, Artificial Sequence
  Description of Artificial Sequence: Synthetic oligonucleotide
  Sense strand starting at position 2582 of SEQ ID NO: 1561079
uggauaaugucguuccuau

SEQ ID NO: 1645274 - RNA, 19 nt, Artificial Sequence
  Description of Artificial Sequence: Synthetic oligonucleotide
  Antisense strand to SEQ ID NO: 1645273
auaggaacgacauuaucca

SEQ ID NO: 1645275 - RNA, 19 nt, Artificial Sequence
  Description of Artificial Sequence: Synthetic oligonucleotide
  Sense strand starting at position 2614 of SEQ ID NO: 1561079
auucuuugcugucuuuaga

SEQ ID NO: 1645276 - RNA, 19 nt, Artificial Sequence
  Description of Artificial Sequence: Synthetic oligonucleotide
  Antisense strand to SEQ ID NO: 1645275
ucuaaagacagcaaagaau

SEQ ID NO: 1645277 - RNA, 19 nt, Artificial Sequence
  Description of Artificial Sequence: Synthetic oligonucleotide
  Sense strand starting at position 2617 of SEQ ID NO: 1561079
cuuugcugucuuuagagca

SEQ ID NO: 1645278 - RNA, 19 nt, Artificial Sequence
  Description of Artificial Sequence: Synthetic oligonucleotide
  Antisense strand to SEQ ID NO: 1645277
ugcucuaaagacagcaaag

SEQ ID NO: 1645279 - RNA, 19 nt, Artificial Sequence
  Description of Artificial Sequence: Synthetic oligonucleotide
  Sense strand starting at position 2697 of SEQ ID NO: 1561079
ucuucugccucuccugaga

SEQ ID NO: 1645280 - RNA, 19 nt, Artificial Sequence
  Description of Artificial Sequence: Synthetic oligonucleotide
  Antisense strand to SEQ ID NO: 1645279
ucucaggagaggcagaaga

SEQ ID NO: 1645281 - RNA, 19 nt, Artificial Sequence
  Description of Artificial Sequence: Synthetic oligonucleotide
  Sense strand starting at position 2725 of SEQ ID NO: 1561079
auuuaaagaucugagcauc

SEQ ID NO: 1645282 - RNA, 19 nt, Artificial Sequence
  Description of Artificial Sequence: Synthetic oligonucleotide
  Antisense strand to SEQ ID NO: 1645281
gaugcucagaucuuuaaau

SEQ ID NO: 1645283 - RNA, 19 nt, Artificial Sequence
  Description of Artificial Sequence: Synthetic oligonucleotide
  Sense strand starting at position 2737 of SEQ ID NO: 1561079
gagcaucaggucugucgua

SEQ ID NO: 1645284 - RNA, 19 nt, Artificial Sequence
  Description of Artificial Sequence: Synthetic oligonucleotide
  Antisense strand to SEQ ID NO: 1645283
uacgacagaccugaugcuc

SEQ ID NO: 1645285 - RNA, 19 nt, Artificial Sequence
  Description of Artificial Sequence: Synthetic oligonucleotide
  Sense strand starting at position 2744 of SEQ ID NO: 1561079
aggucugucguaugaauaa

SEQ ID NO: 1645286 - RNA, 19 nt, Artificial Sequence
  Description of Artificial Sequence: Synthetic oligonucleotide
  Antisense strand to SEQ ID NO: 1645285
uuauucauacgacagaccu

SEQ ID NO: 1645287 - RNA, 19 nt, Artificial Sequence
  Description of Artificial Sequence: Synthetic oligonucleotide
  Sense strand starting at position 3206 of SEQ ID NO: 1561079
cuagauaggugauucucaa

SEQ ID NO: 1645288 - RNA, 19 nt, Artificial Sequence
  Description of Artificial Sequence: Synthetic oligonucleotide
  Antisense strand to SEQ ID NO: 1645287
uugagaaucaccuaucuag

SEQ ID NO: 1645289 - RNA, 19 nt, Artificial Sequence
  Description of Artificial Sequence: Synthetic oligonucleotide
  Sense strand starting at position 3210 of SEQ ID NO: 1561079
auaggugauucucaaacuu

SEQ ID NO: 1645290 - RNA, 19 nt, Artificial Sequence
  Description of Artificial Sequence: Synthetic oligonucleotide
  Antisense strand to SEQ ID NO: 1645289
aaguuugagaaucaccuau

SEQ ID NO: 1645291 - RNA, 19 nt, Artificial Sequence
  Description of Artificial Sequence: Synthetic oligonucleotide
  Sense strand starting at position 3281 of SEQ ID NO: 1561079
gacauaguggcccaugcau

SEQ ID NO: 1645292 - RNA, 19 nt, Artificial Sequence
  Description of Artificial Sequence: Synthetic oligonucleotide
  Antisense strand to SEQ ID NO: 1645291
augcaugggccacuauguc

SEQ ID NO: 1645293 - RNA, 19 nt, Artificial Sequence
  Description of Artificial Sequence: Synthetic oligonucleotide
  Sense strand starting at position 3470 of SEQ ID NO: 1561079
gucacuugagcuuaggaau

SEQ ID NO: 1645294 - RNA, 19 nt, Artificial Sequence
  Description of Artificial Sequence: Synthetic oligonucleotide
  Antisense strand to SEQ ID NO: 1645293
auuccuaagcucaagugac

SEQ ID NO: 1645295 - RNA, 19 nt, Artificial Sequence
  Description of Artificial Sequence: Synthetic oligonucleotide
  Sense strand starting at position 3481 of SEQ ID NO: 1561079
uuaggaauuugagguuaca

SEQ ID NO: 1645296 - RNA, 19 nt, Artificial Sequence
  Description of Artificial Sequence: Synthetic oligonucleotide
  Antisense strand to SEQ ID NO: 1645295
uguaaccucaaauuccuaa

SEQ ID NO: 1645297 - RNA, 19 nt, Artificial Sequence
  Description of Artificial Sequence: Synthetic oligonucleotide
  Sense strand starting at position 3687 of SEQ ID NO: 1561079
ggcugaaucucuguccuag

SEQ ID NO: 1645298 - RNA, 19 nt, Artificial Sequence
  Description of Artificial Sequence: Synthetic oligonucleotide
  Antisense strand to SEQ ID NO: 1645297
cuaggacagagauucagcc

SEQ ID NO: 1645299 - RNA, 19 nt, Artificial Sequence
  Description of Artificial Sequence: Synthetic oligonucleotide
  Sense strand starting at position 3689 of SEQ ID NO: 1561079
cugaaucucuguccuagau

SEQ ID NO: 1645300 - RNA, 19 nt, Artificial Sequence
  Description of Artificial Sequence: Synthetic oligonucleotide
  Antisense strand to SEQ ID NO: 1645299
aucuaggacagagauucag

SEQ ID NO: 1645301 - RNA, 19 nt, Artificial Sequence
  Description of Artificial Sequence: Synthetic oligonucleotide
  Sense strand starting at position 3691 of SEQ ID NO: 1561079
gaaucucuguccuagaugu

SEQ ID NO: 1645302 - RNA, 19 nt, Artificial Sequence
  Description of Artificial Sequence: Synthetic oligonucleotide
  Antisense strand to SEQ ID NO: 1645301
acaucuaggacagagauuc

SEQ ID NO: 1645303 - RNA, 19 nt, Artificial Sequence
  Description of Artificial Sequence: Synthetic oligonucleotide
  Sense strand starting at position 3693 of SEQ ID NO: 1561079
aucucuguccuagauguca

SEQ ID NO: 1645304 - RNA, 19 nt, Artificial Sequence
  Description of Artificial Sequence: Synthetic oligonucleotide
  Antisense strand to SEQ ID NO: 1645303
ugacaucuaggacagagau

SEQ ID NO: 1645305 - RNA, 19 nt, Artificial Sequence
  Description of Artificial Sequence: Synthetic oligonucleotide
  Sense strand starting at position 3770 of SEQ ID NO: 1561079
gucacucacugugcuuaga

SEQ ID NO: 1645306 - RNA, 19 nt, Artificial Sequence
  Description of Artificial Sequence: Synthetic oligonucleotide
  Antisense strand to SEQ ID NO: 1645305
ucuaagcacagugagugac

SEQ ID NO: 1645307 - RNA, 19 nt, Artificial Sequence
  Description of Artificial Sequence: Synthetic oligonucleotide
  Sense strand starting at position 3957 of SEQ ID NO: 1561079
agcaguuguucccuggcaa

SEQ ID NO: 1645308 - RNA, 19 nt, Artificial Sequence
  Description of Artificial Sequence: Synthetic oligonucleotide
  Antisense strand to SEQ ID NO: 1645307
uugccagggaacaacugcu

SEQ ID NO: 1645309 - RNA, 19 nt, Artificial Sequence
  Description of Artificial Sequence: Synthetic oligonucleotide
  Sense strand starting at position 3958 of SEQ ID NO: 1561079
gcaguuguucccuggcaau

SEQ ID NO: 1645310 - RNA, 19 nt, Artificial Sequence
  Description of Artificial Sequence: Synthetic oligonucleotide
  Antisense strand to SEQ ID NO: 1645309
auugccagggaacaacugc

SEQ ID NO: 1645311 - RNA, 19 nt, Artificial Sequence
  Description of Artificial Sequence: Synthetic oligonucleotide
  Sense strand starting at position 531 of SEQ ID NO: 1561080
cucucacuucuuugugaua

SEQ ID NO: 1645312 - RNA, 19 nt, Artificial Sequence
  Description of Artificial Sequence: Synthetic oligonucleotide
  Antisense strand to SEQ ID NO: 1645311
uaucacaaagaagugagag

SEQ ID NO: 1645313 - RNA, 19 nt, Artificial Sequence
  Description of Artificial Sequence: Synthetic oligonucleotide
  Sense strand starting at position 861 of SEQ ID NO: 1561080
gcagcauccucaucagaag

SEQ ID NO: 1645314 - RNA, 19 nt, Artificial Sequence
  Description of Artificial Sequence: Synthetic oligonucleotide
  Antisense strand to SEQ ID NO: 1645313
cuucugaugaggaugcugc

SEQ ID NO: 1645315 - RNA, 19 nt, Artificial Sequence
  Description of Artificial Sequence: Synthetic oligonucleotide
  Sense strand starting at position 872 of SEQ ID NO: 1561080
aucagaagcucuccaggaa

SEQ ID NO: 1645316 - RNA, 19 nt, Artificial Sequence
  Description of Artificial Sequence: Synthetic oligonucleotide
  Antisense strand to SEQ ID NO: 1645315
uuccuggagagcuucugau

SEQ ID NO: 1645317 - RNA, 19 nt, Artificial Sequence
  Description of Artificial Sequence: Synthetic oligonucleotide
  Sense strand starting at position 1061 of SEQ ID NO: 1561080
agaaauauccuaugagugu

SEQ ID NO: 1645318 - RNA, 19 nt, Artificial Sequence
  Description of Artificial Sequence: Synthetic oligonucleotide
  Antisense strand to SEQ ID NO: 1645317
acacucauaggauauuucu

SEQ ID NO: 1645319 - RNA, 19 nt, Artificial Sequence
  Description of Artificial Sequence: Synthetic oligonucleotide
  Sense strand starting at position 1106 of SEQ ID NO: 1561080
gcagacauuguagaaaugu

SEQ ID NO: 1645320 - RNA, 19 nt, Artificial Sequence
  Description of Artificial Sequence: Synthetic oligonucleotide
  Antisense strand to SEQ ID NO: 1645319
acauuucuacaaugucugc

SEQ ID NO: 1645321 - RNA, 19 nt, Artificial Sequence
  Description of Artificial Sequence: Synthetic oligonucleotide
  Sense strand starting at position 1127 of SEQ ID NO: 1561080
gcauguauggguuaccaua

SEQ ID NO: 1645322 - RNA, 19 nt, Artificial Sequence
  Description of Artificial Sequence: Synthetic oligonucleotide
  Antisense strand to SEQ ID NO: 1645321
uaugguaacccauacaugc

SEQ ID NO: 1645323 - RNA, 19 nt, Artificial Sequence
  Description of Artificial Sequence: Synthetic oligonucleotide
  Sense strand starting at position 1129 of SEQ ID NO: 1561080
auguauggguuaccauauu

SEQ ID NO: 1645324 - RNA, 19 nt, Artificial Sequence
  Description of Artificial Sequence: Synthetic oligonucleotide
  Antisense strand to SEQ ID NO: 1645323
aauaugguaacccauacau

SEQ ID NO: 1645325 - RNA, 19 nt, Artificial Sequence
  Description of Artificial Sequence: Synthetic oligonucleotide
  Sense strand starting at position 1155 of SEQ ID NO: 1561080
uguaaauguguguccgugu

SEQ ID NO: 1645326 - RNA, 19 nt, Artificial Sequence
  Description of Artificial Sequence: Synthetic oligonucleotide
  Antisense strand to SEQ ID NO: 1645325
acacggacacacauuuaca

SEQ ID NO: 1645327 - RNA, 19 nt, Artificial Sequence
  Description of Artificial Sequence: Synthetic oligonucleotide
  Sense strand starting at position 1200 of SEQ ID NO: 1561080
guguguauauauccaggau

SEQ ID NO: 1645328 - RNA, 19 nt, Artificial Sequence
  Description of Artificial Sequence: Synthetic oligonucleotide
  Antisense strand to SEQ ID NO: 1645327
auccuggauauauacacac

SEQ ID NO: 1645329 - RNA, 19 nt, Artificial Sequence
  Description of Artificial Sequence: Synthetic oligonucleotide
  Sense strand starting at position 1203 of SEQ ID NO: 1561080
uguauauauccaggauaug

SEQ ID NO: 1645330 - RNA, 19 nt, Artificial Sequence
  Description of Artificial Sequence: Synthetic oligonucleotide
  Antisense strand to SEQ ID NO: 1645329
cauauccuggauauauaca

SEQ ID NO: 1645331 - RNA, 19 nt, Artificial Sequence
  Description of Artificial Sequence: Synthetic oligonucleotide
  Sense strand starting at position 1204 of SEQ ID NO: 1561080
guauauauccaggauaugu

SEQ ID NO: 1645332 - RNA, 19 nt, Artificial Sequence
  Description of Artificial Sequence: Synthetic oligonucleotide
  Antisense strand to SEQ ID NO: 1645331
acauauccuggauauauac

SEQ ID NO: 1645333 - RNA, 19 nt, Artificial Sequence
  Description of Artificial Sequence: Synthetic oligonucleotide
  Sense strand starting at position 1304 of SEQ ID NO: 1561080
uggacaucuauagguguga

SEQ ID NO: 1645334 - RNA, 19 nt, Artificial Sequence
  Description of Artificial Sequence: Synthetic oligonucleotide
  Antisense strand to SEQ ID NO: 1645333
ucacaccuauagaugucca

SEQ ID NO: 1645335 - RNA, 19 nt, Artificial Sequence
  Description of Artificial Sequence: Synthetic oligonucleotide
  Sense strand starting at position 1305 of SEQ ID NO: 1561080
ggacaucuauaggugugau

SEQ ID NO: 1645336 - RNA, 19 nt, Artificial Sequence
  Description of Artificial Sequence: Synthetic oligonucleotide
  Antisense strand to SEQ ID NO: 1645335
aucacaccuauagaugucc

SEQ ID NO: 1645337 - RNA, 19 nt, Artificial Sequence
  Description of Artificial Sequence: Synthetic oligonucleotide
  Sense strand starting at position 1313 of SEQ ID NO: 1561080
auaggugugauuugugugu

SEQ ID NO: 1645338 - RNA, 19 nt, Artificial Sequence
  Description of Artificial Sequence: Synthetic oligonucleotide
  Antisense strand to SEQ ID NO: 1645337
acacacaaaucacaccuau

SEQ ID NO: 1645339 - RNA, 19 nt, Artificial Sequence
  Description of Artificial Sequence: Synthetic oligonucleotide
  Sense strand starting at position 1317 of SEQ ID NO: 1561080
gugugauuuguguguaucu

SEQ ID NO: 1645340 - RNA, 19 nt, Artificial Sequence
  Description of Artificial Sequence: Synthetic oligonucleotide
  Antisense strand to SEQ ID NO: 1645339
agauacacacaaaucacac

SEQ ID NO: 1645341 - RNA, 19 nt, Artificial Sequence
  Description of Artificial Sequence: Synthetic oligonucleotide
  Sense strand starting at position 1318 of SEQ ID NO: 1561080
ugugauuuguguguaucuu

SEQ ID NO: 1645342 - RNA, 19 nt, Artificial Sequence
  Description of Artificial Sequence: Synthetic oligonucleotide
  Antisense strand to SEQ ID NO: 1645341
aagauacacacaaaucaca

SEQ ID NO: 1645343 - RNA, 19 nt, Artificial Sequence
  Description of Artificial Sequence: Synthetic oligonucleotide
  Sense strand starting at position 1319 of SEQ ID NO: 1561080
gugauuuguguguaucuua

SEQ ID NO: 1645344 - RNA, 19 nt, Artificial Sequence
  Description of Artificial Sequence: Synthetic oligonucleotide
  Antisense strand to SEQ ID NO: 1645343
uaagauacacacaaaucac

SEQ ID NO: 1645345 - RNA, 19 nt, Artificial Sequence
  Description of Artificial Sequence: Synthetic oligonucleotide
  Sense strand starting at position 1322 of SEQ ID NO: 1561080
auuuguguguaucuuacua

SEQ ID NO: 1645346 - RNA, 19 nt, Artificial Sequence
  Description of Artificial Sequence: Synthetic oligonucleotide
  Antisense strand to SEQ ID NO: 1645345
uaguaagauacacacaaau

SEQ ID NO: 1645347 - RNA, 19 nt, Artificial Sequence
  Description of Artificial Sequence: Synthetic oligonucleotide
  Sense strand starting at position 1363 of SEQ ID NO: 1561080
uguucuuaagcucauaagu

SEQ ID NO: 1645348 - RNA, 19 nt, Artificial Sequence
  Description of Artificial Sequence: Synthetic oligonucleotide
  Antisense strand to SEQ ID NO: 1645347
acuuaugagcuuaagaaca

SEQ ID NO: 1645349 - RNA, 19 nt, Artificial Sequence
  Description of Artificial Sequence: Synthetic oligonucleotide
  Sense strand starting at position 1376 of SEQ ID NO: 1561080
auaagugugugcacgugua

SEQ ID NO: 1645350 - RNA, 19 nt, Artificial Sequence
  Description of Artificial Sequence: Synthetic oligonucleotide
  Antisense strand to SEQ ID NO: 1645349
uacacgugcacacacuuau

SEQ ID NO: 1645351 - RNA, 19 nt, Artificial Sequence
  Description of Artificial Sequence: Synthetic oligonucleotide
  Sense strand starting at position 1388 of SEQ ID NO: 1561080
acguguacucaagagaaug

SEQ ID NO: 1645352 - RNA, 19 nt, Artificial Sequence
  Description of Artificial Sequence: Synthetic oligonucleotide
  Antisense strand to SEQ ID NO: 1645351
cauucucuugaguacacgu

SEQ ID NO: 1645353 - RNA, 19 nt, Artificial Sequence
  Description of Artificial Sequence: Synthetic oligonucleotide
  Sense strand starting at position 1407 of SEQ ID NO: 1561080
cauguagagaugugaaugu

SEQ ID NO: 1645354 - RNA, 19 nt, Artificial Sequence
  Description of Artificial Sequence: Synthetic oligonucleotide
  Antisense strand to SEQ ID NO: 1645353
acauucacaucucuacaug

SEQ ID NO: 1645355 - RNA, 19 nt, Artificial Sequence
  Description of Artificial Sequence: Synthetic oligonucleotide
  Sense strand starting at position 1411 of SEQ ID NO: 1561080
uagagaugugaauguguuu

SEQ ID NO: 1645356 - RNA, 19 nt, Artificial Sequence
  Description of Artificial Sequence: Synthetic oligonucleotide
  Antisense strand to SEQ ID NO: 1645355
aaacacauucacaucucua

SEQ ID NO: 1645357 - RNA, 19 nt, Artificial Sequence
  Description of Artificial Sequence: Synthetic oligonucleotide
  Sense strand starting at position 1414 of SEQ ID NO: 1561080
agaugugaauguguuuaua

SEQ ID NO: 1645358 - RNA, 19 nt, Artificial Sequence
  Description of Artificial Sequence: Synthetic oligonucleotide
  Antisense strand to SEQ ID NO: 1645357
uauaaacacauucacaucu

SEQ ID NO: 1645359 - RNA, 19 nt, Artificial Sequence
  Description of Artificial Sequence: Synthetic oligonucleotide
  Sense strand starting at position 1416 of SEQ ID NO: 1561080
augugaauguguuuauaag

SEQ ID NO: 1645360 - RNA, 19 nt, Artificial Sequence
  Description of Artificial Sequence: Synthetic oligonucleotide
  Antisense strand to SEQ ID NO: 1645359
cuuauaaacacauucacau

SEQ ID NO: 1645361 - RNA, 19 nt, Artificial Sequence
  Description of Artificial Sequence: Synthetic oligonucleotide
  Sense strand starting at position 1417 of SEQ ID NO: 1561080
ugugaauguguuuauaagu

SEQ ID NO: 1645362 - RNA, 19 nt, Artificial Sequence
  Description of Artificial Sequence: Synthetic oligonucleotide
  Antisense strand to SEQ ID NO: 1645361
acuuauaaacacauucaca

SEQ ID NO: 1645363 - RNA, 19 nt, Artificial Sequence
  Description of Artificial Sequence: Synthetic oligonucleotide
  Sense strand starting at position 1422 of SEQ ID NO: 1561080
auguguuuauaaguuccaa

SEQ ID NO: 1645364 - RNA, 19 nt, Artificial Sequence
  Description of Artificial Sequence: Synthetic oligonucleotide
  Antisense strand to SEQ ID NO: 1645363
uuggaacuuauaaacacau

SEQ ID NO: 1645365 - RNA, 19 nt, Artificial Sequence
  Description of Artificial Sequence: Synthetic oligonucleotide
  Sense strand starting at position 1561 of SEQ ID NO: 1561080
cauggauaugcauguaaca

SEQ ID NO: 1645366 - RNA, 19 nt, Artificial Sequence
  Description of Artificial Sequence: Synthetic oligonucleotide
  Antisense strand to SEQ ID NO: 1645365
uguuacaugcauauccaug

SEQ ID NO: 1645367 - RNA, 19 nt, Artificial Sequence
  Description of Artificial Sequence: Synthetic oligonucleotide
  Sense strand starting at position 1622 of SEQ ID NO: 1561080
cuguguggugugucuuuau

SEQ ID NO: 1645368 - RNA, 19 nt, Artificial Sequence
  Description of Artificial Sequence: Synthetic oligonucleotide
  Antisense strand to SEQ ID NO: 1645367
auaaagacacaccacacag

SEQ ID NO: 1645369 - RNA, 19 nt, Artificial Sequence
  Description of Artificial Sequence: Synthetic oligonucleotide
  Sense strand starting at position 1821 of SEQ ID NO: 1561080
aggcguuucggcgcaggaa

SEQ ID NO: 1645370 - RNA, 19 nt, Artificial Sequence
  Description of Artificial Sequence: Synthetic oligonucleotide
  Antisense strand to SEQ ID NO: 1645369
uuccugcgccgaaacgccu

SEQ ID NO: 1645371 - RNA, 19 nt, Artificial Sequence
  Description of Artificial Sequence: Synthetic oligonucleotide
  Sense strand starting at position 1991 of SEQ ID NO: 1561080
auggucuaucugcgggaaa

SEQ ID NO: 1645372 - RNA, 19 nt, Artificial Sequence
  Description of Artificial Sequence: Synthetic oligonucleotide
  Antisense strand to SEQ ID NO: 1645371
uuucccgcagauagaccau

SEQ ID NO: 1645373 - RNA, 19 nt, Artificial Sequence
  Description of Artificial Sequence: Synthetic oligonucleotide
  Sense strand starting at position 1993 of SEQ ID NO: 1561080
ggucuaucugcgggaaaca

SEQ ID NO: 1645374 - RNA, 19 nt, Artificial Sequence
  Description of Artificial Sequence: Synthetic oligonucleotide
  Antisense strand to SEQ ID NO: 1645373
uguuucccgcagauagacc

SEQ ID NO: 1645375 - RNA, 19 nt, Artificial Sequence
  Description of Artificial Sequence: Synthetic oligonucleotide
  Sense strand starting at position 2489 of SEQ ID NO: 1561080
acagcccugucucuaagaa

SEQ ID NO: 1645376 - RNA, 19 nt, Artificial Sequence
  Description of Artificial Sequence: Synthetic oligonucleotide
  Antisense strand to SEQ ID NO: 1645375
uucuuagagacagggcugu

SEQ ID NO: 1645377 - RNA, 19 nt, Artificial Sequence
  Description of Artificial Sequence: Synthetic oligonucleotide
  Sense strand starting at position 2609 of SEQ ID NO: 1561080
aacgucaagucuccagaau

SEQ ID NO: 1645378 - RNA, 19 nt, Artificial Sequence
  Description of Artificial Sequence: Synthetic oligonucleotide
  Antisense strand to SEQ ID NO: 1645377
auucuggagacuugacguu

SEQ ID NO: 1645379 - RNA, 19 nt, Artificial Sequence
  Description of Artificial Sequence: Synthetic oligonucleotide
  Sense strand starting at position 2610 of SEQ ID NO: 1561080
acgucaagucuccagaauc

SEQ ID NO: 1645380 - RNA, 19 nt, Artificial Sequence
  Description of Artificial Sequence: Synthetic oligonucleotide
  Antisense strand to SEQ ID NO: 1645379
gauucuggagacuugacgu

SEQ ID NO: 1645381 - RNA, 19 nt, Artificial Sequence
  Description of Artificial Sequence: Synthetic oligonucleotide
  Sense strand starting at position 2765 of SEQ ID NO: 1561080
uuaacaagccuuugugaag

SEQ ID NO: 1645382 - RNA, 19 nt, Artificial Sequence
  Description of Artificial Sequence: Synthetic oligonucleotide
  Antisense strand to SEQ ID NO: 1645381
cuucacaaaggcuuguuaa

SEQ ID NO: 1645383 - RNA, 19 nt, Artificial Sequence
  Description of Artificial Sequence: Synthetic oligonucleotide
  Sense strand starting at position 2986 of SEQ ID NO: 1561080
gucccuugggaaugaaaug

SEQ ID NO: 1645384 - RNA, 19 nt, Artificial Sequence
  Description of Artificial Sequence: Synthetic oligonucleotide
  Antisense strand to SEQ ID NO: 1645383
cauuucauucccaagggac

SEQ ID NO: 1645385 - RNA, 19 nt, Artificial Sequence
  Description of Artificial Sequence: Synthetic oligonucleotide
  Sense strand starting at position 3003 of SEQ ID NO: 1561080
ugauaaugauucuuggcca

SEQ ID NO: 1645386 - RNA, 19 nt, Artificial Sequence
  Description of Artificial Sequence: Synthetic oligonucleotide
  Antisense strand to SEQ ID NO: 1645385
uggccaagaaucauuauca

SEQ ID NO: 1645387 - RNA, 19 nt, Artificial Sequence
  Description of Artificial Sequence: Synthetic oligonucleotide
  Sense strand starting at position 3007 of SEQ ID NO: 1561080
aaugauucuuggccacagu

SEQ ID NO: 1645388 - RNA, 19 nt, Artificial Sequence
  Description of Artificial Sequence: Synthetic oligonucleotide
  Antisense strand to SEQ ID NO: 1645387
acuguggccaagaaucauu

SEQ ID NO: 1645389 - RNA, 19 nt, Artificial Sequence
  Description of Artificial Sequence: Synthetic oligonucleotide
  Sense strand starting at position 3092 of SEQ ID NO: 1561080
gcgucuccucuuuauauuu

SEQ ID NO: 1645390 - RNA, 19 nt, Artificial Sequence
  Description of Artificial Sequence: Synthetic oligonucleotide
  Antisense strand to SEQ ID NO: 1645389
aaauauaaagaggagacgc

SEQ ID NO: 1645391 - RNA, 19 nt, Artificial Sequence
  Description of Artificial Sequence: Synthetic oligonucleotide
  Sense strand starting at position 23 of SEQ ID NO: 1561081
gggcuucucuguucuguaa

SEQ ID NO: 1645392 - RNA, 19 nt, Artificial Sequence
  Description of Artificial Sequence: Synthetic oligonucleotide
  Antisense strand to SEQ ID NO: 1645391
uuacagaacagagaagccc

SEQ ID NO: 1645393 - RNA, 19 nt, Artificial Sequence
  Description of Artificial Sequence: Synthetic oligonucleotide
  Sense strand starting at position 26 of SEQ ID NO: 1561081
cuucucuguucuguaaaug

SEQ ID NO: 1645394 - RNA, 19 nt, Artificial Sequence
  Description of Artificial Sequence: Synthetic oligonucleotide
  Antisense strand to SEQ ID NO: 1645393
cauuuacagaacagagaag

SEQ ID NO: 1645395 - RNA, 19 nt, Artificial Sequence
  Description of Artificial Sequence: Synthetic oligonucleotide
  Sense strand starting at position 27 of SEQ ID NO: 1561081
uucucuguucuguaaauga

SEQ ID NO: 1645396 - RNA, 19 nt, Artificial Sequence
  Description of Artificial Sequence: Synthetic oligonucleotide
  Antisense strand to SEQ ID NO: 1645395
ucauuuacagaacagagaa

SEQ ID NO: 1645397 - RNA, 19 nt, Artificial Sequence
  Description of Artificial Sequence: Synthetic oligonucleotide
  Sense strand starting at position 288 of SEQ ID NO: 1561081
ccugaaauagccuaugagu

SEQ ID NO: 1645398 - RNA, 19 nt, Artificial Sequence
  Description of Artificial Sequence: Synthetic oligonucleotide
  Antisense strand to SEQ ID NO: 1645397
acucauaggcuauuucagg

SEQ ID NO: 1645399 - RNA, 19 nt, Artificial Sequence
  Description of Artificial Sequence: Synthetic oligonucleotide
  Sense strand starting at position 290 of SEQ ID NO: 1561081
ugaaauagccuaugaguca

SEQ ID NO: 1645400 - RNA, 19 nt, Artificial Sequence
  Description of Artificial Sequence: Synthetic oligonucleotide
  Antisense strand to SEQ ID NO: 1645399
ugacucauaggcuauuuca

SEQ ID NO: 1645401 - RNA, 19 nt, Artificial Sequence
  Description of Artificial Sequence: Synthetic oligonucleotide
  Sense strand starting at position 291 of SEQ ID NO: 1561081
gaaauagccuaugagucau

SEQ ID NO: 1645402 - RNA, 19 nt, Artificial Sequence
  Description of Artificial Sequence: Synthetic oligonucleotide
  Antisense strand to SEQ ID NO: 1645401
augacucauaggcuauuuc

SEQ ID NO: 1645403 - RNA, 19 nt, Artificial Sequence
  Description of Artificial Sequence: Synthetic oligonucleotide
  Sense strand starting at position 431 of SEQ ID NO: 1561081
ccugguuccggucaagacu

SEQ ID NO: 1645404 - RNA, 19 nt, Artificial Sequence
  Description of Artificial Sequence: Synthetic oligonucleotide
  Antisense strand to SEQ ID NO: 1645403
agucuugaccggaaccagg

SEQ ID NO: 1645405 - RNA, 19 nt, Artificial Sequence
  Description of Artificial Sequence: Synthetic oligonucleotide
  Sense strand starting at position 437 of SEQ ID NO: 1561081
uccggucaagacugugaaa

SEQ ID NO: 1645406 - RNA, 19 nt, Artificial Sequence
  Description of Artificial Sequence: Synthetic oligonucleotide
  Antisense strand to SEQ ID NO: 1645405
uuucacagucuugaccgga

SEQ ID NO: 1645407 - RNA, 19 nt, Artificial Sequence
  Description of Artificial Sequence: Synthetic oligonucleotide
  Sense strand starting at position 439 of SEQ ID NO: 1561081
cggucaagacugugaaaca

SEQ ID NO: 1645408 - RNA, 19 nt, Artificial Sequence
  Description of Artificial Sequence: Synthetic oligonucleotide
  Antisense strand to SEQ ID NO: 1645407
uguuucacagucuugaccg

SEQ ID NO: 1645409 - RNA, 19 nt, Artificial Sequence
  Description of Artificial Sequence: Synthetic oligonucleotide
  Sense strand starting at position 440 of SEQ ID NO: 1561081
ggucaagacugugaaacau

SEQ ID NO: 1645410 - RNA, 19 nt, Artificial Sequence
  Description of Artificial Sequence: Synthetic oligonucleotide
  Antisense strand to SEQ ID NO: 1645409
auguuucacagucuugacc

SEQ ID NO: 1645411 - RNA, 19 nt, Artificial Sequence
  Description of Artificial Sequence: Synthetic oligonucleotide
  Sense strand starting at position 702 of SEQ ID NO: 1561081
gcuaacuucucagccagau

SEQ ID NO: 1645412 - RNA, 19 nt, Artificial Sequence
  Description of Artificial Sequence: Synthetic oligonucleotide
  Antisense strand to SEQ ID NO: 1645411
aucuggcugagaaguuagc

SEQ ID NO: 1645413 - RNA, 19 nt, Artificial Sequence
  Description of Artificial Sequence: Synthetic oligonucleotide
  Sense strand starting at position 749 of SEQ ID NO: 1561081
gggugugaguggucuaguu

SEQ ID NO: 1645414 - RNA, 19 nt, Artificial Sequence
  Description of Artificial Sequence: Synthetic oligonucleotide
  Antisense strand to SEQ ID NO: 1645413
aacuagaccacucacaccc

SEQ ID NO: 1645415 - RNA, 19 nt, Artificial Sequence
  Description of Artificial Sequence: Synthetic oligonucleotide
  Sense strand starting at position 828 of SEQ ID NO: 1561081
aggaaaugguaaccucagu

SEQ ID NO: 1645416 - RNA, 19 nt, Artificial Sequence
  Description of Artificial Sequence: Synthetic oligonucleotide
  Antisense strand to SEQ ID NO: 1645415
acugagguuaccauuuccu

SEQ ID NO: 1645417 - RNA, 19 nt, Artificial Sequence
  Description of Artificial Sequence: Synthetic oligonucleotide
  Sense strand starting at position 833 of SEQ ID NO: 1561081
augguaaccucaguucuca

SEQ ID NO: 1645418 - RNA, 19 nt, Artificial Sequence
  Description of Artificial Sequence: Synthetic oligonucleotide
  Antisense strand to SEQ ID NO: 1645417
ugagaacugagguuaccau

SEQ ID NO: 1645419 - RNA, 19 nt, Artificial Sequence
  Description of Artificial Sequence: Synthetic oligonucleotide
  Sense strand starting at position 908 of SEQ ID NO: 1561081
gguaucucauuccuguuga

SEQ ID NO: 1645420 - RNA, 19 nt, Artificial Sequence
  Description of Artificial Sequence: Synthetic oligonucleotide
  Antisense strand to SEQ ID NO: 1645419
ucaacaggaaugagauacc

SEQ ID NO: 1645421 - RNA, 19 nt, Artificial Sequence
  Description of Artificial Sequence: Synthetic oligonucleotide
  Sense strand starting at position 909 of SEQ ID NO: 1561081
guaucucauuccuguugaa

SEQ ID NO: 1645422 - RNA, 19 nt, Artificial Sequence
  Description of Artificial Sequence: Synthetic oligonucleotide
  Antisense strand to SEQ ID NO: 1645421
uucaacaggaaugagauac

SEQ ID NO: 1645423 - RNA, 19 nt, Artificial Sequence
  Description of Artificial Sequence: Synthetic oligonucleotide
  Sense strand starting at position 1089 of SEQ ID NO: 1561081
gugguucucuuagagcgau

SEQ ID NO: 1645424 - RNA, 19 nt, Artificial Sequence
  Description of Artificial Sequence: Synthetic oligonucleotide
  Antisense strand to SEQ ID NO: 1645423
aucgcucuaagagaaccac

SEQ ID NO: 1645425 - RNA, 19 nt, Artificial Sequence
  Description of Artificial Sequence: Synthetic oligonucleotide
  Sense strand starting at position 1158 of SEQ ID NO: 1561081
ggaggaaagucuuguuaua

SEQ ID NO: 1645426 - RNA, 19 nt, Artificial Sequence
  Description of Artificial Sequence: Synthetic oligonucleotide
  Antisense strand to SEQ ID NO: 1645425
uauaacaagacuuuccucc

SEQ ID NO: 1645427 - RNA, 19 nt, Artificial Sequence
  Description of Artificial Sequence: Synthetic oligonucleotide
  Sense strand starting at position 1160 of SEQ ID NO: 1561081
aggaaagucuuguuauagg

SEQ ID NO: 1645428 - RNA, 19 nt, Artificial Sequence
  Description of Artificial Sequence: Synthetic oligonucleotide
  Antisense strand to SEQ ID NO: 1645427
ccuauaacaagacuuuccu

SEQ ID NO: 1645429 - RNA, 19 nt, Artificial Sequence
  Description of Artificial Sequence: Synthetic oligonucleotide
  Sense strand starting at position 1165 of SEQ ID NO: 1561081
agucuuguuauaggugcau

SEQ ID NO: 1645430 - RNA, 19 nt, Artificial Sequence
  Description of Artificial Sequence: Synthetic oligonucleotide
  Antisense strand to SEQ ID NO: 1645429
augcaccuauaacaagacu

SEQ ID NO: 1645431 - RNA, 19 nt, Artificial Sequence
  Description of Artificial Sequence: Synthetic oligonucleotide
  Sense strand starting at position 1253 of SEQ ID NO: 1561081
ccgugaacggcccaugaaa

SEQ ID NO: 1645432 - RNA, 19 nt, Artificial Sequence
  Description of Artificial Sequence: Synthetic oligonucleotide
  Antisense strand to SEQ ID NO: 1645431
uuucaugggccguucacgg

SEQ ID NO: 1645433 - RNA, 19 nt, Artificial Sequence
  Description of Artificial Sequence: Synthetic oligonucleotide
  Sense strand starting at position 1345 of SEQ ID NO: 1561081
gggugugucuccuggaggu

SEQ ID NO: 1645434 - RNA, 19 nt, Artificial Sequence
  Description of Artificial Sequence: Synthetic oligonucleotide
  Antisense strand to SEQ ID NO: 1645433
accuccaggagacacaccc

SEQ ID NO: 1645435 - RNA, 19 nt, Artificial Sequence
  Description of Artificial Sequence: Synthetic oligonucleotide
  Sense strand starting at position 1349 of SEQ ID NO: 1561081
gugucuccuggaggugaga

SEQ ID NO: 1645436 - RNA, 19 nt, Artificial Sequence
  Description of Artificial Sequence: Synthetic oligonucleotide
  Antisense strand to SEQ ID NO: 1645435
ucucaccuccaggagacac

SEQ ID NO: 1645437 - RNA, 19 nt, Artificial Sequence
  Description of Artificial Sequence: Synthetic oligonucleotide
  Sense strand starting at position 1525 of SEQ ID NO: 1561081
ugucuugagcgaucccguu

SEQ ID NO: 1645438 - RNA, 19 nt, Artificial Sequence
  Description of Artificial Sequence: Synthetic oligonucleotide
  Antisense strand to SEQ ID NO: 1645437
aacgggaucgcucaagaca

SEQ ID NO: 1645439 - RNA, 19 nt, Artificial Sequence
  Description of Artificial Sequence: Synthetic oligonucleotide
  Sense strand starting at position 1531 of SEQ ID NO: 1561081
gagcgaucccguuaggcca

SEQ ID NO: 1645440 - RNA, 19 nt, Artificial Sequence
  Description of Artificial Sequence: Synthetic oligonucleotide
  Antisense strand to SEQ ID NO: 1645439
uggccuaacgggaucgcuc

SEQ ID NO: 1645441 - RNA, 19 nt, Artificial Sequence
  Description of Artificial Sequence: Synthetic oligonucleotide
  Sense strand starting at position 2115 of SEQ ID NO: 1561081
agggaaugucugggauggu

SEQ ID NO: 1645442 - RNA, 19 nt, Artificial Sequence
  Description of Artificial Sequence: Synthetic oligonucleotide
  Antisense strand to SEQ ID NO: 1645441
accaucccagacauucccu

SEQ ID NO: 1645443 - RNA, 19 nt, Artificial Sequence
  Description of Artificial Sequence: Synthetic oligonucleotide
  Sense strand starting at position 2159 of SEQ ID NO: 1561081
cagaguuccuucugggaag

SEQ ID NO: 1645444 - RNA, 19 nt, Artificial Sequence
  Description of Artificial Sequence: Synthetic oligonucleotide
  Antisense strand to SEQ ID NO: 1645443
cuucccagaaggaacucug

SEQ ID NO: 1645445 - RNA, 19 nt, Artificial Sequence
  Description of Artificial Sequence: Synthetic oligonucleotide
  Sense strand starting at position 2160 of SEQ ID NO: 1561081
agaguuccuucugggaaga

SEQ ID NO: 1645446 - RNA, 19 nt, Artificial Sequence
  Description of Artificial Sequence: Synthetic oligonucleotide
  Antisense strand to SEQ ID NO: 1645445
ucuucccagaaggaacucu

SEQ ID NO: 1645447 - RNA, 19 nt, Artificial Sequence
  Description of Artificial Sequence: Synthetic oligonucleotide
  Sense strand starting at position 2287 of SEQ ID NO: 1561081
gggauuggguuucauaauc

SEQ ID NO: 1645448 - RNA, 19 nt, Artificial Sequence
  Description of Artificial Sequence: Synthetic oligonucleotide
  Antisense strand to SEQ ID NO: 1645447
gauuaugaaacccaauccc

SEQ ID NO: 1645449 - RNA, 19 nt, Artificial Sequence
  Description of Artificial Sequence: Synthetic oligonucleotide
  Sense strand starting at position 2347 of SEQ ID NO: 1561081
gaacucaaguucucgcuuu

SEQ ID NO: 1645450 - RNA, 19 nt, Artificial Sequence
  Description of Artificial Sequence: Synthetic oligonucleotide
  Antisense strand to SEQ ID NO: 1645449
aaagcgagaacuugaguuc

SEQ ID NO: 1645451 - RNA, 19 nt, Artificial Sequence
  Description of Artificial Sequence: Synthetic oligonucleotide
  Sense strand starting at position 2770 of SEQ ID NO: 1561081
ugaggaucccaguggucga

SEQ ID NO: 1645452 - RNA, 19 nt, Artificial Sequence
  Description of Artificial Sequence: Synthetic oligonucleotide
  Antisense strand to SEQ ID NO: 1645451
ucgaccacugggauccuca

SEQ ID NO: 1645453 - RNA, 19 nt, Artificial Sequence
  Description of Artificial Sequence: Synthetic oligonucleotide
  Sense strand starting at position 2831 of SEQ ID NO: 1561081
gcggaaugucccuacugcu

SEQ ID NO: 1645454 - RNA, 19 nt, Artificial Sequence
  Description of Artificial Sequence: Synthetic oligonucleotide
  Antisense strand to SEQ ID NO: 1645453
agcaguagggacauuccgc

SEQ ID NO: 1645455 - RNA, 19 nt, Artificial Sequence
  Description of Artificial Sequence: Synthetic oligonucleotide
  Sense strand starting at position 2847 of SEQ ID NO: 1561081
gcuaguuucgggcgcaguu

SEQ ID NO: 1645456 - RNA, 19 nt, Artificial Sequence
  Description of Artificial Sequence: Synthetic oligonucleotide
  Antisense strand to SEQ ID NO: 1645455
aacugcgcccgaaacuagc

SEQ ID NO: 1645457 - RNA, 19 nt, Artificial Sequence
  Description of Artificial Sequence: Synthetic oligonucleotide
  Sense strand starting at position 2906 of SEQ ID NO: 1561081
gacagcgaauacucgauaa

SEQ ID NO: 1645458 - RNA, 19 nt, Artificial Sequence
  Description of Artificial Sequence: Synthetic oligonucleotide
  Antisense strand to SEQ ID NO: 1645457
uuaucgaguauucgcuguc

SEQ ID NO: 1645459 - RNA, 19 nt, Artificial Sequence
  Description of Artificial Sequence: Synthetic oligonucleotide
  Sense strand starting at position 2908 of SEQ ID NO: 1561081
cagcgaauacucgauaaca

SEQ ID NO: 1645460 - RNA, 19 nt, Artificial Sequence
  Description of Artificial Sequence: Synthetic oligonucleotide
  Antisense strand to SEQ ID NO: 1645459
uguuaucgaguauucgcug

SEQ ID NO: 1645461 - RNA, 19 nt, Artificial Sequence
  Description of Artificial Sequence: Synthetic oligonucleotide
  Sense strand starting at position 2910 of SEQ ID NO: 1561081
gcgaauacucgauaacaaa

SEQ ID NO: 1645462 - RNA, 19 nt, Artificial Sequence
  Description of Artificial Sequence: Synthetic oligonucleotide
  Antisense strand to SEQ ID NO: 1645461
uuuguuaucgaguauucgc

SEQ ID NO: 1645463 - RNA, 19 nt, Artificial Sequence
  Description of Artificial Sequence: Synthetic oligonucleotide
  Sense strand starting at position 2976 of SEQ ID NO: 1561081
ucucgagucgucuuugcca

SEQ ID NO: 1645464 - RNA, 19 nt, Artificial Sequence
  Description of Artificial Sequence: Synthetic oligonucleotide
  Antisense strand to SEQ ID NO: 1645463
uggcaaagacgacucgaga

SEQ ID NO: 1645465 - RNA, 19 nt, Artificial Sequence
  Description of Artificial Sequence: Synthetic oligonucleotide
  Sense strand starting at position 2978 of SEQ ID NO: 1561081
ucgagucgucuuugccaaa

SEQ ID NO: 1645466 - RNA, 19 nt, Artificial Sequence
  Description of Artificial Sequence: Synthetic oligonucleotide
  Antisense strand to SEQ ID NO: 1645465
uuuggcaaagacgacucga

SEQ ID NO: 1645467 - RNA, 19 nt, Artificial Sequence
  Description of Artificial Sequence: Synthetic oligonucleotide
  Sense strand starting at position 3022 of SEQ ID NO: 1561081
guucgcacuuugcagauaa

SEQ ID NO: 1645468 - RNA, 19 nt, Artificial Sequence
  Description of Artificial Sequence: Synthetic oligonucleotide
  Antisense strand to SEQ ID NO: 1645467
uuaucugcaaagugcgaac

SEQ ID NO: 1645469 - RNA, 19 nt, Artificial Sequence
  Description of Artificial Sequence: Synthetic oligonucleotide
  Sense strand starting at position 3834 of SEQ ID NO: 1561081
ggguuucaccuguggacca

SEQ ID NO: 1645470 - RNA, 19 nt, Artificial Sequence
  Description of Artificial Sequence: Synthetic oligonucleotide
  Antisense strand to SEQ ID NO: 1645469
ugguccacaggugaaaccc

SEQ ID NO: 1645471 - RNA, 19 nt, Artificial Sequence
  Description of Artificial Sequence: Synthetic oligonucleotide
  Sense strand starting at position 52 of SEQ ID NO: 1561082
cuggcaaguucucucaacu

SEQ ID NO: 1645472 - RNA, 19 nt, Artificial Sequence
  Description of Artificial Sequence: Synthetic oligonucleotide
  Antisense strand to SEQ ID NO: 1645471
aguugagagaacuugccag

SEQ ID NO: 1645473 - RNA, 19 nt, Artificial Sequence
  Description of Artificial Sequence: Synthetic oligonucleotide
  Sense strand starting at position 327 of SEQ ID NO: 1561082
ggccauagcuccugagagu

SEQ ID NO: 1645474 - RNA, 19 nt, Artificial Sequence
  Description of Artificial Sequence: Synthetic oligonucleotide
  Antisense strand to SEQ ID NO: 1645473
acucucaggagcuauggcc

SEQ ID NO: 1645475 - RNA, 19 nt, Artificial Sequence
  Description of Artificial Sequence: Synthetic oligonucleotide
  Sense strand starting at position 328 of SEQ ID NO: 1561082
gccauagcuccugagagua

SEQ ID NO: 1645476 - RNA, 19 nt, Artificial Sequence
  Description of Artificial Sequence: Synthetic oligonucleotide
  Antisense strand to SEQ ID NO: 1645475
uacucucaggagcuauggc

SEQ ID NO: 1645477 - RNA, 19 nt, Artificial Sequence
  Description of Artificial Sequence: Synthetic oligonucleotide
  Sense strand starting at position 330 of SEQ ID NO: 1561082
cauagcuccugagaguaga

SEQ ID NO: 1645478 - RNA, 19 nt, Artificial Sequence
  Description of Artificial Sequence: Synthetic oligonucleotide
  Antisense strand to SEQ ID NO: 1645477
ucuacucucaggagcuaug

SEQ ID NO: 1645479 - RNA, 19 nt, Artificial Sequence
  Description of Artificial Sequence: Synthetic oligonucleotide
  Sense strand starting at position 942 of SEQ ID NO: 1561082
gggacaauggugugaucuc

SEQ ID NO: 1645480 - RNA, 19 nt, Artificial Sequence
  Description of Artificial Sequence: Synthetic oligonucleotide
  Antisense strand to SEQ ID NO: 1645479
gagaucacaccauuguccc

SEQ ID NO: 1645481 - RNA, 19 nt, Artificial Sequence
  Description of Artificial Sequence: Synthetic oligonucleotide
  Sense strand starting at position 1038 of SEQ ID NO: 1561082
caacgugccgagcaaauuu

SEQ ID NO: 1645482 - RNA, 19 nt, Artificial Sequence
  Description of Artificial Sequence: Synthetic oligonucleotide
  Antisense strand to SEQ ID NO: 1645481
aaauuugcucggcacguug

SEQ ID NO: 1645483 - RNA, 19 nt, Artificial Sequence
  Description of Artificial Sequence: Synthetic oligonucleotide
  Sense strand starting at position 1302 of SEQ ID NO: 1561082
cuguguugcucuggcuuga

SEQ ID NO: 1645484 - RNA, 19 nt, Artificial Sequence
  Description of Artificial Sequence: Synthetic oligonucleotide
  Antisense strand to SEQ ID NO: 1645483
ucaagccagagcaacacag

SEQ ID NO: 1645485 - RNA, 19 nt, Artificial Sequence
  Description of Artificial Sequence: Synthetic oligonucleotide
  Sense strand starting at position 1537 of SEQ ID NO: 1561082
ugggauuacauguguggag

SEQ ID NO: 1645486 - RNA, 19 nt, Artificial Sequence
  Description of Artificial Sequence: Synthetic oligonucleotide
  Antisense strand to SEQ ID NO: 1645485
cuccacacauguaauccca

SEQ ID NO: 1645487 - RNA, 19 nt, Artificial Sequence
  Description of Artificial Sequence: Synthetic oligonucleotide
  Sense strand starting at position 1657 of SEQ ID NO: 1561082
cccuguaguccugaccaga

SEQ ID NO: 1645488 - RNA, 19 nt, Artificial Sequence
  Description of Artificial Sequence: Synthetic oligonucleotide
  Antisense strand to SEQ ID NO: 1645487
ucuggucaggacuacaggg

SEQ ID NO: 1645489 - RNA, 19 nt, Artificial Sequence
  Description of Artificial Sequence: Synthetic oligonucleotide
  Sense strand starting at position 1683 of SEQ ID NO: 1561082
ggacacugguguuuccuaa

SEQ ID NO: 1645490 - RNA, 19 nt, Artificial Sequence
  Description of Artificial Sequence: Synthetic oligonucleotide
  Antisense strand to SEQ ID NO: 1645489
uuaggaaacaccagugucc

SEQ ID NO: 1645491 - RNA, 19 nt, Artificial Sequence
  Description of Artificial Sequence: Synthetic oligonucleotide
  Sense strand starting at position 1687 of SEQ ID NO: 1561082
acugguguuuccuaaacuc

SEQ ID NO: 1645492 - RNA, 19 nt, Artificial Sequence
  Description of Artificial Sequence: Synthetic oligonucleotide
  Antisense strand to SEQ ID NO: 1645491
gaguuuaggaaacaccagu

SEQ ID NO: 1645493 - RNA, 19 nt, Artificial Sequence
  Description of Artificial Sequence: Synthetic oligonucleotide
  Sense strand starting at position 1709 of SEQ ID NO: 1561082
ugcugugacgggagauguu

SEQ ID NO: 1645494 - RNA, 19 nt, Artificial Sequence
  Description of Artificial Sequence: Synthetic oligonucleotide
  Antisense strand to SEQ ID NO: 1645493
aacaucucccgucacagca

SEQ ID NO: 1645495 - RNA, 19 nt, Artificial Sequence
  Description of Artificial Sequence: Synthetic oligonucleotide
  Sense strand starting at position 1716 of SEQ ID NO: 1561082
acgggagauguucaagguu

SEQ ID NO: 1645496 - RNA, 19 nt, Artificial Sequence
  Description of Artificial Sequence: Synthetic oligonucleotide
  Antisense strand to SEQ ID NO: 1645495
aaccuugaacaucucccgu

SEQ ID NO: 1645497 - RNA, 19 nt, Artificial Sequence
  Description of Artificial Sequence: Synthetic oligonucleotide
  Sense strand starting at position 1719 of SEQ ID NO: 1561082
ggagauguucaagguuguu

SEQ ID NO: 1645498 - RNA, 19 nt, Artificial Sequence
  Description of Artificial Sequence: Synthetic oligonucleotide
  Antisense strand to SEQ ID NO: 1645497
aacaaccuugaacaucucc

SEQ ID NO: 1645499 - RNA, 19 nt, Artificial Sequence
  Description of Artificial Sequence: Synthetic oligonucleotide
  Sense strand starting at position 1724 of SEQ ID NO: 1561082
uguucaagguuguugucau

SEQ ID NO: 1645500 - RNA, 19 nt, Artificial Sequence
  Description of Artificial Sequence: Synthetic oligonucleotide
  Antisense strand to SEQ ID NO: 1645499
augacaacaaccuugaaca

SEQ ID NO: 1645501 - RNA, 19 nt, Artificial Sequence
  Description of Artificial Sequence: Synthetic oligonucleotide
  Sense strand starting at position 1725 of SEQ ID NO: 1561082
guucaagguuguugucaug

SEQ ID NO: 1645502 - RNA, 19 nt, Artificial Sequence
  Description of Artificial Sequence: Synthetic oligonucleotide
  Antisense strand to SEQ ID NO: 1645501
caugacaacaaccuugaac

SEQ ID NO: 1645503 - RNA, 19 nt, Artificial Sequence
  Description of Artificial Sequence: Synthetic oligonucleotide
  Sense strand starting at position 1728 of SEQ ID NO: 1561082
caagguuguugucaugcau

SEQ ID NO: 1645504 - RNA, 19 nt, Artificial Sequence
  Description of Artificial Sequence: Synthetic oligonucleotide
  Antisense strand to SEQ ID NO: 1645503
augcaugacaacaaccuug

SEQ ID NO: 1645505 - RNA, 19 nt, Artificial Sequence
  Description of Artificial Sequence: Synthetic oligonucleotide
  Sense strand starting at position 1827 of SEQ ID NO: 1561082
gggcuuugaugaguaaggu

SEQ ID NO: 1645506 - RNA, 19 nt, Artificial Sequence
  Description of Artificial Sequence: Synthetic oligonucleotide
  Antisense strand to SEQ ID NO: 1645505
accuuacucaucaaagccc

SEQ ID NO: 1645507 - RNA, 19 nt, Artificial Sequence
  Description of Artificial Sequence: Synthetic oligonucleotide
  Sense strand starting at position 1828 of SEQ ID NO: 1561082
ggcuuugaugaguaagguc

SEQ ID NO: 1645508 - RNA, 19 nt, Artificial Sequence
  Description of Artificial Sequence: Synthetic oligonucleotide
  Antisense strand to SEQ ID NO: 1645507
gaccuuacucaucaaagcc

SEQ ID NO: 1645509 - RNA, 19 nt, Artificial Sequence
  Description of Artificial Sequence: Synthetic oligonucleotide
  Sense strand starting at position 1836 of SEQ ID NO: 1561082
ugaguaaggucuugacccu

SEQ ID NO: 1645510 - RNA, 19 nt, Artificial Sequence
  Description of Artificial Sequence: Synthetic oligonucleotide
  Antisense strand to SEQ ID NO: 1645509
agggucaagaccuuacuca

SEQ ID NO: 1645511 - RNA, 19 nt, Artificial Sequence
  Description of Artificial Sequence: Synthetic oligonucleotide
  Sense strand starting at position 1863 of SEQ ID NO: 1561082
gugucuggauccuagagca

SEQ ID NO: 1645512 - RNA, 19 nt, Artificial Sequence
  Description of Artificial Sequence: Synthetic oligonucleotide
  Antisense strand to SEQ ID NO: 1645511
ugcucuaggauccagacac

SEQ ID NO: 1645513 - RNA, 19 nt, Artificial Sequence
  Description of Artificial Sequence: Synthetic oligonucleotide
  Sense strand starting at position 1877 of SEQ ID NO: 1561082
gagcaaguguucugagguu

SEQ ID NO: 1645514 - RNA, 19 nt, Artificial Sequence
  Description of Artificial Sequence: Synthetic oligonucleotide
  Antisense strand to SEQ ID NO: 1645513
aaccucagaacacuugcuc

SEQ ID NO: 1645515 - RNA, 19 nt, Artificial Sequence
  Description of Artificial Sequence: Synthetic oligonucleotide
  Sense strand starting at position 1981 of SEQ ID NO: 1561082
gagugucuagugggaggau

SEQ ID NO: 1645516 - RNA, 19 nt, Artificial Sequence
  Description of Artificial Sequence: Synthetic oligonucleotide
  Antisense strand to SEQ ID NO: 1645515
auccucccacuagacacuc

SEQ ID NO: 1645517 - RNA, 19 nt, Artificial Sequence
  Description of Artificial Sequence: Synthetic oligonucleotide
  Sense strand starting at position 1982 of SEQ ID NO: 1561082
agugucuagugggaggauu

SEQ ID NO: 1645518 - RNA, 19 nt, Artificial Sequence
  Description of Artificial Sequence: Synthetic oligonucleotide
  Antisense strand to SEQ ID NO: 1645517
aauccucccacuagacacu

SEQ ID NO: 1645519 - RNA, 19 nt, Artificial Sequence
  Description of Artificial Sequence: Synthetic oligonucleotide
  Sense strand starting at position 2138 of SEQ ID NO: 1561082
auugaauuguguccuguca

SEQ ID NO: 1645520 - RNA, 19 nt, Artificial Sequence
  Description of Artificial Sequence: Synthetic oligonucleotide
  Antisense strand to SEQ ID NO: 1645519
ugacaggacacaauucaau

SEQ ID NO: 1645521 - RNA, 19 nt, Artificial Sequence
  Description of Artificial Sequence: Synthetic oligonucleotide
  Sense strand starting at position 2490 of SEQ ID NO: 1561082
uucccaguggguuggaauu

SEQ ID NO: 1645522 - RNA, 19 nt, Artificial Sequence
  Description of Artificial Sequence: Synthetic oligonucleotide
  Antisense strand to SEQ ID NO: 1645521
aauuccaacccacugggaa

SEQ ID NO: 1645523 - RNA, 19 nt, Artificial Sequence
  Description of Artificial Sequence: Synthetic oligonucleotide
  Sense strand starting at position 2526 of SEQ ID NO: 1561082
ggagguccucaggguuaga

SEQ ID NO: 1645524 - RNA, 19 nt, Artificial Sequence
  Description of Artificial Sequence: Synthetic oligonucleotide
  Antisense strand to SEQ ID NO: 1645523
ucuaacccugaggaccucc

SEQ ID NO: 1645525 - RNA, 19 nt, Artificial Sequence
  Description of Artificial Sequence: Synthetic oligonucleotide
  Sense strand starting at position 2529 of SEQ ID NO: 1561082
gguccucaggguuagauga

SEQ ID NO: 1645526 - RNA, 19 nt, Artificial Sequence
  Description of Artificial Sequence: Synthetic oligonucleotide
  Antisense strand to SEQ ID NO: 1645525
ucaucuaacccugaggacc

SEQ ID NO: 1645527 - RNA, 19 nt, Artificial Sequence
  Description of Artificial Sequence: Synthetic oligonucleotide
  Sense strand starting at position 2573 of SEQ ID NO: 1561082
uggaauuaguucccuauaa

SEQ ID NO: 1645528 - RNA, 19 nt, Artificial Sequence
  Description of Artificial Sequence: Synthetic oligonucleotide
  Antisense strand to SEQ ID NO: 1645527
uuauagggaacuaauucca

SEQ ID NO: 1645529 - RNA, 19 nt, Artificial Sequence
  Description of Artificial Sequence: Synthetic oligonucleotide
  Sense strand starting at position 2574 of SEQ ID NO: 1561082
ggaauuaguucccuauaag

SEQ ID NO: 1645530 - RNA, 19 nt, Artificial Sequence
  Description of Artificial Sequence: Synthetic oligonucleotide
  Antisense strand to SEQ ID NO: 1645529
cuuauagggaacuaauucc

SEQ ID NO: 1645531 - RNA, 19 nt, Artificial Sequence
  Description of Artificial Sequence: Synthetic oligonucleotide
  Sense strand starting at position 2755 of SEQ ID NO: 1561082
gcucuuuaguguuuccuua

SEQ ID NO: 1645532 - RNA, 19 nt, Artificial Sequence
  Description of Artificial Sequence: Synthetic oligonucleotide
  Antisense strand to SEQ ID NO: 1645531
uaaggaaacacuaaagagc

SEQ ID NO: 1645533 - RNA, 19 nt, Artificial Sequence
  Description of Artificial Sequence: Synthetic oligonucleotide
  Sense strand starting at position 2814 of SEQ ID NO: 1561082
ggaauuaaguuugcagaua

SEQ ID NO: 1645534 - RNA, 19 nt, Artificial Sequence
  Description of Artificial Sequence: Synthetic oligonucleotide
  Antisense strand to SEQ ID NO: 1645533
uaucugcaaacuuaauucc

SEQ ID NO: 1645535 - RNA, 19 nt, Artificial Sequence
  Description of Artificial Sequence: Synthetic oligonucleotide
  Sense strand starting at position 2815 of SEQ ID NO: 1561082
gaauuaaguuugcagauac

SEQ ID NO: 1645536 - RNA, 19 nt, Artificial Sequence
  Description of Artificial Sequence: Synthetic oligonucleotide
  Antisense strand to SEQ ID NO: 1645535
guaucugcaaacuuaauuc

SEQ ID NO: 1645537 - RNA, 19 nt, Artificial Sequence
  Description of Artificial Sequence: Synthetic oligonucleotide
  Sense strand starting at position 3175 of SEQ ID NO: 1561082
ggcucauuccuauaauagc

SEQ ID NO: 1645538 - RNA, 19 nt, Artificial Sequence
  Description of Artificial Sequence: Synthetic oligonucleotide
  Antisense strand to SEQ ID NO: 1645537
gcuauuauaggaaugagcc

SEQ ID NO: 1645539 - RNA, 19 nt, Artificial Sequence
  Description of Artificial Sequence: Synthetic oligonucleotide
  Sense strand starting at position 3528 of SEQ ID NO: 1561082
ggaguauaguggcacacuu

SEQ ID NO: 1645540 - RNA, 19 nt, Artificial Sequence
  Description of Artificial Sequence: Synthetic oligonucleotide
  Antisense strand to SEQ ID NO: 1645539
aagugugccacuauacucc

SEQ ID NO: 1645541 - RNA, 19 nt, Artificial Sequence
  Description of Artificial Sequence: Synthetic oligonucleotide
  Sense strand starting at position 3530 of SEQ ID NO: 1561082
aguauaguggcacacuuaa

SEQ ID NO: 1645542 - RNA, 19 nt, Artificial Sequence
  Description of Artificial Sequence: Synthetic oligonucleotide
  Antisense strand to SEQ ID NO: 1645541
uuaagugugccacuauacu

SEQ ID NO: 1645543 - RNA, 19 nt, Artificial Sequence
  Description of Artificial Sequence: Synthetic oligonucleotide
  Sense strand starting at position 228 of SEQ ID NO: 1561083
ugaauauuauagguacaug

SEQ ID NO: 1645544 - RNA, 19 nt, Artificial Sequence
  Description of Artificial Sequence: Synthetic oligonucleotide
  Antisense strand to SEQ ID NO: 1645543
cauguaccuauaauauuca

SEQ ID NO: 1645545 - RNA, 19 nt, Artificial Sequence
  Description of Artificial Sequence: Synthetic oligonucleotide
  Sense strand starting at position 245 of SEQ ID NO: 1561083
uguacauauguguacaaca

SEQ ID NO: 1645546 - RNA, 19 nt, Artificial Sequence
  Description of Artificial Sequence: Synthetic oligonucleotide
  Antisense strand to SEQ ID NO: 1645545
uguuguacacauauguaca

SEQ ID NO: 1645547 - RNA, 19 nt, Artificial Sequence
  Description of Artificial Sequence: Synthetic oligonucleotide
  Sense strand starting at position 318 of SEQ ID NO: 1561083
ccuauugaaguuggacaga

SEQ ID NO: 1645548 - RNA, 19 nt, Artificial Sequence
  Description of Artificial Sequence: Synthetic oligonucleotide
  Antisense strand to SEQ ID NO: 1645547
ucuguccaacuucaauagg

SEQ ID NO: 1645549 - RNA, 19 nt, Artificial Sequence
  Description of Artificial Sequence: Synthetic oligonucleotide
  Sense strand starting at position 351 of SEQ ID NO: 1561083
ucaguuuccacaggagaag

SEQ ID NO: 1645550 - RNA, 19 nt, Artificial Sequence
  Description of Artificial Sequence: Synthetic oligonucleotide
  Antisense strand to SEQ ID NO: 1645549
cuucuccuguggaaacuga

SEQ ID NO: 1645551 - RNA, 19 nt, Artificial Sequence
  Description of Artificial Sequence: Synthetic oligonucleotide
  Sense strand starting at position 457 of SEQ ID NO: 1561083
caggaaauggcacguuauu

SEQ ID NO: 1645552 - RNA, 19 nt, Artificial Sequence
  Description of Artificial Sequence: Synthetic oligonucleotide
  Antisense strand to SEQ ID NO: 1645551
aauaacgugccauuuccug

SEQ ID NO: 1645553 - RNA, 19 nt, Artificial Sequence
  Description of Artificial Sequence: Synthetic oligonucleotide
  Sense strand starting at position 590 of SEQ ID NO: 1561083
gcagguuagcuuuaaacag

SEQ ID NO: 1645554 - RNA, 19 nt, Artificial Sequence
  Description of Artificial Sequence: Synthetic oligonucleotide
  Antisense strand to SEQ ID NO: 1645553
cuguuuaaagcuaaccugc

SEQ ID NO: 1645555 - RNA, 19 nt, Artificial Sequence
  Description of Artificial Sequence: Synthetic oligonucleotide
  Sense strand starting at position 616 of SEQ ID NO: 1561083
auuaguuugccucacucua

SEQ ID NO: 1645556 - RNA, 19 nt, Artificial Sequence
  Description of Artificial Sequence: Synthetic oligonucleotide
  Antisense strand to SEQ ID NO: 1645555
uagagugaggcaaacuaau

SEQ ID NO: 1645557 - RNA, 19 nt, Artificial Sequence
  Description of Artificial Sequence: Synthetic oligonucleotide
  Sense strand starting at position 893 of SEQ ID NO: 1561083
ugccaaucccucugagaua

SEQ ID NO: 1645558 - RNA, 19 nt, Artificial Sequence
  Description of Artificial Sequence: Synthetic oligonucleotide
  Antisense strand to SEQ ID NO: 1645557
uaucucagagggauuggca

SEQ ID NO: 1645559 - RNA, 19 nt, Artificial Sequence
  Description of Artificial Sequence: Synthetic oligonucleotide
  Sense strand starting at position 1045 of SEQ ID NO: 1561083
gucugacagaugggauuau

SEQ ID NO: 1645560 - RNA, 19 nt, Artificial Sequence
  Description of Artificial Sequence: Synthetic oligonucleotide
  Antisense strand to SEQ ID NO: 1645559
auaaucccaucugucagac

SEQ ID NO: 1645561 - RNA, 19 nt, Artificial Sequence
  Description of Artificial Sequence: Synthetic oligonucleotide
  Sense strand starting at position 1061 of SEQ ID NO: 1561083
uauucuaagguccggaaau

SEQ ID NO: 1645562 - RNA, 19 nt, Artificial Sequence
  Description of Artificial Sequence: Synthetic oligonucleotide
  Antisense strand to SEQ ID NO: 1645561
auuuccggaccuuagaaua

SEQ ID NO: 1645563 - RNA, 19 nt, Artificial Sequence
  Description of Artificial Sequence: Synthetic oligonucleotide
  Sense strand starting at position 1063 of SEQ ID NO: 1561083
uucuaagguccggaaauca

SEQ ID NO: 1645564 - RNA, 19 nt, Artificial Sequence
  Description of Artificial Sequence: Synthetic oligonucleotide
  Antisense strand to SEQ ID NO: 1645563
ugauuuccggaccuuagaa

SEQ ID NO: 1645565 - RNA, 19 nt, Artificial Sequence
  Description of Artificial Sequence: Synthetic oligonucleotide
  Sense strand starting at position 1090 of SEQ ID NO: 1561083
acugucaagcacuguuaga

SEQ ID NO: 1645566 - RNA, 19 nt, Artificial Sequence
  Description of Artificial Sequence: Synthetic oligonucleotide
  Antisense strand to SEQ ID NO: 1645565
ucuaacagugcuugacagu

SEQ ID NO: 1645567 - RNA, 19 nt, Artificial Sequence
  Description of Artificial Sequence: Synthetic oligonucleotide
  Sense strand starting at position 1379 of SEQ ID NO: 1561083
gcgagcagauaccuggaua

SEQ ID NO: 1645568 - RNA, 19 nt, Artificial Sequence
  Description of Artificial Sequence: Synthetic oligonucleotide
  Antisense strand to SEQ ID NO: 1645567
uauccagguaucugcucgc

SEQ ID NO: 1645569 - RNA, 19 nt, Artificial Sequence
  Description of Artificial Sequence: Synthetic oligonucleotide
  Sense strand starting at position 1380 of SEQ ID NO: 1561083
cgagcagauaccuggauau

SEQ ID NO: 1645570 - RNA, 19 nt, Artificial Sequence
  Description of Artificial Sequence: Synthetic oligonucleotide
  Antisense strand to SEQ ID NO: 1645569
auauccagguaucugcucg

SEQ ID NO: 1645571 - RNA, 19 nt, Artificial Sequence
  Description of Artificial Sequence: Synthetic oligonucleotide
  Sense strand starting at position 1420 of SEQ ID NO: 1561083
ggacuagguccagguguga

SEQ ID NO: 1645572 - RNA, 19 nt, Artificial Sequence
  Description of Artificial Sequence: Synthetic oligonucleotide
  Antisense strand to SEQ ID NO: 1645571
ucacaccuggaccuagucc

SEQ ID NO: 1645573 - RNA, 19 nt, Artificial Sequence
  Description of Artificial Sequence: Synthetic oligonucleotide
  Sense strand starting at position 1433 of SEQ ID NO: 1561083
gugugaguugcgaggccau

SEQ ID NO: 1645574 - RNA, 19 nt, Artificial Sequence
  Description of Artificial Sequence: Synthetic oligonucleotide
  Antisense strand to SEQ ID NO: 1645573
auggccucgcaacucacac

SEQ ID NO: 1645575 - RNA, 19 nt, Artificial Sequence
  Description of Artificial Sequence: Synthetic oligonucleotide
  Sense strand starting at position 2086 of SEQ ID NO: 1561083
gugauuggcgaguaugaag

SEQ ID NO: 1645576 - RNA, 19 nt, Artificial Sequence
  Description of Artificial Sequence: Synthetic oligonucleotide
  Antisense strand to SEQ ID NO: 1645575
cuucauacucgccaaucac

SEQ ID NO: 1645577 - RNA, 19 nt, Artificial Sequence
  Description of Artificial Sequence: Synthetic oligonucleotide
  Sense strand starting at position 2232 of SEQ ID NO: 1561083
auuggaaucuuggcagaaa

SEQ ID NO: 1645578 - RNA, 19 nt, Artificial Sequence
  Description of Artificial Sequence: Synthetic oligonucleotide
  Antisense strand to SEQ ID NO: 1645577
uuucugccaagauuccaau

SEQ ID NO: 1645579 - RNA, 19 nt, Artificial Sequence
  Description of Artificial Sequence: Synthetic oligonucleotide
  Sense strand starting at position 2660 of SEQ ID NO: 1561083
gcagauucgcuggagguca

SEQ ID NO: 1645580 - RNA, 19 nt, Artificial Sequence
  Description of Artificial Sequence: Synthetic oligonucleotide
  Antisense strand to SEQ ID NO: 1645579
ugaccuccagcgaaucugc

SEQ ID NO: 1645581 - RNA, 19 nt, Artificial Sequence
  Description of Artificial Sequence: Synthetic oligonucleotide
  Sense strand starting at position 2802 of SEQ ID NO: 1561083
cacgguauccagugacauc

SEQ ID NO: 1645582 - RNA, 19 nt, Artificial Sequence
  Description of Artificial Sequence: Synthetic oligonucleotide
  Antisense strand to SEQ ID NO: 1645581
gaugucacuggauaccgug

SEQ ID NO: 1645583 - RNA, 19 nt, Artificial Sequence
  Description of Artificial Sequence: Synthetic oligonucleotide
  Sense strand starting at position 3011 of SEQ ID NO: 1561083
uuggaaagagugugucaga

SEQ ID NO: 1645584 - RNA, 19 nt, Artificial Sequence
  Description of Artificial Sequence: Synthetic oligonucleotide
  Antisense strand to SEQ ID NO: 1645583
ucugacacacucuuuccaa

SEQ ID NO: 1645585 - RNA, 19 nt, Artificial Sequence
  Description of Artificial Sequence: Synthetic oligonucleotide
  Sense strand starting at position 3045 of SEQ ID NO: 1561083
gccucagagaccuggguuu

SEQ ID NO: 1645586 - RNA, 19 nt, Artificial Sequence
  Description of Artificial Sequence: Synthetic oligonucleotide
  Antisense strand to SEQ ID NO: 1645585
aaacccaggucucugaggc

SEQ ID NO: 1645587 - RNA, 19 nt, Artificial Sequence
  Description of Artificial Sequence: Synthetic oligonucleotide
  Sense strand starting at position 3047 of SEQ ID NO: 1561083
cucagagaccuggguuuga

SEQ ID NO: 1645588 - RNA, 19 nt, Artificial Sequence
  Description of Artificial Sequence: Synthetic oligonucleotide
  Antisense strand to SEQ ID NO: 1645587
ucaaacccaggucucugag

SEQ ID NO: 1645589 - RNA, 19 nt, Artificial Sequence
  Description of Artificial Sequence: Synthetic oligonucleotide
  Sense strand starting at position 3058 of SEQ ID NO: 1561083
ggguuugaauccuugucca

SEQ ID NO: 1645590 - RNA, 19 nt, Artificial Sequence
  Description of Artificial Sequence: Synthetic oligonucleotide
  Antisense strand to SEQ ID NO: 1645589
uggacaaggauucaaaccc

SEQ ID NO: 1645591 - RNA, 19 nt, Artificial Sequence
  Description of Artificial Sequence: Synthetic oligonucleotide
  Sense strand starting at position 3226 of SEQ ID NO: 1561083
uaauuaucuggugaaagca

SEQ ID NO: 1645592 - RNA, 19 nt, Artificial Sequence
  Description of Artificial Sequence: Synthetic oligonucleotide
  Antisense strand to SEQ ID NO: 1645591
ugcuuucaccagauaauua

SEQ ID NO: 1645593 - RNA, 19 nt, Artificial Sequence
  Description of Artificial Sequence: Synthetic oligonucleotide
  Sense strand starting at position 3286 of SEQ ID NO: 1561083
uccucugugaagugcagaa

SEQ ID NO: 1645594 - RNA, 19 nt, Artificial Sequence
  Description of Artificial Sequence: Synthetic oligonucleotide
  Antisense strand to SEQ ID NO: 1645593
uucugcacuucacagagga

SEQ ID NO: 1645595 - RNA, 19 nt, Artificial Sequence
  Description of Artificial Sequence: Synthetic oligonucleotide
  Sense strand starting at position 3417 of SEQ ID NO: 1561083
ggcuacaaauguuuccaga

SEQ ID NO: 1645596 - RNA, 19 nt, Artificial Sequence
  Description of Artificial Sequence: Synthetic oligonucleotide
  Antisense strand to SEQ ID NO: 1645595
ucuggaaacauuuguagcc

SEQ ID NO: 1645597 - RNA, 19 nt, Artificial Sequence
  Description of Artificial Sequence: Synthetic oligonucleotide
  Sense strand starting at position 3441 of SEQ ID NO: 1561083
gcucuuauuuccucuaggu

SEQ ID NO: 1645598 - RNA, 19 nt, Artificial Sequence
  Description of Artificial Sequence: Synthetic oligonucleotide
  Antisense strand to SEQ ID NO: 1645597
accuagaggaaauaagagc

SEQ ID NO: 1645599 - RNA, 19 nt, Artificial Sequence
  Description of Artificial Sequence: Synthetic oligonucleotide
  Sense strand starting at position 3570 of SEQ ID NO: 1561083
cuaagugugugauccacaa

SEQ ID NO: 1645600 - RNA, 19 nt, Artificial Sequence
  Description of Artificial Sequence: Synthetic oligonucleotide
  Antisense strand to SEQ ID NO: 1645599
uuguggaucacacacuuag

SEQ ID NO: 1645601 - RNA, 19 nt, Artificial Sequence
  Description of Artificial Sequence: Synthetic oligonucleotide
  Sense strand starting at position 3574 of SEQ ID NO: 1561083
gugugugauccacaaguuu

SEQ ID NO: 1645602 - RNA, 19 nt, Artificial Sequence
  Description of Artificial Sequence: Synthetic oligonucleotide
  Antisense strand to SEQ ID NO: 1645601
aaacuuguggaucacacac

SEQ ID NO: 1645603 - RNA, 19 nt, Artificial Sequence
  Description of Artificial Sequence: Synthetic oligonucleotide
  Sense strand starting at position 3601 of SEQ ID NO: 1561083
gaggaugugacgggaaauc

SEQ ID NO: 1645604 - RNA, 19 nt, Artificial Sequence
  Description of Artificial Sequence: Synthetic oligonucleotide
  Antisense strand to SEQ ID NO: 1645603
gauuucccgucacauccuc

SEQ ID NO: 1645605 - RNA, 19 nt, Artificial Sequence
  Description of Artificial Sequence: Synthetic oligonucleotide
  Sense strand starting at position 3610 of SEQ ID NO: 1561083
acgggaaaucacuagccca

SEQ ID NO: 1645606 - RNA, 19 nt, Artificial Sequence
  Description of Artificial Sequence: Synthetic oligonucleotide
  Antisense strand to SEQ ID NO: 1645605
ugggcuagugauuucccgu

SEQ ID NO: 1645607 - RNA, 19 nt, Artificial Sequence
  Description of Artificial Sequence: Synthetic oligonucleotide
  Sense strand starting at position 3624 of SEQ ID NO: 1561083
gcccaaggccaucaucaaa

SEQ ID NO: 1645608 - RNA, 19 nt, Artificial Sequence
  Description of Artificial Sequence: Synthetic oligonucleotide
  Antisense strand to SEQ ID NO: 1645607
uuugaugauggccuugggc

SEQ ID NO: 1645609 - RNA, 19 nt, Artificial Sequence
  Description of Artificial Sequence: Synthetic oligonucleotide
  Sense strand starting at position 3858 of SEQ ID NO: 1561083
gcccacuuagcagauaaga

SEQ ID NO: 1645610 - RNA, 19 nt, Artificial Sequence
  Description of Artificial Sequence: Synthetic oligonucleotide
  Antisense strand to SEQ ID NO: 1645609
ucuuaucugcuaagugggc

SEQ ID NO: 1645611 - RNA, 19 nt, Artificial Sequence
  Description of Artificial Sequence: Synthetic oligonucleotide
  Sense strand starting at position 3881 of SEQ ID NO: 1561083
ugagccuaugguggagaau

SEQ ID NO: 1645612 - RNA, 19 nt, Artificial Sequence
  Description of Artificial Sequence: Synthetic oligonucleotide
  Antisense strand to SEQ ID NO: 1645611
auucuccaccauaggcuca

SEQ ID NO: 1645613 - RNA, 19 nt, Artificial Sequence
  Description of Artificial Sequence: Synthetic oligonucleotide
  Sense strand starting at position 3884 of SEQ ID NO: 1561083
gccuaugguggagaauauu

SEQ ID NO: 1645614 - RNA, 19 nt, Artificial Sequence
  Description of Artificial Sequence: Synthetic oligonucleotide
  Antisense strand to SEQ ID NO: 1645613
aauauucuccaccauaggc

SEQ ID NO: 1645615 - RNA, 19 nt, Artificial Sequence
  Description of Artificial Sequence: Synthetic oligonucleotide
  Sense strand starting at position 3894 of SEQ ID NO: 1561083
gagaauauuccuuggugga

SEQ ID NO: 1645616 - RNA, 19 nt, Artificial Sequence
  Description of Artificial Sequence: Synthetic oligonucleotide
  Antisense strand to SEQ ID NO: 1645615
uccaccaaggaauauucuc

SEQ ID NO: 1645617 - RNA, 19 nt, Artificial Sequence
  Description of Artificial Sequence: Synthetic oligonucleotide
  Sense strand starting at position 3895 of SEQ ID NO: 1561083
agaauauuccuugguggaa

SEQ ID NO: 1645618 - RNA, 19 nt, Artificial Sequence
  Description of Artificial Sequence: Synthetic oligonucleotide
  Antisense strand to SEQ ID NO: 1645617
uuccaccaaggaauauucu

SEQ ID NO: 1645619 - RNA, 19 nt, Artificial Sequence
  Description of Artificial Sequence: Synthetic oligonucleotide
  Sense strand starting at position 3896 of SEQ ID NO: 1561083
gaauauuccuugguggaag

SEQ ID NO: 1645620 - RNA, 19 nt, Artificial Sequence
  Description of Artificial Sequence: Synthetic oligonucleotide
  Antisense strand to SEQ ID NO: 1645619
cuuccaccaaggaauauuc

SEQ ID NO: 1645621 - RNA, 19 nt, Artificial Sequence
  Description of Artificial Sequence: Synthetic oligonucleotide
  Sense strand starting at position 3952 of SEQ ID NO: 1561083
guaaguaauggccaguaac

SEQ ID NO: 1645622 - RNA, 19 nt, Artificial Sequence
  Description of Artificial Sequence: Synthetic oligonucleotide
  Antisense strand to SEQ ID NO: 1645621
guuacuggccauuacuuac

SEQ ID NO: 1645623 - RNA, 19 nt, Artificial Sequence
  Description of Artificial Sequence: Synthetic oligonucleotide
  Sense strand starting at position 52 of SEQ ID NO: 1561084
ucaggaguauggccucaau

SEQ ID NO: 1645624 - RNA, 19 nt, Artificial Sequence
  Description of Artificial Sequence: Synthetic oligonucleotide
  Antisense strand to SEQ ID NO: 1645623
auugaggccauacuccuga

SEQ ID NO: 1645625 - RNA, 19 nt, Artificial Sequence
  Description of Artificial Sequence: Synthetic oligonucleotide
  Sense strand starting at position 55 of SEQ ID NO: 1561084
ggaguauggccucaauucu

SEQ ID NO: 1645626 - RNA, 19 nt, Artificial Sequence
  Description of Artificial Sequence: Synthetic oligonucleotide
  Antisense strand to SEQ ID NO: 1645625
agaauugaggccauacucc

SEQ ID NO: 1645627 - RNA, 19 nt, Artificial Sequence
  Description of Artificial Sequence: Synthetic oligonucleotide
  Sense strand starting at position 377 of SEQ ID NO: 1561084
gccaguauggcgucaauuc

SEQ ID NO: 1645628 - RNA, 19 nt, Artificial Sequence
  Description of Artificial Sequence: Synthetic oligonucleotide
  Antisense strand to SEQ ID NO: 1645627
gaauugacgccauacuggc

SEQ ID NO: 1645629 - RNA, 19 nt, Artificial Sequence
  Description of Artificial Sequence: Synthetic oligonucleotide
  Sense strand starting at position 378 of SEQ ID NO: 1561084
ccaguauggcgucaauucu

SEQ ID NO: 1645630 - RNA, 19 nt, Artificial Sequence
  Description of Artificial Sequence: Synthetic oligonucleotide
  Antisense strand to SEQ ID NO: 1645629
agaauugacgccauacugg

SEQ ID NO: 1645631 - RNA, 19 nt, Artificial Sequence
  Description of Artificial Sequence: Synthetic oligonucleotide
  Sense strand starting at position 387 of SEQ ID NO: 1561084
cgucaauucuaagggcaac

SEQ ID NO: 1645632 - RNA, 19 nt, Artificial Sequence
  Description of Artificial Sequence: Synthetic oligonucleotide
  Antisense strand to SEQ ID NO: 1645631
guugcccuuagaauugacg

SEQ ID NO: 1645633 - RNA, 19 nt, Artificial Sequence
  Description of Artificial Sequence: Synthetic oligonucleotide
  Sense strand starting at position 516 of SEQ ID NO: 1561084
cugcaagucuuucugaaga

SEQ ID NO: 1645634 - RNA, 19 nt, Artificial Sequence
  Description of Artificial Sequence: Synthetic oligonucleotide
  Antisense strand to SEQ ID NO: 1645633
ucuucagaaagacuugcag

SEQ ID NO: 1645635 - RNA, 19 nt, Artificial Sequence
  Description of Artificial Sequence: Synthetic oligonucleotide
  Sense strand starting at position 617 of SEQ ID NO: 1561084
ucuuccuucugccaaggau

SEQ ID NO: 1645636 - RNA, 19 nt, Artificial Sequence
  Description of Artificial Sequence: Synthetic oligonucleotide
  Antisense strand to SEQ ID NO: 1645635
auccuuggcagaaggaaga

SEQ ID NO: 1645637 - RNA, 19 nt, Artificial Sequence
  Description of Artificial Sequence: Synthetic oligonucleotide
  Sense strand starting at position 917 of SEQ ID NO: 1561084
ugaggucugcucugauaga

SEQ ID NO: 1645638 - RNA, 19 nt, Artificial Sequence
  Description of Artificial Sequence: Synthetic oligonucleotide
  Antisense strand to SEQ ID NO: 1645637
ucuaucagagcagaccuca

SEQ ID NO: 1645639 - RNA, 19 nt, Artificial Sequence
  Description of Artificial Sequence: Synthetic oligonucleotide
  Sense strand starting at position 918 of SEQ ID NO: 1561084
gaggucugcucugauagaa

SEQ ID NO: 1645640 - RNA, 19 nt, Artificial Sequence
  Description of Artificial Sequence: Synthetic oligonucleotide
  Antisense strand to SEQ ID NO: 1645639
uucuaucagagcagaccuc

SEQ ID NO: 1645641 - RNA, 19 nt, Artificial Sequence
  Description of Artificial Sequence: Synthetic oligonucleotide
  Sense strand starting at position 987 of SEQ ID NO: 1561084
gagcaagucccucagagac

SEQ ID NO: 1645642 - RNA, 19 nt, Artificial Sequence
  Description of Artificial Sequence: Synthetic oligonucleotide
  Antisense strand to SEQ ID NO: 1645641
gucucugagggacuugcuc

SEQ ID NO: 1645643 - RNA, 19 nt, Artificial Sequence
  Description of Artificial Sequence: Synthetic oligonucleotide
  Sense strand starting at position 1060 of SEQ ID NO: 1561084
gcaugaauccaguguccca

SEQ ID NO: 1645644 - RNA, 19 nt, Artificial Sequence
  Description of Artificial Sequence: Synthetic oligonucleotide
  Antisense strand to SEQ ID NO: 1645643
ugggacacuggauucaugc

SEQ ID NO: 1645645 - RNA, 19 nt, Artificial Sequence
  Description of Artificial Sequence: Synthetic oligonucleotide
  Sense strand starting at position 1097 of SEQ ID NO: 1561084
ccaaacaaguccuggaaua

SEQ ID NO: 1645646 - RNA, 19 nt, Artificial Sequence
  Description of Artificial Sequence: Synthetic oligonucleotide
  Antisense strand to SEQ ID NO: 1645645
uauuccaggacuuguuugg

SEQ ID NO: 1645647 - RNA, 19 nt, Artificial Sequence
  Description of Artificial Sequence: Synthetic oligonucleotide
  Sense strand starting at position 1199 of SEQ ID NO: 1561084
uguaaacgaucccgaggaa

SEQ ID NO: 1645648 - RNA, 19 nt, Artificial Sequence
  Description of Artificial Sequence: Synthetic oligonucleotide
  Antisense strand to SEQ ID NO: 1645647
uuccucgggaucguuuaca

SEQ ID NO: 1645649 - RNA, 19 nt, Artificial Sequence
  Description of Artificial Sequence: Synthetic oligonucleotide
  Sense strand starting at position 1202 of SEQ ID NO: 1561084
aaacgaucccgaggaaacu

SEQ ID NO: 1645650 - RNA, 19 nt, Artificial Sequence
  Description of Artificial Sequence: Synthetic oligonucleotide
  Antisense strand to SEQ ID NO: 1645649
aguuuccucgggaucguuu

SEQ ID NO: 1645651 - RNA, 19 nt, Artificial Sequence
  Description of Artificial Sequence: Synthetic oligonucleotide
  Sense strand starting at position 1237 of SEQ ID NO: 1561084
cgggaaguccuuuauagag

SEQ ID NO: 1645652 - RNA, 19 nt, Artificial Sequence
  Description of Artificial Sequence: Synthetic oligonucleotide
  Antisense strand to SEQ ID NO: 1645651
cucuauaaaggacuucccg

SEQ ID NO: 1645653 - RNA, 19 nt, Artificial Sequence
  Description of Artificial Sequence: Synthetic oligonucleotide
  Sense strand starting at position 1239 of SEQ ID NO: 1561084
ggaaguccuuuauagagca

SEQ ID NO: 1645654 - RNA, 19 nt, Artificial Sequence
  Description of Artificial Sequence: Synthetic oligonucleotide
  Antisense strand to SEQ ID NO: 1645653
ugcucuauaaaggacuucc

SEQ ID NO: 1645655 - RNA, 19 nt, Artificial Sequence
  Description of Artificial Sequence: Synthetic oligonucleotide
  Sense strand starting at position 1260 of SEQ ID NO: 1561084
ucgcucaucccucagagaa

SEQ ID NO: 1645656 - RNA, 19 nt, Artificial Sequence
  Description of Artificial Sequence: Synthetic oligonucleotide
  Antisense strand to SEQ ID NO: 1645655
uucucugagggaugagcga

SEQ ID NO: 1645657 - RNA, 19 nt, Artificial Sequence
  Description of Artificial Sequence: Synthetic oligonucleotide
  Sense strand starting at position 1262 of SEQ ID NO: 1561084
gcucaucccucagagaaag

SEQ ID NO: 1645658 - RNA, 19 nt, Artificial Sequence
  Description of Artificial Sequence: Synthetic oligonucleotide
  Antisense strand to SEQ ID NO: 1645657
cuuucucugagggaugagc

SEQ ID NO: 1645659 - RNA, 19 nt, Artificial Sequence
  Description of Artificial Sequence: Synthetic oligonucleotide
  Sense strand starting at position 1370 of SEQ ID NO: 1561084
ccugaagucucucacaguu

SEQ ID NO: 1645660 - RNA, 19 nt, Artificial Sequence
  Description of Artificial Sequence: Synthetic oligonucleotide
  Antisense strand to SEQ ID NO: 1645659
aacugugagagacuucagg

SEQ ID NO: 1645661 - RNA, 19 nt, Artificial Sequence
  Description of Artificial Sequence: Synthetic oligonucleotide
  Sense strand starting at position 1545 of SEQ ID NO: 1561084
cuacucaucuuccucgaga

SEQ ID NO: 1645662 - RNA, 19 nt, Artificial Sequence
  Description of Artificial Sequence: Synthetic oligonucleotide
  Antisense strand to SEQ ID NO: 1645661
ucucgaggaagaugaguag

SEQ ID NO: 1645663 - RNA, 19 nt, Artificial Sequence
  Description of Artificial Sequence: Synthetic oligonucleotide
  Sense strand starting at position 1547 of SEQ ID NO: 1561084
acucaucuuccucgagaaa

SEQ ID NO: 1645664 - RNA, 19 nt, Artificial Sequence
  Description of Artificial Sequence: Synthetic oligonucleotide
  Antisense strand to SEQ ID NO: 1645663
uuucucgaggaagaugagu

SEQ ID NO: 1645665 - RNA, 19 nt, Artificial Sequence
  Description of Artificial Sequence: Synthetic oligonucleotide
  Sense strand starting at position 1548 of SEQ ID NO: 1561084
cucaucuuccucgagaaau

SEQ ID NO: 1645666 - RNA, 19 nt, Artificial Sequence
  Description of Artificial Sequence: Synthetic oligonucleotide
  Antisense strand to SEQ ID NO: 1645665
auuucucgaggaagaugag

SEQ ID NO: 1645667 - RNA, 19 nt, Artificial Sequence
  Description of Artificial Sequence: Synthetic oligonucleotide
  Sense strand starting at position 2483 of SEQ ID NO: 1561084
agguuaugcuucuagccca

SEQ ID NO: 1645668 - RNA, 19 nt, Artificial Sequence
  Description of Artificial Sequence: Synthetic oligonucleotide
  Antisense strand to SEQ ID NO: 1645667
ugggcuagaagcauaaccu

SEQ ID NO: 1645669 - RNA, 19 nt, Artificial Sequence
  Description of Artificial Sequence: Synthetic oligonucleotide
  Sense strand starting at position 2891 of SEQ ID NO: 1561084
aagagacaugggugcuaga

SEQ ID NO: 1645670 - RNA, 19 nt, Artificial Sequence
  Description of Artificial Sequence: Synthetic oligonucleotide
  Antisense strand to SEQ ID NO: 1645669
ucuagcacccaugucucuu

SEQ ID NO: 1645671 - RNA, 19 nt, Artificial Sequence
  Description of Artificial Sequence: Synthetic oligonucleotide
  Sense strand starting at position 2926 of SEQ ID NO: 1561084
guccgcugucuccaugaca

SEQ ID NO: 1645672 - RNA, 19 nt, Artificial Sequence
  Description of Artificial Sequence: Synthetic oligonucleotide
  Antisense strand to SEQ ID NO: 1645671
ugucauggagacagcggac

SEQ ID NO: 1645673 - RNA, 19 nt, Artificial Sequence
  Description of Artificial Sequence: Synthetic oligonucleotide
  Sense strand starting at position 3005 of SEQ ID NO: 1561084
cguggcucgcaagauauca

SEQ ID NO: 1645674 - RNA, 19 nt, Artificial Sequence
  Description of Artificial Sequence: Synthetic oligonucleotide
  Antisense strand to SEQ ID NO: 1645673
ugauaucuugcgagccacg

SEQ ID NO: 1645675 - RNA, 19 nt, Artificial Sequence
  Description of Artificial Sequence: Synthetic oligonucleotide
  Sense strand starting at position 3115 of SEQ ID NO: 1561084
ugcuccagcuuguccuaaa

SEQ ID NO: 1645676 - RNA, 19 nt, Artificial Sequence
  Description of Artificial Sequence: Synthetic oligonucleotide
  Antisense strand to SEQ ID NO: 1645675
uuuaggacaagcuggagca

SEQ ID NO: 1645677 - RNA, 19 nt, Artificial Sequence
  Description of Artificial Sequence: Synthetic oligonucleotide
  Sense strand starting at position 3116 of SEQ ID NO: 1561084
gcuccagcuuguccuaaau

SEQ ID NO: 1645678 - RNA, 19 nt, Artificial Sequence
  Description of Artificial Sequence: Synthetic oligonucleotide
  Antisense strand to SEQ ID NO: 1645677
auuuaggacaagcuggagc

SEQ ID NO: 1645679 - RNA, 19 nt, Artificial Sequence
  Description of Artificial Sequence: Synthetic oligonucleotide
  Sense strand starting at position 3145 of SEQ ID NO: 1561084
aagccucuuucggucuuaa

SEQ ID NO: 1645680 - RNA, 19 nt, Artificial Sequence
  Description of Artificial Sequence: Synthetic oligonucleotide
  Antisense strand to SEQ ID NO: 1645679
uuaagaccgaaagaggcuu

SEQ ID NO: 1645681 - RNA, 19 nt, Artificial Sequence
  Description of Artificial Sequence: Synthetic oligonucleotide
  Sense strand starting at position 3212 of SEQ ID NO: 1561084
cucagaagucucuaacugu

SEQ ID NO: 1645682 - RNA, 19 nt, Artificial Sequence
  Description of Artificial Sequence: Synthetic oligonucleotide
  Antisense strand to SEQ ID NO: 1645681
acaguuagagacuucugag

SEQ ID NO: 1645683 - RNA, 19 nt, Artificial Sequence
  Description of Artificial Sequence: Synthetic oligonucleotide
  Sense strand starting at position 3215 of SEQ ID NO: 1561084
agaagucucuaacuguaaa

SEQ ID NO: 1645684 - RNA, 19 nt, Artificial Sequence
  Description of Artificial Sequence: Synthetic oligonucleotide
  Antisense strand to SEQ ID NO: 1645683
uuuacaguuagagacuucu

SEQ ID NO: 1645685 - RNA, 19 nt, Artificial Sequence
  Description of Artificial Sequence: Synthetic oligonucleotide
  Sense strand starting at position 3241 of SEQ ID NO: 1561084
gcggucuuaacacguguga

SEQ ID NO: 1645686 - RNA, 19 nt, Artificial Sequence
  Description of Artificial Sequence: Synthetic oligonucleotide
  Antisense strand to SEQ ID NO: 1645685
ucacacguguuaagaccgc

SEQ ID NO: 1645687 - RNA, 19 nt, Artificial Sequence
  Description of Artificial Sequence: Synthetic oligonucleotide
  Sense strand starting at position 3243 of SEQ ID NO: 1561084
ggucuuaacacgugugauu

SEQ ID NO: 1645688 - RNA, 19 nt, Artificial Sequence
  Description of Artificial Sequence: Synthetic oligonucleotide
  Antisense strand to SEQ ID NO: 1645687
aaucacacguguuaagacc

SEQ ID NO: 1645689 - RNA, 19 nt, Artificial Sequence
  Description of Artificial Sequence: Synthetic oligonucleotide
  Sense strand starting at position 3265 of SEQ ID NO: 1561084
ggacacagcuaauucuuaa

SEQ ID NO: 1645690 - RNA, 19 nt, Artificial Sequence
  Description of Artificial Sequence: Synthetic oligonucleotide
  Antisense strand to SEQ ID NO: 1645689
uuaagaauuagcugugucc

SEQ ID NO: 1645691 - RNA, 19 nt, Artificial Sequence
  Description of Artificial Sequence: Synthetic oligonucleotide
  Sense strand starting at position 3291 of SEQ ID NO: 1561084
cccgaagccuugucgguua

SEQ ID NO: 1645692 - RNA, 19 nt, Artificial Sequence
  Description of Artificial Sequence: Synthetic oligonucleotide
  Antisense strand to SEQ ID NO: 1645691
uaaccgacaaggcuucggg

SEQ ID NO: 1645693 - RNA, 19 nt, Artificial Sequence
  Description of Artificial Sequence: Synthetic oligonucleotide
  Sense strand starting at position 3294 of SEQ ID NO: 1561084
gaagccuugucgguuaagu

SEQ ID NO: 1645694 - RNA, 19 nt, Artificial Sequence
  Description of Artificial Sequence: Synthetic oligonucleotide
  Antisense strand to SEQ ID NO: 1645693
acuuaaccgacaaggcuuc

SEQ ID NO: 1645695 - RNA, 19 nt, Artificial Sequence
  Description of Artificial Sequence: Synthetic oligonucleotide
  Sense strand starting at position 3296 of SEQ ID NO: 1561084
agccuugucgguuaagucu

SEQ ID NO: 1645696 - RNA, 19 nt, Artificial Sequence
  Description of Artificial Sequence: Synthetic oligonucleotide
  Antisense strand to SEQ ID NO: 1645695
agacuuaaccgacaaggcu

SEQ ID NO: 1645697 - RNA, 19 nt, Artificial Sequence
  Description of Artificial Sequence: Synthetic oligonucleotide
  Sense strand starting at position 3744 of SEQ ID NO: 1561084
gccugauuccaaugcauuu

SEQ ID NO: 1645698 - RNA, 19 nt, Artificial Sequence
  Description of Artificial Sequence: Synthetic oligonucleotide
  Antisense strand to SEQ ID NO: 1645697
aaaugcauuggaaucaggc

SEQ ID NO: 1645699 - RNA, 19 nt, Artificial Sequence
  Description of Artificial Sequence: Synthetic oligonucleotide
  Sense strand starting at position 3891 of SEQ ID NO: 1561084
gcuuucugggccuggaaga

SEQ ID NO: 1645700 - RNA, 19 nt, Artificial Sequence
  Description of Artificial Sequence: Synthetic oligonucleotide
  Antisense strand to SEQ ID NO: 1645699
ucuuccaggcccagaaagc

SEQ ID NO: 1645701 - RNA, 19 nt, Artificial Sequence
  Description of Artificial Sequence: Synthetic oligonucleotide
  Sense strand starting at position 3902 of SEQ ID NO: 1561084
cuggaagagucagcaauga

SEQ ID NO: 1645702 - RNA, 19 nt, Artificial Sequence
  Description of Artificial Sequence: Synthetic oligonucleotide
  Antisense strand to SEQ ID NO: 1645701
ucauugcugacucuuccag

SEQ ID NO: 1645703 - RNA, 19 nt, Artificial Sequence
  Description of Artificial Sequence: Synthetic oligonucleotide
  Sense strand starting at position 40 of SEQ ID NO: 1561085
guuugaggcucucagagaa

SEQ ID NO: 1645704 - RNA, 19 nt, Artificial Sequence
  Description of Artificial Sequence: Synthetic oligonucleotide
  Antisense strand to SEQ ID NO: 1645703
uucucugagagccucaaac

SEQ ID NO: 1645705 - RNA, 19 nt, Artificial Sequence
  Description of Artificial Sequence: Synthetic oligonucleotide
  Sense strand starting at position 104 of SEQ ID NO: 1561085
gacugaaaguaauauguca

SEQ ID NO: 1645706 - RNA, 19 nt, Artificial Sequence
  Description of Artificial Sequence: Synthetic oligonucleotide
  Antisense strand to SEQ ID NO: 1645705
ugacauauuacuuucaguc

SEQ ID NO: 1645707 - RNA, 19 nt, Artificial Sequence
  Description of Artificial Sequence: Synthetic oligonucleotide
  Sense strand starting at position 130 of SEQ ID NO: 1561085
agguuucaguggcuguuua

SEQ ID NO: 1645708 - RNA, 19 nt, Artificial Sequence
  Description of Artificial Sequence: Synthetic oligonucleotide
  Antisense strand to SEQ ID NO: 1645707
uaaacagccacugaaaccu

SEQ ID NO: 1645709 - RNA, 19 nt, Artificial Sequence
  Description of Artificial Sequence: Synthetic oligonucleotide
  Sense strand starting at position 156 of SEQ ID NO: 1561085
caggaagaauucuggcauu

SEQ ID NO: 1645710 - RNA, 19 nt, Artificial Sequence
  Description of Artificial Sequence: Synthetic oligonucleotide
  Antisense strand to SEQ ID NO: 1645709
aaugccagaauucuuccug

SEQ ID NO: 1645711 - RNA, 19 nt, Artificial Sequence
  Description of Artificial Sequence: Synthetic oligonucleotide
  Sense strand starting at position 159 of SEQ ID NO: 1561085
gaagaauucuggcauugac

SEQ ID NO: 1645712 - RNA, 19 nt, Artificial Sequence
  Description of Artificial Sequence: Synthetic oligonucleotide
  Antisense strand to SEQ ID NO: 1645711
gucaaugccagaauucuuc

SEQ ID NO: 1645713 - RNA, 19 nt, Artificial Sequence
  Description of Artificial Sequence: Synthetic oligonucleotide
  Sense strand starting at position 551 of SEQ ID NO: 1561085
aggguaaagugguuucaga

SEQ ID NO: 1645714 - RNA, 19 nt, Artificial Sequence
  Description of Artificial Sequence: Synthetic oligonucleotide
  Antisense strand to SEQ ID NO: 1645713
ucugaaaccacuuuacccu

SEQ ID NO: 1645715 - RNA, 19 nt, Artificial Sequence
  Description of Artificial Sequence: Synthetic oligonucleotide
  Sense strand starting at position 602 of SEQ ID NO: 1561085
ucaggucagccugagaguu

SEQ ID NO: 1645716 - RNA, 19 nt, Artificial Sequence
  Description of Artificial Sequence: Synthetic oligonucleotide
  Antisense strand to SEQ ID NO: 1645715
aacucucaggcugaccuga

SEQ ID NO: 1645717 - RNA, 19 nt, Artificial Sequence
  Description of Artificial Sequence: Synthetic oligonucleotide
  Sense strand starting at position 687 of SEQ ID NO: 1561085
agggcuucuccaugugauc

SEQ ID NO: 1645718 - RNA, 19 nt, Artificial Sequence
  Description of Artificial Sequence: Synthetic oligonucleotide
  Antisense strand to SEQ ID NO: 1645717
gaucacauggagaagcccu

SEQ ID NO: 1645719 - RNA, 19 nt, Artificial Sequence
  Description of Artificial Sequence: Synthetic oligonucleotide
  Sense strand starting at position 785 of SEQ ID NO: 1561085
gggagguauggcugaggua

SEQ ID NO: 1645720 - RNA, 19 nt, Artificial Sequence
  Description of Artificial Sequence: Synthetic oligonucleotide
  Antisense strand to SEQ ID NO: 1645719
uaccucagccauaccuccc

SEQ ID NO: 1645721 - RNA, 19 nt, Artificial Sequence
  Description of Artificial Sequence: Synthetic oligonucleotide
  Sense strand starting at position 857 of SEQ ID NO: 1561085
cccggaggucugcagagau

SEQ ID NO: 1645722 - RNA, 19 nt, Artificial Sequence
  Description of Artificial Sequence: Synthetic oligonucleotide
  Antisense strand to SEQ ID NO: 1645721
aucucugcagaccuccggg

SEQ ID NO: 1645723 - RNA, 19 nt, Artificial Sequence
  Description of Artificial Sequence: Synthetic oligonucleotide
  Sense strand starting at position 870 of SEQ ID NO: 1561085
agagaugggucagaggaga

SEQ ID NO: 1645724 - RNA, 19 nt, Artificial Sequence
  Description of Artificial Sequence: Synthetic oligonucleotide
  Antisense strand to SEQ ID NO: 1645723
ucuccucugacccaucucu

SEQ ID NO: 1645725 - RNA, 19 nt, Artificial Sequence
  Description of Artificial Sequence: Synthetic oligonucleotide
  Sense strand starting at position 973 of SEQ ID NO: 1561085
gcauccauguuguuuggua

SEQ ID NO: 1645726 - RNA, 19 nt, Artificial Sequence
  Description of Artificial Sequence: Synthetic oligonucleotide
  Antisense strand to SEQ ID NO: 1645725
uaccaaacaacauggaugc

SEQ ID NO: 1645727 - RNA, 19 nt, Artificial Sequence
  Description of Artificial Sequence: Synthetic oligonucleotide
  Sense strand starting at position 974 of SEQ ID NO: 1561085
cauccauguuguuugguaa

SEQ ID NO: 1645728 - RNA, 19 nt, Artificial Sequence
  Description of Artificial Sequence: Synthetic oligonucleotide
  Antisense strand to SEQ ID NO: 1645727
uuaccaaacaacauggaug

SEQ ID NO: 1645729 - RNA, 19 nt, Artificial Sequence
  Description of Artificial Sequence: Synthetic oligonucleotide
  Sense strand starting at position 975 of SEQ ID NO: 1561085
auccauguuguuugguaaa

SEQ ID NO: 1645730 - RNA, 19 nt, Artificial Sequence
  Description of Artificial Sequence: Synthetic oligonucleotide
  Antisense strand to SEQ ID NO: 1645729
uuuaccaaacaacauggau

SEQ ID NO: 1645731 - RNA, 19 nt, Artificial Sequence
  Description of Artificial Sequence: Synthetic oligonucleotide
  Sense strand starting at position 977 of SEQ ID NO: 1561085
ccauguuguuugguaaaga

SEQ ID NO: 1645732 - RNA, 19 nt, Artificial Sequence
  Description of Artificial Sequence: Synthetic oligonucleotide
  Antisense strand to SEQ ID NO: 1645731
ucuuuaccaaacaacaugg

SEQ ID NO: 1645733 - RNA, 19 nt, Artificial Sequence
  Description of Artificial Sequence: Synthetic oligonucleotide
  Sense strand starting at position 978 of SEQ ID NO: 1561085
cauguuguuugguaaagaa

SEQ ID NO: 1645734 - RNA, 19 nt, Artificial Sequence
  Description of Artificial Sequence: Synthetic oligonucleotide
  Antisense strand to SEQ ID NO: 1645733
uucuuuaccaaacaacaug

SEQ ID NO: 1645735 - RNA, 19 nt, Artificial Sequence
  Description of Artificial Sequence: Synthetic oligonucleotide
  Sense strand starting at position 988 of SEQ ID NO: 1561085
gguaaagaaucccaucauu

SEQ ID NO: 1645736 - RNA, 19 nt, Artificial Sequence
  Description of Artificial Sequence: Synthetic oligonucleotide
  Antisense strand to SEQ ID NO: 1645735
aaugaugggauucuuuacc

SEQ ID NO: 1645737 - RNA, 19 nt, Artificial Sequence
  Description of Artificial Sequence: Synthetic oligonucleotide
  Sense strand starting at position 1077 of SEQ ID NO: 1561085
ugauuauaauugccuguga

SEQ ID NO: 1645738 - RNA, 19 nt, Artificial Sequence
  Description of Artificial Sequence: Synthetic oligonucleotide
  Antisense strand to SEQ ID NO: 1645737
ucacaggcaauuauaauca

SEQ ID NO: 1645739 - RNA, 19 nt, Artificial Sequence
  Description of Artificial Sequence: Synthetic oligonucleotide
  Sense strand starting at position 1078 of SEQ ID NO: 1561085
gauuauaauugccugugaa

SEQ ID NO: 1645740 - RNA, 19 nt, Artificial Sequence
  Description of Artificial Sequence: Synthetic oligonucleotide
  Antisense strand to SEQ ID NO: 1645739
uucacaggcaauuauaauc

SEQ ID NO: 1645741 - RNA, 19 nt, Artificial Sequence
  Description of Artificial Sequence: Synthetic oligonucleotide
  Sense strand starting at position 1079 of SEQ ID NO: 1561085
auuauaauugccugugaaa

SEQ ID NO: 1645742 - RNA, 19 nt, Artificial Sequence
  Description of Artificial Sequence: Synthetic oligonucleotide
  Antisense strand to SEQ ID NO: 1645741
uuucacaggcaauuauaau

SEQ ID NO: 1645743 - RNA, 19 nt, Artificial Sequence
  Description of Artificial Sequence: Synthetic oligonucleotide
  Sense strand starting at position 1081 of SEQ ID NO: 1561085
uauaauugccugugaaagu

SEQ ID NO: 1645744 - RNA, 19 nt, Artificial Sequence
  Description of Artificial Sequence: Synthetic oligonucleotide
  Antisense strand to SEQ ID NO: 1645743
acuuucacaggcaauuaua

SEQ ID NO: 1645745 - RNA, 19 nt, Artificial Sequence
  Description of Artificial Sequence: Synthetic oligonucleotide
  Sense strand starting at position 2409 of SEQ ID NO: 1561085
gucccaugauccgaggaau

SEQ ID NO: 1645746 - RNA, 19 nt, Artificial Sequence
  Description of Artificial Sequence: Synthetic oligonucleotide
  Antisense strand to SEQ ID NO: 1645745
auuccucggaucaugggac

SEQ ID NO: 1645747 - RNA, 19 nt, Artificial Sequence
  Description of Artificial Sequence: Synthetic oligonucleotide
  Sense strand starting at position 2412 of SEQ ID NO: 1561085
ccaugauccgaggaaucgu

SEQ ID NO: 1645748 - RNA, 19 nt, Artificial Sequence
  Description of Artificial Sequence: Synthetic oligonucleotide
  Antisense strand to SEQ ID NO: 1645747
acgauuccucggaucaugg

SEQ ID NO: 1645749 - RNA, 19 nt, Artificial Sequence
  Description of Artificial Sequence: Synthetic oligonucleotide
  Sense strand starting at position 2588 of SEQ ID NO: 1561085
gaagucagcccaugaugca

SEQ ID NO: 1645750 - RNA, 19 nt, Artificial Sequence
  Description of Artificial Sequence: Synthetic oligonucleotide
  Antisense strand to SEQ ID NO: 1645749
ugcaucaugggcugacuuc

SEQ ID NO: 1645751 - RNA, 19 nt, Artificial Sequence
  Description of Artificial Sequence: Synthetic oligonucleotide
  Sense strand starting at position 2630 of SEQ ID NO: 1561085
ggccucucaccuugaggaa

SEQ ID NO: 1645752 - RNA, 19 nt, Artificial Sequence
  Description of Artificial Sequence: Synthetic oligonucleotide
  Antisense strand to SEQ ID NO: 1645751
uuccucaaggugagaggcc

SEQ ID NO: 1645753 - RNA, 19 nt, Artificial Sequence
  Description of Artificial Sequence: Synthetic oligonucleotide
  Sense strand starting at position 2745 of SEQ ID NO: 1561085
gcuccaaauccuuauggca

SEQ ID NO: 1645754 - RNA, 19 nt, Artificial Sequence
  Description of Artificial Sequence: Synthetic oligonucleotide
  Antisense strand to SEQ ID NO: 1645753
ugccauaaggauuuggagc

SEQ ID NO: 1645755 - RNA, 19 nt, Artificial Sequence
  Description of Artificial Sequence: Synthetic oligonucleotide
  Sense strand starting at position 2971 of SEQ ID NO: 1561085
gcaccaagggcagauauau

SEQ ID NO: 1645756 - RNA, 19 nt, Artificial Sequence
  Description of Artificial Sequence: Synthetic oligonucleotide
  Antisense strand to SEQ ID NO: 1645755
auauaucugcccuuggugc

SEQ ID NO: 1645757 - RNA, 19 nt, Artificial Sequence
  Description of Artificial Sequence: Synthetic oligonucleotide
  Sense strand starting at position 2992 of SEQ ID NO: 1561085
gggcuuauauacccucagu

SEQ ID NO: 1645758 - RNA, 19 nt, Artificial Sequence
  Description of Artificial Sequence: Synthetic oligonucleotide
  Antisense strand to SEQ ID NO: 1645757
acugaggguauauaagccc

SEQ ID NO: 1645759 - RNA, 19 nt, Artificial Sequence
  Description of Artificial Sequence: Synthetic oligonucleotide
  Sense strand starting at position 3216 of SEQ ID NO: 1561085
ucagauguggccugccuau

SEQ ID NO: 1645760 - RNA, 19 nt, Artificial Sequence
  Description of Artificial Sequence: Synthetic oligonucleotide
  Antisense strand to SEQ ID NO: 1645759
auaggcaggccacaucuga

SEQ ID NO: 1645761 - RNA, 19 nt, Artificial Sequence
  Description of Artificial Sequence: Synthetic oligonucleotide
  Sense strand starting at position 3266 of SEQ ID NO: 1561085
gaaccaagugcugguuaua

SEQ ID NO: 1645762 - RNA, 19 nt, Artificial Sequence
  Description of Artificial Sequence: Synthetic oligonucleotide
  Antisense strand to SEQ ID NO: 1645761
uauaaccagcacuugguuc

SEQ ID NO: 1645763 - RNA, 19 nt, Artificial Sequence
  Description of Artificial Sequence: Synthetic oligonucleotide
  Sense strand starting at position 3269 of SEQ ID NO: 1561085
ccaagugcugguuauauau

SEQ ID NO: 1645764 - RNA, 19 nt, Artificial Sequence
  Description of Artificial Sequence: Synthetic oligonucleotide
  Antisense strand to SEQ ID NO: 1645763
auauauaaccagcacuugg

SEQ ID NO: 1645765 - RNA, 19 nt, Artificial Sequence
  Description of Artificial Sequence: Synthetic oligonucleotide
  Sense strand starting at position 3314 of SEQ ID NO: 1561085
agagguccuagauggcaaa

SEQ ID NO: 1645766 - RNA, 19 nt, Artificial Sequence
  Description of Artificial Sequence: Synthetic oligonucleotide
  Antisense strand to SEQ ID NO: 1645765
uuugccaucuaggaccucu

SEQ ID NO: 1645767 - RNA, 19 nt, Artificial Sequence
  Description of Artificial Sequence: Synthetic oligonucleotide
  Sense strand starting at position 3412 of SEQ ID NO: 1561085
acucacaucuugucuauga

SEQ ID NO: 1645768 - RNA, 19 nt, Artificial Sequence
  Description of Artificial Sequence: Synthetic oligonucleotide
  Antisense strand to SEQ ID NO: 1645767
ucauagacaagaugugagu

SEQ ID NO: 1645769 - RNA, 19 nt, Artificial Sequence
  Description of Artificial Sequence: Synthetic oligonucleotide
  Sense strand starting at position 3484 of SEQ ID NO: 1561085
ggccuacaguccuuuauua

SEQ ID NO: 1645770 - RNA, 19 nt, Artificial Sequence
  Description of Artificial Sequence: Synthetic oligonucleotide
  Antisense strand to SEQ ID NO: 1645769
uaauaaaggacuguaggcc

SEQ ID NO: 1645771 - RNA, 19 nt, Artificial Sequence
  Description of Artificial Sequence: Synthetic oligonucleotide
  Sense strand starting at position 3486 of SEQ ID NO: 1561085
ccuacaguccuuuauuaga

SEQ ID NO: 1645772 - RNA, 19 nt, Artificial Sequence
  Description of Artificial Sequence: Synthetic oligonucleotide
  Antisense strand to SEQ ID NO: 1645771
ucuaauaaaggacuguagg

SEQ ID NO: 1645773 - RNA, 19 nt, Artificial Sequence
  Description of Artificial Sequence: Synthetic oligonucleotide
  Sense strand starting at position 3494 of SEQ ID NO: 1561085
ccuuuauuagagcgagagu

SEQ ID NO: 1645774 - RNA, 19 nt, Artificial Sequence
  Description of Artificial Sequence: Synthetic oligonucleotide
  Antisense strand to SEQ ID NO: 1645773
acucucgcucuaauaaagg

SEQ ID NO: 1645775 - RNA, 19 nt, Artificial Sequence
  Description of Artificial Sequence: Synthetic oligonucleotide
  Sense strand starting at position 3721 of SEQ ID NO: 1561085
ccgguuuacgcaggaaaua

SEQ ID NO: 1645776 - RNA, 19 nt, Artificial Sequence
  Description of Artificial Sequence: Synthetic oligonucleotide
  Antisense strand to SEQ ID NO: 1645775
uauuuccugcguaaaccgg

SEQ ID NO: 1645777 - RNA, 19 nt, Artificial Sequence
  Description of Artificial Sequence: Synthetic oligonucleotide
  Sense strand starting at position 3731 of SEQ ID NO: 1561085
caggaaauaguccaguucu

SEQ ID NO: 1645778 - RNA, 19 nt, Artificial Sequence
  Description of Artificial Sequence: Synthetic oligonucleotide
  Antisense strand to SEQ ID NO: 1645777
agaacuggacuauuuccug

SEQ ID NO: 1645779 - RNA, 19 nt, Artificial Sequence
  Description of Artificial Sequence: Synthetic oligonucleotide
  Sense strand starting at position 3744 of SEQ ID NO: 1561085
aguucucagaaguggucua

SEQ ID NO: 1645780 - RNA, 19 nt, Artificial Sequence
  Description of Artificial Sequence: Synthetic oligonucleotide
  Antisense strand to SEQ ID NO: 1645779
uagaccacuucugagaacu

SEQ ID NO: 1645781 - RNA, 19 nt, Artificial Sequence
  Description of Artificial Sequence: Synthetic oligonucleotide
  Sense strand starting at position 3745 of SEQ ID NO: 1561085
guucucagaaguggucuaa

SEQ ID NO: 1645782 - RNA, 19 nt, Artificial Sequence
  Description of Artificial Sequence: Synthetic oligonucleotide
  Antisense strand to SEQ ID NO: 1645781
uuagaccacuucugagaac

SEQ ID NO: 1645783 - RNA, 19 nt, Artificial Sequence
  Description of Artificial Sequence: Synthetic oligonucleotide
  Sense strand starting at position 10 of SEQ ID NO: 1561086
ggcacuaccucucugaguu

SEQ ID NO: 1645784 - RNA, 19 nt, Artificial Sequence
  Description of Artificial Sequence: Synthetic oligonucleotide
  Antisense strand to SEQ ID NO: 1645783
aacucagagagguagugcc

SEQ ID NO: 1645785 - RNA, 19 nt, Artificial Sequence
  Description of Artificial Sequence: Synthetic oligonucleotide
  Sense strand starting at position 11 of SEQ ID NO: 1561086
gcacuaccucucugaguua

SEQ ID NO: 1645786 - RNA, 19 nt, Artificial Sequence
  Description of Artificial Sequence: Synthetic oligonucleotide
  Antisense strand to SEQ ID NO: 1645785
uaacucagagagguagugc

SEQ ID NO: 1645787 - RNA, 19 nt, Artificial Sequence
  Description of Artificial Sequence: Synthetic oligonucleotide
  Sense strand starting at position 14 of SEQ ID NO: 1561086
cuaccucucugaguuacau

SEQ ID NO: 1645788 - RNA, 19 nt, Artificial Sequence
  Description of Artificial Sequence: Synthetic oligonucleotide
  Antisense strand to SEQ ID NO: 1645787
auguaacucagagagguag

SEQ ID NO: 1645789 - RNA, 19 nt, Artificial Sequence
  Description of Artificial Sequence: Synthetic oligonucleotide
  Sense strand starting at position 81 of SEQ ID NO: 1561086
ccagcaucagcaugaaaug

SEQ ID NO: 1645790 - RNA, 19 nt, Artificial Sequence
  Description of Artificial Sequence: Synthetic oligonucleotide
  Antisense strand to SEQ ID NO: 1645789
cauuucaugcugaugcugg

SEQ ID NO: 1645791 - RNA, 19 nt, Artificial Sequence
  Description of Artificial Sequence: Synthetic oligonucleotide
  Sense strand starting at position 97 of SEQ ID NO: 1561086
auggauuccggcugagaca

SEQ ID NO: 1645792 - RNA, 19 nt, Artificial Sequence
  Description of Artificial Sequence: Synthetic oligonucleotide
  Antisense strand to SEQ ID NO: 1645791
ugucucagccggaauccau

SEQ ID NO: 1645793 - RNA, 19 nt, Artificial Sequence
  Description of Artificial Sequence: Synthetic oligonucleotide
  Sense strand starting at position 98 of SEQ ID NO: 1561086
uggauuccggcugagacaa

SEQ ID NO: 1645794 - RNA, 19 nt, Artificial Sequence
  Description of Artificial Sequence: Synthetic oligonucleotide
  Antisense strand to SEQ ID NO: 1645793
uugucucagccggaaucca

SEQ ID NO: 1645795 - RNA, 19 nt, Artificial Sequence
  Description of Artificial Sequence: Synthetic oligonucleotide
  Sense strand starting at position 162 of SEQ ID NO: 1561086
ggcuaaagccauggcuauu

SEQ ID NO: 1645796 - RNA, 19 nt, Artificial Sequence
  Description of Artificial Sequence: Synthetic oligonucleotide
  Antisense strand to SEQ ID NO: 1645795
aauagccauggcuuuagcc

SEQ ID NO: 1645797 - RNA, 19 nt, Artificial Sequence
  Description of Artificial Sequence: Synthetic oligonucleotide
  Sense strand starting at position 325 of SEQ ID NO: 1561086
uuucuaagacuuugcugga

SEQ ID NO: 1645798 - RNA, 19 nt, Artificial Sequence
  Description of Artificial Sequence: Synthetic oligonucleotide
  Antisense strand to SEQ ID NO: 1645797
uccagcaaagucuuagaaa

SEQ ID NO: 1645799 - RNA, 19 nt, Artificial Sequence
  Description of Artificial Sequence: Synthetic oligonucleotide
  Sense strand starting at position 326 of SEQ ID NO: 1561086
uucuaagacuuugcuggau

SEQ ID NO: 1645800 - RNA, 19 nt, Artificial Sequence
  Description of Artificial Sequence: Synthetic oligonucleotide
  Antisense strand to SEQ ID NO: 1645799
auccagcaaagucuuagaa

SEQ ID NO: 1645801 - RNA, 19 nt, Artificial Sequence
  Description of Artificial Sequence: Synthetic oligonucleotide
  Sense strand starting at position 374 of SEQ ID NO: 1561086
ucuggcuucugaucccaga

SEQ ID NO: 1645802 - RNA, 19 nt, Artificial Sequence
  Description of Artificial Sequence: Synthetic oligonucleotide
  Antisense strand to SEQ ID NO: 1645801
ucugggaucagaagccaga

SEQ ID NO: 1645803 - RNA, 19 nt, Artificial Sequence
  Description of Artificial Sequence: Synthetic oligonucleotide
  Sense strand starting at position 408 of SEQ ID NO: 1561086
aucucuugucaagaaguga

SEQ ID NO: 1645804 - RNA, 19 nt, Artificial Sequence
  Description of Artificial Sequence: Synthetic oligonucleotide
  Antisense strand to SEQ ID NO: 1645803
ucacuucuugacaagagau

SEQ ID NO: 1645805 - RNA, 19 nt, Artificial Sequence
  Description of Artificial Sequence: Synthetic oligonucleotide
  Sense strand starting at position 799 of SEQ ID NO: 1561086
guguauggccaagauguga

SEQ ID NO: 1645806 - RNA, 19 nt, Artificial Sequence
  Description of Artificial Sequence: Synthetic oligonucleotide
  Antisense strand to SEQ ID NO: 1645805
ucacaucuuggccauacac

SEQ ID NO: 1645807 - RNA, 19 nt, Artificial Sequence
  Description of Artificial Sequence: Synthetic oligonucleotide
  Sense strand starting at position 885 of SEQ ID NO: 1561086
ggacaacaguguuccuaag

SEQ ID NO: 1645808 - RNA, 19 nt, Artificial Sequence
  Description of Artificial Sequence: Synthetic oligonucleotide
  Antisense strand to SEQ ID NO: 1645807
cuuaggaacacuguugucc

SEQ ID NO: 1645809 - RNA, 19 nt, Artificial Sequence
  Description of Artificial Sequence: Synthetic oligonucleotide
  Sense strand starting at position 887 of SEQ ID NO: 1561086
acaacaguguuccuaagac

SEQ ID NO: 1645810 - RNA, 19 nt, Artificial Sequence
  Description of Artificial Sequence: Synthetic oligonucleotide
  Antisense strand to SEQ ID NO: 1645809
gucuuaggaacacuguugu

SEQ ID NO: 1645811 - RNA, 19 nt, Artificial Sequence
  Description of Artificial Sequence: Synthetic oligonucleotide
  Sense strand starting at position 946 of SEQ ID NO: 1561086
cacugcucacagggugauu

SEQ ID NO: 1645812 - RNA, 19 nt, Artificial Sequence
  Description of Artificial Sequence: Synthetic oligonucleotide
  Antisense strand to SEQ ID NO: 1645811
aaucacccugugagcagug

SEQ ID NO: 1645813 - RNA, 19 nt, Artificial Sequence
  Description of Artificial Sequence: Synthetic oligonucleotide
  Sense strand starting at position 962 of SEQ ID NO: 1561086
auucuagaacuugaguagu

SEQ ID NO: 1645814 - RNA, 19 nt, Artificial Sequence
  Description of Artificial Sequence: Synthetic oligonucleotide
  Antisense strand to SEQ ID NO: 1645813
acuacucaaguucuagaau

SEQ ID NO: 1645815 - RNA, 19 nt, Artificial Sequence
  Description of Artificial Sequence: Synthetic oligonucleotide
  Sense strand starting at position 2153 of SEQ ID NO: 1561086
ggcccaguccacuguagau

SEQ ID NO: 1645816 - RNA, 19 nt, Artificial Sequence
  Description of Artificial Sequence: Synthetic oligonucleotide
  Antisense strand to SEQ ID NO: 1645815
aucuacaguggacugggcc

SEQ ID NO: 1645817 - RNA, 19 nt, Artificial Sequence
  Description of Artificial Sequence: Synthetic oligonucleotide
  Sense strand starting at position 2383 of SEQ ID NO: 1561086
cuagauuccugauuccuga

SEQ ID NO: 1645818 - RNA, 19 nt, Artificial Sequence
  Description of Artificial Sequence: Synthetic oligonucleotide
  Antisense strand to SEQ ID NO: 1645817
ucaggaaucaggaaucuag

SEQ ID NO: 1645819 - RNA, 19 nt, Artificial Sequence
  Description of Artificial Sequence: Synthetic oligonucleotide
  Sense strand starting at position 2543 of SEQ ID NO: 1561086
acccgaucccuggaaucau

SEQ ID NO: 1645820 - RNA, 19 nt, Artificial Sequence
  Description of Artificial Sequence: Synthetic oligonucleotide
  Antisense strand to SEQ ID NO: 1645819
augauuccagggaucgggu

SEQ ID NO: 1645821 - RNA, 19 nt, Artificial Sequence
  Description of Artificial Sequence: Synthetic oligonucleotide
  Sense strand starting at position 2552 of SEQ ID NO: 1561086
cuggaaucauguucuggaa

SEQ ID NO: 1645822 - RNA, 19 nt, Artificial Sequence
  Description of Artificial Sequence: Synthetic oligonucleotide
  Antisense strand to SEQ ID NO: 1645821
uuccagaacaugauuccag

SEQ ID NO: 1645823 - RNA, 19 nt, Artificial Sequence
  Description of Artificial Sequence: Synthetic oligonucleotide
  Sense strand starting at position 2645 of SEQ ID NO: 1561086
gguaucacuguccgcauuu

SEQ ID NO: 1645824 - RNA, 19 nt, Artificial Sequence
  Description of Artificial Sequence: Synthetic oligonucleotide
  Antisense strand to SEQ ID NO: 1645823
aaaugcggacagugauacc

SEQ ID NO: 1645825 - RNA, 19 nt, Artificial Sequence
  Description of Artificial Sequence: Synthetic oligonucleotide
  Sense strand starting at position 2870 of SEQ ID NO: 1561086
ucaguaagaugaucuuaua

SEQ ID NO: 1645826 - RNA, 19 nt, Artificial Sequence
  Description of Artificial Sequence: Synthetic oligonucleotide
  Antisense strand to SEQ ID NO: 1645825
uauaagaucaucuuacuga

SEQ ID NO: 1645827 - RNA, 19 nt, Artificial Sequence
  Description of Artificial Sequence: Synthetic oligonucleotide
  Sense strand starting at position 2899 of SEQ ID NO: 1561086
ggcuauaauuuguucucca

SEQ ID NO: 1645828 - RNA, 19 nt, Artificial Sequence
  Description of Artificial Sequence: Synthetic oligonucleotide
  Antisense strand to SEQ ID NO: 1645827
uggagaacaaauuauagcc

SEQ ID NO: 1645829 - RNA, 19 nt, Artificial Sequence
  Description of Artificial Sequence: Synthetic oligonucleotide
  Sense strand starting at position 3007 of SEQ ID NO: 1561086
ggugcagugagucaagcuu

SEQ ID NO: 1645830 - RNA, 19 nt, Artificial Sequence
  Description of Artificial Sequence: Synthetic oligonucleotide
  Antisense strand to SEQ ID NO: 1645829
aagcuugacucacugcacc

SEQ ID NO: 1645831 - RNA, 19 nt, Artificial Sequence
  Description of Artificial Sequence: Synthetic oligonucleotide
  Sense strand starting at position 3013 of SEQ ID NO: 1561086
gugagucaagcuuggaauc

SEQ ID NO: 1645832 - RNA, 19 nt, Artificial Sequence
  Description of Artificial Sequence: Synthetic oligonucleotide
  Antisense strand to SEQ ID NO: 1645831
gauuccaagcuugacucac

SEQ ID NO: 1645833 - RNA, 19 nt, Artificial Sequence
  Description of Artificial Sequence: Synthetic oligonucleotide
  Sense strand starting at position 3084 of SEQ ID NO: 1561086
gaucguggcaucgauaaca

SEQ ID NO: 1645834 - RNA, 19 nt, Artificial Sequence
  Description of Artificial Sequence: Synthetic oligonucleotide
  Antisense strand to SEQ ID NO: 1645833
uguuaucgaugccacgauc

SEQ ID NO: 1645835 - RNA, 19 nt, Artificial Sequence
  Description of Artificial Sequence: Synthetic oligonucleotide
  Sense strand starting at position 3092 of SEQ ID NO: 1561086
caucgauaacauggcagaa

SEQ ID NO: 1645836 - RNA, 19 nt, Artificial Sequence
  Description of Artificial Sequence: Synthetic oligonucleotide
  Antisense strand to SEQ ID NO: 1645835
uucugccauguuaucgaug

SEQ ID NO: 1645837 - RNA, 19 nt, Artificial Sequence
  Description of Artificial Sequence: Synthetic oligonucleotide
  Sense strand starting at position 3102 of SEQ ID NO: 1561086
auggcagaaccucaucuuu

SEQ ID NO: 1645838 - RNA, 19 nt, Artificial Sequence
  Description of Artificial Sequence: Synthetic oligonucleotide
  Antisense strand to SEQ ID NO: 1645837
aaagaugagguucugccau

SEQ ID NO: 1645839 - RNA, 19 nt, Artificial Sequence
  Description of Artificial Sequence: Synthetic oligonucleotide
  Sense strand starting at position 3326 of SEQ ID NO: 1561086
guuggaagguaucuuagcu

SEQ ID NO: 1645840 - RNA, 19 nt, Artificial Sequence
  Description of Artificial Sequence: Synthetic oligonucleotide
  Antisense strand to SEQ ID NO: 1645839
agcuaagauaccuuccaac

SEQ ID NO: 1645841 - RNA, 19 nt, Artificial Sequence
  Description of Artificial Sequence: Synthetic oligonucleotide
  Sense strand starting at position 3330 of SEQ ID NO: 1561086
gaagguaucuuagcuuauc

SEQ ID NO: 1645842 - RNA, 19 nt, Artificial Sequence
  Description of Artificial Sequence: Synthetic oligonucleotide
  Antisense strand to SEQ ID NO: 1645841
gauaagcuaagauaccuuc

SEQ ID NO: 1645843 - RNA, 19 nt, Artificial Sequence
  Description of Artificial Sequence: Synthetic oligonucleotide
  Sense strand starting at position 3333 of SEQ ID NO: 1561086
gguaucuuagcuuauccuu

SEQ ID NO: 1645844 - RNA, 19 nt, Artificial Sequence
  Description of Artificial Sequence: Synthetic oligonucleotide
  Antisense strand to SEQ ID NO: 1645843
aaggauaagcuaagauacc

SEQ ID NO: 1645845 - RNA, 19 nt, Artificial Sequence
  Description of Artificial Sequence: Synthetic oligonucleotide
  Sense strand starting at position 3503 of SEQ ID NO: 1561086
cccucuguggaucagagua

SEQ ID NO: 1645846 - RNA, 19 nt, Artificial Sequence
  Description of Artificial Sequence: Synthetic oligonucleotide
  Antisense strand to SEQ ID NO: 1645845
uacucugauccacagaggg

SEQ ID NO: 1645847 - RNA, 19 nt, Artificial Sequence
  Description of Artificial Sequence: Synthetic oligonucleotide
  Sense strand starting at position 3508 of SEQ ID NO: 1561086
uguggaucagaguaaaguc

SEQ ID NO: 1645848 - RNA, 19 nt, Artificial Sequence
  Description of Artificial Sequence: Synthetic oligonucleotide
  Antisense strand to SEQ ID NO: 1645847
gacuuuacucugauccaca

SEQ ID NO: 1645849 - RNA, 19 nt, Artificial Sequence
  Description of Artificial Sequence: Synthetic oligonucleotide
  Sense strand starting at position 3522 of SEQ ID NO: 1561086
aagucacauccuugggaca

SEQ ID NO: 1645850 - RNA, 19 nt, Artificial Sequence
  Description of Artificial Sequence: Synthetic oligonucleotide
  Antisense strand to SEQ ID NO: 1645849
ugucccaaggaugugacuu

SEQ ID NO: 1645851 - RNA, 19 nt, Artificial Sequence
  Description of Artificial Sequence: Synthetic oligonucleotide
  Sense strand starting at position 3702 of SEQ ID NO: 1561086
gggacaugugcacaggagu

SEQ ID NO: 1645852 - RNA, 19 nt, Artificial Sequence
  Description of Artificial Sequence: Synthetic oligonucleotide
  Antisense strand to SEQ ID NO: 1645851
acuccugugcacauguccc

SEQ ID NO: 1645853 - RNA, 19 nt, Artificial Sequence
  Description of Artificial Sequence: Synthetic oligonucleotide
  Sense strand starting at position 3754 of SEQ ID NO: 1561086
gugguaggccuggguucaa

SEQ ID NO: 1645854 - RNA, 19 nt, Artificial Sequence
  Description of Artificial Sequence: Synthetic oligonucleotide
  Antisense strand to SEQ ID NO: 1645853
uugaacccaggccuaccac

SEQ ID NO: 1645855 - RNA, 19 nt, Artificial Sequence
  Description of Artificial Sequence: Synthetic oligonucleotide
  Sense strand starting at position 3824 of SEQ ID NO: 1561086
gaguguguucugcaccaag

SEQ ID NO: 1645856 - RNA, 19 nt, Artificial Sequence
  Description of Artificial Sequence: Synthetic oligonucleotide
  Antisense strand to SEQ ID NO: 1645855
cuuggugcagaacacacuc

SEQ ID NO: 1645857 - RNA, 19 nt, Artificial Sequence
  Description of Artificial Sequence: Synthetic oligonucleotide
  Sense strand starting at position 3826 of SEQ ID NO: 1561086
guguguucugcaccaagcu

SEQ ID NO: 1645858 - RNA, 19 nt, Artificial Sequence
  Description of Artificial Sequence: Synthetic oligonucleotide
  Antisense strand to SEQ ID NO: 1645857
agcuuggugcagaacacac

SEQ ID NO: 1645859 - RNA, 19 nt, Artificial Sequence
  Description of Artificial Sequence: Synthetic oligonucleotide
  Sense strand starting at position 3883 of SEQ ID NO: 1561086
gacugacuguagucuuaca

SEQ ID NO: 1645860 - RNA, 19 nt, Artificial Sequence
  Description of Artificial Sequence: Synthetic oligonucleotide
  Antisense strand to SEQ ID NO: 1645859
uguaagacuacagucaguc

SEQ ID NO: 1645861 - RNA, 19 nt, Artificial Sequence
  Description of Artificial Sequence: Synthetic oligonucleotide
  Sense strand starting at position 3967 of SEQ ID NO: 1561086
uugugaaauuaagcagaua

SEQ ID NO: 1645862 - RNA, 19 nt, Artificial Sequence
  Description of Artificial Sequence: Synthetic oligonucleotide
  Antisense strand to SEQ ID NO: 1645861
uaucugcuuaauuucacaa

SEQ ID NO: 1645863 - RNA, 19 nt, Artificial Sequence
  Description of Artificial Sequence: Synthetic oligonucleotide
  Sense strand starting at position 195 of SEQ ID NO: 1561087
gcgcucaguagucacacaa

SEQ ID NO: 1645864 - RNA, 19 nt, Artificial Sequence
  Description of Artificial Sequence: Synthetic oligonucleotide
  Antisense strand to SEQ ID NO: 1645863
uugugugacuacugagcgc

SEQ ID NO: 1645865 - RNA, 19 nt, Artificial Sequence
  Description of Artificial Sequence: Synthetic oligonucleotide
  Sense strand starting at position 216 of SEQ ID NO: 1561087
cuacuugacuucugugguu

SEQ ID NO: 1645866 - RNA, 19 nt, Artificial Sequence
  Description of Artificial Sequence: Synthetic oligonucleotide
  Antisense strand to SEQ ID NO: 1645865
aaccacagaagucaaguag

SEQ ID NO: 1645867 - RNA, 19 nt, Artificial Sequence
  Description of Artificial Sequence: Synthetic oligonucleotide
  Sense strand starting at position 218 of SEQ ID NO: 1561087
acuugacuucugugguuac

SEQ ID NO: 1645868 - RNA, 19 nt, Artificial Sequence
  Description of Artificial Sequence: Synthetic oligonucleotide
  Antisense strand to SEQ ID NO: 1645867
guaaccacagaagucaagu

SEQ ID NO: 1645869 - RNA, 19 nt, Artificial Sequence
  Description of Artificial Sequence: Synthetic oligonucleotide
  Sense strand starting at position 222 of SEQ ID NO: 1561087
gacuucugugguuaccgua

SEQ ID NO: 1645870 - RNA, 19 nt, Artificial Sequence
  Description of Artificial Sequence: Synthetic oligonucleotide
  Antisense strand to SEQ ID NO: 1645869
uacgguaaccacagaaguc

SEQ ID NO: 1645871 - RNA, 19 nt, Artificial Sequence
  Description of Artificial Sequence: Synthetic oligonucleotide
  Sense strand starting at position 234 of SEQ ID NO: 1561087
uaccguauuugacagcaaa

SEQ ID NO: 1645872 - RNA, 19 nt, Artificial Sequence
  Description of Artificial Sequence: Synthetic oligonucleotide
  Antisense strand to SEQ ID NO: 1645871
uuugcugucaaauacggua

SEQ ID NO: 1645873 - RNA, 19 nt, Artificial Sequence
  Description of Artificial Sequence: Synthetic oligonucleotide
  Sense strand starting at position 252 of SEQ ID NO: 1561087
agggaacacucucaucacu

SEQ ID NO: 1645874 - RNA, 19 nt, Artificial Sequence
  Description of Artificial Sequence: Synthetic oligonucleotide
  Antisense strand to SEQ ID NO: 1645873
agugaugagaguguucccu

SEQ ID NO: 1645875 - RNA, 19 nt, Artificial Sequence
  Description of Artificial Sequence: Synthetic oligonucleotide
  Sense strand starting at position 348 of SEQ ID NO: 1561087
gcugaagcucugcaugaca

SEQ ID NO: 1645876 - RNA, 19 nt, Artificial Sequence
  Description of Artificial Sequence: Synthetic oligonucleotide
  Antisense strand to SEQ ID NO: 1645875
ugucaugcagagcuucagc

SEQ ID NO: 1645877 - RNA, 19 nt, Artificial Sequence
  Description of Artificial Sequence: Synthetic oligonucleotide
  Sense strand starting at position 1168 of SEQ ID NO: 1561087
gcguguggccacugauaag

SEQ ID NO: 1645878 - RNA, 19 nt, Artificial Sequence
  Description of Artificial Sequence: Synthetic oligonucleotide
  Antisense strand to SEQ ID NO: 1645877
cuuaucaguggccacacgc

SEQ ID NO: 1645879 - RNA, 19 nt, Artificial Sequence
  Description of Artificial Sequence: Synthetic oligonucleotide
  Sense strand starting at position 1251 of SEQ ID NO: 1561087
caccguucuuaggaggaau

SEQ ID NO: 1645880 - RNA, 19 nt, Artificial Sequence
  Description of Artificial Sequence: Synthetic oligonucleotide
  Antisense strand to SEQ ID NO: 1645879
auuccuccuaagaacggug

SEQ ID NO: 1645881 - RNA, 19 nt, Artificial Sequence
  Description of Artificial Sequence: Synthetic oligonucleotide
  Sense strand starting at position 1253 of SEQ ID NO: 1561087
ccguucuuaggaggaaucu

SEQ ID NO: 1645882 - RNA, 19 nt, Artificial Sequence
  Description of Artificial Sequence: Synthetic oligonucleotide
  Antisense strand to SEQ ID NO: 1645881
agauuccuccuaagaacgg

SEQ ID NO: 1645883 - RNA, 19 nt, Artificial Sequence
  Description of Artificial Sequence: Synthetic oligonucleotide
  Sense strand starting at position 1616 of SEQ ID NO: 1561087
cuggauaccucagucugua

SEQ ID NO: 1645884 - RNA, 19 nt, Artificial Sequence
  Description of Artificial Sequence: Synthetic oligonucleotide
  Antisense strand to SEQ ID NO: 1645883
uacagacugagguauccag

SEQ ID NO: 1645885 - RNA, 19 nt, Artificial Sequence
  Description of Artificial Sequence: Synthetic oligonucleotide
  Sense strand starting at position 1788 of SEQ ID NO: 1561087
gcggguagaguccaacaga

SEQ ID NO: 1645886 - RNA, 19 nt, Artificial Sequence
  Description of Artificial Sequence: Synthetic oligonucleotide
  Antisense strand to SEQ ID NO: 1645885
ucuguuggacucuacccgc

SEQ ID NO: 1645887 - RNA, 19 nt, Artificial Sequence
  Description of Artificial Sequence: Synthetic oligonucleotide
  Sense strand starting at position 2023 of SEQ ID NO: 1561087
ggcagaacuuuccauacua

SEQ ID NO: 1645888 - RNA, 19 nt, Artificial Sequence
  Description of Artificial Sequence: Synthetic oligonucleotide
  Antisense strand to SEQ ID NO: 1645887
uaguauggaaaguucugcc

SEQ ID NO: 1645889 - RNA, 19 nt, Artificial Sequence
  Description of Artificial Sequence: Synthetic oligonucleotide
  Sense strand starting at position 2035 of SEQ ID NO: 1561087
cauacuauuggcugcgaaa

SEQ ID NO: 1645890 - RNA, 19 nt, Artificial Sequence
  Description of Artificial Sequence: Synthetic oligonucleotide
  Antisense strand to SEQ ID NO: 1645889
uuucgcagccaauaguaug

SEQ ID NO: 1645891 - RNA, 19 nt, Artificial Sequence
  Description of Artificial Sequence: Synthetic oligonucleotide
  Sense strand starting at position 2047 of SEQ ID NO: 1561087
ugcgaaaccugccacucau

SEQ ID NO: 1645892 - RNA, 19 nt, Artificial Sequence
  Description of Artificial Sequence: Synthetic oligonucleotide
  Antisense strand to SEQ ID NO: 1645891
augaguggcagguuucgca

SEQ ID NO: 1645893 - RNA, 19 nt, Artificial Sequence
  Description of Artificial Sequence: Synthetic oligonucleotide
  Sense strand starting at position 2377 of SEQ ID NO: 1561087
guccaagagaucgacugua

SEQ ID NO: 1645894 - RNA, 19 nt, Artificial Sequence
  Description of Artificial Sequence: Synthetic oligonucleotide
  Antisense strand to SEQ ID NO: 1645893
uacagucgaucucuuggac

SEQ ID NO: 1645895 - RNA, 19 nt, Artificial Sequence
  Description of Artificial Sequence: Synthetic oligonucleotide
  Sense strand starting at position 2403 of SEQ ID NO: 1561087
guggcuacagcucguaaca

SEQ ID NO: 1645896 - RNA, 19 nt, Artificial Sequence
  Description of Artificial Sequence: Synthetic oligonucleotide
  Antisense strand to SEQ ID NO: 1645895
uguuacgagcuguagccac

SEQ ID NO: 1645897 - RNA, 19 nt, Artificial Sequence
  Description of Artificial Sequence: Synthetic oligonucleotide
  Sense strand starting at position 2405 of SEQ ID NO: 1561087
ggcuacagcucguaacaau

SEQ ID NO: 1645898 - RNA, 19 nt, Artificial Sequence
  Description of Artificial Sequence: Synthetic oligonucleotide
  Antisense strand to SEQ ID NO: 1645897
auuguuacgagcuguagcc

SEQ ID NO: 1645899 - RNA, 19 nt, Artificial Sequence
  Description of Artificial Sequence: Synthetic oligonucleotide
  Sense strand starting at position 2449 of SEQ ID NO: 1561087
gaaaguagauguuacaugu

SEQ ID NO: 1645900 - RNA, 19 nt, Artificial Sequence
  Description of Artificial Sequence: Synthetic oligonucleotide
  Antisense strand to SEQ ID NO: 1645899
acauguaacaucuacuuuc

SEQ ID NO: 1645901 - RNA, 19 nt, Artificial Sequence
  Description of Artificial Sequence: Synthetic oligonucleotide
  Sense strand starting at position 2492 of SEQ ID NO: 1561087
ggagguaacgcguaaguua

SEQ ID NO: 1645902 - RNA, 19 nt, Artificial Sequence
  Description of Artificial Sequence: Synthetic oligonucleotide
  Antisense strand to SEQ ID NO: 1645901
uaacuuacgcguuaccucc

SEQ ID NO: 1645903 - RNA, 19 nt, Artificial Sequence
  Description of Artificial Sequence: Synthetic oligonucleotide
  Sense strand starting at position 2944 of SEQ ID NO: 1561087
gccugaugacuugauucua

SEQ ID NO: 1645904 - RNA, 19 nt, Artificial Sequence
  Description of Artificial Sequence: Synthetic oligonucleotide
  Antisense strand to SEQ ID NO: 1645903
uagaaucaagucaucaggc

SEQ ID NO: 1645905 - RNA, 19 nt, Artificial Sequence
  Description of Artificial Sequence: Synthetic oligonucleotide
  Sense strand starting at position 2977 of SEQ ID NO: 1561087
gcaaaugaaugggauguca

SEQ ID NO: 1645906 - RNA, 19 nt, Artificial Sequence
  Description of Artificial Sequence: Synthetic oligonucleotide
  Antisense strand to SEQ ID NO: 1645905
ugacaucccauucauuugc

SEQ ID NO: 1645907 - RNA, 19 nt, Artificial Sequence
  Description of Artificial Sequence: Synthetic oligonucleotide
  Sense strand starting at position 2988 of SEQ ID NO: 1561087
ggaugucauucugcgauua

SEQ ID NO: 1645908 - RNA, 19 nt, Artificial Sequence
  Description of Artificial Sequence: Synthetic oligonucleotide
  Antisense strand to SEQ ID NO: 1645907
uaaucgcagaaugacaucc

SEQ ID NO: 1645909 - RNA, 19 nt, Artificial Sequence
  Description of Artificial Sequence: Synthetic oligonucleotide
  Sense strand starting at position 2989 of SEQ ID NO: 1561087
gaugucauucugcgauuag

SEQ ID NO: 1645910 - RNA, 19 nt, Artificial Sequence
  Description of Artificial Sequence: Synthetic oligonucleotide
  Antisense strand to SEQ ID NO: 1645909
cuaaucgcagaaugacauc

SEQ ID NO: 1645911 - RNA, 19 nt, Artificial Sequence
  Description of Artificial Sequence: Synthetic oligonucleotide
  Sense strand starting at position 2990 of SEQ ID NO: 1561087
augucauucugcgauuagg

SEQ ID NO: 1645912 - RNA, 19 nt, Artificial Sequence
  Description of Artificial Sequence: Synthetic oligonucleotide
  Antisense strand to SEQ ID NO: 1645911
ccuaaucgcagaaugacau

SEQ ID NO: 1645913 - RNA, 19 nt, Artificial Sequence
  Description of Artificial Sequence: Synthetic oligonucleotide
  Sense strand starting at position 2993 of SEQ ID NO: 1561087
ucauucugcgauuaggcua

SEQ ID NO: 1645914 - RNA, 19 nt, Artificial Sequence
  Description of Artificial Sequence: Synthetic oligonucleotide
  Antisense strand to SEQ ID NO: 1645913
uagccuaaucgcagaauga

SEQ ID NO: 1645915 - RNA, 19 nt, Artificial Sequence
  Description of Artificial Sequence: Synthetic oligonucleotide
  Sense strand starting at position 2998 of SEQ ID NO: 1561087
cugcgauuaggcuaugaga

SEQ ID NO: 1645916 - RNA, 19 nt, Artificial Sequence
  Description of Artificial Sequence: Synthetic oligonucleotide
  Antisense strand to SEQ ID NO: 1645915
ucucauagccuaaucgcag

SEQ ID NO: 1645917 - RNA, 19 nt, Artificial Sequence
  Description of Artificial Sequence: Synthetic oligonucleotide
  Sense strand starting at position 3000 of SEQ ID NO: 1561087
gcgauuaggcuaugagaga

SEQ ID NO: 1645918 - RNA, 19 nt, Artificial Sequence
  Description of Artificial Sequence: Synthetic oligonucleotide
  Antisense strand to SEQ ID NO: 1645917
ucucucauagccuaaucgc

SEQ ID NO: 1645919 - RNA, 19 nt, Artificial Sequence
  Description of Artificial Sequence: Synthetic oligonucleotide
  Sense strand starting at position 3001 of SEQ ID NO: 1561087
cgauuaggcuaugagagau

SEQ ID NO: 1645920 - RNA, 19 nt, Artificial Sequence
  Description of Artificial Sequence: Synthetic oligonucleotide
  Antisense strand to SEQ ID NO: 1645919
aucucucauagccuaaucg

SEQ ID NO: 1645921 - RNA, 19 nt, Artificial Sequence
  Description of Artificial Sequence: Synthetic oligonucleotide
  Sense strand starting at position 3011 of SEQ ID NO: 1561087
augagagauugugacuucu

SEQ ID NO: 1645922 - RNA, 19 nt, Artificial Sequence
  Description of Artificial Sequence: Synthetic oligonucleotide
  Antisense strand to SEQ ID NO: 1645921
agaagucacaaucucucau

SEQ ID NO: 1645923 - RNA, 19 nt, Artificial Sequence
  Description of Artificial Sequence: Synthetic oligonucleotide
  Sense strand starting at position 3013 of SEQ ID NO: 1561087
gagagauugugacuucugu

SEQ ID NO: 1645924 - RNA, 19 nt, Artificial Sequence
  Description of Artificial Sequence: Synthetic oligonucleotide
  Antisense strand to SEQ ID NO: 1645923
acagaagucacaaucucuc

SEQ ID NO: 1645925 - RNA, 19 nt, Artificial Sequence
  Description of Artificial Sequence: Synthetic oligonucleotide
  Sense strand starting at position 3062 of SEQ ID NO: 1561087
cagccuacgugucuugaca

SEQ ID NO: 1645926 - RNA, 19 nt, Artificial Sequence
  Description of Artificial Sequence: Synthetic oligonucleotide
  Antisense strand to SEQ ID NO: 1645925
ugucaagacacguaggcug

SEQ ID NO: 1645927 - RNA, 19 nt, Artificial Sequence
  Description of Artificial Sequence: Synthetic oligonucleotide
  Sense strand starting at position 3064 of SEQ ID NO: 1561087
gccuacgugucuugacaaa

SEQ ID NO: 1645928 - RNA, 19 nt, Artificial Sequence
  Description of Artificial Sequence: Synthetic oligonucleotide
  Antisense strand to SEQ ID NO: 1645927
uuugucaagacacguaggc

SEQ ID NO: 1645929 - RNA, 19 nt, Artificial Sequence
  Description of Artificial Sequence: Synthetic oligonucleotide
  Sense strand starting at position 3123 of SEQ ID NO: 1561087
gaggguguccuccagccaa

SEQ ID NO: 1645930 - RNA, 19 nt, Artificial Sequence
  Description of Artificial Sequence: Synthetic oligonucleotide
  Antisense strand to SEQ ID NO: 1645929
uuggcuggaggacacccuc

SEQ ID NO: 1645931 - RNA, 19 nt, Artificial Sequence
  Description of Artificial Sequence: Synthetic oligonucleotide
  Sense strand starting at position 3205 of SEQ ID NO: 1561087
ccaugaacgugaucaugga

SEQ ID NO: 1645932 - RNA, 19 nt, Artificial Sequence
  Description of Artificial Sequence: Synthetic oligonucleotide
  Antisense strand to SEQ ID NO: 1645931
uccaugaucacguucaugg

SEQ ID NO: 1645933 - RNA, 19 nt, Artificial Sequence
  Description of Artificial Sequence: Synthetic oligonucleotide
  Sense strand starting at position 3209 of SEQ ID NO: 1561087
gaacgugaucauggaagag

SEQ ID NO: 1645934 - RNA, 19 nt, Artificial Sequence
  Description of Artificial Sequence: Synthetic oligonucleotide
  Antisense strand to SEQ ID NO: 1645933
cucuuccaugaucacguuc

SEQ ID NO: 1645935 - RNA, 19 nt, Artificial Sequence
  Description of Artificial Sequence: Synthetic oligonucleotide
  Sense strand starting at position 3721 of SEQ ID NO: 1561087
guguuuguuugcuuguauu

SEQ ID NO: 1645936 - RNA, 19 nt, Artificial Sequence
  Description of Artificial Sequence: Synthetic oligonucleotide
  Antisense strand to SEQ ID NO: 1645935
aauacaagcaaacaaacac

SEQ ID NO: 1645937 - RNA, 19 nt, Artificial Sequence
  Description of Artificial Sequence: Synthetic oligonucleotide
  Sense strand starting at position 2 of SEQ ID NO: 1561088
uucugaugugaaggaacua

SEQ ID NO: 1645938 - RNA, 19 nt, Artificial Sequence
  Description of Artificial Sequence: Synthetic oligonucleotide
  Antisense strand to SEQ ID NO: 1645937
uaguuccuucacaucagaa

SEQ ID NO: 1645939 - RNA, 19 nt, Artificial Sequence
  Description of Artificial Sequence: Synthetic oligonucleotide
  Sense strand starting at position 99 of SEQ ID NO: 1561088
guaacuacgugguuuguuu

SEQ ID NO: 1645940 - RNA, 19 nt, Artificial Sequence
  Description of Artificial Sequence: Synthetic oligonucleotide
  Antisense strand to SEQ ID NO: 1645939
aaacaaaccacguaguuac

SEQ ID NO: 1645941 - RNA, 19 nt, Artificial Sequence
  Description of Artificial Sequence: Synthetic oligonucleotide
  Sense strand starting at position 118 of SEQ ID NO: 1561088
gcuguucuuucugugugaa

SEQ ID NO: 1645942 - RNA, 19 nt, Artificial Sequence
  Description of Artificial Sequence: Synthetic oligonucleotide
  Antisense strand to SEQ ID NO: 1645941
uucacacagaaagaacagc

SEQ ID NO: 1645943 - RNA, 19 nt, Artificial Sequence
  Description of Artificial Sequence: Synthetic oligonucleotide
  Sense strand starting at position 119 of SEQ ID NO: 1561088
cuguucuuucugugugaaa

SEQ ID NO: 1645944 - RNA, 19 nt, Artificial Sequence
  Description of Artificial Sequence: Synthetic oligonucleotide
  Antisense strand to SEQ ID NO: 1645943
uuucacacagaaagaacag

SEQ ID NO: 1645945 - RNA, 19 nt, Artificial Sequence
  Description of Artificial Sequence: Synthetic oligonucleotide
  Sense strand starting at position 120 of SEQ ID NO: 1561088
uguucuuucugugugaaac

SEQ ID NO: 1645946 - RNA, 19 nt, Artificial Sequence
  Description of Artificial Sequence: Synthetic oligonucleotide
  Antisense strand to SEQ ID NO: 1645945
guuucacacagaaagaaca

SEQ ID NO: 1645947 - RNA, 19 nt, Artificial Sequence
  Description of Artificial Sequence: Synthetic oligonucleotide
  Sense strand starting at position 206 of SEQ ID NO: 1561088
cuguuucugccacacaaga

SEQ ID NO: 1645948 - RNA, 19 nt, Artificial Sequence
  Description of Artificial Sequence: Synthetic oligonucleotide
  Antisense strand to SEQ ID NO: 1645947
ucuuguguggcagaaacag

SEQ ID NO: 1645949 - RNA, 19 nt, Artificial Sequence
  Description of Artificial Sequence: Synthetic oligonucleotide
  Sense strand starting at position 358 of SEQ ID NO: 1561088
ccuaaaucgugcucaauaa

SEQ ID NO: 1645950 - RNA, 19 nt, Artificial Sequence
  Description of Artificial Sequence: Synthetic oligonucleotide
  Antisense strand to SEQ ID NO: 1645949
uuauugagcacgauuuagg

SEQ ID NO: 1645951 - RNA, 19 nt, Artificial Sequence
  Description of Artificial Sequence: Synthetic oligonucleotide
  Sense strand starting at position 359 of SEQ ID NO: 1561088
cuaaaucgugcucaauaaa

SEQ ID NO: 1645952 - RNA, 19 nt, Artificial Sequence
  Description of Artificial Sequence: Synthetic oligonucleotide
  Antisense strand to SEQ ID NO: 1645951
uuuauugagcacgauuuag

SEQ ID NO: 1645953 - RNA, 19 nt, Artificial Sequence
  Description of Artificial Sequence: Synthetic oligonucleotide
  Sense strand starting at position 386 of SEQ ID NO: 1561088
gauugaagguacucccuua

SEQ ID NO: 1645954 - RNA, 19 nt, Artificial Sequence
  Description of Artificial Sequence: Synthetic oligonucleotide
  Antisense strand to SEQ ID NO: 1645953
uaagggaguaccuucaauc

SEQ ID NO: 1645955 - RNA, 19 nt, Artificial Sequence
  Description of Artificial Sequence: Synthetic oligonucleotide
  Sense strand starting at position 513 of SEQ ID NO: 1561088
cugggugaaucauaucauu

SEQ ID NO: 1645956 - RNA, 19 nt, Artificial Sequence
  Description of Artificial Sequence: Synthetic oligonucleotide
  Antisense strand to SEQ ID NO: 1645955
aaugauaugauucacccag

SEQ ID NO: 1645957 - RNA, 19 nt, Artificial Sequence
  Description of Artificial Sequence: Synthetic oligonucleotide
  Sense strand starting at position 972 of SEQ ID NO: 1561088
gugucacaguuuccaggaa

SEQ ID NO: 1645958 - RNA, 19 nt, Artificial Sequence
  Description of Artificial Sequence: Synthetic oligonucleotide
  Antisense strand to SEQ ID NO: 1645957
uuccuggaaacugugacac

SEQ ID NO: 1645959 - RNA, 19 nt, Artificial Sequence
  Description of Artificial Sequence: Synthetic oligonucleotide
  Sense strand starting at position 2176 of SEQ ID NO: 1561088
ugagcaaacagaggucauu

SEQ ID NO: 1645960 - RNA, 19 nt, Artificial Sequence
  Description of Artificial Sequence: Synthetic oligonucleotide
  Antisense strand to SEQ ID NO: 1645959
aaugaccucuguuugcuca

SEQ ID NO: 1645961 - RNA, 19 nt, Artificial Sequence
  Description of Artificial Sequence: Synthetic oligonucleotide
  Sense strand starting at position 2294 of SEQ ID NO: 1561088
ggaggauagcuugggccaa

SEQ ID NO: 1645962 - RNA, 19 nt, Artificial Sequence
  Description of Artificial Sequence: Synthetic oligonucleotide
  Antisense strand to SEQ ID NO: 1645961
uuggcccaagcuauccucc

SEQ ID NO: 1645963 - RNA, 19 nt, Artificial Sequence
  Description of Artificial Sequence: Synthetic oligonucleotide
  Sense strand starting at position 2296 of SEQ ID NO: 1561088
aggauagcuugggccaaau

SEQ ID NO: 1645964 - RNA, 19 nt, Artificial Sequence
  Description of Artificial Sequence: Synthetic oligonucleotide
  Antisense strand to SEQ ID NO: 1645963
auuuggcccaagcuauccu

SEQ ID NO: 1645965 - RNA, 19 nt, Artificial Sequence
  Description of Artificial Sequence: Synthetic oligonucleotide
  Sense strand starting at position 2341 of SEQ ID NO: 1561088
ggaagacccucaucuguac

SEQ ID NO: 1645966 - RNA, 19 nt, Artificial Sequence
  Description of Artificial Sequence: Synthetic oligonucleotide
  Antisense strand to SEQ ID NO: 1645965
guacagaugagggucuucc

SEQ ID NO: 1645967 - RNA, 19 nt, Artificial Sequence
  Description of Artificial Sequence: Synthetic oligonucleotide
  Sense strand starting at position 2590 of SEQ ID NO: 1561088
ggaagauggucaggagauc

SEQ ID NO: 1645968 - RNA, 19 nt, Artificial Sequence
  Description of Artificial Sequence: Synthetic oligonucleotide
  Antisense strand to SEQ ID NO: 1645967
gaucuccugaccaucuucc

SEQ ID NO: 1645969 - RNA, 19 nt, Artificial Sequence
  Description of Artificial Sequence: Synthetic oligonucleotide
  Sense strand starting at position 2884 of SEQ ID NO: 1561088
gguaaauauugaucaccgu

SEQ ID NO: 1645970 - RNA, 19 nt, Artificial Sequence
  Description of Artificial Sequence: Synthetic oligonucleotide
  Antisense strand to SEQ ID NO: 1645969
acggugaucaauauuuacc

SEQ ID NO: 1645971 - RNA, 19 nt, Artificial Sequence
  Description of Artificial Sequence: Synthetic oligonucleotide
  Sense strand starting at position 2887 of SEQ ID NO: 1561088
aaauauugaucaccgugua

SEQ ID NO: 1645972 - RNA, 19 nt, Artificial Sequence
  Description of Artificial Sequence: Synthetic oligonucleotide
  Antisense strand to SEQ ID NO: 1645971
uacacggugaucaauauuu

SEQ ID NO: 1645973 - RNA, 19 nt, Artificial Sequence
  Description of Artificial Sequence: Synthetic oligonucleotide
  Sense strand starting at position 2890 of SEQ ID NO: 1561088
uauugaucaccguguacca

SEQ ID NO: 1645974 - RNA, 19 nt, Artificial Sequence
  Description of Artificial Sequence: Synthetic oligonucleotide
  Antisense strand to SEQ ID NO: 1645973
ugguacacggugaucaaua

SEQ ID NO: 1645975 - RNA, 19 nt, Artificial Sequence
  Description of Artificial Sequence: Synthetic oligonucleotide
  Sense strand starting at position 2938 of SEQ ID NO: 1561088
ucaucagauugguaagaau

SEQ ID NO: 1645976 - RNA, 19 nt, Artificial Sequence
  Description of Artificial Sequence: Synthetic oligonucleotide
  Antisense strand to SEQ ID NO: 1645975
auucuuaccaaucugauga

SEQ ID NO: 1645977 - RNA, 19 nt, Artificial Sequence
  Description of Artificial Sequence: Synthetic oligonucleotide
  Sense strand starting at position 2983 of SEQ ID NO: 1561088
gugagugaauacuuugaag

SEQ ID NO: 1645978 - RNA, 19 nt, Artificial Sequence
  Description of Artificial Sequence: Synthetic oligonucleotide
  Antisense strand to SEQ ID NO: 1645977
cuucaaaguauucacucac

SEQ ID NO: 1645979 - RNA, 19 nt, Artificial Sequence
  Description of Artificial Sequence: Synthetic oligonucleotide
  Sense strand starting at position 2985 of SEQ ID NO: 1561088
gagugaauacuuugaagca

SEQ ID NO: 1645980 - RNA, 19 nt, Artificial Sequence
  Description of Artificial Sequence: Synthetic oligonucleotide
  Antisense strand to SEQ ID NO: 1645979
ugcuucaaaguauucacuc

SEQ ID NO: 1645981 - RNA, 19 nt, Artificial Sequence
  Description of Artificial Sequence: Synthetic oligonucleotide
  Sense strand starting at position 2992 of SEQ ID NO: 1561088
uacuuugaagcagaauguu

SEQ ID NO: 1645982 - RNA, 19 nt, Artificial Sequence
  Description of Artificial Sequence: Synthetic oligonucleotide
  Antisense strand to SEQ ID NO: 1645981
aacauucugcuucaaagua

SEQ ID NO: 1645983 - RNA, 19 nt, Artificial Sequence
  Description of Artificial Sequence: Synthetic oligonucleotide
  Sense strand starting at position 3000 of SEQ ID NO: 1561088
agcagaauguuuccuggca

SEQ ID NO: 1645984 - RNA, 19 nt, Artificial Sequence
  Description of Artificial Sequence: Synthetic oligonucleotide
  Antisense strand to SEQ ID NO: 1645983
ugccaggaaacauucugcu

SEQ ID NO: 1645985 - RNA, 19 nt, Artificial Sequence
  Description of Artificial Sequence: Synthetic oligonucleotide
  Sense strand starting at position 3019 of SEQ ID NO: 1561088
gaaagaguauauccaaguc

SEQ ID NO: 1645986 - RNA, 19 nt, Artificial Sequence
  Description of Artificial Sequence: Synthetic oligonucleotide
  Antisense strand to SEQ ID NO: 1645985
gacuuggauauacucuuuc

SEQ ID NO: 1645987 - RNA, 19 nt, Artificial Sequence
  Description of Artificial Sequence: Synthetic oligonucleotide
  Sense strand starting at position 3049 of SEQ ID NO: 1561088
gugcgauuccugucuggca

SEQ ID NO: 1645988 - RNA, 19 nt, Artificial Sequence
  Description of Artificial Sequence: Synthetic oligonucleotide
  Antisense strand to SEQ ID NO: 1645987
ugccagacaggaaucgcac

SEQ ID NO: 1645989 - RNA, 19 nt, Artificial Sequence
  Description of Artificial Sequence: Synthetic oligonucleotide
  Sense strand starting at position 3064 of SEQ ID NO: 1561088
ggcacugacccuggacaaa

SEQ ID NO: 1645990 - RNA, 19 nt, Artificial Sequence
  Description of Artificial Sequence: Synthetic oligonucleotide
  Antisense strand to SEQ ID NO: 1645989
uuuguccagggucagugcc

SEQ ID NO: 1645991 - RNA, 19 nt, Artificial Sequence
  Description of Artificial Sequence: Synthetic oligonucleotide
  Sense strand starting at position 3096 of SEQ ID NO: 1561088
gugugcaugggauguagua

SEQ ID NO: 1645992 - RNA, 19 nt, Artificial Sequence
  Description of Artificial Sequence: Synthetic oligonucleotide
  Antisense strand to SEQ ID NO: 1645991
uacuacaucccaugcacac

SEQ ID NO: 1645993 - RNA, 19 nt, Artificial Sequence
  Description of Artificial Sequence: Synthetic oligonucleotide
  Sense strand starting at position 3401 of SEQ ID NO: 1561088
cugagaugacgcuauugca

SEQ ID NO: 1645994 - RNA, 19 nt, Artificial Sequence
  Description of Artificial Sequence: Synthetic oligonucleotide
  Antisense strand to SEQ ID NO: 1645993
ugcaauagcgucaucucag

SEQ ID NO: 1645995 - RNA, 19 nt, Artificial Sequence
  Description of Artificial Sequence: Synthetic oligonucleotide
  Sense strand starting at position 3593 of SEQ ID NO: 1561088
cgaagucaucagggaaaug

SEQ ID NO: 1645996 - RNA, 19 nt, Artificial Sequence
  Description of Artificial Sequence: Synthetic oligonucleotide
  Antisense strand to SEQ ID NO: 1645995
cauuucccugaugacuucg

SEQ ID NO: 1645997 - RNA, 19 nt, Artificial Sequence
  Description of Artificial Sequence: Synthetic oligonucleotide
  Sense strand starting at position 3627 of SEQ ID NO: 1561088
augagauaucauugcacac

SEQ ID NO: 1645998 - RNA, 19 nt, Artificial Sequence
  Description of Artificial Sequence: Synthetic oligonucleotide
  Antisense strand to SEQ ID NO: 1645997
gugugcaaugauaucucau

SEQ ID NO: 1645999 - RNA, 19 nt, Artificial Sequence
  Description of Artificial Sequence: Synthetic oligonucleotide
  Sense strand starting at position 3803 of SEQ ID NO: 1561088
auugcacuucuagguauau

SEQ ID NO: 1646000 - RNA, 19 nt, Artificial Sequence
  Description of Artificial Sequence: Synthetic oligonucleotide
  Antisense strand to SEQ ID NO: 1645999
auauaccuagaagugcaau

SEQ ID NO: 1646001 - RNA, 19 nt, Artificial Sequence
  Description of Artificial Sequence: Synthetic oligonucleotide
  Sense strand starting at position 3804 of SEQ ID NO: 1561088
uugcacuucuagguauaua

SEQ ID NO: 1646002 - RNA, 19 nt, Artificial Sequence
  Description of Artificial Sequence: Synthetic oligonucleotide
  Antisense strand to SEQ ID NO: 1646001
uauauaccuagaagugcaa

SEQ ID NO: 1646003 - RNA, 19 nt, Artificial Sequence
  Description of Artificial Sequence: Synthetic oligonucleotide
  Sense strand starting at position 3881 of SEQ ID NO: 1561088
ucaugauagccuuauagua

SEQ ID NO: 1646004 - RNA, 19 nt, Artificial Sequence
  Description of Artificial Sequence: Synthetic oligonucleotide
  Antisense strand to SEQ ID NO: 1646003
uacuauaaggcuaucauga

SEQ ID NO: 1646005 - RNA, 19 nt, Artificial Sequence
  Description of Artificial Sequence: Synthetic oligonucleotide
  Sense strand starting at position 3889 of SEQ ID NO: 1561088
gccuuauaguauccuuauu

SEQ ID NO: 1646006 - RNA, 19 nt, Artificial Sequence
  Description of Artificial Sequence: Synthetic oligonucleotide
  Antisense strand to SEQ ID NO: 1646005
aauaaggauacuauaaggc

SEQ ID NO: 1646007 - RNA, 19 nt, Artificial Sequence
  Description of Artificial Sequence: Synthetic oligonucleotide
  Sense strand starting at position 3894 of SEQ ID NO: 1561088
auaguauccuuauucguag

SEQ ID NO: 1646008 - RNA, 19 nt, Artificial Sequence
  Description of Artificial Sequence: Synthetic oligonucleotide
  Antisense strand to SEQ ID NO: 1646007
cuacgaauaaggauacuau

SEQ ID NO: 1646009 - RNA, 19 nt, Artificial Sequence
  Description of Artificial Sequence: Synthetic oligonucleotide
  Sense strand starting at position 3902 of SEQ ID NO: 1561088
cuuauucguagugggcaaa

SEQ ID NO: 1646010 - RNA, 19 nt, Artificial Sequence
  Description of Artificial Sequence: Synthetic oligonucleotide
  Antisense strand to SEQ ID NO: 1646009
uuugcccacuacgaauaag

SEQ ID NO: 1646011 - RNA, 19 nt, Artificial Sequence
  Description of Artificial Sequence: Synthetic oligonucleotide
  Sense strand starting at position 3946 of SEQ ID NO: 1561088
auuaacagaucauugguga

SEQ ID NO: 1646012 - RNA, 19 nt, Artificial Sequence
  Description of Artificial Sequence: Synthetic oligonucleotide
  Antisense strand to SEQ ID NO: 1646011
ucaccaaugaucuguuaau

SEQ ID NO: 1646013 - RNA, 19 nt, Artificial Sequence
  Description of Artificial Sequence: Synthetic oligonucleotide
  Sense strand starting at position 3947 of SEQ ID NO: 1561088
uuaacagaucauuggugaa

SEQ ID NO: 1646014 - RNA, 19 nt, Artificial Sequence
  Description of Artificial Sequence: Synthetic oligonucleotide
  Antisense strand to SEQ ID NO: 1646013
uucaccaaugaucuguuaa

SEQ ID NO: 1646015 - RNA, 19 nt, Artificial Sequence
  Description of Artificial Sequence: Synthetic oligonucleotide
  Sense strand starting at position 3983 of SEQ ID NO: 1561088
ucacccauaccaugggauu

SEQ ID NO: 1646016 - RNA, 19 nt, Artificial Sequence
  Description of Artificial Sequence: Synthetic oligonucleotide
  Antisense strand to SEQ ID NO: 1646015
aaucccaugguauggguga

SEQ ID NO: 1646017 - RNA, 19 nt, Artificial Sequence
  Description of Artificial Sequence: Synthetic oligonucleotide
  Sense strand starting at position 593 of SEQ ID NO: 1561089
ugaguagccucugaguagu

SEQ ID NO: 1646018 - RNA, 19 nt, Artificial Sequence
  Description of Artificial Sequence: Synthetic oligonucleotide
  Antisense strand to SEQ ID NO: 1646017
acuacucagaggcuacuca

SEQ ID NO: 1646019 - RNA, 19 nt, Artificial Sequence
  Description of Artificial Sequence: Synthetic oligonucleotide
  Sense strand starting at position 636 of SEQ ID NO: 1561089
agaagacgugcuugaacca

SEQ ID NO: 1646020 - RNA, 19 nt, Artificial Sequence
  Description of Artificial Sequence: Synthetic oligonucleotide
  Antisense strand to SEQ ID NO: 1646019
ugguucaagcacgucuucu

SEQ ID NO: 1646021 - RNA, 19 nt, Artificial Sequence
  Description of Artificial Sequence: Synthetic oligonucleotide
  Sense strand starting at position 876 of SEQ ID NO: 1561089
agcgaaacaucucugcuaa

SEQ ID NO: 1646022 - RNA, 19 nt, Artificial Sequence
  Description of Artificial Sequence: Synthetic oligonucleotide
  Antisense strand to SEQ ID NO: 1646021
uuagcagagauguuucgcu

SEQ ID NO: 1646023 - RNA, 19 nt, Artificial Sequence
  Description of Artificial Sequence: Synthetic oligonucleotide
  Sense strand starting at position 877 of SEQ ID NO: 1561089
gcgaaacaucucugcuaaa

SEQ ID NO: 1646024 - RNA, 19 nt, Artificial Sequence
  Description of Artificial Sequence: Synthetic oligonucleotide
  Antisense strand to SEQ ID NO: 1646023
uuuagcagagauguuucgc

SEQ ID NO: 1646025 - RNA, 19 nt, Artificial Sequence
  Description of Artificial Sequence: Synthetic oligonucleotide
  Sense strand starting at position 1087 of SEQ ID NO: 1561089
ucaaauauuugucaccagu

SEQ ID NO: 1646026 - RNA, 19 nt, Artificial Sequence
  Description of Artificial Sequence: Synthetic oligonucleotide
  Antisense strand to SEQ ID NO: 1646025
acuggugacaaauauuuga

SEQ ID NO: 1646027 - RNA, 19 nt, Artificial Sequence
  Description of Artificial Sequence: Synthetic oligonucleotide
  Sense strand starting at position 1098 of SEQ ID NO: 1561089
ucaccaguuuguuggagaa

SEQ ID NO: 1646028 - RNA, 19 nt, Artificial Sequence
  Description of Artificial Sequence: Synthetic oligonucleotide
  Antisense strand to SEQ ID NO: 1646027
uucuccaacaaacugguga

SEQ ID NO: 1646029 - RNA, 19 nt, Artificial Sequence
  Description of Artificial Sequence: Synthetic oligonucleotide
  Sense strand starting at position 1100 of SEQ ID NO: 1561089
accaguuuguuggagaaca

SEQ ID NO: 1646030 - RNA, 19 nt, Artificial Sequence
  Description of Artificial Sequence: Synthetic oligonucleotide
  Antisense strand to SEQ ID NO: 1646029
uguucuccaacaaacuggu

SEQ ID NO: 1646031 - RNA, 19 nt, Artificial Sequence
  Description of Artificial Sequence: Synthetic oligonucleotide
  Sense strand starting at position 1252 of SEQ ID NO: 1561089
caagaagauuaagauggau

SEQ ID NO: 1646032 - RNA, 19 nt, Artificial Sequence
  Description of Artificial Sequence: Synthetic oligonucleotide
  Antisense strand to SEQ ID NO: 1646031
auccaucuuaaucuucuug

SEQ ID NO: 1646033 - RNA, 19 nt, Artificial Sequence
  Description of Artificial Sequence: Synthetic oligonucleotide
  Sense strand starting at position 1329 of SEQ ID NO: 1561089
gggugucuuugccuuggca

SEQ ID NO: 1646034 - RNA, 19 nt, Artificial Sequence
  Description of Artificial Sequence: Synthetic oligonucleotide
  Antisense strand to SEQ ID NO: 1646033
ugccaaggcaaagacaccc

SEQ ID NO: 1646035 - RNA, 19 nt, Artificial Sequence
  Description of Artificial Sequence: Synthetic oligonucleotide
  Sense strand starting at position 1332 of SEQ ID NO: 1561089
ugucuuugccuuggcaaga

SEQ ID NO: 1646036 - RNA, 19 nt, Artificial Sequence
  Description of Artificial Sequence: Synthetic oligonucleotide
  Antisense strand to SEQ ID NO: 1646035
ucuugccaaggcaaagaca

SEQ ID NO: 1646037 - RNA, 19 nt, Artificial Sequence
  Description of Artificial Sequence: Synthetic oligonucleotide
  Sense strand starting at position 1333 of SEQ ID NO: 1561089
gucuuugccuuggcaagaa

SEQ ID NO: 1646038 - RNA, 19 nt, Artificial Sequence
  Description of Artificial Sequence: Synthetic oligonucleotide
  Antisense strand to SEQ ID NO: 1646037
uucuugccaaggcaaagac

SEQ ID NO: 1646039 - RNA, 19 nt, Artificial Sequence
  Description of Artificial Sequence: Synthetic oligonucleotide
  Sense strand starting at position 2286 of SEQ ID NO: 1561089
guggaauguuggugcugaa

SEQ ID NO: 1646040 - RNA, 19 nt, Artificial Sequence
  Description of Artificial Sequence: Synthetic oligonucleotide
  Antisense strand to SEQ ID NO: 1646039
uucagcaccaacauuccac

SEQ ID NO: 1646041 - RNA, 19 nt, Artificial Sequence
  Description of Artificial Sequence: Synthetic oligonucleotide
  Sense strand starting at position 2312 of SEQ ID NO: 1561089
ccaagcugugcaggaaauu

SEQ ID NO: 1646042 - RNA, 19 nt, Artificial Sequence
  Description of Artificial Sequence: Synthetic oligonucleotide
  Antisense strand to SEQ ID NO: 1646041
aauuuccugcacagcuugg

SEQ ID NO: 1646043 - RNA, 19 nt, Artificial Sequence
  Description of Artificial Sequence: Synthetic oligonucleotide
  Sense strand starting at position 2313 of SEQ ID NO: 1561089
caagcugugcaggaaauua

SEQ ID NO: 1646044 - RNA, 19 nt, Artificial Sequence
  Description of Artificial Sequence: Synthetic oligonucleotide
  Antisense strand to SEQ ID NO: 1646043
uaauuuccugcacagcuug

SEQ ID NO: 1646045 - RNA, 19 nt, Artificial Sequence
  Description of Artificial Sequence: Synthetic oligonucleotide
  Sense strand starting at position 2548 of SEQ ID NO: 1561089
ugcccaggcucaucuuuaa

SEQ ID NO: 1646046 - RNA, 19 nt, Artificial Sequence
  Description of Artificial Sequence: Synthetic oligonucleotide
  Antisense strand to SEQ ID NO: 1646045
uuaaagaugagccugggca

SEQ ID NO: 1646047 - RNA, 19 nt, Artificial Sequence
  Description of Artificial Sequence: Synthetic oligonucleotide
  Sense strand starting at position 2613 of SEQ ID NO: 1561089
ggauuaccugcgugcacua

SEQ ID NO: 1646048 - RNA, 19 nt, Artificial Sequence
  Description of Artificial Sequence: Synthetic oligonucleotide
  Antisense strand to SEQ ID NO: 1646047
uagugcacgcagguaaucc

SEQ ID NO: 1646049 - RNA, 19 nt, Artificial Sequence
  Description of Artificial Sequence: Synthetic oligonucleotide
  Sense strand starting at position 2633 of SEQ ID NO: 1561089
ugggccuggucuuagaaca

SEQ ID NO: 1646050 - RNA, 19 nt, Artificial Sequence
  Description of Artificial Sequence: Synthetic oligonucleotide
  Antisense strand to SEQ ID NO: 1646049
uguucuaagaccaggccca

SEQ ID NO: 1646051 - RNA, 19 nt, Artificial Sequence
  Description of Artificial Sequence: Synthetic oligonucleotide
  Sense strand starting at position 2638 of SEQ ID NO: 1561089
cuggucuuagaacaaguau

SEQ ID NO: 1646052 - RNA, 19 nt, Artificial Sequence
  Description of Artificial Sequence: Synthetic oligonucleotide
  Antisense strand to SEQ ID NO: 1646051
auacuuguucuaagaccag

SEQ ID NO: 1646053 - RNA, 19 nt, Artificial Sequence
  Description of Artificial Sequence: Synthetic oligonucleotide
  Sense strand starting at position 3973 of SEQ ID NO: 1561089
gcagccaauuauuugguua

SEQ ID NO: 1646054 - RNA, 19 nt, Artificial Sequence
  Description of Artificial Sequence: Synthetic oligonucleotide
  Antisense strand to SEQ ID NO: 1646053
uaaccaaauaauuggcugc

SEQ ID NO: 1646055 - RNA, 19 nt, Artificial Sequence
  Description of Artificial Sequence: Synthetic oligonucleotide
  Sense strand starting at position 3975 of SEQ ID NO: 1561089
agccaauuauuugguuaac

SEQ ID NO: 1646056 - RNA, 19 nt, Artificial Sequence
  Description of Artificial Sequence: Synthetic oligonucleotide
  Antisense strand to SEQ ID NO: 1646055
guuaaccaaauaauuggcu

SEQ ID NO: 1646057 - RNA, 19 nt, Artificial Sequence
  Description of Artificial Sequence: Synthetic oligonucleotide
  Sense strand starting at position 184 of SEQ ID NO: 1561090
ggauauaccugucacgauu

SEQ ID NO: 1646058 - RNA, 19 nt, Artificial Sequence
  Description of Artificial Sequence: Synthetic oligonucleotide
  Antisense strand to SEQ ID NO: 1646057
aaucgugacagguauaucc

SEQ ID NO: 1646059 - RNA, 19 nt, Artificial Sequence
  Description of Artificial Sequence: Synthetic oligonucleotide
  Sense strand starting at position 730 of SEQ ID NO: 1561090
aggugaucugcaugcuuug

SEQ ID NO: 1646060 - RNA, 19 nt, Artificial Sequence
  Description of Artificial Sequence: Synthetic oligonucleotide
  Antisense strand to SEQ ID NO: 1646059
caaagcaugcagaucaccu

SEQ ID NO: 1646061 - RNA, 19 nt, Artificial Sequence
  Description of Artificial Sequence: Synthetic oligonucleotide
  Sense strand starting at position 842 of SEQ ID NO: 1561090
cuguaauucgcccauugga

SEQ ID NO: 1646062 - RNA, 19 nt, Artificial Sequence
  Description of Artificial Sequence: Synthetic oligonucleotide
  Antisense strand to SEQ ID NO: 1646061
uccaaugggcgaauuacag

SEQ ID NO: 1646063 - RNA, 19 nt, Artificial Sequence
  Description of Artificial Sequence: Synthetic oligonucleotide
  Sense strand starting at position 2022 of SEQ ID NO: 1561090
acgggagcagcucgugauu

SEQ ID NO: 1646064 - RNA, 19 nt, Artificial Sequence
  Description of Artificial Sequence: Synthetic oligonucleotide
  Antisense strand to SEQ ID NO: 1646063
aaucacgagcugcucccgu

SEQ ID NO: 1646065 - RNA, 19 nt, Artificial Sequence
  Description of Artificial Sequence: Synthetic oligonucleotide
  Sense strand starting at position 2035 of SEQ ID NO: 1561090
gugauuguggguugcagau

SEQ ID NO: 1646066 - RNA, 19 nt, Artificial Sequence
  Description of Artificial Sequence: Synthetic oligonucleotide
  Antisense strand to SEQ ID NO: 1646065
aucugcaacccacaaucac

SEQ ID NO: 1646067 - RNA, 19 nt, Artificial Sequence
  Description of Artificial Sequence: Synthetic oligonucleotide
  Sense strand starting at position 2037 of SEQ ID NO: 1561090
gauuguggguugcagauuu

SEQ ID NO: 1646068 - RNA, 19 nt, Artificial Sequence
  Description of Artificial Sequence: Synthetic oligonucleotide
  Antisense strand to SEQ ID NO: 1646067
aaaucugcaacccacaauc

SEQ ID NO: 1646069 - RNA, 19 nt, Artificial Sequence
  Description of Artificial Sequence: Synthetic oligonucleotide
  Sense strand starting at position 2303 of SEQ ID NO: 1561090
agggcaugucacuauccaa

SEQ ID NO: 1646070 - RNA, 19 nt, Artificial Sequence
  Description of Artificial Sequence: Synthetic oligonucleotide
  Antisense strand to SEQ ID NO: 1646069
uuggauagugacaugcccu

SEQ ID NO: 1646071 - RNA, 19 nt, Artificial Sequence
  Description of Artificial Sequence: Synthetic oligonucleotide
  Sense strand starting at position 2349 of SEQ ID NO: 1561090
agccguauugugcuugaau

SEQ ID NO: 1646072 - RNA, 19 nt, Artificial Sequence
  Description of Artificial Sequence: Synthetic oligonucleotide
  Antisense strand to SEQ ID NO: 1646071
auucaagcacaauacggcu

SEQ ID NO: 1646073 - RNA, 19 nt, Artificial Sequence
  Description of Artificial Sequence: Synthetic oligonucleotide
  Sense strand starting at position 2350 of SEQ ID NO: 1561090
gccguauugugcuugaaua

SEQ ID NO: 1646074 - RNA, 19 nt, Artificial Sequence
  Description of Artificial Sequence: Synthetic oligonucleotide
  Antisense strand to SEQ ID NO: 1646073
uauucaagcacaauacggc

SEQ ID NO: 1646075 - RNA, 19 nt, Artificial Sequence
  Description of Artificial Sequence: Synthetic oligonucleotide
  Sense strand starting at position 2351 of SEQ ID NO: 1561090
ccguauugugcuugaauac

SEQ ID NO: 1646076 - RNA, 19 nt, Artificial Sequence
  Description of Artificial Sequence: Synthetic oligonucleotide
  Antisense strand to SEQ ID NO: 1646075
guauucaagcacaauacgg

SEQ ID NO: 1646077 - RNA, 19 nt, Artificial Sequence
  Description of Artificial Sequence: Synthetic oligonucleotide
  Sense strand starting at position 2360 of SEQ ID NO: 1561090
gcuugaauaccuugagcua

SEQ ID NO: 1646078 - RNA, 19 nt, Artificial Sequence
  Description of Artificial Sequence: Synthetic oligonucleotide
  Antisense strand to SEQ ID NO: 1646077
uagcucaagguauucaagc

SEQ ID NO: 1646079 - RNA, 19 nt, Artificial Sequence
  Description of Artificial Sequence: Synthetic oligonucleotide
  Sense strand starting at position 2361 of SEQ ID NO: 1561090
cuugaauaccuugagcuau

SEQ ID NO: 1646080 - RNA, 19 nt, Artificial Sequence
  Description of Artificial Sequence: Synthetic oligonucleotide
  Antisense strand to SEQ ID NO: 1646079
auagcucaagguauucaag

SEQ ID NO: 1646081 - RNA, 19 nt, Artificial Sequence
  Description of Artificial Sequence: Synthetic oligonucleotide
  Sense strand starting at position 2567 of SEQ ID NO: 1561090
caaguucugaguggguaca

SEQ ID NO: 1646082 - RNA, 19 nt, Artificial Sequence
  Description of Artificial Sequence: Synthetic oligonucleotide
  Antisense strand to SEQ ID NO: 1646081
uguacccacucagaacuug

SEQ ID NO: 1646083 - RNA, 19 nt, Artificial Sequence
  Description of Artificial Sequence: Synthetic oligonucleotide
  Sense strand starting at position 2569 of SEQ ID NO: 1561090
aguucugaguggguacaua

SEQ ID NO: 1646084 - RNA, 19 nt, Artificial Sequence
  Description of Artificial Sequence: Synthetic oligonucleotide
  Antisense strand to SEQ ID NO: 1646083
uauguacccacucagaacu

SEQ ID NO: 1646085 - RNA, 19 nt, Artificial Sequence
  Description of Artificial Sequence: Synthetic oligonucleotide
  Sense strand starting at position 2650 of SEQ ID NO: 1561090
gacccugccucagaggaau

SEQ ID NO: 1646086 - RNA, 19 nt, Artificial Sequence
  Description of Artificial Sequence: Synthetic oligonucleotide
  Antisense strand to SEQ ID NO: 1646085
auuccucugaggcaggguc

SEQ ID NO: 1646087 - RNA, 19 nt, Artificial Sequence
  Description of Artificial Sequence: Synthetic oligonucleotide
  Sense strand starting at position 2665 of SEQ ID NO: 1561090
gaauaaaugggacguggua

SEQ ID NO: 1646088 - RNA, 19 nt, Artificial Sequence
  Description of Artificial Sequence: Synthetic oligonucleotide
  Antisense strand to SEQ ID NO: 1646087
uaccacgucccauuuauuc

SEQ ID NO: 1646089 - RNA, 19 nt, Artificial Sequence
  Description of Artificial Sequence: Synthetic oligonucleotide
  Sense strand starting at position 2682 of SEQ ID NO: 1561090
uaacgaaagccugguacau

SEQ ID NO: 1646090 - RNA, 19 nt, Artificial Sequence
  Description of Artificial Sequence: Synthetic oligonucleotide
  Antisense strand to SEQ ID NO: 1646089
auguaccaggcuuucguua

SEQ ID NO: 1646091 - RNA, 19 nt, Artificial Sequence
  Description of Artificial Sequence: Synthetic oligonucleotide
  Sense strand starting at position 2684 of SEQ ID NO: 1561090
acgaaagccugguacauga

SEQ ID NO: 1646092 - RNA, 19 nt, Artificial Sequence
  Description of Artificial Sequence: Synthetic oligonucleotide
  Antisense strand to SEQ ID NO: 1646091
ucauguaccaggcuuucgu

SEQ ID NO: 1646093 - RNA, 19 nt, Artificial Sequence
  Description of Artificial Sequence: Synthetic oligonucleotide
  Sense strand starting at position 2757 of SEQ ID NO: 1561090
auugguuccuuugcagaua

SEQ ID NO: 1646094 - RNA, 19 nt, Artificial Sequence
  Description of Artificial Sequence: Synthetic oligonucleotide
  Antisense strand to SEQ ID NO: 1646093
uaucugcaaaggaaccaau

SEQ ID NO: 1646095 - RNA, 19 nt, Artificial Sequence
  Description of Artificial Sequence: Synthetic oligonucleotide
  Sense strand starting at position 2758 of SEQ ID NO: 1561090
uugguuccuuugcagauau

SEQ ID NO: 1646096 - RNA, 19 nt, Artificial Sequence
  Description of Artificial Sequence: Synthetic oligonucleotide
  Antisense strand to SEQ ID NO: 1646095
auaucugcaaaggaaccaa

SEQ ID NO: 1646097 - RNA, 19 nt, Artificial Sequence
  Description of Artificial Sequence: Synthetic oligonucleotide
  Sense strand starting at position 2769 of SEQ ID NO: 1561090
gcagauaugcacugagagu

SEQ ID NO: 1646098 - RNA, 19 nt, Artificial Sequence
  Description of Artificial Sequence: Synthetic oligonucleotide
  Antisense strand to SEQ ID NO: 1646097
acucucagugcauaucugc

SEQ ID NO: 1646099 - RNA, 19 nt, Artificial Sequence
  Description of Artificial Sequence: Synthetic oligonucleotide
  Sense strand starting at position 2782 of SEQ ID NO: 1561090
gagaguuggcccugugcca

SEQ ID NO: 1646100 - RNA, 19 nt, Artificial Sequence
  Description of Artificial Sequence: Synthetic oligonucleotide
  Antisense strand to SEQ ID NO: 1646099
uggcacagggccaacucuc

SEQ ID NO: 1646101 - RNA, 19 nt, Artificial Sequence
  Description of Artificial Sequence: Synthetic oligonucleotide
  Sense strand starting at position 2789 of SEQ ID NO: 1561090
ggcccugugccaggcauaa

SEQ ID NO: 1646102 - RNA, 19 nt, Artificial Sequence
  Description of Artificial Sequence: Synthetic oligonucleotide
  Antisense strand to SEQ ID NO: 1646101
uuaugccuggcacagggcc

SEQ ID NO: 1646103 - RNA, 19 nt, Artificial Sequence
  Description of Artificial Sequence: Synthetic oligonucleotide
  Sense strand starting at position 2832 of SEQ ID NO: 1561090
ggccuuuaagguuaugaac

SEQ ID NO: 1646104 - RNA, 19 nt, Artificial Sequence
  Description of Artificial Sequence: Synthetic oligonucleotide
  Antisense strand to SEQ ID NO: 1646103
guucauaaccuuaaaggcc

SEQ ID NO: 1646105 - RNA, 19 nt, Artificial Sequence
  Description of Artificial Sequence: Synthetic oligonucleotide
  Sense strand starting at position 2840 of SEQ ID NO: 1561090
agguuaugaacccgaauaa

SEQ ID NO: 1646106 - RNA, 19 nt, Artificial Sequence
  Description of Artificial Sequence: Synthetic oligonucleotide
  Antisense strand to SEQ ID NO: 1646105
uuauucggguucauaaccu

SEQ ID NO: 1646107 - RNA, 19 nt, Artificial Sequence
  Description of Artificial Sequence: Synthetic oligonucleotide
  Sense strand starting at position 2889 of SEQ ID NO: 1561090
ucuggcuugucccuaucau

SEQ ID NO: 1646108 - RNA, 19 nt, Artificial Sequence
  Description of Artificial Sequence: Synthetic oligonucleotide
  Antisense strand to SEQ ID NO: 1646107
augauagggacaagccaga

SEQ ID NO: 1646109 - RNA, 19 nt, Artificial Sequence
  Description of Artificial Sequence: Synthetic oligonucleotide
  Sense strand starting at position 2890 of SEQ ID NO: 1561090
cuggcuugucccuaucaua

SEQ ID NO: 1646110 - RNA, 19 nt, Artificial Sequence
  Description of Artificial Sequence: Synthetic oligonucleotide
  Antisense strand to SEQ ID NO: 1646109
uaugauagggacaagccag

SEQ ID NO: 1646111 - RNA, 19 nt, Artificial Sequence
  Description of Artificial Sequence: Synthetic oligonucleotide
  Sense strand starting at position 2893 of SEQ ID NO: 1561090
gcuugucccuaucauauag

SEQ ID NO: 1646112 - RNA, 19 nt, Artificial Sequence
  Description of Artificial Sequence: Synthetic oligonucleotide
  Antisense strand to SEQ ID NO: 1646111
cuauaugauagggacaagc

SEQ ID NO: 1646113 - RNA, 19 nt, Artificial Sequence
  Description of Artificial Sequence: Synthetic oligonucleotide
  Sense strand starting at position 2895 of SEQ ID NO: 1561090
uugucccuaucauauagau

SEQ ID NO: 1646114 - RNA, 19 nt, Artificial Sequence
  Description of Artificial Sequence: Synthetic oligonucleotide
  Antisense strand to SEQ ID NO: 1646113
aucuauaugauagggacaa

SEQ ID NO: 1646115 - RNA, 19 nt, Artificial Sequence
  Description of Artificial Sequence: Synthetic oligonucleotide
  Sense strand starting at position 3019 of SEQ ID NO: 1561090
gacuuugaccucuggaggu

SEQ ID NO: 1646116 - RNA, 19 nt, Artificial Sequence
  Description of Artificial Sequence: Synthetic oligonucleotide
  Antisense strand to SEQ ID NO: 1646115
accuccagaggucaaaguc

SEQ ID NO: 1646117 - RNA, 19 nt, Artificial Sequence
  Description of Artificial Sequence: Synthetic oligonucleotide
  Sense strand starting at position 3069 of SEQ ID NO: 1561090
cuccaacuuucugggcaau

SEQ ID NO: 1646118 - RNA, 19 nt, Artificial Sequence
  Description of Artificial Sequence: Synthetic oligonucleotide
  Antisense strand to SEQ ID NO: 1646117
auugcccagaaaguuggag

SEQ ID NO: 1646119 - RNA, 19 nt, Artificial Sequence
  Description of Artificial Sequence: Synthetic oligonucleotide
  Sense strand starting at position 3071 of SEQ ID NO: 1561090
ccaacuuucugggcaauca

SEQ ID NO: 1646120 - RNA, 19 nt, Artificial Sequence
  Description of Artificial Sequence: Synthetic oligonucleotide
  Antisense strand to SEQ ID NO: 1646119
ugauugcccagaaaguugg

SEQ ID NO: 1646121 - RNA, 19 nt, Artificial Sequence
  Description of Artificial Sequence: Synthetic oligonucleotide
  Sense strand starting at position 3080 of SEQ ID NO: 1561090
ugggcaaucacgcaucuca

SEQ ID NO: 1646122 - RNA, 19 nt, Artificial Sequence
  Description of Artificial Sequence: Synthetic oligonucleotide
  Antisense strand to SEQ ID NO: 1646121
ugagaugcgugauugccca

SEQ ID NO: 1646123 - RNA, 19 nt, Artificial Sequence
  Description of Artificial Sequence: Synthetic oligonucleotide
  Sense strand starting at position 3114 of SEQ ID NO: 1561090
uccauaagcugguggaauc

SEQ ID NO: 1646124 - RNA, 19 nt, Artificial Sequence
  Description of Artificial Sequence: Synthetic oligonucleotide
  Antisense strand to SEQ ID NO: 1646123
gauuccaccagcuuaugga

SEQ ID NO: 1646125 - RNA, 19 nt, Artificial Sequence
  Description of Artificial Sequence: Synthetic oligonucleotide
  Sense strand starting at position 3121 of SEQ ID NO: 1561090
gcugguggaaucugaaauc

SEQ ID NO: 1646126 - RNA, 19 nt, Artificial Sequence
  Description of Artificial Sequence: Synthetic oligonucleotide
  Antisense strand to SEQ ID NO: 1646125
gauuucagauuccaccagc

SEQ ID NO: 1646127 - RNA, 19 nt, Artificial Sequence
  Description of Artificial Sequence: Synthetic oligonucleotide
  Sense strand starting at position 3235 of SEQ ID NO: 1561090
gucccagaauucgagacua

SEQ ID NO: 1646128 - RNA, 19 nt, Artificial Sequence
  Description of Artificial Sequence: Synthetic oligonucleotide
  Antisense strand to SEQ ID NO: 1646127
uagucucgaauucugggac

SEQ ID NO: 1646129 - RNA, 19 nt, Artificial Sequence
  Description of Artificial Sequence: Synthetic oligonucleotide
  Sense strand starting at position 3268 of SEQ ID NO: 1561090
gugagaucuugucuguaug

SEQ ID NO: 1646130 - RNA, 19 nt, Artificial Sequence
  Description of Artificial Sequence: Synthetic oligonucleotide
  Antisense strand to SEQ ID NO: 1646129
cauacagacaagaucucac

SEQ ID NO: 1646131 - RNA, 19 nt, Artificial Sequence
  Description of Artificial Sequence: Synthetic oligonucleotide
  Sense strand starting at position 3271 of SEQ ID NO: 1561090
agaucuugucuguaugaaa

SEQ ID NO: 1646132 - RNA, 19 nt, Artificial Sequence
  Description of Artificial Sequence: Synthetic oligonucleotide
  Antisense strand to SEQ ID NO: 1646131
uuucauacagacaagaucu

SEQ ID NO: 1646133 - RNA, 19 nt, Artificial Sequence
  Description of Artificial Sequence: Synthetic oligonucleotide
  Sense strand starting at position 3362 of SEQ ID NO: 1561090
ucgcuugagcguggaaguu

SEQ ID NO: 1646134 - RNA, 19 nt, Artificial Sequence
  Description of Artificial Sequence: Synthetic oligonucleotide
  Antisense strand to SEQ ID NO: 1646133
aacuuccacgcucaagcga

SEQ ID NO: 1646135 - RNA, 19 nt, Artificial Sequence
  Description of Artificial Sequence: Synthetic oligonucleotide
  Sense strand starting at position 3392 of SEQ ID NO: 1561090
ugagcuguggucgagaacu

SEQ ID NO: 1646136 - RNA, 19 nt, Artificial Sequence
  Description of Artificial Sequence: Synthetic oligonucleotide
  Antisense strand to SEQ ID NO: 1646135
aguucucgaccacagcuca

SEQ ID NO: 1646137 - RNA, 19 nt, Artificial Sequence
  Description of Artificial Sequence: Synthetic oligonucleotide
  Sense strand starting at position 75 of SEQ ID NO: 1561091
gauaguggaucugcaauga

SEQ ID NO: 1646138 - RNA, 19 nt, Artificial Sequence
  Description of Artificial Sequence: Synthetic oligonucleotide
  Antisense strand to SEQ ID NO: 1646137
ucauugcagauccacuauc

SEQ ID NO: 1646139 - RNA, 19 nt, Artificial Sequence
  Description of Artificial Sequence: Synthetic oligonucleotide
  Sense strand starting at position 79 of SEQ ID NO: 1561091
guggaucugcaaugaauuc

SEQ ID NO: 1646140 - RNA, 19 nt, Artificial Sequence
  Description of Artificial Sequence: Synthetic oligonucleotide
  Antisense strand to SEQ ID NO: 1646139
gaauucauugcagauccac

SEQ ID NO: 1646141 - RNA, 19 nt, Artificial Sequence
  Description of Artificial Sequence: Synthetic oligonucleotide
  Sense strand starting at position 86 of SEQ ID NO: 1561091
ugcaaugaauucuuggaua

SEQ ID NO: 1646142 - RNA, 19 nt, Artificial Sequence
  Description of Artificial Sequence: Synthetic oligonucleotide
  Antisense strand to SEQ ID NO: 1646141
uauccaagaauucauugca

SEQ ID NO: 1646143 - RNA, 19 nt, Artificial Sequence
  Description of Artificial Sequence: Synthetic oligonucleotide
  Sense strand starting at position 401 of SEQ ID NO: 1561091
cgucacuaaucauuaagga

SEQ ID NO: 1646144 - RNA, 19 nt, Artificial Sequence
  Description of Artificial Sequence: Synthetic oligonucleotide
  Antisense strand to SEQ ID NO: 1646143
uccuuaaugauuagugacg

SEQ ID NO: 1646145 - RNA, 19 nt, Artificial Sequence
  Description of Artificial Sequence: Synthetic oligonucleotide
  Sense strand starting at position 439 of SEQ ID NO: 1561091
augagauaauaccucgcau

SEQ ID NO: 1646146 - RNA, 19 nt, Artificial Sequence
  Description of Artificial Sequence: Synthetic oligonucleotide
  Antisense strand to SEQ ID NO: 1646145
augcgagguauuaucucau

SEQ ID NO: 1646147 - RNA, 19 nt, Artificial Sequence
  Description of Artificial Sequence: Synthetic oligonucleotide
  Sense strand starting at position 531 of SEQ ID NO: 1561091
gugccuugcuggucagaau

SEQ ID NO: 1646148 - RNA, 19 nt, Artificial Sequence
  Description of Artificial Sequence: Synthetic oligonucleotide
  Antisense strand to SEQ ID NO: 1646147
auucugaccagcaaggcac

SEQ ID NO: 1646149 - RNA, 19 nt, Artificial Sequence
  Description of Artificial Sequence: Synthetic oligonucleotide
  Sense strand starting at position 534 of SEQ ID NO: 1561091
ccuugcuggucagaaugua

SEQ ID NO: 1646150 - RNA, 19 nt, Artificial Sequence
  Description of Artificial Sequence: Synthetic oligonucleotide
  Antisense strand to SEQ ID NO: 1646149
uacauucugaccagcaagg

SEQ ID NO: 1646151 - RNA, 19 nt, Artificial Sequence
  Description of Artificial Sequence: Synthetic oligonucleotide
  Sense strand starting at position 749 of SEQ ID NO: 1561091
gcuguagugagaggugauc

SEQ ID NO: 1646152 - RNA, 19 nt, Artificial Sequence
  Description of Artificial Sequence: Synthetic oligonucleotide
  Antisense strand to SEQ ID NO: 1646151
gaucaccucucacuacagc

SEQ ID NO: 1646153 - RNA, 19 nt, Artificial Sequence
  Description of Artificial Sequence: Synthetic oligonucleotide
  Sense strand starting at position 751 of SEQ ID NO: 1561091
uguagugagaggugaucau

SEQ ID NO: 1646154 - RNA, 19 nt, Artificial Sequence
  Description of Artificial Sequence: Synthetic oligonucleotide
  Antisense strand to SEQ ID NO: 1646153
augaucaccucucacuaca

SEQ ID NO: 1646155 - RNA, 19 nt, Artificial Sequence
  Description of Artificial Sequence: Synthetic oligonucleotide
  Sense strand starting at position 1164 of SEQ ID NO: 1561091
cuagaacaguuguccuuaa

SEQ ID NO: 1646156 - RNA, 19 nt, Artificial Sequence
  Description of Artificial Sequence: Synthetic oligonucleotide
  Antisense strand to SEQ ID NO: 1646155
uuaaggacaacuguucuag

SEQ ID NO: 1646157 - RNA, 19 nt, Artificial Sequence
  Description of Artificial Sequence: Synthetic oligonucleotide
  Sense strand starting at position 1185 of SEQ ID NO: 1561091
gcaagcuuuacggaaggga

SEQ ID NO: 1646158 - RNA, 19 nt, Artificial Sequence
  Description of Artificial Sequence: Synthetic oligonucleotide
  Antisense strand to SEQ ID NO: 1646157
ucccuuccguaaagcuugc

SEQ ID NO: 1646159 - RNA, 19 nt, Artificial Sequence
  Description of Artificial Sequence: Synthetic oligonucleotide
  Sense strand starting at position 1264 of SEQ ID NO: 1561091
gcggacuccucuucccaua

SEQ ID NO: 1646160 - RNA, 19 nt, Artificial Sequence
  Description of Artificial Sequence: Synthetic oligonucleotide
  Antisense strand to SEQ ID NO: 1646159
uaugggaagaggaguccgc

SEQ ID NO: 1646161 - RNA, 19 nt, Artificial Sequence
  Description of Artificial Sequence: Synthetic oligonucleotide
  Sense strand starting at position 1565 of SEQ ID NO: 1561091
gccgaauccugucaaggaa

SEQ ID NO: 1646162 - RNA, 19 nt, Artificial Sequence
  Description of Artificial Sequence: Synthetic oligonucleotide
  Antisense strand to SEQ ID NO: 1646161
uuccuugacaggauucggc

SEQ ID NO: 1646163 - RNA, 19 nt, Artificial Sequence
  Description of Artificial Sequence: Synthetic oligonucleotide
  Sense strand starting at position 1568 of SEQ ID NO: 1561091
gaauccugucaaggaauug

SEQ ID NO: 1646164 - RNA, 19 nt, Artificial Sequence
  Description of Artificial Sequence: Synthetic oligonucleotide
  Antisense strand to SEQ ID NO: 1646163
caauuccuugacaggauuc

SEQ ID NO: 1646165 - RNA, 19 nt, Artificial Sequence
  Description of Artificial Sequence: Synthetic oligonucleotide
  Sense strand starting at position 1901 of SEQ ID NO: 1561091
agcugagaagccuagcaau

SEQ ID NO: 1646166 - RNA, 19 nt, Artificial Sequence
  Description of Artificial Sequence: Synthetic oligonucleotide
  Antisense strand to SEQ ID NO: 1646165
auugcuaggcuucucagcu

SEQ ID NO: 1646167 - RNA, 19 nt, Artificial Sequence
  Description of Artificial Sequence: Synthetic oligonucleotide
  Sense strand starting at position 1931 of SEQ ID NO: 1561091
ccuucaggcgucgacagau

SEQ ID NO: 1646168 - RNA, 19 nt, Artificial Sequence
  Description of Artificial Sequence: Synthetic oligonucleotide
  Antisense strand to SEQ ID NO: 1646167
aucugucgacgccugaagg

SEQ ID NO: 1646169 - RNA, 19 nt, Artificial Sequence
  Description of Artificial Sequence: Synthetic oligonucleotide
  Sense strand starting at position 1943 of SEQ ID NO: 1561091
gacagaucgguuugggcga

SEQ ID NO: 1646170 - RNA, 19 nt, Artificial Sequence
  Description of Artificial Sequence: Synthetic oligonucleotide
  Antisense strand to SEQ ID NO: 1646169
ucgcccaaaccgaucuguc

SEQ ID NO: 1646171 - RNA, 19 nt, Artificial Sequence
  Description of Artificial Sequence: Synthetic oligonucleotide
  Sense strand starting at position 2208 of SEQ ID NO: 1561091
aggccuuucucuggcacau

SEQ ID NO: 1646172 - RNA, 19 nt, Artificial Sequence
  Description of Artificial Sequence: Synthetic oligonucleotide
  Antisense strand to SEQ ID NO: 1646171
augugccagagaaaggccu

SEQ ID NO: 1646173 - RNA, 19 nt, Artificial Sequence
  Description of Artificial Sequence: Synthetic oligonucleotide
  Sense strand starting at position 2269 of SEQ ID NO: 1561091
gugggagaaucgucucauu

SEQ ID NO: 1646174 - RNA, 19 nt, Artificial Sequence
  Description of Artificial Sequence: Synthetic oligonucleotide
  Antisense strand to SEQ ID NO: 1646173
aaugagacgauucucccac

SEQ ID NO: 1646175 - RNA, 19 nt, Artificial Sequence
  Description of Artificial Sequence: Synthetic oligonucleotide
  Sense strand starting at position 2320 of SEQ ID NO: 1561091
acuuaaagaucgccuacua

SEQ ID NO: 1646176 - RNA, 19 nt, Artificial Sequence
  Description of Artificial Sequence: Synthetic oligonucleotide
  Antisense strand to SEQ ID NO: 1646175
uaguaggcgaucuuuaagu

SEQ ID NO: 1646177 - RNA, 19 nt, Artificial Sequence
  Description of Artificial Sequence: Synthetic oligonucleotide
  Sense strand starting at position 2375 of SEQ ID NO: 1561091
cagggacguugccuuaaga

SEQ ID NO: 1646178 - RNA, 19 nt, Artificial Sequence
  Description of Artificial Sequence: Synthetic oligonucleotide
  Antisense strand to SEQ ID NO: 1646177
ucuuaaggcaacgucccug

SEQ ID NO: 1646179 - RNA, 19 nt, Artificial Sequence
  Description of Artificial Sequence: Synthetic oligonucleotide
  Sense strand starting at position 2451 of SEQ ID NO: 1561091
ggucauccguucucauacu

SEQ ID NO: 1646180 - RNA, 19 nt, Artificial Sequence
  Description of Artificial Sequence: Synthetic oligonucleotide
  Antisense strand to SEQ ID NO: 1646179
aguaugagaacggaugacc

SEQ ID NO: 1646181 - RNA, 19 nt, Artificial Sequence
  Description of Artificial Sequence: Synthetic oligonucleotide
  Sense strand starting at position 2452 of SEQ ID NO: 1561091
gucauccguucucauacuu

SEQ ID NO: 1646182 - RNA, 19 nt, Artificial Sequence
  Description of Artificial Sequence: Synthetic oligonucleotide
  Antisense strand to SEQ ID NO: 1646181
aaguaugagaacggaugac

SEQ ID NO: 1646183 - RNA, 19 nt, Artificial Sequence
  Description of Artificial Sequence: Synthetic oligonucleotide
  Sense strand starting at position 2467 of SEQ ID NO: 1561091
acuuuccggucucuuaaga

SEQ ID NO: 1646184 - RNA, 19 nt, Artificial Sequence
  Description of Artificial Sequence: Synthetic oligonucleotide
  Antisense strand to SEQ ID NO: 1646183
ucuuaagagaccggaaagu

SEQ ID NO: 1646185 - RNA, 19 nt, Artificial Sequence
  Description of Artificial Sequence: Synthetic oligonucleotide
  Sense strand starting at position 2472 of SEQ ID NO: 1561091
ccggucucuuaagaauuau

SEQ ID NO: 1646186 - RNA, 19 nt, Artificial Sequence
  Description of Artificial Sequence: Synthetic oligonucleotide
  Antisense strand to SEQ ID NO: 1646185
auaauucuuaagagaccgg

SEQ ID NO: 1646187 - RNA, 19 nt, Artificial Sequence
  Description of Artificial Sequence: Synthetic oligonucleotide
  Sense strand starting at position 2511 of SEQ ID NO: 1561091
gaguuacauuuauaugggu

SEQ ID NO: 1646188 - RNA, 19 nt, Artificial Sequence
  Description of Artificial Sequence: Synthetic oligonucleotide
  Antisense strand to SEQ ID NO: 1646187
acccauauaaauguaacuc

SEQ ID NO: 1646189 - RNA, 19 nt, Artificial Sequence
  Description of Artificial Sequence: Synthetic oligonucleotide
  Sense strand starting at position 2518 of SEQ ID NO: 1561091
auuuauauggguuguaugu

SEQ ID NO: 1646190 - RNA, 19 nt, Artificial Sequence
  Description of Artificial Sequence: Synthetic oligonucleotide
  Antisense strand to SEQ ID NO: 1646189
acauacaacccauauaaau

SEQ ID NO: 1646191 - RNA, 19 nt, Artificial Sequence
  Description of Artificial Sequence: Synthetic oligonucleotide
  Sense strand starting at position 2533 of SEQ ID NO: 1561091
auguuuaugugaguuguau

SEQ ID NO: 1646192 - RNA, 19 nt, Artificial Sequence
  Description of Artificial Sequence: Synthetic oligonucleotide
  Antisense strand to SEQ ID NO: 1646191
auacaacucacauaaacau

SEQ ID NO: 1646193 - RNA, 19 nt, Artificial Sequence
  Description of Artificial Sequence: Synthetic oligonucleotide
  Sense strand starting at position 2535 of SEQ ID NO: 1561091
guuuaugugaguuguaucu

SEQ ID NO: 1646194 - RNA, 19 nt, Artificial Sequence
  Description of Artificial Sequence: Synthetic oligonucleotide
  Antisense strand to SEQ ID NO: 1646193
agauacaacucacauaaac

SEQ ID NO: 1646195 - RNA, 19 nt, Artificial Sequence
  Description of Artificial Sequence: Synthetic oligonucleotide
  Sense strand starting at position 2537 of SEQ ID NO: 1561091
uuaugugaguuguaucuau

SEQ ID NO: 1646196 - RNA, 19 nt, Artificial Sequence
  Description of Artificial Sequence: Synthetic oligonucleotide
  Antisense strand to SEQ ID NO: 1646195
auagauacaacucacauaa

SEQ ID NO: 1646197 - RNA, 19 nt, Artificial Sequence
  Description of Artificial Sequence: Synthetic oligonucleotide
  Sense strand starting at position 2541 of SEQ ID NO: 1561091
gugaguuguaucuaucaau

SEQ ID NO: 1646198 - RNA, 19 nt, Artificial Sequence
  Description of Artificial Sequence: Synthetic oligonucleotide
  Antisense strand to SEQ ID NO: 1646197
auugauagauacaacucac

SEQ ID NO: 1646199 - RNA, 19 nt, Artificial Sequence
  Description of Artificial Sequence: Synthetic oligonucleotide
  Sense strand starting at position 3071 of SEQ ID NO: 1561091
cugcacugagugugucaaa

SEQ ID NO: 1646200 - RNA, 19 nt, Artificial Sequence
  Description of Artificial Sequence: Synthetic oligonucleotide
  Antisense strand to SEQ ID NO: 1646199
uuugacacacucagugcag

SEQ ID NO: 1646201 - RNA, 19 nt, Artificial Sequence
  Description of Artificial Sequence: Synthetic oligonucleotide
  Sense strand starting at position 3092 of SEQ ID NO: 1561091
agcucaugucuuguagcuu

SEQ ID NO: 1646202 - RNA, 19 nt, Artificial Sequence
  Description of Artificial Sequence: Synthetic oligonucleotide
  Antisense strand to SEQ ID NO: 1646201
aagcuacaagacaugagcu

SEQ ID NO: 1646203 - RNA, 19 nt, Artificial Sequence
  Description of Artificial Sequence: Synthetic oligonucleotide
  Sense strand starting at position 3103 of SEQ ID NO: 1561091
uguagcuucuggcaaacau

SEQ ID NO: 1646204 - RNA, 19 nt, Artificial Sequence
  Description of Artificial Sequence: Synthetic oligonucleotide
  Antisense strand to SEQ ID NO: 1646203
auguuugccagaagcuaca

SEQ ID NO: 1646205 - RNA, 19 nt, Artificial Sequence
  Description of Artificial Sequence: Synthetic oligonucleotide
  Sense strand starting at position 3237 of SEQ ID NO: 1561091
ugagccacacuuugagaau

SEQ ID NO: 1646206 - RNA, 19 nt, Artificial Sequence
  Description of Artificial Sequence: Synthetic oligonucleotide
  Antisense strand to SEQ ID NO: 1646205
auucucaaaguguggcuca

SEQ ID NO: 1646207 - RNA, 19 nt, Artificial Sequence
  Description of Artificial Sequence: Synthetic oligonucleotide
  Sense strand starting at position 3259 of SEQ ID NO: 1561091
aggcuuaaauuguuaugau

SEQ ID NO: 1646208 - RNA, 19 nt, Artificial Sequence
  Description of Artificial Sequence: Synthetic oligonucleotide
  Antisense strand to SEQ ID NO: 1646207
aucauaacaauuuaagccu

SEQ ID NO: 1646209 - RNA, 19 nt, Artificial Sequence
  Description of Artificial Sequence: Synthetic oligonucleotide
  Sense strand starting at position 3260 of SEQ ID NO: 1561091
ggcuuaaauuguuaugauu

SEQ ID NO: 1646210 - RNA, 19 nt, Artificial Sequence
  Description of Artificial Sequence: Synthetic oligonucleotide
  Antisense strand to SEQ ID NO: 1646209
aaucauaacaauuuaagcc

SEQ ID NO: 1646211 - RNA, 19 nt, Artificial Sequence
  Description of Artificial Sequence: Synthetic oligonucleotide
  Sense strand starting at position 3324 of SEQ ID NO: 1561091
aucacaaucuuugggaauc

SEQ ID NO: 1646212 - RNA, 19 nt, Artificial Sequence
  Description of Artificial Sequence: Synthetic oligonucleotide
  Antisense strand to SEQ ID NO: 1646211
gauucccaaagauugugau

SEQ ID NO: 1646213 - RNA, 19 nt, Artificial Sequence
  Description of Artificial Sequence: Synthetic oligonucleotide
  Sense strand starting at position 3325 of SEQ ID NO: 1561091
ucacaaucuuugggaauca

SEQ ID NO: 1646214 - RNA, 19 nt, Artificial Sequence
  Description of Artificial Sequence: Synthetic oligonucleotide
  Antisense strand to SEQ ID NO: 1646213
ugauucccaaagauuguga

SEQ ID NO: 1646215 - RNA, 19 nt, Artificial Sequence
  Description of Artificial Sequence: Synthetic oligonucleotide
  Sense strand starting at position 3356 of SEQ ID NO: 1561091
acacguauuuaucgagagu

SEQ ID NO: 1646216 - RNA, 19 nt, Artificial Sequence
  Description of Artificial Sequence: Synthetic oligonucleotide
  Antisense strand to SEQ ID NO: 1646215
acucucgauaaauacgugu

SEQ ID NO: 1646217 - RNA, 19 nt, Artificial Sequence
  Description of Artificial Sequence: Synthetic oligonucleotide
  Sense strand starting at position 18 of SEQ ID NO: 1561092
uacagagucuguccuggaa

SEQ ID NO: 1646218 - RNA, 19 nt, Artificial Sequence
  Description of Artificial Sequence: Synthetic oligonucleotide
  Antisense strand to SEQ ID NO: 1646217
uuccaggacagacucugua

SEQ ID NO: 1646219 - RNA, 19 nt, Artificial Sequence
  Description of Artificial Sequence: Synthetic oligonucleotide
  Sense strand starting at position 260 of SEQ ID NO: 1561092
caggcagagcugugucuuu

SEQ ID NO: 1646220 - RNA, 19 nt, Artificial Sequence
  Description of Artificial Sequence: Synthetic oligonucleotide
  Antisense strand to SEQ ID NO: 1646219
aaagacacagcucugccug

SEQ ID NO: 1646221 - RNA, 19 nt, Artificial Sequence
  Description of Artificial Sequence: Synthetic oligonucleotide
  Sense strand starting at position 265 of SEQ ID NO: 1561092
agagcugugucuuucugca

SEQ ID NO: 1646222 - RNA, 19 nt, Artificial Sequence
  Description of Artificial Sequence: Synthetic oligonucleotide
  Antisense strand to SEQ ID NO: 1646221
ugcagaaagacacagcucu

SEQ ID NO: 1646223 - RNA, 19 nt, Artificial Sequence
  Description of Artificial Sequence: Synthetic oligonucleotide
  Sense strand starting at position 332 of SEQ ID NO: 1561092
ccacucauggugugagcuu

SEQ ID NO: 1646224 - RNA, 19 nt, Artificial Sequence
  Description of Artificial Sequence: Synthetic oligonucleotide
  Antisense strand to SEQ ID NO: 1646223
aagcucacaccaugagugg

SEQ ID NO: 1646225 - RNA, 19 nt, Artificial Sequence
  Description of Artificial Sequence: Synthetic oligonucleotide
  Sense strand starting at position 416 of SEQ ID NO: 1561092
ggccaaaucccuggaacca

SEQ ID NO: 1646226 - RNA, 19 nt, Artificial Sequence
  Description of Artificial Sequence: Synthetic oligonucleotide
  Antisense strand to SEQ ID NO: 1646225
ugguuccagggauuuggcc

SEQ ID NO: 1646227 - RNA, 19 nt, Artificial Sequence
  Description of Artificial Sequence: Synthetic oligonucleotide
  Sense strand starting at position 755 of SEQ ID NO: 1561092
gcgguaaggugagaacagu

SEQ ID NO: 1646228 - RNA, 19 nt, Artificial Sequence
  Description of Artificial Sequence: Synthetic oligonucleotide
  Antisense strand to SEQ ID NO: 1646227
acuguucucaccuuaccgc

SEQ ID NO: 1646229 - RNA, 19 nt, Artificial Sequence
  Description of Artificial Sequence: Synthetic oligonucleotide
  Sense strand starting at position 865 of SEQ ID NO: 1561092
guauccaugacuugggaca

SEQ ID NO: 1646230 - RNA, 19 nt, Artificial Sequence
  Description of Artificial Sequence: Synthetic oligonucleotide
  Antisense strand to SEQ ID NO: 1646229
ugucccaagucauggauac

SEQ ID NO: 1646231 - RNA, 19 nt, Artificial Sequence
  Description of Artificial Sequence: Synthetic oligonucleotide
  Sense strand starting at position 867 of SEQ ID NO: 1561092
auccaugacuugggacaga

SEQ ID NO: 1646232 - RNA, 19 nt, Artificial Sequence
  Description of Artificial Sequence: Synthetic oligonucleotide
  Antisense strand to SEQ ID NO: 1646231
ucugucccaagucauggau

SEQ ID NO: 1646233 - RNA, 19 nt, Artificial Sequence
  Description of Artificial Sequence: Synthetic oligonucleotide
  Sense strand starting at position 1146 of SEQ ID NO: 1561092
gucauugccugcucugaac

SEQ ID NO: 1646234 - RNA, 19 nt, Artificial Sequence
  Description of Artificial Sequence: Synthetic oligonucleotide
  Antisense strand to SEQ ID NO: 1646233
guucagagcaggcaaugac

SEQ ID NO: 1646235 - RNA, 19 nt, Artificial Sequence
  Description of Artificial Sequence: Synthetic oligonucleotide
  Sense strand starting at position 1226 of SEQ ID NO: 1561092
agaauaaagucacugcacu

SEQ ID NO: 1646236 - RNA, 19 nt, Artificial Sequence
  Description of Artificial Sequence: Synthetic oligonucleotide
  Antisense strand to SEQ ID NO: 1646235
agugcagugacuuuauucu

SEQ ID NO: 1646237 - RNA, 19 nt, Artificial Sequence
  Description of Artificial Sequence: Synthetic oligonucleotide
  Sense strand starting at position 1343 of SEQ ID NO: 1561092
uggucaaguuccugcgcua

SEQ ID NO: 1646238 - RNA, 19 nt, Artificial Sequence
  Description of Artificial Sequence: Synthetic oligonucleotide
  Antisense strand to SEQ ID NO: 1646237
uagcgcaggaacuugacca

SEQ ID NO: 1646239 - RNA, 19 nt, Artificial Sequence
  Description of Artificial Sequence: Synthetic oligonucleotide
  Sense strand starting at position 1344 of SEQ ID NO: 1561092
ggucaaguuccugcgcuaa

SEQ ID NO: 1646240 - RNA, 19 nt, Artificial Sequence
  Description of Artificial Sequence: Synthetic oligonucleotide
  Antisense strand to SEQ ID NO: 1646239
uuagcgcaggaacuugacc

SEQ ID NO: 1646241 - RNA, 19 nt, Artificial Sequence
  Description of Artificial Sequence: Synthetic oligonucleotide
  Sense strand starting at position 1346 of SEQ ID NO: 1561092
ucaaguuccugcgcuaauc

SEQ ID NO: 1646242 - RNA, 19 nt, Artificial Sequence
  Description of Artificial Sequence: Synthetic oligonucleotide
  Antisense strand to SEQ ID NO: 1646241
gauuagcgcaggaacuuga

SEQ ID NO: 1646243 - RNA, 19 nt, Artificial Sequence
  Description of Artificial Sequence: Synthetic oligonucleotide
  Sense strand starting at position 1405 of SEQ ID NO: 1561092
gaggguaacugccuugcaa

SEQ ID NO: 1646244 - RNA, 19 nt, Artificial Sequence
  Description of Artificial Sequence: Synthetic oligonucleotide
  Antisense strand to SEQ ID NO: 1646243
uugcaaggcaguuacccuc

SEQ ID NO: 1646245 - RNA, 19 nt, Artificial Sequence
  Description of Artificial Sequence: Synthetic oligonucleotide
  Sense strand starting at position 1559 of SEQ ID NO: 1561092
cggucauagcgcucucuga

SEQ ID NO: 1646246 - RNA, 19 nt, Artificial Sequence
  Description of Artificial Sequence: Synthetic oligonucleotide
  Antisense strand to SEQ ID NO: 1646245
ucagagagcgcuaugaccg

SEQ ID NO: 1646247 - RNA, 19 nt, Artificial Sequence
  Description of Artificial Sequence: Synthetic oligonucleotide
  Sense strand starting at position 2172 of SEQ ID NO: 1561092
ccuccaguugccugaguua

SEQ ID NO: 1646248 - RNA, 19 nt, Artificial Sequence
  Description of Artificial Sequence: Synthetic oligonucleotide
  Antisense strand to SEQ ID NO: 1646247
uaacucaggcaacuggagg

SEQ ID NO: 1646249 - RNA, 19 nt, Artificial Sequence
  Description of Artificial Sequence: Synthetic oligonucleotide
  Sense strand starting at position 2175 of SEQ ID NO: 1561092
ccaguugccugaguuacau

SEQ ID NO: 1646250 - RNA, 19 nt, Artificial Sequence
  Description of Artificial Sequence: Synthetic oligonucleotide
  Antisense strand to SEQ ID NO: 1646249
auguaacucaggcaacugg

SEQ ID NO: 1646251 - RNA, 19 nt, Artificial Sequence
  Description of Artificial Sequence: Synthetic oligonucleotide
  Sense strand starting at position 2304 of SEQ ID NO: 1561092
gugugugcucccuuuagua

SEQ ID NO: 1646252 - RNA, 19 nt, Artificial Sequence
  Description of Artificial Sequence: Synthetic oligonucleotide
  Antisense strand to SEQ ID NO: 1646251
uacuaaagggagcacacac

SEQ ID NO: 1646253 - RNA, 19 nt, Artificial Sequence
  Description of Artificial Sequence: Synthetic oligonucleotide
  Sense strand starting at position 2306 of SEQ ID NO: 1561092
gugugcucccuuuaguacu

SEQ ID NO: 1646254 - RNA, 19 nt, Artificial Sequence
  Description of Artificial Sequence: Synthetic oligonucleotide
  Antisense strand to SEQ ID NO: 1646253
aguacuaaagggagcacac

SEQ ID NO: 1646255 - RNA, 19 nt, Artificial Sequence
  Description of Artificial Sequence: Synthetic oligonucleotide
  Sense strand starting at position 2407 of SEQ ID NO: 1561092
ccauucuacagguggaagu

SEQ ID NO: 1646256 - RNA, 19 nt, Artificial Sequence
  Description of Artificial Sequence: Synthetic oligonucleotide
  Antisense strand to SEQ ID NO: 1646255
acuuccaccuguagaaugg

SEQ ID NO: 1646257 - RNA, 19 nt, Artificial Sequence
  Description of Artificial Sequence: Synthetic oligonucleotide
  Sense strand starting at position 2431 of SEQ ID NO: 1561092
cccagagaucaguagcgau

SEQ ID NO: 1646258 - RNA, 19 nt, Artificial Sequence
  Description of Artificial Sequence: Synthetic oligonucleotide
  Antisense strand to SEQ ID NO: 1646257
aucgcuacugaucucuggg

SEQ ID NO: 1646259 - RNA, 19 nt, Artificial Sequence
  Description of Artificial Sequence: Synthetic oligonucleotide
  Sense strand starting at position 2570 of SEQ ID NO: 1561092
cuaugcacccuggaucaaa

SEQ ID NO: 1646260 - RNA, 19 nt, Artificial Sequence
  Description of Artificial Sequence: Synthetic oligonucleotide
  Antisense strand to SEQ ID NO: 1646259
uuugauccagggugcauag

SEQ ID NO: 1646261 - RNA, 19 nt, Artificial Sequence
  Description of Artificial Sequence: Synthetic oligonucleotide
  Sense strand starting at position 3391 of SEQ ID NO: 1561092
ucgcuucugucgucggaga

SEQ ID NO: 1646262 - RNA, 19 nt, Artificial Sequence
  Description of Artificial Sequence: Synthetic oligonucleotide
  Antisense strand to SEQ ID NO: 1646261
ucuccgacgacagaagcga

SEQ ID NO: 1646263 - RNA, 19 nt, Artificial Sequence
  Description of Artificial Sequence: Synthetic oligonucleotide
  Sense strand starting at position 3457 of SEQ ID NO: 1561092
ggccgacucucuuaaagga

SEQ ID NO: 1646264 - RNA, 19 nt, Artificial Sequence
  Description of Artificial Sequence: Synthetic oligonucleotide
  Antisense strand to SEQ ID NO: 1646263
uccuuuaagagagucggcc

SEQ ID NO: 1646265 - RNA, 19 nt, Artificial Sequence
  Description of Artificial Sequence: Synthetic oligonucleotide
  Sense strand starting at position 3516 of SEQ ID NO: 1561092
cugauugucgcggguguua

SEQ ID NO: 1646266 - RNA, 19 nt, Artificial Sequence
  Description of Artificial Sequence: Synthetic oligonucleotide
  Antisense strand to SEQ ID NO: 1646265
uaacacccgcgacaaucag

SEQ ID NO: 1646267 - RNA, 19 nt, Artificial Sequence
  Description of Artificial Sequence: Synthetic oligonucleotide
  Sense strand starting at position 3578 of SEQ ID NO: 1561092
cccaguugcccucgcaauu

SEQ ID NO: 1646268 - RNA, 19 nt, Artificial Sequence
  Description of Artificial Sequence: Synthetic oligonucleotide
  Antisense strand to SEQ ID NO: 1646267
aauugcgagggcaacuggg

SEQ ID NO: 1646269 - RNA, 19 nt, Artificial Sequence
  Description of Artificial Sequence: Synthetic oligonucleotide
  Sense strand starting at position 3780 of SEQ ID NO: 1561092
uggaguuuguauguuguca

SEQ ID NO: 1646270 - RNA, 19 nt, Artificial Sequence
  Description of Artificial Sequence: Synthetic oligonucleotide
  Antisense strand to SEQ ID NO: 1646269
ugacaacauacaaacucca

SEQ ID NO: 1646271 - RNA, 19 nt, Artificial Sequence
  Description of Artificial Sequence: Synthetic oligonucleotide
  Sense strand starting at position 3784 of SEQ ID NO: 1561092
guuuguauguugucagcca

SEQ ID NO: 1646272 - RNA, 19 nt, Artificial Sequence
  Description of Artificial Sequence: Synthetic oligonucleotide
  Antisense strand to SEQ ID NO: 1646271
uggcugacaacauacaaac

SEQ ID NO: 1646273 - RNA, 19 nt, Artificial Sequence
  Description of Artificial Sequence: Synthetic oligonucleotide
  Sense strand starting at position 3877 of SEQ ID NO: 1561092
guaggauugguuuaccauc

SEQ ID NO: 1646274 - RNA, 19 nt, Artificial Sequence
  Description of Artificial Sequence: Synthetic oligonucleotide
  Antisense strand to SEQ ID NO: 1646273
gaugguaaaccaauccuac

SEQ ID NO: 1646275 - RNA, 19 nt, Artificial Sequence
  Description of Artificial Sequence: Synthetic oligonucleotide
  Sense strand starting at position 3964 of SEQ ID NO: 1561092
aacagucauccgugaugua

SEQ ID NO: 1646276 - RNA, 19 nt, Artificial Sequence
  Description of Artificial Sequence: Synthetic oligonucleotide
  Antisense strand to SEQ ID NO: 1646275
uacaucacggaugacuguu

SEQ ID NO: 1646277 - RNA, 19 nt, Artificial Sequence
  Description of Artificial Sequence: Synthetic oligonucleotide
  Sense strand starting at position 3965 of SEQ ID NO: 1561092
acagucauccgugauguaa

SEQ ID NO: 1646278 - RNA, 19 nt, Artificial Sequence
  Description of Artificial Sequence: Synthetic oligonucleotide
  Antisense strand to SEQ ID NO: 1646277
uuacaucacggaugacugu

SEQ ID NO: 1646279 - RNA, 19 nt, Artificial Sequence
  Description of Artificial Sequence: Synthetic oligonucleotide
  Sense strand starting at position 3967 of SEQ ID NO: 1561092
agucauccgugauguaaac

SEQ ID NO: 1646280 - RNA, 19 nt, Artificial Sequence
  Description of Artificial Sequence: Synthetic oligonucleotide
  Antisense strand to SEQ ID NO: 1646279
guuuacaucacggaugacu

SEQ ID NO: 1646281 - RNA, 19 nt, Artificial Sequence
  Description of Artificial Sequence: Synthetic oligonucleotide
  Sense strand starting at position 479 of SEQ ID NO: 1561093
ugcagaauucccuggcgag

SEQ ID NO: 1646282 - RNA, 19 nt, Artificial Sequence
  Description of Artificial Sequence: Synthetic oligonucleotide
  Antisense strand to SEQ ID NO: 1646281
cucgccagggaauucugca

SEQ ID NO: 1646283 - RNA, 19 nt, Artificial Sequence
  Description of Artificial Sequence: Synthetic oligonucleotide
  Sense strand starting at position 480 of SEQ ID NO: 1561093
gcagaauucccuggcgaga

SEQ ID NO: 1646284 - RNA, 19 nt, Artificial Sequence
  Description of Artificial Sequence: Synthetic oligonucleotide
  Antisense strand to SEQ ID NO: 1646283
ucucgccagggaauucugc

SEQ ID NO: 1646285 - RNA, 19 nt, Artificial Sequence
  Description of Artificial Sequence: Synthetic oligonucleotide
  Sense strand starting at position 579 of SEQ ID NO: 1561093
uagggaucggcccggauuu

SEQ ID NO: 1646286 - RNA, 19 nt, Artificial Sequence
  Description of Artificial Sequence: Synthetic oligonucleotide
  Antisense strand to SEQ ID NO: 1646285
aaauccgggccgaucccua

SEQ ID NO: 1646287 - RNA, 19 nt, Artificial Sequence
  Description of Artificial Sequence: Synthetic oligonucleotide
  Sense strand starting at position 731 of SEQ ID NO: 1561093
ccgcuuucucaggccagua

SEQ ID NO: 1646288 - RNA, 19 nt, Artificial Sequence
  Description of Artificial Sequence: Synthetic oligonucleotide
  Antisense strand to SEQ ID NO: 1646287
uacuggccugagaaagcgg

SEQ ID NO: 1646289 - RNA, 19 nt, Artificial Sequence
  Description of Artificial Sequence: Synthetic oligonucleotide
  Sense strand starting at position 732 of SEQ ID NO: 1561093
cgcuuucucaggccaguau

SEQ ID NO: 1646290 - RNA, 19 nt, Artificial Sequence
  Description of Artificial Sequence: Synthetic oligonucleotide
  Antisense strand to SEQ ID NO: 1646289
auacuggccugagaaagcg

SEQ ID NO: 1646291 - RNA, 19 nt, Artificial Sequence
  Description of Artificial Sequence: Synthetic oligonucleotide
  Sense strand starting at position 946 of SEQ ID NO: 1561093
gagucaaagucagucauua

SEQ ID NO: 1646292 - RNA, 19 nt, Artificial Sequence
  Description of Artificial Sequence: Synthetic oligonucleotide
  Antisense strand to SEQ ID NO: 1646291
uaaugacugacuuugacuc

SEQ ID NO: 1646293 - RNA, 19 nt, Artificial Sequence
  Description of Artificial Sequence: Synthetic oligonucleotide
  Sense strand starting at position 1063 of SEQ ID NO: 1561093
acgugccugugccuugaaa

SEQ ID NO: 1646294 - RNA, 19 nt, Artificial Sequence
  Description of Artificial Sequence: Synthetic oligonucleotide
  Antisense strand to SEQ ID NO: 1646293
uuucaaggcacaggcacgu

SEQ ID NO: 1646295 - RNA, 19 nt, Artificial Sequence
  Description of Artificial Sequence: Synthetic oligonucleotide
  Sense strand starting at position 1065 of SEQ ID NO: 1561093
gugccugugccuugaaagu

SEQ ID NO: 1646296 - RNA, 19 nt, Artificial Sequence
  Description of Artificial Sequence: Synthetic oligonucleotide
  Antisense strand to SEQ ID NO: 1646295
acuuucaaggcacaggcac

SEQ ID NO: 1646297 - RNA, 19 nt, Artificial Sequence
  Description of Artificial Sequence: Synthetic oligonucleotide
  Sense strand starting at position 1516 of SEQ ID NO: 1561093
uaaggagugucugucuuau

SEQ ID NO: 1646298 - RNA, 19 nt, Artificial Sequence
  Description of Artificial Sequence: Synthetic oligonucleotide
  Antisense strand to SEQ ID NO: 1646297
auaagacagacacuccuua

SEQ ID NO: 1646299 - RNA, 19 nt, Artificial Sequence
  Description of Artificial Sequence: Synthetic oligonucleotide
  Sense strand starting at position 1518 of SEQ ID NO: 1561093
aggagugucugucuuauaa

SEQ ID NO: 1646300 - RNA, 19 nt, Artificial Sequence
  Description of Artificial Sequence: Synthetic oligonucleotide
  Antisense strand to SEQ ID NO: 1646299
uuauaagacagacacuccu

SEQ ID NO: 1646301 - RNA, 19 nt, Artificial Sequence
  Description of Artificial Sequence: Synthetic oligonucleotide
  Sense strand starting at position 1786 of SEQ ID NO: 1561093
ccaguuccagacugaacua

SEQ ID NO: 1646302 - RNA, 19 nt, Artificial Sequence
  Description of Artificial Sequence: Synthetic oligonucleotide
  Antisense strand to SEQ ID NO: 1646301
uaguucagucuggaacugg

SEQ ID NO: 1646303 - RNA, 19 nt, Artificial Sequence
  Description of Artificial Sequence: Synthetic oligonucleotide
  Sense strand starting at position 1969 of SEQ ID NO: 1561093
acgguccaacccuagaaau

SEQ ID NO: 1646304 - RNA, 19 nt, Artificial Sequence
  Description of Artificial Sequence: Synthetic oligonucleotide
  Antisense strand to SEQ ID NO: 1646303
auuucuaggguuggaccgu

SEQ ID NO: 1646305 - RNA, 19 nt, Artificial Sequence
  Description of Artificial Sequence: Synthetic oligonucleotide
  Sense strand starting at position 1979 of SEQ ID NO: 1561093
ccuagaaauggccaugucu

SEQ ID NO: 1646306 - RNA, 19 nt, Artificial Sequence
  Description of Artificial Sequence: Synthetic oligonucleotide
  Antisense strand to SEQ ID NO: 1646305
agacauggccauuucuagg

SEQ ID NO: 1646307 - RNA, 19 nt, Artificial Sequence
  Description of Artificial Sequence: Synthetic oligonucleotide
  Sense strand starting at position 1981 of SEQ ID NO: 1561093
uagaaauggccaugucuug

SEQ ID NO: 1646308 - RNA, 19 nt, Artificial Sequence
  Description of Artificial Sequence: Synthetic oligonucleotide
  Antisense strand to SEQ ID NO: 1646307
caagacauggccauuucua

SEQ ID NO: 1646309 - RNA, 19 nt, Artificial Sequence
  Description of Artificial Sequence: Synthetic oligonucleotide
  Sense strand starting at position 2031 of SEQ ID NO: 1561093
agaggucaauaaggguaau

SEQ ID NO: 1646310 - RNA, 19 nt, Artificial Sequence
  Description of Artificial Sequence: Synthetic oligonucleotide
  Antisense strand to SEQ ID NO: 1646309
auuacccuuauugaccucu

SEQ ID NO: 1646311 - RNA, 19 nt, Artificial Sequence
  Description of Artificial Sequence: Synthetic oligonucleotide
  Sense strand starting at position 2160 of SEQ ID NO: 1561093
uugugucuaggucagauua

SEQ ID NO: 1646312 - RNA, 19 nt, Artificial Sequence
  Description of Artificial Sequence: Synthetic oligonucleotide
  Antisense strand to SEQ ID NO: 1646311
uaaucugaccuagacacaa

SEQ ID NO: 1646313 - RNA, 19 nt, Artificial Sequence
  Description of Artificial Sequence: Synthetic oligonucleotide
  Sense strand starting at position 2162 of SEQ ID NO: 1561093
gugucuaggucagauuauu

SEQ ID NO: 1646314 - RNA, 19 nt, Artificial Sequence
  Description of Artificial Sequence: Synthetic oligonucleotide
  Antisense strand to SEQ ID NO: 1646313
aauaaucugaccuagacac

SEQ ID NO: 1646315 - RNA, 19 nt, Artificial Sequence
  Description of Artificial Sequence: Synthetic oligonucleotide
  Sense strand starting at position 2289 of SEQ ID NO: 1561093
uucgcuaauugccuuaaua

SEQ ID NO: 1646316 - RNA, 19 nt, Artificial Sequence
  Description of Artificial Sequence: Synthetic oligonucleotide
  Antisense strand to SEQ ID NO: 1646315
uauuaaggcaauuagcgaa

SEQ ID NO: 1646317 - RNA, 19 nt, Artificial Sequence
  Description of Artificial Sequence: Synthetic oligonucleotide
  Sense strand starting at position 2460 of SEQ ID NO: 1561093
acuccucuuuaccagugau

SEQ ID NO: 1646318 - RNA, 19 nt, Artificial Sequence
  Description of Artificial Sequence: Synthetic oligonucleotide
  Antisense strand to SEQ ID NO: 1646317
aucacugguaaagaggagu

SEQ ID NO: 1646319 - RNA, 19 nt, Artificial Sequence
  Description of Artificial Sequence: Synthetic oligonucleotide
  Sense strand starting at position 2589 of SEQ ID NO: 1561093
uagccauguccuggcucau

SEQ ID NO: 1646320 - RNA, 19 nt, Artificial Sequence
  Description of Artificial Sequence: Synthetic oligonucleotide
  Antisense strand to SEQ ID NO: 1646319
augagccaggacauggcua

SEQ ID NO: 1646321 - RNA, 19 nt, Artificial Sequence
  Description of Artificial Sequence: Synthetic oligonucleotide
  Sense strand starting at position 3029 of SEQ ID NO: 1561093
ggcacagguuucucugaaa

SEQ ID NO: 1646322 - RNA, 19 nt, Artificial Sequence
  Description of Artificial Sequence: Synthetic oligonucleotide
  Antisense strand to SEQ ID NO: 1646321
uuucagagaaaccugugcc

SEQ ID NO: 1646323 - RNA, 19 nt, Artificial Sequence
  Description of Artificial Sequence: Synthetic oligonucleotide
  Sense strand starting at position 3083 of SEQ ID NO: 1561093
gaggcacgguccugauuua

SEQ ID NO: 1646324 - RNA, 19 nt, Artificial Sequence
  Description of Artificial Sequence: Synthetic oligonucleotide
  Antisense strand to SEQ ID NO: 1646323
uaaaucaggaccgugccuc

SEQ ID NO: 1646325 - RNA, 19 nt, Artificial Sequence
  Description of Artificial Sequence: Synthetic oligonucleotide
  Sense strand starting at position 3247 of SEQ ID NO: 1561093
ugcagcacucaucauagua

SEQ ID NO: 1646326 - RNA, 19 nt, Artificial Sequence
  Description of Artificial Sequence: Synthetic oligonucleotide
  Antisense strand to SEQ ID NO: 1646325
uacuaugaugagugcugca

SEQ ID NO: 1646327 - RNA, 19 nt, Artificial Sequence
  Description of Artificial Sequence: Synthetic oligonucleotide
  Sense strand starting at position 3270 of SEQ ID NO: 1561093
gcacauccauguuugcaaa

SEQ ID NO: 1646328 - RNA, 19 nt, Artificial Sequence
  Description of Artificial Sequence: Synthetic oligonucleotide
  Antisense strand to SEQ ID NO: 1646327
uuugcaaacauggaugugc

SEQ ID NO: 1646329 - RNA, 19 nt, Artificial Sequence
  Description of Artificial Sequence: Synthetic oligonucleotide
  Sense strand starting at position 3501 of SEQ ID NO: 1561093
gaacuugcauguuccauga

SEQ ID NO: 1646330 - RNA, 19 nt, Artificial Sequence
  Description of Artificial Sequence: Synthetic oligonucleotide
  Antisense strand to SEQ ID NO: 1646329
ucauggaacaugcaaguuc

SEQ ID NO: 1646331 - RNA, 19 nt, Artificial Sequence
  Description of Artificial Sequence: Synthetic oligonucleotide
  Sense strand starting at position 3503 of SEQ ID NO: 1561093
acuugcauguuccaugaau

SEQ ID NO: 1646332 - RNA, 19 nt, Artificial Sequence
  Description of Artificial Sequence: Synthetic oligonucleotide
  Antisense strand to SEQ ID NO: 1646331
auucauggaacaugcaagu

SEQ ID NO: 1646333 - RNA, 19 nt, Artificial Sequence
  Description of Artificial Sequence: Synthetic oligonucleotide
  Sense strand starting at position 3505 of SEQ ID NO: 1561093
uugcauguuccaugaaugu

SEQ ID NO: 1646334 - RNA, 19 nt, Artificial Sequence
  Description of Artificial Sequence: Synthetic oligonucleotide
  Antisense strand to SEQ ID NO: 1646333
acauucauggaacaugcaa

SEQ ID NO: 1646335 - RNA, 19 nt, Artificial Sequence
  Description of Artificial Sequence: Synthetic oligonucleotide
  Sense strand starting at position 3514 of SEQ ID NO: 1561093
ccaugaauguccgggacca

SEQ ID NO: 1646336 - RNA, 19 nt, Artificial Sequence
  Description of Artificial Sequence: Synthetic oligonucleotide
  Antisense strand to SEQ ID NO: 1646335
uggucccggacauucaugg

SEQ ID NO: 1646337 - RNA, 19 nt, Artificial Sequence
  Description of Artificial Sequence: Synthetic oligonucleotide
  Sense strand starting at position 3584 of SEQ ID NO: 1561093
augugaggguccuuuguua

SEQ ID NO: 1646338 - RNA, 19 nt, Artificial Sequence
  Description of Artificial Sequence: Synthetic oligonucleotide
  Antisense strand to SEQ ID NO: 1646337
uaacaaaggacccucacau

SEQ ID NO: 1646339 - RNA, 19 nt, Artificial Sequence
  Description of Artificial Sequence: Synthetic oligonucleotide
  Sense strand starting at position 3588 of SEQ ID NO: 1561093
gaggguccuuuguuaaguc

SEQ ID NO: 1646340 - RNA, 19 nt, Artificial Sequence
  Description of Artificial Sequence: Synthetic oligonucleotide
  Antisense strand to SEQ ID NO: 1646339
gacuuaacaaaggacccuc

SEQ ID NO: 1646341 - RNA, 19 nt, Artificial Sequence
  Description of Artificial Sequence: Synthetic oligonucleotide
  Sense strand starting at position 3592 of SEQ ID NO: 1561093
guccuuuguuaagucagaa

SEQ ID NO: 1646342 - RNA, 19 nt, Artificial Sequence
  Description of Artificial Sequence: Synthetic oligonucleotide
  Antisense strand to SEQ ID NO: 1646341
uucugacuuaacaaaggac

SEQ ID NO: 1646343 - RNA, 19 nt, Artificial Sequence
  Description of Artificial Sequence: Synthetic oligonucleotide
  Sense strand starting at position 3596 of SEQ ID NO: 1561093
uuuguuaagucagaaaccu

SEQ ID NO: 1646344 - RNA, 19 nt, Artificial Sequence
  Description of Artificial Sequence: Synthetic oligonucleotide
  Antisense strand to SEQ ID NO: 1646343
agguuucugacuuaacaaa

SEQ ID NO: 1646345 - RNA, 19 nt, Artificial Sequence
  Description of Artificial Sequence: Synthetic oligonucleotide
  Sense strand starting at position 3641 of SEQ ID NO: 1561093
gugagcauuucuuaagccu

SEQ ID NO: 1646346 - RNA, 19 nt, Artificial Sequence
  Description of Artificial Sequence: Synthetic oligonucleotide
  Antisense strand to SEQ ID NO: 1646345
aggcuuaagaaaugcucac

SEQ ID NO: 1646347 - RNA, 19 nt, Artificial Sequence
  Description of Artificial Sequence: Synthetic oligonucleotide
  Sense strand starting at position 3739 of SEQ ID NO: 1561093
auaagcucuuccucaugga

SEQ ID NO: 1646348 - RNA, 19 nt, Artificial Sequence
  Description of Artificial Sequence: Synthetic oligonucleotide
  Antisense strand to SEQ ID NO: 1646347
uccaugaggaagagcuuau

SEQ ID NO: 1646349 - RNA, 19 nt, Artificial Sequence
  Description of Artificial Sequence: Synthetic oligonucleotide
  Sense strand starting at position 3790 of SEQ ID NO: 1561093
uuuccucaguucuugaaga

SEQ ID NO: 1646350 - RNA, 19 nt, Artificial Sequence
  Description of Artificial Sequence: Synthetic oligonucleotide
  Antisense strand to SEQ ID NO: 1646349
ucuucaagaacugaggaaa

SEQ ID NO: 1646351 - RNA, 19 nt, Artificial Sequence
  Description of Artificial Sequence: Synthetic oligonucleotide
  Sense strand starting at position 3795 of SEQ ID NO: 1561093
ucaguucuugaagaccauu

SEQ ID NO: 1646352 - RNA, 19 nt, Artificial Sequence
  Description of Artificial Sequence: Synthetic oligonucleotide
  Antisense strand to SEQ ID NO: 1646351
aauggucuucaagaacuga

SEQ ID NO: 1646353 - RNA, 19 nt, Artificial Sequence
  Description of Artificial Sequence: Synthetic oligonucleotide
  Sense strand starting at position 3820 of SEQ ID NO: 1561093
uuguguauccagugcuucu

SEQ ID NO: 1646354 - RNA, 19 nt, Artificial Sequence
  Description of Artificial Sequence: Synthetic oligonucleotide
  Antisense strand to SEQ ID NO: 1646353
agaagcacuggauacacaa

SEQ ID NO: 1646355 - RNA, 19 nt, Artificial Sequence
  Description of Artificial Sequence: Synthetic oligonucleotide
  Sense strand starting at position 3831 of SEQ ID NO: 1561093
gugcuucugccaugugacu

SEQ ID NO: 1646356 - RNA, 19 nt, Artificial Sequence
  Description of Artificial Sequence: Synthetic oligonucleotide
  Antisense strand to SEQ ID NO: 1646355
agucacauggcagaagcac

SEQ ID NO: 1646357 - RNA, 19 nt, Artificial Sequence
  Description of Artificial Sequence: Synthetic oligonucleotide
  Sense strand starting at position 3837 of SEQ ID NO: 1561093
cugccaugugacugaaguu

SEQ ID NO: 1646358 - RNA, 19 nt, Artificial Sequence
  Description of Artificial Sequence: Synthetic oligonucleotide
  Antisense strand to SEQ ID NO: 1646357
aacuucagucacauggcag

SEQ ID NO: 1646359 - RNA, 19 nt, Artificial Sequence
  Description of Artificial Sequence: Synthetic oligonucleotide
  Sense strand starting at position 3838 of SEQ ID NO: 1561093
ugccaugugacugaaguuu

SEQ ID NO: 1646360 - RNA, 19 nt, Artificial Sequence
  Description of Artificial Sequence: Synthetic oligonucleotide
  Antisense strand to SEQ ID NO: 1646359
aaacuucagucacauggca

SEQ ID NO: 1646361 - RNA, 19 nt, Artificial Sequence
  Description of Artificial Sequence: Synthetic oligonucleotide
  Sense strand starting at position 144 of SEQ ID NO: 1561094
ggugcucgaggcugugaua

SEQ ID NO: 1646362 - RNA, 19 nt, Artificial Sequence
  Description of Artificial Sequence: Synthetic oligonucleotide
  Antisense strand to SEQ ID NO: 1646361
uaucacagccucgagcacc

SEQ ID NO: 1646363 - RNA, 19 nt, Artificial Sequence
  Description of Artificial Sequence: Synthetic oligonucleotide
  Sense strand starting at position 529 of SEQ ID NO: 1561094
cggucuaacucaguaccua

SEQ ID NO: 1646364 - RNA, 19 nt, Artificial Sequence
  Description of Artificial Sequence: Synthetic oligonucleotide
  Antisense strand to SEQ ID NO: 1646363
uagguacugaguuagaccg

SEQ ID NO: 1646365 - RNA, 19 nt, Artificial Sequence
  Description of Artificial Sequence: Synthetic oligonucleotide
  Sense strand starting at position 563 of SEQ ID NO: 1561094
aggaaaggcgcucaguaau

SEQ ID NO: 1646366 - RNA, 19 nt, Artificial Sequence
  Description of Artificial Sequence: Synthetic oligonucleotide
  Antisense strand to SEQ ID NO: 1646365
auuacugagcgccuuuccu

SEQ ID NO: 1646367 - RNA, 19 nt, Artificial Sequence
  Description of Artificial Sequence: Synthetic oligonucleotide
  Sense strand starting at position 566 of SEQ ID NO: 1561094
aaaggcgcucaguaauuau

SEQ ID NO: 1646368 - RNA, 19 nt, Artificial Sequence
  Description of Artificial Sequence: Synthetic oligonucleotide
  Antisense strand to SEQ ID NO: 1646367
auaauuacugagcgccuuu

SEQ ID NO: 1646369 - RNA, 19 nt, Artificial Sequence
  Description of Artificial Sequence: Synthetic oligonucleotide
  Sense strand starting at position 569 of SEQ ID NO: 1561094
ggcgcucaguaauuaucaa

SEQ ID NO: 1646370 - RNA, 19 nt, Artificial Sequence
  Description of Artificial Sequence: Synthetic oligonucleotide
  Antisense strand to SEQ ID NO: 1646369
uugauaauuacugagcgcc

SEQ ID NO: 1646371 - RNA, 19 nt, Artificial Sequence
  Description of Artificial Sequence: Synthetic oligonucleotide
  Sense strand starting at position 655 of SEQ ID NO: 1561094
gguccaguuacacgaggaa

SEQ ID NO: 1646372 - RNA, 19 nt, Artificial Sequence
  Description of Artificial Sequence: Synthetic oligonucleotide
  Antisense strand to SEQ ID NO: 1646371
uuccucguguaacuggacc

SEQ ID NO: 1646373 - RNA, 19 nt, Artificial Sequence
  Description of Artificial Sequence: Synthetic oligonucleotide
  Sense strand starting at position 703 of SEQ ID NO: 1561094
uggucucaucucuacuaca

SEQ ID NO: 1646374 - RNA, 19 nt, Artificial Sequence
  Description of Artificial Sequence: Synthetic oligonucleotide
  Antisense strand to SEQ ID NO: 1646373
uguaguagagaugagacca

SEQ ID NO: 1646375 - RNA, 19 nt, Artificial Sequence
  Description of Artificial Sequence: Synthetic oligonucleotide
  Sense strand starting at position 919 of SEQ ID NO: 1561094
gggucuaauuccuccaggu

SEQ ID NO: 1646376 - RNA, 19 nt, Artificial Sequence
  Description of Artificial Sequence: Synthetic oligonucleotide
  Antisense strand to SEQ ID NO: 1646375
accuggaggaauuagaccc

SEQ ID NO: 1646377 - RNA, 19 nt, Artificial Sequence
  Description of Artificial Sequence: Synthetic oligonucleotide
  Sense strand starting at position 1270 of SEQ ID NO: 1561094
cagagagacuccgaacaga

SEQ ID NO: 1646378 - RNA, 19 nt, Artificial Sequence
  Description of Artificial Sequence: Synthetic oligonucleotide
  Antisense strand to SEQ ID NO: 1646377
ucuguucggagucucucug

SEQ ID NO: 1646379 - RNA, 19 nt, Artificial Sequence
  Description of Artificial Sequence: Synthetic oligonucleotide
  Sense strand starting at position 2108 of SEQ ID NO: 1561094
cgcuccuguguguuucaga

SEQ ID NO: 1646380 - RNA, 19 nt, Artificial Sequence
  Description of Artificial Sequence: Synthetic oligonucleotide
  Antisense strand to SEQ ID NO: 1646379
ucugaaacacacaggagcg

SEQ ID NO: 1646381 - RNA, 19 nt, Artificial Sequence
  Description of Artificial Sequence: Synthetic oligonucleotide
  Sense strand starting at position 2113 of SEQ ID NO: 1561094
cuguguguuucagaagcag

SEQ ID NO: 1646382 - RNA, 19 nt, Artificial Sequence
  Description of Artificial Sequence: Synthetic oligonucleotide
  Antisense strand to SEQ ID NO: 1646381
cugcuucugaaacacacag

SEQ ID NO: 1646383 - RNA, 19 nt, Artificial Sequence
  Description of Artificial Sequence: Synthetic oligonucleotide
  Sense strand starting at position 2220 of SEQ ID NO: 1561094
guuacagacuuacagaacu

SEQ ID NO: 1646384 - RNA, 19 nt, Artificial Sequence
  Description of Artificial Sequence: Synthetic oligonucleotide
  Antisense strand to SEQ ID NO: 1646383
aguucuguaagucuguaac

SEQ ID NO: 1646385 - RNA, 19 nt, Artificial Sequence
  Description of Artificial Sequence: Synthetic oligonucleotide
  Sense strand starting at position 2250 of SEQ ID NO: 1561094
aagaauguuuagcuggagu

SEQ ID NO: 1646386 - RNA, 19 nt, Artificial Sequence
  Description of Artificial Sequence: Synthetic oligonucleotide
  Antisense strand to SEQ ID NO: 1646385
acuccagcuaaacauucuu

SEQ ID NO: 1646387 - RNA, 19 nt, Artificial Sequence
  Description of Artificial Sequence: Synthetic oligonucleotide
  Sense strand starting at position 2252 of SEQ ID NO: 1561094
gaauguuuagcuggaguca

SEQ ID NO: 1646388 - RNA, 19 nt, Artificial Sequence
  Description of Artificial Sequence: Synthetic oligonucleotide
  Antisense strand to SEQ ID NO: 1646387
ugacuccagcuaaacauuc

SEQ ID NO: 1646389 - RNA, 19 nt, Artificial Sequence
  Description of Artificial Sequence: Synthetic oligonucleotide
  Sense strand starting at position 2865 of SEQ ID NO: 1561094
ccuggcauguucuaauguu

SEQ ID NO: 1646390 - RNA, 19 nt, Artificial Sequence
  Description of Artificial Sequence: Synthetic oligonucleotide
  Antisense strand to SEQ ID NO: 1646389
aacauuagaacaugccagg

SEQ ID NO: 1646391 - RNA, 19 nt, Artificial Sequence
  Description of Artificial Sequence: Synthetic oligonucleotide
  Sense strand starting at position 2897 of SEQ ID NO: 1561094
gguaaaugcuauuaugagc

SEQ ID NO: 1646392 - RNA, 19 nt, Artificial Sequence
  Description of Artificial Sequence: Synthetic oligonucleotide
  Antisense strand to SEQ ID NO: 1646391
gcucauaauagcauuuacc

SEQ ID NO: 1646393 - RNA, 19 nt, Artificial Sequence
  Description of Artificial Sequence: Synthetic oligonucleotide
  Sense strand starting at position 2937 of SEQ ID NO: 1561094
caaggcaugaggugguaaa

SEQ ID NO: 1646394 - RNA, 19 nt, Artificial Sequence
  Description of Artificial Sequence: Synthetic oligonucleotide
  Antisense strand to SEQ ID NO: 1646393
uuuaccaccucaugccuug

SEQ ID NO: 1646395 - RNA, 19 nt, Artificial Sequence
  Description of Artificial Sequence: Synthetic oligonucleotide
  Sense strand starting at position 2938 of SEQ ID NO: 1561094
aaggcaugaggugguaaau

SEQ ID NO: 1646396 - RNA, 19 nt, Artificial Sequence
  Description of Artificial Sequence: Synthetic oligonucleotide
  Antisense strand to SEQ ID NO: 1646395
auuuaccaccucaugccuu

SEQ ID NO: 1646397 - RNA, 19 nt, Artificial Sequence
  Description of Artificial Sequence: Synthetic oligonucleotide
  Sense strand starting at position 2949 of SEQ ID NO: 1561094
ugguaaauauggcuccaga

SEQ ID NO: 1646398 - RNA, 19 nt, Artificial Sequence
  Description of Artificial Sequence: Synthetic oligonucleotide
  Antisense strand to SEQ ID NO: 1646397
ucuggagccauauuuacca

SEQ ID NO: 1646399 - RNA, 19 nt, Artificial Sequence
  Description of Artificial Sequence: Synthetic oligonucleotide
  Sense strand starting at position 3515 of SEQ ID NO: 1561094
gcguguuagucggugugga

SEQ ID NO: 1646400 - RNA, 19 nt, Artificial Sequence
  Description of Artificial Sequence: Synthetic oligonucleotide
  Antisense strand to SEQ ID NO: 1646399
uccacaccgacuaacacgc

SEQ ID NO: 1646401 - RNA, 19 nt, Artificial Sequence
  Description of Artificial Sequence: Synthetic oligonucleotide
  Sense strand starting at position 3517 of SEQ ID NO: 1561094
guguuagucgguguggagu

SEQ ID NO: 1646402 - RNA, 19 nt, Artificial Sequence
  Description of Artificial Sequence: Synthetic oligonucleotide
  Antisense strand to SEQ ID NO: 1646401
acuccacaccgacuaacac

SEQ ID NO: 1646403 - RNA, 19 nt, Artificial Sequence
  Description of Artificial Sequence: Synthetic oligonucleotide
  Sense strand starting at position 3532 of SEQ ID NO: 1561094
gagugcuccuucucuagag

SEQ ID NO: 1646404 - RNA, 19 nt, Artificial Sequence
  Description of Artificial Sequence: Synthetic oligonucleotide
  Antisense strand to SEQ ID NO: 1646403
cucuagagaaggagcacuc

SEQ ID NO: 1646405 - RNA, 19 nt, Artificial Sequence
  Description of Artificial Sequence: Synthetic oligonucleotide
  Sense strand starting at position 3680 of SEQ ID NO: 1561094
gggccuggcuucugggaaa

SEQ ID NO: 1646406 - RNA, 19 nt, Artificial Sequence
  Description of Artificial Sequence: Synthetic oligonucleotide
  Antisense strand to SEQ ID NO: 1646405
uuucccagaagccaggccc

SEQ ID NO: 1646407 - RNA, 19 nt, Artificial Sequence
  Description of Artificial Sequence: Synthetic oligonucleotide
  Sense strand starting at position 3743 of SEQ ID NO: 1561094
cccauaaacgcucgguaga

SEQ ID NO: 1646408 - RNA, 19 nt, Artificial Sequence
  Description of Artificial Sequence: Synthetic oligonucleotide
  Antisense strand to SEQ ID NO: 1646407
ucuaccgagcguuuauggg

SEQ ID NO: 1646409 - RNA, 19 nt, Artificial Sequence
  Description of Artificial Sequence: Synthetic oligonucleotide
  Sense strand starting at position 3745 of SEQ ID NO: 1561094
cauaaacgcucgguagaga

SEQ ID NO: 1646410 - RNA, 19 nt, Artificial Sequence
  Description of Artificial Sequence: Synthetic oligonucleotide
  Antisense strand to SEQ ID NO: 1646409
ucucuaccgagcguuuaug

SEQ ID NO: 1646411 - RNA, 19 nt, Artificial Sequence
  Description of Artificial Sequence: Synthetic oligonucleotide
  Sense strand starting at position 3746 of SEQ ID NO: 1561094
auaaacgcucgguagagaa

SEQ ID NO: 1646412 - RNA, 19 nt, Artificial Sequence
  Description of Artificial Sequence: Synthetic oligonucleotide
  Antisense strand to SEQ ID NO: 1646411
uucucuaccgagcguuuau

SEQ ID NO: 1646413 - RNA, 19 nt, Artificial Sequence
  Description of Artificial Sequence: Synthetic oligonucleotide
  Sense strand starting at position 3772 of SEQ ID NO: 1561094
cugggucuucccugucagu

SEQ ID NO: 1646414 - RNA, 19 nt, Artificial Sequence
  Description of Artificial Sequence: Synthetic oligonucleotide
  Antisense strand to SEQ ID NO: 1646413
acugacagggaagacccag

SEQ ID NO: 1646415 - RNA, 19 nt, Artificial Sequence
  Description of Artificial Sequence: Synthetic oligonucleotide
  Sense strand starting at position 3952 of SEQ ID NO: 1561094
ccugcugacccagauucua

SEQ ID NO: 1646416 - RNA, 19 nt, Artificial Sequence
  Description of Artificial Sequence: Synthetic oligonucleotide
  Antisense strand to SEQ ID NO: 1646415
uagaaucugggucagcagg

SEQ ID NO: 1646417 - RNA, 19 nt, Artificial Sequence
  Description of Artificial Sequence: Synthetic oligonucleotide
  Sense strand starting at position 6 of SEQ ID NO: 1561095
ggaccaaguugauguauga

SEQ ID NO: 1646418 - RNA, 19 nt, Artificial Sequence
  Description of Artificial Sequence: Synthetic oligonucleotide
  Antisense strand to SEQ ID NO: 1646417
ucauacaucaacuuggucc

SEQ ID NO: 1646419 - RNA, 19 nt, Artificial Sequence
  Description of Artificial Sequence: Synthetic oligonucleotide
  Sense strand starting at position 10 of SEQ ID NO: 1561095
caaguugauguaugaaugu

SEQ ID NO: 1646420 - RNA, 19 nt, Artificial Sequence
  Description of Artificial Sequence: Synthetic oligonucleotide
  Antisense strand to SEQ ID NO: 1646419
acauucauacaucaacuug

SEQ ID NO: 1646421 - RNA, 19 nt, Artificial Sequence
  Description of Artificial Sequence: Synthetic oligonucleotide
  Sense strand starting at position 16 of SEQ ID NO: 1561095
gauguaugaauguagcuga

SEQ ID NO: 1646422 - RNA, 19 nt, Artificial Sequence
  Description of Artificial Sequence: Synthetic oligonucleotide
  Antisense strand to SEQ ID NO: 1646421
ucagcuacauucauacauc

SEQ ID NO: 1646423 - RNA, 19 nt, Artificial Sequence
  Description of Artificial Sequence: Synthetic oligonucleotide
  Sense strand starting at position 477 of SEQ ID NO: 1561095
agugcagguucagagcaau

SEQ ID NO: 1646424 - RNA, 19 nt, Artificial Sequence
  Description of Artificial Sequence: Synthetic oligonucleotide
  Antisense strand to SEQ ID NO: 1646423
auugcucugaaccugcacu

SEQ ID NO: 1646425 - RNA, 19 nt, Artificial Sequence
  Description of Artificial Sequence: Synthetic oligonucleotide
  Sense strand starting at position 498 of SEQ ID NO: 1561095
acgauaggccaagagaguu

SEQ ID NO: 1646426 - RNA, 19 nt, Artificial Sequence
  Description of Artificial Sequence: Synthetic oligonucleotide
  Antisense strand to SEQ ID NO: 1646425
aacucucuuggccuaucgu

SEQ ID NO: 1646427 - RNA, 19 nt, Artificial Sequence
  Description of Artificial Sequence: Synthetic oligonucleotide
  Sense strand starting at position 506 of SEQ ID NO: 1561095
ccaagagaguuuguuccca

SEQ ID NO: 1646428 - RNA, 19 nt, Artificial Sequence
  Description of Artificial Sequence: Synthetic oligonucleotide
  Antisense strand to SEQ ID NO: 1646427
ugggaacaaacucucuugg

SEQ ID NO: 1646429 - RNA, 19 nt, Artificial Sequence
  Description of Artificial Sequence: Synthetic oligonucleotide
  Sense strand starting at position 508 of SEQ ID NO: 1561095
aagagaguuuguucccaca

SEQ ID NO: 1646430 - RNA, 19 nt, Artificial Sequence
  Description of Artificial Sequence: Synthetic oligonucleotide
  Antisense strand to SEQ ID NO: 1646429
ugugggaacaaacucucuu

SEQ ID NO: 1646431 - RNA, 19 nt, Artificial Sequence
  Description of Artificial Sequence: Synthetic oligonucleotide
  Sense strand starting at position 510 of SEQ ID NO: 1561095
gagaguuuguucccacauu

SEQ ID NO: 1646432 - RNA, 19 nt, Artificial Sequence
  Description of Artificial Sequence: Synthetic oligonucleotide
  Antisense strand to SEQ ID NO: 1646431
aaugugggaacaaacucuc

SEQ ID NO: 1646433 - RNA, 19 nt, Artificial Sequence
  Description of Artificial Sequence: Synthetic oligonucleotide
  Sense strand starting at position 511 of SEQ ID NO: 1561095
agaguuuguucccacauuu

SEQ ID NO: 1646434 - RNA, 19 nt, Artificial Sequence
  Description of Artificial Sequence: Synthetic oligonucleotide
  Antisense strand to SEQ ID NO: 1646433
aaaugugggaacaaacucu

SEQ ID NO: 1646435 - RNA, 19 nt, Artificial Sequence
  Description of Artificial Sequence: Synthetic oligonucleotide
  Sense strand starting at position 602 of SEQ ID NO: 1561095
ucaagaaguuaucugcuga

SEQ ID NO: 1646436 - RNA, 19 nt, Artificial Sequence
  Description of Artificial Sequence: Synthetic oligonucleotide
  Antisense strand to SEQ ID NO: 1646435
ucagcagauaacuucuuga

SEQ ID NO: 1646437 - RNA, 19 nt, Artificial Sequence
  Description of Artificial Sequence: Synthetic oligonucleotide
  Sense strand starting at position 694 of SEQ ID NO: 1561095
ccaauuccauuugggagau

SEQ ID NO: 1646438 - RNA, 19 nt, Artificial Sequence
  Description of Artificial Sequence: Synthetic oligonucleotide
  Antisense strand to SEQ ID NO: 1646437
aucucccaaauggaauugg

SEQ ID NO: 1646439 - RNA, 19 nt, Artificial Sequence
  Description of Artificial Sequence: Synthetic oligonucleotide
  Sense strand starting at position 788 of SEQ ID NO: 1561095
gugacagugugcuaaguga

SEQ ID NO: 1646440 - RNA, 19 nt, Artificial Sequence
  Description of Artificial Sequence: Synthetic oligonucleotide
  Antisense strand to SEQ ID NO: 1646439
ucacuuagcacacugucac

SEQ ID NO: 1646441 - RNA, 19 nt, Artificial Sequence
  Description of Artificial Sequence: Synthetic oligonucleotide
  Sense strand starting at position 819 of SEQ ID NO: 1561095
ggaaucaagcuugaaugca

SEQ ID NO: 1646442 - RNA, 19 nt, Artificial Sequence
  Description of Artificial Sequence: Synthetic oligonucleotide
  Antisense strand to SEQ ID NO: 1646441
ugcauucaagcuugauucc

SEQ ID NO: 1646443 - RNA, 19 nt, Artificial Sequence
  Description of Artificial Sequence: Synthetic oligonucleotide
  Sense strand starting at position 829 of SEQ ID NO: 1561095
uugaaugcagccuaucaau

SEQ ID NO: 1646444 - RNA, 19 nt, Artificial Sequence
  Description of Artificial Sequence: Synthetic oligonucleotide
  Antisense strand to SEQ ID NO: 1646443
auugauaggcugcauucaa

SEQ ID NO: 1646445 - RNA, 19 nt, Artificial Sequence
  Description of Artificial Sequence: Synthetic oligonucleotide
  Sense strand starting at position 889 of SEQ ID NO: 1561095
uccgcuuauucccuugcua

SEQ ID NO: 1646446 - RNA, 19 nt, Artificial Sequence
  Description of Artificial Sequence: Synthetic oligonucleotide
  Antisense strand to SEQ ID NO: 1646445
uagcaagggaauaagcgga

SEQ ID NO: 1646447 - RNA, 19 nt, Artificial Sequence
  Description of Artificial Sequence: Synthetic oligonucleotide
  Sense strand starting at position 891 of SEQ ID NO: 1561095
cgcuuauucccuugcuacu

SEQ ID NO: 1646448 - RNA, 19 nt, Artificial Sequence
  Description of Artificial Sequence: Synthetic oligonucleotide
  Antisense strand to SEQ ID NO: 1646447
aguagcaagggaauaagcg

SEQ ID NO: 1646449 - RNA, 19 nt, Artificial Sequence
  Description of Artificial Sequence: Synthetic oligonucleotide
  Sense strand starting at position 1284 of SEQ ID NO: 1561095
ccggacauaucuggagguu

SEQ ID NO: 1646450 - RNA, 19 nt, Artificial Sequence
  Description of Artificial Sequence: Synthetic oligonucleotide
  Antisense strand to SEQ ID NO: 1646449
aaccuccagauauguccgg

SEQ ID NO: 1646451 - RNA, 19 nt, Artificial Sequence
  Description of Artificial Sequence: Synthetic oligonucleotide
  Sense strand starting at position 1285 of SEQ ID NO: 1561095
cggacauaucuggagguuu

SEQ ID NO: 1646452 - RNA, 19 nt, Artificial Sequence
  Description of Artificial Sequence: Synthetic oligonucleotide
  Antisense strand to SEQ ID NO: 1646451
aaaccuccagauauguccg

SEQ ID NO: 1646453 - RNA, 19 nt, Artificial Sequence
  Description of Artificial Sequence: Synthetic oligonucleotide
  Sense strand starting at position 1394 of SEQ ID NO: 1561095
uguugcagccgcuguaauu

SEQ ID NO: 1646454 - RNA, 19 nt, Artificial Sequence
  Description of Artificial Sequence: Synthetic oligonucleotide
  Antisense strand to SEQ ID NO: 1646453
aauuacagcggcugcaaca

SEQ ID NO: 1646455 - RNA, 19 nt, Artificial Sequence
  Description of Artificial Sequence: Synthetic oligonucleotide
  Sense strand starting at position 2315 of SEQ ID NO: 1561095
gucccugaggcucggaaau

SEQ ID NO: 1646456 - RNA, 19 nt, Artificial Sequence
  Description of Artificial Sequence: Synthetic oligonucleotide
  Antisense strand to SEQ ID NO: 1646455
auuuccgagccucagggac

SEQ ID NO: 1646457 - RNA, 19 nt, Artificial Sequence
  Description of Artificial Sequence: Synthetic oligonucleotide
  Sense strand starting at position 2507 of SEQ ID NO: 1561095
gccauuaauuagcuuagca

SEQ ID NO: 1646458 - RNA, 19 nt, Artificial Sequence
  Description of Artificial Sequence: Synthetic oligonucleotide
  Antisense strand to SEQ ID NO: 1646457
ugcuaagcuaauuaauggc

SEQ ID NO: 1646459 - RNA, 19 nt, Artificial Sequence
  Description of Artificial Sequence: Synthetic oligonucleotide
  Sense strand starting at position 3079 of SEQ ID NO: 1561095
cugggaggaucauggacau

SEQ ID NO: 1646460 - RNA, 19 nt, Artificial Sequence
  Description of Artificial Sequence: Synthetic oligonucleotide
  Antisense strand to SEQ ID NO: 1646459
auguccaugauccucccag

SEQ ID NO: 1646461 - RNA, 19 nt, Artificial Sequence
  Description of Artificial Sequence: Synthetic oligonucleotide
  Sense strand starting at position 3114 of SEQ ID NO: 1561095
acggaagucgucguugcaa

SEQ ID NO: 1646462 - RNA, 19 nt, Artificial Sequence
  Description of Artificial Sequence: Synthetic oligonucleotide
  Antisense strand to SEQ ID NO: 1646461
uugcaacgacgacuuccgu

SEQ ID NO: 1646463 - RNA, 19 nt, Artificial Sequence
  Description of Artificial Sequence: Synthetic oligonucleotide
  Sense strand starting at position 3115 of SEQ ID NO: 1561095
cggaagucgucguugcaaa

SEQ ID NO: 1646464 - RNA, 19 nt, Artificial Sequence
  Description of Artificial Sequence: Synthetic oligonucleotide
  Antisense strand to SEQ ID NO: 1646463
uuugcaacgacgacuuccg

SEQ ID NO: 1646465 - RNA, 19 nt, Artificial Sequence
  Description of Artificial Sequence: Synthetic oligonucleotide
  Sense strand starting at position 3116 of SEQ ID NO: 1561095
ggaagucgucguugcaaag

SEQ ID NO: 1646466 - RNA, 19 nt, Artificial Sequence
  Description of Artificial Sequence: Synthetic oligonucleotide
  Antisense strand to SEQ ID NO: 1646465
cuuugcaacgacgacuucc

SEQ ID NO: 1646467 - RNA, 19 nt, Artificial Sequence
  Description of Artificial Sequence: Synthetic oligonucleotide
  Sense strand starting at position 3171 of SEQ ID NO: 1561095
gagaaaccuuccuccgaga

SEQ ID NO: 1646468 - RNA, 19 nt, Artificial Sequence
  Description of Artificial Sequence: Synthetic oligonucleotide
  Antisense strand to SEQ ID NO: 1646467
ucucggaggaagguuucuc

SEQ ID NO: 1646469 - RNA, 19 nt, Artificial Sequence
  Description of Artificial Sequence: Synthetic oligonucleotide
  Sense strand starting at position 3173 of SEQ ID NO: 1561095
gaaaccuuccuccgagagu

SEQ ID NO: 1646470 - RNA, 19 nt, Artificial Sequence
  Description of Artificial Sequence: Synthetic oligonucleotide
  Antisense strand to SEQ ID NO: 1646469
acucucggaggaagguuuc

SEQ ID NO: 1646471 - RNA, 19 nt, Artificial Sequence
  Description of Artificial Sequence: Synthetic oligonucleotide
  Sense strand starting at position 3176 of SEQ ID NO: 1561095
accuuccuccgagagugaa

SEQ ID NO: 1646472 - RNA, 19 nt, Artificial Sequence
  Description of Artificial Sequence: Synthetic oligonucleotide
  Antisense strand to SEQ ID NO: 1646471
uucacucucggaggaaggu

SEQ ID NO: 1646473 - RNA, 19 nt, Artificial Sequence
  Description of Artificial Sequence: Synthetic oligonucleotide
  Sense strand starting at position 3754 of SEQ ID NO: 1561095
ucuguuauguucuguagag

SEQ ID NO: 1646474 - RNA, 19 nt, Artificial Sequence
  Description of Artificial Sequence: Synthetic oligonucleotide
  Antisense strand to SEQ ID NO: 1646473
cucuacagaacauaacaga

SEQ ID NO: 1646475 - RNA, 19 nt, Artificial Sequence
  Description of Artificial Sequence: Synthetic oligonucleotide
  Sense strand starting at position 3755 of SEQ ID NO: 1561095
cuguuauguucuguagagc

SEQ ID NO: 1646476 - RNA, 19 nt, Artificial Sequence
  Description of Artificial Sequence: Synthetic oligonucleotide
  Antisense strand to SEQ ID NO: 1646475
gcucuacagaacauaacag

SEQ ID NO: 1646477 - RNA, 19 nt, Artificial Sequence
  Description of Artificial Sequence: Synthetic oligonucleotide
  Sense strand starting at position 3756 of SEQ ID NO: 1561095
uguuauguucuguagagcu

SEQ ID NO: 1646478 - RNA, 19 nt, Artificial Sequence
  Description of Artificial Sequence: Synthetic oligonucleotide
  Antisense strand to SEQ ID NO: 1646477
agcucuacagaacauaaca

SEQ ID NO: 1646479 - RNA, 19 nt, Artificial Sequence
  Description of Artificial Sequence: Synthetic oligonucleotide
  Sense strand starting at position 3758 of SEQ ID NO: 1561095
uuauguucuguagagcuga

SEQ ID NO: 1646480 - RNA, 19 nt, Artificial Sequence
  Description of Artificial Sequence: Synthetic oligonucleotide
  Antisense strand to SEQ ID NO: 1646479
ucagcucuacagaacauaa

SEQ ID NO: 1646481 - RNA, 19 nt, Artificial Sequence
  Description of Artificial Sequence: Synthetic oligonucleotide
  Sense strand starting at position 3885 of SEQ ID NO: 1561095
ccagaaggaccuggguuua

SEQ ID NO: 1646482 - RNA, 19 nt, Artificial Sequence
  Description of Artificial Sequence: Synthetic oligonucleotide
  Antisense strand to SEQ ID NO: 1646481
uaaacccagguccuucugg

SEQ ID NO: 1646483 - RNA, 19 nt, Artificial Sequence
  Description of Artificial Sequence: Synthetic oligonucleotide
  Sense strand starting at position 3917 of SEQ ID NO: 1561095
uuucuacuaccugggugau

SEQ ID NO: 1646484 - RNA, 19 nt, Artificial Sequence
  Description of Artificial Sequence: Synthetic oligonucleotide
  Antisense strand to SEQ ID NO: 1646483
aucacccagguaguagaaa

SEQ ID NO: 1646485 - RNA, 19 nt, Artificial Sequence
  Description of Artificial Sequence: Synthetic oligonucleotide
  Sense strand starting at position 3927 of SEQ ID NO: 1561095
cugggugaugcauggguaa

SEQ ID NO: 1646486 - RNA, 19 nt, Artificial Sequence
  Description of Artificial Sequence: Synthetic oligonucleotide
  Antisense strand to SEQ ID NO: 1646485
uuacccaugcaucacccag

SEQ ID NO: 1646487 - RNA, 19 nt, Artificial Sequence
  Description of Artificial Sequence: Synthetic oligonucleotide
  Sense strand starting at position 3929 of SEQ ID NO: 1561095
gggugaugcauggguaaua

SEQ ID NO: 1646488 - RNA, 19 nt, Artificial Sequence
  Description of Artificial Sequence: Synthetic oligonucleotide
  Antisense strand to SEQ ID NO: 1646487
uauuacccaugcaucaccc

SEQ ID NO: 1646489 - RNA, 19 nt, Artificial Sequence
  Description of Artificial Sequence: Synthetic oligonucleotide
  Sense strand starting at position 3941 of SEQ ID NO: 1561095
gguaauaccaggcagguuu

SEQ ID NO: 1646490 - RNA, 19 nt, Artificial Sequence
  Description of Artificial Sequence: Synthetic oligonucleotide
  Antisense strand to SEQ ID NO: 1646489
aaaccugccugguauuacc

SEQ ID NO: 1646491 - RNA, 19 nt, Artificial Sequence
  Description of Artificial Sequence: Synthetic oligonucleotide
  Sense strand starting at position 3952 of SEQ ID NO: 1561095
gcagguuuaccagagcauc

SEQ ID NO: 1646492 - RNA, 19 nt, Artificial Sequence
  Description of Artificial Sequence: Synthetic oligonucleotide
  Antisense strand to SEQ ID NO: 1646491
gaugcucugguaaaccugc

SEQ ID NO: 1646493 - RNA, 19 nt, Artificial Sequence
  Description of Artificial Sequence: Synthetic oligonucleotide
  Sense strand starting at position 71 of SEQ ID NO: 1561096
uggcauccuucucuugagu

SEQ ID NO: 1646494 - RNA, 19 nt, Artificial Sequence
  Description of Artificial Sequence: Synthetic oligonucleotide
  Antisense strand to SEQ ID NO: 1646493
acucaagagaaggaugcca

SEQ ID NO: 1646495 - RNA, 19 nt, Artificial Sequence
  Description of Artificial Sequence: Synthetic oligonucleotide
  Sense strand starting at position 184 of SEQ ID NO: 1561096
ucugguuaaugcugagaac

SEQ ID NO: 1646496 - RNA, 19 nt, Artificial Sequence
  Description of Artificial Sequence: Synthetic oligonucleotide
  Antisense strand to SEQ ID NO: 1646495
guucucagcauuaaccaga

SEQ ID NO: 1646497 - RNA, 19 nt, Artificial Sequence
  Description of Artificial Sequence: Synthetic oligonucleotide
  Sense strand starting at position 187 of SEQ ID NO: 1561096
gguuaaugcugagaaccug

SEQ ID NO: 1646498 - RNA, 19 nt, Artificial Sequence
  Description of Artificial Sequence: Synthetic oligonucleotide
  Antisense strand to SEQ ID NO: 1646497
cagguucucagcauuaacc

SEQ ID NO: 1646499 - RNA, 19 nt, Artificial Sequence
  Description of Artificial Sequence: Synthetic oligonucleotide
  Sense strand starting at position 195 of SEQ ID NO: 1561096
cugagaaccugugcaugaa

SEQ ID NO: 1646500 - RNA, 19 nt, Artificial Sequence
  Description of Artificial Sequence: Synthetic oligonucleotide
  Antisense strand to SEQ ID NO: 1646499
uucaugcacagguucucag

SEQ ID NO: 1646501 - RNA, 19 nt, Artificial Sequence
  Description of Artificial Sequence: Synthetic oligonucleotide
  Sense strand starting at position 371 of SEQ ID NO: 1561096
cuucucaauuguccucgua

SEQ ID NO: 1646502 - RNA, 19 nt, Artificial Sequence
  Description of Artificial Sequence: Synthetic oligonucleotide
  Antisense strand to SEQ ID NO: 1646501
uacgaggacaauugagaag

SEQ ID NO: 1646503 - RNA, 19 nt, Artificial Sequence
  Description of Artificial Sequence: Synthetic oligonucleotide
  Sense strand starting at position 373 of SEQ ID NO: 1561096
ucucaauuguccucguaca

SEQ ID NO: 1646504 - RNA, 19 nt, Artificial Sequence
  Description of Artificial Sequence: Synthetic oligonucleotide
  Antisense strand to SEQ ID NO: 1646503
uguacgaggacaauugaga

SEQ ID NO: 1646505 - RNA, 19 nt, Artificial Sequence
  Description of Artificial Sequence: Synthetic oligonucleotide
  Sense strand starting at position 400 of SEQ ID NO: 1561096
accugcugggcucauuaaa

SEQ ID NO: 1646506 - RNA, 19 nt, Artificial Sequence
  Description of Artificial Sequence: Synthetic oligonucleotide
  Antisense strand to SEQ ID NO: 1646505
uuuaaugagcccagcaggu

SEQ ID NO: 1646507 - RNA, 19 nt, Artificial Sequence
  Description of Artificial Sequence: Synthetic oligonucleotide
  Sense strand starting at position 692 of SEQ ID NO: 1561096
aucugaggacucuggagua

SEQ ID NO: 1646508 - RNA, 19 nt, Artificial Sequence
  Description of Artificial Sequence: Synthetic oligonucleotide
  Antisense strand to SEQ ID NO: 1646507
uacuccagaguccucagau

SEQ ID NO: 1646509 - RNA, 19 nt, Artificial Sequence
  Description of Artificial Sequence: Synthetic oligonucleotide
  Sense strand starting at position 736 of SEQ ID NO: 1561096
gcaguucuguaccuuggga

SEQ ID NO: 1646510 - RNA, 19 nt, Artificial Sequence
  Description of Artificial Sequence: Synthetic oligonucleotide
  Antisense strand to SEQ ID NO: 1646509
ucccaagguacagaacugc

SEQ ID NO: 1646511 - RNA, 19 nt, Artificial Sequence
  Description of Artificial Sequence: Synthetic oligonucleotide
  Sense strand starting at position 738 of SEQ ID NO: 1561096
aguucuguaccuugggagu

SEQ ID NO: 1646512 - RNA, 19 nt, Artificial Sequence
  Description of Artificial Sequence: Synthetic oligonucleotide
  Antisense strand to SEQ ID NO: 1646511
acucccaagguacagaacu

SEQ ID NO: 1646513 - RNA, 19 nt, Artificial Sequence
  Description of Artificial Sequence: Synthetic oligonucleotide
  Sense strand starting at position 1044 of SEQ ID NO: 1561096
cuacuuaggccucgagaca

SEQ ID NO: 1646514 - RNA, 19 nt, Artificial Sequence
  Description of Artificial Sequence: Synthetic oligonucleotide
  Antisense strand to SEQ ID NO: 1646513
ugucucgaggccuaaguag

SEQ ID NO: 1646515 - RNA, 19 nt, Artificial Sequence
  Description of Artificial Sequence: Synthetic oligonucleotide
  Sense strand starting at position 1104 of SEQ ID NO: 1561096
gggagacuguggucaagca

SEQ ID NO: 1646516 - RNA, 19 nt, Artificial Sequence
  Description of Artificial Sequence: Synthetic oligonucleotide
  Antisense strand to SEQ ID NO: 1646515
ugcuugaccacagucuccc

SEQ ID NO: 1646517 - RNA, 19 nt, Artificial Sequence
  Description of Artificial Sequence: Synthetic oligonucleotide
  Sense strand starting at position 1105 of SEQ ID NO: 1561096
ggagacuguggucaagcaa

SEQ ID NO: 1646518 - RNA, 19 nt, Artificial Sequence
  Description of Artificial Sequence: Synthetic oligonucleotide
  Antisense strand to SEQ ID NO: 1646517
uugcuugaccacagucucc

SEQ ID NO: 1646519 - RNA, 19 nt, Artificial Sequence
  Description of Artificial Sequence: Synthetic oligonucleotide
  Sense strand starting at position 1156 of SEQ ID NO: 1561096
gcccgugacacuuagaaau

SEQ ID NO: 1646520 - RNA, 19 nt, Artificial Sequence
  Description of Artificial Sequence: Synthetic oligonucleotide
  Antisense strand to SEQ ID NO: 1646519
auuucuaagugucacgggc

SEQ ID NO: 1646521 - RNA, 19 nt, Artificial Sequence
  Description of Artificial Sequence: Synthetic oligonucleotide
  Sense strand starting at position 1158 of SEQ ID NO: 1561096
ccgugacacuuagaaaugu

SEQ ID NO: 1646522 - RNA, 19 nt, Artificial Sequence
  Description of Artificial Sequence: Synthetic oligonucleotide
  Antisense strand to SEQ ID NO: 1646521
acauuucuaagugucacgg

SEQ ID NO: 1646523 - RNA, 19 nt, Artificial Sequence
  Description of Artificial Sequence: Synthetic oligonucleotide
  Sense strand starting at position 1213 of SEQ ID NO: 1561096
ucagaugcuguauguauaa

SEQ ID NO: 1646524 - RNA, 19 nt, Artificial Sequence
  Description of Artificial Sequence: Synthetic oligonucleotide
  Antisense strand to SEQ ID NO: 1646523
uuauacauacagcaucuga

SEQ ID NO: 1646525 - RNA, 19 nt, Artificial Sequence
  Description of Artificial Sequence: Synthetic oligonucleotide
  Sense strand starting at position 1220 of SEQ ID NO: 1561096
cuguauguauaagggaaua

SEQ ID NO: 1646526 - RNA, 19 nt, Artificial Sequence
  Description of Artificial Sequence: Synthetic oligonucleotide
  Antisense strand to SEQ ID NO: 1646525
uauucccuuauacauacag

SEQ ID NO: 1646527 - RNA, 19 nt, Artificial Sequence
  Description of Artificial Sequence: Synthetic oligonucleotide
  Sense strand starting at position 1232 of SEQ ID NO: 1561096
gggaauauguccucuaacc

SEQ ID NO: 1646528 - RNA, 19 nt, Artificial Sequence
  Description of Artificial Sequence: Synthetic oligonucleotide
  Antisense strand to SEQ ID NO: 1646527
gguuagaggacauauuccc

SEQ ID NO: 1646529 - RNA, 19 nt, Artificial Sequence
  Description of Artificial Sequence: Synthetic oligonucleotide
  Sense strand starting at position 2036 of SEQ ID NO: 1561096
gaagacaguccuggucagu

SEQ ID NO: 1646530 - RNA, 19 nt, Artificial Sequence
  Description of Artificial Sequence: Synthetic oligonucleotide
  Antisense strand to SEQ ID NO: 1646529
acugaccaggacugucuuc

SEQ ID NO: 1646531 - RNA, 19 nt, Artificial Sequence
  Description of Artificial Sequence: Synthetic oligonucleotide
  Sense strand starting at position 2098 of SEQ ID NO: 1561096
ggacaaucauacggucaca

SEQ ID NO: 1646532 - RNA, 19 nt, Artificial Sequence
  Description of Artificial Sequence: Synthetic oligonucleotide
  Antisense strand to SEQ ID NO: 1646531
ugugaccguaugauugucc

SEQ ID NO: 1646533 - RNA, 19 nt, Artificial Sequence
  Description of Artificial Sequence: Synthetic oligonucleotide
  Sense strand starting at position 2108 of SEQ ID NO: 1561096
acggucacaucagaaucua

SEQ ID NO: 1646534 - RNA, 19 nt, Artificial Sequence
  Description of Artificial Sequence: Synthetic oligonucleotide
  Antisense strand to SEQ ID NO: 1646533
uagauucugaugugaccgu

SEQ ID NO: 1646535 - RNA, 19 nt, Artificial Sequence
  Description of Artificial Sequence: Synthetic oligonucleotide
  Sense strand starting at position 2168 of SEQ ID NO: 1561096
accguuucuccaugaucac

SEQ ID NO: 1646536 - RNA, 19 nt, Artificial Sequence
  Description of Artificial Sequence: Synthetic oligonucleotide
  Antisense strand to SEQ ID NO: 1646535
gugaucauggagaaacggu

SEQ ID NO: 1646537 - RNA, 19 nt, Artificial Sequence
  Description of Artificial Sequence: Synthetic oligonucleotide
  Sense strand starting at position 2169 of SEQ ID NO: 1561096
ccguuucuccaugaucacu

SEQ ID NO: 1646538 - RNA, 19 nt, Artificial Sequence
  Description of Artificial Sequence: Synthetic oligonucleotide
  Antisense strand to SEQ ID NO: 1646537
agugaucauggagaaacgg

SEQ ID NO: 1646539 - RNA, 19 nt, Artificial Sequence
  Description of Artificial Sequence: Synthetic oligonucleotide
  Sense strand starting at position 2178 of SEQ ID NO: 1561096
caugaucacucucagagga

SEQ ID NO: 1646540 - RNA, 19 nt, Artificial Sequence
  Description of Artificial Sequence: Synthetic oligonucleotide
  Antisense strand to SEQ ID NO: 1646539
uccucugagagugaucaug

SEQ ID NO: 1646541 - RNA, 19 nt, Artificial Sequence
  Description of Artificial Sequence: Synthetic oligonucleotide
  Sense strand starting at position 2180 of SEQ ID NO: 1561096
ugaucacucucagaggaag

SEQ ID NO: 1646542 - RNA, 19 nt, Artificial Sequence
  Description of Artificial Sequence: Synthetic oligonucleotide
  Antisense strand to SEQ ID NO: 1646541
cuuccucugagagugauca

SEQ ID NO: 1646543 - RNA, 19 nt, Artificial Sequence
  Description of Artificial Sequence: Synthetic oligonucleotide
  Sense strand starting at position 2390 of SEQ ID NO: 1561096
acaggacuauagcucaaau

SEQ ID NO: 1646544 - RNA, 19 nt, Artificial Sequence
  Description of Artificial Sequence: Synthetic oligonucleotide
  Antisense strand to SEQ ID NO: 1646543
auuugagcuauaguccugu

SEQ ID NO: 1646545 - RNA, 19 nt, Artificial Sequence
  Description of Artificial Sequence: Synthetic oligonucleotide
  Sense strand starting at position 2756 of SEQ ID NO: 1561096
acagauauuuauggcaaau

SEQ ID NO: 1646546 - RNA, 19 nt, Artificial Sequence
  Description of Artificial Sequence: Synthetic oligonucleotide
  Antisense strand to SEQ ID NO: 1646545
auuugccauaaauaucugu

SEQ ID NO: 1646547 - RNA, 19 nt, Artificial Sequence
  Description of Artificial Sequence: Synthetic oligonucleotide
  Sense strand starting at position 2758 of SEQ ID NO: 1561096
agauauuuauggcaaauac

SEQ ID NO: 1646548 - RNA, 19 nt, Artificial Sequence
  Description of Artificial Sequence: Synthetic oligonucleotide
  Antisense strand to SEQ ID NO: 1646547
guauuugccauaaauaucu

SEQ ID NO: 1646549 - RNA, 19 nt, Artificial Sequence
  Description of Artificial Sequence: Synthetic oligonucleotide
  Sense strand starting at position 2843 of SEQ ID NO: 1561096
aggauaaaguauuacacaa

SEQ ID NO: 1646550 - RNA, 19 nt, Artificial Sequence
  Description of Artificial Sequence: Synthetic oligonucleotide
  Antisense strand to SEQ ID NO: 1646549
uuguguaauacuuuauccu

SEQ ID NO: 1646551 - RNA, 19 nt, Artificial Sequence
  Description of Artificial Sequence: Synthetic oligonucleotide
  Sense strand starting at position 2966 of SEQ ID NO: 1561096
aggaaagauacuugugucu

SEQ ID NO: 1646552 - RNA, 19 nt, Artificial Sequence
  Description of Artificial Sequence: Synthetic oligonucleotide
  Antisense strand to SEQ ID NO: 1646551
agacacaaguaucuuuccu

SEQ ID NO: 1646553 - RNA, 19 nt, Artificial Sequence
  Description of Artificial Sequence: Synthetic oligonucleotide
  Sense strand starting at position 2968 of SEQ ID NO: 1561096
gaaagauacuugugucugu

SEQ ID NO: 1646554 - RNA, 19 nt, Artificial Sequence
  Description of Artificial Sequence: Synthetic oligonucleotide
  Antisense strand to SEQ ID NO: 1646553
acagacacaaguaucuuuc

SEQ ID NO: 1646555 - RNA, 19 nt, Artificial Sequence
  Description of Artificial Sequence: Synthetic oligonucleotide
  Sense strand starting at position 2971 of SEQ ID NO: 1561096
agauacuugugucuguaaa

SEQ ID NO: 1646556 - RNA, 19 nt, Artificial Sequence
  Description of Artificial Sequence: Synthetic oligonucleotide
  Antisense strand to SEQ ID NO: 1646555
uuuacagacacaaguaucu

SEQ ID NO: 1646557 - RNA, 19 nt, Artificial Sequence
  Description of Artificial Sequence: Synthetic oligonucleotide
  Sense strand starting at position 2972 of SEQ ID NO: 1561096
gauacuugugucuguaaag

SEQ ID NO: 1646558 - RNA, 19 nt, Artificial Sequence
  Description of Artificial Sequence: Synthetic oligonucleotide
  Antisense strand to SEQ ID NO: 1646557
cuuuacagacacaaguauc

SEQ ID NO: 1646559 - RNA, 19 nt, Artificial Sequence
  Description of Artificial Sequence: Synthetic oligonucleotide
  Sense strand starting at position 2973 of SEQ ID NO: 1561096
auacuugugucuguaaaga

SEQ ID NO: 1646560 - RNA, 19 nt, Artificial Sequence
  Description of Artificial Sequence: Synthetic oligonucleotide
  Antisense strand to SEQ ID NO: 1646559
ucuuuacagacacaaguau

SEQ ID NO: 1646561 - RNA, 19 nt, Artificial Sequence
  Description of Artificial Sequence: Synthetic oligonucleotide
  Sense strand starting at position 3204 of SEQ ID NO: 1561096
gucgcaaaucugucuuguu

SEQ ID NO: 1646562 - RNA, 19 nt, Artificial Sequence
  Description of Artificial Sequence: Synthetic oligonucleotide
  Antisense strand to SEQ ID NO: 1646561
aacaagacagauuugcgac

SEQ ID NO: 1646563 - RNA, 19 nt, Artificial Sequence
  Description of Artificial Sequence: Synthetic oligonucleotide
  Sense strand starting at position 3205 of SEQ ID NO: 1561096
ucgcaaaucugucuuguuu

SEQ ID NO: 1646564 - RNA, 19 nt, Artificial Sequence
  Description of Artificial Sequence: Synthetic oligonucleotide
  Antisense strand to SEQ ID NO: 1646563
aaacaagacagauuugcga

SEQ ID NO: 1646565 - RNA, 19 nt, Artificial Sequence
  Description of Artificial Sequence: Synthetic oligonucleotide
  Sense strand starting at position 3253 of SEQ ID NO: 1561096
cccugaacucuccggcaua

SEQ ID NO: 1646566 - RNA, 19 nt, Artificial Sequence
  Description of Artificial Sequence: Synthetic oligonucleotide
  Antisense strand to SEQ ID NO: 1646565
uaugccggagaguucaggg

SEQ ID NO: 1646567 - RNA, 19 nt, Artificial Sequence
  Description of Artificial Sequence: Synthetic oligonucleotide
  Sense strand starting at position 3265 of SEQ ID NO: 1561096
cggcauauuucugguucua

SEQ ID NO: 1646568 - RNA, 19 nt, Artificial Sequence
  Description of Artificial Sequence: Synthetic oligonucleotide
  Antisense strand to SEQ ID NO: 1646567
uagaaccagaaauaugccg

SEQ ID NO: 1646569 - RNA, 19 nt, Artificial Sequence
  Description of Artificial Sequence: Synthetic oligonucleotide
  Sense strand starting at position 3270 of SEQ ID NO: 1561096
uauuucugguucuaaggau

SEQ ID NO: 1646570 - RNA, 19 nt, Artificial Sequence
  Description of Artificial Sequence: Synthetic oligonucleotide
  Antisense strand to SEQ ID NO: 1646569
auccuuagaaccagaaaua

SEQ ID NO: 1646571 - RNA, 19 nt, Artificial Sequence
  Description of Artificial Sequence: Synthetic oligonucleotide
  Sense strand starting at position 3288 of SEQ ID NO: 1561096
uaaauucuguaagaagugu

SEQ ID NO: 1646572 - RNA, 19 nt, Artificial Sequence
  Description of Artificial Sequence: Synthetic oligonucleotide
  Antisense strand to SEQ ID NO: 1646571
acacuucuuacagaauuua

SEQ ID NO: 1646573 - RNA, 19 nt, Artificial Sequence
  Description of Artificial Sequence: Synthetic oligonucleotide
  Sense strand starting at position 102 of SEQ ID NO: 1561097
uccacauaaguucgcuaaa

SEQ ID NO: 1646574 - RNA, 19 nt, Artificial Sequence
  Description of Artificial Sequence: Synthetic oligonucleotide
  Antisense strand to SEQ ID NO: 1646573
uuuagcgaacuuaugugga

SEQ ID NO: 1646575 - RNA, 19 nt, Artificial Sequence
  Description of Artificial Sequence: Synthetic oligonucleotide
  Sense strand starting at position 103 of SEQ ID NO: 1561097
ccacauaaguucgcuaaag

SEQ ID NO: 1646576 - RNA, 19 nt, Artificial Sequence
  Description of Artificial Sequence: Synthetic oligonucleotide
  Antisense strand to SEQ ID NO: 1646575
cuuuagcgaacuuaugugg

SEQ ID NO: 1646577 - RNA, 19 nt, Artificial Sequence
  Description of Artificial Sequence: Synthetic oligonucleotide
  Sense strand starting at position 104 of SEQ ID NO: 1561097
cacauaaguucgcuaaaga

SEQ ID NO: 1646578 - RNA, 19 nt, Artificial Sequence
  Description of Artificial Sequence: Synthetic oligonucleotide
  Antisense strand to SEQ ID NO: 1646577
ucuuuagcgaacuuaugug

SEQ ID NO: 1646579 - RNA, 19 nt, Artificial Sequence
  Description of Artificial Sequence: Synthetic oligonucleotide
  Sense strand starting at position 105 of SEQ ID NO: 1561097
acauaaguucgcuaaagac

SEQ ID NO: 1646580 - RNA, 19 nt, Artificial Sequence
  Description of Artificial Sequence: Synthetic oligonucleotide
  Antisense strand to SEQ ID NO: 1646579
gucuuuagcgaacuuaugu

SEQ ID NO: 1646581 - RNA, 19 nt, Artificial Sequence
  Description of Artificial Sequence: Synthetic oligonucleotide
  Sense strand starting at position 216 of SEQ ID NO: 1561097
ggaccaaguugauguauga

SEQ ID NO: 1646582 - RNA, 19 nt, Artificial Sequence
  Description of Artificial Sequence: Synthetic oligonucleotide
  Antisense strand to SEQ ID NO: 1646581
ucauacaucaacuuggucc

SEQ ID NO: 1646583 - RNA, 19 nt, Artificial Sequence
  Description of Artificial Sequence: Synthetic oligonucleotide
  Sense strand starting at position 220 of SEQ ID NO: 1561097
caaguugauguaugaaugu

SEQ ID NO: 1646584 - RNA, 19 nt, Artificial Sequence
  Description of Artificial Sequence: Synthetic oligonucleotide
  Antisense strand to SEQ ID NO: 1646583
acauucauacaucaacuug

SEQ ID NO: 1646585 - RNA, 19 nt, Artificial Sequence
  Description of Artificial Sequence: Synthetic oligonucleotide
  Sense strand starting at position 226 of SEQ ID NO: 1561097
gauguaugaauguagcuga

SEQ ID NO: 1646586 - RNA, 19 nt, Artificial Sequence
  Description of Artificial Sequence: Synthetic oligonucleotide
  Antisense strand to SEQ ID NO: 1646585
ucagcuacauucauacauc

SEQ ID NO: 1646587 - RNA, 19 nt, Artificial Sequence
  Description of Artificial Sequence: Synthetic oligonucleotide
  Sense strand starting at position 687 of SEQ ID NO: 1561097
agugcagguucagagcaau

SEQ ID NO: 1646588 - RNA, 19 nt, Artificial Sequence
  Description of Artificial Sequence: Synthetic oligonucleotide
  Antisense strand to SEQ ID NO: 1646587
auugcucugaaccugcacu

SEQ ID NO: 1646589 - RNA, 19 nt, Artificial Sequence
  Description of Artificial Sequence: Synthetic oligonucleotide
  Sense strand starting at position 708 of SEQ ID NO: 1561097
acgauaggccaagagaguu

SEQ ID NO: 1646590 - RNA, 19 nt, Artificial Sequence
  Description of Artificial Sequence: Synthetic oligonucleotide
  Antisense strand to SEQ ID NO: 1646589
aacucucuuggccuaucgu

SEQ ID NO: 1646591 - RNA, 19 nt, Artificial Sequence
  Description of Artificial Sequence: Synthetic oligonucleotide
  Sense strand starting at position 716 of SEQ ID NO: 1561097
ccaagagaguuuguuccca

SEQ ID NO: 1646592 - RNA, 19 nt, Artificial Sequence
  Description of Artificial Sequence: Synthetic oligonucleotide
  Antisense strand to SEQ ID NO: 1646591
ugggaacaaacucucuugg

SEQ ID NO: 1646593 - RNA, 19 nt, Artificial Sequence
  Description of Artificial Sequence: Synthetic oligonucleotide
  Sense strand starting at position 718 of SEQ ID NO: 1561097
aagagaguuuguucccaca

SEQ ID NO: 1646594 - RNA, 19 nt, Artificial Sequence
  Description of Artificial Sequence: Synthetic oligonucleotide
  Antisense strand to SEQ ID NO: 1646593
ugugggaacaaacucucuu

SEQ ID NO: 1646595 - RNA, 19 nt, Artificial Sequence
  Description of Artificial Sequence: Synthetic oligonucleotide
  Sense strand starting at position 720 of SEQ ID NO: 1561097
gagaguuuguucccacauu

SEQ ID NO: 1646596 - RNA, 19 nt, Artificial Sequence
  Description of Artificial Sequence: Synthetic oligonucleotide
  Antisense strand to SEQ ID NO: 1646595
aaugugggaacaaacucuc

SEQ ID NO: 1646597 - RNA, 19 nt, Artificial Sequence
  Description of Artificial Sequence: Synthetic oligonucleotide
  Sense strand starting at position 721 of SEQ ID NO: 1561097
agaguuuguucccacauuu

SEQ ID NO: 1646598 - RNA, 19 nt, Artificial Sequence
  Description of Artificial Sequence: Synthetic oligonucleotide
  Antisense strand to SEQ ID NO: 1646597
aaaugugggaacaaacucu

SEQ ID NO: 1646599 - RNA, 19 nt, Artificial Sequence
  Description of Artificial Sequence: Synthetic oligonucleotide
  Sense strand starting at position 812 of SEQ ID NO: 1561097
ucaagaaguuaucugcuga

SEQ ID NO: 1646600 - RNA, 19 nt, Artificial Sequence
  Description of Artificial Sequence: Synthetic oligonucleotide
  Antisense strand to SEQ ID NO: 1646599
ucagcagauaacuucuuga

SEQ ID NO: 1646601 - RNA, 19 nt, Artificial Sequence
  Description of Artificial Sequence: Synthetic oligonucleotide
  Sense strand starting at position 904 of SEQ ID NO: 1561097
ccaauuccauuugggagau

SEQ ID NO: 1646602 - RNA, 19 nt, Artificial Sequence
  Description of Artificial Sequence: Synthetic oligonucleotide
  Antisense strand to SEQ ID NO: 1646601
aucucccaaauggaauugg

SEQ ID NO: 1646603 - RNA, 19 nt, Artificial Sequence
  Description of Artificial Sequence: Synthetic oligonucleotide
  Sense strand starting at position 998 of SEQ ID NO: 1561097
gugacagugugcuaaguga

SEQ ID NO: 1646604 - RNA, 19 nt, Artificial Sequence
  Description of Artificial Sequence: Synthetic oligonucleotide
  Antisense strand to SEQ ID NO: 1646603
ucacuuagcacacugucac

SEQ ID NO: 1646605 - RNA, 19 nt, Artificial Sequence
  Description of Artificial Sequence: Synthetic oligonucleotide
  Sense strand starting at position 1029 of SEQ ID NO: 1561097
ggaaucaagcuugaaugca

SEQ ID NO: 1646606 - RNA, 19 nt, Artificial Sequence
  Description of Artificial Sequence: Synthetic oligonucleotide
  Antisense strand to SEQ ID NO: 1646605
ugcauucaagcuugauucc

SEQ ID NO: 1646607 - RNA, 19 nt, Artificial Sequence
  Description of Artificial Sequence: Synthetic oligonucleotide
  Sense strand starting at position 1039 of SEQ ID NO: 1561097
uugaaugcagccuaucaau

SEQ ID NO: 1646608 - RNA, 19 nt, Artificial Sequence
  Description of Artificial Sequence: Synthetic oligonucleotide
  Antisense strand to SEQ ID NO: 1646607
auugauaggcugcauucaa

SEQ ID NO: 1646609 - RNA, 19 nt, Artificial Sequence
  Description of Artificial Sequence: Synthetic oligonucleotide
  Sense strand starting at position 1099 of SEQ ID NO: 1561097
uccgcuuauucccuugcua

SEQ ID NO: 1646610 - RNA, 19 nt, Artificial Sequence
  Description of Artificial Sequence: Synthetic oligonucleotide
  Antisense strand to SEQ ID NO: 1646609
uagcaagggaauaagcgga

SEQ ID NO: 1646611 - RNA, 19 nt, Artificial Sequence
  Description of Artificial Sequence: Synthetic oligonucleotide
  Sense strand starting at position 1101 of SEQ ID NO: 1561097
cgcuuauucccuugcuacu

SEQ ID NO: 1646612 - RNA, 19 nt, Artificial Sequence
  Description of Artificial Sequence: Synthetic oligonucleotide
  Antisense strand to SEQ ID NO: 1646611
aguagcaagggaauaagcg

SEQ ID NO: 1646613 - RNA, 19 nt, Artificial Sequence
  Description of Artificial Sequence: Synthetic oligonucleotide
  Sense strand starting at position 1494 of SEQ ID NO: 1561097
ccggacauaucuggagguu

SEQ ID NO: 1646614 - RNA, 19 nt, Artificial Sequence
  Description of Artificial Sequence: Synthetic oligonucleotide
  Antisense strand to SEQ ID NO: 1646613
aaccuccagauauguccgg

SEQ ID NO: 1646615 - RNA, 19 nt, Artificial Sequence
  Description of Artificial Sequence: Synthetic oligonucleotide
  Sense strand starting at position 1495 of SEQ ID NO: 1561097
cggacauaucuggagguuu

SEQ ID NO: 1646616 - RNA, 19 nt, Artificial Sequence
  Description of Artificial Sequence: Synthetic oligonucleotide
  Antisense strand to SEQ ID NO: 1646615
aaaccuccagauauguccg

SEQ ID NO: 1646617 - RNA, 19 nt, Artificial Sequence
  Description of Artificial Sequence: Synthetic oligonucleotide
  Sense strand starting at position 1604 of SEQ ID NO: 1561097
uguugcagccgcuguaauu

SEQ ID NO: 1646618 - RNA, 19 nt, Artificial Sequence
  Description of Artificial Sequence: Synthetic oligonucleotide
  Antisense strand to SEQ ID NO: 1646617
aauuacagcggcugcaaca

SEQ ID NO: 1646619 - RNA, 19 nt, Artificial Sequence
  Description of Artificial Sequence: Synthetic oligonucleotide
  Sense strand starting at position 2525 of SEQ ID NO: 1561097
gucccugaggcucggaaau

SEQ ID NO: 1646620 - RNA, 19 nt, Artificial Sequence
  Description of Artificial Sequence: Synthetic oligonucleotide
  Antisense strand to SEQ ID NO: 1646619
auuuccgagccucagggac

SEQ ID NO: 1646621 - RNA, 19 nt, Artificial Sequence
  Description of Artificial Sequence: Synthetic oligonucleotide
  Sense strand starting at position 2717 of SEQ ID NO: 1561097
gccauuaauuagcuuagca

SEQ ID NO: 1646622 - RNA, 19 nt, Artificial Sequence
  Description of Artificial Sequence: Synthetic oligonucleotide
  Antisense strand to SEQ ID NO: 1646621
ugcuaagcuaauuaauggc

SEQ ID NO: 1646623 - RNA, 19 nt, Artificial Sequence
  Description of Artificial Sequence: Synthetic oligonucleotide
  Sense strand starting at position 3289 of SEQ ID NO: 1561097
cugggaggaucauggacau

SEQ ID NO: 1646624 - RNA, 19 nt, Artificial Sequence
  Description of Artificial Sequence: Synthetic oligonucleotide
  Antisense strand to SEQ ID NO: 1646623
auguccaugauccucccag

SEQ ID NO: 1646625 - RNA, 19 nt, Artificial Sequence
  Description of Artificial Sequence: Synthetic oligonucleotide
  Sense strand starting at position 3324 of SEQ ID NO: 1561097
acggaagucgucguugcaa

SEQ ID NO: 1646626 - RNA, 19 nt, Artificial Sequence
  Description of Artificial Sequence: Synthetic oligonucleotide
  Antisense strand to SEQ ID NO: 1646625
uugcaacgacgacuuccgu

SEQ ID NO: 1646627 - RNA, 19 nt, Artificial Sequence
  Description of Artificial Sequence: Synthetic oligonucleotide
  Sense strand starting at position 3325 of SEQ ID NO: 1561097
cggaagucgucguugcaaa

SEQ ID NO: 1646628 - RNA, 19 nt, Artificial Sequence
  Description of Artificial Sequence: Synthetic oligonucleotide
  Antisense strand to SEQ ID NO: 1646627
uuugcaacgacgacuuccg

SEQ ID NO: 1646629 - RNA, 19 nt, Artificial Sequence
  Description of Artificial Sequence: Synthetic oligonucleotide
  Sense strand starting at position 3326 of SEQ ID NO: 1561097
ggaagucgucguugcaaag

SEQ ID NO: 1646630 - RNA, 19 nt, Artificial Sequence
  Description of Artificial Sequence: Synthetic oligonucleotide
  Antisense strand to SEQ ID NO: 1646629
cuuugcaacgacgacuucc

SEQ ID NO: 1646631 - RNA, 19 nt, Artificial Sequence
  Description of Artificial Sequence: Synthetic oligonucleotide
  Sense strand starting at position 3381 of SEQ ID NO: 1561097
gagaaaccuuccuccgaga

SEQ ID NO: 1646632 - RNA, 19 nt, Artificial Sequence
  Description of Artificial Sequence: Synthetic oligonucleotide
  Antisense strand to SEQ ID NO: 1646631
ucucggaggaagguuucuc

SEQ ID NO: 1646633 - RNA, 19 nt, Artificial Sequence
  Description of Artificial Sequence: Synthetic oligonucleotide
  Sense strand starting at position 3383 of SEQ ID NO: 1561097
gaaaccuuccuccgagagu

SEQ ID NO: 1646634 - RNA, 19 nt, Artificial Sequence
  Description of Artificial Sequence: Synthetic oligonucleotide
  Antisense strand to SEQ ID NO: 1646633
acucucggaggaagguuuc

SEQ ID NO: 1646635 - RNA, 19 nt, Artificial Sequence
  Description of Artificial Sequence: Synthetic oligonucleotide
  Sense strand starting at position 3386 of SEQ ID NO: 1561097
accuuccuccgagagugaa

SEQ ID NO: 1646636 - RNA, 19 nt, Artificial Sequence
  Description of Artificial Sequence: Synthetic oligonucleotide
  Antisense strand to SEQ ID NO: 1646635
uucacucucggaggaaggu

SEQ ID NO: 1646637 - RNA, 19 nt, Artificial Sequence
  Description of Artificial Sequence: Synthetic oligonucleotide
  Sense strand starting at position 3964 of SEQ ID NO: 1561097
ucuguuauguucuguagag

SEQ ID NO: 1646638 - RNA, 19 nt, Artificial Sequence
  Description of Artificial Sequence: Synthetic oligonucleotide
  Antisense strand to SEQ ID NO: 1646637
cucuacagaacauaacaga

SEQ ID NO: 1646639 - RNA, 19 nt, Artificial Sequence
  Description of Artificial Sequence: Synthetic oligonucleotide
  Sense strand starting at position 3965 of SEQ ID NO: 1561097
cuguuauguucuguagagc

SEQ ID NO: 1646640 - RNA, 19 nt, Artificial Sequence
  Description of Artificial Sequence: Synthetic oligonucleotide
  Antisense strand to SEQ ID NO: 1646639
gcucuacagaacauaacag

SEQ ID NO: 1646641 - RNA, 19 nt, Artificial Sequence
  Description of Artificial Sequence: Synthetic oligonucleotide
  Sense strand starting at position 3966 of SEQ ID NO: 1561097
uguuauguucuguagagcu

SEQ ID NO: 1646642 - RNA, 19 nt, Artificial Sequence
  Description of Artificial Sequence: Synthetic oligonucleotide
  Antisense strand to SEQ ID NO: 1646641
agcucuacagaacauaaca

SEQ ID NO: 1646643 - RNA, 19 nt, Artificial Sequence
  Description of Artificial Sequence: Synthetic oligonucleotide
  Sense strand starting at position 3968 of SEQ ID NO: 1561097
uuauguucuguagagcuga

SEQ ID NO: 1646644 - RNA, 19 nt, Artificial Sequence
  Description of Artificial Sequence: Synthetic oligonucleotide
  Antisense strand to SEQ ID NO: 1646643
ucagcucuacagaacauaa

SEQ ID NO: 1646645 - RNA, 19 nt, Artificial Sequence
  Description of Artificial Sequence: Synthetic oligonucleotide
  Sense strand starting at position 41 of SEQ ID NO: 1561098
cuccgagacucuccagaau

SEQ ID NO: 1646646 - RNA, 19 nt, Artificial Sequence
  Description of Artificial Sequence: Synthetic oligonucleotide
  Antisense strand to SEQ ID NO: 1646645
auucuggagagucucggag

SEQ ID NO: 1646647 - RNA, 19 nt, Artificial Sequence
  Description of Artificial Sequence: Synthetic oligonucleotide
  Sense strand starting at position 57 of SEQ ID NO: 1561098
aauggaagggucuguuuac

SEQ ID NO: 1646648 - RNA, 19 nt, Artificial Sequence
  Description of Artificial Sequence: Synthetic oligonucleotide
  Antisense strand to SEQ ID NO: 1646647
guaaacagacccuuccauu

SEQ ID NO: 1646649 - RNA, 19 nt, Artificial Sequence
  Description of Artificial Sequence: Synthetic oligonucleotide
  Sense strand starting at position 58 of SEQ ID NO: 1561098
auggaagggucuguuuaca

SEQ ID NO: 1646650 - RNA, 19 nt, Artificial Sequence
  Description of Artificial Sequence: Synthetic oligonucleotide
  Antisense strand to SEQ ID NO: 1646649
uguaaacagacccuuccau

SEQ ID NO: 1646651 - RNA, 19 nt, Artificial Sequence
  Description of Artificial Sequence: Synthetic oligonucleotide
  Sense strand starting at position 102 of SEQ ID NO: 1561098
agacaaguggcuugucuag

SEQ ID NO: 1646652 - RNA, 19 nt, Artificial Sequence
  Description of Artificial Sequence: Synthetic oligonucleotide
  Antisense strand to SEQ ID NO: 1646651
cuagacaagccacuugucu

SEQ ID NO: 1646653 - RNA, 19 nt, Artificial Sequence
  Description of Artificial Sequence: Synthetic oligonucleotide
  Sense strand starting at position 175 of SEQ ID NO: 1561098
acugcuuuccuagacagag

SEQ ID NO: 1646654 - RNA, 19 nt, Artificial Sequence
  Description of Artificial Sequence: Synthetic oligonucleotide
  Antisense strand to SEQ ID NO: 1646653
cucugucuaggaaagcagu

SEQ ID NO: 1646655 - RNA, 19 nt, Artificial Sequence
  Description of Artificial Sequence: Synthetic oligonucleotide
  Sense strand starting at position 253 of SEQ ID NO: 1561098
cugcuuagucugggaugga

SEQ ID NO: 1646656 - RNA, 19 nt, Artificial Sequence
  Description of Artificial Sequence: Synthetic oligonucleotide
  Antisense strand to SEQ ID NO: 1646655
uccaucccagacuaagcag

SEQ ID NO: 1646657 - RNA, 19 nt, Artificial Sequence
  Description of Artificial Sequence: Synthetic oligonucleotide
  Sense strand starting at position 256 of SEQ ID NO: 1561098
cuuagucugggauggagau

SEQ ID NO: 1646658 - RNA, 19 nt, Artificial Sequence
  Description of Artificial Sequence: Synthetic oligonucleotide
  Antisense strand to SEQ ID NO: 1646657
aucuccaucccagacuaag

SEQ ID NO: 1646659 - RNA, 19 nt, Artificial Sequence
  Description of Artificial Sequence: Synthetic oligonucleotide
  Sense strand starting at position 257 of SEQ ID NO: 1561098
uuagucugggauggagauu

SEQ ID NO: 1646660 - RNA, 19 nt, Artificial Sequence
  Description of Artificial Sequence: Synthetic oligonucleotide
  Antisense strand to SEQ ID NO: 1646659
aaucuccaucccagacuaa

SEQ ID NO: 1646661 - RNA, 19 nt, Artificial Sequence
  Description of Artificial Sequence: Synthetic oligonucleotide
  Sense strand starting at position 406 of SEQ ID NO: 1561098
uuuacuggccuaugaggau

SEQ ID NO: 1646662 - RNA, 19 nt, Artificial Sequence
  Description of Artificial Sequence: Synthetic oligonucleotide
  Antisense strand to SEQ ID NO: 1646661
auccucauaggccaguaaa

SEQ ID NO: 1646663 - RNA, 19 nt, Artificial Sequence
  Description of Artificial Sequence: Synthetic oligonucleotide
  Sense strand starting at position 792 of SEQ ID NO: 1561098
gagcuuccacaguaucuga

SEQ ID NO: 1646664 - RNA, 19 nt, Artificial Sequence
  Description of Artificial Sequence: Synthetic oligonucleotide
  Antisense strand to SEQ ID NO: 1646663
ucagauacuguggaagcuc

SEQ ID NO: 1646665 - RNA, 19 nt, Artificial Sequence
  Description of Artificial Sequence: Synthetic oligonucleotide
  Sense strand starting at position 1026 of SEQ ID NO: 1561098
cuauuuaagugucugcuga

SEQ ID NO: 1646666 - RNA, 19 nt, Artificial Sequence
  Description of Artificial Sequence: Synthetic oligonucleotide
  Antisense strand to SEQ ID NO: 1646665
ucagcagacacuuaaauag

SEQ ID NO: 1646667 - RNA, 19 nt, Artificial Sequence
  Description of Artificial Sequence: Synthetic oligonucleotide
  Sense strand starting at position 1027 of SEQ ID NO: 1561098
uauuuaagugucugcugau

SEQ ID NO: 1646668 - RNA, 19 nt, Artificial Sequence
  Description of Artificial Sequence: Synthetic oligonucleotide
  Antisense strand to SEQ ID NO: 1646667
aucagcagacacuuaaaua

SEQ ID NO: 1646669 - RNA, 19 nt, Artificial Sequence
  Description of Artificial Sequence: Synthetic oligonucleotide
  Sense strand starting at position 1028 of SEQ ID NO: 1561098
auuuaagugucugcugaug

SEQ ID NO: 1646670 - RNA, 19 nt, Artificial Sequence
  Description of Artificial Sequence: Synthetic oligonucleotide
  Antisense strand to SEQ ID NO: 1646669
caucagcagacacuuaaau

SEQ ID NO: 1646671 - RNA, 19 nt, Artificial Sequence
  Description of Artificial Sequence: Synthetic oligonucleotide
  Sense strand starting at position 1102 of SEQ ID NO: 1561098
agugucuccucaguauuua

SEQ ID NO: 1646672 - RNA, 19 nt, Artificial Sequence
  Description of Artificial Sequence: Synthetic oligonucleotide
  Antisense strand to SEQ ID NO: 1646671
uaaauacugaggagacacu

SEQ ID NO: 1646673 - RNA, 19 nt, Artificial Sequence
  Description of Artificial Sequence: Synthetic oligonucleotide
  Sense strand starting at position 1193 of SEQ ID NO: 1561098
ccgauuccugaguauguaa

SEQ ID NO: 1646674 - RNA, 19 nt, Artificial Sequence
  Description of Artificial Sequence: Synthetic oligonucleotide
  Antisense strand to SEQ ID NO: 1646673
uuacauacucaggaaucgg

SEQ ID NO: 1646675 - RNA, 19 nt, Artificial Sequence
  Description of Artificial Sequence: Synthetic oligonucleotide
  Sense strand starting at position 1270 of SEQ ID NO: 1561098
aggacucccuaggauuuaa

SEQ ID NO: 1646676 - RNA, 19 nt, Artificial Sequence
  Description of Artificial Sequence: Synthetic oligonucleotide
  Antisense strand to SEQ ID NO: 1646675
uuaaauccuagggaguccu

SEQ ID NO: 1646677 - RNA, 19 nt, Artificial Sequence
  Description of Artificial Sequence: Synthetic oligonucleotide
  Sense strand starting at position 1438 of SEQ ID NO: 1561098
uuggaucucgcagagcaua

SEQ ID NO: 1646678 - RNA, 19 nt, Artificial Sequence
  Description of Artificial Sequence: Synthetic oligonucleotide
  Antisense strand to SEQ ID NO: 1646677
uaugcucugcgagauccaa

SEQ ID NO: 1646679 - RNA, 19 nt, Artificial Sequence
  Description of Artificial Sequence: Synthetic oligonucleotide
  Sense strand starting at position 1952 of SEQ ID NO: 1561098
gcuggagcucgagaacuga

SEQ ID NO: 1646680 - RNA, 19 nt, Artificial Sequence
  Description of Artificial Sequence: Synthetic oligonucleotide
  Antisense strand to SEQ ID NO: 1646679
ucaguucucgagcuccagc

SEQ ID NO: 1646681 - RNA, 19 nt, Artificial Sequence
  Description of Artificial Sequence: Synthetic oligonucleotide
  Sense strand starting at position 2173 of SEQ ID NO: 1561098
cgaguugugccucuucggu

SEQ ID NO: 1646682 - RNA, 19 nt, Artificial Sequence
  Description of Artificial Sequence: Synthetic oligonucleotide
  Antisense strand to SEQ ID NO: 1646681
accgaagaggcacaacucg

SEQ ID NO: 1646683 - RNA, 19 nt, Artificial Sequence
  Description of Artificial Sequence: Synthetic oligonucleotide
  Sense strand starting at position 2439 of SEQ ID NO: 1561098
ggucuagacuggcuuggau

SEQ ID NO: 1646684 - RNA, 19 nt, Artificial Sequence
  Description of Artificial Sequence: Synthetic oligonucleotide
  Antisense strand to SEQ ID NO: 1646683
auccaagccagucuagacc

SEQ ID NO: 1646685 - RNA, 19 nt, Artificial Sequence
  Description of Artificial Sequence: Synthetic oligonucleotide
  Sense strand starting at position 2534 of SEQ ID NO: 1561098
auccuuaaggccugggaga

SEQ ID NO: 1646686 - RNA, 19 nt, Artificial Sequence
  Description of Artificial Sequence: Synthetic oligonucleotide
  Antisense strand to SEQ ID NO: 1646685
ucucccaggccuuaaggau

SEQ ID NO: 1646687 - RNA, 19 nt, Artificial Sequence
  Description of Artificial Sequence: Synthetic oligonucleotide
  Sense strand starting at position 2535 of SEQ ID NO: 1561098
uccuuaaggccugggagau

SEQ ID NO: 1646688 - RNA, 19 nt, Artificial Sequence
  Description of Artificial Sequence: Synthetic oligonucleotide
  Antisense strand to SEQ ID NO: 1646687
aucucccaggccuuaagga

SEQ ID NO: 1646689 - RNA, 19 nt, Artificial Sequence
  Description of Artificial Sequence: Synthetic oligonucleotide
  Sense strand starting at position 2551 of SEQ ID NO: 1561098
gaugcagaauagucugaga

SEQ ID NO: 1646690 - RNA, 19 nt, Artificial Sequence
  Description of Artificial Sequence: Synthetic oligonucleotide
  Antisense strand to SEQ ID NO: 1646689
ucucagacuauucugcauc

SEQ ID NO: 1646691 - RNA, 19 nt, Artificial Sequence
  Description of Artificial Sequence: Synthetic oligonucleotide
  Sense strand starting at position 2553 of SEQ ID NO: 1561098
ugcagaauagucugagaca

SEQ ID NO: 1646692 - RNA, 19 nt, Artificial Sequence
  Description of Artificial Sequence: Synthetic oligonucleotide
  Antisense strand to SEQ ID NO: 1646691
ugucucagacuauucugca

SEQ ID NO: 1646693 - RNA, 19 nt, Artificial Sequence
  Description of Artificial Sequence: Synthetic oligonucleotide
  Sense strand starting at position 3257 of SEQ ID NO: 1561098
auaauaaagcauuggaguu

SEQ ID NO: 1646694 - RNA, 19 nt, Artificial Sequence
  Description of Artificial Sequence: Synthetic oligonucleotide
  Antisense strand to SEQ ID NO: 1646693
aacuccaaugcuuuauuau

SEQ ID NO: 1646695 - RNA, 19 nt, Artificial Sequence
  Description of Artificial Sequence: Synthetic oligonucleotide
  Sense strand starting at position 3314 of SEQ ID NO: 1561098
uugaccaagugacuuaaua

SEQ ID NO: 1646696 - RNA, 19 nt, Artificial Sequence
  Description of Artificial Sequence: Synthetic oligonucleotide
  Antisense strand to SEQ ID NO: 1646695
uauuaagucacuuggucaa

SEQ ID NO: 1646697 - RNA, 19 nt, Artificial Sequence
  Description of Artificial Sequence: Synthetic oligonucleotide
  Sense strand starting at position 3368 of SEQ ID NO: 1561098
gugguauaaccuuacuuac

SEQ ID NO: 1646698 - RNA, 19 nt, Artificial Sequence
  Description of Artificial Sequence: Synthetic oligonucleotide
  Antisense strand to SEQ ID NO: 1646697
guaaguaagguuauaccac

SEQ ID NO: 1646699 - RNA, 19 nt, Artificial Sequence
  Description of Artificial Sequence: Synthetic oligonucleotide
  Sense strand starting at position 3400 of SEQ ID NO: 1561098
gcauuaaaugggugagagu

SEQ ID NO: 1646700 - RNA, 19 nt, Artificial Sequence
  Description of Artificial Sequence: Synthetic oligonucleotide
  Antisense strand to SEQ ID NO: 1646699
acucucacccauuuaaugc

SEQ ID NO: 1646701 - RNA, 19 nt, Artificial Sequence
  Description of Artificial Sequence: Synthetic oligonucleotide
  Sense strand starting at position 3620 of SEQ ID NO: 1561098
acuugaguccacuguugau

SEQ ID NO: 1646702 - RNA, 19 nt, Artificial Sequence
  Description of Artificial Sequence: Synthetic oligonucleotide
  Antisense strand to SEQ ID NO: 1646701
aucaacaguggacucaagu

SEQ ID NO: 1646703 - RNA, 19 nt, Artificial Sequence
  Description of Artificial Sequence: Synthetic oligonucleotide
  Sense strand starting at position 3624 of SEQ ID NO: 1561098
gaguccacuguugauggau

SEQ ID NO: 1646704 - RNA, 19 nt, Artificial Sequence
  Description of Artificial Sequence: Synthetic oligonucleotide
  Antisense strand to SEQ ID NO: 1646703
auccaucaacaguggacuc

SEQ ID NO: 1646705 - RNA, 19 nt, Artificial Sequence
  Description of Artificial Sequence: Synthetic oligonucleotide
  Sense strand starting at position 3649 of SEQ ID NO: 1561098
gaaagauucuggguguuug

SEQ ID NO: 1646706 - RNA, 19 nt, Artificial Sequence
  Description of Artificial Sequence: Synthetic oligonucleotide
  Antisense strand to SEQ ID NO: 1646705
caaacacccagaaucuuuc

SEQ ID NO: 1646707 - RNA, 19 nt, Artificial Sequence
  Description of Artificial Sequence: Synthetic oligonucleotide
  Sense strand starting at position 3650 of SEQ ID NO: 1561098
aaagauucuggguguuuga

SEQ ID NO: 1646708 - RNA, 19 nt, Artificial Sequence
  Description of Artificial Sequence: Synthetic oligonucleotide
  Antisense strand to SEQ ID NO: 1646707
ucaaacacccagaaucuuu

SEQ ID NO: 1646709 - RNA, 19 nt, Artificial Sequence
  Description of Artificial Sequence: Synthetic oligonucleotide
  Sense strand starting at position 3653 of SEQ ID NO: 1561098
gauucuggguguuugauaa

SEQ ID NO: 1646710 - RNA, 19 nt, Artificial Sequence
  Description of Artificial Sequence: Synthetic oligonucleotide
  Antisense strand to SEQ ID NO: 1646709
uuaucaaacacccagaauc

SEQ ID NO: 1646711 - RNA, 19 nt, Artificial Sequence
  Description of Artificial Sequence: Synthetic oligonucleotide
  Sense strand starting at position 3683 of SEQ ID NO: 1561098
acaggccaucucuguauua

SEQ ID NO: 1646712 - RNA, 19 nt, Artificial Sequence
  Description of Artificial Sequence: Synthetic oligonucleotide
  Antisense strand to SEQ ID NO: 1646711
uaauacagagauggccugu

SEQ ID NO: 1646713 - RNA, 19 nt, Artificial Sequence
  Description of Artificial Sequence: Synthetic oligonucleotide
  Sense strand starting at position 3685 of SEQ ID NO: 1561098
aggccaucucuguauuaug

SEQ ID NO: 1646714 - RNA, 19 nt, Artificial Sequence
  Description of Artificial Sequence: Synthetic oligonucleotide
  Antisense strand to SEQ ID NO: 1646713
cauaauacagagauggccu

SEQ ID NO: 1646715 - RNA, 19 nt, Artificial Sequence
  Description of Artificial Sequence: Synthetic oligonucleotide
  Sense strand starting at position 3693 of SEQ ID NO: 1561098
ucuguauuaugucuaucag

SEQ ID NO: 1646716 - RNA, 19 nt, Artificial Sequence
  Description of Artificial Sequence: Synthetic oligonucleotide
  Antisense strand to SEQ ID NO: 1646715
cugauagacauaauacaga

SEQ ID NO: 1646717 - RNA, 19 nt, Artificial Sequence
  Description of Artificial Sequence: Synthetic oligonucleotide
  Sense strand starting at position 3694 of SEQ ID NO: 1561098
cuguauuaugucuaucagu

SEQ ID NO: 1646718 - RNA, 19 nt, Artificial Sequence
  Description of Artificial Sequence: Synthetic oligonucleotide
  Antisense strand to SEQ ID NO: 1646717
acugauagacauaauacag

SEQ ID NO: 1646719 - RNA, 19 nt, Artificial Sequence
  Description of Artificial Sequence: Synthetic oligonucleotide
  Sense strand starting at position 3703 of SEQ ID NO: 1561098
gucuaucaguguccaauuu

SEQ ID NO: 1646720 - RNA, 19 nt, Artificial Sequence
  Description of Artificial Sequence: Synthetic oligonucleotide
  Antisense strand to SEQ ID NO: 1646719
aaauuggacacugauagac

SEQ ID NO: 1646721 - RNA, 19 nt, Artificial Sequence
  Description of Artificial Sequence: Synthetic oligonucleotide
  Sense strand starting at position 3871 of SEQ ID NO: 1561098
ggcugugugcucucugcuu

SEQ ID NO: 1646722 - RNA, 19 nt, Artificial Sequence
  Description of Artificial Sequence: Synthetic oligonucleotide
  Antisense strand to SEQ ID NO: 1646721
aagcagagagcacacagcc

SEQ ID NO: 1646723 - RNA, 19 nt, Artificial Sequence
  Description of Artificial Sequence: Synthetic oligonucleotide
  Sense strand starting at position 3875 of SEQ ID NO: 1561098
gugugcucucugcuuuaua

SEQ ID NO: 1646724 - RNA, 19 nt, Artificial Sequence
  Description of Artificial Sequence: Synthetic oligonucleotide
  Antisense strand to SEQ ID NO: 1646723
uauaaagcagagagcacac

SEQ ID NO: 1646725 - RNA, 19 nt, Artificial Sequence
  Description of Artificial Sequence: Synthetic oligonucleotide
  Sense strand starting at position 91 of SEQ ID NO: 1561099
gucugcacauuuguauaua

SEQ ID NO: 1646726 - RNA, 19 nt, Artificial Sequence
  Description of Artificial Sequence: Synthetic oligonucleotide
  Antisense strand to SEQ ID NO: 1646725
uauauacaaaugugcagac

SEQ ID NO: 1646727 - RNA, 19 nt, Artificial Sequence
  Description of Artificial Sequence: Synthetic oligonucleotide
  Sense strand starting at position 260 of SEQ ID NO: 1561099
uguagucucagauauugga

SEQ ID NO: 1646728 - RNA, 19 nt, Artificial Sequence
  Description of Artificial Sequence: Synthetic oligonucleotide
  Antisense strand to SEQ ID NO: 1646727
uccaauaucugagacuaca

SEQ ID NO: 1646729 - RNA, 19 nt, Artificial Sequence
  Description of Artificial Sequence: Synthetic oligonucleotide
  Sense strand starting at position 283 of SEQ ID NO: 1561099
uccuuugaaccugggaguu

SEQ ID NO: 1646730 - RNA, 19 nt, Artificial Sequence
  Description of Artificial Sequence: Synthetic oligonucleotide
  Antisense strand to SEQ ID NO: 1646729
aacucccagguucaaagga

SEQ ID NO: 1646731 - RNA, 19 nt, Artificial Sequence
  Description of Artificial Sequence: Synthetic oligonucleotide
  Sense strand starting at position 477 of SEQ ID NO: 1561099
aacaaauggcaguggauau

SEQ ID NO: 1646732 - RNA, 19 nt, Artificial Sequence
  Description of Artificial Sequence: Synthetic oligonucleotide
  Antisense strand to SEQ ID NO: 1646731
auauccacugccauuuguu

SEQ ID NO: 1646733 - RNA, 19 nt, Artificial Sequence
  Description of Artificial Sequence: Synthetic oligonucleotide
  Sense strand starting at position 478 of SEQ ID NO: 1561099
acaaauggcaguggauaua

SEQ ID NO: 1646734 - RNA, 19 nt, Artificial Sequence
  Description of Artificial Sequence: Synthetic oligonucleotide
  Antisense strand to SEQ ID NO: 1646733
uauauccacugccauuugu

SEQ ID NO: 1646735 - RNA, 19 nt, Artificial Sequence
  Description of Artificial Sequence: Synthetic oligonucleotide
  Sense strand starting at position 546 of SEQ ID NO: 1561099
caggucuccugucugaaga

SEQ ID NO: 1646736 - RNA, 19 nt, Artificial Sequence
  Description of Artificial Sequence: Synthetic oligonucleotide
  Antisense strand to SEQ ID NO: 1646735
ucuucagacaggagaccug

SEQ ID NO: 1646737 - RNA, 19 nt, Artificial Sequence
  Description of Artificial Sequence: Synthetic oligonucleotide
  Sense strand starting at position 547 of SEQ ID NO: 1561099
aggucuccugucugaagaa

SEQ ID NO: 1646738 - RNA, 19 nt, Artificial Sequence
  Description of Artificial Sequence: Synthetic oligonucleotide
  Antisense strand to SEQ ID NO: 1646737
uucuucagacaggagaccu

SEQ ID NO: 1646739 - RNA, 19 nt, Artificial Sequence
  Description of Artificial Sequence: Synthetic oligonucleotide
  Sense strand starting at position 583 of SEQ ID NO: 1561099
agcuaaugucugcagagca

SEQ ID NO: 1646740 - RNA, 19 nt, Artificial Sequence
  Description of Artificial Sequence: Synthetic oligonucleotide
  Antisense strand to SEQ ID NO: 1646739
ugcucugcagacauuagcu

SEQ ID NO: 1646741 - RNA, 19 nt, Artificial Sequence
  Description of Artificial Sequence: Synthetic oligonucleotide
  Sense strand starting at position 869 of SEQ ID NO: 1561099
gggaccuucgugggaaaga

SEQ ID NO: 1646742 - RNA, 19 nt, Artificial Sequence
  Description of Artificial Sequence: Synthetic oligonucleotide
  Antisense strand to SEQ ID NO: 1646741
ucuuucccacgaagguccc

SEQ ID NO: 1646743 - RNA, 19 nt, Artificial Sequence
  Description of Artificial Sequence: Synthetic oligonucleotide
  Sense strand starting at position 877 of SEQ ID NO: 1561099
cgugggaaagaguguuaga

SEQ ID NO: 1646744 - RNA, 19 nt, Artificial Sequence
  Description of Artificial Sequence: Synthetic oligonucleotide
  Antisense strand to SEQ ID NO: 1646743
ucuaacacucuuucccacg

SEQ ID NO: 1646745 - RNA, 19 nt, Artificial Sequence
  Description of Artificial Sequence: Synthetic oligonucleotide
  Sense strand starting at position 880 of SEQ ID NO: 1561099
gggaaagaguguuagagag

SEQ ID NO: 1646746 - RNA, 19 nt, Artificial Sequence
  Description of Artificial Sequence: Synthetic oligonucleotide
  Antisense strand to SEQ ID NO: 1646745
cucucuaacacucuuuccc

SEQ ID NO: 1646747 - RNA, 19 nt, Artificial Sequence
  Description of Artificial Sequence: Synthetic oligonucleotide
  Sense strand starting at position 887 of SEQ ID NO: 1561099
aguguuagagaguaccauu

SEQ ID NO: 1646748 - RNA, 19 nt, Artificial Sequence
  Description of Artificial Sequence: Synthetic oligonucleotide
  Antisense strand to SEQ ID NO: 1646747
aaugguacucucuaacacu

SEQ ID NO: 1646749 - RNA, 19 nt, Artificial Sequence
  Description of Artificial Sequence: Synthetic oligonucleotide
  Sense strand starting at position 1170 of SEQ ID NO: 1561099
aguguucauggugaaauag

SEQ ID NO: 1646750 - RNA, 19 nt, Artificial Sequence
  Description of Artificial Sequence: Synthetic oligonucleotide
  Antisense strand to SEQ ID NO: 1646749
cuauuucaccaugaacacu

SEQ ID NO: 1646751 - RNA, 19 nt, Artificial Sequence
  Description of Artificial Sequence: Synthetic oligonucleotide
  Sense strand starting at position 1273 of SEQ ID NO: 1561099
caguguuucccggagccca

SEQ ID NO: 1646752 - RNA, 19 nt, Artificial Sequence
  Description of Artificial Sequence: Synthetic oligonucleotide
  Antisense strand to SEQ ID NO: 1646751
ugggcuccgggaaacacug

SEQ ID NO: 1646753 - RNA, 19 nt, Artificial Sequence
  Description of Artificial Sequence: Synthetic oligonucleotide
  Sense strand starting at position 1353 of SEQ ID NO: 1561099
ccauacuucucgcuacaga

SEQ ID NO: 1646754 - RNA, 19 nt, Artificial Sequence
  Description of Artificial Sequence: Synthetic oligonucleotide
  Antisense strand to SEQ ID NO: 1646753
ucuguagcgagaaguaugg

SEQ ID NO: 1646755 - RNA, 19 nt, Artificial Sequence
  Description of Artificial Sequence: Synthetic oligonucleotide
  Sense strand starting at position 2203 of SEQ ID NO: 1561099
guccaucucuagcugauga

SEQ ID NO: 1646756 - RNA, 19 nt, Artificial Sequence
  Description of Artificial Sequence: Synthetic oligonucleotide
  Antisense strand to SEQ ID NO: 1646755
ucaucagcuagagauggac

SEQ ID NO: 1646757 - RNA, 19 nt, Artificial Sequence
  Description of Artificial Sequence: Synthetic oligonucleotide
  Sense strand starting at position 2226 of SEQ ID NO: 1561099
guagguuauguucgaggua

SEQ ID NO: 1646758 - RNA, 19 nt, Artificial Sequence
  Description of Artificial Sequence: Synthetic oligonucleotide
  Antisense strand to SEQ ID NO: 1646757
uaccucgaacauaaccuac

SEQ ID NO: 1646759 - RNA, 19 nt, Artificial Sequence
  Description of Artificial Sequence: Synthetic oligonucleotide
  Sense strand starting at position 2238 of SEQ ID NO: 1561099
cgagguacccugcgacaga

SEQ ID NO: 1646760 - RNA, 19 nt, Artificial Sequence
  Description of Artificial Sequence: Synthetic oligonucleotide
  Antisense strand to SEQ ID NO: 1646759
ucugucgcaggguaccucg

SEQ ID NO: 1646761 - RNA, 19 nt, Artificial Sequence
  Description of Artificial Sequence: Synthetic oligonucleotide
  Sense strand starting at position 2408 of SEQ ID NO: 1561099
ugccauuuguuacuaguga

SEQ ID NO: 1646762 - RNA, 19 nt, Artificial Sequence
  Description of Artificial Sequence: Synthetic oligonucleotide
  Antisense strand to SEQ ID NO: 1646761
ucacuaguaacaaauggca

SEQ ID NO: 1646763 - RNA, 19 nt, Artificial Sequence
  Description of Artificial Sequence: Synthetic oligonucleotide
  Sense strand starting at position 2423 of SEQ ID NO: 1561099
gugaguccucggguguguu

SEQ ID NO: 1646764 - RNA, 19 nt, Artificial Sequence
  Description of Artificial Sequence: Synthetic oligonucleotide
  Antisense strand to SEQ ID NO: 1646763
aacacacccgaggacucac

SEQ ID NO: 1646765 - RNA, 19 nt, Artificial Sequence
  Description of Artificial Sequence: Synthetic oligonucleotide
  Sense strand starting at position 2431 of SEQ ID NO: 1561099
ucggguguguuacuuaaca

SEQ ID NO: 1646766 - RNA, 19 nt, Artificial Sequence
  Description of Artificial Sequence: Synthetic oligonucleotide
  Antisense strand to SEQ ID NO: 1646765
uguuaaguaacacacccga

SEQ ID NO: 1646767 - RNA, 19 nt, Artificial Sequence
  Description of Artificial Sequence: Synthetic oligonucleotide
  Sense strand starting at position 2433 of SEQ ID NO: 1561099
ggguguguuacuuaacauu

SEQ ID NO: 1646768 - RNA, 19 nt, Artificial Sequence
  Description of Artificial Sequence: Synthetic oligonucleotide
  Antisense strand to SEQ ID NO: 1646767
aauguuaaguaacacaccc

SEQ ID NO: 1646769 - RNA, 19 nt, Artificial Sequence
  Description of Artificial Sequence: Synthetic oligonucleotide
  Sense strand starting at position 2471 of SEQ ID NO: 1561099
ugcuguuaagugggaauaa

SEQ ID NO: 1646770 - RNA, 19 nt, Artificial Sequence
  Description of Artificial Sequence: Synthetic oligonucleotide
  Antisense strand to SEQ ID NO: 1646769
uuauucccacuuaacagca

SEQ ID NO: 1646771 - RNA, 19 nt, Artificial Sequence
  Description of Artificial Sequence: Synthetic oligonucleotide
  Sense strand starting at position 2507 of SEQ ID NO: 1561099
caggauuucugugaaagua

SEQ ID NO: 1646772 - RNA, 19 nt, Artificial Sequence
  Description of Artificial Sequence: Synthetic oligonucleotide
  Antisense strand to SEQ ID NO: 1646771
uacuuucacagaaauccug

SEQ ID NO: 1646773 - RNA, 19 nt, Artificial Sequence
  Description of Artificial Sequence: Synthetic oligonucleotide
  Sense strand starting at position 2783 of SEQ ID NO: 1561099
cuuauucucucuucuguga

SEQ ID NO: 1646774 - RNA, 19 nt, Artificial Sequence
  Description of Artificial Sequence: Synthetic oligonucleotide
  Antisense strand to SEQ ID NO: 1646773
ucacagaagagagaauaag

SEQ ID NO: 1646775 - RNA, 19 nt, Artificial Sequence
  Description of Artificial Sequence: Synthetic oligonucleotide
  Sense strand starting at position 2909 of SEQ ID NO: 1561099
guuacucuaucuguggcaa

SEQ ID NO: 1646776 - RNA, 19 nt, Artificial Sequence
  Description of Artificial Sequence: Synthetic oligonucleotide
  Antisense strand to SEQ ID NO: 1646775
uugccacagauagaguaac

SEQ ID NO: 1646777 - RNA, 19 nt, Artificial Sequence
  Description of Artificial Sequence: Synthetic oligonucleotide
  Sense strand starting at position 2910 of SEQ ID NO: 1561099
uuacucuaucuguggcaaa

SEQ ID NO: 1646778 - RNA, 19 nt, Artificial Sequence
  Description of Artificial Sequence: Synthetic oligonucleotide
  Antisense strand to SEQ ID NO: 1646777
uuugccacagauagaguaa

SEQ ID NO: 1646779 - RNA, 19 nt, Artificial Sequence
  Description of Artificial Sequence: Synthetic oligonucleotide
  Sense strand starting at position 2968 of SEQ ID NO: 1561099
uacacagugccugaaguuu

SEQ ID NO: 1646780 - RNA, 19 nt, Artificial Sequence
  Description of Artificial Sequence: Synthetic oligonucleotide
  Antisense strand to SEQ ID NO: 1646779
aaacuucaggcacugugua

SEQ ID NO: 1646781 - RNA, 19 nt, Artificial Sequence
  Description of Artificial Sequence: Synthetic oligonucleotide
  Sense strand starting at position 3106 of SEQ ID NO: 1561099
cuccuugucucuuugagac

SEQ ID NO: 1646782 - RNA, 19 nt, Artificial Sequence
  Description of Artificial Sequence: Synthetic oligonucleotide
  Antisense strand to SEQ ID NO: 1646781
gucucaaagagacaaggag

SEQ ID NO: 1646783 - RNA, 19 nt, Artificial Sequence
  Description of Artificial Sequence: Synthetic oligonucleotide
  Sense strand starting at position 3475 of SEQ ID NO: 1561099
uuugaaccuucuggaauuu

SEQ ID NO: 1646784 - RNA, 19 nt, Artificial Sequence
  Description of Artificial Sequence: Synthetic oligonucleotide
  Antisense strand to SEQ ID NO: 1646783
aaauuccagaagguucaaa

SEQ ID NO: 1646785 - RNA, 19 nt, Artificial Sequence
  Description of Artificial Sequence: Synthetic oligonucleotide
  Sense strand starting at position 3546 of SEQ ID NO: 1561099
auugaauuacccugguuau

SEQ ID NO: 1646786 - RNA, 19 nt, Artificial Sequence
  Description of Artificial Sequence: Synthetic oligonucleotide
  Antisense strand to SEQ ID NO: 1646785
auaaccaggguaauucaau

SEQ ID NO: 1646787 - RNA, 19 nt, Artificial Sequence
  Description of Artificial Sequence: Synthetic oligonucleotide
  Sense strand starting at position 3547 of SEQ ID NO: 1561099
uugaauuacccugguuauu

SEQ ID NO: 1646788 - RNA, 19 nt, Artificial Sequence
  Description of Artificial Sequence: Synthetic oligonucleotide
  Antisense strand to SEQ ID NO: 1646787
aauaaccaggguaauucaa

SEQ ID NO: 1646789 - RNA, 19 nt, Artificial Sequence
  Description of Artificial Sequence: Synthetic oligonucleotide
  Sense strand starting at position 3708 of SEQ ID NO: 1561099
ggaguuaaaugaguuguac

SEQ ID NO: 1646790 - RNA, 19 nt, Artificial Sequence
  Description of Artificial Sequence: Synthetic oligonucleotide
  Antisense strand to SEQ ID NO: 1646789
guacaacucauuuaacucc

SEQ ID NO: 1646791 - RNA, 19 nt, Artificial Sequence
  Description of Artificial Sequence: Synthetic oligonucleotide
  Sense strand starting at position 3783 of SEQ ID NO: 1561099
cagauagguuauguaauug

SEQ ID NO: 1646792 - RNA, 19 nt, Artificial Sequence
  Description of Artificial Sequence: Synthetic oligonucleotide
  Antisense strand to SEQ ID NO: 1646791
caauuacauaaccuaucug

SEQ ID NO: 1646793 - RNA, 19 nt, Artificial Sequence
  Description of Artificial Sequence: Synthetic oligonucleotide
  Sense strand starting at position 3787 of SEQ ID NO: 1561099
uagguuauguaauugggau

SEQ ID NO: 1646794 - RNA, 19 nt, Artificial Sequence
  Description of Artificial Sequence: Synthetic oligonucleotide
  Antisense strand to SEQ ID NO: 1646793
aucccaauuacauaaccua

SEQ ID NO: 1646795 - RNA, 19 nt, Artificial Sequence
  Description of Artificial Sequence: Synthetic oligonucleotide
  Sense strand starting at position 3788 of SEQ ID NO: 1561099
agguuauguaauugggaug

SEQ ID NO: 1646796 - RNA, 19 nt, Artificial Sequence
  Description of Artificial Sequence: Synthetic oligonucleotide
  Antisense strand to SEQ ID NO: 1646795
caucccaauuacauaaccu

SEQ ID NO: 1646797 - RNA, 19 nt, Artificial Sequence
  Description of Artificial Sequence: Synthetic oligonucleotide
  Sense strand starting at position 3791 of SEQ ID NO: 1561099
uuauguaauugggauggga

SEQ ID NO: 1646798 - RNA, 19 nt, Artificial Sequence
  Description of Artificial Sequence: Synthetic oligonucleotide
  Antisense strand to SEQ ID NO: 1646797
ucccaucccaauuacauaa

SEQ ID NO: 1646799 - RNA, 19 nt, Artificial Sequence
  Description of Artificial Sequence: Synthetic oligonucleotide
  Sense strand starting at position 3826 of SEQ ID NO: 1561099
auguuuagaagaugaguuu

SEQ ID NO: 1646800 - RNA, 19 nt, Artificial Sequence
  Description of Artificial Sequence: Synthetic oligonucleotide
  Antisense strand to SEQ ID NO: 1646799
aaacucaucuucuaaacau

SEQ ID NO: 1646801 - RNA, 19 nt, Artificial Sequence
  Description of Artificial Sequence: Synthetic oligonucleotide
  Sense strand starting at position 3833 of SEQ ID NO: 1561099
gaagaugaguuuccugcca

SEQ ID NO: 1646802 - RNA, 19 nt, Artificial Sequence
  Description of Artificial Sequence: Synthetic oligonucleotide
  Antisense strand to SEQ ID NO: 1646801
uggcaggaaacucaucuuc

SEQ ID NO: 1646803 - RNA, 19 nt, Artificial Sequence
  Description of Artificial Sequence: Synthetic oligonucleotide
  Sense strand starting at position 3893 of SEQ ID NO: 1561099
ugucaagaauuagacauuu

SEQ ID NO: 1646804 - RNA, 19 nt, Artificial Sequence
  Description of Artificial Sequence: Synthetic oligonucleotide
  Antisense strand to SEQ ID NO: 1646803
aaaugucuaauucuugaca

SEQ ID NO: 1646805 - RNA, 19 nt, Artificial Sequence
  Description of Artificial Sequence: Synthetic oligonucleotide
  Sense strand starting at position 124 of SEQ ID NO: 1561100
ggaucugggcucugagagu

SEQ ID NO: 1646806 - RNA, 19 nt, Artificial Sequence
  Description of Artificial Sequence: Synthetic oligonucleotide
  Antisense strand to SEQ ID NO: 1646805
acucucagagcccagaucc

SEQ ID NO: 1646807 - RNA, 19 nt, Artificial Sequence
  Description of Artificial Sequence: Synthetic oligonucleotide
  Sense strand starting at position 167 of SEQ ID NO: 1561100
augggagaccuucggacuu

SEQ ID NO: 1646808 - RNA, 19 nt, Artificial Sequence
  Description of Artificial Sequence: Synthetic oligonucleotide
  Antisense strand to SEQ ID NO: 1646807
aaguccgaaggucucccau

SEQ ID NO: 1646809 - RNA, 19 nt, Artificial Sequence
  Description of Artificial Sequence: Synthetic oligonucleotide
  Sense strand starting at position 180 of SEQ ID NO: 1561100
ggacuuugaggcuggugau

SEQ ID NO: 1646810 - RNA, 19 nt, Artificial Sequence
  Description of Artificial Sequence: Synthetic oligonucleotide
  Antisense strand to SEQ ID NO: 1646809
aucaccagccucaaagucc

SEQ ID NO: 1646811 - RNA, 19 nt, Artificial Sequence
  Description of Artificial Sequence: Synthetic oligonucleotide
  Sense strand starting at position 406 of SEQ ID NO: 1561100
guucgacucagaggaagaa

SEQ ID NO: 1646812 - RNA, 19 nt, Artificial Sequence
  Description of Artificial Sequence: Synthetic oligonucleotide
  Antisense strand to SEQ ID NO: 1646811
uucuuccucugagucgaac

SEQ ID NO: 1646813 - RNA, 19 nt, Artificial Sequence
  Description of Artificial Sequence: Synthetic oligonucleotide
  Sense strand starting at position 570 of SEQ ID NO: 1561100
gaggguaccuuaccagagu

SEQ ID NO: 1646814 - RNA, 19 nt, Artificial Sequence
  Description of Artificial Sequence: Synthetic oligonucleotide
  Antisense strand to SEQ ID NO: 1646813
acucugguaagguacccuc

SEQ ID NO: 1646815 - RNA, 19 nt, Artificial Sequence
  Description of Artificial Sequence: Synthetic oligonucleotide
  Sense strand starting at position 1099 of SEQ ID NO: 1561100
gucuauaaaggaugaguga

SEQ ID NO: 1646816 - RNA, 19 nt, Artificial Sequence
  Description of Artificial Sequence: Synthetic oligonucleotide
  Antisense strand to SEQ ID NO: 1646815
ucacucauccuuuauagac

SEQ ID NO: 1646817 - RNA, 19 nt, Artificial Sequence
  Description of Artificial Sequence: Synthetic oligonucleotide
  Sense strand starting at position 1349 of SEQ ID NO: 1561100
gggagaggcuugugaacua

SEQ ID NO: 1646818 - RNA, 19 nt, Artificial Sequence
  Description of Artificial Sequence: Synthetic oligonucleotide
  Antisense strand to SEQ ID NO: 1646817
uaguucacaagccucuccc

SEQ ID NO: 1646819 - RNA, 19 nt, Artificial Sequence
  Description of Artificial Sequence: Synthetic oligonucleotide
  Sense strand starting at position 2141 of SEQ ID NO: 1561100
agacucuggaccuguguaa

SEQ ID NO: 1646820 - RNA, 19 nt, Artificial Sequence
  Description of Artificial Sequence: Synthetic oligonucleotide
  Antisense strand to SEQ ID NO: 1646819
uuacacagguccagagucu

SEQ ID NO: 1646821 - RNA, 19 nt, Artificial Sequence
  Description of Artificial Sequence: Synthetic oligonucleotide
  Sense strand starting at position 2145 of SEQ ID NO: 1561100
ucuggaccuguguaacaau

SEQ ID NO: 1646822 - RNA, 19 nt, Artificial Sequence
  Description of Artificial Sequence: Synthetic oligonucleotide
  Antisense strand to SEQ ID NO: 1646821
auuguuacacagguccaga

SEQ ID NO: 1646823 - RNA, 19 nt, Artificial Sequence
  Description of Artificial Sequence: Synthetic oligonucleotide
  Sense strand starting at position 2148 of SEQ ID NO: 1561100
ggaccuguguaacaauuaa

SEQ ID NO: 1646824 - RNA, 19 nt, Artificial Sequence
  Description of Artificial Sequence: Synthetic oligonucleotide
  Antisense strand to SEQ ID NO: 1646823
uuaauuguuacacaggucc

SEQ ID NO: 1646825 - RNA, 19 nt, Artificial Sequence
  Description of Artificial Sequence: Synthetic oligonucleotide
  Sense strand starting at position 2226 of SEQ ID NO: 1561100
cuuugugaucccugcugca

SEQ ID NO: 1646826 - RNA, 19 nt, Artificial Sequence
  Description of Artificial Sequence: Synthetic oligonucleotide
  Antisense strand to SEQ ID NO: 1646825
ugcagcagggaucacaaag

SEQ ID NO: 1646827 - RNA, 19 nt, Artificial Sequence
  Description of Artificial Sequence: Synthetic oligonucleotide
  Sense strand starting at position 2328 of SEQ ID NO: 1561100
acuggaauaucuuaagaag

SEQ ID NO: 1646828 - RNA, 19 nt, Artificial Sequence
  Description of Artificial Sequence: Synthetic oligonucleotide
  Antisense strand to SEQ ID NO: 1646827
cuucuuaagauauuccagu

SEQ ID NO: 1646829 - RNA, 19 nt, Artificial Sequence
  Description of Artificial Sequence: Synthetic oligonucleotide
  Sense strand starting at position 2331 of SEQ ID NO: 1561100
ggaauaucuuaagaagggu

SEQ ID NO: 1646830 - RNA, 19 nt, Artificial Sequence
  Description of Artificial Sequence: Synthetic oligonucleotide
  Antisense strand to SEQ ID NO: 1646829
acccuucuuaagauauucc

SEQ ID NO: 1646831 - RNA, 19 nt, Artificial Sequence
  Description of Artificial Sequence: Synthetic oligonucleotide
  Sense strand starting at position 2965 of SEQ ID NO: 1561100
gugcucucagaguacacau

SEQ ID NO: 1646832 - RNA, 19 nt, Artificial Sequence
  Description of Artificial Sequence: Synthetic oligonucleotide
  Antisense strand to SEQ ID NO: 1646831
auguguacucugagagcac

SEQ ID NO: 1646833 - RNA, 19 nt, Artificial Sequence
  Description of Artificial Sequence: Synthetic oligonucleotide
  Sense strand starting at position 3038 of SEQ ID NO: 1561100
ugaaauggugccggucuca

SEQ ID NO: 1646834 - RNA, 19 nt, Artificial Sequence
  Description of Artificial Sequence: Synthetic oligonucleotide
  Antisense strand to SEQ ID NO: 1646833
ugagaccggcaccauuuca

SEQ ID NO: 1646835 - RNA, 19 nt, Artificial Sequence
  Description of Artificial Sequence: Synthetic oligonucleotide
  Sense strand starting at position 3051 of SEQ ID NO: 1561100
gucucauugugcccaggaa

SEQ ID NO: 1646836 - RNA, 19 nt, Artificial Sequence
  Description of Artificial Sequence: Synthetic oligonucleotide
  Antisense strand to SEQ ID NO: 1646835
uuccugggcacaaugagac

SEQ ID NO: 1646837 - RNA, 19 nt, Artificial Sequence
  Description of Artificial Sequence: Synthetic oligonucleotide
  Sense strand starting at position 3052 of SEQ ID NO: 1561100
ucucauugugcccaggaaa

SEQ ID NO: 1646838 - RNA, 19 nt, Artificial Sequence
  Description of Artificial Sequence: Synthetic oligonucleotide
  Antisense strand to SEQ ID NO: 1646837
uuuccugggcacaaugaga

SEQ ID NO: 1646839 - RNA, 19 nt, Artificial Sequence
  Description of Artificial Sequence: Synthetic oligonucleotide
  Sense strand starting at position 3085 of SEQ ID NO: 1561100
gcaggucugaccugggauu

SEQ ID NO: 1646840 - RNA, 19 nt, Artificial Sequence
  Description of Artificial Sequence: Synthetic oligonucleotide
  Antisense strand to SEQ ID NO: 1646839
aaucccaggucagaccugc

SEQ ID NO: 1646841 - RNA, 19 nt, Artificial Sequence
  Description of Artificial Sequence: Synthetic oligonucleotide
  Sense strand starting at position 3315 of SEQ ID NO: 1561100
ggucccucggcugauuaga

SEQ ID NO: 1646842 - RNA, 19 nt, Artificial Sequence
  Description of Artificial Sequence: Synthetic oligonucleotide
  Antisense strand to SEQ ID NO: 1646841
ucuaaucagccgagggacc

SEQ ID NO: 1646843 - RNA, 19 nt, Artificial Sequence
  Description of Artificial Sequence: Synthetic oligonucleotide
  Sense strand starting at position 3317 of SEQ ID NO: 1561100
ucccucggcugauuagaua

SEQ ID NO: 1646844 - RNA, 19 nt, Artificial Sequence
  Description of Artificial Sequence: Synthetic oligonucleotide
  Antisense strand to SEQ ID NO: 1646843
uaucuaaucagccgaggga

SEQ ID NO: 1646845 - RNA, 19 nt, Artificial Sequence
  Description of Artificial Sequence: Synthetic oligonucleotide
  Sense strand starting at position 3419 of SEQ ID NO: 1561100
gcgucaucgcacagguguu

SEQ ID NO: 1646846 - RNA, 19 nt, Artificial Sequence
  Description of Artificial Sequence: Synthetic oligonucleotide
  Antisense strand to SEQ ID NO: 1646845
aacaccugugcgaugacgc

SEQ ID NO: 1646847 - RNA, 19 nt, Artificial Sequence
  Description of Artificial Sequence: Synthetic oligonucleotide
  Sense strand starting at position 3449 of SEQ ID NO: 1561100
ugcugagucgcugucacuu

SEQ ID NO: 1646848 - RNA, 19 nt, Artificial Sequence
  Description of Artificial Sequence: Synthetic oligonucleotide
  Antisense strand to SEQ ID NO: 1646847
aagugacagcgacucagca

SEQ ID NO: 1646849 - RNA, 19 nt, Artificial Sequence
  Description of Artificial Sequence: Synthetic oligonucleotide
  Sense strand starting at position 3551 of SEQ ID NO: 1561100
ggccacaggucugcuugaa

SEQ ID NO: 1646850 - RNA, 19 nt, Artificial Sequence
  Description of Artificial Sequence: Synthetic oligonucleotide
  Antisense strand to SEQ ID NO: 1646849
uucaagcagaccuguggcc

SEQ ID NO: 1646851 - RNA, 19 nt, Artificial Sequence
  Description of Artificial Sequence: Synthetic oligonucleotide
  Sense strand starting at position 3578 of SEQ ID NO: 1561100
gcaggcaucuauuaaacuc

SEQ ID NO: 1646852 - RNA, 19 nt, Artificial Sequence
  Description of Artificial Sequence: Synthetic oligonucleotide
  Antisense strand to SEQ ID NO: 1646851
gaguuuaauagaugccugc

SEQ ID NO: 1646853 - RNA, 19 nt, Artificial Sequence
  Description of Artificial Sequence: Synthetic oligonucleotide
  Sense strand starting at position 3588 of SEQ ID NO: 1561100
auuaaacucugacugugua

SEQ ID NO: 1646854 - RNA, 19 nt, Artificial Sequence
  Description of Artificial Sequence: Synthetic oligonucleotide
  Antisense strand to SEQ ID NO: 1646853
uacacagucagaguuuaau

SEQ ID NO: 1646855 - RNA, 19 nt, Artificial Sequence
  Description of Artificial Sequence: Synthetic oligonucleotide
  Sense strand starting at position 3589 of SEQ ID NO: 1561100
uuaaacucugacuguguau

SEQ ID NO: 1646856 - RNA, 19 nt, Artificial Sequence
  Description of Artificial Sequence: Synthetic oligonucleotide
  Antisense strand to SEQ ID NO: 1646855
auacacagucagaguuuaa

SEQ ID NO: 1646857 - RNA, 19 nt, Artificial Sequence
  Description of Artificial Sequence: Synthetic oligonucleotide
  Sense strand starting at position 3653 of SEQ ID NO: 1561100
cugggagcucucgaucuga

SEQ ID NO: 1646858 - RNA, 19 nt, Artificial Sequence
  Description of Artificial Sequence: Synthetic oligonucleotide
  Antisense strand to SEQ ID NO: 1646857
ucagaucgagagcucccag

SEQ ID NO: 1646859 - RNA, 19 nt, Artificial Sequence
  Description of Artificial Sequence: Synthetic oligonucleotide
  Sense strand starting at position 3664 of SEQ ID NO: 1561100
cgaucugauuaggaaguca

SEQ ID NO: 1646860 - RNA, 19 nt, Artificial Sequence
  Description of Artificial Sequence: Synthetic oligonucleotide
  Antisense strand to SEQ ID NO: 1646859
ugacuuccuaaucagaucg

SEQ ID NO: 1646861 - RNA, 19 nt, Artificial Sequence
  Description of Artificial Sequence: Synthetic oligonucleotide
  Sense strand starting at position 3729 of SEQ ID NO: 1561100
uggagaagauuuggaggua

SEQ ID NO: 1646862 - RNA, 19 nt, Artificial Sequence
  Description of Artificial Sequence: Synthetic oligonucleotide
  Antisense strand to SEQ ID NO: 1646861
uaccuccaaaucuucucca

SEQ ID NO: 1646863 - RNA, 19 nt, Artificial Sequence
  Description of Artificial Sequence: Synthetic oligonucleotide
  Sense strand starting at position 3786 of SEQ ID NO: 1561100
uggagauccugcccuccaa

SEQ ID NO: 1646864 - RNA, 19 nt, Artificial Sequence
  Description of Artificial Sequence: Synthetic oligonucleotide
  Antisense strand to SEQ ID NO: 1646863
uuggagggcaggaucucca

SEQ ID NO: 1646865 - RNA, 19 nt, Artificial Sequence
  Description of Artificial Sequence: Synthetic oligonucleotide
  Sense strand starting at position 3808 of SEQ ID NO: 1561100
cagucaguugucugggcuu

SEQ ID NO: 1646866 - RNA, 19 nt, Artificial Sequence
  Description of Artificial Sequence: Synthetic oligonucleotide
  Antisense strand to SEQ ID NO: 1646865
aagcccagacaacugacug

SEQ ID NO: 1646867 - RNA, 19 nt, Artificial Sequence
  Description of Artificial Sequence: Synthetic oligonucleotide
  Sense strand starting at position 3838 of SEQ ID NO: 1561100
agcacucugugcucugaga

SEQ ID NO: 1646868 - RNA, 19 nt, Artificial Sequence
  Description of Artificial Sequence: Synthetic oligonucleotide
  Antisense strand to SEQ ID NO: 1646867
ucucagagcacagagugcu

SEQ ID NO: 1646869 - RNA, 19 nt, Artificial Sequence
  Description of Artificial Sequence: Synthetic oligonucleotide
  Sense strand starting at position 3919 of SEQ ID NO: 1561100
caguccuaccucggaggau

SEQ ID NO: 1646870 - RNA, 19 nt, Artificial Sequence
  Description of Artificial Sequence: Synthetic oligonucleotide
  Antisense strand to SEQ ID NO: 1646869
auccuccgagguaggacug

SEQ ID NO: 1646871 - RNA, 19 nt, Artificial Sequence
  Description of Artificial Sequence: Synthetic oligonucleotide
  Sense strand starting at position 3920 of SEQ ID NO: 1561100
aguccuaccucggaggauu

SEQ ID NO: 1646872 - RNA, 19 nt, Artificial Sequence
  Description of Artificial Sequence: Synthetic oligonucleotide
  Antisense strand to SEQ ID NO: 1646871
aauccuccgagguaggacu

SEQ ID NO: 1646873 - RNA, 19 nt, Artificial Sequence
  Description of Artificial Sequence: Synthetic oligonucleotide
  Sense strand starting at position 3922 of SEQ ID NO: 1561100
uccuaccucggaggauuaa

SEQ ID NO: 1646874 - RNA, 19 nt, Artificial Sequence
  Description of Artificial Sequence: Synthetic oligonucleotide
  Antisense strand to SEQ ID NO: 1646873
uuaauccuccgagguagga

SEQ ID NO: 1646875 - RNA, 19 nt, Artificial Sequence
  Description of Artificial Sequence: Synthetic oligonucleotide
  Sense strand starting at position 163 of SEQ ID NO: 1561101
gcaugcguuagguacucaa

SEQ ID NO: 1646876 - RNA, 19 nt, Artificial Sequence
  Description of Artificial Sequence: Synthetic oligonucleotide
  Antisense strand to SEQ ID NO: 1646875
uugaguaccuaacgcaugc

SEQ ID NO: 1646877 - RNA, 19 nt, Artificial Sequence
  Description of Artificial Sequence: Synthetic oligonucleotide
  Sense strand starting at position 166 of SEQ ID NO: 1561101
ugcguuagguacucaaaua

SEQ ID NO: 1646878 - RNA, 19 nt, Artificial Sequence
  Description of Artificial Sequence: Synthetic oligonucleotide
  Antisense strand to SEQ ID NO: 1646877
uauuugaguaccuaacgca

SEQ ID NO: 1646879 - RNA, 19 nt, Artificial Sequence
  Description of Artificial Sequence: Synthetic oligonucleotide
  Sense strand starting at position 167 of SEQ ID NO: 1561101
gcguuagguacucaaauau

SEQ ID NO: 1646880 - RNA, 19 nt, Artificial Sequence
  Description of Artificial Sequence: Synthetic oligonucleotide
  Antisense strand to SEQ ID NO: 1646879
auauuugaguaccuaacgc

SEQ ID NO: 1646881 - RNA, 19 nt, Artificial Sequence
  Description of Artificial Sequence: Synthetic oligonucleotide
  Sense strand starting at position 176 of SEQ ID NO: 1561101
acucaaauaucuggugaau

SEQ ID NO: 1646882 - RNA, 19 nt, Artificial Sequence
  Description of Artificial Sequence: Synthetic oligonucleotide
  Antisense strand to SEQ ID NO: 1646881
auucaccagauauuugagu

SEQ ID NO: 1646883 - RNA, 19 nt, Artificial Sequence
  Description of Artificial Sequence: Synthetic oligonucleotide
  Sense strand starting at position 178 of SEQ ID NO: 1561101
ucaaauaucuggugaauga

SEQ ID NO: 1646884 - RNA, 19 nt, Artificial Sequence
  Description of Artificial Sequence: Synthetic oligonucleotide
  Antisense strand to SEQ ID NO: 1646883
ucauucaccagauauuuga

SEQ ID NO: 1646885 - RNA, 19 nt, Artificial Sequence
  Description of Artificial Sequence: Synthetic oligonucleotide
  Sense strand starting at position 210 of SEQ ID NO: 1561101
uggauacaauagucaugua

SEQ ID NO: 1646886 - RNA, 19 nt, Artificial Sequence
  Description of Artificial Sequence: Synthetic oligonucleotide
  Antisense strand to SEQ ID NO: 1646885
uacaugacuauuguaucca

SEQ ID NO: 1646887 - RNA, 19 nt, Artificial Sequence
  Description of Artificial Sequence: Synthetic oligonucleotide
  Sense strand starting at position 213 of SEQ ID NO: 1561101
auacaauagucauguacag

SEQ ID NO: 1646888 - RNA, 19 nt, Artificial Sequence
  Description of Artificial Sequence: Synthetic oligonucleotide
  Antisense strand to SEQ ID NO: 1646887
cuguacaugacuauuguau

SEQ ID NO: 1646889 - RNA, 19 nt, Artificial Sequence
  Description of Artificial Sequence: Synthetic oligonucleotide
  Sense strand starting at position 402 of SEQ ID NO: 1561101
gcaaacagcucuccugaau

SEQ ID NO: 1646890 - RNA, 19 nt, Artificial Sequence
  Description of Artificial Sequence: Synthetic oligonucleotide
  Antisense strand to SEQ ID NO: 1646889
auucaggagagcuguuugc

SEQ ID NO: 1646891 - RNA, 19 nt, Artificial Sequence
  Description of Artificial Sequence: Synthetic oligonucleotide
  Sense strand starting at position 416 of SEQ ID NO: 1561101
ugaaucuugaguugcagaa

SEQ ID NO: 1646892 - RNA, 19 nt, Artificial Sequence
  Description of Artificial Sequence: Synthetic oligonucleotide
  Antisense strand to SEQ ID NO: 1646891
uucugcaacucaagauuca

SEQ ID NO: 1646893 - RNA, 19 nt, Artificial Sequence
  Description of Artificial Sequence: Synthetic oligonucleotide
  Sense strand starting at position 418 of SEQ ID NO: 1561101
aaucuugaguugcagaaug

SEQ ID NO: 1646894 - RNA, 19 nt, Artificial Sequence
  Description of Artificial Sequence: Synthetic oligonucleotide
  Antisense strand to SEQ ID NO: 1646893
cauucugcaacucaagauu

SEQ ID NO: 1646895 - RNA, 19 nt, Artificial Sequence
  Description of Artificial Sequence: Synthetic oligonucleotide
  Sense strand starting at position 420 of SEQ ID NO: 1561101
ucuugaguugcagaauguu

SEQ ID NO: 1646896 - RNA, 19 nt, Artificial Sequence
  Description of Artificial Sequence: Synthetic oligonucleotide
  Antisense strand to SEQ ID NO: 1646895
aacauucugcaacucaaga

SEQ ID NO: 1646897 - RNA, 19 nt, Artificial Sequence
  Description of Artificial Sequence: Synthetic oligonucleotide
  Sense strand starting at position 426 of SEQ ID NO: 1561101
guugcagaauguuccaauu

SEQ ID NO: 1646898 - RNA, 19 nt, Artificial Sequence
  Description of Artificial Sequence: Synthetic oligonucleotide
  Antisense strand to SEQ ID NO: 1646897
aauuggaacauucugcaac

SEQ ID NO: 1646899 - RNA, 19 nt, Artificial Sequence
  Description of Artificial Sequence: Synthetic oligonucleotide
  Sense strand starting at position 497 of SEQ ID NO: 1561101
aucuaauguuggcaucuaa

SEQ ID NO: 1646900 - RNA, 19 nt, Artificial Sequence
  Description of Artificial Sequence: Synthetic oligonucleotide
  Antisense strand to SEQ ID NO: 1646899
uuagaugccaacauuagau

SEQ ID NO: 1646901 - RNA, 19 nt, Artificial Sequence
  Description of Artificial Sequence: Synthetic oligonucleotide
  Sense strand starting at position 640 of SEQ ID NO: 1561101
gggccucuucucugaaguu

SEQ ID NO: 1646902 - RNA, 19 nt, Artificial Sequence
  Description of Artificial Sequence: Synthetic oligonucleotide
  Antisense strand to SEQ ID NO: 1646901
aacuucagagaagaggccc

SEQ ID NO: 1646903 - RNA, 19 nt, Artificial Sequence
  Description of Artificial Sequence: Synthetic oligonucleotide
  Sense strand starting at position 649 of SEQ ID NO: 1561101
cucugaaguuuacagucau

SEQ ID NO: 1646904 - RNA, 19 nt, Artificial Sequence
  Description of Artificial Sequence: Synthetic oligonucleotide
  Antisense strand to SEQ ID NO: 1646903
augacuguaaacuucagag

SEQ ID NO: 1646905 - RNA, 19 nt, Artificial Sequence
  Description of Artificial Sequence: Synthetic oligonucleotide
  Sense strand starting at position 677 of SEQ ID NO: 1561101
gcagacauuagccagauga

SEQ ID NO: 1646906 - RNA, 19 nt, Artificial Sequence
  Description of Artificial Sequence: Synthetic oligonucleotide
  Antisense strand to SEQ ID NO: 1646905
ucaucuggcuaaugucugc

SEQ ID NO: 1646907 - RNA, 19 nt, Artificial Sequence
  Description of Artificial Sequence: Synthetic oligonucleotide
  Sense strand starting at position 687 of SEQ ID NO: 1561101
gccagaugacagcaaacau

SEQ ID NO: 1646908 - RNA, 19 nt, Artificial Sequence
  Description of Artificial Sequence: Synthetic oligonucleotide
  Antisense strand to SEQ ID NO: 1646907
auguuugcugucaucuggc

SEQ ID NO: 1646909 - RNA, 19 nt, Artificial Sequence
  Description of Artificial Sequence: Synthetic oligonucleotide
  Sense strand starting at position 731 of SEQ ID NO: 1561101
ugaugugagugcucacauc

SEQ ID NO: 1646910 - RNA, 19 nt, Artificial Sequence
  Description of Artificial Sequence: Synthetic oligonucleotide
  Antisense strand to SEQ ID NO: 1646909
gaugugagcacucacauca

SEQ ID NO: 1646911 - RNA, 19 nt, Artificial Sequence
  Description of Artificial Sequence: Synthetic oligonucleotide
  Sense strand starting at position 802 of SEQ ID NO: 1561101
agcacauucucagucaucu

SEQ ID NO: 1646912 - RNA, 19 nt, Artificial Sequence
  Description of Artificial Sequence: Synthetic oligonucleotide
  Antisense strand to SEQ ID NO: 1646911
agaugacugagaaugugcu

SEQ ID NO: 1646913 - RNA, 19 nt, Artificial Sequence
  Description of Artificial Sequence: Synthetic oligonucleotide
  Sense strand starting at position 1183 of SEQ ID NO: 1561101
acagaacuguccucugaag

SEQ ID NO: 1646914 - RNA, 19 nt, Artificial Sequence
  Description of Artificial Sequence: Synthetic oligonucleotide
  Antisense strand to SEQ ID NO: 1646913
cuucagaggacaguucugu

SEQ ID NO: 1646915 - RNA, 19 nt, Artificial Sequence
  Description of Artificial Sequence: Synthetic oligonucleotide
  Sense strand starting at position 1185 of SEQ ID NO: 1561101
agaacuguccucugaagug

SEQ ID NO: 1646916 - RNA, 19 nt, Artificial Sequence
  Description of Artificial Sequence: Synthetic oligonucleotide
  Antisense strand to SEQ ID NO: 1646915
cacuucagaggacaguucu

SEQ ID NO: 1646917 - RNA, 19 nt, Artificial Sequence
  Description of Artificial Sequence: Synthetic oligonucleotide
  Sense strand starting at position 1197 of SEQ ID NO: 1561101
ugaaguggaccaugcaauu

SEQ ID NO: 1646918 - RNA, 19 nt, Artificial Sequence
  Description of Artificial Sequence: Synthetic oligonucleotide
  Antisense strand to SEQ ID NO: 1646917
aauugcaugguccacuuca

SEQ ID NO: 1646919 - RNA, 19 nt, Artificial Sequence
  Description of Artificial Sequence: Synthetic oligonucleotide
  Sense strand starting at position 1409 of SEQ ID NO: 1561101
cugugugaccucugacguu

SEQ ID NO: 1646920 - RNA, 19 nt, Artificial Sequence
  Description of Artificial Sequence: Synthetic oligonucleotide
  Antisense strand to SEQ ID NO: 1646919
aacgucagaggucacacag

SEQ ID NO: 1646921 - RNA, 19 nt, Artificial Sequence
  Description of Artificial Sequence: Synthetic oligonucleotide
  Sense strand starting at position 1561 of SEQ ID NO: 1561101
ggcuuaagcucuccaggaa

SEQ ID NO: 1646922 - RNA, 19 nt, Artificial Sequence
  Description of Artificial Sequence: Synthetic oligonucleotide
  Antisense strand to SEQ ID NO: 1646921
uuccuggagagcuuaagcc

SEQ ID NO: 1646923 - RNA, 19 nt, Artificial Sequence
  Description of Artificial Sequence: Synthetic oligonucleotide
  Sense strand starting at position 1562 of SEQ ID NO: 1561101
gcuuaagcucuccaggaag

SEQ ID NO: 1646924 - RNA, 19 nt, Artificial Sequence
  Description of Artificial Sequence: Synthetic oligonucleotide
  Antisense strand to SEQ ID NO: 1646923
cuuccuggagagcuuaagc

SEQ ID NO: 1646925 - RNA, 19 nt, Artificial Sequence
  Description of Artificial Sequence: Synthetic oligonucleotide
  Sense strand starting at position 1605 of SEQ ID NO: 1561101
cggagaguauggguuuaag

SEQ ID NO: 1646926 - RNA, 19 nt, Artificial Sequence
  Description of Artificial Sequence: Synthetic oligonucleotide
  Antisense strand to SEQ ID NO: 1646925
cuuaaacccauacucuccg

SEQ ID NO: 1646927 - RNA, 19 nt, Artificial Sequence
  Description of Artificial Sequence: Synthetic oligonucleotide
  Sense strand starting at position 1718 of SEQ ID NO: 1561101
ugagaagugcgccgagauc

SEQ ID NO: 1646928 - RNA, 19 nt, Artificial Sequence
  Description of Artificial Sequence: Synthetic oligonucleotide
  Antisense strand to SEQ ID NO: 1646927
gaucucggcgcacuucuca

SEQ ID NO: 1646929 - RNA, 19 nt, Artificial Sequence
  Description of Artificial Sequence: Synthetic oligonucleotide
  Sense strand starting at position 1935 of SEQ ID NO: 1561101
gcaggaugucuccgaucau

SEQ ID NO: 1646930 - RNA, 19 nt, Artificial Sequence
  Description of Artificial Sequence: Synthetic oligonucleotide
  Antisense strand to SEQ ID NO: 1646929
augaucggagacauccugc

SEQ ID NO: 1646931 - RNA, 19 nt, Artificial Sequence
  Description of Artificial Sequence: Synthetic oligonucleotide
  Sense strand starting at position 2219 of SEQ ID NO: 1561101
gcaugcgugaggucucgau

SEQ ID NO: 1646932 - RNA, 19 nt, Artificial Sequence
  Description of Artificial Sequence: Synthetic oligonucleotide
  Antisense strand to SEQ ID NO: 1646931
aucgagaccucacgcaugc

SEQ ID NO: 1646933 - RNA, 19 nt, Artificial Sequence
  Description of Artificial Sequence: Synthetic oligonucleotide
  Sense strand starting at position 2225 of SEQ ID NO: 1561101
gugaggucucgaugccgua

SEQ ID NO: 1646934 - RNA, 19 nt, Artificial Sequence
  Description of Artificial Sequence: Synthetic oligonucleotide
  Antisense strand to SEQ ID NO: 1646933
uacggcaucgagaccucac

SEQ ID NO: 1646935 - RNA, 19 nt, Artificial Sequence
  Description of Artificial Sequence: Synthetic oligonucleotide
  Sense strand starting at position 2231 of SEQ ID NO: 1561101
ucucgaugccguaggguua

SEQ ID NO: 1646936 - RNA, 19 nt, Artificial Sequence
  Description of Artificial Sequence: Synthetic oligonucleotide
  Antisense strand to SEQ ID NO: 1646935
uaacccuacggcaucgaga

SEQ ID NO: 1646937 - RNA, 19 nt, Artificial Sequence
  Description of Artificial Sequence: Synthetic oligonucleotide
  Sense strand starting at position 2665 of SEQ ID NO: 1561101
ggacaaaguccuggccgau

SEQ ID NO: 1646938 - RNA, 19 nt, Artificial Sequence
  Description of Artificial Sequence: Synthetic oligonucleotide
  Antisense strand to SEQ ID NO: 1646937
aucggccaggacuuugucc

SEQ ID NO: 1646939 - RNA, 19 nt, Artificial Sequence
  Description of Artificial Sequence: Synthetic oligonucleotide
  Sense strand starting at position 3170 of SEQ ID NO: 1561101
ucaaguaugagccagguga

SEQ ID NO: 1646940 - RNA, 19 nt, Artificial Sequence
  Description of Artificial Sequence: Synthetic oligonucleotide
  Antisense strand to SEQ ID NO: 1646939
ucaccuggcucauacuuga

SEQ ID NO: 1646941 - RNA, 19 nt, Artificial Sequence
  Description of Artificial Sequence: Synthetic oligonucleotide
  Sense strand starting at position 3299 of SEQ ID NO: 1561101
caaggauugcaucguggga

SEQ ID NO: 1646942 - RNA, 19 nt, Artificial Sequence
  Description of Artificial Sequence: Synthetic oligonucleotide
  Antisense strand to SEQ ID NO: 1646941
ucccacgaugcaauccuug

SEQ ID NO: 1646943 - RNA, 19 nt, Artificial Sequence
  Description of Artificial Sequence: Synthetic oligonucleotide
  Sense strand starting at position 3302 of SEQ ID NO: 1561101
ggauugcaucgugggagua

SEQ ID NO: 1646944 - RNA, 19 nt, Artificial Sequence
  Description of Artificial Sequence: Synthetic oligonucleotide
  Antisense strand to SEQ ID NO: 1646943
uacucccacgaugcaaucc

SEQ ID NO: 1646945 - RNA, 19 nt, Artificial Sequence
  Description of Artificial Sequence: Synthetic oligonucleotide
  Sense strand starting at position 3820 of SEQ ID NO: 1561101
gucaguguccuccaucuca

SEQ ID NO: 1646946 - RNA, 19 nt, Artificial Sequence
  Description of Artificial Sequence: Synthetic oligonucleotide
  Antisense strand to SEQ ID NO: 1646945
ugagauggaggacacugac

SEQ ID NO: 1646947 - RNA, 19 nt, Artificial Sequence
  Description of Artificial Sequence: Synthetic oligonucleotide
  Sense strand starting at position 3872 of SEQ ID NO: 1561101
gguacagccugcuucuuaa

SEQ ID NO: 1646948 - RNA, 19 nt, Artificial Sequence
  Description of Artificial Sequence: Synthetic oligonucleotide
  Antisense strand to SEQ ID NO: 1646947
uuaagaagcaggcuguacc

SEQ ID NO: 1646949 - RNA, 19 nt, Artificial Sequence
  Description of Artificial Sequence: Synthetic oligonucleotide
  Sense strand starting at position 3905 of SEQ ID NO: 1561101
augaauggcuuccuuagaa

SEQ ID NO: 1646950 - RNA, 19 nt, Artificial Sequence
  Description of Artificial Sequence: Synthetic oligonucleotide
  Antisense strand to SEQ ID NO: 1646949
uucuaaggaagccauucau

SEQ ID NO: 1646951 - RNA, 19 nt, Artificial Sequence
  Description of Artificial Sequence: Synthetic oligonucleotide
  Sense strand starting at position 3917 of SEQ ID NO: 1561101
cuuagaacguguucuauuu

SEQ ID NO: 1646952 - RNA, 19 nt, Artificial Sequence
  Description of Artificial Sequence: Synthetic oligonucleotide
  Antisense strand to SEQ ID NO: 1646951
aaauagaacacguucuaag

SEQ ID NO: 1646953 - RNA, 19 nt, Artificial Sequence
  Description of Artificial Sequence: Synthetic oligonucleotide
  Sense strand starting at position 3962 of SEQ ID NO: 1561101
guuuaaauguuucuuguuc

SEQ ID NO: 1646954 - RNA, 19 nt, Artificial Sequence
  Description of Artificial Sequence: Synthetic oligonucleotide
  Antisense strand to SEQ ID NO: 1646953
gaacaagaaacauuuaaac

SEQ ID NO: 1646955 - RNA, 19 nt, Artificial Sequence
  Description of Artificial Sequence: Synthetic oligonucleotide
  Sense strand starting at position 310 of SEQ ID NO: 1561102
ugggaagucuucucaccgu

SEQ ID NO: 1646956 - RNA, 19 nt, Artificial Sequence
  Description of Artificial Sequence: Synthetic oligonucleotide
  Antisense strand to SEQ ID NO: 1646955
acggugagaagacuuccca

SEQ ID NO: 1646957 - RNA, 19 nt, Artificial Sequence
  Description of Artificial Sequence: Synthetic oligonucleotide
  Sense strand starting at position 313 of SEQ ID NO: 1561102
gaagucuucucaccgucua

SEQ ID NO: 1646958 - RNA, 19 nt, Artificial Sequence
  Description of Artificial Sequence: Synthetic oligonucleotide
  Antisense strand to SEQ ID NO: 1646957
uagacggugagaagacuuc

SEQ ID NO: 1646959 - RNA, 19 nt, Artificial Sequence
  Description of Artificial Sequence: Synthetic oligonucleotide
  Sense strand starting at position 410 of SEQ ID NO: 1561102
cgagguguccagugacuga

SEQ ID NO: 1646960 - RNA, 19 nt, Artificial Sequence
  Description of Artificial Sequence: Synthetic oligonucleotide
  Antisense strand to SEQ ID NO: 1646959
ucagucacuggacaccucg

SEQ ID NO: 1646961 - RNA, 19 nt, Artificial Sequence
  Description of Artificial Sequence: Synthetic oligonucleotide
  Sense strand starting at position 636 of SEQ ID NO: 1561102
cagggaucagccugcaaug

SEQ ID NO: 1646962 - RNA, 19 nt, Artificial Sequence
  Description of Artificial Sequence: Synthetic oligonucleotide
  Antisense strand to SEQ ID NO: 1646961
cauugcaggcugaucccug

SEQ ID NO: 1646963 - RNA, 19 nt, Artificial Sequence
  Description of Artificial Sequence: Synthetic oligonucleotide
  Sense strand starting at position 909 of SEQ ID NO: 1561102
gaaugaggcuucuaugagc

SEQ ID NO: 1646964 - RNA, 19 nt, Artificial Sequence
  Description of Artificial Sequence: Synthetic oligonucleotide
  Antisense strand to SEQ ID NO: 1646963
gcucauagaagccucauuc

SEQ ID NO: 1646965 - RNA, 19 nt, Artificial Sequence
  Description of Artificial Sequence: Synthetic oligonucleotide
  Sense strand starting at position 1378 of SEQ ID NO: 1561102
cgcccuuaagucuugcuau

SEQ ID NO: 1646966 - RNA, 19 nt, Artificial Sequence
  Description of Artificial Sequence: Synthetic oligonucleotide
  Antisense strand to SEQ ID NO: 1646965
auagcaagacuuaagggcg

SEQ ID NO: 1646967 - RNA, 19 nt, Artificial Sequence
  Description of Artificial Sequence: Synthetic oligonucleotide
  Sense strand starting at position 1379 of SEQ ID NO: 1561102
gcccuuaagucuugcuauu

SEQ ID NO: 1646968 - RNA, 19 nt, Artificial Sequence
  Description of Artificial Sequence: Synthetic oligonucleotide
  Antisense strand to SEQ ID NO: 1646967
aauagcaagacuuaagggc

SEQ ID NO: 1646969 - RNA, 19 nt, Artificial Sequence
  Description of Artificial Sequence: Synthetic oligonucleotide
  Sense strand starting at position 2198 of SEQ ID NO: 1561102
cccucuguugcuggacuaa

SEQ ID NO: 1646970 - RNA, 19 nt, Artificial Sequence
  Description of Artificial Sequence: Synthetic oligonucleotide
  Antisense strand to SEQ ID NO: 1646969
uuaguccagcaacagaggg

SEQ ID NO: 1646971 - RNA, 19 nt, Artificial Sequence
  Description of Artificial Sequence: Synthetic oligonucleotide
  Sense strand starting at position 2209 of SEQ ID NO: 1561102
uggacuaacucaugaagcu

SEQ ID NO: 1646972 - RNA, 19 nt, Artificial Sequence
  Description of Artificial Sequence: Synthetic oligonucleotide
  Antisense strand to SEQ ID NO: 1646971
agcuucaugaguuagucca

SEQ ID NO: 1646973 - RNA, 19 nt, Artificial Sequence
  Description of Artificial Sequence: Synthetic oligonucleotide
  Sense strand starting at position 2234 of SEQ ID NO: 1561102
gugugcuuugcuucucgca

SEQ ID NO: 1646974 - RNA, 19 nt, Artificial Sequence
  Description of Artificial Sequence: Synthetic oligonucleotide
  Antisense strand to SEQ ID NO: 1646973
ugcgagaagcaaagcacac

SEQ ID NO: 1646975 - RNA, 19 nt, Artificial Sequence
  Description of Artificial Sequence: Synthetic oligonucleotide
  Sense strand starting at position 2236 of SEQ ID NO: 1561102
gugcuuugcuucucgcaga

SEQ ID NO: 1646976 - RNA, 19 nt, Artificial Sequence
  Description of Artificial Sequence: Synthetic oligonucleotide
  Antisense strand to SEQ ID NO: 1646975
ucugcgagaagcaaagcac

SEQ ID NO: 1646977 - RNA, 19 nt, Artificial Sequence
  Description of Artificial Sequence: Synthetic oligonucleotide
  Sense strand starting at position 2257 of SEQ ID NO: 1561102
gguggguucuggccgaaag

SEQ ID NO: 1646978 - RNA, 19 nt, Artificial Sequence
  Description of Artificial Sequence: Synthetic oligonucleotide
  Antisense strand to SEQ ID NO: 1646977
cuuucggccagaacccacc

SEQ ID NO: 1646979 - RNA, 19 nt, Artificial Sequence
  Description of Artificial Sequence: Synthetic oligonucleotide
  Sense strand starting at position 2259 of SEQ ID NO: 1561102
uggguucuggccgaaaggu

SEQ ID NO: 1646980 - RNA, 19 nt, Artificial Sequence
  Description of Artificial Sequence: Synthetic oligonucleotide
  Antisense strand to SEQ ID NO: 1646979
accuuucggccagaaccca

SEQ ID NO: 1646981 - RNA, 19 nt, Artificial Sequence
  Description of Artificial Sequence: Synthetic oligonucleotide
  Sense strand starting at position 2272 of SEQ ID NO: 1561102
aaaggucaaguccgaagau

SEQ ID NO: 1646982 - RNA, 19 nt, Artificial Sequence
  Description of Artificial Sequence: Synthetic oligonucleotide
  Antisense strand to SEQ ID NO: 1646981
aucuucggacuugaccuuu

SEQ ID NO: 1646983 - RNA, 19 nt, Artificial Sequence
  Description of Artificial Sequence: Synthetic oligonucleotide
  Sense strand starting at position 2284 of SEQ ID NO: 1561102
cgaagauccagucggucaa

SEQ ID NO: 1646984 - RNA, 19 nt, Artificial Sequence
  Description of Artificial Sequence: Synthetic oligonucleotide
  Antisense strand to SEQ ID NO: 1646983
uugaccgacuggaucuucg

SEQ ID NO: 1646985 - RNA, 19 nt, Artificial Sequence
  Description of Artificial Sequence: Synthetic oligonucleotide
  Sense strand starting at position 2347 of SEQ ID NO: 1561102
gugauuuagccuugccgag

SEQ ID NO: 1646986 - RNA, 19 nt, Artificial Sequence
  Description of Artificial Sequence: Synthetic oligonucleotide
  Antisense strand to SEQ ID NO: 1646985
cucggcaaggcuaaaucac

SEQ ID NO: 1646987 - RNA, 19 nt, Artificial Sequence
  Description of Artificial Sequence: Synthetic oligonucleotide
  Sense strand starting at position 2392 of SEQ ID NO: 1561102
ggcugauagucccacucuu

SEQ ID NO: 1646988 - RNA, 19 nt, Artificial Sequence
  Description of Artificial Sequence: Synthetic oligonucleotide
  Antisense strand to SEQ ID NO: 1646987
aagagugggacuaucagcc

SEQ ID NO: 1646989 - RNA, 19 nt, Artificial Sequence
  Description of Artificial Sequence: Synthetic oligonucleotide
  Sense strand starting at position 2402 of SEQ ID NO: 1561102
cccacucuugucuguguaa

SEQ ID NO: 1646990 - RNA, 19 nt, Artificial Sequence
  Description of Artificial Sequence: Synthetic oligonucleotide
  Antisense strand to SEQ ID NO: 1646989
uuacacagacaagaguggg

SEQ ID NO: 1646991 - RNA, 19 nt, Artificial Sequence
  Description of Artificial Sequence: Synthetic oligonucleotide
  Sense strand starting at position 2403 of SEQ ID NO: 1561102
ccacucuugucuguguaag

SEQ ID NO: 1646992 - RNA, 19 nt, Artificial Sequence
  Description of Artificial Sequence: Synthetic oligonucleotide
  Antisense strand to SEQ ID NO: 1646991
cuuacacagacaagagugg

SEQ ID NO: 1646993 - RNA, 19 nt, Artificial Sequence
  Description of Artificial Sequence: Synthetic oligonucleotide
  Sense strand starting at position 2405 of SEQ ID NO: 1561102
acucuugucuguguaaggu

SEQ ID NO: 1646994 - RNA, 19 nt, Artificial Sequence
  Description of Artificial Sequence: Synthetic oligonucleotide
  Antisense strand to SEQ ID NO: 1646993
accuuacacagacaagagu

SEQ ID NO: 1646995 - RNA, 19 nt, Artificial Sequence
  Description of Artificial Sequence: Synthetic oligonucleotide
  Sense strand starting at position 2461 of SEQ ID NO: 1561102
agacuagacugacaaucua

SEQ ID NO: 1646996 - RNA, 19 nt, Artificial Sequence
  Description of Artificial Sequence: Synthetic oligonucleotide
  Antisense strand to SEQ ID NO: 1646995
uagauugucagucuagucu

SEQ ID NO: 1646997 - RNA, 19 nt, Artificial Sequence
  Description of Artificial Sequence: Synthetic oligonucleotide
  Sense strand starting at position 2578 of SEQ ID NO: 1561102
gaaggccuggcuugagaaa

SEQ ID NO: 1646998 - RNA, 19 nt, Artificial Sequence
  Description of Artificial Sequence: Synthetic oligonucleotide
  Antisense strand to SEQ ID NO: 1646997
uuucucaagccaggccuuc

SEQ ID NO: 1646999 - RNA, 19 nt, Artificial Sequence
  Description of Artificial Sequence: Synthetic oligonucleotide
  Sense strand starting at position 3000 of SEQ ID NO: 1561102
gucgcuuucuguuugagac

SEQ ID NO: 1647000 - RNA, 19 nt, Artificial Sequence
  Description of Artificial Sequence: Synthetic oligonucleotide
  Antisense strand to SEQ ID NO: 1646999
gucucaaacagaaagcgac

SEQ ID NO: 1647001 - RNA, 19 nt, Artificial Sequence
  Description of Artificial Sequence: Synthetic oligonucleotide
  Sense strand starting at position 3001 of SEQ ID NO: 1561102
ucgcuuucuguuugagaca

SEQ ID NO: 1647002 - RNA, 19 nt, Artificial Sequence
  Description of Artificial Sequence: Synthetic oligonucleotide
  Antisense strand to SEQ ID NO: 1647001
ugucucaaacagaaagcga

SEQ ID NO: 1647003 - RNA, 19 nt, Artificial Sequence
  Description of Artificial Sequence: Synthetic oligonucleotide
  Sense strand starting at position 3002 of SEQ ID NO: 1561102
cgcuuucuguuugagacaa

SEQ ID NO: 1647004 - RNA, 19 nt, Artificial Sequence
  Description of Artificial Sequence: Synthetic oligonucleotide
  Antisense strand to SEQ ID NO: 1647003
uugucucaaacagaaagcg

SEQ ID NO: 1647005 - RNA, 19 nt, Artificial Sequence
  Description of Artificial Sequence: Synthetic oligonucleotide
  Sense strand starting at position 3197 of SEQ ID NO: 1561102
cugacugcaccagaacuua

SEQ ID NO: 1647006 - RNA, 19 nt, Artificial Sequence
  Description of Artificial Sequence: Synthetic oligonucleotide
  Antisense strand to SEQ ID NO: 1647005
uaaguucuggugcagucag

SEQ ID NO: 1647007 - RNA, 19 nt, Artificial Sequence
  Description of Artificial Sequence: Synthetic oligonucleotide
  Sense strand starting at position 3521 of SEQ ID NO: 1561102
ugaguucuccucgccuagu

SEQ ID NO: 1647008 - RNA, 19 nt, Artificial Sequence
  Description of Artificial Sequence: Synthetic oligonucleotide
  Antisense strand to SEQ ID NO: 1647007
acuaggcgaggagaacuca

SEQ ID NO: 1647009 - RNA, 19 nt, Artificial Sequence
  Description of Artificial Sequence: Synthetic oligonucleotide
  Sense strand starting at position 3699 of SEQ ID NO: 1561102
uuauaauaguguccgccua

SEQ ID NO: 1647010 - RNA, 19 nt, Artificial Sequence
  Description of Artificial Sequence: Synthetic oligonucleotide
  Antisense strand to SEQ ID NO: 1647009
uaggcggacacuauuauaa

SEQ ID NO: 1647011 - RNA, 19 nt, Artificial Sequence
  Description of Artificial Sequence: Synthetic oligonucleotide
  Sense strand starting at position 3701 of SEQ ID NO: 1561102
auaauaguguccgccuaga

SEQ ID NO: 1647012 - RNA, 19 nt, Artificial Sequence
  Description of Artificial Sequence: Synthetic oligonucleotide
  Antisense strand to SEQ ID NO: 1647011
ucuaggcggacacuauuau

SEQ ID NO: 1647013 - RNA, 19 nt, Artificial Sequence
  Description of Artificial Sequence: Synthetic oligonucleotide
  Sense strand starting at position 3735 of SEQ ID NO: 1561102
guuaguucauaggcguaaa

SEQ ID NO: 1647014 - RNA, 19 nt, Artificial Sequence
  Description of Artificial Sequence: Synthetic oligonucleotide
  Antisense strand to SEQ ID NO: 1647013
uuuacgccuaugaacuaac

SEQ ID NO: 1647015 - RNA, 19 nt, Artificial Sequence
  Description of Artificial Sequence: Synthetic oligonucleotide
  Sense strand starting at position 729 of SEQ ID NO: 1561103
ugccaagucugagagcaga

SEQ ID NO: 1647016 - RNA, 19 nt, Artificial Sequence
  Description of Artificial Sequence: Synthetic oligonucleotide
  Antisense strand to SEQ ID NO: 1647015
ucugcucucagacuuggca

SEQ ID NO: 1647017 - RNA, 19 nt, Artificial Sequence
  Description of Artificial Sequence: Synthetic oligonucleotide
  Sense strand starting at position 749 of SEQ ID NO: 1561103
gcaggacagccuuagguua

SEQ ID NO: 1647018 - RNA, 19 nt, Artificial Sequence
  Description of Artificial Sequence: Synthetic oligonucleotide
  Antisense strand to SEQ ID NO: 1647017
uaaccuaaggcuguccugc

SEQ ID NO: 1647019 - RNA, 19 nt, Artificial Sequence
  Description of Artificial Sequence: Synthetic oligonucleotide
  Sense strand starting at position 792 of SEQ ID NO: 1561103
ccuguuacuccuugacucu

SEQ ID NO: 1647020 - RNA, 19 nt, Artificial Sequence
  Description of Artificial Sequence: Synthetic oligonucleotide
  Antisense strand to SEQ ID NO: 1647019
agagucaaggaguaacagg

SEQ ID NO: 1647021 - RNA, 19 nt, Artificial Sequence
  Description of Artificial Sequence: Synthetic oligonucleotide
  Sense strand starting at position 866 of SEQ ID NO: 1561103
agagaacaguccuguguug

SEQ ID NO: 1647022 - RNA, 19 nt, Artificial Sequence
  Description of Artificial Sequence: Synthetic oligonucleotide
  Antisense strand to SEQ ID NO: 1647021
caacacaggacuguucucu

SEQ ID NO: 1647023 - RNA, 19 nt, Artificial Sequence
  Description of Artificial Sequence: Synthetic oligonucleotide
  Sense strand starting at position 873 of SEQ ID NO: 1561103
aguccuguguugcggagaa

SEQ ID NO: 1647024 - RNA, 19 nt, Artificial Sequence
  Description of Artificial Sequence: Synthetic oligonucleotide
  Antisense strand to SEQ ID NO: 1647023
uucuccgcaacacaggacu

SEQ ID NO: 1647025 - RNA, 19 nt, Artificial Sequence
  Description of Artificial Sequence: Synthetic oligonucleotide
  Sense strand starting at position 918 of SEQ ID NO: 1561103
gugaaaggccgguaaagaa

SEQ ID NO: 1647026 - RNA, 19 nt, Artificial Sequence
  Description of Artificial Sequence: Synthetic oligonucleotide
  Antisense strand to SEQ ID NO: 1647025
uucuuuaccggccuuucac

SEQ ID NO: 1647027 - RNA, 19 nt, Artificial Sequence
  Description of Artificial Sequence: Synthetic oligonucleotide
  Sense strand starting at position 971 of SEQ ID NO: 1561103
agugaagucucagaguccu

SEQ ID NO: 1647028 - RNA, 19 nt, Artificial Sequence
  Description of Artificial Sequence: Synthetic oligonucleotide
  Antisense strand to SEQ ID NO: 1647027
aggacucugagacuucacu

SEQ ID NO: 1647029 - RNA, 19 nt, Artificial Sequence
  Description of Artificial Sequence: Synthetic oligonucleotide
  Sense strand starting at position 977 of SEQ ID NO: 1561103
gucucagaguccucugaca

SEQ ID NO: 1647030 - RNA, 19 nt, Artificial Sequence
  Description of Artificial Sequence: Synthetic oligonucleotide
  Antisense strand to SEQ ID NO: 1647029
ugucagaggacucugagac

SEQ ID NO: 1647031 - RNA, 19 nt, Artificial Sequence
  Description of Artificial Sequence: Synthetic oligonucleotide
  Sense strand starting at position 1008 of SEQ ID NO: 1561103
cggagagguucccugggaa

SEQ ID NO: 1647032 - RNA, 19 nt, Artificial Sequence
  Description of Artificial Sequence: Synthetic oligonucleotide
  Antisense strand to SEQ ID NO: 1647031
uucccagggaaccucuccg

SEQ ID NO: 1647033 - RNA, 19 nt, Artificial Sequence
  Description of Artificial Sequence: Synthetic oligonucleotide
  Sense strand starting at position 1134 of SEQ ID NO: 1561103
aucggaaguuuccaagcaa

SEQ ID NO: 1647034 - RNA, 19 nt, Artificial Sequence
  Description of Artificial Sequence: Synthetic oligonucleotide
  Antisense strand to SEQ ID NO: 1647033
uugcuuggaaacuuccgau

SEQ ID NO: 1647035 - RNA, 19 nt, Artificial Sequence
  Description of Artificial Sequence: Synthetic oligonucleotide
  Sense strand starting at position 1189 of SEQ ID NO: 1561103
agugcuuguggguaacaga

SEQ ID NO: 1647036 - RNA, 19 nt, Artificial Sequence
  Description of Artificial Sequence: Synthetic oligonucleotide
  Antisense strand to SEQ ID NO: 1647035
ucuguuacccacaagcacu

SEQ ID NO: 1647037 - RNA, 19 nt, Artificial Sequence
  Description of Artificial Sequence: Synthetic oligonucleotide
  Sense strand starting at position 1239 of SEQ ID NO: 1561103
ggguaaggguccaggacaa

SEQ ID NO: 1647038 - RNA, 19 nt, Artificial Sequence
  Description of Artificial Sequence: Synthetic oligonucleotide
  Antisense strand to SEQ ID NO: 1647037
uuguccuggacccuuaccc

SEQ ID NO: 1647039 - RNA, 19 nt, Artificial Sequence
  Description of Artificial Sequence: Synthetic oligonucleotide
  Sense strand starting at position 1987 of SEQ ID NO: 1561103
ggaucuuucgcgcaugcgu

SEQ ID NO: 1647040 - RNA, 19 nt, Artificial Sequence
  Description of Artificial Sequence: Synthetic oligonucleotide
  Antisense strand to SEQ ID NO: 1647039
acgcaugcgcgaaagaucc

SEQ ID NO: 1647041 - RNA, 19 nt, Artificial Sequence
  Description of Artificial Sequence: Synthetic oligonucleotide
  Sense strand starting at position 2010 of SEQ ID NO: 1561103
cguagagaacuguaacgua

SEQ ID NO: 1647042 - RNA, 19 nt, Artificial Sequence
  Description of Artificial Sequence: Synthetic oligonucleotide
  Antisense strand to SEQ ID NO: 1647041
uacguuacaguucucuacg

SEQ ID NO: 1647043 - RNA, 19 nt, Artificial Sequence
  Description of Artificial Sequence: Synthetic oligonucleotide
  Sense strand starting at position 2066 of SEQ ID NO: 1561103
gccugauugcguugauguc

SEQ ID NO: 1647044 - RNA, 19 nt, Artificial Sequence
  Description of Artificial Sequence: Synthetic oligonucleotide
  Antisense strand to SEQ ID NO: 1647043
gacaucaacgcaaucaggc

SEQ ID NO: 1647045 - RNA, 19 nt, Artificial Sequence
  Description of Artificial Sequence: Synthetic oligonucleotide
  Sense strand starting at position 2072 of SEQ ID NO: 1561103
uugcguugaugucuaaucu

SEQ ID NO: 1647046 - RNA, 19 nt, Artificial Sequence
  Description of Artificial Sequence: Synthetic oligonucleotide
  Antisense strand to SEQ ID NO: 1647045
agauuagacaucaacgcaa

SEQ ID NO: 1647047 - RNA, 19 nt, Artificial Sequence
  Description of Artificial Sequence: Synthetic oligonucleotide
  Sense strand starting at position 2073 of SEQ ID NO: 1561103
ugcguugaugucuaaucua

SEQ ID NO: 1647048 - RNA, 19 nt, Artificial Sequence
  Description of Artificial Sequence: Synthetic oligonucleotide
  Antisense strand to SEQ ID NO: 1647047
uagauuagacaucaacgca

SEQ ID NO: 1647049 - RNA, 19 nt, Artificial Sequence
  Description of Artificial Sequence: Synthetic oligonucleotide
  Sense strand starting at position 2076 of SEQ ID NO: 1561103
guugaugucuaaucuauuc

SEQ ID NO: 1647050 - RNA, 19 nt, Artificial Sequence
  Description of Artificial Sequence: Synthetic oligonucleotide
  Antisense strand to SEQ ID NO: 1647049
gaauagauuagacaucaac

SEQ ID NO: 1647051 - RNA, 19 nt, Artificial Sequence
  Description of Artificial Sequence: Synthetic oligonucleotide
  Sense strand starting at position 2113 of SEQ ID NO: 1561103
gagcaucucgugugugcua

SEQ ID NO: 1647052 - RNA, 19 nt, Artificial Sequence
  Description of Artificial Sequence: Synthetic oligonucleotide
  Antisense strand to SEQ ID NO: 1647051
uagcacacacgagaugcuc

SEQ ID NO: 1647053 - RNA, 19 nt, Artificial Sequence
  Description of Artificial Sequence: Synthetic oligonucleotide
  Sense strand starting at position 2151 of SEQ ID NO: 1561103
ggguacagcacgugauuaa

SEQ ID NO: 1647054 - RNA, 19 nt, Artificial Sequence
  Description of Artificial Sequence: Synthetic oligonucleotide
  Antisense strand to SEQ ID NO: 1647053
uuaaucacgugcuguaccc

SEQ ID NO: 1647055 - RNA, 19 nt, Artificial Sequence
  Description of Artificial Sequence: Synthetic oligonucleotide
  Sense strand starting at position 2152 of SEQ ID NO: 1561103
gguacagcacgugauuaaa

SEQ ID NO: 1647056 - RNA, 19 nt, Artificial Sequence
  Description of Artificial Sequence: Synthetic oligonucleotide
  Antisense strand to SEQ ID NO: 1647055
uuuaaucacgugcuguacc

SEQ ID NO: 1647057 - RNA, 19 nt, Artificial Sequence
  Description of Artificial Sequence: Synthetic oligonucleotide
  Sense strand starting at position 2193 of SEQ ID NO: 1561103
cuuacauuguacugggaga

SEQ ID NO: 1647058 - RNA, 19 nt, Artificial Sequence
  Description of Artificial Sequence: Synthetic oligonucleotide
  Antisense strand to SEQ ID NO: 1647057
ucucccaguacaauguaag

SEQ ID NO: 1647059 - RNA, 19 nt, Artificial Sequence
  Description of Artificial Sequence: Synthetic oligonucleotide
  Sense strand starting at position 2557 of SEQ ID NO: 1561103
aagauaauuugagauagug

SEQ ID NO: 1647060 - RNA, 19 nt, Artificial Sequence
  Description of Artificial Sequence: Synthetic oligonucleotide
  Antisense strand to SEQ ID NO: 1647059
cacuaucucaaauuaucuu

SEQ ID NO: 1647061 - RNA, 19 nt, Artificial Sequence
  Description of Artificial Sequence: Synthetic oligonucleotide
  Sense strand starting at position 2565 of SEQ ID NO: 1561103
uugagauaguggccagcau

SEQ ID NO: 1647062 - RNA, 19 nt, Artificial Sequence
  Description of Artificial Sequence: Synthetic oligonucleotide
  Antisense strand to SEQ ID NO: 1647061
augcuggccacuaucucaa

SEQ ID NO: 1647063 - RNA, 19 nt, Artificial Sequence
  Description of Artificial Sequence: Synthetic oligonucleotide
  Sense strand starting at position 2566 of SEQ ID NO: 1561103
ugagauaguggccagcaua

SEQ ID NO: 1647064 - RNA, 19 nt, Artificial Sequence
  Description of Artificial Sequence: Synthetic oligonucleotide
  Antisense strand to SEQ ID NO: 1647063
uaugcuggccacuaucuca

SEQ ID NO: 1647065 - RNA, 19 nt, Artificial Sequence
  Description of Artificial Sequence: Synthetic oligonucleotide
  Sense strand starting at position 2744 of SEQ ID NO: 1561103
gugcaaagguccugaacug

SEQ ID NO: 1647066 - RNA, 19 nt, Artificial Sequence
  Description of Artificial Sequence: Synthetic oligonucleotide
  Antisense strand to SEQ ID NO: 1647065
caguucaggaccuuugcac

SEQ ID NO: 1647067 - RNA, 19 nt, Artificial Sequence
  Description of Artificial Sequence: Synthetic oligonucleotide
  Sense strand starting at position 2745 of SEQ ID NO: 1561103
ugcaaagguccugaacuga

SEQ ID NO: 1647068 - RNA, 19 nt, Artificial Sequence
  Description of Artificial Sequence: Synthetic oligonucleotide
  Antisense strand to SEQ ID NO: 1647067
ucaguucaggaccuuugca

SEQ ID NO: 1647069 - RNA, 19 nt, Artificial Sequence
  Description of Artificial Sequence: Synthetic oligonucleotide
  Sense strand starting at position 2773 of SEQ ID NO: 1561103
gcaggaaucucagguuguu

SEQ ID NO: 1647070 - RNA, 19 nt, Artificial Sequence
  Description of Artificial Sequence: Synthetic oligonucleotide
  Antisense strand to SEQ ID NO: 1647069
aacaaccugagauuccugc

SEQ ID NO: 1647071 - RNA, 19 nt, Artificial Sequence
  Description of Artificial Sequence: Synthetic oligonucleotide
  Sense strand starting at position 2783 of SEQ ID NO: 1561103
cagguuguuggccaugaga

SEQ ID NO: 1647072 - RNA, 19 nt, Artificial Sequence
  Description of Artificial Sequence: Synthetic oligonucleotide
  Antisense strand to SEQ ID NO: 1647071
ucucauggccaacaaccug

SEQ ID NO: 1647073 - RNA, 19 nt, Artificial Sequence
  Description of Artificial Sequence: Synthetic oligonucleotide
  Sense strand starting at position 2785 of SEQ ID NO: 1561103
gguuguuggccaugagauc

SEQ ID NO: 1647074 - RNA, 19 nt, Artificial Sequence
  Description of Artificial Sequence: Synthetic oligonucleotide
  Antisense strand to SEQ ID NO: 1647073
gaucucauggccaacaacc

SEQ ID NO: 1647075 - RNA, 19 nt, Artificial Sequence
  Description of Artificial Sequence: Synthetic oligonucleotide
  Sense strand starting at position 2786 of SEQ ID NO: 1561103
guuguuggccaugagauca

SEQ ID NO: 1647076 - RNA, 19 nt, Artificial Sequence
  Description of Artificial Sequence: Synthetic oligonucleotide
  Antisense strand to SEQ ID NO: 1647075
ugaucucauggccaacaac

SEQ ID NO: 1647077 - RNA, 19 nt, Artificial Sequence
  Description of Artificial Sequence: Synthetic oligonucleotide
  Sense strand starting at position 2806 of SEQ ID NO: 1561103
agagcuggcacuuguuauu

SEQ ID NO: 1647078 - RNA, 19 nt, Artificial Sequence
  Description of Artificial Sequence: Synthetic oligonucleotide
  Antisense strand to SEQ ID NO: 1647077
aauaacaagugccagcucu

SEQ ID NO: 1647079 - RNA, 19 nt, Artificial Sequence
  Description of Artificial Sequence: Synthetic oligonucleotide
  Sense strand starting at position 2826 of SEQ ID NO: 1561103
agagcccuguucuuaagua

SEQ ID NO: 1647080 - RNA, 19 nt, Artificial Sequence
  Description of Artificial Sequence: Synthetic oligonucleotide
  Antisense strand to SEQ ID NO: 1647079
uacuuaagaacagggcucu

SEQ ID NO: 1647081 - RNA, 19 nt, Artificial Sequence
  Description of Artificial Sequence: Synthetic oligonucleotide
  Sense strand starting at position 2827 of SEQ ID NO: 1561103
gagcccuguucuuaaguau

SEQ ID NO: 1647082 - RNA, 19 nt, Artificial Sequence
  Description of Artificial Sequence: Synthetic oligonucleotide
  Antisense strand to SEQ ID NO: 1647081
auacuuaagaacagggcuc

SEQ ID NO: 1647083 - RNA, 19 nt, Artificial Sequence
  Description of Artificial Sequence: Synthetic oligonucleotide
  Sense strand starting at position 2830 of SEQ ID NO: 1561103
cccuguucuuaaguauugu

SEQ ID NO: 1647084 - RNA, 19 nt, Artificial Sequence
  Description of Artificial Sequence: Synthetic oligonucleotide
  Antisense strand to SEQ ID NO: 1647083
acaauacuuaagaacaggg

SEQ ID NO: 1647085 - RNA, 19 nt, Artificial Sequence
  Description of Artificial Sequence: Synthetic oligonucleotide
  Sense strand starting at position 2834 of SEQ ID NO: 1561103
guucuuaaguauuguaucu

SEQ ID NO: 1647086 - RNA, 19 nt, Artificial Sequence
  Description of Artificial Sequence: Synthetic oligonucleotide
  Antisense strand to SEQ ID NO: 1647085
agauacaauacuuaagaac

SEQ ID NO: 1647087 - RNA, 19 nt, Artificial Sequence
  Description of Artificial Sequence: Synthetic oligonucleotide
  Sense strand starting at position 3244 of SEQ ID NO: 1561103
gaucguuugagccgagaaa

SEQ ID NO: 1647088 - RNA, 19 nt, Artificial Sequence
  Description of Artificial Sequence: Synthetic oligonucleotide
  Antisense strand to SEQ ID NO: 1647087
uuucucggcucaaacgauc

SEQ ID NO: 1647089 - RNA, 19 nt, Artificial Sequence
  Description of Artificial Sequence: Synthetic oligonucleotide
  Sense strand starting at position 3245 of SEQ ID NO: 1561103
aucguuugagccgagaaag

SEQ ID NO: 1647090 - RNA, 19 nt, Artificial Sequence
  Description of Artificial Sequence: Synthetic oligonucleotide
  Antisense strand to SEQ ID NO: 1647089
cuuucucggcucaaacgau

SEQ ID NO: 1647091 - RNA, 19 nt, Artificial Sequence
  Description of Artificial Sequence: Synthetic oligonucleotide
  Sense strand starting at position 3246 of SEQ ID NO: 1561103
ucguuugagccgagaaagu

SEQ ID NO: 1647092 - RNA, 19 nt, Artificial Sequence
  Description of Artificial Sequence: Synthetic oligonucleotide
  Antisense strand to SEQ ID NO: 1647091
acuuucucggcucaaacga

SEQ ID NO: 1647093 - RNA, 19 nt, Artificial Sequence
  Description of Artificial Sequence: Synthetic oligonucleotide
  Sense strand starting at position 37 of SEQ ID NO: 1561104
uaauuuacuugagaaugug

SEQ ID NO: 1647094 - RNA, 19 nt, Artificial Sequence
  Description of Artificial Sequence: Synthetic oligonucleotide
  Antisense strand to SEQ ID NO: 1647093
cacauucucaaguaaauua

SEQ ID NO: 1647095 - RNA, 19 nt, Artificial Sequence
  Description of Artificial Sequence: Synthetic oligonucleotide
  Sense strand starting at position 40 of SEQ ID NO: 1561104
uuuacuugagaaugugaga

SEQ ID NO: 1647096 - RNA, 19 nt, Artificial Sequence
  Description of Artificial Sequence: Synthetic oligonucleotide
  Antisense strand to SEQ ID NO: 1647095
ucucacauucucaaguaaa

SEQ ID NO: 1647097 - RNA, 19 nt, Artificial Sequence
  Description of Artificial Sequence: Synthetic oligonucleotide
  Sense strand starting at position 53 of SEQ ID NO: 1561104
gugagagagucuuuccgau

SEQ ID NO: 1647098 - RNA, 19 nt, Artificial Sequence
  Description of Artificial Sequence: Synthetic oligonucleotide
  Antisense strand to SEQ ID NO: 1647097
aucggaaagacucucucac

SEQ ID NO: 1647099 - RNA, 19 nt, Artificial Sequence
  Description of Artificial Sequence: Synthetic oligonucleotide
  Sense strand starting at position 106 of SEQ ID NO: 1561104
ucagauagguucuugcuca

SEQ ID NO: 1647100 - RNA, 19 nt, Artificial Sequence
  Description of Artificial Sequence: Synthetic oligonucleotide
  Antisense strand to SEQ ID NO: 1647099
ugagcaagaaccuaucuga

SEQ ID NO: 1647101 - RNA, 19 nt, Artificial Sequence
  Description of Artificial Sequence: Synthetic oligonucleotide
  Sense strand starting at position 400 of SEQ ID NO: 1561104
uuggguuccuaagcagaau

SEQ ID NO: 1647102 - RNA, 19 nt, Artificial Sequence
  Description of Artificial Sequence: Synthetic oligonucleotide
  Antisense strand to SEQ ID NO: 1647101
auucugcuuaggaacccaa

SEQ ID NO: 1647103 - RNA, 19 nt, Artificial Sequence
  Description of Artificial Sequence: Synthetic oligonucleotide
  Sense strand starting at position 401 of SEQ ID NO: 1561104
uggguuccuaagcagaauu

SEQ ID NO: 1647104 - RNA, 19 nt, Artificial Sequence
  Description of Artificial Sequence: Synthetic oligonucleotide
  Antisense strand to SEQ ID NO: 1647103
aauucugcuuaggaaccca

SEQ ID NO: 1647105 - RNA, 19 nt, Artificial Sequence
  Description of Artificial Sequence: Synthetic oligonucleotide
  Sense strand starting at position 411 of SEQ ID NO: 1561104
agcagaauucuauacgggu

SEQ ID NO: 1647106 - RNA, 19 nt, Artificial Sequence
  Description of Artificial Sequence: Synthetic oligonucleotide
  Antisense strand to SEQ ID NO: 1647105
acccguauagaauucugcu

SEQ ID NO: 1647107 - RNA, 19 nt, Artificial Sequence
  Description of Artificial Sequence: Synthetic oligonucleotide
  Sense strand starting at position 804 of SEQ ID NO: 1561104
ccaguuucuuaguugacga

SEQ ID NO: 1647108 - RNA, 19 nt, Artificial Sequence
  Description of Artificial Sequence: Synthetic oligonucleotide
  Antisense strand to SEQ ID NO: 1647107
ucgucaacuaagaaacugg

SEQ ID NO: 1647109 - RNA, 19 nt, Artificial Sequence
  Description of Artificial Sequence: Synthetic oligonucleotide
  Sense strand starting at position 806 of SEQ ID NO: 1561104
aguuucuuaguugacgaau

SEQ ID NO: 1647110 - RNA, 19 nt, Artificial Sequence
  Description of Artificial Sequence: Synthetic oligonucleotide
  Antisense strand to SEQ ID NO: 1647109
auucgucaacuaagaaacu

SEQ ID NO: 1647111 - RNA, 19 nt, Artificial Sequence
  Description of Artificial Sequence: Synthetic oligonucleotide
  Sense strand starting at position 812 of SEQ ID NO: 1561104
uuaguugacgaaugggaau

SEQ ID NO: 1647112 - RNA, 19 nt, Artificial Sequence
  Description of Artificial Sequence: Synthetic oligonucleotide
  Antisense strand to SEQ ID NO: 1647111
auucccauucgucaacuaa

SEQ ID NO: 1647113 - RNA, 19 nt, Artificial Sequence
  Description of Artificial Sequence: Synthetic oligonucleotide
  Sense strand starting at position 1154 of SEQ ID NO: 1561104
ccucaaaccuuguaagaug

SEQ ID NO: 1647114 - RNA, 19 nt, Artificial Sequence
  Description of Artificial Sequence: Synthetic oligonucleotide
  Antisense strand to SEQ ID NO: 1647113
caucuuacaagguuugagg

SEQ ID NO: 1647115 - RNA, 19 nt, Artificial Sequence
  Description of Artificial Sequence: Synthetic oligonucleotide
  Sense strand starting at position 1234 of SEQ ID NO: 1561104
gaaguaguuuguguaaagg

SEQ ID NO: 1647116 - RNA, 19 nt, Artificial Sequence
  Description of Artificial Sequence: Synthetic oligonucleotide
  Antisense strand to SEQ ID NO: 1647115
ccuuuacacaaacuacuuc

SEQ ID NO: 1647117 - RNA, 19 nt, Artificial Sequence
  Description of Artificial Sequence: Synthetic oligonucleotide
  Sense strand starting at position 1245 of SEQ ID NO: 1561104
uguaaaggccaaggaguua

SEQ ID NO: 1647118 - RNA, 19 nt, Artificial Sequence
  Description of Artificial Sequence: Synthetic oligonucleotide
  Antisense strand to SEQ ID NO: 1647117
uaacuccuuggccuuuaca

SEQ ID NO: 1647119 - RNA, 19 nt, Artificial Sequence
  Description of Artificial Sequence: Synthetic oligonucleotide
  Sense strand starting at position 1256 of SEQ ID NO: 1561104
aggaguuaacucgaaguuu

SEQ ID NO: 1647120 - RNA, 19 nt, Artificial Sequence
  Description of Artificial Sequence: Synthetic oligonucleotide
  Antisense strand to SEQ ID NO: 1647119
aaacuucgaguuaacuccu

SEQ ID NO: 1647121 - RNA, 19 nt, Artificial Sequence
  Description of Artificial Sequence: Synthetic oligonucleotide
  Sense strand starting at position 1267 of SEQ ID NO: 1561104
cgaaguuuggcuggacaaa

SEQ ID NO: 1647122 - RNA, 19 nt, Artificial Sequence
  Description of Artificial Sequence: Synthetic oligonucleotide
  Antisense strand to SEQ ID NO: 1647121
uuuguccagccaaacuucg

SEQ ID NO: 1647123 - RNA, 19 nt, Artificial Sequence
  Description of Artificial Sequence: Synthetic oligonucleotide
  Sense strand starting at position 1352 of SEQ ID NO: 1561104
ccggacuaucccgagaacu

SEQ ID NO: 1647124 - RNA, 19 nt, Artificial Sequence
  Description of Artificial Sequence: Synthetic oligonucleotide
  Antisense strand to SEQ ID NO: 1647123
aguucucgggauaguccgg

SEQ ID NO: 1647125 - RNA, 19 nt, Artificial Sequence
  Description of Artificial Sequence: Synthetic oligonucleotide
  Sense strand starting at position 1362 of SEQ ID NO: 1561104
ccgagaacucaccauccuu

SEQ ID NO: 1647126 - RNA, 19 nt, Artificial Sequence
  Description of Artificial Sequence: Synthetic oligonucleotide
  Antisense strand to SEQ ID NO: 1647125
aaggauggugaguucucgg

SEQ ID NO: 1647127 - RNA, 19 nt, Artificial Sequence
  Description of Artificial Sequence: Synthetic oligonucleotide
  Sense strand starting at position 2037 of SEQ ID NO: 1561104
gcaguagcuugaccaauca

SEQ ID NO: 1647128 - RNA, 19 nt, Artificial Sequence
  Description of Artificial Sequence: Synthetic oligonucleotide
  Antisense strand to SEQ ID NO: 1647127
ugauuggucaagcuacugc

SEQ ID NO: 1647129 - RNA, 19 nt, Artificial Sequence
  Description of Artificial Sequence: Synthetic oligonucleotide
  Sense strand starting at position 2223 of SEQ ID NO: 1561104
cggugucuuccggaggcaa

SEQ ID NO: 1647130 - RNA, 19 nt, Artificial Sequence
  Description of Artificial Sequence: Synthetic oligonucleotide
  Antisense strand to SEQ ID NO: 1647129
uugccuccggaagacaccg

SEQ ID NO: 1647131 - RNA, 19 nt, Artificial Sequence
  Description of Artificial Sequence: Synthetic oligonucleotide
  Sense strand starting at position 2224 of SEQ ID NO: 1561104
ggugucuuccggaggcaau

SEQ ID NO: 1647132 - RNA, 19 nt, Artificial Sequence
  Description of Artificial Sequence: Synthetic oligonucleotide
  Antisense strand to SEQ ID NO: 1647131
auugccuccggaagacacc

SEQ ID NO: 1647133 - RNA, 19 nt, Artificial Sequence
  Description of Artificial Sequence: Synthetic oligonucleotide
  Sense strand starting at position 2225 of SEQ ID NO: 1561104
gugucuuccggaggcaauc

SEQ ID NO: 1647134 - RNA, 19 nt, Artificial Sequence
  Description of Artificial Sequence: Synthetic oligonucleotide
  Antisense strand to SEQ ID NO: 1647133
gauugccuccggaagacac

SEQ ID NO: 1647135 - RNA, 19 nt, Artificial Sequence
  Description of Artificial Sequence: Synthetic oligonucleotide
  Sense strand starting at position 2286 of SEQ ID NO: 1561104
ucugucacgugaucgcaaa

SEQ ID NO: 1647136 - RNA, 19 nt, Artificial Sequence
  Description of Artificial Sequence: Synthetic oligonucleotide
  Antisense strand to SEQ ID NO: 1647135
uuugcgaucacgugacaga

SEQ ID NO: 1647137 - RNA, 19 nt, Artificial Sequence
  Description of Artificial Sequence: Synthetic oligonucleotide
  Sense strand starting at position 2309 of SEQ ID NO: 1561104
gcgggaacuguugcgugua

SEQ ID NO: 1647138 - RNA, 19 nt, Artificial Sequence
  Description of Artificial Sequence: Synthetic oligonucleotide
  Antisense strand to SEQ ID NO: 1647137
uacacgcaacaguucccgc

SEQ ID NO: 1647139 - RNA, 19 nt, Artificial Sequence
  Description of Artificial Sequence: Synthetic oligonucleotide
  Sense strand starting at position 2311 of SEQ ID NO: 1561104
gggaacuguugcguguaau

SEQ ID NO: 1647140 - RNA, 19 nt, Artificial Sequence
  Description of Artificial Sequence: Synthetic oligonucleotide
  Antisense strand to SEQ ID NO: 1647139
auuacacgcaacaguuccc

SEQ ID NO: 1647141 - RNA, 19 nt, Artificial Sequence
  Description of Artificial Sequence: Synthetic oligonucleotide
  Sense strand starting at position 2312 of SEQ ID NO: 1561104
ggaacuguugcguguaaua

SEQ ID NO: 1647142 - RNA, 19 nt, Artificial Sequence
  Description of Artificial Sequence: Synthetic oligonucleotide
  Antisense strand to SEQ ID NO: 1647141
uauuacacgcaacaguucc

SEQ ID NO: 1647143 - RNA, 19 nt, Artificial Sequence
  Description of Artificial Sequence: Synthetic oligonucleotide
  Sense strand starting at position 2322 of SEQ ID NO: 1561104
cguguaauaccacgugaua

SEQ ID NO: 1647144 - RNA, 19 nt, Artificial Sequence
  Description of Artificial Sequence: Synthetic oligonucleotide
  Antisense strand to SEQ ID NO: 1647143
uaucacgugguauuacacg

SEQ ID NO: 1647145 - RNA, 19 nt, Artificial Sequence
  Description of Artificial Sequence: Synthetic oligonucleotide
  Sense strand starting at position 2324 of SEQ ID NO: 1561104
uguaauaccacgugauaug

SEQ ID NO: 1647146 - RNA, 19 nt, Artificial Sequence
  Description of Artificial Sequence: Synthetic oligonucleotide
  Antisense strand to SEQ ID NO: 1647145
cauaucacgugguauuaca

SEQ ID NO: 1647147 - RNA, 19 nt, Artificial Sequence
  Description of Artificial Sequence: Synthetic oligonucleotide
  Sense strand starting at position 2563 of SEQ ID NO: 1561104
acucaaaggucagcucaaa

SEQ ID NO: 1647148 - RNA, 19 nt, Artificial Sequence
  Description of Artificial Sequence: Synthetic oligonucleotide
  Antisense strand to SEQ ID NO: 1647147
uuugagcugaccuuugagu

SEQ ID NO: 1647149 - RNA, 19 nt, Artificial Sequence
  Description of Artificial Sequence: Synthetic oligonucleotide
  Sense strand starting at position 2620 of SEQ ID NO: 1561104
accuaaguucuccgaaucu

SEQ ID NO: 1647150 - RNA, 19 nt, Artificial Sequence
  Description of Artificial Sequence: Synthetic oligonucleotide
  Antisense strand to SEQ ID NO: 1647149
agauucggagaacuuaggu

SEQ ID NO: 1647151 - RNA, 19 nt, Artificial Sequence
  Description of Artificial Sequence: Synthetic oligonucleotide
  Sense strand starting at position 2710 of SEQ ID NO: 1561104
acucaugaguuuccacauc

SEQ ID NO: 1647152 - RNA, 19 nt, Artificial Sequence
  Description of Artificial Sequence: Synthetic oligonucleotide
  Antisense strand to SEQ ID NO: 1647151
gauguggaaacucaugagu

SEQ ID NO: 1647153 - RNA, 19 nt, Artificial Sequence
  Description of Artificial Sequence: Synthetic oligonucleotide
  Sense strand starting at position 2847 of SEQ ID NO: 1561104
gccuuaugacuugagucag

SEQ ID NO: 1647154 - RNA, 19 nt, Artificial Sequence
  Description of Artificial Sequence: Synthetic oligonucleotide
  Antisense strand to SEQ ID NO: 1647153
cugacucaagucauaaggc

SEQ ID NO: 1647155 - RNA, 19 nt, Artificial Sequence
  Description of Artificial Sequence: Synthetic oligonucleotide
  Sense strand starting at position 2857 of SEQ ID NO: 1561104
uugagucagccucgcaauu

SEQ ID NO: 1647156 - RNA, 19 nt, Artificial Sequence
  Description of Artificial Sequence: Synthetic oligonucleotide
  Antisense strand to SEQ ID NO: 1647155
aauugcgaggcugacucaa

SEQ ID NO: 1647157 - RNA, 19 nt, Artificial Sequence
  Description of Artificial Sequence: Synthetic oligonucleotide
  Sense strand starting at position 3263 of SEQ ID NO: 1561104
augucuucggccuggagaa

SEQ ID NO: 1647158 - RNA, 19 nt, Artificial Sequence
  Description of Artificial Sequence: Synthetic oligonucleotide
  Antisense strand to SEQ ID NO: 1647157
uucuccaggccgaagacau

SEQ ID NO: 1647159 - RNA, 19 nt, Artificial Sequence
  Description of Artificial Sequence: Synthetic oligonucleotide
  Sense strand starting at position 3294 of SEQ ID NO: 1561104
gaaggaggccuuugauaag

SEQ ID NO: 1647160 - RNA, 19 nt, Artificial Sequence
  Description of Artificial Sequence: Synthetic oligonucleotide
  Antisense strand to SEQ ID NO: 1647159
cuuaucaaaggccuccuuc

SEQ ID NO: 1647161 - RNA, 19 nt, Artificial Sequence
  Description of Artificial Sequence: Synthetic oligonucleotide
  Sense strand starting at position 3450 of SEQ ID NO: 1561104
guucccguguccucaagau

SEQ ID NO: 1647162 - RNA, 19 nt, Artificial Sequence
  Description of Artificial Sequence: Synthetic oligonucleotide
  Antisense strand to SEQ ID NO: 1647161
aucuugaggacacgggaac

SEQ ID NO: 1647163 - RNA, 19 nt, Artificial Sequence
  Description of Artificial Sequence: Synthetic oligonucleotide
  Sense strand starting at position 3454 of SEQ ID NO: 1561104
ccguguccucaagaucaaa

SEQ ID NO: 1647164 - RNA, 19 nt, Artificial Sequence
  Description of Artificial Sequence: Synthetic oligonucleotide
  Antisense strand to SEQ ID NO: 1647163
uuugaucuugaggacacgg

SEQ ID NO: 1647165 - RNA, 19 nt, Artificial Sequence
  Description of Artificial Sequence: Synthetic oligonucleotide
  Sense strand starting at position 3517 of SEQ ID NO: 1561104
gugugccuccagcaaugaa

SEQ ID NO: 1647166 - RNA, 19 nt, Artificial Sequence
  Description of Artificial Sequence: Synthetic oligonucleotide
  Antisense strand to SEQ ID NO: 1647165
uucauugcuggaggcacac

SEQ ID NO: 1647167 - RNA, 19 nt, Artificial Sequence
  Description of Artificial Sequence: Synthetic oligonucleotide
  Sense strand starting at position 3533 of SEQ ID NO: 1561104
gaagaaagcuguccucaca

SEQ ID NO: 1647168 - RNA, 19 nt, Artificial Sequence
  Description of Artificial Sequence: Synthetic oligonucleotide
  Antisense strand to SEQ ID NO: 1647167
ugugaggacagcuuucuuc

SEQ ID NO: 1647169 - RNA, 19 nt, Artificial Sequence
  Description of Artificial Sequence: Synthetic oligonucleotide
  Sense strand starting at position 3536 of SEQ ID NO: 1561104
gaaagcuguccucacaagu

SEQ ID NO: 1647170 - RNA, 19 nt, Artificial Sequence
  Description of Artificial Sequence: Synthetic oligonucleotide
  Antisense strand to SEQ ID NO: 1647169
acuugugaggacagcuuuc

SEQ ID NO: 1647171 - RNA, 19 nt, Artificial Sequence
  Description of Artificial Sequence: Synthetic oligonucleotide
  Sense strand starting at position 3570 of SEQ ID NO: 1561104
ggugcuuuggcucaugcau

SEQ ID NO: 1647172 - RNA, 19 nt, Artificial Sequence
  Description of Artificial Sequence: Synthetic oligonucleotide
  Antisense strand to SEQ ID NO: 1647171
augcaugagccaaagcacc

SEQ ID NO: 1647173 - RNA, 19 nt, Artificial Sequence
  Description of Artificial Sequence: Synthetic oligonucleotide
  Sense strand starting at position 242 of SEQ ID NO: 1561105
ggagacagagcucgugcua

SEQ ID NO: 1647174 - RNA, 19 nt, Artificial Sequence
  Description of Artificial Sequence: Synthetic oligonucleotide
  Antisense strand to SEQ ID NO: 1647173
uagcacgagcucugucucc

SEQ ID NO: 1647175 - RNA, 19 nt, Artificial Sequence
  Description of Artificial Sequence: Synthetic oligonucleotide
  Sense strand starting at position 339 of SEQ ID NO: 1561105
caucucaguguagaaagua

SEQ ID NO: 1647176 - RNA, 19 nt, Artificial Sequence
  Description of Artificial Sequence: Synthetic oligonucleotide
  Antisense strand to SEQ ID NO: 1647175
uacuuucuacacugagaug

SEQ ID NO: 1647177 - RNA, 19 nt, Artificial Sequence
  Description of Artificial Sequence: Synthetic oligonucleotide
  Sense strand starting at position 717 of SEQ ID NO: 1561105
ugauguauccuauguagcu

SEQ ID NO: 1647178 - RNA, 19 nt, Artificial Sequence
  Description of Artificial Sequence: Synthetic oligonucleotide
  Antisense strand to SEQ ID NO: 1647177
agcuacauaggauacauca

SEQ ID NO: 1647179 - RNA, 19 nt, Artificial Sequence
  Description of Artificial Sequence: Synthetic oligonucleotide
  Sense strand starting at position 718 of SEQ ID NO: 1561105
gauguauccuauguagcuu

SEQ ID NO: 1647180 - RNA, 19 nt, Artificial Sequence
  Description of Artificial Sequence: Synthetic oligonucleotide
  Antisense strand to SEQ ID NO: 1647179
aagcuacauaggauacauc

SEQ ID NO: 1647181 - RNA, 19 nt, Artificial Sequence
  Description of Artificial Sequence: Synthetic oligonucleotide
  Sense strand starting at position 731 of SEQ ID NO: 1561105
uagcuuaagcagugucuga

SEQ ID NO: 1647182 - RNA, 19 nt, Artificial Sequence
  Description of Artificial Sequence: Synthetic oligonucleotide
  Antisense strand to SEQ ID NO: 1647181
ucagacacugcuuaagcua

SEQ ID NO: 1647183 - RNA, 19 nt, Artificial Sequence
  Description of Artificial Sequence: Synthetic oligonucleotide
  Sense strand starting at position 735 of SEQ ID NO: 1561105
uuaagcagugucugauaca

SEQ ID NO: 1647184 - RNA, 19 nt, Artificial Sequence
  Description of Artificial Sequence: Synthetic oligonucleotide
  Antisense strand to SEQ ID NO: 1647183
uguaucagacacugcuuaa

SEQ ID NO: 1647185 - RNA, 19 nt, Artificial Sequence
  Description of Artificial Sequence: Synthetic oligonucleotide
  Sense strand starting at position 800 of SEQ ID NO: 1561105
augucaaugacucguucgu

SEQ ID NO: 1647186 - RNA, 19 nt, Artificial Sequence
  Description of Artificial Sequence: Synthetic oligonucleotide
  Antisense strand to SEQ ID NO: 1647185
acgaacgagucauugacau

SEQ ID NO: 1647187 - RNA, 19 nt, Artificial Sequence
  Description of Artificial Sequence: Synthetic oligonucleotide
  Sense strand starting at position 801 of SEQ ID NO: 1561105
ugucaaugacucguucguu

SEQ ID NO: 1647188 - RNA, 19 nt, Artificial Sequence
  Description of Artificial Sequence: Synthetic oligonucleotide
  Antisense strand to SEQ ID NO: 1647187
aacgaacgagucauugaca

SEQ ID NO: 1647189 - RNA, 19 nt, Artificial Sequence
  Description of Artificial Sequence: Synthetic oligonucleotide
  Sense strand starting at position 802 of SEQ ID NO: 1561105
gucaaugacucguucguua

SEQ ID NO: 1647190 - RNA, 19 nt, Artificial Sequence
  Description of Artificial Sequence: Synthetic oligonucleotide
  Antisense strand to SEQ ID NO: 1647189
uaacgaacgagucauugac

SEQ ID NO: 1647191 - RNA, 19 nt, Artificial Sequence
  Description of Artificial Sequence: Synthetic oligonucleotide
  Sense strand starting at position 804 of SEQ ID NO: 1561105
caaugacucguucguuauc

SEQ ID NO: 1647192 - RNA, 19 nt, Artificial Sequence
  Description of Artificial Sequence: Synthetic oligonucleotide
  Antisense strand to SEQ ID NO: 1647191
gauaacgaacgagucauug

SEQ ID NO: 1647193 - RNA, 19 nt, Artificial Sequence
  Description of Artificial Sequence: Synthetic oligonucleotide
  Sense strand starting at position 814 of SEQ ID NO: 1561105
uucguuauccguguaaguu

SEQ ID NO: 1647194 - RNA, 19 nt, Artificial Sequence
  Description of Artificial Sequence: Synthetic oligonucleotide
  Antisense strand to SEQ ID NO: 1647193
aacuuacacggauaacgaa

SEQ ID NO: 1647195 - RNA, 19 nt, Artificial Sequence
  Description of Artificial Sequence: Synthetic oligonucleotide
  Sense strand starting at position 815 of SEQ ID NO: 1561105
ucguuauccguguaaguug

SEQ ID NO: 1647196 - RNA, 19 nt, Artificial Sequence
  Description of Artificial Sequence: Synthetic oligonucleotide
  Antisense strand to SEQ ID NO: 1647195
caacuuacacggauaacga

SEQ ID NO: 1647197 - RNA, 19 nt, Artificial Sequence
  Description of Artificial Sequence: Synthetic oligonucleotide
  Sense strand starting at position 820 of SEQ ID NO: 1561105
auccguguaaguugugaau

SEQ ID NO: 1647198 - RNA, 19 nt, Artificial Sequence
  Description of Artificial Sequence: Synthetic oligonucleotide
  Antisense strand to SEQ ID NO: 1647197
auucacaacuuacacggau

SEQ ID NO: 1647199 - RNA, 19 nt, Artificial Sequence
  Description of Artificial Sequence: Synthetic oligonucleotide
  Sense strand starting at position 1309 of SEQ ID NO: 1561105
gaccacucccguuaucguu

SEQ ID NO: 1647200 - RNA, 19 nt, Artificial Sequence
  Description of Artificial Sequence: Synthetic oligonucleotide
  Antisense strand to SEQ ID NO: 1647199
aacgauaacgggagugguc

SEQ ID NO: 1647201 - RNA, 19 nt, Artificial Sequence
  Description of Artificial Sequence: Synthetic oligonucleotide
  Sense strand starting at position 1520 of SEQ ID NO: 1561105
gaagucacgaugcgucaaa

SEQ ID NO: 1647202 - RNA, 19 nt, Artificial Sequence
  Description of Artificial Sequence: Synthetic oligonucleotide
  Antisense strand to SEQ ID NO: 1647201
uuugacgcaucgugacuuc

SEQ ID NO: 1647203 - RNA, 19 nt, Artificial Sequence
  Description of Artificial Sequence: Synthetic oligonucleotide
  Sense strand starting at position 1555 of SEQ ID NO: 1561105
ucaaacucaucaggagaaa

SEQ ID NO: 1647204 - RNA, 19 nt, Artificial Sequence
  Description of Artificial Sequence: Synthetic oligonucleotide
  Antisense strand to SEQ ID NO: 1647203
uuucuccugaugaguuuga

SEQ ID NO: 1647205 - RNA, 19 nt, Artificial Sequence
  Description of Artificial Sequence: Synthetic oligonucleotide
  Sense strand starting at position 1869 of SEQ ID NO: 1561105
gugcacaaugauggaauaa

SEQ ID NO: 1647206 - RNA, 19 nt, Artificial Sequence
  Description of Artificial Sequence: Synthetic oligonucleotide
  Antisense strand to SEQ ID NO: 1647205
uuauuccaucauugugcac

SEQ ID NO: 1647207 - RNA, 19 nt, Artificial Sequence
  Description of Artificial Sequence: Synthetic oligonucleotide
  Sense strand starting at position 1933 of SEQ ID NO: 1561105
agauguuuaugacaaugaa

SEQ ID NO: 1647208 - RNA, 19 nt, Artificial Sequence
  Description of Artificial Sequence: Synthetic oligonucleotide
  Antisense strand to SEQ ID NO: 1647207
uucauugucauaaacaucu

SEQ ID NO: 1647209 - RNA, 19 nt, Artificial Sequence
  Description of Artificial Sequence: Synthetic oligonucleotide
  Sense strand starting at position 1936 of SEQ ID NO: 1561105
uguuuaugacaaugaagac

SEQ ID NO: 1647210 - RNA, 19 nt, Artificial Sequence
  Description of Artificial Sequence: Synthetic oligonucleotide
  Antisense strand to SEQ ID NO: 1647209
gucuucauugucauaaaca

SEQ ID NO: 1647211 - RNA, 19 nt, Artificial Sequence
  Description of Artificial Sequence: Synthetic oligonucleotide
  Sense strand starting at position 1975 of SEQ ID NO: 1561105
ucaaaccguuucuugaaga

SEQ ID NO: 1647212 - RNA, 19 nt, Artificial Sequence
  Description of Artificial Sequence: Synthetic oligonucleotide
  Antisense strand to SEQ ID NO: 1647211
ucuucaagaaacgguuuga

SEQ ID NO: 1647213 - RNA, 19 nt, Artificial Sequence
  Description of Artificial Sequence: Synthetic oligonucleotide
  Sense strand starting at position 1980 of SEQ ID NO: 1561105
ccguuucuugaagaauggu

SEQ ID NO: 1647214 - RNA, 19 nt, Artificial Sequence
  Description of Artificial Sequence: Synthetic oligonucleotide
  Antisense strand to SEQ ID NO: 1647213
accauucuucaagaaacgg

SEQ ID NO: 1647215 - RNA, 19 nt, Artificial Sequence
  Description of Artificial Sequence: Synthetic oligonucleotide
  Sense strand starting at position 1983 of SEQ ID NO: 1561105
uuucuugaagaaugguaca

SEQ ID NO: 1647216 - RNA, 19 nt, Artificial Sequence
  Description of Artificial Sequence: Synthetic oligonucleotide
  Antisense strand to SEQ ID NO: 1647215
uguaccauucuucaagaaa

SEQ ID NO: 1647217 - RNA, 19 nt, Artificial Sequence
  Description of Artificial Sequence: Synthetic oligonucleotide
  Sense strand starting at position 2125 of SEQ ID NO: 1561105
ggacgcguuacugacguau

SEQ ID NO: 1647218 - RNA, 19 nt, Artificial Sequence
  Description of Artificial Sequence: Synthetic oligonucleotide
  Antisense strand to SEQ ID NO: 1647217
auacgucaguaacgcgucc

SEQ ID NO: 1647219 - RNA, 19 nt, Artificial Sequence
  Description of Artificial Sequence: Synthetic oligonucleotide
  Sense strand starting at position 2128 of SEQ ID NO: 1561105
cgcguuacugacguaucua

SEQ ID NO: 1647220 - RNA, 19 nt, Artificial Sequence
  Description of Artificial Sequence: Synthetic oligonucleotide
  Antisense strand to SEQ ID NO: 1647219
uagauacgucaguaacgcg

SEQ ID NO: 1647221 - RNA, 19 nt, Artificial Sequence
  Description of Artificial Sequence: Synthetic oligonucleotide
  Sense strand starting at position 2129 of SEQ ID NO: 1561105
gcguuacugacguaucuac

SEQ ID NO: 1647222 - RNA, 19 nt, Artificial Sequence
  Description of Artificial Sequence: Synthetic oligonucleotide
  Antisense strand to SEQ ID NO: 1647221
guagauacgucaguaacgc

SEQ ID NO: 1647223 - RNA, 19 nt, Artificial Sequence
  Description of Artificial Sequence: Synthetic oligonucleotide
  Sense strand starting at position 2775 of SEQ ID NO: 1561105
cgcuguuacccaggguuga

SEQ ID NO: 1647224 - RNA, 19 nt, Artificial Sequence
  Description of Artificial Sequence: Synthetic oligonucleotide
  Antisense strand to SEQ ID NO: 1647223
ucaacccuggguaacagcg

SEQ ID NO: 1647225 - RNA, 19 nt, Artificial Sequence
  Description of Artificial Sequence: Synthetic oligonucleotide
  Sense strand starting at position 2847 of SEQ ID NO: 1561105
gcgcaugacccuuaccaaa

SEQ ID NO: 1647226 - RNA, 19 nt, Artificial Sequence
  Description of Artificial Sequence: Synthetic oligonucleotide
  Antisense strand to SEQ ID NO: 1647225
uuugguaagggucaugcgc

SEQ ID NO: 1647227 - RNA, 19 nt, Artificial Sequence
  Description of Artificial Sequence: Synthetic oligonucleotide
  Sense strand starting at position 2911 of SEQ ID NO: 1561105
gaggaaaggucugaaauag

SEQ ID NO: 1647228 - RNA, 19 nt, Artificial Sequence
  Description of Artificial Sequence: Synthetic oligonucleotide
  Antisense strand to SEQ ID NO: 1647227
cuauuucagaccuuuccuc

SEQ ID NO: 1647229 - RNA, 19 nt, Artificial Sequence
  Description of Artificial Sequence: Synthetic oligonucleotide
  Sense strand starting at position 2949 of SEQ ID NO: 1561105
guucuacgccuuuagucaa

SEQ ID NO: 1647230 - RNA, 19 nt, Artificial Sequence
  Description of Artificial Sequence: Synthetic oligonucleotide
  Antisense strand to SEQ ID NO: 1647229
uugacuaaaggcguagaac

SEQ ID NO: 1647231 - RNA, 19 nt, Artificial Sequence
  Description of Artificial Sequence: Synthetic oligonucleotide
  Sense strand starting at position 2952 of SEQ ID NO: 1561105
cuacgccuuuagucaacua

SEQ ID NO: 1647232 - RNA, 19 nt, Artificial Sequence
  Description of Artificial Sequence: Synthetic oligonucleotide
  Antisense strand to SEQ ID NO: 1647231
uaguugacuaaaggcguag

SEQ ID NO: 1647233 - RNA, 19 nt, Artificial Sequence
  Description of Artificial Sequence: Synthetic oligonucleotide
  Sense strand starting at position 2963 of SEQ ID NO: 1561105
gucaacuauuuggaagagu

SEQ ID NO: 1647234 - RNA, 19 nt, Artificial Sequence
  Description of Artificial Sequence: Synthetic oligonucleotide
  Antisense strand to SEQ ID NO: 1647233
acucuuccaaauaguugac

SEQ ID NO: 1647235 - RNA, 19 nt, Artificial Sequence
  Description of Artificial Sequence: Synthetic oligonucleotide
  Sense strand starting at position 3072 of SEQ ID NO: 1561105
uccugagccuuggauuuau

SEQ ID NO: 1647236 - RNA, 19 nt, Artificial Sequence
  Description of Artificial Sequence: Synthetic oligonucleotide
  Antisense strand to SEQ ID NO: 1647235
auaaauccaaggcucagga

SEQ ID NO: 1647237 - RNA, 19 nt, Artificial Sequence
  Description of Artificial Sequence: Synthetic oligonucleotide
  Sense strand starting at position 3081 of SEQ ID NO: 1561105
uuggauuuauccuagaagu

SEQ ID NO: 1647238 - RNA, 19 nt, Artificial Sequence
  Description of Artificial Sequence: Synthetic oligonucleotide
  Antisense strand to SEQ ID NO: 1647237
acuucuaggauaaauccaa

SEQ ID NO: 1647239 - RNA, 19 nt, Artificial Sequence
  Description of Artificial Sequence: Synthetic oligonucleotide
  Sense strand starting at position 3091 of SEQ ID NO: 1561105
ccuagaagucuccgaugcu

SEQ ID NO: 1647240 - RNA, 19 nt, Artificial Sequence
  Description of Artificial Sequence: Synthetic oligonucleotide
  Antisense strand to SEQ ID NO: 1647239
agcaucggagacuucuagg

SEQ ID NO: 1647241 - RNA, 19 nt, Artificial Sequence
  Description of Artificial Sequence: Synthetic oligonucleotide
  Sense strand starting at position 3094 of SEQ ID NO: 1561105
agaagucuccgaugcugga

SEQ ID NO: 1647242 - RNA, 19 nt, Artificial Sequence
  Description of Artificial Sequence: Synthetic oligonucleotide
  Antisense strand to SEQ ID NO: 1647241
uccagcaucggagacuucu

SEQ ID NO: 1647243 - RNA, 19 nt, Artificial Sequence
  Description of Artificial Sequence: Synthetic oligonucleotide
  Sense strand starting at position 3471 of SEQ ID NO: 1561105
gggcucugacuggaguuaa

SEQ ID NO: 1647244 - RNA, 19 nt, Artificial Sequence
  Description of Artificial Sequence: Synthetic oligonucleotide
  Antisense strand to SEQ ID NO: 1647243
uuaacuccagucagagccc

SEQ ID NO: 1647245 - RNA, 19 nt, Artificial Sequence
  Description of Artificial Sequence: Synthetic oligonucleotide
  Sense strand starting at position 3655 of SEQ ID NO: 1561105
gguuauacacauugcacaa

SEQ ID NO: 1647246 - RNA, 19 nt, Artificial Sequence
  Description of Artificial Sequence: Synthetic oligonucleotide
  Antisense strand to SEQ ID NO: 1647245
uugugcaauguguauaacc

SEQ ID NO: 1647247 - RNA, 19 nt, Artificial Sequence
  Description of Artificial Sequence: Synthetic oligonucleotide
  Sense strand starting at position 3764 of SEQ ID NO: 1561105
accugagaaguuugagacu

SEQ ID NO: 1647248 - RNA, 19 nt, Artificial Sequence
  Description of Artificial Sequence: Synthetic oligonucleotide
  Antisense strand to SEQ ID NO: 1647247
agucucaaacuucucaggu

SEQ ID NO: 1647249 - RNA, 19 nt, Artificial Sequence
  Description of Artificial Sequence: Synthetic oligonucleotide
  Sense strand starting at position 3865 of SEQ ID NO: 1561105
gcuguaauguaucuguugu

SEQ ID NO: 1647250 - RNA, 19 nt, Artificial Sequence
  Description of Artificial Sequence: Synthetic oligonucleotide
  Antisense strand to SEQ ID NO: 1647249
acaacagauacauuacagc

SEQ ID NO: 1647251 - RNA, 19 nt, Artificial Sequence
  Description of Artificial Sequence: Synthetic oligonucleotide
  Sense strand starting at position 3878 of SEQ ID NO: 1561105
uguugucuuccagaaagca

SEQ ID NO: 1647252 - RNA, 19 nt, Artificial Sequence
  Description of Artificial Sequence: Synthetic oligonucleotide
  Antisense strand to SEQ ID NO: 1647251
ugcuuucuggaagacaaca

SEQ ID NO: 1647253 - RNA, 19 nt, Artificial Sequence
  Description of Artificial Sequence: Synthetic oligonucleotide
  Sense strand starting at position 480 of SEQ ID NO: 1561106
gauggagcaugcuucuagu

SEQ ID NO: 1647254 - RNA, 19 nt, Artificial Sequence
  Description of Artificial Sequence: Synthetic oligonucleotide
  Antisense strand to SEQ ID NO: 1647253
acuagaagcaugcuccauc

SEQ ID NO: 1647255 - RNA, 19 nt, Artificial Sequence
  Description of Artificial Sequence: Synthetic oligonucleotide
  Sense strand starting at position 752 of SEQ ID NO: 1561106
cuuugagaaugauuggagu

SEQ ID NO: 1647256 - RNA, 19 nt, Artificial Sequence
  Description of Artificial Sequence: Synthetic oligonucleotide
  Antisense strand to SEQ ID NO: 1647255
acuccaaucauucucaaag

SEQ ID NO: 1647257 - RNA, 19 nt, Artificial Sequence
  Description of Artificial Sequence: Synthetic oligonucleotide
  Sense strand starting at position 754 of SEQ ID NO: 1561106
uugagaaugauuggaguug

SEQ ID NO: 1647258 - RNA, 19 nt, Artificial Sequence
  Description of Artificial Sequence: Synthetic oligonucleotide
  Antisense strand to SEQ ID NO: 1647257
caacuccaaucauucucaa

SEQ ID NO: 1647259 - RNA, 19 nt, Artificial Sequence
  Description of Artificial Sequence: Synthetic oligonucleotide
  Sense strand starting at position 755 of SEQ ID NO: 1561106
ugagaaugauuggaguuga

SEQ ID NO: 1647260 - RNA, 19 nt, Artificial Sequence
  Description of Artificial Sequence: Synthetic oligonucleotide
  Antisense strand to SEQ ID NO: 1647259
ucaacuccaaucauucuca

SEQ ID NO: 1647261 - RNA, 19 nt, Artificial Sequence
  Description of Artificial Sequence: Synthetic oligonucleotide
  Sense strand starting at position 768 of SEQ ID NO: 1561106
aguugagaccaggauguuu

SEQ ID NO: 1647262 - RNA, 19 nt, Artificial Sequence
  Description of Artificial Sequence: Synthetic oligonucleotide
  Antisense strand to SEQ ID NO: 1647261
aaacauccuggucucaacu

SEQ ID NO: 1647263 - RNA, 19 nt, Artificial Sequence
  Description of Artificial Sequence: Synthetic oligonucleotide
  Sense strand starting at position 779 of SEQ ID NO: 1561106
ggauguuugaaauguuuga

SEQ ID NO: 1647264 - RNA, 19 nt, Artificial Sequence
  Description of Artificial Sequence: Synthetic oligonucleotide
  Antisense strand to SEQ ID NO: 1647263
ucaaacauuucaaacaucc

SEQ ID NO: 1647265 - RNA, 19 nt, Artificial Sequence
  Description of Artificial Sequence: Synthetic oligonucleotide
  Sense strand starting at position 784 of SEQ ID NO: 1561106
uuugaaauguuugaaagag

SEQ ID NO: 1647266 - RNA, 19 nt, Artificial Sequence
  Description of Artificial Sequence: Synthetic oligonucleotide
  Antisense strand to SEQ ID NO: 1647265
cucuuucaaacauuucaaa

SEQ ID NO: 1647267 - RNA, 19 nt, Artificial Sequence
  Description of Artificial Sequence: Synthetic oligonucleotide
  Sense strand starting at position 794 of SEQ ID NO: 1561106
uugaaagaguguuuaccuu

SEQ ID NO: 1647268 - RNA, 19 nt, Artificial Sequence
  Description of Artificial Sequence: Synthetic oligonucleotide
  Antisense strand to SEQ ID NO: 1647267
aagguaaacacucuuucaa

SEQ ID NO: 1647269 - RNA, 19 nt, Artificial Sequence
  Description of Artificial Sequence: Synthetic oligonucleotide
  Sense strand starting at position 813 of SEQ ID NO: 1561106
cccagcuuggugugaggau

SEQ ID NO: 1647270 - RNA, 19 nt, Artificial Sequence
  Description of Artificial Sequence: Synthetic oligonucleotide
  Antisense strand to SEQ ID NO: 1647269
auccucacaccaagcuggg

SEQ ID NO: 1647271 - RNA, 19 nt, Artificial Sequence
  Description of Artificial Sequence: Synthetic oligonucleotide
  Sense strand starting at position 825 of SEQ ID NO: 1561106
ugaggauucaguggcacgu

SEQ ID NO: 1647272 - RNA, 19 nt, Artificial Sequence
  Description of Artificial Sequence: Synthetic oligonucleotide
  Antisense strand to SEQ ID NO: 1647271
acgugccacugaauccuca

SEQ ID NO: 1647273 - RNA, 19 nt, Artificial Sequence
  Description of Artificial Sequence: Synthetic oligonucleotide
  Sense strand starting at position 827 of SEQ ID NO: 1561106
aggauucaguggcacguaa

SEQ ID NO: 1647274 - RNA, 19 nt, Artificial Sequence
  Description of Artificial Sequence: Synthetic oligonucleotide
  Antisense strand to SEQ ID NO: 1647273
uuacgugccacugaauccu

SEQ ID NO: 1647275 - RNA, 19 nt, Artificial Sequence
  Description of Artificial Sequence: Synthetic oligonucleotide
  Sense strand starting at position 1986 of SEQ ID NO: 1561106
gagucugugaauggaauga

SEQ ID NO: 1647276 - RNA, 19 nt, Artificial Sequence
  Description of Artificial Sequence: Synthetic oligonucleotide
  Antisense strand to SEQ ID NO: 1647275
ucauuccauucacagacuc

SEQ ID NO: 1647277 - RNA, 19 nt, Artificial Sequence
  Description of Artificial Sequence: Synthetic oligonucleotide
  Sense strand starting at position 1990 of SEQ ID NO: 1561106
cugugaauggaaugaguga

SEQ ID NO: 1647278 - RNA, 19 nt, Artificial Sequence
  Description of Artificial Sequence: Synthetic oligonucleotide
  Antisense strand to SEQ ID NO: 1647277
ucacucauuccauucacag

SEQ ID NO: 1647279 - RNA, 19 nt, Artificial Sequence
  Description of Artificial Sequence: Synthetic oligonucleotide
  Sense strand starting at position 1997 of SEQ ID NO: 1561106
uggaaugagugaucucaca

SEQ ID NO: 1647280 - RNA, 19 nt, Artificial Sequence
  Description of Artificial Sequence: Synthetic oligonucleotide
  Antisense strand to SEQ ID NO: 1647279
ugugagaucacucauucca

SEQ ID NO: 1647281 - RNA, 19 nt, Artificial Sequence
  Description of Artificial Sequence: Synthetic oligonucleotide
  Sense strand starting at position 2046 of SEQ ID NO: 1561106
gggaugaggucauagguga

SEQ ID NO: 1647282 - RNA, 19 nt, Artificial Sequence
  Description of Artificial Sequence: Synthetic oligonucleotide
  Antisense strand to SEQ ID NO: 1647281
ucaccuaugaccucauccc

SEQ ID NO: 1647283 - RNA, 19 nt, Artificial Sequence
  Description of Artificial Sequence: Synthetic oligonucleotide
  Sense strand starting at position 2190 of SEQ ID NO: 1561106
ccgcauucucugugcugua

SEQ ID NO: 1647284 - RNA, 19 nt, Artificial Sequence
  Description of Artificial Sequence: Synthetic oligonucleotide
  Antisense strand to SEQ ID NO: 1647283
uacagcacagagaaugcgg

SEQ ID NO: 1647285 - RNA, 19 nt, Artificial Sequence
  Description of Artificial Sequence: Synthetic oligonucleotide
  Sense strand starting at position 2192 of SEQ ID NO: 1561106
gcauucucugugcuguaca

SEQ ID NO: 1647286 - RNA, 19 nt, Artificial Sequence
  Description of Artificial Sequence: Synthetic oligonucleotide
  Antisense strand to SEQ ID NO: 1647285
uguacagcacagagaaugc

SEQ ID NO: 1647287 - RNA, 19 nt, Artificial Sequence
  Description of Artificial Sequence: Synthetic oligonucleotide
  Sense strand starting at position 2316 of SEQ ID NO: 1561106
ggaugagagccagguucau

SEQ ID NO: 1647288 - RNA, 19 nt, Artificial Sequence
  Description of Artificial Sequence: Synthetic oligonucleotide
  Antisense strand to SEQ ID NO: 1647287
augaaccuggcucucaucc

SEQ ID NO: 1647289 - RNA, 19 nt, Artificial Sequence
  Description of Artificial Sequence: Synthetic oligonucleotide
  Sense strand starting at position 2363 of SEQ ID NO: 1561106
ggguguauuaacugagcac

SEQ ID NO: 1647290 - RNA, 19 nt, Artificial Sequence
  Description of Artificial Sequence: Synthetic oligonucleotide
  Antisense strand to SEQ ID NO: 1647289
gugcucaguuaauacaccc

SEQ ID NO: 1647291 - RNA, 19 nt, Artificial Sequence
  Description of Artificial Sequence: Synthetic oligonucleotide
  Sense strand starting at position 2364 of SEQ ID NO: 1561106
gguguauuaacugagcacu

SEQ ID NO: 1647292 - RNA, 19 nt, Artificial Sequence
  Description of Artificial Sequence: Synthetic oligonucleotide
  Antisense strand to SEQ ID NO: 1647291
agugcucaguuaauacacc

SEQ ID NO: 1647293 - RNA, 19 nt, Artificial Sequence
  Description of Artificial Sequence: Synthetic oligonucleotide
  Sense strand starting at position 2381 of SEQ ID NO: 1561106
cuugcugugugccaggauu

SEQ ID NO: 1647294 - RNA, 19 nt, Artificial Sequence
  Description of Artificial Sequence: Synthetic oligonucleotide
  Antisense strand to SEQ ID NO: 1647293
aauccuggcacacagcaag

SEQ ID NO: 1647295 - RNA, 19 nt, Artificial Sequence
  Description of Artificial Sequence: Synthetic oligonucleotide
  Sense strand starting at position 2744 of SEQ ID NO: 1561106
cugugaugacaggaagugu

SEQ ID NO: 1647296 - RNA, 19 nt, Artificial Sequence
  Description of Artificial Sequence: Synthetic oligonucleotide
  Antisense strand to SEQ ID NO: 1647295
acacuuccugucaucacag

SEQ ID NO: 1647297 - RNA, 19 nt, Artificial Sequence
  Description of Artificial Sequence: Synthetic oligonucleotide
  Sense strand starting at position 3542 of SEQ ID NO: 1561106
gcagucauucuaggaagca

SEQ ID NO: 1647298 - RNA, 19 nt, Artificial Sequence
  Description of Artificial Sequence: Synthetic oligonucleotide
  Antisense strand to SEQ ID NO: 1647297
ugcuuccuagaaugacugc

SEQ ID NO: 1647299 - RNA, 19 nt, Artificial Sequence
  Description of Artificial Sequence: Synthetic oligonucleotide
  Sense strand starting at position 3543 of SEQ ID NO: 1561106
cagucauucuaggaagcag

SEQ ID NO: 1647300 - RNA, 19 nt, Artificial Sequence
  Description of Artificial Sequence: Synthetic oligonucleotide
  Antisense strand to SEQ ID NO: 1647299
cugcuuccuagaaugacug

SEQ ID NO: 1647301 - RNA, 19 nt, Artificial Sequence
  Description of Artificial Sequence: Synthetic oligonucleotide
  Sense strand starting at position 3580 of SEQ ID NO: 1561106
ccuguuaguguccggaagu

SEQ ID NO: 1647302 - RNA, 19 nt, Artificial Sequence
  Description of Artificial Sequence: Synthetic oligonucleotide
  Antisense strand to SEQ ID NO: 1647301
acuuccggacacuaacagg

SEQ ID NO: 1647303 - RNA, 19 nt, Artificial Sequence
  Description of Artificial Sequence: Synthetic oligonucleotide
  Sense strand starting at position 3581 of SEQ ID NO: 1561106
cuguuaguguccggaagug

SEQ ID NO: 1647304 - RNA, 19 nt, Artificial Sequence
  Description of Artificial Sequence: Synthetic oligonucleotide
  Antisense strand to SEQ ID NO: 1647303
cacuuccggacacuaacag

SEQ ID NO: 1647305 - RNA, 19 nt, Artificial Sequence
  Description of Artificial Sequence: Synthetic oligonucleotide
  Sense strand starting at position 3593 of SEQ ID NO: 1561106
ggaagugaauuccgucucu

SEQ ID NO: 1647306 - RNA, 19 nt, Artificial Sequence
  Description of Artificial Sequence: Synthetic oligonucleotide
  Antisense strand to SEQ ID NO: 1647305
agagacggaauucacuucc

SEQ ID NO: 1647307 - RNA, 19 nt, Artificial Sequence
  Description of Artificial Sequence: Synthetic oligonucleotide
  Sense strand starting at position 3629 of SEQ ID NO: 1561106
gaggcauugagguguuccu

SEQ ID NO: 1647308 - RNA, 19 nt, Artificial Sequence
  Description of Artificial Sequence: Synthetic oligonucleotide
  Antisense strand to SEQ ID NO: 1647307
aggaacaccucaaugccuc

SEQ ID NO: 1647309 - RNA, 19 nt, Artificial Sequence
  Description of Artificial Sequence: Synthetic oligonucleotide
  Sense strand starting at position 3678 of SEQ ID NO: 1561106
acuccagucugauuccaga

SEQ ID NO: 1647310 - RNA, 19 nt, Artificial Sequence
  Description of Artificial Sequence: Synthetic oligonucleotide
  Antisense strand to SEQ ID NO: 1647309
ucuggaaucagacuggagu

SEQ ID NO: 1647311 - RNA, 19 nt, Artificial Sequence
  Description of Artificial Sequence: Synthetic oligonucleotide
  Sense strand starting at position 391 of SEQ ID NO: 1561107
ugcgguccauccuucuaua

SEQ ID NO: 1647312 - RNA, 19 nt, Artificial Sequence
  Description of Artificial Sequence: Synthetic oligonucleotide
  Antisense strand to SEQ ID NO: 1647311
uauagaaggauggaccgca

SEQ ID NO: 1647313 - RNA, 19 nt, Artificial Sequence
  Description of Artificial Sequence: Synthetic oligonucleotide
  Sense strand starting at position 602 of SEQ ID NO: 1561107
auaaguguguucucagcua

SEQ ID NO: 1647314 - RNA, 19 nt, Artificial Sequence
  Description of Artificial Sequence: Synthetic oligonucleotide
  Antisense strand to SEQ ID NO: 1647313
uagcugagaacacacuuau

SEQ ID NO: 1647315 - RNA, 19 nt, Artificial Sequence
  Description of Artificial Sequence: Synthetic oligonucleotide
  Sense strand starting at position 865 of SEQ ID NO: 1561107
auuguacaauuccucguaa

SEQ ID NO: 1647316 - RNA, 19 nt, Artificial Sequence
  Description of Artificial Sequence: Synthetic oligonucleotide
  Antisense strand to SEQ ID NO: 1647315
uuacgaggaauuguacaau

SEQ ID NO: 1647317 - RNA, 19 nt, Artificial Sequence
  Description of Artificial Sequence: Synthetic oligonucleotide
  Sense strand starting at position 866 of SEQ ID NO: 1561107
uuguacaauuccucguaag

SEQ ID NO: 1647318 - RNA, 19 nt, Artificial Sequence
  Description of Artificial Sequence: Synthetic oligonucleotide
  Antisense strand to SEQ ID NO: 1647317
cuuacgaggaauuguacaa

SEQ ID NO: 1647319 - RNA, 19 nt, Artificial Sequence
  Description of Artificial Sequence: Synthetic oligonucleotide
  Sense strand starting at position 867 of SEQ ID NO: 1561107
uguacaauuccucguaagg

SEQ ID NO: 1647320 - RNA, 19 nt, Artificial Sequence
  Description of Artificial Sequence: Synthetic oligonucleotide
  Antisense strand to SEQ ID NO: 1647319
ccuuacgaggaauuguaca

SEQ ID NO: 1647321 - RNA, 19 nt, Artificial Sequence
  Description of Artificial Sequence: Synthetic oligonucleotide
  Sense strand starting at position 896 of SEQ ID NO: 1561107
agucaaauuugagacagaa

SEQ ID NO: 1647322 - RNA, 19 nt, Artificial Sequence
  Description of Artificial Sequence: Synthetic oligonucleotide
  Antisense strand to SEQ ID NO: 1647321
uucugucucaaauuugacu

SEQ ID NO: 1647323 - RNA, 19 nt, Artificial Sequence
  Description of Artificial Sequence: Synthetic oligonucleotide
  Sense strand starting at position 1073 of SEQ ID NO: 1561107
ugcaguuacagauagugaa

SEQ ID NO: 1647324 - RNA, 19 nt, Artificial Sequence
  Description of Artificial Sequence: Synthetic oligonucleotide
  Antisense strand to SEQ ID NO: 1647323
uucacuaucuguaacugca

SEQ ID NO: 1647325 - RNA, 19 nt, Artificial Sequence
  Description of Artificial Sequence: Synthetic oligonucleotide
  Sense strand starting at position 1639 of SEQ ID NO: 1561107
gccgauuucucagauggug

SEQ ID NO: 1647326 - RNA, 19 nt, Artificial Sequence
  Description of Artificial Sequence: Synthetic oligonucleotide
  Antisense strand to SEQ ID NO: 1647325
caccaucugagaaaucggc

SEQ ID NO: 1647327 - RNA, 19 nt, Artificial Sequence
  Description of Artificial Sequence: Synthetic oligonucleotide
  Sense strand starting at position 2027 of SEQ ID NO: 1561107
agaagagguugcuuuccau

SEQ ID NO: 1647328 - RNA, 19 nt, Artificial Sequence
  Description of Artificial Sequence: Synthetic oligonucleotide
  Antisense strand to SEQ ID NO: 1647327
auggaaagcaaccucuucu

SEQ ID NO: 1647329 - RNA, 19 nt, Artificial Sequence
  Description of Artificial Sequence: Synthetic oligonucleotide
  Sense strand starting at position 2034 of SEQ ID NO: 1561107
guugcuuuccauuggauuu

SEQ ID NO: 1647330 - RNA, 19 nt, Artificial Sequence
  Description of Artificial Sequence: Synthetic oligonucleotide
  Antisense strand to SEQ ID NO: 1647329
aaauccaauggaaagcaac

SEQ ID NO: 1647331 - RNA, 19 nt, Artificial Sequence
  Description of Artificial Sequence: Synthetic oligonucleotide
  Sense strand starting at position 2053 of SEQ ID NO: 1561107
uuugauacgucagucauaa

SEQ ID NO: 1647332 - RNA, 19 nt, Artificial Sequence
  Description of Artificial Sequence: Synthetic oligonucleotide
  Antisense strand to SEQ ID NO: 1647331
uuaugacugacguaucaaa

SEQ ID NO: 1647333 - RNA, 19 nt, Artificial Sequence
  Description of Artificial Sequence: Synthetic oligonucleotide
  Sense strand starting at position 2098 of SEQ ID NO: 1561107
ggaucuuagacugggcuaa

SEQ ID NO: 1647334 - RNA, 19 nt, Artificial Sequence
  Description of Artificial Sequence: Synthetic oligonucleotide
  Antisense strand to SEQ ID NO: 1647333
uuagcccagucuaagaucc

SEQ ID NO: 1647335 - RNA, 19 nt, Artificial Sequence
  Description of Artificial Sequence: Synthetic oligonucleotide
  Sense strand starting at position 2157 of SEQ ID NO: 1561107
ccgucagucaucggugaug

SEQ ID NO: 1647336 - RNA, 19 nt, Artificial Sequence
  Description of Artificial Sequence: Synthetic oligonucleotide
  Antisense strand to SEQ ID NO: 1647335
caucaccgaugacugacgg

SEQ ID NO: 1647337 - RNA, 19 nt, Artificial Sequence
  Description of Artificial Sequence: Synthetic oligonucleotide
  Sense strand starting at position 2159 of SEQ ID NO: 1561107
gucagucaucggugaugac

SEQ ID NO: 1647338 - RNA, 19 nt, Artificial Sequence
  Description of Artificial Sequence: Synthetic oligonucleotide
  Antisense strand to SEQ ID NO: 1647337
gucaucaccgaugacugac

SEQ ID NO: 1647339 - RNA, 19 nt, Artificial Sequence
  Description of Artificial Sequence: Synthetic oligonucleotide
  Sense strand starting at position 2233 of SEQ ID NO: 1561107
agagaaagcggcuguuuau

SEQ ID NO: 1647340 - RNA, 19 nt, Artificial Sequence
  Description of Artificial Sequence: Synthetic oligonucleotide
  Antisense strand to SEQ ID NO: 1647339
auaaacagccgcuuucucu

SEQ ID NO: 1647341 - RNA, 19 nt, Artificial Sequence
  Description of Artificial Sequence: Synthetic oligonucleotide
  Sense strand starting at position 2242 of SEQ ID NO: 1561107
ggcuguuuauuucuccaua

SEQ ID NO: 1647342 - RNA, 19 nt, Artificial Sequence
  Description of Artificial Sequence: Synthetic oligonucleotide
  Antisense strand to SEQ ID NO: 1647341
uauggagaaauaaacagcc

SEQ ID NO: 1647343 - RNA, 19 nt, Artificial Sequence
  Description of Artificial Sequence: Synthetic oligonucleotide
  Sense strand starting at position 2243 of SEQ ID NO: 1561107
gcuguuuauuucuccauag

SEQ ID NO: 1647344 - RNA, 19 nt, Artificial Sequence
  Description of Artificial Sequence: Synthetic oligonucleotide
  Antisense strand to SEQ ID NO: 1647343
cuauggagaaauaaacagc

SEQ ID NO: 1647345 - RNA, 19 nt, Artificial Sequence
  Description of Artificial Sequence: Synthetic oligonucleotide
  Sense strand starting at position 2337 of SEQ ID NO: 1561107
acagugugugcgugggaua

SEQ ID NO: 1647346 - RNA, 19 nt, Artificial Sequence
  Description of Artificial Sequence: Synthetic oligonucleotide
  Antisense strand to SEQ ID NO: 1647345
uaucccacgcacacacugu

SEQ ID NO: 1647347 - RNA, 19 nt, Artificial Sequence
  Description of Artificial Sequence: Synthetic oligonucleotide
  Sense strand starting at position 2344 of SEQ ID NO: 1561107
gugcgugggauacacaaua

SEQ ID NO: 1647348 - RNA, 19 nt, Artificial Sequence
  Description of Artificial Sequence: Synthetic oligonucleotide
  Antisense strand to SEQ ID NO: 1647347
uauuguguaucccacgcac

SEQ ID NO: 1647349 - RNA, 19 nt, Artificial Sequence
  Description of Artificial Sequence: Synthetic oligonucleotide
  Sense strand starting at position 2373 of SEQ ID NO: 1561107
auaaguagauucuaugaga

SEQ ID NO: 1647350 - RNA, 19 nt, Artificial Sequence
  Description of Artificial Sequence: Synthetic oligonucleotide
  Antisense strand to SEQ ID NO: 1647349
ucucauagaaucuacuuau

SEQ ID NO: 1647351 - RNA, 19 nt, Artificial Sequence
  Description of Artificial Sequence: Synthetic oligonucleotide
  Sense strand starting at position 2461 of SEQ ID NO: 1561107
cuguguuacccuggacaga

SEQ ID NO: 1647352 - RNA, 19 nt, Artificial Sequence
  Description of Artificial Sequence: Synthetic oligonucleotide
  Antisense strand to SEQ ID NO: 1647351
ucuguccaggguaacacag

SEQ ID NO: 1647353 - RNA, 19 nt, Artificial Sequence
  Description of Artificial Sequence: Synthetic oligonucleotide
  Sense strand starting at position 2497 of SEQ ID NO: 1561107
guacuuuccuccuuaguaa

SEQ ID NO: 1647354 - RNA, 19 nt, Artificial Sequence
  Description of Artificial Sequence: Synthetic oligonucleotide
  Antisense strand to SEQ ID NO: 1647353
uuacuaaggaggaaaguac

SEQ ID NO: 1647355 - RNA, 19 nt, Artificial Sequence
  Description of Artificial Sequence: Synthetic oligonucleotide
  Sense strand starting at position 2515 of SEQ ID NO: 1561107
aaaugagggucauacuagu

SEQ ID NO: 1647356 - RNA, 19 nt, Artificial Sequence
  Description of Artificial Sequence: Synthetic oligonucleotide
  Antisense strand to SEQ ID NO: 1647355
acuaguaugacccucauuu

SEQ ID NO: 1647357 - RNA, 19 nt, Artificial Sequence
  Description of Artificial Sequence: Synthetic oligonucleotide
  Sense strand starting at position 2525 of SEQ ID NO: 1561107
cauacuagugccuguguca

SEQ ID NO: 1647358 - RNA, 19 nt, Artificial Sequence
  Description of Artificial Sequence: Synthetic oligonucleotide
  Antisense strand to SEQ ID NO: 1647357
ugacacaggcacuaguaug

SEQ ID NO: 1647359 - RNA, 19 nt, Artificial Sequence
  Description of Artificial Sequence: Synthetic oligonucleotide
  Sense strand starting at position 2542 of SEQ ID NO: 1561107
cagcguuggcgugagaauu

SEQ ID NO: 1647360 - RNA, 19 nt, Artificial Sequence
  Description of Artificial Sequence: Synthetic oligonucleotide
  Antisense strand to SEQ ID NO: 1647359
aauucucacgccaacgcug

SEQ ID NO: 1647361 - RNA, 19 nt, Artificial Sequence
  Description of Artificial Sequence: Synthetic oligonucleotide
  Sense strand starting at position 2543 of SEQ ID NO: 1561107
agcguuggcgugagaauuc

SEQ ID NO: 1647362 - RNA, 19 nt, Artificial Sequence
  Description of Artificial Sequence: Synthetic oligonucleotide
  Antisense strand to SEQ ID NO: 1647361
gaauucucacgccaacgcu

SEQ ID NO: 1647363 - RNA, 19 nt, Artificial Sequence
  Description of Artificial Sequence: Synthetic oligonucleotide
  Sense strand starting at position 2550 of SEQ ID NO: 1561107
gcgugagaauucuucuuau

SEQ ID NO: 1647364 - RNA, 19 nt, Artificial Sequence
  Description of Artificial Sequence: Synthetic oligonucleotide
  Antisense strand to SEQ ID NO: 1647363
auaagaagaauucucacgc

SEQ ID NO: 1647365 - RNA, 19 nt, Artificial Sequence
  Description of Artificial Sequence: Synthetic oligonucleotide
  Sense strand starting at position 2733 of SEQ ID NO: 1561107
gugauagugucuccuauuc

SEQ ID NO: 1647366 - RNA, 19 nt, Artificial Sequence
  Description of Artificial Sequence: Synthetic oligonucleotide
  Antisense strand to SEQ ID NO: 1647365
gaauaggagacacuaucac

SEQ ID NO: 1647367 - RNA, 19 nt, Artificial Sequence
  Description of Artificial Sequence: Synthetic oligonucleotide
  Sense strand starting at position 2756 of SEQ ID NO: 1561107
ggugcuauauaguuguuua

SEQ ID NO: 1647368 - RNA, 19 nt, Artificial Sequence
  Description of Artificial Sequence: Synthetic oligonucleotide
  Antisense strand to SEQ ID NO: 1647367
uaaacaacuauauagcacc

SEQ ID NO: 1647369 - RNA, 19 nt, Artificial Sequence
  Description of Artificial Sequence: Synthetic oligonucleotide
  Sense strand starting at position 2757 of SEQ ID NO: 1561107
gugcuauauaguuguuuaa

SEQ ID NO: 1647370 - RNA, 19 nt, Artificial Sequence
  Description of Artificial Sequence: Synthetic oligonucleotide
  Antisense strand to SEQ ID NO: 1647369
uuaaacaacuauauagcac

SEQ ID NO: 1647371 - RNA, 19 nt, Artificial Sequence
  Description of Artificial Sequence: Synthetic oligonucleotide
  Sense strand starting at position 2759 of SEQ ID NO: 1561107
gcuauauaguuguuuaaug

SEQ ID NO: 1647372 - RNA, 19 nt, Artificial Sequence
  Description of Artificial Sequence: Synthetic oligonucleotide
  Antisense strand to SEQ ID NO: 1647371
cauuaaacaacuauauagc

SEQ ID NO: 1647373 - RNA, 19 nt, Artificial Sequence
  Description of Artificial Sequence: Synthetic oligonucleotide
  Sense strand starting at position 2825 of SEQ ID NO: 1561107
cuguaagucugagcucuuu

SEQ ID NO: 1647374 - RNA, 19 nt, Artificial Sequence
  Description of Artificial Sequence: Synthetic oligonucleotide
  Antisense strand to SEQ ID NO: 1647373
aaagagcucagacuuacag

SEQ ID NO: 1647375 - RNA, 19 nt, Artificial Sequence
  Description of Artificial Sequence: Synthetic oligonucleotide
  Sense strand starting at position 2921 of SEQ ID NO: 1561107
aagaucagugcugacucua

SEQ ID NO: 1647376 - RNA, 19 nt, Artificial Sequence
  Description of Artificial Sequence: Synthetic oligonucleotide
  Antisense strand to SEQ ID NO: 1647375
uagagucagcacugaucuu

SEQ ID NO: 1647377 - RNA, 19 nt, Artificial Sequence
  Description of Artificial Sequence: Synthetic oligonucleotide
  Sense strand starting at position 2952 of SEQ ID NO: 1561107
caugcuagacacugguauu

SEQ ID NO: 1647378 - RNA, 19 nt, Artificial Sequence
  Description of Artificial Sequence: Synthetic oligonucleotide
  Antisense strand to SEQ ID NO: 1647377
aauaccagugucuagcaug

SEQ ID NO: 1647379 - RNA, 19 nt, Artificial Sequence
  Description of Artificial Sequence: Synthetic oligonucleotide
  Sense strand starting at position 2955 of SEQ ID NO: 1561107
gcuagacacugguauuucu

SEQ ID NO: 1647380 - RNA, 19 nt, Artificial Sequence
  Description of Artificial Sequence: Synthetic oligonucleotide
  Antisense strand to SEQ ID NO: 1647379
agaaauaccagugucuagc

SEQ ID NO: 1647381 - RNA, 19 nt, Artificial Sequence
  Description of Artificial Sequence: Synthetic oligonucleotide
  Sense strand starting at position 2978 of SEQ ID NO: 1561107
gaaacaagauguuaagaug

SEQ ID NO: 1647382 - RNA, 19 nt, Artificial Sequence
  Description of Artificial Sequence: Synthetic oligonucleotide
  Antisense strand to SEQ ID NO: 1647381
caucuuaacaucuuguuuc

SEQ ID NO: 1647383 - RNA, 19 nt, Artificial Sequence
  Description of Artificial Sequence: Synthetic oligonucleotide
  Sense strand starting at position 3833 of SEQ ID NO: 1561107
gaaccagcuguguaauguu

SEQ ID NO: 1647384 - RNA, 19 nt, Artificial Sequence
  Description of Artificial Sequence: Synthetic oligonucleotide
  Antisense strand to SEQ ID NO: 1647383
aacauuacacagcugguuc

SEQ ID NO: 1647385 - RNA, 19 nt, Artificial Sequence
  Description of Artificial Sequence: Synthetic oligonucleotide
  Sense strand starting at position 3841 of SEQ ID NO: 1561107
uguguaauguuggcauaga

SEQ ID NO: 1647386 - RNA, 19 nt, Artificial Sequence
  Description of Artificial Sequence: Synthetic oligonucleotide
  Antisense strand to SEQ ID NO: 1647385
ucuaugccaacauuacaca

SEQ ID NO: 1647387 - RNA, 19 nt, Artificial Sequence
  Description of Artificial Sequence: Synthetic oligonucleotide
  Sense strand starting at position 3874 of SEQ ID NO: 1561107
gccuaaaggcagugaauaa

SEQ ID NO: 1647388 - RNA, 19 nt, Artificial Sequence
  Description of Artificial Sequence: Synthetic oligonucleotide
  Antisense strand to SEQ ID NO: 1647387
uuauucacugccuuuaggc

SEQ ID NO: 1647389 - RNA, 19 nt, Artificial Sequence
  Description of Artificial Sequence: Synthetic oligonucleotide
  Sense strand starting at position 3950 of SEQ ID NO: 1561107
gcagcuuaccugugaccuu

SEQ ID NO: 1647390 - RNA, 19 nt, Artificial Sequence
  Description of Artificial Sequence: Synthetic oligonucleotide
  Antisense strand to SEQ ID NO: 1647389
aaggucacagguaagcugc

SEQ ID NO: 1647391 - RNA, 19 nt, Artificial Sequence
  Description of Artificial Sequence: Synthetic oligonucleotide
  Sense strand starting at position 1302 of SEQ ID NO: 1561108
ggauuugaauuugguuaua

SEQ ID NO: 1647392 - RNA, 19 nt, Artificial Sequence
  Description of Artificial Sequence: Synthetic oligonucleotide
  Antisense strand to SEQ ID NO: 1647391
uauaaccaaauucaaaucc

SEQ ID NO: 1647393 - RNA, 19 nt, Artificial Sequence
  Description of Artificial Sequence: Synthetic oligonucleotide
  Sense strand starting at position 1593 of SEQ ID NO: 1561108
cggguuagaccuuaaguag

SEQ ID NO: 1647394 - RNA, 19 nt, Artificial Sequence
  Description of Artificial Sequence: Synthetic oligonucleotide
  Antisense strand to SEQ ID NO: 1647393
cuacuuaaggucuaacccg

SEQ ID NO: 1647395 - RNA, 19 nt, Artificial Sequence
  Description of Artificial Sequence: Synthetic oligonucleotide
  Sense strand starting at position 2179 of SEQ ID NO: 1561108
uggauaauccgcugccauc

SEQ ID NO: 1647396 - RNA, 19 nt, Artificial Sequence
  Description of Artificial Sequence: Synthetic oligonucleotide
  Antisense strand to SEQ ID NO: 1647395
gauggcagcggauuaucca

SEQ ID NO: 1647397 - RNA, 19 nt, Artificial Sequence
  Description of Artificial Sequence: Synthetic oligonucleotide
  Sense strand starting at position 2259 of SEQ ID NO: 1561108
ggagcaauucccgauacug

SEQ ID NO: 1647398 - RNA, 19 nt, Artificial Sequence
  Description of Artificial Sequence: Synthetic oligonucleotide
  Antisense strand to SEQ ID NO: 1647397
caguaucgggaauugcucc

SEQ ID NO: 1647399 - RNA, 19 nt, Artificial Sequence
  Description of Artificial Sequence: Synthetic oligonucleotide
  Sense strand starting at position 2368 of SEQ ID NO: 1561108
ggcugauaugacuggguuu

SEQ ID NO: 1647400 - RNA, 19 nt, Artificial Sequence
  Description of Artificial Sequence: Synthetic oligonucleotide
  Antisense strand to SEQ ID NO: 1647399
aaacccagucauaucagcc

SEQ ID NO: 1647401 - RNA, 19 nt, Artificial Sequence
  Description of Artificial Sequence: Synthetic oligonucleotide
  Sense strand starting at position 2369 of SEQ ID NO: 1561108
gcugauaugacuggguuua

SEQ ID NO: 1647402 - RNA, 19 nt, Artificial Sequence
  Description of Artificial Sequence: Synthetic oligonucleotide
  Antisense strand to SEQ ID NO: 1647401
uaaacccagucauaucagc

SEQ ID NO: 1647403 - RNA, 19 nt, Artificial Sequence
  Description of Artificial Sequence: Synthetic oligonucleotide
  Sense strand starting at position 2370 of SEQ ID NO: 1561108
cugauaugacuggguuuac

SEQ ID NO: 1647404 - RNA, 19 nt, Artificial Sequence
  Description of Artificial Sequence: Synthetic oligonucleotide
  Antisense strand to SEQ ID NO: 1647403
guaaacccagucauaucag

SEQ ID NO: 1647405 - RNA, 19 nt, Artificial Sequence
  Description of Artificial Sequence: Synthetic oligonucleotide
  Sense strand starting at position 2371 of SEQ ID NO: 1561108
ugauaugacuggguuuaca

SEQ ID NO: 1647406 - RNA, 19 nt, Artificial Sequence
  Description of Artificial Sequence: Synthetic oligonucleotide
  Antisense strand to SEQ ID NO: 1647405
uguaaacccagucauauca

SEQ ID NO: 1647407 - RNA, 19 nt, Artificial Sequence
  Description of Artificial Sequence: Synthetic oligonucleotide
  Sense strand starting at position 2479 of SEQ ID NO: 1561108
accugucacuuucuaguau

SEQ ID NO: 1647408 - RNA, 19 nt, Artificial Sequence
  Description of Artificial Sequence: Synthetic oligonucleotide
  Antisense strand to SEQ ID NO: 1647407
auacuagaaagugacaggu

SEQ ID NO: 1647409 - RNA, 19 nt, Artificial Sequence
  Description of Artificial Sequence: Synthetic oligonucleotide
  Sense strand starting at position 2664 of SEQ ID NO: 1561108
aucugacaaguuugugaau

SEQ ID NO: 1647410 - RNA, 19 nt, Artificial Sequence
  Description of Artificial Sequence: Synthetic oligonucleotide
  Antisense strand to SEQ ID NO: 1647409
auucacaaacuugucagau

SEQ ID NO: 1647411 - RNA, 19 nt, Artificial Sequence
  Description of Artificial Sequence: Synthetic oligonucleotide
  Sense strand starting at position 2665 of SEQ ID NO: 1561108
ucugacaaguuugugaauu

SEQ ID NO: 1647412 - RNA, 19 nt, Artificial Sequence
  Description of Artificial Sequence: Synthetic oligonucleotide
  Antisense strand to SEQ ID NO: 1647411
aauucacaaacuugucaga

SEQ ID NO: 1647413 - RNA, 19 nt, Artificial Sequence
  Description of Artificial Sequence: Synthetic oligonucleotide
  Sense strand starting at position 2667 of SEQ ID NO: 1561108
ugacaaguuugugaauuug

SEQ ID NO: 1647414 - RNA, 19 nt, Artificial Sequence
  Description of Artificial Sequence: Synthetic oligonucleotide
  Antisense strand to SEQ ID NO: 1647413
caaauucacaaacuuguca

SEQ ID NO: 1647415 - RNA, 19 nt, Artificial Sequence
  Description of Artificial Sequence: Synthetic oligonucleotide
  Sense strand starting at position 2673 of SEQ ID NO: 1561108
guuugugaauuugggaaga

SEQ ID NO: 1647416 - RNA, 19 nt, Artificial Sequence
  Description of Artificial Sequence: Synthetic oligonucleotide
  Antisense strand to SEQ ID NO: 1647415
ucuucccaaauucacaaac

SEQ ID NO: 1647417 - RNA, 19 nt, Artificial Sequence
  Description of Artificial Sequence: Synthetic oligonucleotide
  Sense strand starting at position 2731 of SEQ ID NO: 1561108
caguaagugcugcauaagu

SEQ ID NO: 1647418 - RNA, 19 nt, Artificial Sequence
  Description of Artificial Sequence: Synthetic oligonucleotide
  Antisense strand to SEQ ID NO: 1647417
acuuaugcagcacuuacug

SEQ ID NO: 1647419 - RNA, 19 nt, Artificial Sequence
  Description of Artificial Sequence: Synthetic oligonucleotide
  Sense strand starting at position 2753 of SEQ ID NO: 1561108
gcuauuaaauaguucuugu

SEQ ID NO: 1647420 - RNA, 19 nt, Artificial Sequence
  Description of Artificial Sequence: Synthetic oligonucleotide
  Antisense strand to SEQ ID NO: 1647419
acaagaacuauuuaauagc

SEQ ID NO: 1647421 - RNA, 19 nt, Artificial Sequence
  Description of Artificial Sequence: Synthetic oligonucleotide
  Sense strand starting at position 2794 of SEQ ID NO: 1561108
acuuaaguugcucagaaag

SEQ ID NO: 1647422 - RNA, 19 nt, Artificial Sequence
  Description of Artificial Sequence: Synthetic oligonucleotide
  Antisense strand to SEQ ID NO: 1647421
cuuucugagcaacuuaagu

SEQ ID NO: 1647423 - RNA, 19 nt, Artificial Sequence
  Description of Artificial Sequence: Synthetic oligonucleotide
  Sense strand starting at position 2884 of SEQ ID NO: 1561108
gaggauuccuugcccagga

SEQ ID NO: 1647424 - RNA, 19 nt, Artificial Sequence
  Description of Artificial Sequence: Synthetic oligonucleotide
  Antisense strand to SEQ ID NO: 1647423
uccugggcaaggaauccuc

SEQ ID NO: 1647425 - RNA, 19 nt, Artificial Sequence
  Description of Artificial Sequence: Synthetic oligonucleotide
  Sense strand starting at position 2886 of SEQ ID NO: 1561108
ggauuccuugcccaggaga

SEQ ID NO: 1647426 - RNA, 19 nt, Artificial Sequence
  Description of Artificial Sequence: Synthetic oligonucleotide
  Antisense strand to SEQ ID NO: 1647425
ucuccugggcaaggaaucc

SEQ ID NO: 1647427 - RNA, 19 nt, Artificial Sequence
  Description of Artificial Sequence: Synthetic oligonucleotide
  Sense strand starting at position 2888 of SEQ ID NO: 1561108
auuccuugcccaggagauc

SEQ ID NO: 1647428 - RNA, 19 nt, Artificial Sequence
  Description of Artificial Sequence: Synthetic oligonucleotide
  Antisense strand to SEQ ID NO: 1647427
gaucuccugggcaaggaau

SEQ ID NO: 1647429 - RNA, 19 nt, Artificial Sequence
  Description of Artificial Sequence: Synthetic oligonucleotide
  Sense strand starting at position 2968 of SEQ ID NO: 1561108
gacacuauuugguaagggu

SEQ ID NO: 1647430 - RNA, 19 nt, Artificial Sequence
  Description of Artificial Sequence: Synthetic oligonucleotide
  Antisense strand to SEQ ID NO: 1647429
acccuuaccaaauaguguc

SEQ ID NO: 1647431 - RNA, 19 nt, Artificial Sequence
  Description of Artificial Sequence: Synthetic oligonucleotide
  Sense strand starting at position 2977 of SEQ ID NO: 1561108
ugguaaggguuguuggauu

SEQ ID NO: 1647432 - RNA, 19 nt, Artificial Sequence
  Description of Artificial Sequence: Synthetic oligonucleotide
  Antisense strand to SEQ ID NO: 1647431
aauccaacaacccuuacca

SEQ ID NO: 1647433 - RNA, 19 nt, Artificial Sequence
  Description of Artificial Sequence: Synthetic oligonucleotide
  Sense strand starting at position 2984 of SEQ ID NO: 1561108
gguuguuggauugacugau

SEQ ID NO: 1647434 - RNA, 19 nt, Artificial Sequence
  Description of Artificial Sequence: Synthetic oligonucleotide
  Antisense strand to SEQ ID NO: 1647433
aucagucaauccaacaacc

SEQ ID NO: 1647435 - RNA, 19 nt, Artificial Sequence
  Description of Artificial Sequence: Synthetic oligonucleotide
  Sense strand starting at position 3021 of SEQ ID NO: 1561108
cuaguaguauugcuagguu

SEQ ID NO: 1647436 - RNA, 19 nt, Artificial Sequence
  Description of Artificial Sequence: Synthetic oligonucleotide
  Antisense strand to SEQ ID NO: 1647435
aaccuagcaauacuacuag

SEQ ID NO: 1647437 - RNA, 19 nt, Artificial Sequence
  Description of Artificial Sequence: Synthetic oligonucleotide
  Sense strand starting at position 3025 of SEQ ID NO: 1561108
uaguauugcuagguucuga

SEQ ID NO: 1647438 - RNA, 19 nt, Artificial Sequence
  Description of Artificial Sequence: Synthetic oligonucleotide
  Antisense strand to SEQ ID NO: 1647437
ucagaaccuagcaauacua

SEQ ID NO: 1647439 - RNA, 19 nt, Artificial Sequence
  Description of Artificial Sequence: Synthetic oligonucleotide
  Sense strand starting at position 3065 of SEQ ID NO: 1561108
uacugccauugguuugaua

SEQ ID NO: 1647440 - RNA, 19 nt, Artificial Sequence
  Description of Artificial Sequence: Synthetic oligonucleotide
  Antisense strand to SEQ ID NO: 1647439
uaucaaaccaauggcagua

SEQ ID NO: 1647441 - RNA, 19 nt, Artificial Sequence
  Description of Artificial Sequence: Synthetic oligonucleotide
  Sense strand starting at position 3067 of SEQ ID NO: 1561108
cugccauugguuugauauu

SEQ ID NO: 1647442 - RNA, 19 nt, Artificial Sequence
  Description of Artificial Sequence: Synthetic oligonucleotide
  Antisense strand to SEQ ID NO: 1647441
aauaucaaaccaauggcag

SEQ ID NO: 1647443 - RNA, 19 nt, Artificial Sequence
  Description of Artificial Sequence: Synthetic oligonucleotide
  Sense strand starting at position 3088 of SEQ ID NO: 1561108
ugguuaucccuccggguau

SEQ ID NO: 1647444 - RNA, 19 nt, Artificial Sequence
  Description of Artificial Sequence: Synthetic oligonucleotide
  Antisense strand to SEQ ID NO: 1647443
auacccggagggauaacca

SEQ ID NO: 1647445 - RNA, 19 nt, Artificial Sequence
  Description of Artificial Sequence: Synthetic oligonucleotide
  Sense strand starting at position 3118 of SEQ ID NO: 1561108
uugauaacauuguugcaaa

SEQ ID NO: 1647446 - RNA, 19 nt, Artificial Sequence
  Description of Artificial Sequence: Synthetic oligonucleotide
  Antisense strand to SEQ ID NO: 1647445
uuugcaacaauguuaucaa

SEQ ID NO: 1647447 - RNA, 19 nt, Artificial Sequence
  Description of Artificial Sequence: Synthetic oligonucleotide
  Sense strand starting at position 3173 of SEQ ID NO: 1561108
uuaauaugauugcuguguu

SEQ ID NO: 1647448 - RNA, 19 nt, Artificial Sequence
  Description of Artificial Sequence: Synthetic oligonucleotide
  Antisense strand to SEQ ID NO: 1647447
aacacagcaaucauauuaa

SEQ ID NO: 1647449 - RNA, 19 nt, Artificial Sequence
  Description of Artificial Sequence: Synthetic oligonucleotide
  Sense strand starting at position 3220 of SEQ ID NO: 1561108
ggcugaaggcuuuguaaac

SEQ ID NO: 1647450 - RNA, 19 nt, Artificial Sequence
  Description of Artificial Sequence: Synthetic oligonucleotide
  Antisense strand to SEQ ID NO: 1647449
guuuacaaagccuucagcc

SEQ ID NO: 1647451 - RNA, 19 nt, Artificial Sequence
  Description of Artificial Sequence: Synthetic oligonucleotide
  Sense strand starting at position 3221 of SEQ ID NO: 1561108
gcugaaggcuuuguaaaca

SEQ ID NO: 1647452 - RNA, 19 nt, Artificial Sequence
  Description of Artificial Sequence: Synthetic oligonucleotide
  Antisense strand to SEQ ID NO: 1647451
uguuuacaaagccuucagc

SEQ ID NO: 1647453 - RNA, 19 nt, Artificial Sequence
  Description of Artificial Sequence: Synthetic oligonucleotide
  Sense strand starting at position 3295 of SEQ ID NO: 1561108
gggauuugagcuggugugu

SEQ ID NO: 1647454 - RNA, 19 nt, Artificial Sequence
  Description of Artificial Sequence: Synthetic oligonucleotide
  Antisense strand to SEQ ID NO: 1647453
acacaccagcucaaauccc

SEQ ID NO: 1647455 - RNA, 19 nt, Artificial Sequence
  Description of Artificial Sequence: Synthetic oligonucleotide
  Sense strand starting at position 3300 of SEQ ID NO: 1561108
uugagcugguguguucaga

SEQ ID NO: 1647456 - RNA, 19 nt, Artificial Sequence
  Description of Artificial Sequence: Synthetic oligonucleotide
  Antisense strand to SEQ ID NO: 1647455
ucugaacacaccagcucaa

SEQ ID NO: 1647457 - RNA, 19 nt, Artificial Sequence
  Description of Artificial Sequence: Synthetic oligonucleotide
  Sense strand starting at position 3324 of SEQ ID NO: 1561108
gcuugugucccagcucuca

SEQ ID NO: 1647458 - RNA, 19 nt, Artificial Sequence
  Description of Artificial Sequence: Synthetic oligonucleotide
  Antisense strand to SEQ ID NO: 1647457
ugagagcugggacacaagc

SEQ ID NO: 1647459 - RNA, 19 nt, Artificial Sequence
  Description of Artificial Sequence: Synthetic oligonucleotide
  Sense strand starting at position 3356 of SEQ ID NO: 1561108
guaauaauuggcuaugguu

SEQ ID NO: 1647460 - RNA, 19 nt, Artificial Sequence
  Description of Artificial Sequence: Synthetic oligonucleotide
  Antisense strand to SEQ ID NO: 1647459
aaccauagccaauuauuac

SEQ ID NO: 1647461 - RNA, 19 nt, Artificial Sequence
  Description of Artificial Sequence: Synthetic oligonucleotide
  Sense strand starting at position 3418 of SEQ ID NO: 1561108
guggacauccgccauaaca

SEQ ID NO: 1647462 - RNA, 19 nt, Artificial Sequence
  Description of Artificial Sequence: Synthetic oligonucleotide
  Antisense strand to SEQ ID NO: 1647461
uguuauggcggauguccac

SEQ ID NO: 1647463 - RNA, 19 nt, Artificial Sequence
  Description of Artificial Sequence: Synthetic oligonucleotide
  Sense strand starting at position 3420 of SEQ ID NO: 1561108
ggacauccgccauaacaag

SEQ ID NO: 1647464 - RNA, 19 nt, Artificial Sequence
  Description of Artificial Sequence: Synthetic oligonucleotide
  Antisense strand to SEQ ID NO: 1647463
cuuguuauggcggaugucc

SEQ ID NO: 1647465 - RNA, 19 nt, Artificial Sequence
  Description of Artificial Sequence: Synthetic oligonucleotide
  Sense strand starting at position 3513 of SEQ ID NO: 1561108
cccugaggucuuugggaag

SEQ ID NO: 1647466 - RNA, 19 nt, Artificial Sequence
  Description of Artificial Sequence: Synthetic oligonucleotide
  Antisense strand to SEQ ID NO: 1647465
cuucccaaagaccucaggg

SEQ ID NO: 1647467 - RNA, 19 nt, Artificial Sequence
  Description of Artificial Sequence: Synthetic oligonucleotide
  Sense strand starting at position 3539 of SEQ ID NO: 1561108
ccaggucugacuugcagau

SEQ ID NO: 1647468 - RNA, 19 nt, Artificial Sequence
  Description of Artificial Sequence: Synthetic oligonucleotide
  Antisense strand to SEQ ID NO: 1647467
aucugcaagucagaccugg

SEQ ID NO: 1647469 - RNA, 19 nt, Artificial Sequence
  Description of Artificial Sequence: Synthetic oligonucleotide
  Sense strand starting at position 3876 of SEQ ID NO: 1561108
gguuucuggccagaagaac

SEQ ID NO: 1647470 - RNA, 19 nt, Artificial Sequence
  Description of Artificial Sequence: Synthetic oligonucleotide
  Antisense strand to SEQ ID NO: 1647469
guucuucuggccagaaacc

SEQ ID NO: 1647471 - RNA, 19 nt, Artificial Sequence
  Description of Artificial Sequence: Synthetic oligonucleotide
  Sense strand starting at position 48 of SEQ ID NO: 1561109
agcucaacacuuugagaga

SEQ ID NO: 1647472 - RNA, 19 nt, Artificial Sequence
  Description of Artificial Sequence: Synthetic oligonucleotide
  Antisense strand to SEQ ID NO: 1647471
ucucucaaaguguugagcu

SEQ ID NO: 1647473 - RNA, 19 nt, Artificial Sequence
  Description of Artificial Sequence: Synthetic oligonucleotide
  Sense strand starting at position 1544 of SEQ ID NO: 1561109
ggauuugaauuugguuaua

SEQ ID NO: 1647474 - RNA, 19 nt, Artificial Sequence
  Description of Artificial Sequence: Synthetic oligonucleotide
  Antisense strand to SEQ ID NO: 1647473
uauaaccaaauucaaaucc

SEQ ID NO: 1647475 - RNA, 19 nt, Artificial Sequence
  Description of Artificial Sequence: Synthetic oligonucleotide
  Sense strand starting at position 1835 of SEQ ID NO: 1561109
cggguuagaccuuaaguag

SEQ ID NO: 1647476 - RNA, 19 nt, Artificial Sequence
  Description of Artificial Sequence: Synthetic oligonucleotide
  Antisense strand to SEQ ID NO: 1647475
cuacuuaaggucuaacccg

SEQ ID NO: 1647477 - RNA, 19 nt, Artificial Sequence
  Description of Artificial Sequence: Synthetic oligonucleotide
  Sense strand starting at position 2421 of SEQ ID NO: 1561109
uggauaauccgcugccauc

SEQ ID NO: 1647478 - RNA, 19 nt, Artificial Sequence
  Description of Artificial Sequence: Synthetic oligonucleotide
  Antisense strand to SEQ ID NO: 1647477
gauggcagcggauuaucca

SEQ ID NO: 1647479 - RNA, 19 nt, Artificial Sequence
  Description of Artificial Sequence: Synthetic oligonucleotide
  Sense strand starting at position 2501 of SEQ ID NO: 1561109
ggagcaauucccgauacug

SEQ ID NO: 1647480 - RNA, 19 nt, Artificial Sequence
  Description of Artificial Sequence: Synthetic oligonucleotide
  Antisense strand to SEQ ID NO: 1647479
caguaucgggaauugcucc

SEQ ID NO: 1647481 - RNA, 19 nt, Artificial Sequence
  Description of Artificial Sequence: Synthetic oligonucleotide
  Sense strand starting at position 2610 of SEQ ID NO: 1561109
ggcugauaugacuggguuu

SEQ ID NO: 1647482 - RNA, 19 nt, Artificial Sequence
  Description of Artificial Sequence: Synthetic oligonucleotide
  Antisense strand to SEQ ID NO: 1647481
aaacccagucauaucagcc

SEQ ID NO: 1647483 - RNA, 19 nt, Artificial Sequence
  Description of Artificial Sequence: Synthetic oligonucleotide
  Sense strand starting at position 2611 of SEQ ID NO: 1561109
gcugauaugacuggguuua

SEQ ID NO: 1647484 - RNA, 19 nt, Artificial Sequence
  Description of Artificial Sequence: Synthetic oligonucleotide
  Antisense strand to SEQ ID NO: 1647483
uaaacccagucauaucagc

SEQ ID NO: 1647485 - RNA, 19 nt, Artificial Sequence
  Description of Artificial Sequence: Synthetic oligonucleotide
  Sense strand starting at position 2612 of SEQ ID NO: 1561109
cugauaugacuggguuuac

SEQ ID NO: 1647486 - RNA, 19 nt, Artificial Sequence
  Description of Artificial Sequence: Synthetic oligonucleotide
  Antisense strand to SEQ ID NO: 1647485
guaaacccagucauaucag

SEQ ID NO: 1647487 - RNA, 19 nt, Artificial Sequence
  Description of Artificial Sequence: Synthetic oligonucleotide
  Sense strand starting at position 2613 of SEQ ID NO: 1561109
ugauaugacuggguuuaca

SEQ ID NO: 1647488 - RNA, 19 nt, Artificial Sequence
  Description of Artificial Sequence: Synthetic oligonucleotide
  Antisense strand to SEQ ID NO: 1647487
uguaaacccagucauauca

SEQ ID NO: 1647489 - RNA, 19 nt, Artificial Sequence
  Description of Artificial Sequence: Synthetic oligonucleotide
  Sense strand starting at position 2721 of SEQ ID NO: 1561109
accugucacuuucuaguau

SEQ ID NO: 1647490 - RNA, 19 nt, Artificial Sequence
  Description of Artificial Sequence: Synthetic oligonucleotide
  Antisense strand to SEQ ID NO: 1647489
auacuagaaagugacaggu

SEQ ID NO: 1647491 - RNA, 19 nt, Artificial Sequence
  Description of Artificial Sequence: Synthetic oligonucleotide
  Sense strand starting at position 2906 of SEQ ID NO: 1561109
aucugacaaguuugugaau

SEQ ID NO: 1647492 - RNA, 19 nt, Artificial Sequence
  Description of Artificial Sequence: Synthetic oligonucleotide
  Antisense strand to SEQ ID NO: 1647491
auucacaaacuugucagau

SEQ ID NO: 1647493 - RNA, 19 nt, Artificial Sequence
  Description of Artificial Sequence: Synthetic oligonucleotide
  Sense strand starting at position 2907 of SEQ ID NO: 1561109
ucugacaaguuugugaauu

SEQ ID NO: 1647494 - RNA, 19 nt, Artificial Sequence
  Description of Artificial Sequence: Synthetic oligonucleotide
  Antisense strand to SEQ ID NO: 1647493
aauucacaaacuugucaga

SEQ ID NO: 1647495 - RNA, 19 nt, Artificial Sequence
  Description of Artificial Sequence: Synthetic oligonucleotide
  Sense strand starting at position 2909 of SEQ ID NO: 1561109
ugacaaguuugugaauuug

SEQ ID NO: 1647496 - RNA, 19 nt, Artificial Sequence
  Description of Artificial Sequence: Synthetic oligonucleotide
  Antisense strand to SEQ ID NO: 1647495
caaauucacaaacuuguca

SEQ ID NO: 1647497 - RNA, 19 nt, Artificial Sequence
  Description of Artificial Sequence: Synthetic oligonucleotide
  Sense strand starting at position 2915 of SEQ ID NO: 1561109
guuugugaauuugggaaga

SEQ ID NO: 1647498 - RNA, 19 nt, Artificial Sequence
  Description of Artificial Sequence: Synthetic oligonucleotide
  Antisense strand to SEQ ID NO: 1647497
ucuucccaaauucacaaac

SEQ ID NO: 1647499 - RNA, 19 nt, Artificial Sequence
  Description of Artificial Sequence: Synthetic oligonucleotide
  Sense strand starting at position 2973 of SEQ ID NO: 1561109
caguaagugcugcauaagu

SEQ ID NO: 1647500 - RNA, 19 nt, Artificial Sequence
  Description of Artificial Sequence: Synthetic oligonucleotide
  Antisense strand to SEQ ID NO: 1647499
acuuaugcagcacuuacug

SEQ ID NO: 1647501 - RNA, 19 nt, Artificial Sequence
  Description of Artificial Sequence: Synthetic oligonucleotide
  Sense strand starting at position 2995 of SEQ ID NO: 1561109
gcuauuaaauaguucuugu

SEQ ID NO: 1647502 - RNA, 19 nt, Artificial Sequence
  Description of Artificial Sequence: Synthetic oligonucleotide
  Antisense strand to SEQ ID NO: 1647501
acaagaacuauuuaauagc

SEQ ID NO: 1647503 - RNA, 19 nt, Artificial Sequence
  Description of Artificial Sequence: Synthetic oligonucleotide
  Sense strand starting at position 3036 of SEQ ID NO: 1561109
acuuaaguugcucagaaag

SEQ ID NO: 1647504 - RNA, 19 nt, Artificial Sequence
  Description of Artificial Sequence: Synthetic oligonucleotide
  Antisense strand to SEQ ID NO: 1647503
cuuucugagcaacuuaagu

SEQ ID NO: 1647505 - RNA, 19 nt, Artificial Sequence
  Description of Artificial Sequence: Synthetic oligonucleotide
  Sense strand starting at position 3126 of SEQ ID NO: 1561109
gaggauuccuugcccagga

SEQ ID NO: 1647506 - RNA, 19 nt, Artificial Sequence
  Description of Artificial Sequence: Synthetic oligonucleotide
  Antisense strand to SEQ ID NO: 1647505
uccugggcaaggaauccuc

SEQ ID NO: 1647507 - RNA, 19 nt, Artificial Sequence
  Description of Artificial Sequence: Synthetic oligonucleotide
  Sense strand starting at position 3128 of SEQ ID NO: 1561109
ggauuccuugcccaggaga

SEQ ID NO: 1647508 - RNA, 19 nt, Artificial Sequence
  Description of Artificial Sequence: Synthetic oligonucleotide
  Antisense strand to SEQ ID NO: 1647507
ucuccugggcaaggaaucc

SEQ ID NO: 1647509 - RNA, 19 nt, Artificial Sequence
  Description of Artificial Sequence: Synthetic oligonucleotide
  Sense strand starting at position 3130 of SEQ ID NO: 1561109
auuccuugcccaggagauc

SEQ ID NO: 1647510 - RNA, 19 nt, Artificial Sequence
  Description of Artificial Sequence: Synthetic oligonucleotide
  Antisense strand to SEQ ID NO: 1647509
gaucuccugggcaaggaau

SEQ ID NO: 1647511 - RNA, 19 nt, Artificial Sequence
  Description of Artificial Sequence: Synthetic oligonucleotide
  Sense strand starting at position 3210 of SEQ ID NO: 1561109
gacacuauuugguaagggu

SEQ ID NO: 1647512 - RNA, 19 nt, Artificial Sequence
  Description of Artificial Sequence: Synthetic oligonucleotide
  Antisense strand to SEQ ID NO: 1647511
acccuuaccaaauaguguc

SEQ ID NO: 1647513 - RNA, 19 nt, Artificial Sequence
  Description of Artificial Sequence: Synthetic oligonucleotide
  Sense strand starting at position 3219 of SEQ ID NO: 1561109
ugguaaggguuguuggauu

SEQ ID NO: 1647514 - RNA, 19 nt, Artificial Sequence
  Description of Artificial Sequence: Synthetic oligonucleotide
  Antisense strand to SEQ ID NO: 1647513
aauccaacaacccuuacca

SEQ ID NO: 1647515 - RNA, 19 nt, Artificial Sequence
  Description of Artificial Sequence: Synthetic oligonucleotide
  Sense strand starting at position 3226 of SEQ ID NO: 1561109
gguuguuggauugacugau

SEQ ID NO: 1647516 - RNA, 19 nt, Artificial Sequence
  Description of Artificial Sequence: Synthetic oligonucleotide
  Antisense strand to SEQ ID NO: 1647515
aucagucaauccaacaacc

SEQ ID NO: 1647517 - RNA, 19 nt, Artificial Sequence
  Description of Artificial Sequence: Synthetic oligonucleotide
  Sense strand starting at position 3263 of SEQ ID NO: 1561109
cuaguaguauugcuagguu

SEQ ID NO: 1647518 - RNA, 19 nt, Artificial Sequence
  Description of Artificial Sequence: Synthetic oligonucleotide
  Antisense strand to SEQ ID NO: 1647517
aaccuagcaauacuacuag

SEQ ID NO: 1647519 - RNA, 19 nt, Artificial Sequence
  Description of Artificial Sequence: Synthetic oligonucleotide
  Sense strand starting at position 3267 of SEQ ID NO: 1561109
uaguauugcuagguucuga

SEQ ID NO: 1647520 - RNA, 19 nt, Artificial Sequence
  Description of Artificial Sequence: Synthetic oligonucleotide
  Antisense strand to SEQ ID NO: 1647519
ucagaaccuagcaauacua

SEQ ID NO: 1647521 - RNA, 19 nt, Artificial Sequence
  Description of Artificial Sequence: Synthetic oligonucleotide
  Sense strand starting at position 3307 of SEQ ID NO: 1561109
uacugccauugguuugaua

SEQ ID NO: 1647522 - RNA, 19 nt, Artificial Sequence
  Description of Artificial Sequence: Synthetic oligonucleotide
  Antisense strand to SEQ ID NO: 1647521
uaucaaaccaauggcagua

SEQ ID NO: 1647523 - RNA, 19 nt, Artificial Sequence
  Description of Artificial Sequence: Synthetic oligonucleotide
  Sense strand starting at position 3309 of SEQ ID NO: 1561109
cugccauugguuugauauu

SEQ ID NO: 1647524 - RNA, 19 nt, Artificial Sequence
  Description of Artificial Sequence: Synthetic oligonucleotide
  Antisense strand to SEQ ID NO: 1647523
aauaucaaaccaauggcag

SEQ ID NO: 1647525 - RNA, 19 nt, Artificial Sequence
  Description of Artificial Sequence: Synthetic oligonucleotide
  Sense strand starting at position 3330 of SEQ ID NO: 1561109
ugguuaucccuccggguau

SEQ ID NO: 1647526 - RNA, 19 nt, Artificial Sequence
  Description of Artificial Sequence: Synthetic oligonucleotide
  Antisense strand to SEQ ID NO: 1647525
auacccggagggauaacca

SEQ ID NO: 1647527 - RNA, 19 nt, Artificial Sequence
  Description of Artificial Sequence: Synthetic oligonucleotide
  Sense strand starting at position 3360 of SEQ ID NO: 1561109
uugauaacauuguugcaaa

SEQ ID NO: 1647528 - RNA, 19 nt, Artificial Sequence
  Description of Artificial Sequence: Synthetic oligonucleotide
  Antisense strand to SEQ ID NO: 1647527
uuugcaacaauguuaucaa

SEQ ID NO: 1647529 - RNA, 19 nt, Artificial Sequence
  Description of Artificial Sequence: Synthetic oligonucleotide
  Sense strand starting at position 3415 of SEQ ID NO: 1561109
uuaauaugauugcuguguu

SEQ ID NO: 1647530 - RNA, 19 nt, Artificial Sequence
  Description of Artificial Sequence: Synthetic oligonucleotide
  Antisense strand to SEQ ID NO: 1647529
aacacagcaaucauauuaa

SEQ ID NO: 1647531 - RNA, 19 nt, Artificial Sequence
  Description of Artificial Sequence: Synthetic oligonucleotide
  Sense strand starting at position 3462 of SEQ ID NO: 1561109
ggcugaaggcuuuguaaac

SEQ ID NO: 1647532 - RNA, 19 nt, Artificial Sequence
  Description of Artificial Sequence: Synthetic oligonucleotide
  Antisense strand to SEQ ID NO: 1647531
guuuacaaagccuucagcc

SEQ ID NO: 1647533 - RNA, 19 nt, Artificial Sequence
  Description of Artificial Sequence: Synthetic oligonucleotide
  Sense strand starting at position 3463 of SEQ ID NO: 1561109
gcugaaggcuuuguaaaca

SEQ ID NO: 1647534 - RNA, 19 nt, Artificial Sequence
  Description of Artificial Sequence: Synthetic oligonucleotide
  Antisense strand to SEQ ID NO: 1647533
uguuuacaaagccuucagc

SEQ ID NO: 1647535 - RNA, 19 nt, Artificial Sequence
  Description of Artificial Sequence: Synthetic oligonucleotide
  Sense strand starting at position 3537 of SEQ ID NO: 1561109
gggauuugagcuggugugu

SEQ ID NO: 1647536 - RNA, 19 nt, Artificial Sequence
  Description of Artificial Sequence: Synthetic oligonucleotide
  Antisense strand to SEQ ID NO: 1647535
acacaccagcucaaauccc

SEQ ID NO: 1647537 - RNA, 19 nt, Artificial Sequence
  Description of Artificial Sequence: Synthetic oligonucleotide
  Sense strand starting at position 3542 of SEQ ID NO: 1561109
uugagcugguguguucaga

SEQ ID NO: 1647538 - RNA, 19 nt, Artificial Sequence
  Description of Artificial Sequence: Synthetic oligonucleotide
  Antisense strand to SEQ ID NO: 1647537
ucugaacacaccagcucaa

SEQ ID NO: 1647539 - RNA, 19 nt, Artificial Sequence
  Description of Artificial Sequence: Synthetic oligonucleotide
  Sense strand starting at position 3566 of SEQ ID NO: 1561109
gcuugugucccagcucuca

SEQ ID NO: 1647540 - RNA, 19 nt, Artificial Sequence
  Description of Artificial Sequence: Synthetic oligonucleotide
  Antisense strand to SEQ ID NO: 1647539
ugagagcugggacacaagc

SEQ ID NO: 1647541 - RNA, 19 nt, Artificial Sequence
  Description of Artificial Sequence: Synthetic oligonucleotide
  Sense strand starting at position 3598 of SEQ ID NO: 1561109
guaauaauuggcuaugguu

SEQ ID NO: 1647542 - RNA, 19 nt, Artificial Sequence
  Description of Artificial Sequence: Synthetic oligonucleotide
  Antisense strand to SEQ ID NO: 1647541
aaccauagccaauuauuac

SEQ ID NO: 1647543 - RNA, 19 nt, Artificial Sequence
  Description of Artificial Sequence: Synthetic oligonucleotide
  Sense strand starting at position 3660 of SEQ ID NO: 1561109
guggacauccgccauaaca

SEQ ID NO: 1647544 - RNA, 19 nt, Artificial Sequence
  Description of Artificial Sequence: Synthetic oligonucleotide
  Antisense strand to SEQ ID NO: 1647543
uguuauggcggauguccac

SEQ ID NO: 1647545 - RNA, 19 nt, Artificial Sequence
  Description of Artificial Sequence: Synthetic oligonucleotide
  Sense strand starting at position 3662 of SEQ ID NO: 1561109
ggacauccgccauaacaag

SEQ ID NO: 1647546 - RNA, 19 nt, Artificial Sequence
  Description of Artificial Sequence: Synthetic oligonucleotide
  Antisense strand to SEQ ID NO: 1647545
cuuguuauggcggaugucc

SEQ ID NO: 1647547 - RNA, 19 nt, Artificial Sequence
  Description of Artificial Sequence: Synthetic oligonucleotide
  Sense strand starting at position 3755 of SEQ ID NO: 1561109
cccugaggucuuugggaag

SEQ ID NO: 1647548 - RNA, 19 nt, Artificial Sequence
  Description of Artificial Sequence: Synthetic oligonucleotide
  Antisense strand to SEQ ID NO: 1647547
cuucccaaagaccucaggg

SEQ ID NO: 1647549 - RNA, 19 nt, Artificial Sequence
  Description of Artificial Sequence: Synthetic oligonucleotide
  Sense strand starting at position 3781 of SEQ ID NO: 1561109
ccaggucugacuugcagau

SEQ ID NO: 1647550 - RNA, 19 nt, Artificial Sequence
  Description of Artificial Sequence: Synthetic oligonucleotide
  Antisense strand to SEQ ID NO: 1647549
aucugcaagucagaccugg

SEQ ID NO: 1647551 - RNA, 19 nt, Artificial Sequence
  Description of Artificial Sequence: Synthetic oligonucleotide
  Sense strand starting at position 445 of SEQ ID NO: 1561110
agcccaucccuguguauca

SEQ ID NO: 1647552 - RNA, 19 nt, Artificial Sequence
  Description of Artificial Sequence: Synthetic oligonucleotide
  Antisense strand to SEQ ID NO: 1647551
ugauacacagggaugggcu

SEQ ID NO: 1647553 - RNA, 19 nt, Artificial Sequence
  Description of Artificial Sequence: Synthetic oligonucleotide
  Sense strand starting at position 452 of SEQ ID NO: 1561110
cccuguguaucacuccuaa

SEQ ID NO: 1647554 - RNA, 19 nt, Artificial Sequence
  Description of Artificial Sequence: Synthetic oligonucleotide
  Antisense strand to SEQ ID NO: 1647553
uuaggagugauacacaggg

SEQ ID NO: 1647555 - RNA, 19 nt, Artificial Sequence
  Description of Artificial Sequence: Synthetic oligonucleotide
  Sense strand starting at position 456 of SEQ ID NO: 1561110
guguaucacuccuaacgga

SEQ ID NO: 1647556 - RNA, 19 nt, Artificial Sequence
  Description of Artificial Sequence: Synthetic oligonucleotide
  Antisense strand to SEQ ID NO: 1647555
uccguuaggagugauacac

SEQ ID NO: 1647557 - RNA, 19 nt, Artificial Sequence
  Description of Artificial Sequence: Synthetic oligonucleotide
  Sense strand starting at position 520 of SEQ ID NO: 1561110
gcugccuauggaggaaauu

SEQ ID NO: 1647558 - RNA, 19 nt, Artificial Sequence
  Description of Artificial Sequence: Synthetic oligonucleotide
  Antisense strand to SEQ ID NO: 1647557
aauuuccuccauaggcagc

SEQ ID NO: 1647559 - RNA, 19 nt, Artificial Sequence
  Description of Artificial Sequence: Synthetic oligonucleotide
  Sense strand starting at position 1330 of SEQ ID NO: 1561110
cggugcuaggccuagcaaa

SEQ ID NO: 1647560 - RNA, 19 nt, Artificial Sequence
  Description of Artificial Sequence: Synthetic oligonucleotide
  Antisense strand to SEQ ID NO: 1647559
uuugcuaggccuagcaccg

SEQ ID NO: 1647561 - RNA, 19 nt, Artificial Sequence
  Description of Artificial Sequence: Synthetic oligonucleotide
  Sense strand starting at position 1414 of SEQ ID NO: 1561110
uugaaauauacaggugguu

SEQ ID NO: 1647562 - RNA, 19 nt, Artificial Sequence
  Description of Artificial Sequence: Synthetic oligonucleotide
  Antisense strand to SEQ ID NO: 1647561
aaccaccuguauauuucaa

SEQ ID NO: 1647563 - RNA, 19 nt, Artificial Sequence
  Description of Artificial Sequence: Synthetic oligonucleotide
  Sense strand starting at position 1425 of SEQ ID NO: 1561110
aggugguugggugaugaua

SEQ ID NO: 1647564 - RNA, 19 nt, Artificial Sequence
  Description of Artificial Sequence: Synthetic oligonucleotide
  Antisense strand to SEQ ID NO: 1647563
uaucaucacccaaccaccu

SEQ ID NO: 1647565 - RNA, 19 nt, Artificial Sequence
  Description of Artificial Sequence: Synthetic oligonucleotide
  Sense strand starting at position 1476 of SEQ ID NO: 1561110
gggaauggauagugggauu

SEQ ID NO: 1647566 - RNA, 19 nt, Artificial Sequence
  Description of Artificial Sequence: Synthetic oligonucleotide
  Antisense strand to SEQ ID NO: 1647565
aaucccacuauccauuccc

SEQ ID NO: 1647567 - RNA, 19 nt, Artificial Sequence
  Description of Artificial Sequence: Synthetic oligonucleotide
  Sense strand starting at position 1488 of SEQ ID NO: 1561110
ugggauuggauaugcagaa

SEQ ID NO: 1647568 - RNA, 19 nt, Artificial Sequence
  Description of Artificial Sequence: Synthetic oligonucleotide
  Antisense strand to SEQ ID NO: 1647567
uucugcauauccaauccca

SEQ ID NO: 1647569 - RNA, 19 nt, Artificial Sequence
  Description of Artificial Sequence: Synthetic oligonucleotide
  Sense strand starting at position 1645 of SEQ ID NO: 1561110
cagggucaaugaggugaaa

SEQ ID NO: 1647570 - RNA, 19 nt, Artificial Sequence
  Description of Artificial Sequence: Synthetic oligonucleotide
  Antisense strand to SEQ ID NO: 1647569
uuucaccucauugacccug

SEQ ID NO: 1647571 - RNA, 19 nt, Artificial Sequence
  Description of Artificial Sequence: Synthetic oligonucleotide
  Sense strand starting at position 1647 of SEQ ID NO: 1561110
gggucaaugaggugaaacu

SEQ ID NO: 1647572 - RNA, 19 nt, Artificial Sequence
  Description of Artificial Sequence: Synthetic oligonucleotide
  Antisense strand to SEQ ID NO: 1647571
aguuucaccucauugaccc

SEQ ID NO: 1647573 - RNA, 19 nt, Artificial Sequence
  Description of Artificial Sequence: Synthetic oligonucleotide
  Sense strand starting at position 1658 of SEQ ID NO: 1561110
gugaaacucaggcgaugaa

SEQ ID NO: 1647574 - RNA, 19 nt, Artificial Sequence
  Description of Artificial Sequence: Synthetic oligonucleotide
  Antisense strand to SEQ ID NO: 1647573
uucaucgccugaguuucac

SEQ ID NO: 1647575 - RNA, 19 nt, Artificial Sequence
  Description of Artificial Sequence: Synthetic oligonucleotide
  Sense strand starting at position 1661 of SEQ ID NO: 1561110
aaacucaggcgaugaaaga

SEQ ID NO: 1647576 - RNA, 19 nt, Artificial Sequence
  Description of Artificial Sequence: Synthetic oligonucleotide
  Antisense strand to SEQ ID NO: 1647575
ucuuucaucgccugaguuu

SEQ ID NO: 1647577 - RNA, 19 nt, Artificial Sequence
  Description of Artificial Sequence: Synthetic oligonucleotide
  Sense strand starting at position 1675 of SEQ ID NO: 1561110
aaagauacuuaagagagua

SEQ ID NO: 1647578 - RNA, 19 nt, Artificial Sequence
  Description of Artificial Sequence: Synthetic oligonucleotide
  Antisense strand to SEQ ID NO: 1647577
uacucucuuaaguaucuuu

SEQ ID NO: 1647579 - RNA, 19 nt, Artificial Sequence
  Description of Artificial Sequence: Synthetic oligonucleotide
  Sense strand starting at position 2221 of SEQ ID NO: 1561110
cuagauguccuccagucuu

SEQ ID NO: 1647580 - RNA, 19 nt, Artificial Sequence
  Description of Artificial Sequence: Synthetic oligonucleotide
  Antisense strand to SEQ ID NO: 1647579
aagacuggaggacaucuag

SEQ ID NO: 1647581 - RNA, 19 nt, Artificial Sequence
  Description of Artificial Sequence: Synthetic oligonucleotide
  Sense strand starting at position 2348 of SEQ ID NO: 1561110
ccgcacucuuauuuccaga

SEQ ID NO: 1647582 - RNA, 19 nt, Artificial Sequence
  Description of Artificial Sequence: Synthetic oligonucleotide
  Antisense strand to SEQ ID NO: 1647581
ucuggaaauaagagugcgg

SEQ ID NO: 1647583 - RNA, 19 nt, Artificial Sequence
  Description of Artificial Sequence: Synthetic oligonucleotide
  Sense strand starting at position 2815 of SEQ ID NO: 1561110
guugucgccaucuuuguua

SEQ ID NO: 1647584 - RNA, 19 nt, Artificial Sequence
  Description of Artificial Sequence: Synthetic oligonucleotide
  Antisense strand to SEQ ID NO: 1647583
uaacaaagauggcgacaac

SEQ ID NO: 1647585 - RNA, 19 nt, Artificial Sequence
  Description of Artificial Sequence: Synthetic oligonucleotide
  Sense strand starting at position 2820 of SEQ ID NO: 1561110
cgccaucuuuguuaaggga

SEQ ID NO: 1647586 - RNA, 19 nt, Artificial Sequence
  Description of Artificial Sequence: Synthetic oligonucleotide
  Antisense strand to SEQ ID NO: 1647585
ucccuuaacaaagauggcg

SEQ ID NO: 1647587 - RNA, 19 nt, Artificial Sequence
  Description of Artificial Sequence: Synthetic oligonucleotide
  Sense strand starting at position 2824 of SEQ ID NO: 1561110
aucuuuguuaagggagagu

SEQ ID NO: 1647588 - RNA, 19 nt, Artificial Sequence
  Description of Artificial Sequence: Synthetic oligonucleotide
  Antisense strand to SEQ ID NO: 1647587
acucucccuuaacaaagau

SEQ ID NO: 1647589 - RNA, 19 nt, Artificial Sequence
  Description of Artificial Sequence: Synthetic oligonucleotide
  Sense strand starting at position 2891 of SEQ ID NO: 1561110
ggaggucuuuagcugcaaa

SEQ ID NO: 1647590 - RNA, 19 nt, Artificial Sequence
  Description of Artificial Sequence: Synthetic oligonucleotide
  Antisense strand to SEQ ID NO: 1647589
uuugcagcuaaagaccucc

SEQ ID NO: 1647591 - RNA, 19 nt, Artificial Sequence
  Description of Artificial Sequence: Synthetic oligonucleotide
  Sense strand starting at position 2894 of SEQ ID NO: 1561110
ggucuuuagcugcaaagac

SEQ ID NO: 1647592 - RNA, 19 nt, Artificial Sequence
  Description of Artificial Sequence: Synthetic oligonucleotide
  Antisense strand to SEQ ID NO: 1647591
gucuuugcagcuaaagacc

SEQ ID NO: 1647593 - RNA, 19 nt, Artificial Sequence
  Description of Artificial Sequence: Synthetic oligonucleotide
  Sense strand starting at position 2918 of SEQ ID NO: 1561110
cucuaacacgcguaacaaa

SEQ ID NO: 1647594 - RNA, 19 nt, Artificial Sequence
  Description of Artificial Sequence: Synthetic oligonucleotide
  Antisense strand to SEQ ID NO: 1647593
uuuguuacgcguguuagag

SEQ ID NO: 1647595 - RNA, 19 nt, Artificial Sequence
  Description of Artificial Sequence: Synthetic oligonucleotide
  Sense strand starting at position 2982 of SEQ ID NO: 1561110
gagguuggaugaggcaaua

SEQ ID NO: 1647596 - RNA, 19 nt, Artificial Sequence
  Description of Artificial Sequence: Synthetic oligonucleotide
  Antisense strand to SEQ ID NO: 1647595
uauugccucauccaaccuc

SEQ ID NO: 1647597 - RNA, 19 nt, Artificial Sequence
  Description of Artificial Sequence: Synthetic oligonucleotide
  Sense strand starting at position 3116 of SEQ ID NO: 1561110
ugggauugagaaugugcaa

SEQ ID NO: 1647598 - RNA, 19 nt, Artificial Sequence
  Description of Artificial Sequence: Synthetic oligonucleotide
  Antisense strand to SEQ ID NO: 1647597
uugcacauucucaauccca

SEQ ID NO: 1647599 - RNA, 19 nt, Artificial Sequence
  Description of Artificial Sequence: Synthetic oligonucleotide
  Sense strand starting at position 3125 of SEQ ID NO: 1561110
gaaugugcaagguaaggau

SEQ ID NO: 1647600 - RNA, 19 nt, Artificial Sequence
  Description of Artificial Sequence: Synthetic oligonucleotide
  Antisense strand to SEQ ID NO: 1647599
auccuuaccuugcacauuc

SEQ ID NO: 1647601 - RNA, 19 nt, Artificial Sequence
  Description of Artificial Sequence: Synthetic oligonucleotide
  Sense strand starting at position 3185 of SEQ ID NO: 1561110
gacagacacuucuggaaug

SEQ ID NO: 1647602 - RNA, 19 nt, Artificial Sequence
  Description of Artificial Sequence: Synthetic oligonucleotide
  Antisense strand to SEQ ID NO: 1647601
cauuccagaagugucuguc

SEQ ID NO: 1647603 - RNA, 19 nt, Artificial Sequence
  Description of Artificial Sequence: Synthetic oligonucleotide
  Sense strand starting at position 3214 of SEQ ID NO: 1561110
aggagaggcucauuaauuc

SEQ ID NO: 1647604 - RNA, 19 nt, Artificial Sequence
  Description of Artificial Sequence: Synthetic oligonucleotide
  Antisense strand to SEQ ID NO: 1647603
gaauuaaugagccucuccu

SEQ ID NO: 1647605 - RNA, 19 nt, Artificial Sequence
  Description of Artificial Sequence: Synthetic oligonucleotide
  Sense strand starting at position 3262 of SEQ ID NO: 1561110
auggaagcggcaugagaua

SEQ ID NO: 1647606 - RNA, 19 nt, Artificial Sequence
  Description of Artificial Sequence: Synthetic oligonucleotide
  Antisense strand to SEQ ID NO: 1647605
uaucucaugccgcuuccau

SEQ ID NO: 1647607 - RNA, 19 nt, Artificial Sequence
  Description of Artificial Sequence: Synthetic oligonucleotide
  Sense strand starting at position 3267 of SEQ ID NO: 1561110
agcggcaugagauaaacau

SEQ ID NO: 1647608 - RNA, 19 nt, Artificial Sequence
  Description of Artificial Sequence: Synthetic oligonucleotide
  Antisense strand to SEQ ID NO: 1647607
auguuuaucucaugccgcu

SEQ ID NO: 1647609 - RNA, 19 nt, Artificial Sequence
  Description of Artificial Sequence: Synthetic oligonucleotide
  Sense strand starting at position 3282 of SEQ ID NO: 1561110
acaucugcccagugaauga

SEQ ID NO: 1647610 - RNA, 19 nt, Artificial Sequence
  Description of Artificial Sequence: Synthetic oligonucleotide
  Antisense strand to SEQ ID NO: 1647609
ucauucacugggcagaugu

SEQ ID NO: 1647611 - RNA, 19 nt, Artificial Sequence
  Description of Artificial Sequence: Synthetic oligonucleotide
  Sense strand starting at position 3338 of SEQ ID NO: 1561110
acaguaucucuaggucaaa

SEQ ID NO: 1647612 - RNA, 19 nt, Artificial Sequence
  Description of Artificial Sequence: Synthetic oligonucleotide
  Antisense strand to SEQ ID NO: 1647611
uuugaccuagagauacugu

SEQ ID NO: 1647613 - RNA, 19 nt, Artificial Sequence
  Description of Artificial Sequence: Synthetic oligonucleotide
  Sense strand starting at position 3339 of SEQ ID NO: 1561110
caguaucucuaggucaaag

SEQ ID NO: 1647614 - RNA, 19 nt, Artificial Sequence
  Description of Artificial Sequence: Synthetic oligonucleotide
  Antisense strand to SEQ ID NO: 1647613
cuuugaccuagagauacug

SEQ ID NO: 1647615 - RNA, 19 nt, Artificial Sequence
  Description of Artificial Sequence: Synthetic oligonucleotide
  Sense strand starting at position 3412 of SEQ ID NO: 1561110
aagugaagauguugacaga

SEQ ID NO: 1647616 - RNA, 19 nt, Artificial Sequence
  Description of Artificial Sequence: Synthetic oligonucleotide
  Antisense strand to SEQ ID NO: 1647615
ucugucaacaucuucacuu

SEQ ID NO: 1647617 - RNA, 19 nt, Artificial Sequence
  Description of Artificial Sequence: Synthetic oligonucleotide
  Sense strand starting at position 3468 of SEQ ID NO: 1561110
gcaaguauauauuaggaga

SEQ ID NO: 1647618 - RNA, 19 nt, Artificial Sequence
  Description of Artificial Sequence: Synthetic oligonucleotide
  Antisense strand to SEQ ID NO: 1647617
ucuccuaauauauacuugc

SEQ ID NO: 1647619 - RNA, 19 nt, Artificial Sequence
  Description of Artificial Sequence: Synthetic oligonucleotide
  Sense strand starting at position 3470 of SEQ ID NO: 1561110
aaguauauauuaggagacu

SEQ ID NO: 1647620 - RNA, 19 nt, Artificial Sequence
  Description of Artificial Sequence: Synthetic oligonucleotide
  Antisense strand to SEQ ID NO: 1647619
agucuccuaauauauacuu

SEQ ID NO: 1647621 - RNA, 19 nt, Artificial Sequence
  Description of Artificial Sequence: Synthetic oligonucleotide
  Sense strand starting at position 3471 of SEQ ID NO: 1561110
aguauauauuaggagacuu

SEQ ID NO: 1647622 - RNA, 19 nt, Artificial Sequence
  Description of Artificial Sequence: Synthetic oligonucleotide
  Antisense strand to SEQ ID NO: 1647621
aagucuccuaauauauacu

SEQ ID NO: 1647623 - RNA, 19 nt, Artificial Sequence
  Description of Artificial Sequence: Synthetic oligonucleotide
  Sense strand starting at position 3516 of SEQ ID NO: 1561110
agauaugcauuaggagaca

SEQ ID NO: 1647624 - RNA, 19 nt, Artificial Sequence
  Description of Artificial Sequence: Synthetic oligonucleotide
  Antisense strand to SEQ ID NO: 1647623
ugucuccuaaugcauaucu

SEQ ID NO: 1647625 - RNA, 19 nt, Artificial Sequence
  Description of Artificial Sequence: Synthetic oligonucleotide
  Sense strand starting at position 3547 of SEQ ID NO: 1561110
acuagaaagugacaaaugu

SEQ ID NO: 1647626 - RNA, 19 nt, Artificial Sequence
  Description of Artificial Sequence: Synthetic oligonucleotide
  Antisense strand to SEQ ID NO: 1647625
acauuugucacuuucuagu

SEQ ID NO: 1647627 - RNA, 19 nt, Artificial Sequence
  Description of Artificial Sequence: Synthetic oligonucleotide
  Sense strand starting at position 3555 of SEQ ID NO: 1561110
gugacaaauguaggcugua

SEQ ID NO: 1647628 - RNA, 19 nt, Artificial Sequence
  Description of Artificial Sequence: Synthetic oligonucleotide
  Antisense strand to SEQ ID NO: 1647627
uacagccuacauuugucac

SEQ ID NO: 1647629 - RNA, 19 nt, Artificial Sequence
  Description of Artificial Sequence: Synthetic oligonucleotide
  Sense strand starting at position 362 of SEQ ID NO: 1561111
gguauugacugagaaggga

SEQ ID NO: 1647630 - RNA, 19 nt, Artificial Sequence
  Description of Artificial Sequence: Synthetic oligonucleotide
  Antisense strand to SEQ ID NO: 1647629
ucccuucucagucaauacc

SEQ ID NO: 1647631 - RNA, 19 nt, Artificial Sequence
  Description of Artificial Sequence: Synthetic oligonucleotide
  Sense strand starting at position 400 of SEQ ID NO: 1561111
gauugaaauguucgguauc

SEQ ID NO: 1647632 - RNA, 19 nt, Artificial Sequence
  Description of Artificial Sequence: Synthetic oligonucleotide
  Antisense strand to SEQ ID NO: 1647631
gauaccgaacauuucaauc

SEQ ID NO: 1647633 - RNA, 19 nt, Artificial Sequence
  Description of Artificial Sequence: Synthetic oligonucleotide
  Sense strand starting at position 401 of SEQ ID NO: 1561111
auugaaauguucgguaucu

SEQ ID NO: 1647634 - RNA, 19 nt, Artificial Sequence
  Description of Artificial Sequence: Synthetic oligonucleotide
  Antisense strand to SEQ ID NO: 1647633
agauaccgaacauuucaau

SEQ ID NO: 1647635 - RNA, 19 nt, Artificial Sequence
  Description of Artificial Sequence: Synthetic oligonucleotide
  Sense strand starting at position 402 of SEQ ID NO: 1561111
uugaaauguucgguaucuu

SEQ ID NO: 1647636 - RNA, 19 nt, Artificial Sequence
  Description of Artificial Sequence: Synthetic oligonucleotide
  Antisense strand to SEQ ID NO: 1647635
aagauaccgaacauuucaa

SEQ ID NO: 1647637 - RNA, 19 nt, Artificial Sequence
  Description of Artificial Sequence: Synthetic oligonucleotide
  Sense strand starting at position 403 of SEQ ID NO: 1561111
ugaaauguucgguaucuug

SEQ ID NO: 1647638 - RNA, 19 nt, Artificial Sequence
  Description of Artificial Sequence: Synthetic oligonucleotide
  Antisense strand to SEQ ID NO: 1647637
caagauaccgaacauuuca

SEQ ID NO: 1647639 - RNA, 19 nt, Artificial Sequence
  Description of Artificial Sequence: Synthetic oligonucleotide
  Sense strand starting at position 433 of SEQ ID NO: 1561111
ggcuacacgguguauagau

SEQ ID NO: 1647640 - RNA, 19 nt, Artificial Sequence
  Description of Artificial Sequence: Synthetic oligonucleotide
  Antisense strand to SEQ ID NO: 1647639
aucuauacaccguguagcc

SEQ ID NO: 1647641 - RNA, 19 nt, Artificial Sequence
  Description of Artificial Sequence: Synthetic oligonucleotide
  Sense strand starting at position 473 of SEQ ID NO: 1561111
ucacuuuacugacuuguua

SEQ ID NO: 1647642 - RNA, 19 nt, Artificial Sequence
  Description of Artificial Sequence: Synthetic oligonucleotide
  Antisense strand to SEQ ID NO: 1647641
uaacaagucaguaaaguga

SEQ ID NO: 1647643 - RNA, 19 nt, Artificial Sequence
  Description of Artificial Sequence: Synthetic oligonucleotide
  Sense strand starting at position 477 of SEQ ID NO: 1561111
uuuacugacuuguuaguua

SEQ ID NO: 1647644 - RNA, 19 nt, Artificial Sequence
  Description of Artificial Sequence: Synthetic oligonucleotide
  Antisense strand to SEQ ID NO: 1647643
uaacuaacaagucaguaaa

SEQ ID NO: 1647645 - RNA, 19 nt, Artificial Sequence
  Description of Artificial Sequence: Synthetic oligonucleotide
  Sense strand starting at position 481 of SEQ ID NO: 1561111
cugacuuguuaguuacacu

SEQ ID NO: 1647646 - RNA, 19 nt, Artificial Sequence
  Description of Artificial Sequence: Synthetic oligonucleotide
  Antisense strand to SEQ ID NO: 1647645
aguguaacuaacaagucag

SEQ ID NO: 1647647 - RNA, 19 nt, Artificial Sequence
  Description of Artificial Sequence: Synthetic oligonucleotide
  Sense strand starting at position 589 of SEQ ID NO: 1561111
ccacaucaguaagauuuga

SEQ ID NO: 1647648 - RNA, 19 nt, Artificial Sequence
  Description of Artificial Sequence: Synthetic oligonucleotide
  Antisense strand to SEQ ID NO: 1647647
ucaaaucuuacugaugugg

SEQ ID NO: 1647649 - RNA, 19 nt, Artificial Sequence
  Description of Artificial Sequence: Synthetic oligonucleotide
  Sense strand starting at position 594 of SEQ ID NO: 1561111
ucaguaagauuugauuacu

SEQ ID NO: 1647650 - RNA, 19 nt, Artificial Sequence
  Description of Artificial Sequence: Synthetic oligonucleotide
  Antisense strand to SEQ ID NO: 1647649
aguaaucaaaucuuacuga

SEQ ID NO: 1647651 - RNA, 19 nt, Artificial Sequence
  Description of Artificial Sequence: Synthetic oligonucleotide
  Sense strand starting at position 603 of SEQ ID NO: 1561111
uuugauuacucagacugga

SEQ ID NO: 1647652 - RNA, 19 nt, Artificial Sequence
  Description of Artificial Sequence: Synthetic oligonucleotide
  Antisense strand to SEQ ID NO: 1647651
uccagucugaguaaucaaa

SEQ ID NO: 1647653 - RNA, 19 nt, Artificial Sequence
  Description of Artificial Sequence: Synthetic oligonucleotide
  Sense strand starting at position 616 of SEQ ID NO: 1561111
acuggauuguggguucaag

SEQ ID NO: 1647654 - RNA, 19 nt, Artificial Sequence
  Description of Artificial Sequence: Synthetic oligonucleotide
  Antisense strand to SEQ ID NO: 1647653
cuugaacccacaauccagu

SEQ ID NO: 1647655 - RNA, 19 nt, Artificial Sequence
  Description of Artificial Sequence: Synthetic oligonucleotide
  Sense strand starting at position 628 of SEQ ID NO: 1561111
guucaaggguguuggguau

SEQ ID NO: 1647656 - RNA, 19 nt, Artificial Sequence
  Description of Artificial Sequence: Synthetic oligonucleotide
  Antisense strand to SEQ ID NO: 1647655
auacccaacacccuugaac

SEQ ID NO: 1647657 - RNA, 19 nt, Artificial Sequence
  Description of Artificial Sequence: Synthetic oligonucleotide
  Sense strand starting at position 632 of SEQ ID NO: 1561111
aaggguguuggguauagua

SEQ ID NO: 1647658 - RNA, 19 nt, Artificial Sequence
  Description of Artificial Sequence: Synthetic oligonucleotide
  Antisense strand to SEQ ID NO: 1647657
uacuauacccaacacccuu

SEQ ID NO: 1647659 - RNA, 19 nt, Artificial Sequence
  Description of Artificial Sequence: Synthetic oligonucleotide
  Sense strand starting at position 634 of SEQ ID NO: 1561111
ggguguuggguauaguauu

SEQ ID NO: 1647660 - RNA, 19 nt, Artificial Sequence
  Description of Artificial Sequence: Synthetic oligonucleotide
  Antisense strand to SEQ ID NO: 1647659
aauacuauacccaacaccc

SEQ ID NO: 1647661 - RNA, 19 nt, Artificial Sequence
  Description of Artificial Sequence: Synthetic oligonucleotide
  Sense strand starting at position 640 of SEQ ID NO: 1561111
uggguauaguauuccguau

SEQ ID NO: 1647662 - RNA, 19 nt, Artificial Sequence
  Description of Artificial Sequence: Synthetic oligonucleotide
  Antisense strand to SEQ ID NO: 1647661
auacggaauacuauaccca

SEQ ID NO: 1647663 - RNA, 19 nt, Artificial Sequence
  Description of Artificial Sequence: Synthetic oligonucleotide
  Sense strand starting at position 642 of SEQ ID NO: 1561111
gguauaguauuccguaucu

SEQ ID NO: 1647664 - RNA, 19 nt, Artificial Sequence
  Description of Artificial Sequence: Synthetic oligonucleotide
  Antisense strand to SEQ ID NO: 1647663
agauacggaauacuauacc

SEQ ID NO: 1647665 - RNA, 19 nt, Artificial Sequence
  Description of Artificial Sequence: Synthetic oligonucleotide
  Sense strand starting at position 644 of SEQ ID NO: 1561111
uauaguauuccguaucuga

SEQ ID NO: 1647666 - RNA, 19 nt, Artificial Sequence
  Description of Artificial Sequence: Synthetic oligonucleotide
  Antisense strand to SEQ ID NO: 1647665
ucagauacggaauacuaua

SEQ ID NO: 1647667 - RNA, 19 nt, Artificial Sequence
  Description of Artificial Sequence: Synthetic oligonucleotide
  Sense strand starting at position 653 of SEQ ID NO: 1561111
ccguaucugaacuguuaga

SEQ ID NO: 1647668 - RNA, 19 nt, Artificial Sequence
  Description of Artificial Sequence: Synthetic oligonucleotide
  Antisense strand to SEQ ID NO: 1647667
ucuaacaguucagauacgg

SEQ ID NO: 1647669 - RNA, 19 nt, Artificial Sequence
  Description of Artificial Sequence: Synthetic oligonucleotide
  Sense strand starting at position 658 of SEQ ID NO: 1561111
ucugaacuguuagagaaca

SEQ ID NO: 1647670 - RNA, 19 nt, Artificial Sequence
  Description of Artificial Sequence: Synthetic oligonucleotide
  Antisense strand to SEQ ID NO: 1647669
uguucucuaacaguucaga

SEQ ID NO: 1647671 - RNA, 19 nt, Artificial Sequence
  Description of Artificial Sequence: Synthetic oligonucleotide
  Sense strand starting at position 903 of SEQ ID NO: 1561111
ugacuucucugagggaggu

SEQ ID NO: 1647672 - RNA, 19 nt, Artificial Sequence
  Description of Artificial Sequence: Synthetic oligonucleotide
  Antisense strand to SEQ ID NO: 1647671
accucccucagagaaguca

SEQ ID NO: 1647673 - RNA, 19 nt, Artificial Sequence
  Description of Artificial Sequence: Synthetic oligonucleotide
  Sense strand starting at position 1357 of SEQ ID NO: 1561111
uggagagaugucuggguag

SEQ ID NO: 1647674 - RNA, 19 nt, Artificial Sequence
  Description of Artificial Sequence: Synthetic oligonucleotide
  Antisense strand to SEQ ID NO: 1647673
cuacccagacaucucucca

SEQ ID NO: 1647675 - RNA, 19 nt, Artificial Sequence
  Description of Artificial Sequence: Synthetic oligonucleotide
  Sense strand starting at position 1603 of SEQ ID NO: 1561111
aauguugagagcugggaga

SEQ ID NO: 1647676 - RNA, 19 nt, Artificial Sequence
  Description of Artificial Sequence: Synthetic oligonucleotide
  Antisense strand to SEQ ID NO: 1647675
ucucccagcucucaacauu

SEQ ID NO: 1647677 - RNA, 19 nt, Artificial Sequence
  Description of Artificial Sequence: Synthetic oligonucleotide
  Sense strand starting at position 2221 of SEQ ID NO: 1561111
gaccuugagggcuggagau

SEQ ID NO: 1647678 - RNA, 19 nt, Artificial Sequence
  Description of Artificial Sequence: Synthetic oligonucleotide
  Antisense strand to SEQ ID NO: 1647677
aucuccagcccucaagguc

SEQ ID NO: 1647679 - RNA, 19 nt, Artificial Sequence
  Description of Artificial Sequence: Synthetic oligonucleotide
  Sense strand starting at position 2515 of SEQ ID NO: 1561111
guggaaacaucgugggugu

SEQ ID NO: 1647680 - RNA, 19 nt, Artificial Sequence
  Description of Artificial Sequence: Synthetic oligonucleotide
  Antisense strand to SEQ ID NO: 1647679
acacccacgauguuuccac

SEQ ID NO: 1647681 - RNA, 19 nt, Artificial Sequence
  Description of Artificial Sequence: Synthetic oligonucleotide
  Sense strand starting at position 2517 of SEQ ID NO: 1561111
ggaaacaucgugggugugu

SEQ ID NO: 1647682 - RNA, 19 nt, Artificial Sequence
  Description of Artificial Sequence: Synthetic oligonucleotide
  Antisense strand to SEQ ID NO: 1647681
acacacccacgauguuucc

SEQ ID NO: 1647683 - RNA, 19 nt, Artificial Sequence
  Description of Artificial Sequence: Synthetic oligonucleotide
  Sense strand starting at position 2724 of SEQ ID NO: 1561111
cagagaagcgcugguauaa

SEQ ID NO: 1647684 - RNA, 19 nt, Artificial Sequence
  Description of Artificial Sequence: Synthetic oligonucleotide
  Antisense strand to SEQ ID NO: 1647683
uuauaccagcgcuucucug

SEQ ID NO: 1647685 - RNA, 19 nt, Artificial Sequence
  Description of Artificial Sequence: Synthetic oligonucleotide
  Sense strand starting at position 3311 of SEQ ID NO: 1561111
ggccguauaucaccuguca

SEQ ID NO: 1647686 - RNA, 19 nt, Artificial Sequence
  Description of Artificial Sequence: Synthetic oligonucleotide
  Antisense strand to SEQ ID NO: 1647685
ugacaggugauauacggcc

SEQ ID NO: 1647687 - RNA, 19 nt, Artificial Sequence
  Description of Artificial Sequence: Synthetic oligonucleotide
  Sense strand starting at position 3426 of SEQ ID NO: 1561111
agccguuucccgggcaaca

SEQ ID NO: 1647688 - RNA, 19 nt, Artificial Sequence
  Description of Artificial Sequence: Synthetic oligonucleotide
  Antisense strand to SEQ ID NO: 1647687
uguugcccgggaaacggcu

SEQ ID NO: 1647689 - RNA, 19 nt, Artificial Sequence
  Description of Artificial Sequence: Synthetic oligonucleotide
  Sense strand starting at position 393 of SEQ ID NO: 1561112
cauguuagagcucagaugu

SEQ ID NO: 1647690 - RNA, 19 nt, Artificial Sequence
  Description of Artificial Sequence: Synthetic oligonucleotide
  Antisense strand to SEQ ID NO: 1647689
acaucugagcucuaacaug

SEQ ID NO: 1647691 - RNA, 19 nt, Artificial Sequence
  Description of Artificial Sequence: Synthetic oligonucleotide
  Sense strand starting at position 517 of SEQ ID NO: 1561112
acuuaaucucauggcaagu

SEQ ID NO: 1647692 - RNA, 19 nt, Artificial Sequence
  Description of Artificial Sequence: Synthetic oligonucleotide
  Antisense strand to SEQ ID NO: 1647691
acuugccaugagauuaagu

SEQ ID NO: 1647693 - RNA, 19 nt, Artificial Sequence
  Description of Artificial Sequence: Synthetic oligonucleotide
  Sense strand starting at position 559 of SEQ ID NO: 1561112
ugccucucccacuggaaua

SEQ ID NO: 1647694 - RNA, 19 nt, Artificial Sequence
  Description of Artificial Sequence: Synthetic oligonucleotide
  Antisense strand to SEQ ID NO: 1647693
uauuccagugggagaggca

SEQ ID NO: 1647695 - RNA, 19 nt, Artificial Sequence
  Description of Artificial Sequence: Synthetic oligonucleotide
  Sense strand starting at position 573 of SEQ ID NO: 1561112
gaauauuagcucugugaau

SEQ ID NO: 1647696 - RNA, 19 nt, Artificial Sequence
  Description of Artificial Sequence: Synthetic oligonucleotide
  Antisense strand to SEQ ID NO: 1647695
auucacagagcuaauauuc

SEQ ID NO: 1647697 - RNA, 19 nt, Artificial Sequence
  Description of Artificial Sequence: Synthetic oligonucleotide
  Sense strand starting at position 574 of SEQ ID NO: 1561112
aauauuagcucugugaaug

SEQ ID NO: 1647698 - RNA, 19 nt, Artificial Sequence
  Description of Artificial Sequence: Synthetic oligonucleotide
  Antisense strand to SEQ ID NO: 1647697
cauucacagagcuaauauu

SEQ ID NO: 1647699 - RNA, 19 nt, Artificial Sequence
  Description of Artificial Sequence: Synthetic oligonucleotide
  Sense strand starting at position 575 of SEQ ID NO: 1561112
auauuagcucugugaaugc

SEQ ID NO: 1647700 - RNA, 19 nt, Artificial Sequence
  Description of Artificial Sequence: Synthetic oligonucleotide
  Antisense strand to SEQ ID NO: 1647699
gcauucacagagcuaauau

SEQ ID NO: 1647701 - RNA, 19 nt, Artificial Sequence
  Description of Artificial Sequence: Synthetic oligonucleotide
  Sense strand starting at position 601 of SEQ ID NO: 1561112
cagcuagucugaguuaacu

SEQ ID NO: 1647702 - RNA, 19 nt, Artificial Sequence
  Description of Artificial Sequence: Synthetic oligonucleotide
  Antisense strand to SEQ ID NO: 1647701
aguuaacucagacuagcug

SEQ ID NO: 1647703 - RNA, 19 nt, Artificial Sequence
  Description of Artificial Sequence: Synthetic oligonucleotide
  Sense strand starting at position 603 of SEQ ID NO: 1561112
gcuagucugaguuaacugu

SEQ ID NO: 1647704 - RNA, 19 nt, Artificial Sequence
  Description of Artificial Sequence: Synthetic oligonucleotide
  Antisense strand to SEQ ID NO: 1647703
acaguuaacucagacuagc

SEQ ID NO: 1647705 - RNA, 19 nt, Artificial Sequence
  Description of Artificial Sequence: Synthetic oligonucleotide
  Sense strand starting at position 607 of SEQ ID NO: 1561112
gucugaguuaacuguuaua

SEQ ID NO: 1647706 - RNA, 19 nt, Artificial Sequence
  Description of Artificial Sequence: Synthetic oligonucleotide
  Antisense strand to SEQ ID NO: 1647705
uauaacaguuaacucagac

SEQ ID NO: 1647707 - RNA, 19 nt, Artificial Sequence
  Description of Artificial Sequence: Synthetic oligonucleotide
  Sense strand starting at position 723 of SEQ ID NO: 1561112
gcuugucugaagcaguuaa

SEQ ID NO: 1647708 - RNA, 19 nt, Artificial Sequence
  Description of Artificial Sequence: Synthetic oligonucleotide
  Antisense strand to SEQ ID NO: 1647707
uuaacugcuucagacaagc

SEQ ID NO: 1647709 - RNA, 19 nt, Artificial Sequence
  Description of Artificial Sequence: Synthetic oligonucleotide
  Sense strand starting at position 727 of SEQ ID NO: 1561112
gucugaagcaguuaagguu

SEQ ID NO: 1647710 - RNA, 19 nt, Artificial Sequence
  Description of Artificial Sequence: Synthetic oligonucleotide
  Antisense strand to SEQ ID NO: 1647709
aaccuuaacugcuucagac

SEQ ID NO: 1647711 - RNA, 19 nt, Artificial Sequence
  Description of Artificial Sequence: Synthetic oligonucleotide
  Sense strand starting at position 733 of SEQ ID NO: 1561112
agcaguuaagguuauaaca

SEQ ID NO: 1647712 - RNA, 19 nt, Artificial Sequence
  Description of Artificial Sequence: Synthetic oligonucleotide
  Antisense strand to SEQ ID NO: 1647711
uguuauaaccuuaacugcu

SEQ ID NO: 1647713 - RNA, 19 nt, Artificial Sequence
  Description of Artificial Sequence: Synthetic oligonucleotide
  Sense strand starting at position 780 of SEQ ID NO: 1561112
acacuuccuuaagagugua

SEQ ID NO: 1647714 - RNA, 19 nt, Artificial Sequence
  Description of Artificial Sequence: Synthetic oligonucleotide
  Antisense strand to SEQ ID NO: 1647713
uacacucuuaaggaagugu

SEQ ID NO: 1647715 - RNA, 19 nt, Artificial Sequence
  Description of Artificial Sequence: Synthetic oligonucleotide
  Sense strand starting at position 783 of SEQ ID NO: 1561112
cuuccuuaagaguguagaa

SEQ ID NO: 1647716 - RNA, 19 nt, Artificial Sequence
  Description of Artificial Sequence: Synthetic oligonucleotide
  Antisense strand to SEQ ID NO: 1647715
uucuacacucuuaaggaag

SEQ ID NO: 1647717 - RNA, 19 nt, Artificial Sequence
  Description of Artificial Sequence: Synthetic oligonucleotide
  Sense strand starting at position 785 of SEQ ID NO: 1561112
uccuuaagaguguagaagu

SEQ ID NO: 1647718 - RNA, 19 nt, Artificial Sequence
  Description of Artificial Sequence: Synthetic oligonucleotide
  Antisense strand to SEQ ID NO: 1647717
acuucuacacucuuaagga

SEQ ID NO: 1647719 - RNA, 19 nt, Artificial Sequence
  Description of Artificial Sequence: Synthetic oligonucleotide
  Sense strand starting at position 1101 of SEQ ID NO: 1561112
cugagcuuuggccauggaa

SEQ ID NO: 1647720 - RNA, 19 nt, Artificial Sequence
  Description of Artificial Sequence: Synthetic oligonucleotide
  Antisense strand to SEQ ID NO: 1647719
uuccauggccaaagcucag

SEQ ID NO: 1647721 - RNA, 19 nt, Artificial Sequence
  Description of Artificial Sequence: Synthetic oligonucleotide
  Sense strand starting at position 1103 of SEQ ID NO: 1561112
gagcuuuggccauggaacu

SEQ ID NO: 1647722 - RNA, 19 nt, Artificial Sequence
  Description of Artificial Sequence: Synthetic oligonucleotide
  Antisense strand to SEQ ID NO: 1647721
aguuccauggccaaagcuc

SEQ ID NO: 1647723 - RNA, 19 nt, Artificial Sequence
  Description of Artificial Sequence: Synthetic oligonucleotide
  Sense strand starting at position 1133 of SEQ ID NO: 1561112
ggagaaggcuggucuucaa

SEQ ID NO: 1647724 - RNA, 19 nt, Artificial Sequence
  Description of Artificial Sequence: Synthetic oligonucleotide
  Antisense strand to SEQ ID NO: 1647723
uugaagaccagccuucucc

SEQ ID NO: 1647725 - RNA, 19 nt, Artificial Sequence
  Description of Artificial Sequence: Synthetic oligonucleotide
  Sense strand starting at position 1193 of SEQ ID NO: 1561112
ccacgccuucuuggucaau

SEQ ID NO: 1647726 - RNA, 19 nt, Artificial Sequence
  Description of Artificial Sequence: Synthetic oligonucleotide
  Antisense strand to SEQ ID NO: 1647725
auugaccaagaaggcgugg

SEQ ID NO: 1647727 - RNA, 19 nt, Artificial Sequence
  Description of Artificial Sequence: Synthetic oligonucleotide
  Sense strand starting at position 1194 of SEQ ID NO: 1561112
cacgccuucuuggucaaua

SEQ ID NO: 1647728 - RNA, 19 nt, Artificial Sequence
  Description of Artificial Sequence: Synthetic oligonucleotide
  Antisense strand to SEQ ID NO: 1647727
uauugaccaagaaggcgug

SEQ ID NO: 1647729 - RNA, 19 nt, Artificial Sequence
  Description of Artificial Sequence: Synthetic oligonucleotide
  Sense strand starting at position 2251 of SEQ ID NO: 1561112
cgcagcuuuccugugaauu

SEQ ID NO: 1647730 - RNA, 19 nt, Artificial Sequence
  Description of Artificial Sequence: Synthetic oligonucleotide
  Antisense strand to SEQ ID NO: 1647729
aauucacaggaaagcugcg

SEQ ID NO: 1647731 - RNA, 19 nt, Artificial Sequence
  Description of Artificial Sequence: Synthetic oligonucleotide
  Sense strand starting at position 2252 of SEQ ID NO: 1561112
gcagcuuuccugugaauuc

SEQ ID NO: 1647732 - RNA, 19 nt, Artificial Sequence
  Description of Artificial Sequence: Synthetic oligonucleotide
  Antisense strand to SEQ ID NO: 1647731
gaauucacaggaaagcugc

SEQ ID NO: 1647733 - RNA, 19 nt, Artificial Sequence
  Description of Artificial Sequence: Synthetic oligonucleotide
  Sense strand starting at position 2263 of SEQ ID NO: 1561112
gugaauuccuuccugaauu

SEQ ID NO: 1647734 - RNA, 19 nt, Artificial Sequence
  Description of Artificial Sequence: Synthetic oligonucleotide
  Antisense strand to SEQ ID NO: 1647733
aauucaggaaggaauucac

SEQ ID NO: 1647735 - RNA, 19 nt, Artificial Sequence
  Description of Artificial Sequence: Synthetic oligonucleotide
  Sense strand starting at position 2296 of SEQ ID NO: 1561112
gcucaugcuccagggcuua

SEQ ID NO: 1647736 - RNA, 19 nt, Artificial Sequence
  Description of Artificial Sequence: Synthetic oligonucleotide
  Antisense strand to SEQ ID NO: 1647735
uaagcccuggagcaugagc

SEQ ID NO: 1647737 - RNA, 19 nt, Artificial Sequence
  Description of Artificial Sequence: Synthetic oligonucleotide
  Sense strand starting at position 2342 of SEQ ID NO: 1561112
cagacuggucccugaguca

SEQ ID NO: 1647738 - RNA, 19 nt, Artificial Sequence
  Description of Artificial Sequence: Synthetic oligonucleotide
  Antisense strand to SEQ ID NO: 1647737
ugacucagggaccagucug

SEQ ID NO: 1647739 - RNA, 19 nt, Artificial Sequence
  Description of Artificial Sequence: Synthetic oligonucleotide
  Sense strand starting at position 2449 of SEQ ID NO: 1561112
gaggcugggucgcuagaaa

SEQ ID NO: 1647740 - RNA, 19 nt, Artificial Sequence
  Description of Artificial Sequence: Synthetic oligonucleotide
  Antisense strand to SEQ ID NO: 1647739
uuucuagcgacccagccuc

SEQ ID NO: 1647741 - RNA, 19 nt, Artificial Sequence
  Description of Artificial Sequence: Synthetic oligonucleotide
  Sense strand starting at position 2541 of SEQ ID NO: 1561112
aggugauaggcccaugcaa

SEQ ID NO: 1647742 - RNA, 19 nt, Artificial Sequence
  Description of Artificial Sequence: Synthetic oligonucleotide
  Antisense strand to SEQ ID NO: 1647741
uugcaugggccuaucaccu

SEQ ID NO: 1647743 - RNA, 19 nt, Artificial Sequence
  Description of Artificial Sequence: Synthetic oligonucleotide
  Sense strand starting at position 2713 of SEQ ID NO: 1561112
agaggaguuacgugaacag

SEQ ID NO: 1647744 - RNA, 19 nt, Artificial Sequence
  Description of Artificial Sequence: Synthetic oligonucleotide
  Antisense strand to SEQ ID NO: 1647743
cuguucacguaacuccucu

SEQ ID NO: 1647745 - RNA, 19 nt, Artificial Sequence
  Description of Artificial Sequence: Synthetic oligonucleotide
  Sense strand starting at position 3105 of SEQ ID NO: 1561112
uuguauuacaggcgugaac

SEQ ID NO: 1647746 - RNA, 19 nt, Artificial Sequence
  Description of Artificial Sequence: Synthetic oligonucleotide
  Antisense strand to SEQ ID NO: 1647745
guucacgccuguaauacaa

SEQ ID NO: 1647747 - RNA, 19 nt, Artificial Sequence
  Description of Artificial Sequence: Synthetic oligonucleotide
  Sense strand starting at position 3143 of SEQ ID NO: 1561112
acacuuugacagugcuaua

SEQ ID NO: 1647748 - RNA, 19 nt, Artificial Sequence
  Description of Artificial Sequence: Synthetic oligonucleotide
  Antisense strand to SEQ ID NO: 1647747
uauagcacugucaaagugu

SEQ ID NO: 1647749 - RNA, 19 nt, Artificial Sequence
  Description of Artificial Sequence: Synthetic oligonucleotide
  Sense strand starting at position 3148 of SEQ ID NO: 1561112
uugacagugcuauacagaa

SEQ ID NO: 1647750 - RNA, 19 nt, Artificial Sequence
  Description of Artificial Sequence: Synthetic oligonucleotide
  Antisense strand to SEQ ID NO: 1647749
uucuguauagcacugucaa

SEQ ID NO: 1647751 - RNA, 19 nt, Artificial Sequence
  Description of Artificial Sequence: Synthetic oligonucleotide
  Sense strand starting at position 3283 of SEQ ID NO: 1561112
ggacaaacauuccaagaau

SEQ ID NO: 1647752 - RNA, 19 nt, Artificial Sequence
  Description of Artificial Sequence: Synthetic oligonucleotide
  Antisense strand to SEQ ID NO: 1647751
auucuuggaauguuugucc

SEQ ID NO: 1647753 - RNA, 19 nt, Artificial Sequence
  Description of Artificial Sequence: Synthetic oligonucleotide
  Sense strand starting at position 3339 of SEQ ID NO: 1561112
agaauaguguguucaggag

SEQ ID NO: 1647754 - RNA, 19 nt, Artificial Sequence
  Description of Artificial Sequence: Synthetic oligonucleotide
  Antisense strand to SEQ ID NO: 1647753
cuccugaacacacuauucu

SEQ ID NO: 1647755 - RNA, 19 nt, Artificial Sequence
  Description of Artificial Sequence: Synthetic oligonucleotide
  Sense strand starting at position 3410 of SEQ ID NO: 1561112
agccguaacugaguuauca

SEQ ID NO: 1647756 - RNA, 19 nt, Artificial Sequence
  Description of Artificial Sequence: Synthetic oligonucleotide
  Antisense strand to SEQ ID NO: 1647755
ugauaacucaguuacggcu

SEQ ID NO: 1647757 - RNA, 19 nt, Artificial Sequence
  Description of Artificial Sequence: Synthetic oligonucleotide
  Sense strand starting at position 3458 of SEQ ID NO: 1561112
cuaaccuugcaaugagauc

SEQ ID NO: 1647758 - RNA, 19 nt, Artificial Sequence
  Description of Artificial Sequence: Synthetic oligonucleotide
  Antisense strand to SEQ ID NO: 1647757
gaucucauugcaagguuag

SEQ ID NO: 1647759 - RNA, 19 nt, Artificial Sequence
  Description of Artificial Sequence: Synthetic oligonucleotide
  Sense strand starting at position 3469 of SEQ ID NO: 1561112
augagaucaugggacucaa

SEQ ID NO: 1647760 - RNA, 19 nt, Artificial Sequence
  Description of Artificial Sequence: Synthetic oligonucleotide
  Antisense strand to SEQ ID NO: 1647759
uugagucccaugaucucau

SEQ ID NO: 1647761 - RNA, 19 nt, Artificial Sequence
  Description of Artificial Sequence: Synthetic oligonucleotide
  Sense strand starting at position 3542 of SEQ ID NO: 1561112
gccacucaggccuacuaaa

SEQ ID NO: 1647762 - RNA, 19 nt, Artificial Sequence
  Description of Artificial Sequence: Synthetic oligonucleotide
  Antisense strand to SEQ ID NO: 1647761
uuuaguaggccugaguggc

SEQ ID NO: 1647763 - RNA, 19 nt, Artificial Sequence
  Description of Artificial Sequence: Synthetic oligonucleotide
  Sense strand starting at position 3588 of SEQ ID NO: 1561112
guaugugcugagccgucaa

SEQ ID NO: 1647764 - RNA, 19 nt, Artificial Sequence
  Description of Artificial Sequence: Synthetic oligonucleotide
  Antisense strand to SEQ ID NO: 1647763
uugacggcucagcacauac

SEQ ID NO: 1647765 - RNA, 19 nt, Artificial Sequence
  Description of Artificial Sequence: Synthetic oligonucleotide
  Sense strand starting at position 3599 of SEQ ID NO: 1561112
gccgucaaggcuuggaaga

SEQ ID NO: 1647766 - RNA, 19 nt, Artificial Sequence
  Description of Artificial Sequence: Synthetic oligonucleotide
  Antisense strand to SEQ ID NO: 1647765
ucuuccaagccuugacggc

SEQ ID NO: 1647767 - RNA, 19 nt, Artificial Sequence
  Description of Artificial Sequence: Synthetic oligonucleotide
  Sense strand starting at position 3600 of SEQ ID NO: 1561112
ccgucaaggcuuggaagaa

SEQ ID NO: 1647768 - RNA, 19 nt, Artificial Sequence
  Description of Artificial Sequence: Synthetic oligonucleotide
  Antisense strand to SEQ ID NO: 1647767
uucuuccaagccuugacgg

SEQ ID NO: 1647769 - RNA, 19 nt, Artificial Sequence
  Description of Artificial Sequence: Synthetic oligonucleotide
  Sense strand starting at position 177 of SEQ ID NO: 1561113
ccggcaaacuccuacucau

SEQ ID NO: 1647770 - RNA, 19 nt, Artificial Sequence
  Description of Artificial Sequence: Synthetic oligonucleotide
  Antisense strand to SEQ ID NO: 1647769
augaguaggaguuugccgg

SEQ ID NO: 1647771 - RNA, 19 nt, Artificial Sequence
  Description of Artificial Sequence: Synthetic oligonucleotide
  Sense strand starting at position 563 of SEQ ID NO: 1561113
uccacagaguucugugauc

SEQ ID NO: 1647772 - RNA, 19 nt, Artificial Sequence
  Description of Artificial Sequence: Synthetic oligonucleotide
  Antisense strand to SEQ ID NO: 1647771
gaucacagaacucugugga

SEQ ID NO: 1647773 - RNA, 19 nt, Artificial Sequence
  Description of Artificial Sequence: Synthetic oligonucleotide
  Sense strand starting at position 565 of SEQ ID NO: 1561113
cacagaguucugugaucuu

SEQ ID NO: 1647774 - RNA, 19 nt, Artificial Sequence
  Description of Artificial Sequence: Synthetic oligonucleotide
  Antisense strand to SEQ ID NO: 1647773
aagaucacagaacucugug

SEQ ID NO: 1647775 - RNA, 19 nt, Artificial Sequence
  Description of Artificial Sequence: Synthetic oligonucleotide
  Sense strand starting at position 568 of SEQ ID NO: 1561113
agaguucugugaucuuucu

SEQ ID NO: 1647776 - RNA, 19 nt, Artificial Sequence
  Description of Artificial Sequence: Synthetic oligonucleotide
  Antisense strand to SEQ ID NO: 1647775
agaaagaucacagaacucu

SEQ ID NO: 1647777 - RNA, 19 nt, Artificial Sequence
  Description of Artificial Sequence: Synthetic oligonucleotide
  Sense strand starting at position 837 of SEQ ID NO: 1561113
cacucaucuggaugcgaca

SEQ ID NO: 1647778 - RNA, 19 nt, Artificial Sequence
  Description of Artificial Sequence: Synthetic oligonucleotide
  Antisense strand to SEQ ID NO: 1647777
ugucgcauccagaugagug

SEQ ID NO: 1647779 - RNA, 19 nt, Artificial Sequence
  Description of Artificial Sequence: Synthetic oligonucleotide
  Sense strand starting at position 849 of SEQ ID NO: 1561113
ugcgacacggucugacaua

SEQ ID NO: 1647780 - RNA, 19 nt, Artificial Sequence
  Description of Artificial Sequence: Synthetic oligonucleotide
  Antisense strand to SEQ ID NO: 1647779
uaugucagaccgugucgca

SEQ ID NO: 1647781 - RNA, 19 nt, Artificial Sequence
  Description of Artificial Sequence: Synthetic oligonucleotide
  Sense strand starting at position 984 of SEQ ID NO: 1561113
gcggcgacgccuuaagagu

SEQ ID NO: 1647782 - RNA, 19 nt, Artificial Sequence
  Description of Artificial Sequence: Synthetic oligonucleotide
  Antisense strand to SEQ ID NO: 1647781
acucuuaaggcgucgccgc

SEQ ID NO: 1647783 - RNA, 19 nt, Artificial Sequence
  Description of Artificial Sequence: Synthetic oligonucleotide
  Sense strand starting at position 990 of SEQ ID NO: 1561113
acgccuuaagagugagaac

SEQ ID NO: 1647784 - RNA, 19 nt, Artificial Sequence
  Description of Artificial Sequence: Synthetic oligonucleotide
  Antisense strand to SEQ ID NO: 1647783
guucucacucuuaaggcgu

SEQ ID NO: 1647785 - RNA, 19 nt, Artificial Sequence
  Description of Artificial Sequence: Synthetic oligonucleotide
  Sense strand starting at position 991 of SEQ ID NO: 1561113
cgccuuaagagugagaacu

SEQ ID NO: 1647786 - RNA, 19 nt, Artificial Sequence
  Description of Artificial Sequence: Synthetic oligonucleotide
  Antisense strand to SEQ ID NO: 1647785
aguucucacucuuaaggcg

SEQ ID NO: 1647787 - RNA, 19 nt, Artificial Sequence
  Description of Artificial Sequence: Synthetic oligonucleotide
  Sense strand starting at position 1090 of SEQ ID NO: 1561113
gagggaagauuuggaauua

SEQ ID NO: 1647788 - RNA, 19 nt, Artificial Sequence
  Description of Artificial Sequence: Synthetic oligonucleotide
  Antisense strand to SEQ ID NO: 1647787
uaauuccaaaucuucccuc

SEQ ID NO: 1647789 - RNA, 19 nt, Artificial Sequence
  Description of Artificial Sequence: Synthetic oligonucleotide
  Sense strand starting at position 1124 of SEQ ID NO: 1561113
caguuaugacagugcgauc

SEQ ID NO: 1647790 - RNA, 19 nt, Artificial Sequence
  Description of Artificial Sequence: Synthetic oligonucleotide
  Antisense strand to SEQ ID NO: 1647789
gaucgcacugucauaacug

SEQ ID NO: 1647791 - RNA, 19 nt, Artificial Sequence
  Description of Artificial Sequence: Synthetic oligonucleotide
  Sense strand starting at position 1135 of SEQ ID NO: 1561113
gugcgaucucguagacugu

SEQ ID NO: 1647792 - RNA, 19 nt, Artificial Sequence
  Description of Artificial Sequence: Synthetic oligonucleotide
  Antisense strand to SEQ ID NO: 1647791
acagucuacgagaucgcac

SEQ ID NO: 1647793 - RNA, 19 nt, Artificial Sequence
  Description of Artificial Sequence: Synthetic oligonucleotide
  Sense strand starting at position 1273 of SEQ ID NO: 1561113
ccuccuucugcacacgaau

SEQ ID NO: 1647794 - RNA, 19 nt, Artificial Sequence
  Description of Artificial Sequence: Synthetic oligonucleotide
  Antisense strand to SEQ ID NO: 1647793
auucgugugcagaaggagg

SEQ ID NO: 1647795 - RNA, 19 nt, Artificial Sequence
  Description of Artificial Sequence: Synthetic oligonucleotide
  Sense strand starting at position 1285 of SEQ ID NO: 1561113
cacgaauuccaucguccaa

SEQ ID NO: 1647796 - RNA, 19 nt, Artificial Sequence
  Description of Artificial Sequence: Synthetic oligonucleotide
  Antisense strand to SEQ ID NO: 1647795
uuggacgauggaauucgug

SEQ ID NO: 1647797 - RNA, 19 nt, Artificial Sequence
  Description of Artificial Sequence: Synthetic oligonucleotide
  Sense strand starting at position 2173 of SEQ ID NO: 1561113
aggagagcaucuuggacuu

SEQ ID NO: 1647798 - RNA, 19 nt, Artificial Sequence
  Description of Artificial Sequence: Synthetic oligonucleotide
  Antisense strand to SEQ ID NO: 1647797
aaguccaagaugcucuccu

SEQ ID NO: 1647799 - RNA, 19 nt, Artificial Sequence
  Description of Artificial Sequence: Synthetic oligonucleotide
  Sense strand starting at position 2206 of SEQ ID NO: 1561113
acaagacgauccggguaaa

SEQ ID NO: 1647800 - RNA, 19 nt, Artificial Sequence
  Description of Artificial Sequence: Synthetic oligonucleotide
  Antisense strand to SEQ ID NO: 1647799
uuuacccggaucgucuugu

SEQ ID NO: 1647801 - RNA, 19 nt, Artificial Sequence
  Description of Artificial Sequence: Synthetic oligonucleotide
  Sense strand starting at position 2209 of SEQ ID NO: 1561113
agacgauccggguaaaguu

SEQ ID NO: 1647802 - RNA, 19 nt, Artificial Sequence
  Description of Artificial Sequence: Synthetic oligonucleotide
  Antisense strand to SEQ ID NO: 1647801
aacuuuacccggaucgucu

SEQ ID NO: 1647803 - RNA, 19 nt, Artificial Sequence
  Description of Artificial Sequence: Synthetic oligonucleotide
  Sense strand starting at position 2730 of SEQ ID NO: 1561113
gugagaaugaaugguuaca

SEQ ID NO: 1647804 - RNA, 19 nt, Artificial Sequence
  Description of Artificial Sequence: Synthetic oligonucleotide
  Antisense strand to SEQ ID NO: 1647803
uguaaccauucauucucac

SEQ ID NO: 1647805 - RNA, 19 nt, Artificial Sequence
  Description of Artificial Sequence: Synthetic oligonucleotide
  Sense strand starting at position 2741 of SEQ ID NO: 1561113
ugguuacaggcauguaaug

SEQ ID NO: 1647806 - RNA, 19 nt, Artificial Sequence
  Description of Artificial Sequence: Synthetic oligonucleotide
  Antisense strand to SEQ ID NO: 1647805
cauuacaugccuguaacca

SEQ ID NO: 1647807 - RNA, 19 nt, Artificial Sequence
  Description of Artificial Sequence: Synthetic oligonucleotide
  Sense strand starting at position 2743 of SEQ ID NO: 1561113
guuacaggcauguaaugua

SEQ ID NO: 1647808 - RNA, 19 nt, Artificial Sequence
  Description of Artificial Sequence: Synthetic oligonucleotide
  Antisense strand to SEQ ID NO: 1647807
uacauuacaugccuguaac

SEQ ID NO: 1647809 - RNA, 19 nt, Artificial Sequence
  Description of Artificial Sequence: Synthetic oligonucleotide
  Sense strand starting at position 2746 of SEQ ID NO: 1561113
acaggcauguaauguaauu

SEQ ID NO: 1647810 - RNA, 19 nt, Artificial Sequence
  Description of Artificial Sequence: Synthetic oligonucleotide
  Antisense strand to SEQ ID NO: 1647809
aauuacauuacaugccugu

SEQ ID NO: 1647811 - RNA, 19 nt, Artificial Sequence
  Description of Artificial Sequence: Synthetic oligonucleotide
  Sense strand starting at position 2748 of SEQ ID NO: 1561113
aggcauguaauguaauuga

SEQ ID NO: 1647812 - RNA, 19 nt, Artificial Sequence
  Description of Artificial Sequence: Synthetic oligonucleotide
  Antisense strand to SEQ ID NO: 1647811
ucaauuacauuacaugccu

SEQ ID NO: 1647813 - RNA, 19 nt, Artificial Sequence
  Description of Artificial Sequence: Synthetic oligonucleotide
  Sense strand starting at position 2752 of SEQ ID NO: 1561113
auguaauguaauugaggca

SEQ ID NO: 1647814 - RNA, 19 nt, Artificial Sequence
  Description of Artificial Sequence: Synthetic oligonucleotide
  Antisense strand to SEQ ID NO: 1647813
ugccucaauuacauuacau

SEQ ID NO: 1647815 - RNA, 19 nt, Artificial Sequence
  Description of Artificial Sequence: Synthetic oligonucleotide
  Sense strand starting at position 2865 of SEQ ID NO: 1561113
accucuuugucccuggauu

SEQ ID NO: 1647816 - RNA, 19 nt, Artificial Sequence
  Description of Artificial Sequence: Synthetic oligonucleotide
  Antisense strand to SEQ ID NO: 1647815
aauccagggacaaagaggu

SEQ ID NO: 1647817 - RNA, 19 nt, Artificial Sequence
  Description of Artificial Sequence: Synthetic oligonucleotide
  Sense strand starting at position 2873 of SEQ ID NO: 1561113
gucccuggauuguagacaa

SEQ ID NO: 1647818 - RNA, 19 nt, Artificial Sequence
  Description of Artificial Sequence: Synthetic oligonucleotide
  Antisense strand to SEQ ID NO: 1647817
uugucuacaauccagggac

SEQ ID NO: 1647819 - RNA, 19 nt, Artificial Sequence
  Description of Artificial Sequence: Synthetic oligonucleotide
  Sense strand starting at position 3584 of SEQ ID NO: 1561113
gagguuguaacugaggguu

SEQ ID NO: 1647820 - RNA, 19 nt, Artificial Sequence
  Description of Artificial Sequence: Synthetic oligonucleotide
  Antisense strand to SEQ ID NO: 1647819
aacccucaguuacaaccuc

SEQ ID NO: 1647821 - RNA, 19 nt, Artificial Sequence
  Description of Artificial Sequence: Synthetic oligonucleotide
  Sense strand starting at position 3586 of SEQ ID NO: 1561113
gguuguaacugaggguugu

SEQ ID NO: 1647822 - RNA, 19 nt, Artificial Sequence
  Description of Artificial Sequence: Synthetic oligonucleotide
  Antisense strand to SEQ ID NO: 1647821
acaacccucaguuacaacc

SEQ ID NO: 1647823 - RNA, 19 nt, Artificial Sequence
  Description of Artificial Sequence: Synthetic oligonucleotide
  Sense strand starting at position 3587 of SEQ ID NO: 1561113
guuguaacugaggguuguu

SEQ ID NO: 1647824 - RNA, 19 nt, Artificial Sequence
  Description of Artificial Sequence: Synthetic oligonucleotide
  Antisense strand to SEQ ID NO: 1647823
aacaacccucaguuacaac

SEQ ID NO: 1647825 - RNA, 19 nt, Artificial Sequence
  Description of Artificial Sequence: Synthetic oligonucleotide
  Sense strand starting at position 3634 of SEQ ID NO: 1561113
uucugagcccacugguuau

SEQ ID NO: 1647826 - RNA, 19 nt, Artificial Sequence
  Description of Artificial Sequence: Synthetic oligonucleotide
  Antisense strand to SEQ ID NO: 1647825
auaaccagugggcucagaa

SEQ ID NO: 1647827 - RNA, 19 nt, Artificial Sequence
  Description of Artificial Sequence: Synthetic oligonucleotide
  Sense strand starting at position 3641 of SEQ ID NO: 1561113
cccacugguuauugacaga

SEQ ID NO: 1647828 - RNA, 19 nt, Artificial Sequence
  Description of Artificial Sequence: Synthetic oligonucleotide
  Antisense strand to SEQ ID NO: 1647827
ucugucaauaaccaguggg

SEQ ID NO: 1647829 - RNA, 19 nt, Artificial Sequence
  Description of Artificial Sequence: Synthetic oligonucleotide
  Sense strand starting at position 3646 of SEQ ID NO: 1561113
ugguuauugacagagcuca

SEQ ID NO: 1647830 - RNA, 19 nt, Artificial Sequence
  Description of Artificial Sequence: Synthetic oligonucleotide
  Antisense strand to SEQ ID NO: 1647829
ugagcucugucaauaacca

SEQ ID NO: 1647831 - RNA, 19 nt, Artificial Sequence
  Description of Artificial Sequence: Synthetic oligonucleotide
  Sense strand starting at position 3654 of SEQ ID NO: 1561113
gacagagcucagugccuua

SEQ ID NO: 1647832 - RNA, 19 nt, Artificial Sequence
  Description of Artificial Sequence: Synthetic oligonucleotide
  Antisense strand to SEQ ID NO: 1647831
uaaggcacugagcucuguc

SEQ ID NO: 1647833 - RNA, 19 nt, Artificial Sequence
  Description of Artificial Sequence: Synthetic oligonucleotide
  Sense strand starting at position 3797 of SEQ ID NO: 1561113
gcugacauuuguccauauu

SEQ ID NO: 1647834 - RNA, 19 nt, Artificial Sequence
  Description of Artificial Sequence: Synthetic oligonucleotide
  Antisense strand to SEQ ID NO: 1647833
aauauggacaaaugucagc

SEQ ID NO: 1647835 - RNA, 19 nt, Artificial Sequence
  Description of Artificial Sequence: Synthetic oligonucleotide
  Sense strand starting at position 3814 of SEQ ID NO: 1561113
uucaguuauucgggccagu

SEQ ID NO: 1647836 - RNA, 19 nt, Artificial Sequence
  Description of Artificial Sequence: Synthetic oligonucleotide
  Antisense strand to SEQ ID NO: 1647835
acuggcccgaauaacugaa

SEQ ID NO: 1647837 - RNA, 19 nt, Artificial Sequence
  Description of Artificial Sequence: Synthetic oligonucleotide
  Sense strand starting at position 339 of SEQ ID NO: 1561114
acccuagugucuucucaca

SEQ ID NO: 1647838 - RNA, 19 nt, Artificial Sequence
  Description of Artificial Sequence: Synthetic oligonucleotide
  Antisense strand to SEQ ID NO: 1647837
ugugagaagacacuagggu

SEQ ID NO: 1647839 - RNA, 19 nt, Artificial Sequence
  Description of Artificial Sequence: Synthetic oligonucleotide
  Sense strand starting at position 344 of SEQ ID NO: 1561114
agugucuucucacaaaccu

SEQ ID NO: 1647840 - RNA, 19 nt, Artificial Sequence
  Description of Artificial Sequence: Synthetic oligonucleotide
  Antisense strand to SEQ ID NO: 1647839
agguuugugagaagacacu

SEQ ID NO: 1647841 - RNA, 19 nt, Artificial Sequence
  Description of Artificial Sequence: Synthetic oligonucleotide
  Sense strand starting at position 489 of SEQ ID NO: 1561114
gggcucacuacggaaucaa

SEQ ID NO: 1647842 - RNA, 19 nt, Artificial Sequence
  Description of Artificial Sequence: Synthetic oligonucleotide
  Antisense strand to SEQ ID NO: 1647841
uugauuccguagugagccc

SEQ ID NO: 1647843 - RNA, 19 nt, Artificial Sequence
  Description of Artificial Sequence: Synthetic oligonucleotide
  Sense strand starting at position 800 of SEQ ID NO: 1561114
ugugaauccucuucugaua

SEQ ID NO: 1647844 - RNA, 19 nt, Artificial Sequence
  Description of Artificial Sequence: Synthetic oligonucleotide
  Antisense strand to SEQ ID NO: 1647843
uaucagaagaggauucaca

SEQ ID NO: 1647845 - RNA, 19 nt, Artificial Sequence
  Description of Artificial Sequence: Synthetic oligonucleotide
  Sense strand starting at position 1074 of SEQ ID NO: 1561114
ugccuaguaucaccauauu

SEQ ID NO: 1647846 - RNA, 19 nt, Artificial Sequence
  Description of Artificial Sequence: Synthetic oligonucleotide
  Antisense strand to SEQ ID NO: 1647845
aauauggugauacuaggca

SEQ ID NO: 1647847 - RNA, 19 nt, Artificial Sequence
  Description of Artificial Sequence: Synthetic oligonucleotide
  Sense strand starting at position 1237 of SEQ ID NO: 1561114
cccaguuauuccugaugaa

SEQ ID NO: 1647848 - RNA, 19 nt, Artificial Sequence
  Description of Artificial Sequence: Synthetic oligonucleotide
  Antisense strand to SEQ ID NO: 1647847
uucaucaggaauaacuggg

SEQ ID NO: 1647849 - RNA, 19 nt, Artificial Sequence
  Description of Artificial Sequence: Synthetic oligonucleotide
  Sense strand starting at position 1238 of SEQ ID NO: 1561114
ccaguuauuccugaugaac

SEQ ID NO: 1647850 - RNA, 19 nt, Artificial Sequence
  Description of Artificial Sequence: Synthetic oligonucleotide
  Antisense strand to SEQ ID NO: 1647849
guucaucaggaauaacugg

SEQ ID NO: 1647851 - RNA, 19 nt, Artificial Sequence
  Description of Artificial Sequence: Synthetic oligonucleotide
  Sense strand starting at position 1260 of SEQ ID NO: 1561114
uguauagaauugucaacca

SEQ ID NO: 1647852 - RNA, 19 nt, Artificial Sequence
  Description of Artificial Sequence: Synthetic oligonucleotide
  Antisense strand to SEQ ID NO: 1647851
ugguugacaauucuauaca

SEQ ID NO: 1647853 - RNA, 19 nt, Artificial Sequence
  Description of Artificial Sequence: Synthetic oligonucleotide
  Sense strand starting at position 1314 of SEQ ID NO: 1561114
ucacuauacuuagggcaga

SEQ ID NO: 1647854 - RNA, 19 nt, Artificial Sequence
  Description of Artificial Sequence: Synthetic oligonucleotide
  Antisense strand to SEQ ID NO: 1647853
ucugcccuaaguauaguga

SEQ ID NO: 1647855 - RNA, 19 nt, Artificial Sequence
  Description of Artificial Sequence: Synthetic oligonucleotide
  Sense strand starting at position 1363 of SEQ ID NO: 1561114
aaggaucucugagcaagau

SEQ ID NO: 1647856 - RNA, 19 nt, Artificial Sequence
  Description of Artificial Sequence: Synthetic oligonucleotide
  Antisense strand to SEQ ID NO: 1647855
aucuugcucagagauccuu

SEQ ID NO: 1647857 - RNA, 19 nt, Artificial Sequence
  Description of Artificial Sequence: Synthetic oligonucleotide
  Sense strand starting at position 1499 of SEQ ID NO: 1561114
cgaggauagucuggcugga

SEQ ID NO: 1647858 - RNA, 19 nt, Artificial Sequence
  Description of Artificial Sequence: Synthetic oligonucleotide
  Antisense strand to SEQ ID NO: 1647857
uccagccagacuauccucg

SEQ ID NO: 1647859 - RNA, 19 nt, Artificial Sequence
  Description of Artificial Sequence: Synthetic oligonucleotide
  Sense strand starting at position 1501 of SEQ ID NO: 1561114
aggauagucuggcuggaag

SEQ ID NO: 1647860 - RNA, 19 nt, Artificial Sequence
  Description of Artificial Sequence: Synthetic oligonucleotide
  Antisense strand to SEQ ID NO: 1647859
cuuccagccagacuauccu

SEQ ID NO: 1647861 - RNA, 19 nt, Artificial Sequence
  Description of Artificial Sequence: Synthetic oligonucleotide
  Sense strand starting at position 2390 of SEQ ID NO: 1561114
gugagaaacccaggcucuu

SEQ ID NO: 1647862 - RNA, 19 nt, Artificial Sequence
  Description of Artificial Sequence: Synthetic oligonucleotide
  Antisense strand to SEQ ID NO: 1647861
aagagccuggguuucucac

SEQ ID NO: 1647863 - RNA, 19 nt, Artificial Sequence
  Description of Artificial Sequence: Synthetic oligonucleotide
  Sense strand starting at position 2452 of SEQ ID NO: 1561114
ugcaaagcucacugaguca

SEQ ID NO: 1647864 - RNA, 19 nt, Artificial Sequence
  Description of Artificial Sequence: Synthetic oligonucleotide
  Antisense strand to SEQ ID NO: 1647863
ugacucagugagcuuugca

SEQ ID NO: 1647865 - RNA, 19 nt, Artificial Sequence
  Description of Artificial Sequence: Synthetic oligonucleotide
  Sense strand starting at position 2771 of SEQ ID NO: 1561114
cccaguaaucgggaucagu

SEQ ID NO: 1647866 - RNA, 19 nt, Artificial Sequence
  Description of Artificial Sequence: Synthetic oligonucleotide
  Antisense strand to SEQ ID NO: 1647865
acugaucccgauuacuggg

SEQ ID NO: 1647867 - RNA, 19 nt, Artificial Sequence
  Description of Artificial Sequence: Synthetic oligonucleotide
  Sense strand starting at position 3126 of SEQ ID NO: 1561114
gggagugguccucagcguu

SEQ ID NO: 1647868 - RNA, 19 nt, Artificial Sequence
  Description of Artificial Sequence: Synthetic oligonucleotide
  Antisense strand to SEQ ID NO: 1647867
aacgcugaggaccacuccc

SEQ ID NO: 1647869 - RNA, 19 nt, Artificial Sequence
  Description of Artificial Sequence: Synthetic oligonucleotide
  Sense strand starting at position 3217 of SEQ ID NO: 1561114
gaagacugguacccugaau

SEQ ID NO: 1647870 - RNA, 19 nt, Artificial Sequence
  Description of Artificial Sequence: Synthetic oligonucleotide
  Antisense strand to SEQ ID NO: 1647869
auucaggguaccagucuuc

SEQ ID NO: 1647871 - RNA, 19 nt, Artificial Sequence
  Description of Artificial Sequence: Synthetic oligonucleotide
  Sense strand starting at position 3694 of SEQ ID NO: 1561114
cugcgccauuggucucuaa

SEQ ID NO: 1647872 - RNA, 19 nt, Artificial Sequence
  Description of Artificial Sequence: Synthetic oligonucleotide
  Antisense strand to SEQ ID NO: 1647871
uuagagaccaauggcgcag

SEQ ID NO: 1647873 - RNA, 19 nt, Artificial Sequence
  Description of Artificial Sequence: Synthetic oligonucleotide
  Sense strand starting at position 3695 of SEQ ID NO: 1561114
ugcgccauuggucucuaau

SEQ ID NO: 1647874 - RNA, 19 nt, Artificial Sequence
  Description of Artificial Sequence: Synthetic oligonucleotide
  Antisense strand to SEQ ID NO: 1647873
auuagagaccaauggcgca

SEQ ID NO: 1647875 - RNA, 19 nt, Artificial Sequence
  Description of Artificial Sequence: Synthetic oligonucleotide
  Sense strand starting at position 3698 of SEQ ID NO: 1561114
gccauuggucucuaaugcu

SEQ ID NO: 1647876 - RNA, 19 nt, Artificial Sequence
  Description of Artificial Sequence: Synthetic oligonucleotide
  Antisense strand to SEQ ID NO: 1647875
agcauuagagaccaauggc

SEQ ID NO: 1647877 - RNA, 19 nt, Artificial Sequence
  Description of Artificial Sequence: Synthetic oligonucleotide
  Sense strand starting at position 3706 of SEQ ID NO: 1561114
ucucuaaugcuaugaggag

SEQ ID NO: 1647878 - RNA, 19 nt, Artificial Sequence
  Description of Artificial Sequence: Synthetic oligonucleotide
  Antisense strand to SEQ ID NO: 1647877
cuccucauagcauuagaga

SEQ ID NO: 1647879 - RNA, 19 nt, Artificial Sequence
  Description of Artificial Sequence: Synthetic oligonucleotide
  Sense strand starting at position 3741 of SEQ ID NO: 1561114
agggacuggucucaagguu

SEQ ID NO: 1647880 - RNA, 19 nt, Artificial Sequence
  Description of Artificial Sequence: Synthetic oligonucleotide
  Antisense strand to SEQ ID NO: 1647879
aaccuugagaccagucccu

SEQ ID NO: 1647881 - RNA, 19 nt, Artificial Sequence
  Description of Artificial Sequence: Synthetic oligonucleotide
  Sense strand starting at position 3749 of SEQ ID NO: 1561114
gucucaagguucuaaagag

SEQ ID NO: 1647882 - RNA, 19 nt, Artificial Sequence
  Description of Artificial Sequence: Synthetic oligonucleotide
  Antisense strand to SEQ ID NO: 1647881
cucuuuagaaccuugagac

SEQ ID NO: 1647883 - RNA, 19 nt, Artificial Sequence
  Description of Artificial Sequence: Synthetic oligonucleotide
  Sense strand starting at position 3960 of SEQ ID NO: 1561114
aggagagggucuugagaag

SEQ ID NO: 1647884 - RNA, 19 nt, Artificial Sequence
  Description of Artificial Sequence: Synthetic oligonucleotide
  Antisense strand to SEQ ID NO: 1647883
cuucucaagacccucuccu

SEQ ID NO: 1647885 - RNA, 19 nt, Artificial Sequence
  Description of Artificial Sequence: Synthetic oligonucleotide
  Sense strand starting at position 3967 of SEQ ID NO: 1561114
ggucuugagaagcgauguu

SEQ ID NO: 1647886 - RNA, 19 nt, Artificial Sequence
  Description of Artificial Sequence: Synthetic oligonucleotide
  Antisense strand to SEQ ID NO: 1647885
aacaucgcuucucaagacc

SEQ ID NO: 1647887 - RNA, 19 nt, Artificial Sequence
  Description of Artificial Sequence: Synthetic oligonucleotide
  Sense strand starting at position 3978 of SEQ ID NO: 1561114
gcgauguugccgggucuua

SEQ ID NO: 1647888 - RNA, 19 nt, Artificial Sequence
  Description of Artificial Sequence: Synthetic oligonucleotide
  Antisense strand to SEQ ID NO: 1647887
uaagacccggcaacaucgc

SEQ ID NO: 1647889 - RNA, 19 nt, Artificial Sequence
  Description of Artificial Sequence: Synthetic oligonucleotide
  Sense strand starting at position 22 of SEQ ID NO: 1561115
acugaauucuaggaaggca

SEQ ID NO: 1647890 - RNA, 19 nt, Artificial Sequence
  Description of Artificial Sequence: Synthetic oligonucleotide
  Antisense strand to SEQ ID NO: 1647889
ugccuuccuagaauucagu

SEQ ID NO: 1647891 - RNA, 19 nt, Artificial Sequence
  Description of Artificial Sequence: Synthetic oligonucleotide
  Sense strand starting at position 42 of SEQ ID NO: 1561115
ggucuaagucuuggucagu

SEQ ID NO: 1647892 - RNA, 19 nt, Artificial Sequence
  Description of Artificial Sequence: Synthetic oligonucleotide
  Antisense strand to SEQ ID NO: 1647891
acugaccaagacuuagacc

SEQ ID NO: 1647893 - RNA, 19 nt, Artificial Sequence
  Description of Artificial Sequence: Synthetic oligonucleotide
  Sense strand starting at position 43 of SEQ ID NO: 1561115
gucuaagucuuggucagua

SEQ ID NO: 1647894 - RNA, 19 nt, Artificial Sequence
  Description of Artificial Sequence: Synthetic oligonucleotide
  Antisense strand to SEQ ID NO: 1647893
uacugaccaagacuuagac

SEQ ID NO: 1647895 - RNA, 19 nt, Artificial Sequence
  Description of Artificial Sequence: Synthetic oligonucleotide
  Sense strand starting at position 45 of SEQ ID NO: 1561115
cuaagucuuggucaguaga

SEQ ID NO: 1647896 - RNA, 19 nt, Artificial Sequence
  Description of Artificial Sequence: Synthetic oligonucleotide
  Antisense strand to SEQ ID NO: 1647895
ucuacugaccaagacuuag

SEQ ID NO: 1647897 - RNA, 19 nt, Artificial Sequence
  Description of Artificial Sequence: Synthetic oligonucleotide
  Sense strand starting at position 47 of SEQ ID NO: 1561115
aagucuuggucaguagagu

SEQ ID NO: 1647898 - RNA, 19 nt, Artificial Sequence
  Description of Artificial Sequence: Synthetic oligonucleotide
  Antisense strand to SEQ ID NO: 1647897
acucuacugaccaagacuu

SEQ ID NO: 1647899 - RNA, 19 nt, Artificial Sequence
  Description of Artificial Sequence: Synthetic oligonucleotide
  Sense strand starting at position 62 of SEQ ID NO: 1561115
gagugaguagaguggaaau

SEQ ID NO: 1647900 - RNA, 19 nt, Artificial Sequence
  Description of Artificial Sequence: Synthetic oligonucleotide
  Antisense strand to SEQ ID NO: 1647899
auuuccacucuacucacuc

SEQ ID NO: 1647901 - RNA, 19 nt, Artificial Sequence
  Description of Artificial Sequence: Synthetic oligonucleotide
  Sense strand starting at position 473 of SEQ ID NO: 1561115
gugugaccuuggcugaaau

SEQ ID NO: 1647902 - RNA, 19 nt, Artificial Sequence
  Description of Artificial Sequence: Synthetic oligonucleotide
  Antisense strand to SEQ ID NO: 1647901
auuucagccaaggucacac

SEQ ID NO: 1647903 - RNA, 19 nt, Artificial Sequence
  Description of Artificial Sequence: Synthetic oligonucleotide
  Sense strand starting at position 474 of SEQ ID NO: 1561115
ugugaccuuggcugaaaua

SEQ ID NO: 1647904 - RNA, 19 nt, Artificial Sequence
  Description of Artificial Sequence: Synthetic oligonucleotide
  Antisense strand to SEQ ID NO: 1647903
uauuucagccaaggucaca

SEQ ID NO: 1647905 - RNA, 19 nt, Artificial Sequence
  Description of Artificial Sequence: Synthetic oligonucleotide
  Sense strand starting at position 1166 of SEQ ID NO: 1561115
gcgguguuugaagagguaa

SEQ ID NO: 1647906 - RNA, 19 nt, Artificial Sequence
  Description of Artificial Sequence: Synthetic oligonucleotide
  Antisense strand to SEQ ID NO: 1647905
uuaccucuucaaacaccgc

SEQ ID NO: 1647907 - RNA, 19 nt, Artificial Sequence
  Description of Artificial Sequence: Synthetic oligonucleotide
  Sense strand starting at position 1168 of SEQ ID NO: 1561115
gguguuugaagagguaagu

SEQ ID NO: 1647908 - RNA, 19 nt, Artificial Sequence
  Description of Artificial Sequence: Synthetic oligonucleotide
  Antisense strand to SEQ ID NO: 1647907
acuuaccucuucaaacacc

SEQ ID NO: 1647909 - RNA, 19 nt, Artificial Sequence
  Description of Artificial Sequence: Synthetic oligonucleotide
  Sense strand starting at position 1185 of SEQ ID NO: 1561115
guuauuaaugcagggauca

SEQ ID NO: 1647910 - RNA, 19 nt, Artificial Sequence
  Description of Artificial Sequence: Synthetic oligonucleotide
  Antisense strand to SEQ ID NO: 1647909
ugaucccugcauuaauaac

SEQ ID NO: 1647911 - RNA, 19 nt, Artificial Sequence
  Description of Artificial Sequence: Synthetic oligonucleotide
  Sense strand starting at position 1186 of SEQ ID NO: 1561115
uuauuaaugcagggaucau

SEQ ID NO: 1647912 - RNA, 19 nt, Artificial Sequence
  Description of Artificial Sequence: Synthetic oligonucleotide
  Antisense strand to SEQ ID NO: 1647911
augaucccugcauuaauaa

SEQ ID NO: 1647913 - RNA, 19 nt, Artificial Sequence
  Description of Artificial Sequence: Synthetic oligonucleotide
  Sense strand starting at position 1217 of SEQ ID NO: 1561115
acugcaagcccuugauaca

SEQ ID NO: 1647914 - RNA, 19 nt, Artificial Sequence
  Description of Artificial Sequence: Synthetic oligonucleotide
  Antisense strand to SEQ ID NO: 1647913
uguaucaagggcuugcagu

SEQ ID NO: 1647915 - RNA, 19 nt, Artificial Sequence
  Description of Artificial Sequence: Synthetic oligonucleotide
  Sense strand starting at position 1218 of SEQ ID NO: 1561115
cugcaagcccuugauacau

SEQ ID NO: 1647916 - RNA, 19 nt, Artificial Sequence
  Description of Artificial Sequence: Synthetic oligonucleotide
  Antisense strand to SEQ ID NO: 1647915
auguaucaagggcuugcag

SEQ ID NO: 1647917 - RNA, 19 nt, Artificial Sequence
  Description of Artificial Sequence: Synthetic oligonucleotide
  Sense strand starting at position 1229 of SEQ ID NO: 1561115
ugauacauguuccuugcua

SEQ ID NO: 1647918 - RNA, 19 nt, Artificial Sequence
  Description of Artificial Sequence: Synthetic oligonucleotide
  Antisense strand to SEQ ID NO: 1647917
uagcaaggaacauguauca

SEQ ID NO: 1647919 - RNA, 19 nt, Artificial Sequence
  Description of Artificial Sequence: Synthetic oligonucleotide
  Sense strand starting at position 1327 of SEQ ID NO: 1561115
cgcuuuauucuugcuguau

SEQ ID NO: 1647920 - RNA, 19 nt, Artificial Sequence
  Description of Artificial Sequence: Synthetic oligonucleotide
  Antisense strand to SEQ ID NO: 1647919
auacagcaagaauaaagcg

SEQ ID NO: 1647921 - RNA, 19 nt, Artificial Sequence
  Description of Artificial Sequence: Synthetic oligonucleotide
  Sense strand starting at position 1328 of SEQ ID NO: 1561115
gcuuuauucuugcuguauc

SEQ ID NO: 1647922 - RNA, 19 nt, Artificial Sequence
  Description of Artificial Sequence: Synthetic oligonucleotide
  Antisense strand to SEQ ID NO: 1647921
gauacagcaagaauaaagc

SEQ ID NO: 1647923 - RNA, 19 nt, Artificial Sequence
  Description of Artificial Sequence: Synthetic oligonucleotide
  Sense strand starting at position 1340 of SEQ ID NO: 1561115
cuguaucuuuaaccgagua

SEQ ID NO: 1647924 - RNA, 19 nt, Artificial Sequence
  Description of Artificial Sequence: Synthetic oligonucleotide
  Antisense strand to SEQ ID NO: 1647923
uacucgguuaaagauacag

SEQ ID NO: 1647925 - RNA, 19 nt, Artificial Sequence
  Description of Artificial Sequence: Synthetic oligonucleotide
  Sense strand starting at position 1345 of SEQ ID NO: 1561115
ucuuuaaccgaguaucuuu

SEQ ID NO: 1647926 - RNA, 19 nt, Artificial Sequence
  Description of Artificial Sequence: Synthetic oligonucleotide
  Antisense strand to SEQ ID NO: 1647925
aaagauacucgguuaaaga

SEQ ID NO: 1647927 - RNA, 19 nt, Artificial Sequence
  Description of Artificial Sequence: Synthetic oligonucleotide
  Sense strand starting at position 1385 of SEQ ID NO: 1561115
aguuucccucccuguuaaa

SEQ ID NO: 1647928 - RNA, 19 nt, Artificial Sequence
  Description of Artificial Sequence: Synthetic oligonucleotide
  Antisense strand to SEQ ID NO: 1647927
uuuaacagggagggaaacu

SEQ ID NO: 1647929 - RNA, 19 nt, Artificial Sequence
  Description of Artificial Sequence: Synthetic oligonucleotide
  Sense strand starting at position 1396 of SEQ ID NO: 1561115
cuguuaaacggugguuaca

SEQ ID NO: 1647930 - RNA, 19 nt, Artificial Sequence
  Description of Artificial Sequence: Synthetic oligonucleotide
  Antisense strand to SEQ ID NO: 1647929
uguaaccaccguuuaacag

SEQ ID NO: 1647931 - RNA, 19 nt, Artificial Sequence
  Description of Artificial Sequence: Synthetic oligonucleotide
  Sense strand starting at position 1500 of SEQ ID NO: 1561115
uggccauaacgcgauugaa

SEQ ID NO: 1647932 - RNA, 19 nt, Artificial Sequence
  Description of Artificial Sequence: Synthetic oligonucleotide
  Antisense strand to SEQ ID NO: 1647931
uucaaucgcguuauggcca

SEQ ID NO: 1647933 - RNA, 19 nt, Artificial Sequence
  Description of Artificial Sequence: Synthetic oligonucleotide
  Sense strand starting at position 1510 of SEQ ID NO: 1561115
gcgauugaaugggaaggaa

SEQ ID NO: 1647934 - RNA, 19 nt, Artificial Sequence
  Description of Artificial Sequence: Synthetic oligonucleotide
  Antisense strand to SEQ ID NO: 1647933
uuccuucccauucaaucgc

SEQ ID NO: 1647935 - RNA, 19 nt, Artificial Sequence
  Description of Artificial Sequence: Synthetic oligonucleotide
  Sense strand starting at position 1624 of SEQ ID NO: 1561115
gguggcaucagaggcuuua

SEQ ID NO: 1647936 - RNA, 19 nt, Artificial Sequence
  Description of Artificial Sequence: Synthetic oligonucleotide
  Antisense strand to SEQ ID NO: 1647935
uaaagccucugaugccacc

SEQ ID NO: 1647937 - RNA, 19 nt, Artificial Sequence
  Description of Artificial Sequence: Synthetic oligonucleotide
  Sense strand starting at position 2493 of SEQ ID NO: 1561115
agucacaaacagugucaua

SEQ ID NO: 1647938 - RNA, 19 nt, Artificial Sequence
  Description of Artificial Sequence: Synthetic oligonucleotide
  Antisense strand to SEQ ID NO: 1647937
uaugacacuguuugugacu

SEQ ID NO: 1647939 - RNA, 19 nt, Artificial Sequence
  Description of Artificial Sequence: Synthetic oligonucleotide
  Sense strand starting at position 2504 of SEQ ID NO: 1561115
gugucauaggcccacacau

SEQ ID NO: 1647940 - RNA, 19 nt, Artificial Sequence
  Description of Artificial Sequence: Synthetic oligonucleotide
  Antisense strand to SEQ ID NO: 1647939
augugugggccuaugacac

SEQ ID NO: 1647941 - RNA, 19 nt, Artificial Sequence
  Description of Artificial Sequence: Synthetic oligonucleotide
  Sense strand starting at position 2731 of SEQ ID NO: 1561115
gucacagucuaauuagucu

SEQ ID NO: 1647942 - RNA, 19 nt, Artificial Sequence
  Description of Artificial Sequence: Synthetic oligonucleotide
  Antisense strand to SEQ ID NO: 1647941
agacuaauuagacugugac

SEQ ID NO: 1647943 - RNA, 19 nt, Artificial Sequence
  Description of Artificial Sequence: Synthetic oligonucleotide
  Sense strand starting at position 2845 of SEQ ID NO: 1561115
agaaucaaugccugccaca

SEQ ID NO: 1647944 - RNA, 19 nt, Artificial Sequence
  Description of Artificial Sequence: Synthetic oligonucleotide
  Antisense strand to SEQ ID NO: 1647943
uguggcaggcauugauucu

SEQ ID NO: 1647945 - RNA, 19 nt, Artificial Sequence
  Description of Artificial Sequence: Synthetic oligonucleotide
  Sense strand starting at position 2966 of SEQ ID NO: 1561115
cacacagggucauauaagu

SEQ ID NO: 1647946 - RNA, 19 nt, Artificial Sequence
  Description of Artificial Sequence: Synthetic oligonucleotide
  Antisense strand to SEQ ID NO: 1647945
acuuauaugacccugugug

SEQ ID NO: 1647947 - RNA, 19 nt, Artificial Sequence
  Description of Artificial Sequence: Synthetic oligonucleotide
  Sense strand starting at position 2972 of SEQ ID NO: 1561115
gggucauauaagugcauag

SEQ ID NO: 1647948 - RNA, 19 nt, Artificial Sequence
  Description of Artificial Sequence: Synthetic oligonucleotide
  Antisense strand to SEQ ID NO: 1647947
cuaugcacuuauaugaccc

SEQ ID NO: 1647949 - RNA, 19 nt, Artificial Sequence
  Description of Artificial Sequence: Synthetic oligonucleotide
  Sense strand starting at position 2974 of SEQ ID NO: 1561115
gucauauaagugcauaggu

SEQ ID NO: 1647950 - RNA, 19 nt, Artificial Sequence
  Description of Artificial Sequence: Synthetic oligonucleotide
  Antisense strand to SEQ ID NO: 1647949
accuaugcacuuauaugac

SEQ ID NO: 1647951 - RNA, 19 nt, Artificial Sequence
  Description of Artificial Sequence: Synthetic oligonucleotide
  Sense strand starting at position 2987 of SEQ ID NO: 1561115
auagguacgccgugacaca

SEQ ID NO: 1647952 - RNA, 19 nt, Artificial Sequence
  Description of Artificial Sequence: Synthetic oligonucleotide
  Antisense strand to SEQ ID NO: 1647951
ugugucacggcguaccuau

SEQ ID NO: 1647953 - RNA, 19 nt, Artificial Sequence
  Description of Artificial Sequence: Synthetic oligonucleotide
  Sense strand starting at position 2998 of SEQ ID NO: 1561115
gugacacagugucuuacau

SEQ ID NO: 1647954 - RNA, 19 nt, Artificial Sequence
  Description of Artificial Sequence: Synthetic oligonucleotide
  Antisense strand to SEQ ID NO: 1647953
auguaagacacugugucac

SEQ ID NO: 1647955 - RNA, 19 nt, Artificial Sequence
  Description of Artificial Sequence: Synthetic oligonucleotide
  Sense strand starting at position 3630 of SEQ ID NO: 1561115
gggcaugucacgggacaga

SEQ ID NO: 1647956 - RNA, 19 nt, Artificial Sequence
  Description of Artificial Sequence: Synthetic oligonucleotide
  Antisense strand to SEQ ID NO: 1647955
ucugucccgugacaugccc

SEQ ID NO: 1647957 - RNA, 19 nt, Artificial Sequence
  Description of Artificial Sequence: Synthetic oligonucleotide
  Sense strand starting at position 3788 of SEQ ID NO: 1561115
aaguuuaugugaguccaag

SEQ ID NO: 1647958 - RNA, 19 nt, Artificial Sequence
  Description of Artificial Sequence: Synthetic oligonucleotide
  Antisense strand to SEQ ID NO: 1647957
cuuggacucacauaaacuu

SEQ ID NO: 1647959 - RNA, 19 nt, Artificial Sequence
  Description of Artificial Sequence: Synthetic oligonucleotide
  Sense strand starting at position 3860 of SEQ ID NO: 1561115
guguaaguccagggcucuu

SEQ ID NO: 1647960 - RNA, 19 nt, Artificial Sequence
  Description of Artificial Sequence: Synthetic oligonucleotide
  Antisense strand to SEQ ID NO: 1647959
aagagcccuggacuuacac

SEQ ID NO: 1647961 - RNA, 19 nt, Artificial Sequence
  Description of Artificial Sequence: Synthetic oligonucleotide
  Sense strand starting at position 3878 of SEQ ID NO: 1561115
uaugcaaugcgguugucau

SEQ ID NO: 1647962 - RNA, 19 nt, Artificial Sequence
  Description of Artificial Sequence: Synthetic oligonucleotide
  Antisense strand to SEQ ID NO: 1647961
augacaaccgcauugcaua

SEQ ID NO: 1647963 - RNA, 19 nt, Artificial Sequence
  Description of Artificial Sequence: Synthetic oligonucleotide
  Sense strand starting at position 3880 of SEQ ID NO: 1561115
ugcaaugcgguugucauua

SEQ ID NO: 1647964 - RNA, 19 nt, Artificial Sequence
  Description of Artificial Sequence: Synthetic oligonucleotide
  Antisense strand to SEQ ID NO: 1647963
uaaugacaaccgcauugca

SEQ ID NO: 1647965 - RNA, 19 nt, Artificial Sequence
  Description of Artificial Sequence: Synthetic oligonucleotide
  Sense strand starting at position 3893 of SEQ ID NO: 1561115
ucauuauugugguuguggu

SEQ ID NO: 1647966 - RNA, 19 nt, Artificial Sequence
  Description of Artificial Sequence: Synthetic oligonucleotide
  Antisense strand to SEQ ID NO: 1647965
accacaaccacaauaauga

SEQ ID NO: 1647967 - RNA, 19 nt, Artificial Sequence
  Description of Artificial Sequence: Synthetic oligonucleotide
  Sense strand starting at position 3922 of SEQ ID NO: 1561115
cgcacucccagagaggauu

SEQ ID NO: 1647968 - RNA, 19 nt, Artificial Sequence
  Description of Artificial Sequence: Synthetic oligonucleotide
  Antisense strand to SEQ ID NO: 1647967
aauccucucugggagugcg

SEQ ID NO: 1647969 - RNA, 19 nt, Artificial Sequence
  Description of Artificial Sequence: Synthetic oligonucleotide
  Sense strand starting at position 7 of SEQ ID NO: 1561116
aagugaggccuuuauauug

SEQ ID NO: 1647970 - RNA, 19 nt, Artificial Sequence
  Description of Artificial Sequence: Synthetic oligonucleotide
  Antisense strand to SEQ ID NO: 1647969
caauauaaaggccucacuu

SEQ ID NO: 1647971 - RNA, 19 nt, Artificial Sequence
  Description of Artificial Sequence: Synthetic oligonucleotide
  Sense strand starting at position 40 of SEQ ID NO: 1561116
ucaagcucuuuccuggaua

SEQ ID NO: 1647972 - RNA, 19 nt, Artificial Sequence
  Description of Artificial Sequence: Synthetic oligonucleotide
  Antisense strand to SEQ ID NO: 1647971
uauccaggaaagagcuuga

SEQ ID NO: 1647973 - RNA, 19 nt, Artificial Sequence
  Description of Artificial Sequence: Synthetic oligonucleotide
  Sense strand starting at position 43 of SEQ ID NO: 1561116
agcucuuuccuggauagag

SEQ ID NO: 1647974 - RNA, 19 nt, Artificial Sequence
  Description of Artificial Sequence: Synthetic oligonucleotide
  Antisense strand to SEQ ID NO: 1647973
cucuauccaggaaagagcu

SEQ ID NO: 1647975 - RNA, 19 nt, Artificial Sequence
  Description of Artificial Sequence: Synthetic oligonucleotide
  Sense strand starting at position 377 of SEQ ID NO: 1561116
ccuccaguauggccagaua

SEQ ID NO: 1647976 - RNA, 19 nt, Artificial Sequence
  Description of Artificial Sequence: Synthetic oligonucleotide
  Antisense strand to SEQ ID NO: 1647975
uaucuggccauacuggagg

SEQ ID NO: 1647977 - RNA, 19 nt, Artificial Sequence
  Description of Artificial Sequence: Synthetic oligonucleotide
  Sense strand starting at position 380 of SEQ ID NO: 1561116
ccaguauggccagauaaac

SEQ ID NO: 1647978 - RNA, 19 nt, Artificial Sequence
  Description of Artificial Sequence: Synthetic oligonucleotide
  Antisense strand to SEQ ID NO: 1647977
guuuaucuggccauacugg

SEQ ID NO: 1647979 - RNA, 19 nt, Artificial Sequence
  Description of Artificial Sequence: Synthetic oligonucleotide
  Sense strand starting at position 520 of SEQ ID NO: 1561116
caguucuagcccugggacu

SEQ ID NO: 1647980 - RNA, 19 nt, Artificial Sequence
  Description of Artificial Sequence: Synthetic oligonucleotide
  Antisense strand to SEQ ID NO: 1647979
agucccagggcuagaacug

SEQ ID NO: 1647981 - RNA, 19 nt, Artificial Sequence
  Description of Artificial Sequence: Synthetic oligonucleotide
  Sense strand starting at position 1067 of SEQ ID NO: 1561116
agucauagccaaggacaaa

SEQ ID NO: 1647982 - RNA, 19 nt, Artificial Sequence
  Description of Artificial Sequence: Synthetic oligonucleotide
  Antisense strand to SEQ ID NO: 1647981
uuuguccuuggcuaugacu

SEQ ID NO: 1647983 - RNA, 19 nt, Artificial Sequence
  Description of Artificial Sequence: Synthetic oligonucleotide
  Sense strand starting at position 1472 of SEQ ID NO: 1561116
auccaaggcugauacagau

SEQ ID NO: 1647984 - RNA, 19 nt, Artificial Sequence
  Description of Artificial Sequence: Synthetic oligonucleotide
  Antisense strand to SEQ ID NO: 1647983
aucuguaucagccuuggau

SEQ ID NO: 1647985 - RNA, 19 nt, Artificial Sequence
  Description of Artificial Sequence: Synthetic oligonucleotide
  Sense strand starting at position 2152 of SEQ ID NO: 1561116
gcuucugcgccaucucaga

SEQ ID NO: 1647986 - RNA, 19 nt, Artificial Sequence
  Description of Artificial Sequence: Synthetic oligonucleotide
  Antisense strand to SEQ ID NO: 1647985
ucugagauggcgcagaagc

SEQ ID NO: 1647987 - RNA, 19 nt, Artificial Sequence
  Description of Artificial Sequence: Synthetic oligonucleotide
  Sense strand starting at position 2157 of SEQ ID NO: 1561116
ugcgccaucucagaugauu

SEQ ID NO: 1647988 - RNA, 19 nt, Artificial Sequence
  Description of Artificial Sequence: Synthetic oligonucleotide
  Antisense strand to SEQ ID NO: 1647987
aaucaucugagauggcgca

SEQ ID NO: 1647989 - RNA, 19 nt, Artificial Sequence
  Description of Artificial Sequence: Synthetic oligonucleotide
  Sense strand starting at position 2166 of SEQ ID NO: 1561116
ucagaugauugcugccuga

SEQ ID NO: 1647990 - RNA, 19 nt, Artificial Sequence
  Description of Artificial Sequence: Synthetic oligonucleotide
  Antisense strand to SEQ ID NO: 1647989
ucaggcagcaaucaucuga

SEQ ID NO: 1647991 - RNA, 19 nt, Artificial Sequence
  Description of Artificial Sequence: Synthetic oligonucleotide
  Sense strand starting at position 2170 of SEQ ID NO: 1561116
augauugcugccugaucca

SEQ ID NO: 1647992 - RNA, 19 nt, Artificial Sequence
  Description of Artificial Sequence: Synthetic oligonucleotide
  Antisense strand to SEQ ID NO: 1647991
uggaucaggcagcaaucau

SEQ ID NO: 1647993 - RNA, 19 nt, Artificial Sequence
  Description of Artificial Sequence: Synthetic oligonucleotide
  Sense strand starting at position 2173 of SEQ ID NO: 1561116
auugcugccugauccagaa

SEQ ID NO: 1647994 - RNA, 19 nt, Artificial Sequence
  Description of Artificial Sequence: Synthetic oligonucleotide
  Antisense strand to SEQ ID NO: 1647993
uucuggaucaggcagcaau

SEQ ID NO: 1647995 - RNA, 19 nt, Artificial Sequence
  Description of Artificial Sequence: Synthetic oligonucleotide
  Sense strand starting at position 2188 of SEQ ID NO: 1561116
agaacaaucucaugaggga

SEQ ID NO: 1647996 - RNA, 19 nt, Artificial Sequence
  Description of Artificial Sequence: Synthetic oligonucleotide
  Antisense strand to SEQ ID NO: 1647995
ucccucaugagauuguucu

SEQ ID NO: 1647997 - RNA, 19 nt, Artificial Sequence
  Description of Artificial Sequence: Synthetic oligonucleotide
  Sense strand starting at position 2487 of SEQ ID NO: 1561116
uauggaggcccuuguuuau

SEQ ID NO: 1647998 - RNA, 19 nt, Artificial Sequence
  Description of Artificial Sequence: Synthetic oligonucleotide
  Antisense strand to SEQ ID NO: 1647997
auaaacaagggccuccaua

SEQ ID NO: 1647999 - RNA, 19 nt, Artificial Sequence
  Description of Artificial Sequence: Synthetic oligonucleotide
  Sense strand starting at position 2499 of SEQ ID NO: 1561116
uguuuauuccgugugcgga

SEQ ID NO: 1648000 - RNA, 19 nt, Artificial Sequence
  Description of Artificial Sequence: Synthetic oligonucleotide
  Antisense strand to SEQ ID NO: 1647999
uccgcacacggaauaaaca

SEQ ID NO: 1648001 - RNA, 19 nt, Artificial Sequence
  Description of Artificial Sequence: Synthetic oligonucleotide
  Sense strand starting at position 2519 of SEQ ID NO: 1561116
agaacaaucucccaugggu

SEQ ID NO: 1648002 - RNA, 19 nt, Artificial Sequence
  Description of Artificial Sequence: Synthetic oligonucleotide
  Antisense strand to SEQ ID NO: 1648001
acccaugggagauuguucu

SEQ ID NO: 1648003 - RNA, 19 nt, Artificial Sequence
  Description of Artificial Sequence: Synthetic oligonucleotide
  Sense strand starting at position 2554 of SEQ ID NO: 1561116
agggucgaaucgucuuuaa

SEQ ID NO: 1648004 - RNA, 19 nt, Artificial Sequence
  Description of Artificial Sequence: Synthetic oligonucleotide
  Antisense strand to SEQ ID NO: 1648003
uuaaagacgauucgacccu

SEQ ID NO: 1648005 - RNA, 19 nt, Artificial Sequence
  Description of Artificial Sequence: Synthetic oligonucleotide
  Sense strand starting at position 2557 of SEQ ID NO: 1561116
gucgaaucgucuuuaauug

SEQ ID NO: 1648006 - RNA, 19 nt, Artificial Sequence
  Description of Artificial Sequence: Synthetic oligonucleotide
  Antisense strand to SEQ ID NO: 1648005
caauuaaagacgauucgac

SEQ ID NO: 1648007 - RNA, 19 nt, Artificial Sequence
  Description of Artificial Sequence: Synthetic oligonucleotide
  Sense strand starting at position 2558 of SEQ ID NO: 1561116
ucgaaucgucuuuaauuga

SEQ ID NO: 1648008 - RNA, 19 nt, Artificial Sequence
  Description of Artificial Sequence: Synthetic oligonucleotide
  Antisense strand to SEQ ID NO: 1648007
ucaauuaaagacgauucga

SEQ ID NO: 1648009 - RNA, 19 nt, Artificial Sequence
  Description of Artificial Sequence: Synthetic oligonucleotide
  Sense strand starting at position 2612 of SEQ ID NO: 1561116
accagcuuugguuggaaga

SEQ ID NO: 1648010 - RNA, 19 nt, Artificial Sequence
  Description of Artificial Sequence: Synthetic oligonucleotide
  Antisense strand to SEQ ID NO: 1648009
ucuuccaaccaaagcuggu

SEQ ID NO: 1648011 - RNA, 19 nt, Artificial Sequence
  Description of Artificial Sequence: Synthetic oligonucleotide
  Sense strand starting at position 2665 of SEQ ID NO: 1561116
gauccugggucacacagau

SEQ ID NO: 1648012 - RNA, 19 nt, Artificial Sequence
  Description of Artificial Sequence: Synthetic oligonucleotide
  Antisense strand to SEQ ID NO: 1648011
aucugugugacccaggauc

SEQ ID NO: 1648013 - RNA, 19 nt, Artificial Sequence
  Description of Artificial Sequence: Synthetic oligonucleotide
  Sense strand starting at position 2710 of SEQ ID NO: 1561116
cuguuuaggguuuaggaaa

SEQ ID NO: 1648014 - RNA, 19 nt, Artificial Sequence
  Description of Artificial Sequence: Synthetic oligonucleotide
  Antisense strand to SEQ ID NO: 1648013
uuuccuaaacccuaaacag

SEQ ID NO: 1648015 - RNA, 19 nt, Artificial Sequence
  Description of Artificial Sequence: Synthetic oligonucleotide
  Sense strand starting at position 2744 of SEQ ID NO: 1561116
ucucuaauguggccaaagu

SEQ ID NO: 1648016 - RNA, 19 nt, Artificial Sequence
  Description of Artificial Sequence: Synthetic oligonucleotide
  Antisense strand to SEQ ID NO: 1648015
acuuuggccacauuagaga

SEQ ID NO: 1648017 - RNA, 19 nt, Artificial Sequence
  Description of Artificial Sequence: Synthetic oligonucleotide
  Sense strand starting at position 2754 of SEQ ID NO: 1561116
ggccaaagucuagaaucgu

SEQ ID NO: 1648018 - RNA, 19 nt, Artificial Sequence
  Description of Artificial Sequence: Synthetic oligonucleotide
  Antisense strand to SEQ ID NO: 1648017
acgauucuagacuuuggcc

SEQ ID NO: 1648019 - RNA, 19 nt, Artificial Sequence
  Description of Artificial Sequence: Synthetic oligonucleotide
  Sense strand starting at position 2760 of SEQ ID NO: 1561116
agucuagaaucguuucuau

SEQ ID NO: 1648020 - RNA, 19 nt, Artificial Sequence
  Description of Artificial Sequence: Synthetic oligonucleotide
  Antisense strand to SEQ ID NO: 1648019
auagaaacgauucuagacu

SEQ ID NO: 1648021 - RNA, 19 nt, Artificial Sequence
  Description of Artificial Sequence: Synthetic oligonucleotide
  Sense strand starting at position 2763 of SEQ ID NO: 1561116
cuagaaucguuucuaugga

SEQ ID NO: 1648022 - RNA, 19 nt, Artificial Sequence
  Description of Artificial Sequence: Synthetic oligonucleotide
  Antisense strand to SEQ ID NO: 1648021
uccauagaaacgauucuag

SEQ ID NO: 1648023 - RNA, 19 nt, Artificial Sequence
  Description of Artificial Sequence: Synthetic oligonucleotide
  Sense strand starting at position 2764 of SEQ ID NO: 1561116
uagaaucguuucuauggaa

SEQ ID NO: 1648024 - RNA, 19 nt, Artificial Sequence
  Description of Artificial Sequence: Synthetic oligonucleotide
  Antisense strand to SEQ ID NO: 1648023
uuccauagaaacgauucua

SEQ ID NO: 1648025 - RNA, 19 nt, Artificial Sequence
  Description of Artificial Sequence: Synthetic oligonucleotide
  Sense strand starting at position 2814 of SEQ ID NO: 1561116
ccugaaccgucacuaauaa

SEQ ID NO: 1648026 - RNA, 19 nt, Artificial Sequence
  Description of Artificial Sequence: Synthetic oligonucleotide
  Antisense strand to SEQ ID NO: 1648025
uuauuagugacgguucagg

SEQ ID NO: 1648027 - RNA, 19 nt, Artificial Sequence
  Description of Artificial Sequence: Synthetic oligonucleotide
  Sense strand starting at position 2862 of SEQ ID NO: 1561116
gggagaucgucccuaaugu

SEQ ID NO: 1648028 - RNA, 19 nt, Artificial Sequence
  Description of Artificial Sequence: Synthetic oligonucleotide
  Antisense strand to SEQ ID NO: 1648027
acauuagggacgaucuccc

SEQ ID NO: 1648029 - RNA, 19 nt, Artificial Sequence
  Description of Artificial Sequence: Synthetic oligonucleotide
  Sense strand starting at position 2863 of SEQ ID NO: 1561116
ggagaucgucccuaaugug

SEQ ID NO: 1648030 - RNA, 19 nt, Artificial Sequence
  Description of Artificial Sequence: Synthetic oligonucleotide
  Antisense strand to SEQ ID NO: 1648029
cacauuagggacgaucucc

SEQ ID NO: 1648031 - RNA, 19 nt, Artificial Sequence
  Description of Artificial Sequence: Synthetic oligonucleotide
  Sense strand starting at position 2870 of SEQ ID NO: 1561116
gucccuaaugugugcagau

SEQ ID NO: 1648032 - RNA, 19 nt, Artificial Sequence
  Description of Artificial Sequence: Synthetic oligonucleotide
  Antisense strand to SEQ ID NO: 1648031
aucugcacacauuagggac

SEQ ID NO: 1648033 - RNA, 19 nt, Artificial Sequence
  Description of Artificial Sequence: Synthetic oligonucleotide
  Sense strand starting at position 2871 of SEQ ID NO: 1561116
ucccuaaugugugcagauc

SEQ ID NO: 1648034 - RNA, 19 nt, Artificial Sequence
  Description of Artificial Sequence: Synthetic oligonucleotide
  Antisense strand to SEQ ID NO: 1648033
gaucugcacacauuaggga

SEQ ID NO: 1648035 - RNA, 19 nt, Artificial Sequence
  Description of Artificial Sequence: Synthetic oligonucleotide
  Sense strand starting at position 2872 of SEQ ID NO: 1561116
cccuaaugugugcagauca

SEQ ID NO: 1648036 - RNA, 19 nt, Artificial Sequence
  Description of Artificial Sequence: Synthetic oligonucleotide
  Antisense strand to SEQ ID NO: 1648035
ugaucugcacacauuaggg

SEQ ID NO: 1648037 - RNA, 19 nt, Artificial Sequence
  Description of Artificial Sequence: Synthetic oligonucleotide
  Sense strand starting at position 2879 of SEQ ID NO: 1561116
gugugcagaucaucccuaa

SEQ ID NO: 1648038 - RNA, 19 nt, Artificial Sequence
  Description of Artificial Sequence: Synthetic oligonucleotide
  Antisense strand to SEQ ID NO: 1648037
uuagggaugaucugcacac

SEQ ID NO: 1648039 - RNA, 19 nt, Artificial Sequence
  Description of Artificial Sequence: Synthetic oligonucleotide
  Sense strand starting at position 2904 of SEQ ID NO: 1561116
gggcuugauuacugaacac

SEQ ID NO: 1648040 - RNA, 19 nt, Artificial Sequence
  Description of Artificial Sequence: Synthetic oligonucleotide
  Antisense strand to SEQ ID NO: 1648039
guguucaguaaucaagccc

SEQ ID NO: 1648041 - RNA, 19 nt, Artificial Sequence
  Description of Artificial Sequence: Synthetic oligonucleotide
  Sense strand starting at position 2937 of SEQ ID NO: 1561116
gggcuugguucagagccau

SEQ ID NO: 1648042 - RNA, 19 nt, Artificial Sequence
  Description of Artificial Sequence: Synthetic oligonucleotide
  Antisense strand to SEQ ID NO: 1648041
auggcucugaaccaagccc

SEQ ID NO: 1648043 - RNA, 19 nt, Artificial Sequence
  Description of Artificial Sequence: Synthetic oligonucleotide
  Sense strand starting at position 3054 of SEQ ID NO: 1561116
ucacaaaucucaggagaga

SEQ ID NO: 1648044 - RNA, 19 nt, Artificial Sequence
  Description of Artificial Sequence: Synthetic oligonucleotide
  Antisense strand to SEQ ID NO: 1648043
ucucuccugagauuuguga

SEQ ID NO: 1648045 - RNA, 19 nt, Artificial Sequence
  Description of Artificial Sequence: Synthetic oligonucleotide
  Sense strand starting at position 3722 of SEQ ID NO: 1561116
agagaaagauaacagagaa

SEQ ID NO: 1648046 - RNA, 19 nt, Artificial Sequence
  Description of Artificial Sequence: Synthetic oligonucleotide
  Antisense strand to SEQ ID NO: 1648045
uucucuguuaucuuucucu

SEQ ID NO: 1648047 - RNA, 19 nt, Artificial Sequence
  Description of Artificial Sequence: Synthetic oligonucleotide
  Sense strand starting at position 3749 of SEQ ID NO: 1561116
agacauaccuagggacaaa

SEQ ID NO: 1648048 - RNA, 19 nt, Artificial Sequence
  Description of Artificial Sequence: Synthetic oligonucleotide
  Antisense strand to SEQ ID NO: 1648047
uuugucccuagguaugucu

SEQ ID NO: 1648049 - RNA, 19 nt, Artificial Sequence
  Description of Artificial Sequence: Synthetic oligonucleotide
  Sense strand starting at position 2069 of SEQ ID NO: 1561117
aggccaacugugugaagua

SEQ ID NO: 1648050 - RNA, 19 nt, Artificial Sequence
  Description of Artificial Sequence: Synthetic oligonucleotide
  Antisense strand to SEQ ID NO: 1648049
uacuucacacaguuggccu

SEQ ID NO: 1648051 - RNA, 19 nt, Artificial Sequence
  Description of Artificial Sequence: Synthetic oligonucleotide
  Sense strand starting at position 2070 of SEQ ID NO: 1561117
ggccaacugugugaaguaa

SEQ ID NO: 1648052 - RNA, 19 nt, Artificial Sequence
  Description of Artificial Sequence: Synthetic oligonucleotide
  Antisense strand to SEQ ID NO: 1648051
uuacuucacacaguuggcc

SEQ ID NO: 1648053 - RNA, 19 nt, Artificial Sequence
  Description of Artificial Sequence: Synthetic oligonucleotide
  Sense strand starting at position 2081 of SEQ ID NO: 1561117
ugaaguaauagugggcauu

SEQ ID NO: 1648054 - RNA, 19 nt, Artificial Sequence
  Description of Artificial Sequence: Synthetic oligonucleotide
  Antisense strand to SEQ ID NO: 1648053
aaugcccacuauuacuuca

SEQ ID NO: 1648055 - RNA, 19 nt, Artificial Sequence
  Description of Artificial Sequence: Synthetic oligonucleotide
  Sense strand starting at position 2083 of SEQ ID NO: 1561117
aaguaauagugggcauuga

SEQ ID NO: 1648056 - RNA, 19 nt, Artificial Sequence
  Description of Artificial Sequence: Synthetic oligonucleotide
  Antisense strand to SEQ ID NO: 1648055
ucaaugcccacuauuacuu

SEQ ID NO: 1648057 - RNA, 19 nt, Artificial Sequence
  Description of Artificial Sequence: Synthetic oligonucleotide
  Sense strand starting at position 2084 of SEQ ID NO: 1561117
aguaauagugggcauugaa

SEQ ID NO: 1648058 - RNA, 19 nt, Artificial Sequence
  Description of Artificial Sequence: Synthetic oligonucleotide
  Antisense strand to SEQ ID NO: 1648057
uucaaugcccacuauuacu

SEQ ID NO: 1648059 - RNA, 19 nt, Artificial Sequence
  Description of Artificial Sequence: Synthetic oligonucleotide
  Sense strand starting at position 2110 of SEQ ID NO: 1561117
gagggugagugguaugaag

SEQ ID NO: 1648060 - RNA, 19 nt, Artificial Sequence
  Description of Artificial Sequence: Synthetic oligonucleotide
  Antisense strand to SEQ ID NO: 1648059
cuucauaccacucacccuc

SEQ ID NO: 1648061 - RNA, 19 nt, Artificial Sequence
  Description of Artificial Sequence: Synthetic oligonucleotide
  Sense strand starting at position 2112 of SEQ ID NO: 1561117
gggugagugguaugaaguc

SEQ ID NO: 1648062 - RNA, 19 nt, Artificial Sequence
  Description of Artificial Sequence: Synthetic oligonucleotide
  Antisense strand to SEQ ID NO: 1648061
gacuucauaccacucaccc

SEQ ID NO: 1648063 - RNA, 19 nt, Artificial Sequence
  Description of Artificial Sequence: Synthetic oligonucleotide
  Sense strand starting at position 2118 of SEQ ID NO: 1561117
gugguaugaagucagaggu

SEQ ID NO: 1648064 - RNA, 19 nt, Artificial Sequence
  Description of Artificial Sequence: Synthetic oligonucleotide
  Antisense strand to SEQ ID NO: 1648063
accucugacuucauaccac

SEQ ID NO: 1648065 - RNA, 19 nt, Artificial Sequence
  Description of Artificial Sequence: Synthetic oligonucleotide
  Sense strand starting at position 2203 of SEQ ID NO: 1561117
gcagaugucuucugaggcu

SEQ ID NO: 1648066 - RNA, 19 nt, Artificial Sequence
  Description of Artificial Sequence: Synthetic oligonucleotide
  Antisense strand to SEQ ID NO: 1648065
agccucagaagacaucugc

SEQ ID NO: 1648067 - RNA, 19 nt, Artificial Sequence
  Description of Artificial Sequence: Synthetic oligonucleotide
  Sense strand starting at position 2220 of SEQ ID NO: 1561117
cugacucaugcccagcauu

SEQ ID NO: 1648068 - RNA, 19 nt, Artificial Sequence
  Description of Artificial Sequence: Synthetic oligonucleotide
  Antisense strand to SEQ ID NO: 1648067
aaugcugggcaugagucag

SEQ ID NO: 1648069 - RNA, 19 nt, Artificial Sequence
  Description of Artificial Sequence: Synthetic oligonucleotide
  Sense strand starting at position 2321 of SEQ ID NO: 1561117
cagaguggucaggguguga

SEQ ID NO: 1648070 - RNA, 19 nt, Artificial Sequence
  Description of Artificial Sequence: Synthetic oligonucleotide
  Antisense strand to SEQ ID NO: 1648069
ucacacccugaccacucug

SEQ ID NO: 1648071 - RNA, 19 nt, Artificial Sequence
  Description of Artificial Sequence: Synthetic oligonucleotide
  Sense strand starting at position 2422 of SEQ ID NO: 1561117
gugacaugagcuuggcuuu

SEQ ID NO: 1648072 - RNA, 19 nt, Artificial Sequence
  Description of Artificial Sequence: Synthetic oligonucleotide
  Antisense strand to SEQ ID NO: 1648071
aaagccaagcucaugucac

SEQ ID NO: 1648073 - RNA, 19 nt, Artificial Sequence
  Description of Artificial Sequence: Synthetic oligonucleotide
  Sense strand starting at position 2423 of SEQ ID NO: 1561117
ugacaugagcuuggcuuua

SEQ ID NO: 1648074 - RNA, 19 nt, Artificial Sequence
  Description of Artificial Sequence: Synthetic oligonucleotide
  Antisense strand to SEQ ID NO: 1648073
uaaagccaagcucauguca

SEQ ID NO: 1648075 - RNA, 19 nt, Artificial Sequence
  Description of Artificial Sequence: Synthetic oligonucleotide
  Sense strand starting at position 2425 of SEQ ID NO: 1561117
acaugagcuuggcuuuaaa

SEQ ID NO: 1648076 - RNA, 19 nt, Artificial Sequence
  Description of Artificial Sequence: Synthetic oligonucleotide
  Antisense strand to SEQ ID NO: 1648075
uuuaaagccaagcucaugu

SEQ ID NO: 1648077 - RNA, 19 nt, Artificial Sequence
  Description of Artificial Sequence: Synthetic oligonucleotide
  Sense strand starting at position 3061 of SEQ ID NO: 1561117
cagaguuugugcugggucu

SEQ ID NO: 1648078 - RNA, 19 nt, Artificial Sequence
  Description of Artificial Sequence: Synthetic oligonucleotide
  Antisense strand to SEQ ID NO: 1648077
agacccagcacaaacucug

SEQ ID NO: 1648079 - RNA, 19 nt, Artificial Sequence
  Description of Artificial Sequence: Synthetic oligonucleotide
  Sense strand starting at position 3139 of SEQ ID NO: 1561117
ucaggaaacgauuguuaaa

SEQ ID NO: 1648080 - RNA, 19 nt, Artificial Sequence
  Description of Artificial Sequence: Synthetic oligonucleotide
  Antisense strand to SEQ ID NO: 1648079
uuuaacaaucguuuccuga

SEQ ID NO: 1648081 - RNA, 19 nt, Artificial Sequence
  Description of Artificial Sequence: Synthetic oligonucleotide
  Sense strand starting at position 3141 of SEQ ID NO: 1561117
aggaaacgauuguuaaaug

SEQ ID NO: 1648082 - RNA, 19 nt, Artificial Sequence
  Description of Artificial Sequence: Synthetic oligonucleotide
  Antisense strand to SEQ ID NO: 1648081
cauuuaacaaucguuuccu

SEQ ID NO: 1648083 - RNA, 19 nt, Artificial Sequence
  Description of Artificial Sequence: Synthetic oligonucleotide
  Sense strand starting at position 3151 of SEQ ID NO: 1561117
uguuaaauggcaggaacua

SEQ ID NO: 1648084 - RNA, 19 nt, Artificial Sequence
  Description of Artificial Sequence: Synthetic oligonucleotide
  Antisense strand to SEQ ID NO: 1648083
uaguuccugccauuuaaca

SEQ ID NO: 1648085 - RNA, 19 nt, Artificial Sequence
  Description of Artificial Sequence: Synthetic oligonucleotide
  Sense strand starting at position 3188 of SEQ ID NO: 1561117
gacggauguucagaaggaa

SEQ ID NO: 1648086 - RNA, 19 nt, Artificial Sequence
  Description of Artificial Sequence: Synthetic oligonucleotide
  Antisense strand to SEQ ID NO: 1648085
uuccuucugaacauccguc

SEQ ID NO: 1648087 - RNA, 19 nt, Artificial Sequence
  Description of Artificial Sequence: Synthetic oligonucleotide
  Sense strand starting at position 3416 of SEQ ID NO: 1561117
ugucaaauuccaugcagag

SEQ ID NO: 1648088 - RNA, 19 nt, Artificial Sequence
  Description of Artificial Sequence: Synthetic oligonucleotide
  Antisense strand to SEQ ID NO: 1648087
cucugcauggaauuugaca

SEQ ID NO: 1648089 - RNA, 19 nt, Artificial Sequence
  Description of Artificial Sequence: Synthetic oligonucleotide
  Sense strand starting at position 3444 of SEQ ID NO: 1561117
ccauaaauaugucauaagu

SEQ ID NO: 1648090 - RNA, 19 nt, Artificial Sequence
  Description of Artificial Sequence: Synthetic oligonucleotide
  Antisense strand to SEQ ID NO: 1648089
acuuaugacauauuuaugg

SEQ ID NO: 1648091 - RNA, 19 nt, Artificial Sequence
  Description of Artificial Sequence: Synthetic oligonucleotide
  Sense strand starting at position 3453 of SEQ ID NO: 1561117
ugucauaaguacuuucuuu

SEQ ID NO: 1648092 - RNA, 19 nt, Artificial Sequence
  Description of Artificial Sequence: Synthetic oligonucleotide
  Antisense strand to SEQ ID NO: 1648091
aaagaaaguacuuaugaca

SEQ ID NO: 1648093 - RNA, 19 nt, Artificial Sequence
  Description of Artificial Sequence: Synthetic oligonucleotide
  Sense strand starting at position 3461 of SEQ ID NO: 1561117
guacuuucuuugcacaaag

SEQ ID NO: 1648094 - RNA, 19 nt, Artificial Sequence
  Description of Artificial Sequence: Synthetic oligonucleotide
  Antisense strand to SEQ ID NO: 1648093
cuuugugcaaagaaaguac

SEQ ID NO: 1648095 - RNA, 19 nt, Artificial Sequence
  Description of Artificial Sequence: Synthetic oligonucleotide
  Sense strand starting at position 3463 of SEQ ID NO: 1561117
acuuucuuugcacaaagga

SEQ ID NO: 1648096 - RNA, 19 nt, Artificial Sequence
  Description of Artificial Sequence: Synthetic oligonucleotide
  Antisense strand to SEQ ID NO: 1648095
uccuuugugcaaagaaagu

SEQ ID NO: 1648097 - RNA, 19 nt, Artificial Sequence
  Description of Artificial Sequence: Synthetic oligonucleotide
  Sense strand starting at position 3559 of SEQ ID NO: 1561117
caaguaaauguugaaugca

SEQ ID NO: 1648098 - RNA, 19 nt, Artificial Sequence
  Description of Artificial Sequence: Synthetic oligonucleotide
  Antisense strand to SEQ ID NO: 1648097
ugcauucaacauuuacuug

SEQ ID NO: 1648099 - RNA, 19 nt, Artificial Sequence
  Description of Artificial Sequence: Synthetic oligonucleotide
  Sense strand starting at position 3567 of SEQ ID NO: 1561117
uguugaaugcagugaguca

SEQ ID NO: 1648100 - RNA, 19 nt, Artificial Sequence
  Description of Artificial Sequence: Synthetic oligonucleotide
  Antisense strand to SEQ ID NO: 1648099
ugacucacugcauucaaca

SEQ ID NO: 1648101 - RNA, 19 nt, Artificial Sequence
  Description of Artificial Sequence: Synthetic oligonucleotide
  Sense strand starting at position 3816 of SEQ ID NO: 1561117
cggaguuuccagugagcug

SEQ ID NO: 1648102 - RNA, 19 nt, Artificial Sequence
  Description of Artificial Sequence: Synthetic oligonucleotide
  Antisense strand to SEQ ID NO: 1648101
cagcucacuggaaacuccg

SEQ ID NO: 1648103 - RNA, 19 nt, Artificial Sequence
  Description of Artificial Sequence: Synthetic oligonucleotide
  Sense strand starting at position 3961 of SEQ ID NO: 1561117
ggugacacuugagaagaga

SEQ ID NO: 1648104 - RNA, 19 nt, Artificial Sequence
  Description of Artificial Sequence: Synthetic oligonucleotide
  Antisense strand to SEQ ID NO: 1648103
ucucuucucaagugucacc

SEQ ID NO: 1648105 - RNA, 19 nt, Artificial Sequence
  Description of Artificial Sequence: Synthetic oligonucleotide
  Sense strand starting at position 30 of SEQ ID NO: 1561118
gcuuaagggugcuuggaaa

SEQ ID NO: 1648106 - RNA, 19 nt, Artificial Sequence
  Description of Artificial Sequence: Synthetic oligonucleotide
  Antisense strand to SEQ ID NO: 1648105
uuuccaagcacccuuaagc

SEQ ID NO: 1648107 - RNA, 19 nt, Artificial Sequence
  Description of Artificial Sequence: Synthetic oligonucleotide
  Sense strand starting at position 124 of SEQ ID NO: 1561118
agaagagccucuucuccaa

SEQ ID NO: 1648108 - RNA, 19 nt, Artificial Sequence
  Description of Artificial Sequence: Synthetic oligonucleotide
  Antisense strand to SEQ ID NO: 1648107
uuggagaagaggcucuucu

SEQ ID NO: 1648109 - RNA, 19 nt, Artificial Sequence
  Description of Artificial Sequence: Synthetic oligonucleotide
  Sense strand starting at position 2325 of SEQ ID NO: 1561118
agugacauugggugucuca

SEQ ID NO: 1648110 - RNA, 19 nt, Artificial Sequence
  Description of Artificial Sequence: Synthetic oligonucleotide
  Antisense strand to SEQ ID NO: 1648109
ugagacacccaaugucacu

SEQ ID NO: 1648111 - RNA, 19 nt, Artificial Sequence
  Description of Artificial Sequence: Synthetic oligonucleotide
  Sense strand starting at position 2554 of SEQ ID NO: 1561118
ggaguuaacucacagucac

SEQ ID NO: 1648112 - RNA, 19 nt, Artificial Sequence
  Description of Artificial Sequence: Synthetic oligonucleotide
  Antisense strand to SEQ ID NO: 1648111
gugacugugaguuaacucc

SEQ ID NO: 1648113 - RNA, 19 nt, Artificial Sequence
  Description of Artificial Sequence: Synthetic oligonucleotide
  Sense strand starting at position 2749 of SEQ ID NO: 1561118
aguaacacccggugacaau

SEQ ID NO: 1648114 - RNA, 19 nt, Artificial Sequence
  Description of Artificial Sequence: Synthetic oligonucleotide
  Antisense strand to SEQ ID NO: 1648113
auugucaccggguguuacu

SEQ ID NO: 1648115 - RNA, 19 nt, Artificial Sequence
  Description of Artificial Sequence: Synthetic oligonucleotide
  Sense strand starting at position 2807 of SEQ ID NO: 1561118
cggugcugugagcuguaaa

SEQ ID NO: 1648116 - RNA, 19 nt, Artificial Sequence
  Description of Artificial Sequence: Synthetic oligonucleotide
  Antisense strand to SEQ ID NO: 1648115
uuuacagcucacagcaccg

SEQ ID NO: 1648117 - RNA, 19 nt, Artificial Sequence
  Description of Artificial Sequence: Synthetic oligonucleotide
  Sense strand starting at position 2808 of SEQ ID NO: 1561118
ggugcugugagcuguaaau

SEQ ID NO: 1648118 - RNA, 19 nt, Artificial Sequence
  Description of Artificial Sequence: Synthetic oligonucleotide
  Antisense strand to SEQ ID NO: 1648117
auuuacagcucacagcacc

SEQ ID NO: 1648119 - RNA, 19 nt, Artificial Sequence
  Description of Artificial Sequence: Synthetic oligonucleotide
  Sense strand starting at position 2838 of SEQ ID NO: 1561118
caccuuugucugcgggagu

SEQ ID NO: 1648120 - RNA, 19 nt, Artificial Sequence
  Description of Artificial Sequence: Synthetic oligonucleotide
  Antisense strand to SEQ ID NO: 1648119
acucccgcagacaaaggug

SEQ ID NO: 1648121 - RNA, 19 nt, Artificial Sequence
  Description of Artificial Sequence: Synthetic oligonucleotide
  Sense strand starting at position 3024 of SEQ ID NO: 1561118
gcgguugacucugggucua

SEQ ID NO: 1648122 - RNA, 19 nt, Artificial Sequence
  Description of Artificial Sequence: Synthetic oligonucleotide
  Antisense strand to SEQ ID NO: 1648121
uagacccagagucaaccgc

SEQ ID NO: 1648123 - RNA, 19 nt, Artificial Sequence
  Description of Artificial Sequence: Synthetic oligonucleotide
  Sense strand starting at position 3026 of SEQ ID NO: 1561118
gguugacucugggucuaga

SEQ ID NO: 1648124 - RNA, 19 nt, Artificial Sequence
  Description of Artificial Sequence: Synthetic oligonucleotide
  Antisense strand to SEQ ID NO: 1648123
ucuagacccagagucaacc

SEQ ID NO: 1648125 - RNA, 19 nt, Artificial Sequence
  Description of Artificial Sequence: Synthetic oligonucleotide
  Sense strand starting at position 3039 of SEQ ID NO: 1561118
ucuagauguuucuguguuu

SEQ ID NO: 1648126 - RNA, 19 nt, Artificial Sequence
  Description of Artificial Sequence: Synthetic oligonucleotide
  Antisense strand to SEQ ID NO: 1648125
aaacacagaaacaucuaga

SEQ ID NO: 1648127 - RNA, 19 nt, Artificial Sequence
  Description of Artificial Sequence: Synthetic oligonucleotide
  Sense strand starting at position 3050 of SEQ ID NO: 1561118
cuguguuugccacggcuau

SEQ ID NO: 1648128 - RNA, 19 nt, Artificial Sequence
  Description of Artificial Sequence: Synthetic oligonucleotide
  Antisense strand to SEQ ID NO: 1648127
auagccguggcaaacacag

SEQ ID NO: 1648129 - RNA, 19 nt, Artificial Sequence
  Description of Artificial Sequence: Synthetic oligonucleotide
  Sense strand starting at position 3051 of SEQ ID NO: 1561118
uguguuugccacggcuauu

SEQ ID NO: 1648130 - RNA, 19 nt, Artificial Sequence
  Description of Artificial Sequence: Synthetic oligonucleotide
  Antisense strand to SEQ ID NO: 1648129
aauagccguggcaaacaca

SEQ ID NO: 1648131 - RNA, 19 nt, Artificial Sequence
  Description of Artificial Sequence: Synthetic oligonucleotide
  Sense strand starting at position 3210 of SEQ ID NO: 1561118
ggcaguuguggguccgagu

SEQ ID NO: 1648132 - RNA, 19 nt, Artificial Sequence
  Description of Artificial Sequence: Synthetic oligonucleotide
  Antisense strand to SEQ ID NO: 1648131
acucggacccacaacugcc

SEQ ID NO: 1648133 - RNA, 19 nt, Artificial Sequence
  Description of Artificial Sequence: Synthetic oligonucleotide
  Sense strand starting at position 3234 of SEQ ID NO: 1561118
cgagucgcucagugagguu

SEQ ID NO: 1648134 - RNA, 19 nt, Artificial Sequence
  Description of Artificial Sequence: Synthetic oligonucleotide
  Antisense strand to SEQ ID NO: 1648133
aaccucacugagcgacucg

SEQ ID NO: 1648135 - RNA, 19 nt, Artificial Sequence
  Description of Artificial Sequence: Synthetic oligonucleotide
  Sense strand starting at position 3246 of SEQ ID NO: 1561118
ugagguugcgugcacaagu

SEQ ID NO: 1648136 - RNA, 19 nt, Artificial Sequence
  Description of Artificial Sequence: Synthetic oligonucleotide
  Antisense strand to SEQ ID NO: 1648135
acuugugcacgcaaccuca

SEQ ID NO: 1648137 - RNA, 19 nt, Artificial Sequence
  Description of Artificial Sequence: Synthetic oligonucleotide
  Sense strand starting at position 3257 of SEQ ID NO: 1561118
gcacaagugugugccgaau

SEQ ID NO: 1648138 - RNA, 19 nt, Artificial Sequence
  Description of Artificial Sequence: Synthetic oligonucleotide
  Antisense strand to SEQ ID NO: 1648137
auucggcacacacuugugc

SEQ ID NO: 1648139 - RNA, 19 nt, Artificial Sequence
  Description of Artificial Sequence: Synthetic oligonucleotide
  Sense strand starting at position 3366 of SEQ ID NO: 1561118
gugugaaugucuggauguc

SEQ ID NO: 1648140 - RNA, 19 nt, Artificial Sequence
  Description of Artificial Sequence: Synthetic oligonucleotide
  Antisense strand to SEQ ID NO: 1648139
gacauccagacauucacac

SEQ ID NO: 1648141 - RNA, 19 nt, Artificial Sequence
  Description of Artificial Sequence: Synthetic oligonucleotide
  Sense strand starting at position 3367 of SEQ ID NO: 1561118
ugugaaugucuggaugucu

SEQ ID NO: 1648142 - RNA, 19 nt, Artificial Sequence
  Description of Artificial Sequence: Synthetic oligonucleotide
  Antisense strand to SEQ ID NO: 1648141
agacauccagacauucaca

SEQ ID NO: 1648143 - RNA, 19 nt, Artificial Sequence
  Description of Artificial Sequence: Synthetic oligonucleotide
  Sense strand starting at position 286 of SEQ ID NO: 1561119
gagggucugaagugaugga

SEQ ID NO: 1648144 - RNA, 19 nt, Artificial Sequence
  Description of Artificial Sequence: Synthetic oligonucleotide
  Antisense strand to SEQ ID NO: 1648143
uccaucacuucagacccuc

SEQ ID NO: 1648145 - RNA, 19 nt, Artificial Sequence
  Description of Artificial Sequence: Synthetic oligonucleotide
  Sense strand starting at position 289 of SEQ ID NO: 1561119
ggucugaagugauggagga

SEQ ID NO: 1648146 - RNA, 19 nt, Artificial Sequence
  Description of Artificial Sequence: Synthetic oligonucleotide
  Antisense strand to SEQ ID NO: 1648145
uccuccaucacuucagacc

SEQ ID NO: 1648147 - RNA, 19 nt, Artificial Sequence
  Description of Artificial Sequence: Synthetic oligonucleotide
  Sense strand starting at position 641 of SEQ ID NO: 1561119
gacagaagcuaugaggaga

SEQ ID NO: 1648148 - RNA, 19 nt, Artificial Sequence
  Description of Artificial Sequence: Synthetic oligonucleotide
  Antisense strand to SEQ ID NO: 1648147
ucuccucauagcuucuguc

SEQ ID NO: 1648149 - RNA, 19 nt, Artificial Sequence
  Description of Artificial Sequence: Synthetic oligonucleotide
  Sense strand starting at position 727 of SEQ ID NO: 1561119
gagguugggugucucugaa

SEQ ID NO: 1648150 - RNA, 19 nt, Artificial Sequence
  Description of Artificial Sequence: Synthetic oligonucleotide
  Antisense strand to SEQ ID NO: 1648149
uucagagacacccaaccuc

SEQ ID NO: 1648151 - RNA, 19 nt, Artificial Sequence
  Description of Artificial Sequence: Synthetic oligonucleotide
  Sense strand starting at position 785 of SEQ ID NO: 1561119
guuccugggucaucuccaa

SEQ ID NO: 1648152 - RNA, 19 nt, Artificial Sequence
  Description of Artificial Sequence: Synthetic oligonucleotide
  Antisense strand to SEQ ID NO: 1648151
uuggagaugacccaggaac

SEQ ID NO: 1648153 - RNA, 19 nt, Artificial Sequence
  Description of Artificial Sequence: Synthetic oligonucleotide
  Sense strand starting at position 1149 of SEQ ID NO: 1561119
cucugaggguuggaggaau

SEQ ID NO: 1648154 - RNA, 19 nt, Artificial Sequence
  Description of Artificial Sequence: Synthetic oligonucleotide
  Antisense strand to SEQ ID NO: 1648153
auuccuccaacccucagag

SEQ ID NO: 1648155 - RNA, 19 nt, Artificial Sequence
  Description of Artificial Sequence: Synthetic oligonucleotide
  Sense strand starting at position 1289 of SEQ ID NO: 1561119
acuccugggugcucagaga

SEQ ID NO: 1648156 - RNA, 19 nt, Artificial Sequence
  Description of Artificial Sequence: Synthetic oligonucleotide
  Antisense strand to SEQ ID NO: 1648155
ucucugagcacccaggagu

SEQ ID NO: 1648157 - RNA, 19 nt, Artificial Sequence
  Description of Artificial Sequence: Synthetic oligonucleotide
  Sense strand starting at position 1452 of SEQ ID NO: 1561119
ggaggagucugggcacuua

SEQ ID NO: 1648158 - RNA, 19 nt, Artificial Sequence
  Description of Artificial Sequence: Synthetic oligonucleotide
  Antisense strand to SEQ ID NO: 1648157
uaagugcccagacuccucc

SEQ ID NO: 1648159 - RNA, 19 nt, Artificial Sequence
  Description of Artificial Sequence: Synthetic oligonucleotide
  Sense strand starting at position 1639 of SEQ ID NO: 1561119
ggcuaaaggucagaugucu

SEQ ID NO: 1648160 - RNA, 19 nt, Artificial Sequence
  Description of Artificial Sequence: Synthetic oligonucleotide
  Antisense strand to SEQ ID NO: 1648159
agacaucugaccuuuagcc

SEQ ID NO: 1648161 - RNA, 19 nt, Artificial Sequence
  Description of Artificial Sequence: Synthetic oligonucleotide
  Sense strand starting at position 1645 of SEQ ID NO: 1561119
aggucagaugucugggaga

SEQ ID NO: 1648162 - RNA, 19 nt, Artificial Sequence
  Description of Artificial Sequence: Synthetic oligonucleotide
  Antisense strand to SEQ ID NO: 1648161
ucucccagacaucugaccu

SEQ ID NO: 1648163 - RNA, 19 nt, Artificial Sequence
  Description of Artificial Sequence: Synthetic oligonucleotide
  Sense strand starting at position 1647 of SEQ ID NO: 1561119
gucagaugucugggagauc

SEQ ID NO: 1648164 - RNA, 19 nt, Artificial Sequence
  Description of Artificial Sequence: Synthetic oligonucleotide
  Antisense strand to SEQ ID NO: 1648163
gaucucccagacaucugac

SEQ ID NO: 1648165 - RNA, 19 nt, Artificial Sequence
  Description of Artificial Sequence: Synthetic oligonucleotide
  Sense strand starting at position 1725 of SEQ ID NO: 1561119
gcagaaggcugggcagauu

SEQ ID NO: 1648166 - RNA, 19 nt, Artificial Sequence
  Description of Artificial Sequence: Synthetic oligonucleotide
  Antisense strand to SEQ ID NO: 1648165
aaucugcccagccuucugc

SEQ ID NO: 1648167 - RNA, 19 nt, Artificial Sequence
  Description of Artificial Sequence: Synthetic oligonucleotide
  Sense strand starting at position 1747 of SEQ ID NO: 1561119
cagggauccucagaaggga

SEQ ID NO: 1648168 - RNA, 19 nt, Artificial Sequence
  Description of Artificial Sequence: Synthetic oligonucleotide
  Antisense strand to SEQ ID NO: 1648167
ucccuucugaggaucccug

SEQ ID NO: 1648169 - RNA, 19 nt, Artificial Sequence
  Description of Artificial Sequence: Synthetic oligonucleotide
  Sense strand starting at position 1790 of SEQ ID NO: 1561119
cgaccagucccggaaguuu

SEQ ID NO: 1648170 - RNA, 19 nt, Artificial Sequence
  Description of Artificial Sequence: Synthetic oligonucleotide
  Antisense strand to SEQ ID NO: 1648169
aaacuuccgggacuggucg

SEQ ID NO: 1648171 - RNA, 19 nt, Artificial Sequence
  Description of Artificial Sequence: Synthetic oligonucleotide
  Sense strand starting at position 1799 of SEQ ID NO: 1561119
ccggaaguuugagucccua

SEQ ID NO: 1648172 - RNA, 19 nt, Artificial Sequence
  Description of Artificial Sequence: Synthetic oligonucleotide
  Antisense strand to SEQ ID NO: 1648171
uagggacucaaacuuccgg

SEQ ID NO: 1648173 - RNA, 19 nt, Artificial Sequence
  Description of Artificial Sequence: Synthetic oligonucleotide
  Sense strand starting at position 2052 of SEQ ID NO: 1561119
gacgcuuugccaggaggaa

SEQ ID NO: 1648174 - RNA, 19 nt, Artificial Sequence
  Description of Artificial Sequence: Synthetic oligonucleotide
  Antisense strand to SEQ ID NO: 1648173
uuccuccuggcaaagcguc

SEQ ID NO: 1648175 - RNA, 19 nt, Artificial Sequence
  Description of Artificial Sequence: Synthetic oligonucleotide
  Sense strand starting at position 2244 of SEQ ID NO: 1561119
aagugcugugcccagagau

SEQ ID NO: 1648176 - RNA, 19 nt, Artificial Sequence
  Description of Artificial Sequence: Synthetic oligonucleotide
  Antisense strand to SEQ ID NO: 1648175
aucucugggcacagcacuu

SEQ ID NO: 1648177 - RNA, 19 nt, Artificial Sequence
  Description of Artificial Sequence: Synthetic oligonucleotide
  Sense strand starting at position 2368 of SEQ ID NO: 1561119
cuugucuggucagggaaau

SEQ ID NO: 1648178 - RNA, 19 nt, Artificial Sequence
  Description of Artificial Sequence: Synthetic oligonucleotide
  Antisense strand to SEQ ID NO: 1648177
auuucccugaccagacaag

SEQ ID NO: 1648179 - RNA, 19 nt, Artificial Sequence
  Description of Artificial Sequence: Synthetic oligonucleotide
  Sense strand starting at position 2369 of SEQ ID NO: 1561119
uugucuggucagggaaauc

SEQ ID NO: 1648180 - RNA, 19 nt, Artificial Sequence
  Description of Artificial Sequence: Synthetic oligonucleotide
  Antisense strand to SEQ ID NO: 1648179
gauuucccugaccagacaa

SEQ ID NO: 1648181 - RNA, 19 nt, Artificial Sequence
  Description of Artificial Sequence: Synthetic oligonucleotide
  Sense strand starting at position 2474 of SEQ ID NO: 1561119
gggacuuccuggguuagga

SEQ ID NO: 1648182 - RNA, 19 nt, Artificial Sequence
  Description of Artificial Sequence: Synthetic oligonucleotide
  Antisense strand to SEQ ID NO: 1648181
uccuaacccaggaaguccc

SEQ ID NO: 1648183 - RNA, 19 nt, Artificial Sequence
  Description of Artificial Sequence: Synthetic oligonucleotide
  Sense strand starting at position 2535 of SEQ ID NO: 1561119
gguggaucugagugugaag

SEQ ID NO: 1648184 - RNA, 19 nt, Artificial Sequence
  Description of Artificial Sequence: Synthetic oligonucleotide
  Antisense strand to SEQ ID NO: 1648183
cuucacacucagauccacc

SEQ ID NO: 1648185 - RNA, 19 nt, Artificial Sequence
  Description of Artificial Sequence: Synthetic oligonucleotide
  Sense strand starting at position 95 of SEQ ID NO: 1561120
cuuucuuaacugcagugau

SEQ ID NO: 1648186 - RNA, 19 nt, Artificial Sequence
  Description of Artificial Sequence: Synthetic oligonucleotide
  Antisense strand to SEQ ID NO: 1648185
aucacugcaguuaagaaag

SEQ ID NO: 1648187 - RNA, 19 nt, Artificial Sequence
  Description of Artificial Sequence: Synthetic oligonucleotide
  Sense strand starting at position 98 of SEQ ID NO: 1561120
ucuuaacugcagugaucua

SEQ ID NO: 1648188 - RNA, 19 nt, Artificial Sequence
  Description of Artificial Sequence: Synthetic oligonucleotide
  Antisense strand to SEQ ID NO: 1648187
uagaucacugcaguuaaga

SEQ ID NO: 1648189 - RNA, 19 nt, Artificial Sequence
  Description of Artificial Sequence: Synthetic oligonucleotide
  Sense strand starting at position 109 of SEQ ID NO: 1561120
gugaucuacuggcucuaaa

SEQ ID NO: 1648190 - RNA, 19 nt, Artificial Sequence
  Description of Artificial Sequence: Synthetic oligonucleotide
  Antisense strand to SEQ ID NO: 1648189
uuuagagccaguagaucac

SEQ ID NO: 1648191 - RNA, 19 nt, Artificial Sequence
  Description of Artificial Sequence: Synthetic oligonucleotide
  Sense strand starting at position 150 of SEQ ID NO: 1561120
uuggauguauggagguaga

SEQ ID NO: 1648192 - RNA, 19 nt, Artificial Sequence
  Description of Artificial Sequence: Synthetic oligonucleotide
  Antisense strand to SEQ ID NO: 1648191
ucuaccuccauacauccaa

SEQ ID NO: 1648193 - RNA, 19 nt, Artificial Sequence
  Description of Artificial Sequence: Synthetic oligonucleotide
  Sense strand starting at position 169 of SEQ ID NO: 1561120
aggaaagucuacuccacua

SEQ ID NO: 1648194 - RNA, 19 nt, Artificial Sequence
  Description of Artificial Sequence: Synthetic oligonucleotide
  Antisense strand to SEQ ID NO: 1648193
uaguggaguagacuuuccu

SEQ ID NO: 1648195 - RNA, 19 nt, Artificial Sequence
  Description of Artificial Sequence: Synthetic oligonucleotide
  Sense strand starting at position 899 of SEQ ID NO: 1561120
acgagaaucgcuuaaucgu

SEQ ID NO: 1648196 - RNA, 19 nt, Artificial Sequence
  Description of Artificial Sequence: Synthetic oligonucleotide
  Antisense strand to SEQ ID NO: 1648195
acgauuaagcgauucucgu

SEQ ID NO: 1648197 - RNA, 19 nt, Artificial Sequence
  Description of Artificial Sequence: Synthetic oligonucleotide
  Sense strand starting at position 905 of SEQ ID NO: 1561120
aucgcuuaaucguuugaac

SEQ ID NO: 1648198 - RNA, 19 nt, Artificial Sequence
  Description of Artificial Sequence: Synthetic oligonucleotide
  Antisense strand to SEQ ID NO: 1648197
guucaaacgauuaagcgau

SEQ ID NO: 1648199 - RNA, 19 nt, Artificial Sequence
  Description of Artificial Sequence: Synthetic oligonucleotide
  Sense strand starting at position 1245 of SEQ ID NO: 1561120
ggacuuuauucugagggag

SEQ ID NO: 1648200 - RNA, 19 nt, Artificial Sequence
  Description of Artificial Sequence: Synthetic oligonucleotide
  Antisense strand to SEQ ID NO: 1648199
cucccucagaauaaagucc

SEQ ID NO: 1648201 - RNA, 19 nt, Artificial Sequence
  Description of Artificial Sequence: Synthetic oligonucleotide
  Sense strand starting at position 1461 of SEQ ID NO: 1561120
ggaggaagucccugaucuu

SEQ ID NO: 1648202 - RNA, 19 nt, Artificial Sequence
  Description of Artificial Sequence: Synthetic oligonucleotide
  Antisense strand to SEQ ID NO: 1648201
aagaucagggacuuccucc

SEQ ID NO: 1648203 - RNA, 19 nt, Artificial Sequence
  Description of Artificial Sequence: Synthetic oligonucleotide
  Sense strand starting at position 1464 of SEQ ID NO: 1561120
ggaagucccugaucuuguu

SEQ ID NO: 1648204 - RNA, 19 nt, Artificial Sequence
  Description of Artificial Sequence: Synthetic oligonucleotide
  Antisense strand to SEQ ID NO: 1648203
aacaagaucagggacuucc

SEQ ID NO: 1648205 - RNA, 19 nt, Artificial Sequence
  Description of Artificial Sequence: Synthetic oligonucleotide
  Sense strand starting at position 1470 of SEQ ID NO: 1561120
cccugaucuuguuuguauu

SEQ ID NO: 1648206 - RNA, 19 nt, Artificial Sequence
  Description of Artificial Sequence: Synthetic oligonucleotide
  Antisense strand to SEQ ID NO: 1648205
aauacaaacaagaucaggg

SEQ ID NO: 1648207 - RNA, 19 nt, Artificial Sequence
  Description of Artificial Sequence: Synthetic oligonucleotide
  Sense strand starting at position 1480 of SEQ ID NO: 1561120
guuuguauucaagagagug

SEQ ID NO: 1648208 - RNA, 19 nt, Artificial Sequence
  Description of Artificial Sequence: Synthetic oligonucleotide
  Antisense strand to SEQ ID NO: 1648207
cacucucuugaauacaaac

SEQ ID NO: 1648209 - RNA, 19 nt, Artificial Sequence
  Description of Artificial Sequence: Synthetic oligonucleotide
  Sense strand starting at position 2106 of SEQ ID NO: 1561120
gagaauguauaagucuacu

SEQ ID NO: 1648210 - RNA, 19 nt, Artificial Sequence
  Description of Artificial Sequence: Synthetic oligonucleotide
  Antisense strand to SEQ ID NO: 1648209
aguagacuuauacauucuc

SEQ ID NO: 1648211 - RNA, 19 nt, Artificial Sequence
  Description of Artificial Sequence: Synthetic oligonucleotide
  Sense strand starting at position 2112 of SEQ ID NO: 1561120
guauaagucuacuugaaug

SEQ ID NO: 1648212 - RNA, 19 nt, Artificial Sequence
  Description of Artificial Sequence: Synthetic oligonucleotide
  Antisense strand to SEQ ID NO: 1648211
cauucaaguagacuuauac

SEQ ID NO: 1648213 - RNA, 19 nt, Artificial Sequence
  Description of Artificial Sequence: Synthetic oligonucleotide
  Sense strand starting at position 2120 of SEQ ID NO: 1561120
cuacuugaaugggagaaua

SEQ ID NO: 1648214 - RNA, 19 nt, Artificial Sequence
  Description of Artificial Sequence: Synthetic oligonucleotide
  Antisense strand to SEQ ID NO: 1648213
uauucucccauucaaguag

SEQ ID NO: 1648215 - RNA, 19 nt, Artificial Sequence
  Description of Artificial Sequence: Synthetic oligonucleotide
  Sense strand starting at position 2131 of SEQ ID NO: 1561120
ggagaauaaucuucgcuau

SEQ ID NO: 1648216 - RNA, 19 nt, Artificial Sequence
  Description of Artificial Sequence: Synthetic oligonucleotide
  Antisense strand to SEQ ID NO: 1648215
auagcgaagauuauucucc

SEQ ID NO: 1648217 - RNA, 19 nt, Artificial Sequence
  Description of Artificial Sequence: Synthetic oligonucleotide
  Sense strand starting at position 2133 of SEQ ID NO: 1561120
agaauaaucuucgcuauau

SEQ ID NO: 1648218 - RNA, 19 nt, Artificial Sequence
  Description of Artificial Sequence: Synthetic oligonucleotide
  Antisense strand to SEQ ID NO: 1648217
auauagcgaagauuauucu

SEQ ID NO: 1648219 - RNA, 19 nt, Artificial Sequence
  Description of Artificial Sequence: Synthetic oligonucleotide
  Sense strand starting at position 2142 of SEQ ID NO: 1561120
uucgcuauaucugcaaaga

SEQ ID NO: 1648220 - RNA, 19 nt, Artificial Sequence
  Description of Artificial Sequence: Synthetic oligonucleotide
  Antisense strand to SEQ ID NO: 1648219
ucuuugcagauauagcgaa

SEQ ID NO: 1648221 - RNA, 19 nt, Artificial Sequence
  Description of Artificial Sequence: Synthetic oligonucleotide
  Sense strand starting at position 2143 of SEQ ID NO: 1561120
ucgcuauaucugcaaagac

SEQ ID NO: 1648222 - RNA, 19 nt, Artificial Sequence
  Description of Artificial Sequence: Synthetic oligonucleotide
  Antisense strand to SEQ ID NO: 1648221
gucuuugcagauauagcga

SEQ ID NO: 1648223 - RNA, 19 nt, Artificial Sequence
  Description of Artificial Sequence: Synthetic oligonucleotide
  Sense strand starting at position 2163 of SEQ ID NO: 1561120
gagacauggucugucucuu

SEQ ID NO: 1648224 - RNA, 19 nt, Artificial Sequence
  Description of Artificial Sequence: Synthetic oligonucleotide
  Antisense strand to SEQ ID NO: 1648223
aagagacagaccaugucuc

SEQ ID NO: 1648225 - RNA, 19 nt, Artificial Sequence
  Description of Artificial Sequence: Synthetic oligonucleotide
  Sense strand starting at position 2169 of SEQ ID NO: 1561120
uggucugucucuuuauuua

SEQ ID NO: 1648226 - RNA, 19 nt, Artificial Sequence
  Description of Artificial Sequence: Synthetic oligonucleotide
  Antisense strand to SEQ ID NO: 1648225
uaaauaaagagacagacca

SEQ ID NO: 1648227 - RNA, 19 nt, Artificial Sequence
  Description of Artificial Sequence: Synthetic oligonucleotide
  Sense strand starting at position 2524 of SEQ ID NO: 1561120
uuucucuuacuuugaugga

SEQ ID NO: 1648228 - RNA, 19 nt, Artificial Sequence
  Description of Artificial Sequence: Synthetic oligonucleotide
  Antisense strand to SEQ ID NO: 1648227
uccaucaaaguaagagaaa

SEQ ID NO: 1648229 - RNA, 19 nt, Artificial Sequence
  Description of Artificial Sequence: Synthetic oligonucleotide
  Sense strand starting at position 2810 of SEQ ID NO: 1561120
aaggaugaguucucacuau

SEQ ID NO: 1648230 - RNA, 19 nt, Artificial Sequence
  Description of Artificial Sequence: Synthetic oligonucleotide
  Antisense strand to SEQ ID NO: 1648229
auagugagaacucauccuu

SEQ ID NO: 1648231 - RNA, 19 nt, Artificial Sequence
  Description of Artificial Sequence: Synthetic oligonucleotide
  Sense strand starting at position 3482 of SEQ ID NO: 1561120
cccucaggcuagucuugaa

SEQ ID NO: 1648232 - RNA, 19 nt, Artificial Sequence
  Description of Artificial Sequence: Synthetic oligonucleotide
  Antisense strand to SEQ ID NO: 1648231
uucaagacuagccugaggg

SEQ ID NO: 1648233 - RNA, 19 nt, Artificial Sequence
  Description of Artificial Sequence: Synthetic oligonucleotide
  Sense strand starting at position 3571 of SEQ ID NO: 1561120
ccuggcgucuaucuuuaau

SEQ ID NO: 1648234 - RNA, 19 nt, Artificial Sequence
  Description of Artificial Sequence: Synthetic oligonucleotide
  Antisense strand to SEQ ID NO: 1648233
auuaaagauagacgccagg

SEQ ID NO: 1648235 - RNA, 19 nt, Artificial Sequence
  Description of Artificial Sequence: Synthetic oligonucleotide
  Sense strand starting at position 3573 of SEQ ID NO: 1561120
uggcgucuaucuuuaaucu

SEQ ID NO: 1648236 - RNA, 19 nt, Artificial Sequence
  Description of Artificial Sequence: Synthetic oligonucleotide
  Antisense strand to SEQ ID NO: 1648235
agauuaaagauagacgcca

SEQ ID NO: 1648237 - RNA, 19 nt, Artificial Sequence
  Description of Artificial Sequence: Synthetic oligonucleotide
  Sense strand starting at position 3574 of SEQ ID NO: 1561120
ggcgucuaucuuuaaucuu

SEQ ID NO: 1648238 - RNA, 19 nt, Artificial Sequence
  Description of Artificial Sequence: Synthetic oligonucleotide
  Antisense strand to SEQ ID NO: 1648237
aagauuaaagauagacgcc

SEQ ID NO: 1648239 - RNA, 19 nt, Artificial Sequence
  Description of Artificial Sequence: Synthetic oligonucleotide
  Sense strand starting at position 3633 of SEQ ID NO: 1561120
ugggaauuagggcguggau

SEQ ID NO: 1648240 - RNA, 19 nt, Artificial Sequence
  Description of Artificial Sequence: Synthetic oligonucleotide
  Antisense strand to SEQ ID NO: 1648239
auccacgcccuaauuccca

SEQ ID NO: 1648241 - RNA, 19 nt, Artificial Sequence
  Description of Artificial Sequence: Synthetic oligonucleotide
  Sense strand starting at position 3635 of SEQ ID NO: 1561120
ggaauuagggcguggauau

SEQ ID NO: 1648242 - RNA, 19 nt, Artificial Sequence
  Description of Artificial Sequence: Synthetic oligonucleotide
  Antisense strand to SEQ ID NO: 1648241
auauccacgcccuaauucc

SEQ ID NO: 1648243 - RNA, 19 nt, Artificial Sequence
  Description of Artificial Sequence: Synthetic oligonucleotide
  Sense strand starting at position 3636 of SEQ ID NO: 1561120
gaauuagggcguggauauc

SEQ ID NO: 1648244 - RNA, 19 nt, Artificial Sequence
  Description of Artificial Sequence: Synthetic oligonucleotide
  Antisense strand to SEQ ID NO: 1648243
gauauccacgcccuaauuc

SEQ ID NO: 1648245 - RNA, 19 nt, Artificial Sequence
  Description of Artificial Sequence: Synthetic oligonucleotide
  Sense strand starting at position 3648 of SEQ ID NO: 1561120
ggauaucuuuaagagacca

SEQ ID NO: 1648246 - RNA, 19 nt, Artificial Sequence
  Description of Artificial Sequence: Synthetic oligonucleotide
  Antisense strand to SEQ ID NO: 1648245
uggucucuuaaagauaucc

SEQ ID NO: 1648247 - RNA, 19 nt, Artificial Sequence
  Description of Artificial Sequence: Synthetic oligonucleotide
  Sense strand starting at position 3684 of SEQ ID NO: 1561120
gccuguuuaauauggugga

SEQ ID NO: 1648248 - RNA, 19 nt, Artificial Sequence
  Description of Artificial Sequence: Synthetic oligonucleotide
  Antisense strand to SEQ ID NO: 1648247
uccaccauauuaaacaggc

SEQ ID NO: 1648249 - RNA, 19 nt, Artificial Sequence
  Description of Artificial Sequence: Synthetic oligonucleotide
  Sense strand starting at position 3688 of SEQ ID NO: 1561120
guuuaauaugguggacaau

SEQ ID NO: 1648250 - RNA, 19 nt, Artificial Sequence
  Description of Artificial Sequence: Synthetic oligonucleotide
  Antisense strand to SEQ ID NO: 1648249
auuguccaccauauuaaac

SEQ ID NO: 1648251 - RNA, 19 nt, Artificial Sequence
  Description of Artificial Sequence: Synthetic oligonucleotide
  Sense strand starting at position 3753 of SEQ ID NO: 1561120
cccacuugucaugguguau

SEQ ID NO: 1648252 - RNA, 19 nt, Artificial Sequence
  Description of Artificial Sequence: Synthetic oligonucleotide
  Antisense strand to SEQ ID NO: 1648251
auacaccaugacaaguggg

SEQ ID NO: 1648253 - RNA, 19 nt, Artificial Sequence
  Description of Artificial Sequence: Synthetic oligonucleotide
  Sense strand starting at position 3757 of SEQ ID NO: 1561120
cuugucaugguguauaauu

SEQ ID NO: 1648254 - RNA, 19 nt, Artificial Sequence
  Description of Artificial Sequence: Synthetic oligonucleotide
  Antisense strand to SEQ ID NO: 1648253
aauuauacaccaugacaag

SEQ ID NO: 1648255 - RNA, 19 nt, Artificial Sequence
  Description of Artificial Sequence: Synthetic oligonucleotide
  Sense strand starting at position 3827 of SEQ ID NO: 1561120
gcacgucuucaugagggau

SEQ ID NO: 1648256 - RNA, 19 nt, Artificial Sequence
  Description of Artificial Sequence: Synthetic oligonucleotide
  Antisense strand to SEQ ID NO: 1648255
aucccucaugaagacgugc

SEQ ID NO: 1648257 - RNA, 19 nt, Artificial Sequence
  Description of Artificial Sequence: Synthetic oligonucleotide
  Sense strand starting at position 3830 of SEQ ID NO: 1561120
cgucuucaugagggauaug

SEQ ID NO: 1648258 - RNA, 19 nt, Artificial Sequence
  Description of Artificial Sequence: Synthetic oligonucleotide
  Antisense strand to SEQ ID NO: 1648257
cauaucccucaugaagacg

SEQ ID NO: 1648259 - RNA, 19 nt, Artificial Sequence
  Description of Artificial Sequence: Synthetic oligonucleotide
  Sense strand starting at position 3889 of SEQ ID NO: 1561120
ugguaucagggucauaguu

SEQ ID NO: 1648260 - RNA, 19 nt, Artificial Sequence
  Description of Artificial Sequence: Synthetic oligonucleotide
  Antisense strand to SEQ ID NO: 1648259
aacuaugacccugauacca

SEQ ID NO: 1648261 - RNA, 19 nt, Artificial Sequence
  Description of Artificial Sequence: Synthetic oligonucleotide
  Sense strand starting at position 3954 of SEQ ID NO: 1561120
ugaugugaaauugguguua

SEQ ID NO: 1648262 - RNA, 19 nt, Artificial Sequence
  Description of Artificial Sequence: Synthetic oligonucleotide
  Antisense strand to SEQ ID NO: 1648261
uaacaccaauuucacauca

SEQ ID NO: 1648263 - RNA, 19 nt, Artificial Sequence
  Description of Artificial Sequence: Synthetic oligonucleotide
  Sense strand starting at position 3980 of SEQ ID NO: 1561120
uuugaaccuuuggcagaau

SEQ ID NO: 1648264 - RNA, 19 nt, Artificial Sequence
  Description of Artificial Sequence: Synthetic oligonucleotide
  Antisense strand to SEQ ID NO: 1648263
auucugccaaagguucaaa

SEQ ID NO: 1648265 - RNA, 19 nt, Artificial Sequence
  Description of Artificial Sequence: Synthetic oligonucleotide
  Sense strand starting at position 21 of SEQ ID NO: 1561121
ggaugcuuccagcgucaca

SEQ ID NO: 1648266 - RNA, 19 nt, Artificial Sequence
  Description of Artificial Sequence: Synthetic oligonucleotide
  Antisense strand to SEQ ID NO: 1648265
ugugacgcuggaagcaucc

SEQ ID NO: 1648267 - RNA, 19 nt, Artificial Sequence
  Description of Artificial Sequence: Synthetic oligonucleotide
  Sense strand starting at position 32 of SEQ ID NO: 1561121
gcgucacaucccuggcaaa

SEQ ID NO: 1648268 - RNA, 19 nt, Artificial Sequence
  Description of Artificial Sequence: Synthetic oligonucleotide
  Antisense strand to SEQ ID NO: 1648267
uuugccagggaugugacgc

SEQ ID NO: 1648269 - RNA, 19 nt, Artificial Sequence
  Description of Artificial Sequence: Synthetic oligonucleotide
  Sense strand starting at position 33 of SEQ ID NO: 1561121
cgucacaucccuggcaaau

SEQ ID NO: 1648270 - RNA, 19 nt, Artificial Sequence
  Description of Artificial Sequence: Synthetic oligonucleotide
  Antisense strand to SEQ ID NO: 1648269
auuugccagggaugugacg

SEQ ID NO: 1648271 - RNA, 19 nt, Artificial Sequence
  Description of Artificial Sequence: Synthetic oligonucleotide
  Sense strand starting at position 69 of SEQ ID NO: 1561121
cccuccugcugacugauaa

SEQ ID NO: 1648272 - RNA, 19 nt, Artificial Sequence
  Description of Artificial Sequence: Synthetic oligonucleotide
  Antisense strand to SEQ ID NO: 1648271
uuaucagucagcaggaggg

SEQ ID NO: 1648273 - RNA, 19 nt, Artificial Sequence
  Description of Artificial Sequence: Synthetic oligonucleotide
  Sense strand starting at position 79 of SEQ ID NO: 1561121
gacugauaagccggugcaa

SEQ ID NO: 1648274 - RNA, 19 nt, Artificial Sequence
  Description of Artificial Sequence: Synthetic oligonucleotide
  Antisense strand to SEQ ID NO: 1648273
uugcaccggcuuaucaguc

SEQ ID NO: 1648275 - RNA, 19 nt, Artificial Sequence
  Description of Artificial Sequence: Synthetic oligonucleotide
  Sense strand starting at position 397 of SEQ ID NO: 1561121
cuggccuugccugagugaa

SEQ ID NO: 1648276 - RNA, 19 nt, Artificial Sequence
  Description of Artificial Sequence: Synthetic oligonucleotide
  Antisense strand to SEQ ID NO: 1648275
uucacucaggcaaggccag

SEQ ID NO: 1648277 - RNA, 19 nt, Artificial Sequence
  Description of Artificial Sequence: Synthetic oligonucleotide
  Sense strand starting at position 399 of SEQ ID NO: 1561121
ggccuugccugagugaaag

SEQ ID NO: 1648278 - RNA, 19 nt, Artificial Sequence
  Description of Artificial Sequence: Synthetic oligonucleotide
  Antisense strand to SEQ ID NO: 1648277
cuuucacucaggcaaggcc

SEQ ID NO: 1648279 - RNA, 19 nt, Artificial Sequence
  Description of Artificial Sequence: Synthetic oligonucleotide
  Sense strand starting at position 410 of SEQ ID NO: 1561121
agugaaaguccguaacgca

SEQ ID NO: 1648280 - RNA, 19 nt, Artificial Sequence
  Description of Artificial Sequence: Synthetic oligonucleotide
  Antisense strand to SEQ ID NO: 1648279
ugcguuacggacuuucacu

SEQ ID NO: 1648281 - RNA, 19 nt, Artificial Sequence
  Description of Artificial Sequence: Synthetic oligonucleotide
  Sense strand starting at position 2235 of SEQ ID NO: 1561121
gcucauugguccucggaga

SEQ ID NO: 1648282 - RNA, 19 nt, Artificial Sequence
  Description of Artificial Sequence: Synthetic oligonucleotide
  Antisense strand to SEQ ID NO: 1648281
ucuccgaggaccaaugagc

SEQ ID NO: 1648283 - RNA, 19 nt, Artificial Sequence
  Description of Artificial Sequence: Synthetic oligonucleotide
  Sense strand starting at position 2671 of SEQ ID NO: 1561121
auggcuugauaagguugaa

SEQ ID NO: 1648284 - RNA, 19 nt, Artificial Sequence
  Description of Artificial Sequence: Synthetic oligonucleotide
  Antisense strand to SEQ ID NO: 1648283
uucaaccuuaucaagccau

SEQ ID NO: 1648285 - RNA, 19 nt, Artificial Sequence
  Description of Artificial Sequence: Synthetic oligonucleotide
  Sense strand starting at position 2693 of SEQ ID NO: 1561121
auugaacccuccugugcua

SEQ ID NO: 1648286 - RNA, 19 nt, Artificial Sequence
  Description of Artificial Sequence: Synthetic oligonucleotide
  Antisense strand to SEQ ID NO: 1648285
uagcacaggaggguucaau

SEQ ID NO: 1648287 - RNA, 19 nt, Artificial Sequence
  Description of Artificial Sequence: Synthetic oligonucleotide
  Sense strand starting at position 2748 of SEQ ID NO: 1561121
gguuguuuagcuggaacaa

SEQ ID NO: 1648288 - RNA, 19 nt, Artificial Sequence
  Description of Artificial Sequence: Synthetic oligonucleotide
  Antisense strand to SEQ ID NO: 1648287
uuguuccagcuaaacaacc

SEQ ID NO: 1648289 - RNA, 19 nt, Artificial Sequence
  Description of Artificial Sequence: Synthetic oligonucleotide
  Sense strand starting at position 2749 of SEQ ID NO: 1561121
guuguuuagcuggaacaaa

SEQ ID NO: 1648290 - RNA, 19 nt, Artificial Sequence
  Description of Artificial Sequence: Synthetic oligonucleotide
  Antisense strand to SEQ ID NO: 1648289
uuuguuccagcuaaacaac

SEQ ID NO: 1648291 - RNA, 19 nt, Artificial Sequence
  Description of Artificial Sequence: Synthetic oligonucleotide
  Sense strand starting at position 2760 of SEQ ID NO: 1561121
ggaacaaacuaucuuggua

SEQ ID NO: 1648292 - RNA, 19 nt, Artificial Sequence
  Description of Artificial Sequence: Synthetic oligonucleotide
  Antisense strand to SEQ ID NO: 1648291
uaccaagauaguuuguucc

SEQ ID NO: 1648293 - RNA, 19 nt, Artificial Sequence
  Description of Artificial Sequence: Synthetic oligonucleotide
  Sense strand starting at position 2882 of SEQ ID NO: 1561121
guagaaauuacaggugcau

SEQ ID NO: 1648294 - RNA, 19 nt, Artificial Sequence
  Description of Artificial Sequence: Synthetic oligonucleotide
  Antisense strand to SEQ ID NO: 1648293
augcaccuguaauuucuac

SEQ ID NO: 1648295 - RNA, 19 nt, Artificial Sequence
  Description of Artificial Sequence: Synthetic oligonucleotide
  Sense strand starting at position 2884 of SEQ ID NO: 1561121
agaaauuacaggugcaugu

SEQ ID NO: 1648296 - RNA, 19 nt, Artificial Sequence
  Description of Artificial Sequence: Synthetic oligonucleotide
  Antisense strand to SEQ ID NO: 1648295
acaugcaccuguaauuucu

SEQ ID NO: 1648297 - RNA, 19 nt, Artificial Sequence
  Description of Artificial Sequence: Synthetic oligonucleotide
  Sense strand starting at position 2891 of SEQ ID NO: 1561121
acaggugcaugucuguaau

SEQ ID NO: 1648298 - RNA, 19 nt, Artificial Sequence
  Description of Artificial Sequence: Synthetic oligonucleotide
  Antisense strand to SEQ ID NO: 1648297
auuacagacaugcaccugu

SEQ ID NO: 1648299 - RNA, 19 nt, Artificial Sequence
  Description of Artificial Sequence: Synthetic oligonucleotide
  Sense strand starting at position 3150 of SEQ ID NO: 1561121
uggagauaaugcuggauaa

SEQ ID NO: 1648300 - RNA, 19 nt, Artificial Sequence
  Description of Artificial Sequence: Synthetic oligonucleotide
  Antisense strand to SEQ ID NO: 1648299
uuauccagcauuaucucca

SEQ ID NO: 1648301 - RNA, 19 nt, Artificial Sequence
  Description of Artificial Sequence: Synthetic oligonucleotide
  Sense strand starting at position 3228 of SEQ ID NO: 1561121
ggaaauacuuggugaccau

SEQ ID NO: 1648302 - RNA, 19 nt, Artificial Sequence
  Description of Artificial Sequence: Synthetic oligonucleotide
  Antisense strand to SEQ ID NO: 1648301
auggucaccaaguauuucc

SEQ ID NO: 1648303 - RNA, 19 nt, Artificial Sequence
  Description of Artificial Sequence: Synthetic oligonucleotide
  Sense strand starting at position 3308 of SEQ ID NO: 1561121
ccuagucauucucucaagu

SEQ ID NO: 1648304 - RNA, 19 nt, Artificial Sequence
  Description of Artificial Sequence: Synthetic oligonucleotide
  Antisense strand to SEQ ID NO: 1648303
acuugagagaaugacuagg

SEQ ID NO: 1648305 - RNA, 19 nt, Artificial Sequence
  Description of Artificial Sequence: Synthetic oligonucleotide
  Sense strand starting at position 3335 of SEQ ID NO: 1561121
ggagaugugcugugagugu

SEQ ID NO: 1648306 - RNA, 19 nt, Artificial Sequence
  Description of Artificial Sequence: Synthetic oligonucleotide
  Antisense strand to SEQ ID NO: 1648305
acacucacagcacaucucc

SEQ ID NO: 1648307 - RNA, 19 nt, Artificial Sequence
  Description of Artificial Sequence: Synthetic oligonucleotide
  Sense strand starting at position 3352 of SEQ ID NO: 1561121
gugaacuacacacggaauu

SEQ ID NO: 1648308 - RNA, 19 nt, Artificial Sequence
  Description of Artificial Sequence: Synthetic oligonucleotide
  Antisense strand to SEQ ID NO: 1648307
aauuccguguguaguucac

SEQ ID NO: 1648309 - RNA, 19 nt, Artificial Sequence
  Description of Artificial Sequence: Synthetic oligonucleotide
  Sense strand starting at position 3439 of SEQ ID NO: 1561121
agauguacuguugauacua

SEQ ID NO: 1648310 - RNA, 19 nt, Artificial Sequence
  Description of Artificial Sequence: Synthetic oligonucleotide
  Antisense strand to SEQ ID NO: 1648309
uaguaucaacaguacaucu

SEQ ID NO: 1648311 - RNA, 19 nt, Artificial Sequence
  Description of Artificial Sequence: Synthetic oligonucleotide
  Sense strand starting at position 3441 of SEQ ID NO: 1561121
auguacuguugauacuaau

SEQ ID NO: 1648312 - RNA, 19 nt, Artificial Sequence
  Description of Artificial Sequence: Synthetic oligonucleotide
  Antisense strand to SEQ ID NO: 1648311
auuaguaucaacaguacau

SEQ ID NO: 1648313 - RNA, 19 nt, Artificial Sequence
  Description of Artificial Sequence: Synthetic oligonucleotide
  Sense strand starting at position 3858 of SEQ ID NO: 1561121
ucuuaugagcuauacgaaa

SEQ ID NO: 1648314 - RNA, 19 nt, Artificial Sequence
  Description of Artificial Sequence: Synthetic oligonucleotide
  Antisense strand to SEQ ID NO: 1648313
uuucguauagcucauaaga

SEQ ID NO: 1648315 - RNA, 19 nt, Artificial Sequence
  Description of Artificial Sequence: Synthetic oligonucleotide
  Sense strand starting at position 3902 of SEQ ID NO: 1561121
aauacugagcuguacuaga

SEQ ID NO: 1648316 - RNA, 19 nt, Artificial Sequence
  Description of Artificial Sequence: Synthetic oligonucleotide
  Antisense strand to SEQ ID NO: 1648315
ucuaguacagcucaguauu

SEQ ID NO: 1648317 - RNA, 19 nt, Artificial Sequence
  Description of Artificial Sequence: Synthetic oligonucleotide
  Sense strand starting at position 3948 of SEQ ID NO: 1561121
cugcacaggcaucauuaaa

SEQ ID NO: 1648318 - RNA, 19 nt, Artificial Sequence
  Description of Artificial Sequence: Synthetic oligonucleotide
  Antisense strand to SEQ ID NO: 1648317
uuuaaugaugccugugcag

SEQ ID NO: 1648319 - RNA, 19 nt, Artificial Sequence
  Description of Artificial Sequence: Synthetic oligonucleotide
  Sense strand starting at position 244 of SEQ ID NO: 1561122
gcuauuuauuuggguacca

SEQ ID NO: 1648320 - RNA, 19 nt, Artificial Sequence
  Description of Artificial Sequence: Synthetic oligonucleotide
  Antisense strand to SEQ ID NO: 1648319
ugguacccaaauaaauagc

SEQ ID NO: 1648321 - RNA, 19 nt, Artificial Sequence
  Description of Artificial Sequence: Synthetic oligonucleotide
  Sense strand starting at position 257 of SEQ ID NO: 1561122
guaccagcuuccuacuaga

SEQ ID NO: 1648322 - RNA, 19 nt, Artificial Sequence
  Description of Artificial Sequence: Synthetic oligonucleotide
  Antisense strand to SEQ ID NO: 1648321
ucuaguaggaagcugguac

SEQ ID NO: 1648323 - RNA, 19 nt, Artificial Sequence
  Description of Artificial Sequence: Synthetic oligonucleotide
  Sense strand starting at position 260 of SEQ ID NO: 1561122
ccagcuuccuacuagauag

SEQ ID NO: 1648324 - RNA, 19 nt, Artificial Sequence
  Description of Artificial Sequence: Synthetic oligonucleotide
  Antisense strand to SEQ ID NO: 1648323
cuaucuaguaggaagcugg

SEQ ID NO: 1648325 - RNA, 19 nt, Artificial Sequence
  Description of Artificial Sequence: Synthetic oligonucleotide
  Sense strand starting at position 592 of SEQ ID NO: 1561122
cgagaugccuccucauguu

SEQ ID NO: 1648326 - RNA, 19 nt, Artificial Sequence
  Description of Artificial Sequence: Synthetic oligonucleotide
  Antisense strand to SEQ ID NO: 1648325
aacaugaggaggcaucucg

SEQ ID NO: 1648327 - RNA, 19 nt, Artificial Sequence
  Description of Artificial Sequence: Synthetic oligonucleotide
  Sense strand starting at position 936 of SEQ ID NO: 1561122
caaaguuucuccucagagg

SEQ ID NO: 1648328 - RNA, 19 nt, Artificial Sequence
  Description of Artificial Sequence: Synthetic oligonucleotide
  Antisense strand to SEQ ID NO: 1648327
ccucugaggagaaacuuug

SEQ ID NO: 1648329 - RNA, 19 nt, Artificial Sequence
  Description of Artificial Sequence: Synthetic oligonucleotide
  Sense strand starting at position 1224 of SEQ ID NO: 1561122
cggcaagcuucugcuuacu

SEQ ID NO: 1648330 - RNA, 19 nt, Artificial Sequence
  Description of Artificial Sequence: Synthetic oligonucleotide
  Antisense strand to SEQ ID NO: 1648329
aguaagcagaagcuugccg

SEQ ID NO: 1648331 - RNA, 19 nt, Artificial Sequence
  Description of Artificial Sequence: Synthetic oligonucleotide
  Sense strand starting at position 1235 of SEQ ID NO: 1561122
ugcuuacucccacaggaga

SEQ ID NO: 1648332 - RNA, 19 nt, Artificial Sequence
  Description of Artificial Sequence: Synthetic oligonucleotide
  Antisense strand to SEQ ID NO: 1648331
ucuccugugggaguaagca

SEQ ID NO: 1648333 - RNA, 19 nt, Artificial Sequence
  Description of Artificial Sequence: Synthetic oligonucleotide
  Sense strand starting at position 1737 of SEQ ID NO: 1561122
cgcccacucgugcuggaua

SEQ ID NO: 1648334 - RNA, 19 nt, Artificial Sequence
  Description of Artificial Sequence: Synthetic oligonucleotide
  Antisense strand to SEQ ID NO: 1648333
uauccagcacgagugggcg

SEQ ID NO: 1648335 - RNA, 19 nt, Artificial Sequence
  Description of Artificial Sequence: Synthetic oligonucleotide
  Sense strand starting at position 1738 of SEQ ID NO: 1561122
gcccacucgugcuggauaa

SEQ ID NO: 1648336 - RNA, 19 nt, Artificial Sequence
  Description of Artificial Sequence: Synthetic oligonucleotide
  Antisense strand to SEQ ID NO: 1648335
uuauccagcacgagugggc

SEQ ID NO: 1648337 - RNA, 19 nt, Artificial Sequence
  Description of Artificial Sequence: Synthetic oligonucleotide
  Sense strand starting at position 1739 of SEQ ID NO: 1561122
cccacucgugcuggauaaa

SEQ ID NO: 1648338 - RNA, 19 nt, Artificial Sequence
  Description of Artificial Sequence: Synthetic oligonucleotide
  Antisense strand to SEQ ID NO: 1648337
uuuauccagcacgaguggg

SEQ ID NO: 1648339 - RNA, 19 nt, Artificial Sequence
  Description of Artificial Sequence: Synthetic oligonucleotide
  Sense strand starting at position 2395 of SEQ ID NO: 1561122
cagguugguugucauggua

SEQ ID NO: 1648340 - RNA, 19 nt, Artificial Sequence
  Description of Artificial Sequence: Synthetic oligonucleotide
  Antisense strand to SEQ ID NO: 1648339
uaccaugacaaccaaccug

SEQ ID NO: 1648341 - RNA, 19 nt, Artificial Sequence
  Description of Artificial Sequence: Synthetic oligonucleotide
  Sense strand starting at position 2467 of SEQ ID NO: 1561122
ccaccuuugugguuaugga

SEQ ID NO: 1648342 - RNA, 19 nt, Artificial Sequence
  Description of Artificial Sequence: Synthetic oligonucleotide
  Antisense strand to SEQ ID NO: 1648341
uccauaaccacaaaggugg

SEQ ID NO: 1648343 - RNA, 19 nt, Artificial Sequence
  Description of Artificial Sequence: Synthetic oligonucleotide
  Sense strand starting at position 2691 of SEQ ID NO: 1561122
uuggcauuaccaugguaac

SEQ ID NO: 1648344 - RNA, 19 nt, Artificial Sequence
  Description of Artificial Sequence: Synthetic oligonucleotide
  Antisense strand to SEQ ID NO: 1648343
guuaccaugguaaugccaa

SEQ ID NO: 1648345 - RNA, 19 nt, Artificial Sequence
  Description of Artificial Sequence: Synthetic oligonucleotide
  Sense strand starting at position 2790 of SEQ ID NO: 1561122
ggcaguugcuaugguuaca

SEQ ID NO: 1648346 - RNA, 19 nt, Artificial Sequence
  Description of Artificial Sequence: Synthetic oligonucleotide
  Antisense strand to SEQ ID NO: 1648345
uguaaccauagcaacugcc

SEQ ID NO: 1648347 - RNA, 19 nt, Artificial Sequence
  Description of Artificial Sequence: Synthetic oligonucleotide
  Sense strand starting at position 2852 of SEQ ID NO: 1561122
aggccugguuacuaugaua

SEQ ID NO: 1648348 - RNA, 19 nt, Artificial Sequence
  Description of Artificial Sequence: Synthetic oligonucleotide
  Antisense strand to SEQ ID NO: 1648347
uaucauaguaaccaggccu

SEQ ID NO: 1648349 - RNA, 19 nt, Artificial Sequence
  Description of Artificial Sequence: Synthetic oligonucleotide
  Sense strand starting at position 2855 of SEQ ID NO: 1561122
ccugguuacuaugauaaua

SEQ ID NO: 1648350 - RNA, 19 nt, Artificial Sequence
  Description of Artificial Sequence: Synthetic oligonucleotide
  Antisense strand to SEQ ID NO: 1648349
uauuaucauaguaaccagg

SEQ ID NO: 1648351 - RNA, 19 nt, Artificial Sequence
  Description of Artificial Sequence: Synthetic oligonucleotide
  Sense strand starting at position 2857 of SEQ ID NO: 1561122
ugguuacuaugauaauaga

SEQ ID NO: 1648352 - RNA, 19 nt, Artificial Sequence
  Description of Artificial Sequence: Synthetic oligonucleotide
  Antisense strand to SEQ ID NO: 1648351
ucuauuaucauaguaacca

SEQ ID NO: 1648353 - RNA, 19 nt, Artificial Sequence
  Description of Artificial Sequence: Synthetic oligonucleotide
  Sense strand starting at position 3251 of SEQ ID NO: 1561122
uuaagaaugucucucagag

SEQ ID NO: 1648354 - RNA, 19 nt, Artificial Sequence
  Description of Artificial Sequence: Synthetic oligonucleotide
  Antisense strand to SEQ ID NO: 1648353
cucugagagacauucuuaa

SEQ ID NO: 1648355 - RNA, 19 nt, Artificial Sequence
  Description of Artificial Sequence: Synthetic oligonucleotide
  Sense strand starting at position 3253 of SEQ ID NO: 1561122
aagaaugucucucagaggu

SEQ ID NO: 1648356 - RNA, 19 nt, Artificial Sequence
  Description of Artificial Sequence: Synthetic oligonucleotide
  Antisense strand to SEQ ID NO: 1648355
accucugagagacauucuu

SEQ ID NO: 1648357 - RNA, 19 nt, Artificial Sequence
  Description of Artificial Sequence: Synthetic oligonucleotide
  Sense strand starting at position 3255 of SEQ ID NO: 1561122
gaaugucucucagagguag

SEQ ID NO: 1648358 - RNA, 19 nt, Artificial Sequence
  Description of Artificial Sequence: Synthetic oligonucleotide
  Antisense strand to SEQ ID NO: 1648357
cuaccucugagagacauuc

SEQ ID NO: 1648359 - RNA, 19 nt, Artificial Sequence
  Description of Artificial Sequence: Synthetic oligonucleotide
  Sense strand starting at position 3266 of SEQ ID NO: 1561122
agagguagagugugucuau

SEQ ID NO: 1648360 - RNA, 19 nt, Artificial Sequence
  Description of Artificial Sequence: Synthetic oligonucleotide
  Antisense strand to SEQ ID NO: 1648359
auagacacacucuaccucu

SEQ ID NO: 1648361 - RNA, 19 nt, Artificial Sequence
  Description of Artificial Sequence: Synthetic oligonucleotide
  Sense strand starting at position 3269 of SEQ ID NO: 1561122
gguagagugugucuaugga

SEQ ID NO: 1648362 - RNA, 19 nt, Artificial Sequence
  Description of Artificial Sequence: Synthetic oligonucleotide
  Antisense strand to SEQ ID NO: 1648361
uccauagacacacucuacc

SEQ ID NO: 1648363 - RNA, 19 nt, Artificial Sequence
  Description of Artificial Sequence: Synthetic oligonucleotide
  Sense strand starting at position 3348 of SEQ ID NO: 1561122
augcuagagggaugguuau

SEQ ID NO: 1648364 - RNA, 19 nt, Artificial Sequence
  Description of Artificial Sequence: Synthetic oligonucleotide
  Antisense strand to SEQ ID NO: 1648363
auaaccaucccucuagcau

SEQ ID NO: 1648365 - RNA, 19 nt, Artificial Sequence
  Description of Artificial Sequence: Synthetic oligonucleotide
  Sense strand starting at position 3354 of SEQ ID NO: 1561122
gagggaugguuauagguug

SEQ ID NO: 1648366 - RNA, 19 nt, Artificial Sequence
  Description of Artificial Sequence: Synthetic oligonucleotide
  Antisense strand to SEQ ID NO: 1648365
caaccuauaaccaucccuc

SEQ ID NO: 1648367 - RNA, 19 nt, Artificial Sequence
  Description of Artificial Sequence: Synthetic oligonucleotide
  Sense strand starting at position 3359 of SEQ ID NO: 1561122
augguuauagguugcuaua

SEQ ID NO: 1648368 - RNA, 19 nt, Artificial Sequence
  Description of Artificial Sequence: Synthetic oligonucleotide
  Antisense strand to SEQ ID NO: 1648367
uauagcaaccuauaaccau

SEQ ID NO: 1648369 - RNA, 19 nt, Artificial Sequence
  Description of Artificial Sequence: Synthetic oligonucleotide
  Sense strand starting at position 3361 of SEQ ID NO: 1561122
gguuauagguugcuauaau

SEQ ID NO: 1648370 - RNA, 19 nt, Artificial Sequence
  Description of Artificial Sequence: Synthetic oligonucleotide
  Antisense strand to SEQ ID NO: 1648369
auuauagcaaccuauaacc

SEQ ID NO: 1648371 - RNA, 19 nt, Artificial Sequence
  Description of Artificial Sequence: Synthetic oligonucleotide
  Sense strand starting at position 3362 of SEQ ID NO: 1561122
guuauagguugcuauaaua

SEQ ID NO: 1648372 - RNA, 19 nt, Artificial Sequence
  Description of Artificial Sequence: Synthetic oligonucleotide
  Antisense strand to SEQ ID NO: 1648371
uauuauagcaaccuauaac

SEQ ID NO: 1648373 - RNA, 19 nt, Artificial Sequence
  Description of Artificial Sequence: Synthetic oligonucleotide
  Sense strand starting at position 3424 of SEQ ID NO: 1561122
ccagguggugcccgagauu

SEQ ID NO: 1648374 - RNA, 19 nt, Artificial Sequence
  Description of Artificial Sequence: Synthetic oligonucleotide
  Antisense strand to SEQ ID NO: 1648373
aaucucgggcaccaccugg

SEQ ID NO: 1648375 - RNA, 19 nt, Artificial Sequence
  Description of Artificial Sequence: Synthetic oligonucleotide
  Sense strand starting at position 3427 of SEQ ID NO: 1561122
gguggugcccgagauuaua

SEQ ID NO: 1648376 - RNA, 19 nt, Artificial Sequence
  Description of Artificial Sequence: Synthetic oligonucleotide
  Antisense strand to SEQ ID NO: 1648375
uauaaucucgggcaccacc

SEQ ID NO: 1648377 - RNA, 19 nt, Artificial Sequence
  Description of Artificial Sequence: Synthetic oligonucleotide
  Sense strand starting at position 3498 of SEQ ID NO: 1561122
agaugaaauugugcucuau

SEQ ID NO: 1648378 - RNA, 19 nt, Artificial Sequence
  Description of Artificial Sequence: Synthetic oligonucleotide
  Antisense strand to SEQ ID NO: 1648377
auagagcacaauuucaucu

SEQ ID NO: 1648379 - RNA, 19 nt, Artificial Sequence
  Description of Artificial Sequence: Synthetic oligonucleotide
  Sense strand starting at position 3500 of SEQ ID NO: 1561122
augaaauugugcucuauug

SEQ ID NO: 1648380 - RNA, 19 nt, Artificial Sequence
  Description of Artificial Sequence: Synthetic oligonucleotide
  Antisense strand to SEQ ID NO: 1648379
caauagagcacaauuucau

SEQ ID NO: 1648381 - RNA, 19 nt, Artificial Sequence
  Description of Artificial Sequence: Synthetic oligonucleotide
  Sense strand starting at position 3502 of SEQ ID NO: 1561122
gaaauugugcucuauugua

SEQ ID NO: 1648382 - RNA, 19 nt, Artificial Sequence
  Description of Artificial Sequence: Synthetic oligonucleotide
  Antisense strand to SEQ ID NO: 1648381
uacaauagagcacaauuuc

SEQ ID NO: 1648383 - RNA, 19 nt, Artificial Sequence
  Description of Artificial Sequence: Synthetic oligonucleotide
  Sense strand starting at position 3507 of SEQ ID NO: 1561122
ugugcucuauuguacggaa

SEQ ID NO: 1648384 - RNA, 19 nt, Artificial Sequence
  Description of Artificial Sequence: Synthetic oligonucleotide
  Antisense strand to SEQ ID NO: 1648383
uuccguacaauagagcaca

SEQ ID NO: 1648385 - RNA, 19 nt, Artificial Sequence
  Description of Artificial Sequence: Synthetic oligonucleotide
  Sense strand starting at position 3509 of SEQ ID NO: 1561122
ugcucuauuguacggaaau

SEQ ID NO: 1648386 - RNA, 19 nt, Artificial Sequence
  Description of Artificial Sequence: Synthetic oligonucleotide
  Antisense strand to SEQ ID NO: 1648385
auuuccguacaauagagca

SEQ ID NO: 1648387 - RNA, 19 nt, Artificial Sequence
  Description of Artificial Sequence: Synthetic oligonucleotide
  Sense strand starting at position 3510 of SEQ ID NO: 1561122
gcucuauuguacggaaaug

SEQ ID NO: 1648388 - RNA, 19 nt, Artificial Sequence
  Description of Artificial Sequence: Synthetic oligonucleotide
  Antisense strand to SEQ ID NO: 1648387
cauuuccguacaauagagc

SEQ ID NO: 1648389 - RNA, 19 nt, Artificial Sequence
  Description of Artificial Sequence: Synthetic oligonucleotide
  Sense strand starting at position 3968 of SEQ ID NO: 1561122
cucccagaaugcuagaauu

SEQ ID NO: 1648390 - RNA, 19 nt, Artificial Sequence
  Description of Artificial Sequence: Synthetic oligonucleotide
  Antisense strand to SEQ ID NO: 1648389
aauucuagcauucugggag

SEQ ID NO: 1648391 - RNA, 19 nt, Artificial Sequence
  Description of Artificial Sequence: Synthetic oligonucleotide
  Sense strand starting at position 331 of SEQ ID NO: 1561123
aggcaugcguccuggaaac

SEQ ID NO: 1648392 - RNA, 19 nt, Artificial Sequence
  Description of Artificial Sequence: Synthetic oligonucleotide
  Antisense strand to SEQ ID NO: 1648391
guuuccaggacgcaugccu

SEQ ID NO: 1648393 - RNA, 19 nt, Artificial Sequence
  Description of Artificial Sequence: Synthetic oligonucleotide
  Sense strand starting at position 647 of SEQ ID NO: 1561123
aggcuuaccucucuguuau

SEQ ID NO: 1648394 - RNA, 19 nt, Artificial Sequence
  Description of Artificial Sequence: Synthetic oligonucleotide
  Antisense strand to SEQ ID NO: 1648393
auaacagagagguaagccu

SEQ ID NO: 1648395 - RNA, 19 nt, Artificial Sequence
  Description of Artificial Sequence: Synthetic oligonucleotide
  Sense strand starting at position 648 of SEQ ID NO: 1561123
ggcuuaccucucuguuauu

SEQ ID NO: 1648396 - RNA, 19 nt, Artificial Sequence
  Description of Artificial Sequence: Synthetic oligonucleotide
  Antisense strand to SEQ ID NO: 1648395
aauaacagagagguaagcc

SEQ ID NO: 1648397 - RNA, 19 nt, Artificial Sequence
  Description of Artificial Sequence: Synthetic oligonucleotide
  Sense strand starting at position 685 of SEQ ID NO: 1561123
ggcuguugggcugaccaua

SEQ ID NO: 1648398 - RNA, 19 nt, Artificial Sequence
  Description of Artificial Sequence: Synthetic oligonucleotide
  Antisense strand to SEQ ID NO: 1648397
uauggucagcccaacagcc

SEQ ID NO: 1648399 - RNA, 19 nt, Artificial Sequence
  Description of Artificial Sequence: Synthetic oligonucleotide
  Sense strand starting at position 1200 of SEQ ID NO: 1561123
uggguuggcuuccacuaua

SEQ ID NO: 1648400 - RNA, 19 nt, Artificial Sequence
  Description of Artificial Sequence: Synthetic oligonucleotide
  Antisense strand to SEQ ID NO: 1648399
uauaguggaagccaaccca

SEQ ID NO: 1648401 - RNA, 19 nt, Artificial Sequence
  Description of Artificial Sequence: Synthetic oligonucleotide
  Sense strand starting at position 1212 of SEQ ID NO: 1561123
cacuauacgugggcugaga

SEQ ID NO: 1648402 - RNA, 19 nt, Artificial Sequence
  Description of Artificial Sequence: Synthetic oligonucleotide
  Antisense strand to SEQ ID NO: 1648401
ucucagcccacguauagug

SEQ ID NO: 1648403 - RNA, 19 nt, Artificial Sequence
  Description of Artificial Sequence: Synthetic oligonucleotide
  Sense strand starting at position 1244 of SEQ ID NO: 1561123
gccggagccagauaucauc

SEQ ID NO: 1648404 - RNA, 19 nt, Artificial Sequence
  Description of Artificial Sequence: Synthetic oligonucleotide
  Antisense strand to SEQ ID NO: 1648403
gaugauaucuggcuccggc

SEQ ID NO: 1648405 - RNA, 19 nt, Artificial Sequence
  Description of Artificial Sequence: Synthetic oligonucleotide
  Sense strand starting at position 1783 of SEQ ID NO: 1561123
gggucuucgagagacaugu

SEQ ID NO: 1648406 - RNA, 19 nt, Artificial Sequence
  Description of Artificial Sequence: Synthetic oligonucleotide
  Antisense strand to SEQ ID NO: 1648405
acaugucucucgaagaccc

SEQ ID NO: 1648407 - RNA, 19 nt, Artificial Sequence
  Description of Artificial Sequence: Synthetic oligonucleotide
  Sense strand starting at position 1787 of SEQ ID NO: 1561123
cuucgagagacaugucagu

SEQ ID NO: 1648408 - RNA, 19 nt, Artificial Sequence
  Description of Artificial Sequence: Synthetic oligonucleotide
  Antisense strand to SEQ ID NO: 1648407
acugacaugucucucgaag

SEQ ID NO: 1648409 - RNA, 19 nt, Artificial Sequence
  Description of Artificial Sequence: Synthetic oligonucleotide
  Sense strand starting at position 1792 of SEQ ID NO: 1561123
agagacaugucagucccuu

SEQ ID NO: 1648410 - RNA, 19 nt, Artificial Sequence
  Description of Artificial Sequence: Synthetic oligonucleotide
  Antisense strand to SEQ ID NO: 1648409
aagggacugacaugucucu

SEQ ID NO: 1648411 - RNA, 19 nt, Artificial Sequence
  Description of Artificial Sequence: Synthetic oligonucleotide
  Sense strand starting at position 2071 of SEQ ID NO: 1561123
ggaguucugucugggccua

SEQ ID NO: 1648412 - RNA, 19 nt, Artificial Sequence
  Description of Artificial Sequence: Synthetic oligonucleotide
  Antisense strand to SEQ ID NO: 1648411
uaggcccagacagaacucc

SEQ ID NO: 1648413 - RNA, 19 nt, Artificial Sequence
  Description of Artificial Sequence: Synthetic oligonucleotide
  Sense strand starting at position 2072 of SEQ ID NO: 1561123
gaguucugucugggccuau

SEQ ID NO: 1648414 - RNA, 19 nt, Artificial Sequence
  Description of Artificial Sequence: Synthetic oligonucleotide
  Antisense strand to SEQ ID NO: 1648413
auaggcccagacagaacuc

SEQ ID NO: 1648415 - RNA, 19 nt, Artificial Sequence
  Description of Artificial Sequence: Synthetic oligonucleotide
  Sense strand starting at position 2073 of SEQ ID NO: 1561123
aguucugucugggccuauu

SEQ ID NO: 1648416 - RNA, 19 nt, Artificial Sequence
  Description of Artificial Sequence: Synthetic oligonucleotide
  Antisense strand to SEQ ID NO: 1648415
aauaggcccagacagaacu

SEQ ID NO: 1648417 - RNA, 19 nt, Artificial Sequence
  Description of Artificial Sequence: Synthetic oligonucleotide
  Sense strand starting at position 2084 of SEQ ID NO: 1561123
ggccuauucggguccgagu

SEQ ID NO: 1648418 - RNA, 19 nt, Artificial Sequence
  Description of Artificial Sequence: Synthetic oligonucleotide
  Antisense strand to SEQ ID NO: 1648417
acucggacccgaauaggcc

SEQ ID NO: 1648419 - RNA, 19 nt, Artificial Sequence
  Description of Artificial Sequence: Synthetic oligonucleotide
  Sense strand starting at position 2085 of SEQ ID NO: 1561123
gccuauucggguccgaguu

SEQ ID NO: 1648420 - RNA, 19 nt, Artificial Sequence
  Description of Artificial Sequence: Synthetic oligonucleotide
  Antisense strand to SEQ ID NO: 1648419
aacucggacccgaauaggc

SEQ ID NO: 1648421 - RNA, 19 nt, Artificial Sequence
  Description of Artificial Sequence: Synthetic oligonucleotide
  Sense strand starting at position 2236 of SEQ ID NO: 1561123
gcucauucgauucguugaa

SEQ ID NO: 1648422 - RNA, 19 nt, Artificial Sequence
  Description of Artificial Sequence: Synthetic oligonucleotide
  Antisense strand to SEQ ID NO: 1648421
uucaacgaaucgaaugagc

SEQ ID NO: 1648423 - RNA, 19 nt, Artificial Sequence
  Description of Artificial Sequence: Synthetic oligonucleotide
  Sense strand starting at position 2240 of SEQ ID NO: 1561123
auucgauucguugaagcuu

SEQ ID NO: 1648424 - RNA, 19 nt, Artificial Sequence
  Description of Artificial Sequence: Synthetic oligonucleotide
  Antisense strand to SEQ ID NO: 1648423
aagcuucaacgaaucgaau

SEQ ID NO: 1648425 - RNA, 19 nt, Artificial Sequence
  Description of Artificial Sequence: Synthetic oligonucleotide
  Sense strand starting at position 2285 of SEQ ID NO: 1561123
gggagaucgucccauccca

SEQ ID NO: 1648426 - RNA, 19 nt, Artificial Sequence
  Description of Artificial Sequence: Synthetic oligonucleotide
  Antisense strand to SEQ ID NO: 1648425
ugggaugggacgaucuccc

SEQ ID NO: 1648427 - RNA, 19 nt, Artificial Sequence
  Description of Artificial Sequence: Synthetic oligonucleotide
  Sense strand starting at position 2517 of SEQ ID NO: 1561123
gaggucaccuuugagaaag

SEQ ID NO: 1648428 - RNA, 19 nt, Artificial Sequence
  Description of Artificial Sequence: Synthetic oligonucleotide
  Antisense strand to SEQ ID NO: 1648427
cuuucucaaaggugaccuc

SEQ ID NO: 1648429 - RNA, 19 nt, Artificial Sequence
  Description of Artificial Sequence: Synthetic oligonucleotide
  Sense strand starting at position 2541 of SEQ ID NO: 1561123
ggagguggguuucuucaga

SEQ ID NO: 1648430 - RNA, 19 nt, Artificial Sequence
  Description of Artificial Sequence: Synthetic oligonucleotide
  Antisense strand to SEQ ID NO: 1648429
ucugaagaaacccaccucc

SEQ ID NO: 1648431 - RNA, 19 nt, Artificial Sequence
  Description of Artificial Sequence: Synthetic oligonucleotide
  Sense strand starting at position 2555 of SEQ ID NO: 1561123
ucagaagcgcggagucuuu

SEQ ID NO: 1648432 - RNA, 19 nt, Artificial Sequence
  Description of Artificial Sequence: Synthetic oligonucleotide
  Antisense strand to SEQ ID NO: 1648431
aaagacuccgcgcuucuga

SEQ ID NO: 1648433 - RNA, 19 nt, Artificial Sequence
  Description of Artificial Sequence: Synthetic oligonucleotide
  Sense strand starting at position 2565 of SEQ ID NO: 1561123
ggagucuuucugggugcga

SEQ ID NO: 1648434 - RNA, 19 nt, Artificial Sequence
  Description of Artificial Sequence: Synthetic oligonucleotide
  Antisense strand to SEQ ID NO: 1648433
ucgcacccagaaagacucc

SEQ ID NO: 1648435 - RNA, 19 nt, Artificial Sequence
  Description of Artificial Sequence: Synthetic oligonucleotide
  Sense strand starting at position 2788 of SEQ ID NO: 1561123
cggguuaucugagggaguc

SEQ ID NO: 1648436 - RNA, 19 nt, Artificial Sequence
  Description of Artificial Sequence: Synthetic oligonucleotide
  Antisense strand to SEQ ID NO: 1648435
gacucccucagauaacccg

SEQ ID NO: 1648437 - RNA, 19 nt, Artificial Sequence
  Description of Artificial Sequence: Synthetic oligonucleotide
  Sense strand starting at position 2887 of SEQ ID NO: 1561123
gggucuccgugguaagguu

SEQ ID NO: 1648438 - RNA, 19 nt, Artificial Sequence
  Description of Artificial Sequence: Synthetic oligonucleotide
  Antisense strand to SEQ ID NO: 1648437
aaccuuaccacggagaccc

SEQ ID NO: 1648439 - RNA, 19 nt, Artificial Sequence
  Description of Artificial Sequence: Synthetic oligonucleotide
  Sense strand starting at position 2969 of SEQ ID NO: 1561123
ggacgaguuugggaagggu

SEQ ID NO: 1648440 - RNA, 19 nt, Artificial Sequence
  Description of Artificial Sequence: Synthetic oligonucleotide
  Antisense strand to SEQ ID NO: 1648439
acccuucccaaacucgucc

SEQ ID NO: 1648441 - RNA, 19 nt, Artificial Sequence
  Description of Artificial Sequence: Synthetic oligonucleotide
  Sense strand starting at position 2972 of SEQ ID NO: 1561123
cgaguuugggaaggguauu

SEQ ID NO: 1648442 - RNA, 19 nt, Artificial Sequence
  Description of Artificial Sequence: Synthetic oligonucleotide
  Antisense strand to SEQ ID NO: 1648441
aauacccuucccaaacucg

SEQ ID NO: 1648443 - RNA, 19 nt, Artificial Sequence
  Description of Artificial Sequence: Synthetic oligonucleotide
  Sense strand starting at position 3161 of SEQ ID NO: 1561123
gcgggucgucuccugugua

SEQ ID NO: 1648444 - RNA, 19 nt, Artificial Sequence
  Description of Artificial Sequence: Synthetic oligonucleotide
  Antisense strand to SEQ ID NO: 1648443
uacacaggagacgacccgc

SEQ ID NO: 1648445 - RNA, 19 nt, Artificial Sequence
  Description of Artificial Sequence: Synthetic oligonucleotide
  Sense strand starting at position 3162 of SEQ ID NO: 1561123
cgggucgucuccuguguau

SEQ ID NO: 1648446 - RNA, 19 nt, Artificial Sequence
  Description of Artificial Sequence: Synthetic oligonucleotide
  Antisense strand to SEQ ID NO: 1648445
auacacaggagacgacccg

SEQ ID NO: 1648447 - RNA, 19 nt, Artificial Sequence
  Description of Artificial Sequence: Synthetic oligonucleotide
  Sense strand starting at position 3252 of SEQ ID NO: 1561123
gggugcuuuccuggcguca

SEQ ID NO: 1648448 - RNA, 19 nt, Artificial Sequence
  Description of Artificial Sequence: Synthetic oligonucleotide
  Antisense strand to SEQ ID NO: 1648447
ugacgccaggaaagcaccc

SEQ ID NO: 1648449 - RNA, 19 nt, Artificial Sequence
  Description of Artificial Sequence: Synthetic oligonucleotide
  Sense strand starting at position 3518 of SEQ ID NO: 1561123
cuacgucacuccguccaaa

SEQ ID NO: 1648450 - RNA, 19 nt, Artificial Sequence
  Description of Artificial Sequence: Synthetic oligonucleotide
  Antisense strand to SEQ ID NO: 1648449
uuuggacggagugacguag

SEQ ID NO: 1648451 - RNA, 19 nt, Artificial Sequence
  Description of Artificial Sequence: Synthetic oligonucleotide
  Sense strand starting at position 3521 of SEQ ID NO: 1561123
cgucacuccguccaaauuu

SEQ ID NO: 1648452 - RNA, 19 nt, Artificial Sequence
  Description of Artificial Sequence: Synthetic oligonucleotide
  Antisense strand to SEQ ID NO: 1648451
aaauuuggacggagugacg

SEQ ID NO: 1648453 - RNA, 19 nt, Artificial Sequence
  Description of Artificial Sequence: Synthetic oligonucleotide
  Sense strand starting at position 3533 of SEQ ID NO: 1561123
caaauuuaguuguggaagu

SEQ ID NO: 1648454 - RNA, 19 nt, Artificial Sequence
  Description of Artificial Sequence: Synthetic oligonucleotide
  Antisense strand to SEQ ID NO: 1648453
acuuccacaacuaaauuug

SEQ ID NO: 1648455 - RNA, 19 nt, Artificial Sequence
  Description of Artificial Sequence: Synthetic oligonucleotide
  Sense strand starting at position 3659 of SEQ ID NO: 1561123
cgaacaauucugcauccua

SEQ ID NO: 1648456 - RNA, 19 nt, Artificial Sequence
  Description of Artificial Sequence: Synthetic oligonucleotide
  Antisense strand to SEQ ID NO: 1648455
uaggaugcagaauuguucg

SEQ ID NO: 1648457 - RNA, 19 nt, Artificial Sequence
  Description of Artificial Sequence: Synthetic oligonucleotide
  Sense strand starting at position 3695 of SEQ ID NO: 1561123
auuaguauuucuuggagag

SEQ ID NO: 1648458 - RNA, 19 nt, Artificial Sequence
  Description of Artificial Sequence: Synthetic oligonucleotide
  Antisense strand to SEQ ID NO: 1648457
cucuccaagaaauacuaau

SEQ ID NO: 1648459 - RNA, 19 nt, Artificial Sequence
  Description of Artificial Sequence: Synthetic oligonucleotide
  Sense strand starting at position 3697 of SEQ ID NO: 1561123
uaguauuucuuggagagac

SEQ ID NO: 1648460 - RNA, 19 nt, Artificial Sequence
  Description of Artificial Sequence: Synthetic oligonucleotide
  Antisense strand to SEQ ID NO: 1648459
gucucuccaagaaauacua

SEQ ID NO: 1648461 - RNA, 19 nt, Artificial Sequence
  Description of Artificial Sequence: Synthetic oligonucleotide
  Sense strand starting at position 3917 of SEQ ID NO: 1561123
gagcuccugucgcgggaaa

SEQ ID NO: 1648462 - RNA, 19 nt, Artificial Sequence
  Description of Artificial Sequence: Synthetic oligonucleotide
  Antisense strand to SEQ ID NO: 1648461
uuucccgcgacaggagcuc

SEQ ID NO: 1648463 - RNA, 19 nt, Artificial Sequence
  Description of Artificial Sequence: Synthetic oligonucleotide
  Sense strand starting at position 3919 of SEQ ID NO: 1561123
gcuccugucgcgggaaacu

SEQ ID NO: 1648464 - RNA, 19 nt, Artificial Sequence
  Description of Artificial Sequence: Synthetic oligonucleotide
  Antisense strand to SEQ ID NO: 1648463
aguuucccgcgacaggagc

SEQ ID NO: 1648465 - RNA, 19 nt, Artificial Sequence
  Description of Artificial Sequence: Synthetic oligonucleotide
  Sense strand starting at position 3942 of SEQ ID NO: 1561123
gggaauggcuugguacgaa

SEQ ID NO: 1648466 - RNA, 19 nt, Artificial Sequence
  Description of Artificial Sequence: Synthetic oligonucleotide
  Antisense strand to SEQ ID NO: 1648465
uucguaccaagccauuccc

SEQ ID NO: 1648467 - RNA, 19 nt, Artificial Sequence
  Description of Artificial Sequence: Synthetic oligonucleotide
  Sense strand starting at position 79 of SEQ ID NO: 1561124
agcaccuguccagauggau

SEQ ID NO: 1648468 - RNA, 19 nt, Artificial Sequence
  Description of Artificial Sequence: Synthetic oligonucleotide
  Antisense strand to SEQ ID NO: 1648467
auccaucuggacaggugcu

SEQ ID NO: 1648469 - RNA, 19 nt, Artificial Sequence
  Description of Artificial Sequence: Synthetic oligonucleotide
  Sense strand starting at position 846 of SEQ ID NO: 1561124
ggaaacagauucuuaggca

SEQ ID NO: 1648470 - RNA, 19 nt, Artificial Sequence
  Description of Artificial Sequence: Synthetic oligonucleotide
  Antisense strand to SEQ ID NO: 1648469
ugccuaagaaucuguuucc

SEQ ID NO: 1648471 - RNA, 19 nt, Artificial Sequence
  Description of Artificial Sequence: Synthetic oligonucleotide
  Sense strand starting at position 850 of SEQ ID NO: 1561124
acagauucuuaggcaacau

SEQ ID NO: 1648472 - RNA, 19 nt, Artificial Sequence
  Description of Artificial Sequence: Synthetic oligonucleotide
  Antisense strand to SEQ ID NO: 1648471
auguugccuaagaaucugu

SEQ ID NO: 1648473 - RNA, 19 nt, Artificial Sequence
  Description of Artificial Sequence: Synthetic oligonucleotide
  Sense strand starting at position 854 of SEQ ID NO: 1561124
auucuuaggcaacauguaa

SEQ ID NO: 1648474 - RNA, 19 nt, Artificial Sequence
  Description of Artificial Sequence: Synthetic oligonucleotide
  Antisense strand to SEQ ID NO: 1648473
uuacauguugccuaagaau

SEQ ID NO: 1648475 - RNA, 19 nt, Artificial Sequence
  Description of Artificial Sequence: Synthetic oligonucleotide
  Sense strand starting at position 880 of SEQ ID NO: 1561124
acgcauccugagugucuaa

SEQ ID NO: 1648476 - RNA, 19 nt, Artificial Sequence
  Description of Artificial Sequence: Synthetic oligonucleotide
  Antisense strand to SEQ ID NO: 1648475
uuagacacucaggaugcgu

SEQ ID NO: 1648477 - RNA, 19 nt, Artificial Sequence
  Description of Artificial Sequence: Synthetic oligonucleotide
  Sense strand starting at position 921 of SEQ ID NO: 1561124
ggugccacucgauaaacau

SEQ ID NO: 1648478 - RNA, 19 nt, Artificial Sequence
  Description of Artificial Sequence: Synthetic oligonucleotide
  Antisense strand to SEQ ID NO: 1648477
auguuuaucgaguggcacc

SEQ ID NO: 1648479 - RNA, 19 nt, Artificial Sequence
  Description of Artificial Sequence: Synthetic oligonucleotide
  Sense strand starting at position 1031 of SEQ ID NO: 1561124
aaguauuccugcugugagg

SEQ ID NO: 1648480 - RNA, 19 nt, Artificial Sequence
  Description of Artificial Sequence: Synthetic oligonucleotide
  Antisense strand to SEQ ID NO: 1648479
ccucacagcaggaauacuu

SEQ ID NO: 1648481 - RNA, 19 nt, Artificial Sequence
  Description of Artificial Sequence: Synthetic oligonucleotide
  Sense strand starting at position 1284 of SEQ ID NO: 1561124
ugucauguccacuguuauc

SEQ ID NO: 1648482 - RNA, 19 nt, Artificial Sequence
  Description of Artificial Sequence: Synthetic oligonucleotide
  Antisense strand to SEQ ID NO: 1648481
gauaacaguggacaugaca

SEQ ID NO: 1648483 - RNA, 19 nt, Artificial Sequence
  Description of Artificial Sequence: Synthetic oligonucleotide
  Sense strand starting at position 1563 of SEQ ID NO: 1561124
ugaacuuugcccggcuuaa

SEQ ID NO: 1648484 - RNA, 19 nt, Artificial Sequence
  Description of Artificial Sequence: Synthetic oligonucleotide
  Antisense strand to SEQ ID NO: 1648483
uuaagccgggcaaaguuca

SEQ ID NO: 1648485 - RNA, 19 nt, Artificial Sequence
  Description of Artificial Sequence: Synthetic oligonucleotide
  Sense strand starting at position 2238 of SEQ ID NO: 1561124
gcaggaucgcagggcaaua

SEQ ID NO: 1648486 - RNA, 19 nt, Artificial Sequence
  Description of Artificial Sequence: Synthetic oligonucleotide
  Antisense strand to SEQ ID NO: 1648485
uauugcccugcgauccugc

SEQ ID NO: 1648487 - RNA, 19 nt, Artificial Sequence
  Description of Artificial Sequence: Synthetic oligonucleotide
  Sense strand starting at position 2249 of SEQ ID NO: 1561124
gggcaauaaucccuccauc

SEQ ID NO: 1648488 - RNA, 19 nt, Artificial Sequence
  Description of Artificial Sequence: Synthetic oligonucleotide
  Antisense strand to SEQ ID NO: 1648487
gauggagggauuauugccc

SEQ ID NO: 1648489 - RNA, 19 nt, Artificial Sequence
  Description of Artificial Sequence: Synthetic oligonucleotide
  Sense strand starting at position 2277 of SEQ ID NO: 1561124
agguucugugccugcaaga

SEQ ID NO: 1648490 - RNA, 19 nt, Artificial Sequence
  Description of Artificial Sequence: Synthetic oligonucleotide
  Antisense strand to SEQ ID NO: 1648489
ucuugcaggcacagaaccu

SEQ ID NO: 1648491 - RNA, 19 nt, Artificial Sequence
  Description of Artificial Sequence: Synthetic oligonucleotide
  Sense strand starting at position 2396 of SEQ ID NO: 1561124
gcagcagccgucuuggaua

SEQ ID NO: 1648492 - RNA, 19 nt, Artificial Sequence
  Description of Artificial Sequence: Synthetic oligonucleotide
  Antisense strand to SEQ ID NO: 1648491
uauccaagacggcugcugc

SEQ ID NO: 1648493 - RNA, 19 nt, Artificial Sequence
  Description of Artificial Sequence: Synthetic oligonucleotide
  Sense strand starting at position 2399 of SEQ ID NO: 1561124
gcagccgucuuggauaacu

SEQ ID NO: 1648494 - RNA, 19 nt, Artificial Sequence
  Description of Artificial Sequence: Synthetic oligonucleotide
  Antisense strand to SEQ ID NO: 1648493
aguuauccaagacggcugc

SEQ ID NO: 1648495 - RNA, 19 nt, Artificial Sequence
  Description of Artificial Sequence: Synthetic oligonucleotide
  Sense strand starting at position 2401 of SEQ ID NO: 1561124
agccgucuuggauaacuuu

SEQ ID NO: 1648496 - RNA, 19 nt, Artificial Sequence
  Description of Artificial Sequence: Synthetic oligonucleotide
  Antisense strand to SEQ ID NO: 1648495
aaaguuauccaagacggcu

SEQ ID NO: 1648497 - RNA, 19 nt, Artificial Sequence
  Description of Artificial Sequence: Synthetic oligonucleotide
  Sense strand starting at position 2706 of SEQ ID NO: 1561124
gcccucaaaugcuugcaaa

SEQ ID NO: 1648498 - RNA, 19 nt, Artificial Sequence
  Description of Artificial Sequence: Synthetic oligonucleotide
  Antisense strand to SEQ ID NO: 1648497
uuugcaagcauuugagggc

SEQ ID NO: 1648499 - RNA, 19 nt, Artificial Sequence
  Description of Artificial Sequence: Synthetic oligonucleotide
  Sense strand starting at position 2765 of SEQ ID NO: 1561124
uguguccugucgcuuggaa

SEQ ID NO: 1648500 - RNA, 19 nt, Artificial Sequence
  Description of Artificial Sequence: Synthetic oligonucleotide
  Antisense strand to SEQ ID NO: 1648499
uuccaagcgacaggacaca

SEQ ID NO: 1648501 - RNA, 19 nt, Artificial Sequence
  Description of Artificial Sequence: Synthetic oligonucleotide
  Sense strand starting at position 2822 of SEQ ID NO: 1561124
cgauuuaaggugcgaggua

SEQ ID NO: 1648502 - RNA, 19 nt, Artificial Sequence
  Description of Artificial Sequence: Synthetic oligonucleotide
  Antisense strand to SEQ ID NO: 1648501
uaccucgcaccuuaaaucg

SEQ ID NO: 1648503 - RNA, 19 nt, Artificial Sequence
  Description of Artificial Sequence: Synthetic oligonucleotide
  Sense strand starting at position 2823 of SEQ ID NO: 1561124
gauuuaaggugcgagguau

SEQ ID NO: 1648504 - RNA, 19 nt, Artificial Sequence
  Description of Artificial Sequence: Synthetic oligonucleotide
  Antisense strand to SEQ ID NO: 1648503
auaccucgcaccuuaaauc

SEQ ID NO: 1648505 - RNA, 19 nt, Artificial Sequence
  Description of Artificial Sequence: Synthetic oligonucleotide
  Sense strand starting at position 2831 of SEQ ID NO: 1561124
gugcgagguaugugugcaa

SEQ ID NO: 1648506 - RNA, 19 nt, Artificial Sequence
  Description of Artificial Sequence: Synthetic oligonucleotide
  Antisense strand to SEQ ID NO: 1648505
uugcacacauaccucgcac

SEQ ID NO: 1648507 - RNA, 19 nt, Artificial Sequence
  Description of Artificial Sequence: Synthetic oligonucleotide
  Sense strand starting at position 2834 of SEQ ID NO: 1561124
cgagguaugugugcaaaca

SEQ ID NO: 1648508 - RNA, 19 nt, Artificial Sequence
  Description of Artificial Sequence: Synthetic oligonucleotide
  Antisense strand to SEQ ID NO: 1648507
uguuugcacacauaccucg

SEQ ID NO: 1648509 - RNA, 19 nt, Artificial Sequence
  Description of Artificial Sequence: Synthetic oligonucleotide
  Sense strand starting at position 2835 of SEQ ID NO: 1561124
gagguaugugugcaaacag

SEQ ID NO: 1648510 - RNA, 19 nt, Artificial Sequence
  Description of Artificial Sequence: Synthetic oligonucleotide
  Antisense strand to SEQ ID NO: 1648509
cuguuugcacacauaccuc

SEQ ID NO: 1648511 - RNA, 19 nt, Artificial Sequence
  Description of Artificial Sequence: Synthetic oligonucleotide
  Sense strand starting at position 2851 of SEQ ID NO: 1561124
cagacucuugcuggucuga

SEQ ID NO: 1648512 - RNA, 19 nt, Artificial Sequence
  Description of Artificial Sequence: Synthetic oligonucleotide
  Antisense strand to SEQ ID NO: 1648511
ucagaccagcaagagucug

SEQ ID NO: 1648513 - RNA, 19 nt, Artificial Sequence
  Description of Artificial Sequence: Synthetic oligonucleotide
  Sense strand starting at position 2886 of SEQ ID NO: 1561124
ggccguguugaugaaggua

SEQ ID NO: 1648514 - RNA, 19 nt, Artificial Sequence
  Description of Artificial Sequence: Synthetic oligonucleotide
  Antisense strand to SEQ ID NO: 1648513
uaccuucaucaacacggcc

SEQ ID NO: 1648515 - RNA, 19 nt, Artificial Sequence
  Description of Artificial Sequence: Synthetic oligonucleotide
  Sense strand starting at position 3044 of SEQ ID NO: 1561124
ggacuuuacugaggaugac

SEQ ID NO: 1648516 - RNA, 19 nt, Artificial Sequence
  Description of Artificial Sequence: Synthetic oligonucleotide
  Antisense strand to SEQ ID NO: 1648515
gucauccucaguaaagucc

SEQ ID NO: 1648517 - RNA, 19 nt, Artificial Sequence
  Description of Artificial Sequence: Synthetic oligonucleotide
  Sense strand starting at position 3196 of SEQ ID NO: 1561124
gggccagacuucuguagga

SEQ ID NO: 1648518 - RNA, 19 nt, Artificial Sequence
  Description of Artificial Sequence: Synthetic oligonucleotide
  Antisense strand to SEQ ID NO: 1648517
uccuacagaagucuggccc

SEQ ID NO: 1648519 - RNA, 19 nt, Artificial Sequence
  Description of Artificial Sequence: Synthetic oligonucleotide
  Sense strand starting at position 3198 of SEQ ID NO: 1561124
gccagacuucuguaggaca

SEQ ID NO: 1648520 - RNA, 19 nt, Artificial Sequence
  Description of Artificial Sequence: Synthetic oligonucleotide
  Antisense strand to SEQ ID NO: 1648519
uguccuacagaagucuggc

SEQ ID NO: 1648521 - RNA, 19 nt, Artificial Sequence
  Description of Artificial Sequence: Synthetic oligonucleotide
  Sense strand starting at position 3308 of SEQ ID NO: 1561124
uagguaggaguuugagcua

SEQ ID NO: 1648522 - RNA, 19 nt, Artificial Sequence
  Description of Artificial Sequence: Synthetic oligonucleotide
  Antisense strand to SEQ ID NO: 1648521
uagcucaaacuccuaccua

SEQ ID NO: 1648523 - RNA, 19 nt, Artificial Sequence
  Description of Artificial Sequence: Synthetic oligonucleotide
  Sense strand starting at position 3757 of SEQ ID NO: 1561124
ugcguaagucaauggcuuu

SEQ ID NO: 1648524 - RNA, 19 nt, Artificial Sequence
  Description of Artificial Sequence: Synthetic oligonucleotide
  Antisense strand to SEQ ID NO: 1648523
aaagccauugacuuacgca

SEQ ID NO: 1648525 - RNA, 19 nt, Artificial Sequence
  Description of Artificial Sequence: Synthetic oligonucleotide
  Sense strand starting at position 3783 of SEQ ID NO: 1561124
uuuggaguuguguguccau

SEQ ID NO: 1648526 - RNA, 19 nt, Artificial Sequence
  Description of Artificial Sequence: Synthetic oligonucleotide
  Antisense strand to SEQ ID NO: 1648525
auggacacacaacuccaaa

SEQ ID NO: 1648527 - RNA, 19 nt, Artificial Sequence
  Description of Artificial Sequence: Synthetic oligonucleotide
  Sense strand starting at position 3786 of SEQ ID NO: 1561124
ggaguuguguguccauuac

SEQ ID NO: 1648528 - RNA, 19 nt, Artificial Sequence
  Description of Artificial Sequence: Synthetic oligonucleotide
  Antisense strand to SEQ ID NO: 1648527
guaauggacacacaacucc

SEQ ID NO: 1648529 - RNA, 19 nt, Artificial Sequence
  Description of Artificial Sequence: Synthetic oligonucleotide
  Sense strand starting at position 3790 of SEQ ID NO: 1561124
uuguguguccauuaccaca

SEQ ID NO: 1648530 - RNA, 19 nt, Artificial Sequence
  Description of Artificial Sequence: Synthetic oligonucleotide
  Antisense strand to SEQ ID NO: 1648529
ugugguaauggacacacaa

SEQ ID NO: 1648531 - RNA, 19 nt, Artificial Sequence
  Description of Artificial Sequence: Synthetic oligonucleotide
  Sense strand starting at position 3792 of SEQ ID NO: 1561124
guguguccauuaccacaau

SEQ ID NO: 1648532 - RNA, 19 nt, Artificial Sequence
  Description of Artificial Sequence: Synthetic oligonucleotide
  Antisense strand to SEQ ID NO: 1648531
auugugguaauggacacac

SEQ ID NO: 1648533 - RNA, 19 nt, Artificial Sequence
  Description of Artificial Sequence: Synthetic oligonucleotide
  Sense strand starting at position 262 of SEQ ID NO: 1561125
ucauucuggccagagaauc

SEQ ID NO: 1648534 - RNA, 19 nt, Artificial Sequence
  Description of Artificial Sequence: Synthetic oligonucleotide
  Antisense strand to SEQ ID NO: 1648533
gauucucuggccagaauga

SEQ ID NO: 1648535 - RNA, 19 nt, Artificial Sequence
  Description of Artificial Sequence: Synthetic oligonucleotide
  Sense strand starting at position 345 of SEQ ID NO: 1561125
gggugauaguauggagaca

SEQ ID NO: 1648536 - RNA, 19 nt, Artificial Sequence
  Description of Artificial Sequence: Synthetic oligonucleotide
  Antisense strand to SEQ ID NO: 1648535
ugucuccauacuaucaccc

SEQ ID NO: 1648537 - RNA, 19 nt, Artificial Sequence
  Description of Artificial Sequence: Synthetic oligonucleotide
  Sense strand starting at position 905 of SEQ ID NO: 1561125
ucaaauguccucugcuuga

SEQ ID NO: 1648538 - RNA, 19 nt, Artificial Sequence
  Description of Artificial Sequence: Synthetic oligonucleotide
  Antisense strand to SEQ ID NO: 1648537
ucaagcagaggacauuuga

SEQ ID NO: 1648539 - RNA, 19 nt, Artificial Sequence
  Description of Artificial Sequence: Synthetic oligonucleotide
  Sense strand starting at position 952 of SEQ ID NO: 1561125
ggcucacaccuuuacguaa

SEQ ID NO: 1648540 - RNA, 19 nt, Artificial Sequence
  Description of Artificial Sequence: Synthetic oligonucleotide
  Antisense strand to SEQ ID NO: 1648539
uuacguaaaggugugagcc

SEQ ID NO: 1648541 - RNA, 19 nt, Artificial Sequence
  Description of Artificial Sequence: Synthetic oligonucleotide
  Sense strand starting at position 1235 of SEQ ID NO: 1561125
ggucuuuccugacuaccca

SEQ ID NO: 1648542 - RNA, 19 nt, Artificial Sequence
  Description of Artificial Sequence: Synthetic oligonucleotide
  Antisense strand to SEQ ID NO: 1648541
uggguagucaggaaagacc

SEQ ID NO: 1648543 - RNA, 19 nt, Artificial Sequence
  Description of Artificial Sequence: Synthetic oligonucleotide
  Sense strand starting at position 1272 of SEQ ID NO: 1561125
cugaucauaucauacguaa

SEQ ID NO: 1648544 - RNA, 19 nt, Artificial Sequence
  Description of Artificial Sequence: Synthetic oligonucleotide
  Antisense strand to SEQ ID NO: 1648543
uuacguaugauaugaucag

SEQ ID NO: 1648545 - RNA, 19 nt, Artificial Sequence
  Description of Artificial Sequence: Synthetic oligonucleotide
  Sense strand starting at position 1292 of SEQ ID NO: 1561125
cucacaucauacguaaguu

SEQ ID NO: 1648546 - RNA, 19 nt, Artificial Sequence
  Description of Artificial Sequence: Synthetic oligonucleotide
  Antisense strand to SEQ ID NO: 1648545
aacuuacguaugaugugag

SEQ ID NO: 1648547 - RNA, 19 nt, Artificial Sequence
  Description of Artificial Sequence: Synthetic oligonucleotide
  Sense strand starting at position 1430 of SEQ ID NO: 1561125
gugagcacgcccuaaguau

SEQ ID NO: 1648548 - RNA, 19 nt, Artificial Sequence
  Description of Artificial Sequence: Synthetic oligonucleotide
  Antisense strand to SEQ ID NO: 1648547
auacuuagggcgugcucac

SEQ ID NO: 1648549 - RNA, 19 nt, Artificial Sequence
  Description of Artificial Sequence: Synthetic oligonucleotide
  Sense strand starting at position 1445 of SEQ ID NO: 1561125
guaucugcugauggguaaa

SEQ ID NO: 1648550 - RNA, 19 nt, Artificial Sequence
  Description of Artificial Sequence: Synthetic oligonucleotide
  Antisense strand to SEQ ID NO: 1648549
uuuacccaucagcagauac

SEQ ID NO: 1648551 - RNA, 19 nt, Artificial Sequence
  Description of Artificial Sequence: Synthetic oligonucleotide
  Sense strand starting at position 1527 of SEQ ID NO: 1561125
gggaaagugugucaaggga

SEQ ID NO: 1648552 - RNA, 19 nt, Artificial Sequence
  Description of Artificial Sequence: Synthetic oligonucleotide
  Antisense strand to SEQ ID NO: 1648551
ucccuugacacacuuuccc

SEQ ID NO: 1648553 - RNA, 19 nt, Artificial Sequence
  Description of Artificial Sequence: Synthetic oligonucleotide
  Sense strand starting at position 1942 of SEQ ID NO: 1561125
ggcuguuaccugcaacauc

SEQ ID NO: 1648554 - RNA, 19 nt, Artificial Sequence
  Description of Artificial Sequence: Synthetic oligonucleotide
  Antisense strand to SEQ ID NO: 1648553
gauguugcagguaacagcc

SEQ ID NO: 1648555 - RNA, 19 nt, Artificial Sequence
  Description of Artificial Sequence: Synthetic oligonucleotide
  Sense strand starting at position 1966 of SEQ ID NO: 1561125
uguccaucuugagacucau

SEQ ID NO: 1648556 - RNA, 19 nt, Artificial Sequence
  Description of Artificial Sequence: Synthetic oligonucleotide
  Antisense strand to SEQ ID NO: 1648555
augagucucaagauggaca

SEQ ID NO: 1648557 - RNA, 19 nt, Artificial Sequence
  Description of Artificial Sequence: Synthetic oligonucleotide
  Sense strand starting at position 2063 of SEQ ID NO: 1561125
cggucagacucgcccuauu

SEQ ID NO: 1648558 - RNA, 19 nt, Artificial Sequence
  Description of Artificial Sequence: Synthetic oligonucleotide
  Antisense strand to SEQ ID NO: 1648557
aauagggcgagucugaccg

SEQ ID NO: 1648559 - RNA, 19 nt, Artificial Sequence
  Description of Artificial Sequence: Synthetic oligonucleotide
  Sense strand starting at position 2066 of SEQ ID NO: 1561125
ucagacucgcccuauuacu

SEQ ID NO: 1648560 - RNA, 19 nt, Artificial Sequence
  Description of Artificial Sequence: Synthetic oligonucleotide
  Antisense strand to SEQ ID NO: 1648559
aguaauagggcgagucuga

SEQ ID NO: 1648561 - RNA, 19 nt, Artificial Sequence
  Description of Artificial Sequence: Synthetic oligonucleotide
  Sense strand starting at position 2073 of SEQ ID NO: 1561125
cgcccuauuacugcgugaa

SEQ ID NO: 1648562 - RNA, 19 nt, Artificial Sequence
  Description of Artificial Sequence: Synthetic oligonucleotide
  Antisense strand to SEQ ID NO: 1648561
uucacgcaguaauagggcg

SEQ ID NO: 1648563 - RNA, 19 nt, Artificial Sequence
  Description of Artificial Sequence: Synthetic oligonucleotide
  Sense strand starting at position 2074 of SEQ ID NO: 1561125
gcccuauuacugcgugaac

SEQ ID NO: 1648564 - RNA, 19 nt, Artificial Sequence
  Description of Artificial Sequence: Synthetic oligonucleotide
  Antisense strand to SEQ ID NO: 1648563
guucacgcaguaauagggc

SEQ ID NO: 1648565 - RNA, 19 nt, Artificial Sequence
  Description of Artificial Sequence: Synthetic oligonucleotide
  Sense strand starting at position 2076 of SEQ ID NO: 1561125
ccuauuacugcgugaacga

SEQ ID NO: 1648566 - RNA, 19 nt, Artificial Sequence
  Description of Artificial Sequence: Synthetic oligonucleotide
  Antisense strand to SEQ ID NO: 1648565
ucguucacgcaguaauagg

SEQ ID NO: 1648567 - RNA, 19 nt, Artificial Sequence
  Description of Artificial Sequence: Synthetic oligonucleotide
  Sense strand starting at position 2077 of SEQ ID NO: 1561125
cuauuacugcgugaacgac

SEQ ID NO: 1648568 - RNA, 19 nt, Artificial Sequence
  Description of Artificial Sequence: Synthetic oligonucleotide
  Antisense strand to SEQ ID NO: 1648567
gucguucacgcaguaauag

SEQ ID NO: 1648569 - RNA, 19 nt, Artificial Sequence
  Description of Artificial Sequence: Synthetic oligonucleotide
  Sense strand starting at position 2136 of SEQ ID NO: 1561125
gccuaucagcgaugccuaa

SEQ ID NO: 1648570 - RNA, 19 nt, Artificial Sequence
  Description of Artificial Sequence: Synthetic oligonucleotide
  Antisense strand to SEQ ID NO: 1648569
uuaggcaucgcugauaggc

SEQ ID NO: 1648571 - RNA, 19 nt, Artificial Sequence
  Description of Artificial Sequence: Synthetic oligonucleotide
  Sense strand starting at position 2240 of SEQ ID NO: 1561125
gaugcuuugggcggcagau

SEQ ID NO: 1648572 - RNA, 19 nt, Artificial Sequence
  Description of Artificial Sequence: Synthetic oligonucleotide
  Antisense strand to SEQ ID NO: 1648571
aucugccgcccaaagcauc

SEQ ID NO: 1648573 - RNA, 19 nt, Artificial Sequence
  Description of Artificial Sequence: Synthetic oligonucleotide
  Sense strand starting at position 2865 of SEQ ID NO: 1561125
ccgucaccguacucugaaa

SEQ ID NO: 1648574 - RNA, 19 nt, Artificial Sequence
  Description of Artificial Sequence: Synthetic oligonucleotide
  Antisense strand to SEQ ID NO: 1648573
uuucagaguacggugacgg

SEQ ID NO: 1648575 - RNA, 19 nt, Artificial Sequence
  Description of Artificial Sequence: Synthetic oligonucleotide
  Sense strand starting at position 2867 of SEQ ID NO: 1561125
gucaccguacucugaaagu

SEQ ID NO: 1648576 - RNA, 19 nt, Artificial Sequence
  Description of Artificial Sequence: Synthetic oligonucleotide
  Antisense strand to SEQ ID NO: 1648575
acuuucagaguacggugac

SEQ ID NO: 1648577 - RNA, 19 nt, Artificial Sequence
  Description of Artificial Sequence: Synthetic oligonucleotide
  Sense strand starting at position 2876 of SEQ ID NO: 1561125
cucugaaaguugccuguua

SEQ ID NO: 1648578 - RNA, 19 nt, Artificial Sequence
  Description of Artificial Sequence: Synthetic oligonucleotide
  Antisense strand to SEQ ID NO: 1648577
uaacaggcaacuuucagag

SEQ ID NO: 1648579 - RNA, 19 nt, Artificial Sequence
  Description of Artificial Sequence: Synthetic oligonucleotide
  Sense strand starting at position 2877 of SEQ ID NO: 1561125
ucugaaaguugccuguuau

SEQ ID NO: 1648580 - RNA, 19 nt, Artificial Sequence
  Description of Artificial Sequence: Synthetic oligonucleotide
  Antisense strand to SEQ ID NO: 1648579
auaacaggcaacuuucaga

SEQ ID NO: 1648581 - RNA, 19 nt, Artificial Sequence
  Description of Artificial Sequence: Synthetic oligonucleotide
  Sense strand starting at position 2878 of SEQ ID NO: 1561125
cugaaaguugccuguuauu

SEQ ID NO: 1648582 - RNA, 19 nt, Artificial Sequence
  Description of Artificial Sequence: Synthetic oligonucleotide
  Antisense strand to SEQ ID NO: 1648581
aauaacaggcaacuuucag

SEQ ID NO: 1648583 - RNA, 19 nt, Artificial Sequence
  Description of Artificial Sequence: Synthetic oligonucleotide
  Sense strand starting at position 2910 of SEQ ID NO: 1561125
uccgcaaaucgucugguuu

SEQ ID NO: 1648584 - RNA, 19 nt, Artificial Sequence
  Description of Artificial Sequence: Synthetic oligonucleotide
  Antisense strand to SEQ ID NO: 1648583
aaaccagacgauuugcgga

SEQ ID NO: 1648585 - RNA, 19 nt, Artificial Sequence
  Description of Artificial Sequence: Synthetic oligonucleotide
  Sense strand starting at position 3075 of SEQ ID NO: 1561125
uggcauucucccgggaauc

SEQ ID NO: 1648586 - RNA, 19 nt, Artificial Sequence
  Description of Artificial Sequence: Synthetic oligonucleotide
  Antisense strand to SEQ ID NO: 1648585
gauucccgggagaaugcca

SEQ ID NO: 1648587 - RNA, 19 nt, Artificial Sequence
  Description of Artificial Sequence: Synthetic oligonucleotide
  Sense strand starting at position 3076 of SEQ ID NO: 1561125
ggcauucucccgggaaucu

SEQ ID NO: 1648588 - RNA, 19 nt, Artificial Sequence
  Description of Artificial Sequence: Synthetic oligonucleotide
  Antisense strand to SEQ ID NO: 1648587
agauucccgggagaaugcc

SEQ ID NO: 1648589 - RNA, 19 nt, Artificial Sequence
  Description of Artificial Sequence: Synthetic oligonucleotide
  Sense strand starting at position 3092 of SEQ ID NO: 1561125
ucugaagucuggucucuca

SEQ ID NO: 1648590 - RNA, 19 nt, Artificial Sequence
  Description of Artificial Sequence: Synthetic oligonucleotide
  Antisense strand to SEQ ID NO: 1648589
ugagagaccagacuucaga

SEQ ID NO: 1648591 - RNA, 19 nt, Artificial Sequence
  Description of Artificial Sequence: Synthetic oligonucleotide
  Sense strand starting at position 3122 of SEQ ID NO: 1561125
gggcaugauucuccuugga

SEQ ID NO: 1648592 - RNA, 19 nt, Artificial Sequence
  Description of Artificial Sequence: Synthetic oligonucleotide
  Antisense strand to SEQ ID NO: 1648591
uccaaggagaaucaugccc

SEQ ID NO: 1648593 - RNA, 19 nt, Artificial Sequence
  Description of Artificial Sequence: Synthetic oligonucleotide
  Sense strand starting at position 3124 of SEQ ID NO: 1561125
gcaugauucuccuuggaca

SEQ ID NO: 1648594 - RNA, 19 nt, Artificial Sequence
  Description of Artificial Sequence: Synthetic oligonucleotide
  Antisense strand to SEQ ID NO: 1648593
uguccaaggagaaucaugc

SEQ ID NO: 1648595 - RNA, 19 nt, Artificial Sequence
  Description of Artificial Sequence: Synthetic oligonucleotide
  Sense strand starting at position 3126 of SEQ ID NO: 1561125
augauucuccuuggacaca

SEQ ID NO: 1648596 - RNA, 19 nt, Artificial Sequence
  Description of Artificial Sequence: Synthetic oligonucleotide
  Antisense strand to SEQ ID NO: 1648595
uguguccaaggagaaucau

SEQ ID NO: 1648597 - RNA, 19 nt, Artificial Sequence
  Description of Artificial Sequence: Synthetic oligonucleotide
  Sense strand starting at position 3139 of SEQ ID NO: 1561125
gacacagaaguuugguaau

SEQ ID NO: 1648598 - RNA, 19 nt, Artificial Sequence
  Description of Artificial Sequence: Synthetic oligonucleotide
  Antisense strand to SEQ ID NO: 1648597
auuaccaaacuucuguguc

SEQ ID NO: 1648599 - RNA, 19 nt, Artificial Sequence
  Description of Artificial Sequence: Synthetic oligonucleotide
  Sense strand starting at position 3145 of SEQ ID NO: 1561125
gaaguuugguaaucguggu

SEQ ID NO: 1648600 - RNA, 19 nt, Artificial Sequence
  Description of Artificial Sequence: Synthetic oligonucleotide
  Antisense strand to SEQ ID NO: 1648599
accacgauuaccaaacuuc

SEQ ID NO: 1648601 - RNA, 19 nt, Artificial Sequence
  Description of Artificial Sequence: Synthetic oligonucleotide
  Sense strand starting at position 3226 of SEQ ID NO: 1561125
ggagucuggaguuggucau

SEQ ID NO: 1648602 - RNA, 19 nt, Artificial Sequence
  Description of Artificial Sequence: Synthetic oligonucleotide
  Antisense strand to SEQ ID NO: 1648601
augaccaacuccagacucc

SEQ ID NO: 1648603 - RNA, 19 nt, Artificial Sequence
  Description of Artificial Sequence: Synthetic oligonucleotide
  Sense strand starting at position 3227 of SEQ ID NO: 1561125
gagucuggaguuggucauu

SEQ ID NO: 1648604 - RNA, 19 nt, Artificial Sequence
  Description of Artificial Sequence: Synthetic oligonucleotide
  Antisense strand to SEQ ID NO: 1648603
aaugaccaacuccagacuc

SEQ ID NO: 1648605 - RNA, 19 nt, Artificial Sequence
  Description of Artificial Sequence: Synthetic oligonucleotide
  Sense strand starting at position 3351 of SEQ ID NO: 1561125
ggugacuucuaccauccau

SEQ ID NO: 1648606 - RNA, 19 nt, Artificial Sequence
  Description of Artificial Sequence: Synthetic oligonucleotide
  Antisense strand to SEQ ID NO: 1648605
auggaugguagaagucacc

SEQ ID NO: 1648607 - RNA, 19 nt, Artificial Sequence
  Description of Artificial Sequence: Synthetic oligonucleotide
  Sense strand starting at position 3414 of SEQ ID NO: 1561125
cuugauuugugucaucuug

SEQ ID NO: 1648608 - RNA, 19 nt, Artificial Sequence
  Description of Artificial Sequence: Synthetic oligonucleotide
  Antisense strand to SEQ ID NO: 1648607
caagaugacacaaaucaag

SEQ ID NO: 1648609 - RNA, 19 nt, Artificial Sequence
  Description of Artificial Sequence: Synthetic oligonucleotide
  Sense strand starting at position 3416 of SEQ ID NO: 1561125
ugauuugugucaucuuggu

SEQ ID NO: 1648610 - RNA, 19 nt, Artificial Sequence
  Description of Artificial Sequence: Synthetic oligonucleotide
  Antisense strand to SEQ ID NO: 1648609
accaagaugacacaaauca

SEQ ID NO: 1648611 - RNA, 19 nt, Artificial Sequence
  Description of Artificial Sequence: Synthetic oligonucleotide
  Sense strand starting at position 3448 of SEQ ID NO: 1561125
cgggagaguggcugucauu

SEQ ID NO: 1648612 - RNA, 19 nt, Artificial Sequence
  Description of Artificial Sequence: Synthetic oligonucleotide
  Antisense strand to SEQ ID NO: 1648611
aaugacagccacucucccg

SEQ ID NO: 1648613 - RNA, 19 nt, Artificial Sequence
  Description of Artificial Sequence: Synthetic oligonucleotide
  Sense strand starting at position 170 of SEQ ID NO: 1561126
ucacuuaauccucgaagua

SEQ ID NO: 1648614 - RNA, 19 nt, Artificial Sequence
  Description of Artificial Sequence: Synthetic oligonucleotide
  Antisense strand to SEQ ID NO: 1648613
uacuucgaggauuaaguga

SEQ ID NO: 1648615 - RNA, 19 nt, Artificial Sequence
  Description of Artificial Sequence: Synthetic oligonucleotide
  Sense strand starting at position 193 of SEQ ID NO: 1561126
ggcaguaauccauaauccu

SEQ ID NO: 1648616 - RNA, 19 nt, Artificial Sequence
  Description of Artificial Sequence: Synthetic oligonucleotide
  Antisense strand to SEQ ID NO: 1648615
aggauuauggauuacugcc

SEQ ID NO: 1648617 - RNA, 19 nt, Artificial Sequence
  Description of Artificial Sequence: Synthetic oligonucleotide
  Sense strand starting at position 202 of SEQ ID NO: 1561126
ccauaauccucgcauggua

SEQ ID NO: 1648618 - RNA, 19 nt, Artificial Sequence
  Description of Artificial Sequence: Synthetic oligonucleotide
  Antisense strand to SEQ ID NO: 1648617
uaccaugcgaggauuaugg

SEQ ID NO: 1648619 - RNA, 19 nt, Artificial Sequence
  Description of Artificial Sequence: Synthetic oligonucleotide
  Sense strand starting at position 429 of SEQ ID NO: 1561126
gggcccaucuccuuggaau

SEQ ID NO: 1648620 - RNA, 19 nt, Artificial Sequence
  Description of Artificial Sequence: Synthetic oligonucleotide
  Antisense strand to SEQ ID NO: 1648619
auuccaaggagaugggccc

SEQ ID NO: 1648621 - RNA, 19 nt, Artificial Sequence
  Description of Artificial Sequence: Synthetic oligonucleotide
  Sense strand starting at position 430 of SEQ ID NO: 1561126
ggcccaucuccuuggaauc

SEQ ID NO: 1648622 - RNA, 19 nt, Artificial Sequence
  Description of Artificial Sequence: Synthetic oligonucleotide
  Antisense strand to SEQ ID NO: 1648621
gauuccaaggagaugggcc

SEQ ID NO: 1648623 - RNA, 19 nt, Artificial Sequence
  Description of Artificial Sequence: Synthetic oligonucleotide
  Sense strand starting at position 470 of SEQ ID NO: 1561126
agcaguucuaucugcugga

SEQ ID NO: 1648624 - RNA, 19 nt, Artificial Sequence
  Description of Artificial Sequence: Synthetic oligonucleotide
  Antisense strand to SEQ ID NO: 1648623
uccagcagauagaacugcu

SEQ ID NO: 1648625 - RNA, 19 nt, Artificial Sequence
  Description of Artificial Sequence: Synthetic oligonucleotide
  Sense strand starting at position 473 of SEQ ID NO: 1561126
aguucuaucugcuggagga

SEQ ID NO: 1648626 - RNA, 19 nt, Artificial Sequence
  Description of Artificial Sequence: Synthetic oligonucleotide
  Antisense strand to SEQ ID NO: 1648625
uccuccagcagauagaacu

SEQ ID NO: 1648627 - RNA, 19 nt, Artificial Sequence
  Description of Artificial Sequence: Synthetic oligonucleotide
  Sense strand starting at position 474 of SEQ ID NO: 1561126
guucuaucugcuggaggaa

SEQ ID NO: 1648628 - RNA, 19 nt, Artificial Sequence
  Description of Artificial Sequence: Synthetic oligonucleotide
  Antisense strand to SEQ ID NO: 1648627
uuccuccagcagauagaac

SEQ ID NO: 1648629 - RNA, 19 nt, Artificial Sequence
  Description of Artificial Sequence: Synthetic oligonucleotide
  Sense strand starting at position 486 of SEQ ID NO: 1561126
ggaggaaggugucaaccaa

SEQ ID NO: 1648630 - RNA, 19 nt, Artificial Sequence
  Description of Artificial Sequence: Synthetic oligonucleotide
  Antisense strand to SEQ ID NO: 1648629
uugguugacaccuuccucc

SEQ ID NO: 1648631 - RNA, 19 nt, Artificial Sequence
  Description of Artificial Sequence: Synthetic oligonucleotide
  Sense strand starting at position 553 of SEQ ID NO: 1561126
cgcaaaucgugguuaggaa

SEQ ID NO: 1648632 - RNA, 19 nt, Artificial Sequence
  Description of Artificial Sequence: Synthetic oligonucleotide
  Antisense strand to SEQ ID NO: 1648631
uuccuaaccacgauuugcg

SEQ ID NO: 1648633 - RNA, 19 nt, Artificial Sequence
  Description of Artificial Sequence: Synthetic oligonucleotide
  Sense strand starting at position 554 of SEQ ID NO: 1561126
gcaaaucgugguuaggaaa

SEQ ID NO: 1648634 - RNA, 19 nt, Artificial Sequence
  Description of Artificial Sequence: Synthetic oligonucleotide
  Antisense strand to SEQ ID NO: 1648633
uuuccuaaccacgauuugc

SEQ ID NO: 1648635 - RNA, 19 nt, Artificial Sequence
  Description of Artificial Sequence: Synthetic oligonucleotide
  Sense strand starting at position 557 of SEQ ID NO: 1561126
aaucgugguuaggaaagaa

SEQ ID NO: 1648636 - RNA, 19 nt, Artificial Sequence
  Description of Artificial Sequence: Synthetic oligonucleotide
  Antisense strand to SEQ ID NO: 1648635
uucuuuccuaaccacgauu

SEQ ID NO: 1648637 - RNA, 19 nt, Artificial Sequence
  Description of Artificial Sequence: Synthetic oligonucleotide
  Sense strand starting at position 958 of SEQ ID NO: 1561126
aaagaagccucuugacagu

SEQ ID NO: 1648638 - RNA, 19 nt, Artificial Sequence
  Description of Artificial Sequence: Synthetic oligonucleotide
  Antisense strand to SEQ ID NO: 1648637
acugucaagaggcuucuuu

SEQ ID NO: 1648639 - RNA, 19 nt, Artificial Sequence
  Description of Artificial Sequence: Synthetic oligonucleotide
  Sense strand starting at position 1070 of SEQ ID NO: 1561126
cggguccuguuaugaauga

SEQ ID NO: 1648640 - RNA, 19 nt, Artificial Sequence
  Description of Artificial Sequence: Synthetic oligonucleotide
  Antisense strand to SEQ ID NO: 1648639
ucauucauaacaggacccg

SEQ ID NO: 1648641 - RNA, 19 nt, Artificial Sequence
  Description of Artificial Sequence: Synthetic oligonucleotide
  Sense strand starting at position 1074 of SEQ ID NO: 1561126
uccuguuaugaaugacauu

SEQ ID NO: 1648642 - RNA, 19 nt, Artificial Sequence
  Description of Artificial Sequence: Synthetic oligonucleotide
  Antisense strand to SEQ ID NO: 1648641
aaugucauucauaacagga

SEQ ID NO: 1648643 - RNA, 19 nt, Artificial Sequence
  Description of Artificial Sequence: Synthetic oligonucleotide
  Sense strand starting at position 1168 of SEQ ID NO: 1561126
aggguauucgugcauccaa

SEQ ID NO: 1648644 - RNA, 19 nt, Artificial Sequence
  Description of Artificial Sequence: Synthetic oligonucleotide
  Antisense strand to SEQ ID NO: 1648643
uuggaugcacgaauacccu

SEQ ID NO: 1648645 - RNA, 19 nt, Artificial Sequence
  Description of Artificial Sequence: Synthetic oligonucleotide
  Sense strand starting at position 1383 of SEQ ID NO: 1561126
cuuguucucugcuggcaaa

SEQ ID NO: 1648646 - RNA, 19 nt, Artificial Sequence
  Description of Artificial Sequence: Synthetic oligonucleotide
  Antisense strand to SEQ ID NO: 1648645
uuugccagcagagaacaag

SEQ ID NO: 1648647 - RNA, 19 nt, Artificial Sequence
  Description of Artificial Sequence: Synthetic oligonucleotide
  Sense strand starting at position 1588 of SEQ ID NO: 1561126
gcuccgaguucgggaggaa

SEQ ID NO: 1648648 - RNA, 19 nt, Artificial Sequence
  Description of Artificial Sequence: Synthetic oligonucleotide
  Antisense strand to SEQ ID NO: 1648647
uuccucccgaacucggagc

SEQ ID NO: 1648649 - RNA, 19 nt, Artificial Sequence
  Description of Artificial Sequence: Synthetic oligonucleotide
  Sense strand starting at position 1589 of SEQ ID NO: 1561126
cuccgaguucgggaggaau

SEQ ID NO: 1648650 - RNA, 19 nt, Artificial Sequence
  Description of Artificial Sequence: Synthetic oligonucleotide
  Antisense strand to SEQ ID NO: 1648649
auuccucccgaacucggag

SEQ ID NO: 1648651 - RNA, 19 nt, Artificial Sequence
  Description of Artificial Sequence: Synthetic oligonucleotide
  Sense strand starting at position 1591 of SEQ ID NO: 1561126
ccgaguucgggaggaauga

SEQ ID NO: 1648652 - RNA, 19 nt, Artificial Sequence
  Description of Artificial Sequence: Synthetic oligonucleotide
  Antisense strand to SEQ ID NO: 1648651
ucauuccucccgaacucgg

SEQ ID NO: 1648653 - RNA, 19 nt, Artificial Sequence
  Description of Artificial Sequence: Synthetic oligonucleotide
  Sense strand starting at position 2655 of SEQ ID NO: 1561126
gcucuagauacagguaaug

SEQ ID NO: 1648654 - RNA, 19 nt, Artificial Sequence
  Description of Artificial Sequence: Synthetic oligonucleotide
  Antisense strand to SEQ ID NO: 1648653
cauuaccuguaucuagagc

SEQ ID NO: 1648655 - RNA, 19 nt, Artificial Sequence
  Description of Artificial Sequence: Synthetic oligonucleotide
  Sense strand starting at position 2665 of SEQ ID NO: 1561126
cagguaauggugugcaaau

SEQ ID NO: 1648656 - RNA, 19 nt, Artificial Sequence
  Description of Artificial Sequence: Synthetic oligonucleotide
  Antisense strand to SEQ ID NO: 1648655
auuugcacaccauuaccug

SEQ ID NO: 1648657 - RNA, 19 nt, Artificial Sequence
  Description of Artificial Sequence: Synthetic oligonucleotide
  Sense strand starting at position 2666 of SEQ ID NO: 1561126
agguaauggugugcaaaua

SEQ ID NO: 1648658 - RNA, 19 nt, Artificial Sequence
  Description of Artificial Sequence: Synthetic oligonucleotide
  Antisense strand to SEQ ID NO: 1648657
uauuugcacaccauuaccu

SEQ ID NO: 1648659 - RNA, 19 nt, Artificial Sequence
  Description of Artificial Sequence: Synthetic oligonucleotide
  Sense strand starting at position 2667 of SEQ ID NO: 1561126
gguaauggugugcaaauaa

SEQ ID NO: 1648660 - RNA, 19 nt, Artificial Sequence
  Description of Artificial Sequence: Synthetic oligonucleotide
  Antisense strand to SEQ ID NO: 1648659
uuauuugcacaccauuacc

SEQ ID NO: 1648661 - RNA, 19 nt, Artificial Sequence
  Description of Artificial Sequence: Synthetic oligonucleotide
  Sense strand starting at position 2674 of SEQ ID NO: 1561126
gugugcaaauaauaacaga

SEQ ID NO: 1648662 - RNA, 19 nt, Artificial Sequence
  Description of Artificial Sequence: Synthetic oligonucleotide
  Antisense strand to SEQ ID NO: 1648661
ucuguuauuauuugcacac

SEQ ID NO: 1648663 - RNA, 19 nt, Artificial Sequence
  Description of Artificial Sequence: Synthetic oligonucleotide
  Sense strand starting at position 2710 of SEQ ID NO: 1561126
cagggcugcucuuuaucua

SEQ ID NO: 1648664 - RNA, 19 nt, Artificial Sequence
  Description of Artificial Sequence: Synthetic oligonucleotide
  Antisense strand to SEQ ID NO: 1648663
uagauaaagagcagcccug

SEQ ID NO: 1648665 - RNA, 19 nt, Artificial Sequence
  Description of Artificial Sequence: Synthetic oligonucleotide
  Sense strand starting at position 2713 of SEQ ID NO: 1561126
ggcugcucuuuaucuagaa

SEQ ID NO: 1648666 - RNA, 19 nt, Artificial Sequence
  Description of Artificial Sequence: Synthetic oligonucleotide
  Antisense strand to SEQ ID NO: 1648665
uucuagauaaagagcagcc

SEQ ID NO: 1648667 - RNA, 19 nt, Artificial Sequence
  Description of Artificial Sequence: Synthetic oligonucleotide
  Sense strand starting at position 2866 of SEQ ID NO: 1561126
gggcuuugagcacgugagu

SEQ ID NO: 1648668 - RNA, 19 nt, Artificial Sequence
  Description of Artificial Sequence: Synthetic oligonucleotide
  Antisense strand to SEQ ID NO: 1648667
acucacgugcucaaagccc

SEQ ID NO: 1648669 - RNA, 19 nt, Artificial Sequence
  Description of Artificial Sequence: Synthetic oligonucleotide
  Sense strand starting at position 2966 of SEQ ID NO: 1561126
gguagagggacauguggau

SEQ ID NO: 1648670 - RNA, 19 nt, Artificial Sequence
  Description of Artificial Sequence: Synthetic oligonucleotide
  Antisense strand to SEQ ID NO: 1648669
auccacaugucccucuacc

SEQ ID NO: 1648671 - RNA, 19 nt, Artificial Sequence
  Description of Artificial Sequence: Synthetic oligonucleotide
  Sense strand starting at position 3008 of SEQ ID NO: 1561126
ugucauggcacacguuuaa

SEQ ID NO: 1648672 - RNA, 19 nt, Artificial Sequence
  Description of Artificial Sequence: Synthetic oligonucleotide
  Antisense strand to SEQ ID NO: 1648671
uuaaacgugugccaugaca

SEQ ID NO: 1648673 - RNA, 19 nt, Artificial Sequence
  Description of Artificial Sequence: Synthetic oligonucleotide
  Sense strand starting at position 3751 of SEQ ID NO: 1561126
ugagcagauuccuggcuga

SEQ ID NO: 1648674 - RNA, 19 nt, Artificial Sequence
  Description of Artificial Sequence: Synthetic oligonucleotide
  Antisense strand to SEQ ID NO: 1648673
ucagccaggaaucugcuca

SEQ ID NO: 1648675 - RNA, 19 nt, Artificial Sequence
  Description of Artificial Sequence: Synthetic oligonucleotide
  Sense strand starting at position 3755 of SEQ ID NO: 1561126
cagauuccuggcugagaga

SEQ ID NO: 1648676 - RNA, 19 nt, Artificial Sequence
  Description of Artificial Sequence: Synthetic oligonucleotide
  Antisense strand to SEQ ID NO: 1648675
ucucucagccaggaaucug

SEQ ID NO: 1648677 - RNA, 19 nt, Artificial Sequence
  Description of Artificial Sequence: Synthetic oligonucleotide
  Sense strand starting at position 3822 of SEQ ID NO: 1561126
ucagcaugcccugauggau

SEQ ID NO: 1648678 - RNA, 19 nt, Artificial Sequence
  Description of Artificial Sequence: Synthetic oligonucleotide
  Antisense strand to SEQ ID NO: 1648677
auccaucagggcaugcuga

SEQ ID NO: 1648679 - RNA, 19 nt, Artificial Sequence
  Description of Artificial Sequence: Synthetic oligonucleotide
  Sense strand starting at position 3825 of SEQ ID NO: 1561126
gcaugcccugauggauaau

SEQ ID NO: 1648680 - RNA, 19 nt, Artificial Sequence
  Description of Artificial Sequence: Synthetic oligonucleotide
  Antisense strand to SEQ ID NO: 1648679
auuauccaucagggcaugc

SEQ ID NO: 1648681 - RNA, 19 nt, Artificial Sequence
  Description of Artificial Sequence: Synthetic oligonucleotide
  Sense strand starting at position 3877 of SEQ ID NO: 1561126
uaggcuguucuccagguaa

SEQ ID NO: 1648682 - RNA, 19 nt, Artificial Sequence
  Description of Artificial Sequence: Synthetic oligonucleotide
  Antisense strand to SEQ ID NO: 1648681
uuaccuggagaacagccua

SEQ ID NO: 1648683 - RNA, 19 nt, Artificial Sequence
  Description of Artificial Sequence: Synthetic oligonucleotide
  Sense strand starting at position 3879 of SEQ ID NO: 1561126
ggcuguucuccagguaauu

SEQ ID NO: 1648684 - RNA, 19 nt, Artificial Sequence
  Description of Artificial Sequence: Synthetic oligonucleotide
  Antisense strand to SEQ ID NO: 1648683
aauuaccuggagaacagcc

SEQ ID NO: 1648685 - RNA, 19 nt, Artificial Sequence
  Description of Artificial Sequence: Synthetic oligonucleotide
  Sense strand starting at position 3891 of SEQ ID NO: 1561126
gguaauucuuacuuggcca

SEQ ID NO: 1648686 - RNA, 19 nt, Artificial Sequence
  Description of Artificial Sequence: Synthetic oligonucleotide
  Antisense strand to SEQ ID NO: 1648685
uggccaaguaagaauuacc

SEQ ID NO: 1648687 - RNA, 19 nt, Artificial Sequence
  Description of Artificial Sequence: Synthetic oligonucleotide
  Sense strand starting at position 3919 of SEQ ID NO: 1561126
accaucuuauguguuccaa

SEQ ID NO: 1648688 - RNA, 19 nt, Artificial Sequence
  Description of Artificial Sequence: Synthetic oligonucleotide
  Antisense strand to SEQ ID NO: 1648687
uuggaacacauaagauggu

SEQ ID NO: 1648689 - RNA, 19 nt, Artificial Sequence
  Description of Artificial Sequence: Synthetic oligonucleotide
  Sense strand starting at position 3923 of SEQ ID NO: 1561126
ucuuauguguuccaaaucu

SEQ ID NO: 1648690 - RNA, 19 nt, Artificial Sequence
  Description of Artificial Sequence: Synthetic oligonucleotide
  Antisense strand to SEQ ID NO: 1648689
agauuuggaacacauaaga

SEQ ID NO: 1648691 - RNA, 19 nt, Artificial Sequence
  Description of Artificial Sequence: Synthetic oligonucleotide
  Sense strand starting at position 733 of SEQ ID NO: 1561127
uacgguuucguaguguuaa

SEQ ID NO: 1648692 - RNA, 19 nt, Artificial Sequence
  Description of Artificial Sequence: Synthetic oligonucleotide
  Antisense strand to SEQ ID NO: 1648691
uuaacacuacgaaaccgua

SEQ ID NO: 1648693 - RNA, 19 nt, Artificial Sequence
  Description of Artificial Sequence: Synthetic oligonucleotide
  Sense strand starting at position 735 of SEQ ID NO: 1561127
cgguuucguaguguuaagu

SEQ ID NO: 1648694 - RNA, 19 nt, Artificial Sequence
  Description of Artificial Sequence: Synthetic oligonucleotide
  Antisense strand to SEQ ID NO: 1648693
acuuaacacuacgaaaccg

SEQ ID NO: 1648695 - RNA, 19 nt, Artificial Sequence
  Description of Artificial Sequence: Synthetic oligonucleotide
  Sense strand starting at position 736 of SEQ ID NO: 1561127
gguuucguaguguuaagug

SEQ ID NO: 1648696 - RNA, 19 nt, Artificial Sequence
  Description of Artificial Sequence: Synthetic oligonucleotide
  Antisense strand to SEQ ID NO: 1648695
cacuuaacacuacgaaacc

SEQ ID NO: 1648697 - RNA, 19 nt, Artificial Sequence
  Description of Artificial Sequence: Synthetic oligonucleotide
  Sense strand starting at position 753 of SEQ ID NO: 1561127
uguuaaguauauucccagu

SEQ ID NO: 1648698 - RNA, 19 nt, Artificial Sequence
  Description of Artificial Sequence: Synthetic oligonucleotide
  Antisense strand to SEQ ID NO: 1648697
acugggaauauacuuaaca

SEQ ID NO: 1648699 - RNA, 19 nt, Artificial Sequence
  Description of Artificial Sequence: Synthetic oligonucleotide
  Sense strand starting at position 986 of SEQ ID NO: 1561127
ccuugauguuuaucucugu

SEQ ID NO: 1648700 - RNA, 19 nt, Artificial Sequence
  Description of Artificial Sequence: Synthetic oligonucleotide
  Antisense strand to SEQ ID NO: 1648699
acagagauaaacaucaagg

SEQ ID NO: 1648701 - RNA, 19 nt, Artificial Sequence
  Description of Artificial Sequence: Synthetic oligonucleotide
  Sense strand starting at position 989 of SEQ ID NO: 1561127
ugauguuuaucucuguugu

SEQ ID NO: 1648702 - RNA, 19 nt, Artificial Sequence
  Description of Artificial Sequence: Synthetic oligonucleotide
  Antisense strand to SEQ ID NO: 1648701
acaacagagauaaacauca

SEQ ID NO: 1648703 - RNA, 19 nt, Artificial Sequence
  Description of Artificial Sequence: Synthetic oligonucleotide
  Sense strand starting at position 990 of SEQ ID NO: 1561127
gauguuuaucucuguugua

SEQ ID NO: 1648704 - RNA, 19 nt, Artificial Sequence
  Description of Artificial Sequence: Synthetic oligonucleotide
  Antisense strand to SEQ ID NO: 1648703
uacaacagagauaaacauc

SEQ ID NO: 1648705 - RNA, 19 nt, Artificial Sequence
  Description of Artificial Sequence: Synthetic oligonucleotide
  Sense strand starting at position 991 of SEQ ID NO: 1561127
auguuuaucucuguuguau

SEQ ID NO: 1648706 - RNA, 19 nt, Artificial Sequence
  Description of Artificial Sequence: Synthetic oligonucleotide
  Antisense strand to SEQ ID NO: 1648705
auacaacagagauaaacau

SEQ ID NO: 1648707 - RNA, 19 nt, Artificial Sequence
  Description of Artificial Sequence: Synthetic oligonucleotide
  Sense strand starting at position 1085 of SEQ ID NO: 1561127
acucaccugucaguggaua

SEQ ID NO: 1648708 - RNA, 19 nt, Artificial Sequence
  Description of Artificial Sequence: Synthetic oligonucleotide
  Antisense strand to SEQ ID NO: 1648707
uauccacugacaggugagu

SEQ ID NO: 1648709 - RNA, 19 nt, Artificial Sequence
  Description of Artificial Sequence: Synthetic oligonucleotide
  Sense strand starting at position 1086 of SEQ ID NO: 1561127
cucaccugucaguggauau

SEQ ID NO: 1648710 - RNA, 19 nt, Artificial Sequence
  Description of Artificial Sequence: Synthetic oligonucleotide
  Antisense strand to SEQ ID NO: 1648709
auauccacugacaggugag

SEQ ID NO: 1648711 - RNA, 19 nt, Artificial Sequence
  Description of Artificial Sequence: Synthetic oligonucleotide
  Sense strand starting at position 1122 of SEQ ID NO: 1561127
uuuggcuauuugcugaaau

SEQ ID NO: 1648712 - RNA, 19 nt, Artificial Sequence
  Description of Artificial Sequence: Synthetic oligonucleotide
  Antisense strand to SEQ ID NO: 1648711
auuucagcaaauagccaaa

SEQ ID NO: 1648713 - RNA, 19 nt, Artificial Sequence
  Description of Artificial Sequence: Synthetic oligonucleotide
  Sense strand starting at position 1293 of SEQ ID NO: 1561127
uugagauugccuggcucuu

SEQ ID NO: 1648714 - RNA, 19 nt, Artificial Sequence
  Description of Artificial Sequence: Synthetic oligonucleotide
  Antisense strand to SEQ ID NO: 1648713
aagagccaggcaaucucaa

SEQ ID NO: 1648715 - RNA, 19 nt, Artificial Sequence
  Description of Artificial Sequence: Synthetic oligonucleotide
  Sense strand starting at position 1322 of SEQ ID NO: 1561127
uggccauugcccugaugau

SEQ ID NO: 1648716 - RNA, 19 nt, Artificial Sequence
  Description of Artificial Sequence: Synthetic oligonucleotide
  Antisense strand to SEQ ID NO: 1648715
aucaucagggcaauggcca

SEQ ID NO: 1648717 - RNA, 19 nt, Artificial Sequence
  Description of Artificial Sequence: Synthetic oligonucleotide
  Sense strand starting at position 1323 of SEQ ID NO: 1561127
ggccauugcccugaugauu

SEQ ID NO: 1648718 - RNA, 19 nt, Artificial Sequence
  Description of Artificial Sequence: Synthetic oligonucleotide
  Antisense strand to SEQ ID NO: 1648717
aaucaucagggcaauggcc

SEQ ID NO: 1648719 - RNA, 19 nt, Artificial Sequence
  Description of Artificial Sequence: Synthetic oligonucleotide
  Sense strand starting at position 1421 of SEQ ID NO: 1561127
ucaggacaucauuggucau

SEQ ID NO: 1648720 - RNA, 19 nt, Artificial Sequence
  Description of Artificial Sequence: Synthetic oligonucleotide
  Antisense strand to SEQ ID NO: 1648719
augaccaaugauguccuga

SEQ ID NO: 1648721 - RNA, 19 nt, Artificial Sequence
  Description of Artificial Sequence: Synthetic oligonucleotide
  Sense strand starting at position 1501 of SEQ ID NO: 1561127
uccuguggauucuccuaau

SEQ ID NO: 1648722 - RNA, 19 nt, Artificial Sequence
  Description of Artificial Sequence: Synthetic oligonucleotide
  Antisense strand to SEQ ID NO: 1648721
auuaggagaauccacagga

SEQ ID NO: 1648723 - RNA, 19 nt, Artificial Sequence
  Description of Artificial Sequence: Synthetic oligonucleotide
  Sense strand starting at position 1543 of SEQ ID NO: 1561127
cucauccuacuguguaauu

SEQ ID NO: 1648724 - RNA, 19 nt, Artificial Sequence
  Description of Artificial Sequence: Synthetic oligonucleotide
  Antisense strand to SEQ ID NO: 1648723
aauuacacaguaggaugag

SEQ ID NO: 1648725 - RNA, 19 nt, Artificial Sequence
  Description of Artificial Sequence: Synthetic oligonucleotide
  Sense strand starting at position 1581 of SEQ ID NO: 1561127
ucugauugucaaugguauu

SEQ ID NO: 1648726 - RNA, 19 nt, Artificial Sequence
  Description of Artificial Sequence: Synthetic oligonucleotide
  Antisense strand to SEQ ID NO: 1648725
aauaccauugacaaucaga

SEQ ID NO: 1648727 - RNA, 19 nt, Artificial Sequence
  Description of Artificial Sequence: Synthetic oligonucleotide
  Sense strand starting at position 1626 of SEQ ID NO: 1561127
auuguacacugucugacau

SEQ ID NO: 1648728 - RNA, 19 nt, Artificial Sequence
  Description of Artificial Sequence: Synthetic oligonucleotide
  Antisense strand to SEQ ID NO: 1648727
augucagacaguguacaau

SEQ ID NO: 1648729 - RNA, 19 nt, Artificial Sequence
  Description of Artificial Sequence: Synthetic oligonucleotide
  Sense strand starting at position 1627 of SEQ ID NO: 1561127
uuguacacugucugacaua

SEQ ID NO: 1648730 - RNA, 19 nt, Artificial Sequence
  Description of Artificial Sequence: Synthetic oligonucleotide
  Antisense strand to SEQ ID NO: 1648729
uaugucagacaguguacaa

SEQ ID NO: 1648731 - RNA, 19 nt, Artificial Sequence
  Description of Artificial Sequence: Synthetic oligonucleotide
  Sense strand starting at position 1705 of SEQ ID NO: 1561127
ucacgauucugccuccuua

SEQ ID NO: 1648732 - RNA, 19 nt, Artificial Sequence
  Description of Artificial Sequence: Synthetic oligonucleotide
  Antisense strand to SEQ ID NO: 1648731
uaaggaggcagaaucguga

SEQ ID NO: 1648733 - RNA, 19 nt, Artificial Sequence
  Description of Artificial Sequence: Synthetic oligonucleotide
  Sense strand starting at position 1843 of SEQ ID NO: 1561127
uaagaaaucguccgacaug

SEQ ID NO: 1648734 - RNA, 19 nt, Artificial Sequence
  Description of Artificial Sequence: Synthetic oligonucleotide
  Antisense strand to SEQ ID NO: 1648733
caugucggacgauuucuua

SEQ ID NO: 1648735 - RNA, 19 nt, Artificial Sequence
  Description of Artificial Sequence: Synthetic oligonucleotide
  Sense strand starting at position 1846 of SEQ ID NO: 1561127
gaaaucguccgacaugaug

SEQ ID NO: 1648736 - RNA, 19 nt, Artificial Sequence
  Description of Artificial Sequence: Synthetic oligonucleotide
  Antisense strand to SEQ ID NO: 1648735
caucaugucggacgauuuc

SEQ ID NO: 1648737 - RNA, 19 nt, Artificial Sequence
  Description of Artificial Sequence: Synthetic oligonucleotide
  Sense strand starting at position 1983 of SEQ ID NO: 1561127
augucacauguuuguugua

SEQ ID NO: 1648738 - RNA, 19 nt, Artificial Sequence
  Description of Artificial Sequence: Synthetic oligonucleotide
  Antisense strand to SEQ ID NO: 1648737
uacaacaaacaugugacau

SEQ ID NO: 1648739 - RNA, 19 nt, Artificial Sequence
  Description of Artificial Sequence: Synthetic oligonucleotide
  Sense strand starting at position 1984 of SEQ ID NO: 1561127
ugucacauguuuguuguaa

SEQ ID NO: 1648740 - RNA, 19 nt, Artificial Sequence
  Description of Artificial Sequence: Synthetic oligonucleotide
  Antisense strand to SEQ ID NO: 1648739
uuacaacaaacaugugaca

SEQ ID NO: 1648741 - RNA, 19 nt, Artificial Sequence
  Description of Artificial Sequence: Synthetic oligonucleotide
  Sense strand starting at position 1985 of SEQ ID NO: 1561127
gucacauguuuguuguaaa

SEQ ID NO: 1648742 - RNA, 19 nt, Artificial Sequence
  Description of Artificial Sequence: Synthetic oligonucleotide
  Antisense strand to SEQ ID NO: 1648741
uuuacaacaaacaugugac

SEQ ID NO: 1648743 - RNA, 19 nt, Artificial Sequence
  Description of Artificial Sequence: Synthetic oligonucleotide
  Sense strand starting at position 1998 of SEQ ID NO: 1561127
uguaaaguuuacuugcuga

SEQ ID NO: 1648744 - RNA, 19 nt, Artificial Sequence
  Description of Artificial Sequence: Synthetic oligonucleotide
  Antisense strand to SEQ ID NO: 1648743
ucagcaaguaaacuuuaca

SEQ ID NO: 1648745 - RNA, 19 nt, Artificial Sequence
  Description of Artificial Sequence: Synthetic oligonucleotide
  Sense strand starting at position 2003 of SEQ ID NO: 1561127
aguuuacuugcugauaaag

SEQ ID NO: 1648746 - RNA, 19 nt, Artificial Sequence
  Description of Artificial Sequence: Synthetic oligonucleotide
  Antisense strand to SEQ ID NO: 1648745
cuuuaucagcaaguaaacu

SEQ ID NO: 1648747 - RNA, 19 nt, Artificial Sequence
  Description of Artificial Sequence: Synthetic oligonucleotide
  Sense strand starting at position 2022 of SEQ ID NO: 1561127
agagguauaaugugaccca

SEQ ID NO: 1648748 - RNA, 19 nt, Artificial Sequence
  Description of Artificial Sequence: Synthetic oligonucleotide
  Antisense strand to SEQ ID NO: 1648747
ugggucacauuauaccucu

SEQ ID NO: 1648749 - RNA, 19 nt, Artificial Sequence
  Description of Artificial Sequence: Synthetic oligonucleotide
  Sense strand starting at position 2025 of SEQ ID NO: 1561127
gguauaaugugacccauac

SEQ ID NO: 1648750 - RNA, 19 nt, Artificial Sequence
  Description of Artificial Sequence: Synthetic oligonucleotide
  Antisense strand to SEQ ID NO: 1648749
guaugggucacauuauacc

SEQ ID NO: 1648751 - RNA, 19 nt, Artificial Sequence
  Description of Artificial Sequence: Synthetic oligonucleotide
  Sense strand starting at position 2053 of SEQ ID NO: 1561127
ugaagauguugagcaauca

SEQ ID NO: 1648752 - RNA, 19 nt, Artificial Sequence
  Description of Artificial Sequence: Synthetic oligonucleotide
  Antisense strand to SEQ ID NO: 1648751
ugauugcucaacaucuuca

SEQ ID NO: 1648753 - RNA, 19 nt, Artificial Sequence
  Description of Artificial Sequence: Synthetic oligonucleotide
  Sense strand starting at position 2098 of SEQ ID NO: 1561127
ggucaucugagcuugcguu

SEQ ID NO: 1648754 - RNA, 19 nt, Artificial Sequence
  Description of Artificial Sequence: Synthetic oligonucleotide
  Antisense strand to SEQ ID NO: 1648753
aacgcaagcucagaugacc

SEQ ID NO: 1648755 - RNA, 19 nt, Artificial Sequence
  Description of Artificial Sequence: Synthetic oligonucleotide
  Sense strand starting at position 2168 of SEQ ID NO: 1561127
uuugauaauaugggugaau

SEQ ID NO: 1648756 - RNA, 19 nt, Artificial Sequence
  Description of Artificial Sequence: Synthetic oligonucleotide
  Antisense strand to SEQ ID NO: 1648755
auucacccauauuaucaaa

SEQ ID NO: 1648757 - RNA, 19 nt, Artificial Sequence
  Description of Artificial Sequence: Synthetic oligonucleotide
  Sense strand starting at position 2169 of SEQ ID NO: 1561127
uugauaauaugggugaauu

SEQ ID NO: 1648758 - RNA, 19 nt, Artificial Sequence
  Description of Artificial Sequence: Synthetic oligonucleotide
  Antisense strand to SEQ ID NO: 1648757
aauucacccauauuaucaa

SEQ ID NO: 1648759 - RNA, 19 nt, Artificial Sequence
  Description of Artificial Sequence: Synthetic oligonucleotide
  Sense strand starting at position 2196 of SEQ ID NO: 1561127
aagguuugagugcaaacuu

SEQ ID NO: 1648760 - RNA, 19 nt, Artificial Sequence
  Description of Artificial Sequence: Synthetic oligonucleotide
  Antisense strand to SEQ ID NO: 1648759
aaguuugcacucaaaccuu

SEQ ID NO: 1648761 - RNA, 19 nt, Artificial Sequence
  Description of Artificial Sequence: Synthetic oligonucleotide
  Sense strand starting at position 2371 of SEQ ID NO: 1561127
gucuuuaucuguucucauc

SEQ ID NO: 1648762 - RNA, 19 nt, Artificial Sequence
  Description of Artificial Sequence: Synthetic oligonucleotide
  Antisense strand to SEQ ID NO: 1648761
gaugagaacagauaaagac

SEQ ID NO: 1648763 - RNA, 19 nt, Artificial Sequence
  Description of Artificial Sequence: Synthetic oligonucleotide
  Sense strand starting at position 2504 of SEQ ID NO: 1561127
aucuguauuucugaaguau

SEQ ID NO: 1648764 - RNA, 19 nt, Artificial Sequence
  Description of Artificial Sequence: Synthetic oligonucleotide
  Antisense strand to SEQ ID NO: 1648763
auacuucagaaauacagau

SEQ ID NO: 1648765 - RNA, 19 nt, Artificial Sequence
  Description of Artificial Sequence: Synthetic oligonucleotide
  Sense strand starting at position 2619 of SEQ ID NO: 1561127
auggcugacguguauguaa

SEQ ID NO: 1648766 - RNA, 19 nt, Artificial Sequence
  Description of Artificial Sequence: Synthetic oligonucleotide
  Antisense strand to SEQ ID NO: 1648765
uuacauacacgucagccau

SEQ ID NO: 1648767 - RNA, 19 nt, Artificial Sequence
  Description of Artificial Sequence: Synthetic oligonucleotide
  Sense strand starting at position 2622 of SEQ ID NO: 1561127
gcugacguguauguaauaa

SEQ ID NO: 1648768 - RNA, 19 nt, Artificial Sequence
  Description of Artificial Sequence: Synthetic oligonucleotide
  Antisense strand to SEQ ID NO: 1648767
uuauuacauacacgucagc

SEQ ID NO: 1648769 - RNA, 19 nt, Artificial Sequence
  Description of Artificial Sequence: Synthetic oligonucleotide
  Sense strand starting at position 3112 of SEQ ID NO: 1561127
gccuaauuauguguuucua

SEQ ID NO: 1648770 - RNA, 19 nt, Artificial Sequence
  Description of Artificial Sequence: Synthetic oligonucleotide
  Antisense strand to SEQ ID NO: 1648769
uagaaacacauaauuaggc

SEQ ID NO: 1648771 - RNA, 19 nt, Artificial Sequence
  Description of Artificial Sequence: Synthetic oligonucleotide
  Sense strand starting at position 44 of SEQ ID NO: 1561128
uuuguuauuucccuuuggu

SEQ ID NO: 1648772 - RNA, 19 nt, Artificial Sequence
  Description of Artificial Sequence: Synthetic oligonucleotide
  Antisense strand to SEQ ID NO: 1648771
accaaagggaaauaacaaa

SEQ ID NO: 1648773 - RNA, 19 nt, Artificial Sequence
  Description of Artificial Sequence: Synthetic oligonucleotide
  Sense strand starting at position 47 of SEQ ID NO: 1561128
guuauuucccuuuggucau

SEQ ID NO: 1648774 - RNA, 19 nt, Artificial Sequence
  Description of Artificial Sequence: Synthetic oligonucleotide
  Antisense strand to SEQ ID NO: 1648773
augaccaaagggaaauaac

SEQ ID NO: 1648775 - RNA, 19 nt, Artificial Sequence
  Description of Artificial Sequence: Synthetic oligonucleotide
  Sense strand starting at position 48 of SEQ ID NO: 1561128
uuauuucccuuuggucauu

SEQ ID NO: 1648776 - RNA, 19 nt, Artificial Sequence
  Description of Artificial Sequence: Synthetic oligonucleotide
  Antisense strand to SEQ ID NO: 1648775
aaugaccaaagggaaauaa

SEQ ID NO: 1648777 - RNA, 19 nt, Artificial Sequence
  Description of Artificial Sequence: Synthetic oligonucleotide
  Sense strand starting at position 667 of SEQ ID NO: 1561128
cagagagacuccgucacaa

SEQ ID NO: 1648778 - RNA, 19 nt, Artificial Sequence
  Description of Artificial Sequence: Synthetic oligonucleotide
  Antisense strand to SEQ ID NO: 1648777
uugugacggagucucucug

SEQ ID NO: 1648779 - RNA, 19 nt, Artificial Sequence
  Description of Artificial Sequence: Synthetic oligonucleotide
  Sense strand starting at position 1027 of SEQ ID NO: 1561128
ccgagauuguaccaucaca

SEQ ID NO: 1648780 - RNA, 19 nt, Artificial Sequence
  Description of Artificial Sequence: Synthetic oligonucleotide
  Antisense strand to SEQ ID NO: 1648779
ugugaugguacaaucucgg

SEQ ID NO: 1648781 - RNA, 19 nt, Artificial Sequence
  Description of Artificial Sequence: Synthetic oligonucleotide
  Sense strand starting at position 1156 of SEQ ID NO: 1561128
gagguuugaugagcugaua

SEQ ID NO: 1648782 - RNA, 19 nt, Artificial Sequence
  Description of Artificial Sequence: Synthetic oligonucleotide
  Antisense strand to SEQ ID NO: 1648781
uaucagcucaucaaaccuc

SEQ ID NO: 1648783 - RNA, 19 nt, Artificial Sequence
  Description of Artificial Sequence: Synthetic oligonucleotide
  Sense strand starting at position 1159 of SEQ ID NO: 1561128
guuugaugagcugauauug

SEQ ID NO: 1648784 - RNA, 19 nt, Artificial Sequence
  Description of Artificial Sequence: Synthetic oligonucleotide
  Antisense strand to SEQ ID NO: 1648783
caauaucagcucaucaaac

SEQ ID NO: 1648785 - RNA, 19 nt, Artificial Sequence
  Description of Artificial Sequence: Synthetic oligonucleotide
  Sense strand starting at position 1448 of SEQ ID NO: 1561128
aggugaaguguugagaacu

SEQ ID NO: 1648786 - RNA, 19 nt, Artificial Sequence
  Description of Artificial Sequence: Synthetic oligonucleotide
  Antisense strand to SEQ ID NO: 1648785
aguucucaacacuucaccu

SEQ ID NO: 1648787 - RNA, 19 nt, Artificial Sequence
  Description of Artificial Sequence: Synthetic oligonucleotide
  Sense strand starting at position 1449 of SEQ ID NO: 1561128
ggugaaguguugagaacug

SEQ ID NO: 1648788 - RNA, 19 nt, Artificial Sequence
  Description of Artificial Sequence: Synthetic oligonucleotide
  Antisense strand to SEQ ID NO: 1648787
caguucucaacacuucacc

SEQ ID NO: 1648789 - RNA, 19 nt, Artificial Sequence
  Description of Artificial Sequence: Synthetic oligonucleotide
  Sense strand starting at position 2186 of SEQ ID NO: 1561128
ccgagaucacggcaccauu

SEQ ID NO: 1648790 - RNA, 19 nt, Artificial Sequence
  Description of Artificial Sequence: Synthetic oligonucleotide
  Antisense strand to SEQ ID NO: 1648789
aauggugccgugaucucgg

SEQ ID NO: 1648791 - RNA, 19 nt, Artificial Sequence
  Description of Artificial Sequence: Synthetic oligonucleotide
  Sense strand starting at position 2209 of SEQ ID NO: 1561128
uccaguuugggcgacaaga

SEQ ID NO: 1648792 - RNA, 19 nt, Artificial Sequence
  Description of Artificial Sequence: Synthetic oligonucleotide
  Antisense strand to SEQ ID NO: 1648791
ucuugucgcccaaacugga

SEQ ID NO: 1648793 - RNA, 19 nt, Artificial Sequence
  Description of Artificial Sequence: Synthetic oligonucleotide
  Sense strand starting at position 2654 of SEQ ID NO: 1561128
gcucauagucugcauucca

SEQ ID NO: 1648794 - RNA, 19 nt, Artificial Sequence
  Description of Artificial Sequence: Synthetic oligonucleotide
  Antisense strand to SEQ ID NO: 1648793
uggaaugcagacuaugagc

SEQ ID NO: 1648795 - RNA, 19 nt, Artificial Sequence
  Description of Artificial Sequence: Synthetic oligonucleotide
  Sense strand starting at position 2803 of SEQ ID NO: 1561128
uuuguuuguucagugaugu

SEQ ID NO: 1648796 - RNA, 19 nt, Artificial Sequence
  Description of Artificial Sequence: Synthetic oligonucleotide
  Antisense strand to SEQ ID NO: 1648795
acaucacugaacaaacaaa

SEQ ID NO: 1648797 - RNA, 19 nt, Artificial Sequence
  Description of Artificial Sequence: Synthetic oligonucleotide
  Sense strand starting at position 2804 of SEQ ID NO: 1561128
uuguuuguucagugauguc

SEQ ID NO: 1648798 - RNA, 19 nt, Artificial Sequence
  Description of Artificial Sequence: Synthetic oligonucleotide
  Antisense strand to SEQ ID NO: 1648797
gacaucacugaacaaacaa

SEQ ID NO: 1648799 - RNA, 19 nt, Artificial Sequence
  Description of Artificial Sequence: Synthetic oligonucleotide
  Sense strand starting at position 2813 of SEQ ID NO: 1561128
cagugaugucaucaguuau

SEQ ID NO: 1648800 - RNA, 19 nt, Artificial Sequence
  Description of Artificial Sequence: Synthetic oligonucleotide
  Antisense strand to SEQ ID NO: 1648799
auaacugaugacaucacug

SEQ ID NO: 1648801 - RNA, 19 nt, Artificial Sequence
  Description of Artificial Sequence: Synthetic oligonucleotide
  Sense strand starting at position 2819 of SEQ ID NO: 1561128
ugucaucaguuaucccaua

SEQ ID NO: 1648802 - RNA, 19 nt, Artificial Sequence
  Description of Artificial Sequence: Synthetic oligonucleotide
  Antisense strand to SEQ ID NO: 1648801
uaugggauaacugaugaca

SEQ ID NO: 1648803 - RNA, 19 nt, Artificial Sequence
  Description of Artificial Sequence: Synthetic oligonucleotide
  Sense strand starting at position 2824 of SEQ ID NO: 1561128
ucaguuaucccauagguug

SEQ ID NO: 1648804 - RNA, 19 nt, Artificial Sequence
  Description of Artificial Sequence: Synthetic oligonucleotide
  Antisense strand to SEQ ID NO: 1648803
caaccuaugggauaacuga

SEQ ID NO: 1648805 - RNA, 19 nt, Artificial Sequence
  Description of Artificial Sequence: Synthetic oligonucleotide
  Sense strand starting at position 2851 of SEQ ID NO: 1561128
cgcggaauuagugaugaug

SEQ ID NO: 1648806 - RNA, 19 nt, Artificial Sequence
  Description of Artificial Sequence: Synthetic oligonucleotide
  Antisense strand to SEQ ID NO: 1648805
caucaucacuaauuccgcg

SEQ ID NO: 1648807 - RNA, 19 nt, Artificial Sequence
  Description of Artificial Sequence: Synthetic oligonucleotide
  Sense strand starting at position 2853 of SEQ ID NO: 1561128
cggaauuagugaugauguc

SEQ ID NO: 1648808 - RNA, 19 nt, Artificial Sequence
  Description of Artificial Sequence: Synthetic oligonucleotide
  Antisense strand to SEQ ID NO: 1648807
gacaucaucacuaauuccg

SEQ ID NO: 1648809 - RNA, 19 nt, Artificial Sequence
  Description of Artificial Sequence: Synthetic oligonucleotide
  Sense strand starting at position 2862 of SEQ ID NO: 1561128
ugaugaugucaucgguuac

SEQ ID NO: 1648810 - RNA, 19 nt, Artificial Sequence
  Description of Artificial Sequence: Synthetic oligonucleotide
  Antisense strand to SEQ ID NO: 1648809
guaaccgaugacaucauca

SEQ ID NO: 1648811 - RNA, 19 nt, Artificial Sequence
  Description of Artificial Sequence: Synthetic oligonucleotide
  Sense strand starting at position 3036 of SEQ ID NO: 1561128
uuccucaucugucauguga

SEQ ID NO: 1648812 - RNA, 19 nt, Artificial Sequence
  Description of Artificial Sequence: Synthetic oligonucleotide
  Antisense strand to SEQ ID NO: 1648811
ucacaugacagaugaggaa

SEQ ID NO: 1648813 - RNA, 19 nt, Artificial Sequence
  Description of Artificial Sequence: Synthetic oligonucleotide
  Sense strand starting at position 3040 of SEQ ID NO: 1561128
ucaucugucaugugaggau

SEQ ID NO: 1648814 - RNA, 19 nt, Artificial Sequence
  Description of Artificial Sequence: Synthetic oligonucleotide
  Antisense strand to SEQ ID NO: 1648813
auccucacaugacagauga

SEQ ID NO: 1648815 - RNA, 19 nt, Artificial Sequence
  Description of Artificial Sequence: Synthetic oligonucleotide
  Sense strand starting at position 3060 of SEQ ID NO: 1561128
agagcaaucucugcuuuga

SEQ ID NO: 1648816 - RNA, 19 nt, Artificial Sequence
  Description of Artificial Sequence: Synthetic oligonucleotide
  Antisense strand to SEQ ID NO: 1648815
ucaaagcagagauugcucu

SEQ ID NO: 1648817 - RNA, 19 nt, Artificial Sequence
  Description of Artificial Sequence: Synthetic oligonucleotide
  Sense strand starting at position 3064 of SEQ ID NO: 1561128
caaucucugcuuugagguu

SEQ ID NO: 1648818 - RNA, 19 nt, Artificial Sequence
  Description of Artificial Sequence: Synthetic oligonucleotide
  Antisense strand to SEQ ID NO: 1648817
aaccucaaagcagagauug

SEQ ID NO: 1648819 - RNA, 19 nt, Artificial Sequence
  Description of Artificial Sequence: Synthetic oligonucleotide
  Sense strand starting at position 3126 of SEQ ID NO: 1561128
cuuggcuccugauacauuu

SEQ ID NO: 1648820 - RNA, 19 nt, Artificial Sequence
  Description of Artificial Sequence: Synthetic oligonucleotide
  Antisense strand to SEQ ID NO: 1648819
aaauguaucaggagccaag

SEQ ID NO: 1648821 - RNA, 19 nt, Artificial Sequence
  Description of Artificial Sequence: Synthetic oligonucleotide
  Sense strand starting at position 3135 of SEQ ID NO: 1561128
ugauacauuuaucaggaaa

SEQ ID NO: 1648822 - RNA, 19 nt, Artificial Sequence
  Description of Artificial Sequence: Synthetic oligonucleotide
  Antisense strand to SEQ ID NO: 1648821
uuuccugauaaauguauca

SEQ ID NO: 1648823 - RNA, 19 nt, Artificial Sequence
  Description of Artificial Sequence: Synthetic oligonucleotide
  Sense strand starting at position 3137 of SEQ ID NO: 1561128
auacauuuaucaggaaacg

SEQ ID NO: 1648824 - RNA, 19 nt, Artificial Sequence
  Description of Artificial Sequence: Synthetic oligonucleotide
  Antisense strand to SEQ ID NO: 1648823
cguuuccugauaaauguau

SEQ ID NO: 1648825 - RNA, 19 nt, Artificial Sequence
  Description of Artificial Sequence: Synthetic oligonucleotide
  Sense strand starting at position 3155 of SEQ ID NO: 1561128
ggaagcucuguuuagcauu

SEQ ID NO: 1648826 - RNA, 19 nt, Artificial Sequence
  Description of Artificial Sequence: Synthetic oligonucleotide
  Antisense strand to SEQ ID NO: 1648825
aaugcuaaacagagcuucc

SEQ ID NO: 1648827 - RNA, 19 nt, Artificial Sequence
  Description of Artificial Sequence: Synthetic oligonucleotide
  Sense strand starting at position 3209 of SEQ ID NO: 1561128
ggagaaaucuccuucccag

SEQ ID NO: 1648828 - RNA, 19 nt, Artificial Sequence
  Description of Artificial Sequence: Synthetic oligonucleotide
  Antisense strand to SEQ ID NO: 1648827
cugggaaggagauuucucc

SEQ ID NO: 1648829 - RNA, 19 nt, Artificial Sequence
  Description of Artificial Sequence: Synthetic oligonucleotide
  Sense strand starting at position 3421 of SEQ ID NO: 1561128
ucaaccaguguuugauuga

SEQ ID NO: 1648830 - RNA, 19 nt, Artificial Sequence
  Description of Artificial Sequence: Synthetic oligonucleotide
  Antisense strand to SEQ ID NO: 1648829
ucaaucaaacacugguuga

SEQ ID NO: 1648831 - RNA, 19 nt, Artificial Sequence
  Description of Artificial Sequence: Synthetic oligonucleotide
  Sense strand starting at position 3422 of SEQ ID NO: 1561128
caaccaguguuugauugaa

SEQ ID NO: 1648832 - RNA, 19 nt, Artificial Sequence
  Description of Artificial Sequence: Synthetic oligonucleotide
  Antisense strand to SEQ ID NO: 1648831
uucaaucaaacacugguug

SEQ ID NO: 1648833 - RNA, 19 nt, Artificial Sequence
  Description of Artificial Sequence: Synthetic oligonucleotide
  Sense strand starting at position 3424 of SEQ ID NO: 1561128
accaguguuugauugaaug

SEQ ID NO: 1648834 - RNA, 19 nt, Artificial Sequence
  Description of Artificial Sequence: Synthetic oligonucleotide
  Antisense strand to SEQ ID NO: 1648833
cauucaaucaaacacuggu

SEQ ID NO: 1648835 - RNA, 19 nt, Artificial Sequence
  Description of Artificial Sequence: Synthetic oligonucleotide
  Sense strand starting at position 3426 of SEQ ID NO: 1561128
caguguuugauugaaugag

SEQ ID NO: 1648836 - RNA, 19 nt, Artificial Sequence
  Description of Artificial Sequence: Synthetic oligonucleotide
  Antisense strand to SEQ ID NO: 1648835
cucauucaaucaaacacug

SEQ ID NO: 1648837 - RNA, 19 nt, Artificial Sequence
  Description of Artificial Sequence: Synthetic oligonucleotide
  Sense strand starting at position 3430 of SEQ ID NO: 1561128
guuugauugaaugagugua

SEQ ID NO: 1648838 - RNA, 19 nt, Artificial Sequence
  Description of Artificial Sequence: Synthetic oligonucleotide
  Antisense strand to SEQ ID NO: 1648837
uacacucauucaaucaaac

SEQ ID NO: 1648839 - RNA, 19 nt, Artificial Sequence
  Description of Artificial Sequence: Synthetic oligonucleotide
  Sense strand starting at position 3547 of SEQ ID NO: 1561128
ugcuguggauacuuugaaa

SEQ ID NO: 1648840 - RNA, 19 nt, Artificial Sequence
  Description of Artificial Sequence: Synthetic oligonucleotide
  Antisense strand to SEQ ID NO: 1648839
uuucaaaguauccacagca

SEQ ID NO: 1648841 - RNA, 19 nt, Artificial Sequence
  Description of Artificial Sequence: Synthetic oligonucleotide
  Sense strand starting at position 3669 of SEQ ID NO: 1561128
gcaacauagcgagaacacu

SEQ ID NO: 1648842 - RNA, 19 nt, Artificial Sequence
  Description of Artificial Sequence: Synthetic oligonucleotide
  Antisense strand to SEQ ID NO: 1648841
aguguucucgcuauguugc

SEQ ID NO: 1648843 - RNA, 19 nt, Artificial Sequence
  Description of Artificial Sequence: Synthetic oligonucleotide
  Sense strand starting at position 3678 of SEQ ID NO: 1561128
cgagaacacugucucuguu

SEQ ID NO: 1648844 - RNA, 19 nt, Artificial Sequence
  Description of Artificial Sequence: Synthetic oligonucleotide
  Antisense strand to SEQ ID NO: 1648843
aacagagacaguguucucg

SEQ ID NO: 1648845 - RNA, 19 nt, Artificial Sequence
  Description of Artificial Sequence: Synthetic oligonucleotide
  Sense strand starting at position 3680 of SEQ ID NO: 1561128
agaacacugucucuguuua

SEQ ID NO: 1648846 - RNA, 19 nt, Artificial Sequence
  Description of Artificial Sequence: Synthetic oligonucleotide
  Antisense strand to SEQ ID NO: 1648845
uaaacagagacaguguucu

SEQ ID NO: 1648847 - RNA, 19 nt, Artificial Sequence
  Description of Artificial Sequence: Synthetic oligonucleotide
  Sense strand starting at position 3920 of SEQ ID NO: 1561128
uguagcuuccauugcuaca

SEQ ID NO: 1648848 - RNA, 19 nt, Artificial Sequence
  Description of Artificial Sequence: Synthetic oligonucleotide
  Antisense strand to SEQ ID NO: 1648847
uguagcaauggaagcuaca

SEQ ID NO: 1648849 - RNA, 19 nt, Artificial Sequence
  Description of Artificial Sequence: Synthetic oligonucleotide
  Sense strand starting at position 3968 of SEQ ID NO: 1561128
cgauuugacuguggccaca

SEQ ID NO: 1648850 - RNA, 19 nt, Artificial Sequence
  Description of Artificial Sequence: Synthetic oligonucleotide
  Antisense strand to SEQ ID NO: 1648849
uguggccacagucaaaucg

SEQ ID NO: 1648851 - RNA, 19 nt, Artificial Sequence
  Description of Artificial Sequence: Synthetic oligonucleotide
  Sense strand starting at position 177 of SEQ ID NO: 1561129
agagccgucgcggagauaa

SEQ ID NO: 1648852 - RNA, 19 nt, Artificial Sequence
  Description of Artificial Sequence: Synthetic oligonucleotide
  Antisense strand to SEQ ID NO: 1648851
uuaucuccgcgacggcucu

SEQ ID NO: 1648853 - RNA, 19 nt, Artificial Sequence
  Description of Artificial Sequence: Synthetic oligonucleotide
  Sense strand starting at position 269 of SEQ ID NO: 1561129
ggcuuaucuguuuaucucu

SEQ ID NO: 1648854 - RNA, 19 nt, Artificial Sequence
  Description of Artificial Sequence: Synthetic oligonucleotide
  Antisense strand to SEQ ID NO: 1648853
agagauaaacagauaagcc

SEQ ID NO: 1648855 - RNA, 19 nt, Artificial Sequence
  Description of Artificial Sequence: Synthetic oligonucleotide
  Sense strand starting at position 274 of SEQ ID NO: 1561129
aucuguuuaucucuggaga

SEQ ID NO: 1648856 - RNA, 19 nt, Artificial Sequence
  Description of Artificial Sequence: Synthetic oligonucleotide
  Antisense strand to SEQ ID NO: 1648855
ucuccagagauaaacagau

SEQ ID NO: 1648857 - RNA, 19 nt, Artificial Sequence
  Description of Artificial Sequence: Synthetic oligonucleotide
  Sense strand starting at position 275 of SEQ ID NO: 1561129
ucuguuuaucucuggagag

SEQ ID NO: 1648858 - RNA, 19 nt, Artificial Sequence
  Description of Artificial Sequence: Synthetic oligonucleotide
  Antisense strand to SEQ ID NO: 1648857
cucuccagagauaaacaga

SEQ ID NO: 1648859 - RNA, 19 nt, Artificial Sequence
  Description of Artificial Sequence: Synthetic oligonucleotide
  Sense strand starting at position 276 of SEQ ID NO: 1561129
cuguuuaucucuggagaga

SEQ ID NO: 1648860 - RNA, 19 nt, Artificial Sequence
  Description of Artificial Sequence: Synthetic oligonucleotide
  Antisense strand to SEQ ID NO: 1648859
ucucuccagagauaaacag

SEQ ID NO: 1648861 - RNA, 19 nt, Artificial Sequence
  Description of Artificial Sequence: Synthetic oligonucleotide
  Sense strand starting at position 290 of SEQ ID NO: 1561129
agagaagaauugcagaacu

SEQ ID NO: 1648862 - RNA, 19 nt, Artificial Sequence
  Description of Artificial Sequence: Synthetic oligonucleotide
  Antisense strand to SEQ ID NO: 1648861
aguucugcaauucuucucu

SEQ ID NO: 1648863 - RNA, 19 nt, Artificial Sequence
  Description of Artificial Sequence: Synthetic oligonucleotide
  Sense strand starting at position 307 of SEQ ID NO: 1561129
cucagaaguccuggauuag

SEQ ID NO: 1648864 - RNA, 19 nt, Artificial Sequence
  Description of Artificial Sequence: Synthetic oligonucleotide
  Antisense strand to SEQ ID NO: 1648863
cuaauccaggacuucugag

SEQ ID NO: 1648865 - RNA, 19 nt, Artificial Sequence
  Description of Artificial Sequence: Synthetic oligonucleotide
  Sense strand starting at position 321 of SEQ ID NO: 1561129
auuagacaauguugaguaa

SEQ ID NO: 1648866 - RNA, 19 nt, Artificial Sequence
  Description of Artificial Sequence: Synthetic oligonucleotide
  Antisense strand to SEQ ID NO: 1648865
uuacucaacauugucuaau

SEQ ID NO: 1648867 - RNA, 19 nt, Artificial Sequence
  Description of Artificial Sequence: Synthetic oligonucleotide
  Sense strand starting at position 414 of SEQ ID NO: 1561129
ucaggaagcuugucuaggu

SEQ ID NO: 1648868 - RNA, 19 nt, Artificial Sequence
  Description of Artificial Sequence: Synthetic oligonucleotide
  Antisense strand to SEQ ID NO: 1648867
accuagacaagcuuccuga

SEQ ID NO: 1648869 - RNA, 19 nt, Artificial Sequence
  Description of Artificial Sequence: Synthetic oligonucleotide
  Sense strand starting at position 418 of SEQ ID NO: 1561129
gaagcuugucuaggucaca

SEQ ID NO: 1648870 - RNA, 19 nt, Artificial Sequence
  Description of Artificial Sequence: Synthetic oligonucleotide
  Antisense strand to SEQ ID NO: 1648869
ugugaccuagacaagcuuc

SEQ ID NO: 1648871 - RNA, 19 nt, Artificial Sequence
  Description of Artificial Sequence: Synthetic oligonucleotide
  Sense strand starting at position 534 of SEQ ID NO: 1561129
gccugaaacaguggaauga

SEQ ID NO: 1648872 - RNA, 19 nt, Artificial Sequence
  Description of Artificial Sequence: Synthetic oligonucleotide
  Antisense strand to SEQ ID NO: 1648871
ucauuccacuguuucaggc

SEQ ID NO: 1648873 - RNA, 19 nt, Artificial Sequence
  Description of Artificial Sequence: Synthetic oligonucleotide
  Sense strand starting at position 958 of SEQ ID NO: 1561129
aaggucucacuuggcaaga

SEQ ID NO: 1648874 - RNA, 19 nt, Artificial Sequence
  Description of Artificial Sequence: Synthetic oligonucleotide
  Antisense strand to SEQ ID NO: 1648873
ucuugccaagugagaccuu

SEQ ID NO: 1648875 - RNA, 19 nt, Artificial Sequence
  Description of Artificial Sequence: Synthetic oligonucleotide
  Sense strand starting at position 968 of SEQ ID NO: 1561129
uuggcaagagugcaagaua

SEQ ID NO: 1648876 - RNA, 19 nt, Artificial Sequence
  Description of Artificial Sequence: Synthetic oligonucleotide
  Antisense strand to SEQ ID NO: 1648875
uaucuugcacucuugccaa

SEQ ID NO: 1648877 - RNA, 19 nt, Artificial Sequence
  Description of Artificial Sequence: Synthetic oligonucleotide
  Sense strand starting at position 993 of SEQ ID NO: 1561129
guuggagauugucucagca

SEQ ID NO: 1648878 - RNA, 19 nt, Artificial Sequence
  Description of Artificial Sequence: Synthetic oligonucleotide
  Antisense strand to SEQ ID NO: 1648877
ugcugagacaaucuccaac

SEQ ID NO: 1648879 - RNA, 19 nt, Artificial Sequence
  Description of Artificial Sequence: Synthetic oligonucleotide
  Sense strand starting at position 997 of SEQ ID NO: 1561129
gagauugucucagcaguuu

SEQ ID NO: 1648880 - RNA, 19 nt, Artificial Sequence
  Description of Artificial Sequence: Synthetic oligonucleotide
  Antisense strand to SEQ ID NO: 1648879
aaacugcugagacaaucuc

SEQ ID NO: 1648881 - RNA, 19 nt, Artificial Sequence
  Description of Artificial Sequence: Synthetic oligonucleotide
  Sense strand starting at position 1008 of SEQ ID NO: 1561129
agcaguuugcugugugauc

SEQ ID NO: 1648882 - RNA, 19 nt, Artificial Sequence
  Description of Artificial Sequence: Synthetic oligonucleotide
  Antisense strand to SEQ ID NO: 1648881
gaucacacagcaaacugcu

SEQ ID NO: 1648883 - RNA, 19 nt, Artificial Sequence
  Description of Artificial Sequence: Synthetic oligonucleotide
  Sense strand starting at position 1009 of SEQ ID NO: 1561129
gcaguuugcugugugaucu

SEQ ID NO: 1648884 - RNA, 19 nt, Artificial Sequence
  Description of Artificial Sequence: Synthetic oligonucleotide
  Antisense strand to SEQ ID NO: 1648883
agaucacacagcaaacugc

SEQ ID NO: 1648885 - RNA, 19 nt, Artificial Sequence
  Description of Artificial Sequence: Synthetic oligonucleotide
  Sense strand starting at position 1170 of SEQ ID NO: 1561129
uugcuucuagcugcguaau

SEQ ID NO: 1648886 - RNA, 19 nt, Artificial Sequence
  Description of Artificial Sequence: Synthetic oligonucleotide
  Antisense strand to SEQ ID NO: 1648885
auuacgcagcuagaagcaa

SEQ ID NO: 1648887 - RNA, 19 nt, Artificial Sequence
  Description of Artificial Sequence: Synthetic oligonucleotide
  Sense strand starting at position 1181 of SEQ ID NO: 1561129
ugcguaauugcggucaugu

SEQ ID NO: 1648888 - RNA, 19 nt, Artificial Sequence
  Description of Artificial Sequence: Synthetic oligonucleotide
  Antisense strand to SEQ ID NO: 1648887
acaugaccgcaauuacgca

SEQ ID NO: 1648889 - RNA, 19 nt, Artificial Sequence
  Description of Artificial Sequence: Synthetic oligonucleotide
  Sense strand starting at position 1182 of SEQ ID NO: 1561129
gcguaauugcggucauguc

SEQ ID NO: 1648890 - RNA, 19 nt, Artificial Sequence
  Description of Artificial Sequence: Synthetic oligonucleotide
  Antisense strand to SEQ ID NO: 1648889
gacaugaccgcaauuacgc

SEQ ID NO: 1648891 - RNA, 19 nt, Artificial Sequence
  Description of Artificial Sequence: Synthetic oligonucleotide
  Sense strand starting at position 1245 of SEQ ID NO: 1561129
ugucaaagugucugacuca

SEQ ID NO: 1648892 - RNA, 19 nt, Artificial Sequence
  Description of Artificial Sequence: Synthetic oligonucleotide
  Antisense strand to SEQ ID NO: 1648891
ugagucagacacuuugaca

SEQ ID NO: 1648893 - RNA, 19 nt, Artificial Sequence
  Description of Artificial Sequence: Synthetic oligonucleotide
  Sense strand starting at position 1468 of SEQ ID NO: 1561129
ggguguccuggguacuaca

SEQ ID NO: 1648894 - RNA, 19 nt, Artificial Sequence
  Description of Artificial Sequence: Synthetic oligonucleotide
  Antisense strand to SEQ ID NO: 1648893
uguaguacccaggacaccc

SEQ ID NO: 1648895 - RNA, 19 nt, Artificial Sequence
  Description of Artificial Sequence: Synthetic oligonucleotide
  Sense strand starting at position 1493 of SEQ ID NO: 1561129
uguguuuccugagcaacua

SEQ ID NO: 1648896 - RNA, 19 nt, Artificial Sequence
  Description of Artificial Sequence: Synthetic oligonucleotide
  Antisense strand to SEQ ID NO: 1648895
uaguugcucaggaaacaca

SEQ ID NO: 1648897 - RNA, 19 nt, Artificial Sequence
  Description of Artificial Sequence: Synthetic oligonucleotide
  Sense strand starting at position 1541 of SEQ ID NO: 1561129
cugcucuaucagggagaca

SEQ ID NO: 1648898 - RNA, 19 nt, Artificial Sequence
  Description of Artificial Sequence: Synthetic oligonucleotide
  Antisense strand to SEQ ID NO: 1648897
ugucucccugauagagcag

SEQ ID NO: 1648899 - RNA, 19 nt, Artificial Sequence
  Description of Artificial Sequence: Synthetic oligonucleotide
  Sense strand starting at position 1846 of SEQ ID NO: 1561129
ucaccugauuuccgagaug

SEQ ID NO: 1648900 - RNA, 19 nt, Artificial Sequence
  Description of Artificial Sequence: Synthetic oligonucleotide
  Antisense strand to SEQ ID NO: 1648899
caucucggaaaucagguga

SEQ ID NO: 1648901 - RNA, 19 nt, Artificial Sequence
  Description of Artificial Sequence: Synthetic oligonucleotide
  Sense strand starting at position 2271 of SEQ ID NO: 1561129
ccacguugcucauuuggga

SEQ ID NO: 1648902 - RNA, 19 nt, Artificial Sequence
  Description of Artificial Sequence: Synthetic oligonucleotide
  Antisense strand to SEQ ID NO: 1648901
ucccaaaugagcaacgugg

SEQ ID NO: 1648903 - RNA, 19 nt, Artificial Sequence
  Description of Artificial Sequence: Synthetic oligonucleotide
  Sense strand starting at position 2274 of SEQ ID NO: 1561129
cguugcucauuugggaaau

SEQ ID NO: 1648904 - RNA, 19 nt, Artificial Sequence
  Description of Artificial Sequence: Synthetic oligonucleotide
  Antisense strand to SEQ ID NO: 1648903
auuucccaaaugagcaacg

SEQ ID NO: 1648905 - RNA, 19 nt, Artificial Sequence
  Description of Artificial Sequence: Synthetic oligonucleotide
  Sense strand starting at position 2275 of SEQ ID NO: 1561129
guugcucauuugggaaaug

SEQ ID NO: 1648906 - RNA, 19 nt, Artificial Sequence
  Description of Artificial Sequence: Synthetic oligonucleotide
  Antisense strand to SEQ ID NO: 1648905
cauuucccaaaugagcaac

SEQ ID NO: 1648907 - RNA, 19 nt, Artificial Sequence
  Description of Artificial Sequence: Synthetic oligonucleotide
  Sense strand starting at position 2286 of SEQ ID NO: 1561129
gggaaauggcgcugaucuc

SEQ ID NO: 1648908 - RNA, 19 nt, Artificial Sequence
  Description of Artificial Sequence: Synthetic oligonucleotide
  Antisense strand to SEQ ID NO: 1648907
gagaucagcgccauuuccc

SEQ ID NO: 1648909 - RNA, 19 nt, Artificial Sequence
  Description of Artificial Sequence: Synthetic oligonucleotide
  Sense strand starting at position 2791 of SEQ ID NO: 1561129
agagacaacugccagauau

SEQ ID NO: 1648910 - RNA, 19 nt, Artificial Sequence
  Description of Artificial Sequence: Synthetic oligonucleotide
  Antisense strand to SEQ ID NO: 1648909
auaucuggcaguugucucu

SEQ ID NO: 1648911 - RNA, 19 nt, Artificial Sequence
  Description of Artificial Sequence: Synthetic oligonucleotide
  Sense strand starting at position 2801 of SEQ ID NO: 1561129
gccagauaugguugggcgu

SEQ ID NO: 1648912 - RNA, 19 nt, Artificial Sequence
  Description of Artificial Sequence: Synthetic oligonucleotide
  Antisense strand to SEQ ID NO: 1648911
acgcccaaccauaucuggc

SEQ ID NO: 1648913 - RNA, 19 nt, Artificial Sequence
  Description of Artificial Sequence: Synthetic oligonucleotide
  Sense strand starting at position 2807 of SEQ ID NO: 1561129
uaugguugggcgugagagu

SEQ ID NO: 1648914 - RNA, 19 nt, Artificial Sequence
  Description of Artificial Sequence: Synthetic oligonucleotide
  Antisense strand to SEQ ID NO: 1648913
acucucacgcccaaccaua

SEQ ID NO: 1648915 - RNA, 19 nt, Artificial Sequence
  Description of Artificial Sequence: Synthetic oligonucleotide
  Sense strand starting at position 2902 of SEQ ID NO: 1561129
ggcucaucuugccuuaguu

SEQ ID NO: 1648916 - RNA, 19 nt, Artificial Sequence
  Description of Artificial Sequence: Synthetic oligonucleotide
  Antisense strand to SEQ ID NO: 1648915
aacuaaggcaagaugagcc

SEQ ID NO: 1648917 - RNA, 19 nt, Artificial Sequence
  Description of Artificial Sequence: Synthetic oligonucleotide
  Sense strand starting at position 3087 of SEQ ID NO: 1561129
cucagaguccuggagucau

SEQ ID NO: 1648918 - RNA, 19 nt, Artificial Sequence
  Description of Artificial Sequence: Synthetic oligonucleotide
  Antisense strand to SEQ ID NO: 1648917
augacuccaggacucugag

SEQ ID NO: 1648919 - RNA, 19 nt, Artificial Sequence
  Description of Artificial Sequence: Synthetic oligonucleotide
  Sense strand starting at position 3285 of SEQ ID NO: 1561129
aaagaaagccugugcaaug

SEQ ID NO: 1648920 - RNA, 19 nt, Artificial Sequence
  Description of Artificial Sequence: Synthetic oligonucleotide
  Antisense strand to SEQ ID NO: 1648919
cauugcacaggcuuucuuu

SEQ ID NO: 1648921 - RNA, 19 nt, Artificial Sequence
  Description of Artificial Sequence: Synthetic oligonucleotide
  Sense strand starting at position 3625 of SEQ ID NO: 1561129
auuauuguugcauagguga

SEQ ID NO: 1648922 - RNA, 19 nt, Artificial Sequence
  Description of Artificial Sequence: Synthetic oligonucleotide
  Antisense strand to SEQ ID NO: 1648921
ucaccuaugcaacaauaau

SEQ ID NO: 1648923 - RNA, 19 nt, Artificial Sequence
  Description of Artificial Sequence: Synthetic oligonucleotide
  Sense strand starting at position 3656 of SEQ ID NO: 1561129
acgucagacucaccuaaca

SEQ ID NO: 1648924 - RNA, 19 nt, Artificial Sequence
  Description of Artificial Sequence: Synthetic oligonucleotide
  Antisense strand to SEQ ID NO: 1648923
uguuaggugagucugacgu

SEQ ID NO: 1648925 - RNA, 19 nt, Artificial Sequence
  Description of Artificial Sequence: Synthetic oligonucleotide
  Sense strand starting at position 3742 of SEQ ID NO: 1561129
cucugaugguaagcagaaa

SEQ ID NO: 1648926 - RNA, 19 nt, Artificial Sequence
  Description of Artificial Sequence: Synthetic oligonucleotide
  Antisense strand to SEQ ID NO: 1648925
uuucugcuuaccaucagag

SEQ ID NO: 1648927 - RNA, 19 nt, Artificial Sequence
  Description of Artificial Sequence: Synthetic oligonucleotide
  Sense strand starting at position 3898 of SEQ ID NO: 1561129
aguguuaagccuugauguu

SEQ ID NO: 1648928 - RNA, 19 nt, Artificial Sequence
  Description of Artificial Sequence: Synthetic oligonucleotide
  Antisense strand to SEQ ID NO: 1648927
aacaucaaggcuuaacacu

SEQ ID NO: 1648929 - RNA, 19 nt, Artificial Sequence
  Description of Artificial Sequence: Synthetic oligonucleotide
  Sense strand starting at position 3899 of SEQ ID NO: 1561129
guguuaagccuugauguuc

SEQ ID NO: 1648930 - RNA, 19 nt, Artificial Sequence
  Description of Artificial Sequence: Synthetic oligonucleotide
  Antisense strand to SEQ ID NO: 1648929
gaacaucaaggcuuaacac

SEQ ID NO: 1648931 - RNA, 19 nt, Artificial Sequence
  Description of Artificial Sequence: Synthetic oligonucleotide
  Sense strand starting at position 53 of SEQ ID NO: 1561130
ugugcaaccuagugagaug

SEQ ID NO: 1648932 - RNA, 19 nt, Artificial Sequence
  Description of Artificial Sequence: Synthetic oligonucleotide
  Antisense strand to SEQ ID NO: 1648931
caucucacuagguugcaca

SEQ ID NO: 1648933 - RNA, 19 nt, Artificial Sequence
  Description of Artificial Sequence: Synthetic oligonucleotide
  Sense strand starting at position 305 of SEQ ID NO: 1561130
ugacuuggcucucauaaau

SEQ ID NO: 1648934 - RNA, 19 nt, Artificial Sequence
  Description of Artificial Sequence: Synthetic oligonucleotide
  Antisense strand to SEQ ID NO: 1648933
auuuaugagagccaaguca

SEQ ID NO: 1648935 - RNA, 19 nt, Artificial Sequence
  Description of Artificial Sequence: Synthetic oligonucleotide
  Sense strand starting at position 859 of SEQ ID NO: 1561130
cccguuguguuaccgagau

SEQ ID NO: 1648936 - RNA, 19 nt, Artificial Sequence
  Description of Artificial Sequence: Synthetic oligonucleotide
  Antisense strand to SEQ ID NO: 1648935
aucucgguaacacaacggg

SEQ ID NO: 1648937 - RNA, 19 nt, Artificial Sequence
  Description of Artificial Sequence: Synthetic oligonucleotide
  Sense strand starting at position 861 of SEQ ID NO: 1561130
cguuguguuaccgagauug

SEQ ID NO: 1648938 - RNA, 19 nt, Artificial Sequence
  Description of Artificial Sequence: Synthetic oligonucleotide
  Antisense strand to SEQ ID NO: 1648937
caaucucgguaacacaacg

SEQ ID NO: 1648939 - RNA, 19 nt, Artificial Sequence
  Description of Artificial Sequence: Synthetic oligonucleotide
  Sense strand starting at position 863 of SEQ ID NO: 1561130
uuguguuaccgagauugcu

SEQ ID NO: 1648940 - RNA, 19 nt, Artificial Sequence
  Description of Artificial Sequence: Synthetic oligonucleotide
  Antisense strand to SEQ ID NO: 1648939
agcaaucucgguaacacaa

SEQ ID NO: 1648941 - RNA, 19 nt, Artificial Sequence
  Description of Artificial Sequence: Synthetic oligonucleotide
  Sense strand starting at position 872 of SEQ ID NO: 1561130
cgagauugcucucaaacuu

SEQ ID NO: 1648942 - RNA, 19 nt, Artificial Sequence
  Description of Artificial Sequence: Synthetic oligonucleotide
  Antisense strand to SEQ ID NO: 1648941
aaguuugagagcaaucucg

SEQ ID NO: 1648943 - RNA, 19 nt, Artificial Sequence
  Description of Artificial Sequence: Synthetic oligonucleotide
  Sense strand starting at position 929 of SEQ ID NO: 1561130
ccucguuaaucccugaaca

SEQ ID NO: 1648944 - RNA, 19 nt, Artificial Sequence
  Description of Artificial Sequence: Synthetic oligonucleotide
  Antisense strand to SEQ ID NO: 1648943
uguucagggauuaacgagg

SEQ ID NO: 1648945 - RNA, 19 nt, Artificial Sequence
  Description of Artificial Sequence: Synthetic oligonucleotide
  Sense strand starting at position 930 of SEQ ID NO: 1561130
cucguuaaucccugaacac

SEQ ID NO: 1648946 - RNA, 19 nt, Artificial Sequence
  Description of Artificial Sequence: Synthetic oligonucleotide
  Antisense strand to SEQ ID NO: 1648945
guguucagggauuaacgag

SEQ ID NO: 1648947 - RNA, 19 nt, Artificial Sequence
  Description of Artificial Sequence: Synthetic oligonucleotide
  Sense strand starting at position 1061 of SEQ ID NO: 1561130
cccucagacucaugcugau

SEQ ID NO: 1648948 - RNA, 19 nt, Artificial Sequence
  Description of Artificial Sequence: Synthetic oligonucleotide
  Antisense strand to SEQ ID NO: 1648947
aucagcaugagucugaggg

SEQ ID NO: 1648949 - RNA, 19 nt, Artificial Sequence
  Description of Artificial Sequence: Synthetic oligonucleotide
  Sense strand starting at position 1158 of SEQ ID NO: 1561130
auaguuuauuccuuggcua

SEQ ID NO: 1648950 - RNA, 19 nt, Artificial Sequence
  Description of Artificial Sequence: Synthetic oligonucleotide
  Antisense strand to SEQ ID NO: 1648949
uagccaaggaauaaacuau

SEQ ID NO: 1648951 - RNA, 19 nt, Artificial Sequence
  Description of Artificial Sequence: Synthetic oligonucleotide
  Sense strand starting at position 1160 of SEQ ID NO: 1561130
aguuuauuccuuggcuaua

SEQ ID NO: 1648952 - RNA, 19 nt, Artificial Sequence
  Description of Artificial Sequence: Synthetic oligonucleotide
  Antisense strand to SEQ ID NO: 1648951
uauagccaaggaauaaacu

SEQ ID NO: 1648953 - RNA, 19 nt, Artificial Sequence
  Description of Artificial Sequence: Synthetic oligonucleotide
  Sense strand starting at position 1161 of SEQ ID NO: 1561130
guuuauuccuuggcuauau

SEQ ID NO: 1648954 - RNA, 19 nt, Artificial Sequence
  Description of Artificial Sequence: Synthetic oligonucleotide
  Antisense strand to SEQ ID NO: 1648953
auauagccaaggaauaaac

SEQ ID NO: 1648955 - RNA, 19 nt, Artificial Sequence
  Description of Artificial Sequence: Synthetic oligonucleotide
  Sense strand starting at position 1228 of SEQ ID NO: 1561130
gguguacccuaagagcaaa

SEQ ID NO: 1648956 - RNA, 19 nt, Artificial Sequence
  Description of Artificial Sequence: Synthetic oligonucleotide
  Antisense strand to SEQ ID NO: 1648955
uuugcucuuaggguacacc

SEQ ID NO: 1648957 - RNA, 19 nt, Artificial Sequence
  Description of Artificial Sequence: Synthetic oligonucleotide
  Sense strand starting at position 1245 of SEQ ID NO: 1561130
aagaauugcgccugguaca

SEQ ID NO: 1648958 - RNA, 19 nt, Artificial Sequence
  Description of Artificial Sequence: Synthetic oligonucleotide
  Antisense strand to SEQ ID NO: 1648957
uguaccaggcgcaauucuu

SEQ ID NO: 1648959 - RNA, 19 nt, Artificial Sequence
  Description of Artificial Sequence: Synthetic oligonucleotide
  Sense strand starting at position 1246 of SEQ ID NO: 1561130
agaauugcgccugguacau

SEQ ID NO: 1648960 - RNA, 19 nt, Artificial Sequence
  Description of Artificial Sequence: Synthetic oligonucleotide
  Antisense strand to SEQ ID NO: 1648959
auguaccaggcgcaauucu

SEQ ID NO: 1648961 - RNA, 19 nt, Artificial Sequence
  Description of Artificial Sequence: Synthetic oligonucleotide
  Sense strand starting at position 1276 of SEQ ID NO: 1561130
caaauauaguuauggaaug

SEQ ID NO: 1648962 - RNA, 19 nt, Artificial Sequence
  Description of Artificial Sequence: Synthetic oligonucleotide
  Antisense strand to SEQ ID NO: 1648961
cauuccauaacuauauuug

SEQ ID NO: 1648963 - RNA, 19 nt, Artificial Sequence
  Description of Artificial Sequence: Synthetic oligonucleotide
  Sense strand starting at position 1322 of SEQ ID NO: 1561130
augcuaagugcuuacuaua

SEQ ID NO: 1648964 - RNA, 19 nt, Artificial Sequence
  Description of Artificial Sequence: Synthetic oligonucleotide
  Antisense strand to SEQ ID NO: 1648963
uauaguaagcacuuagcau

SEQ ID NO: 1648965 - RNA, 19 nt, Artificial Sequence
  Description of Artificial Sequence: Synthetic oligonucleotide
  Sense strand starting at position 1371 of SEQ ID NO: 1561130
cuguuaucucacuggaccu

SEQ ID NO: 1648966 - RNA, 19 nt, Artificial Sequence
  Description of Artificial Sequence: Synthetic oligonucleotide
  Antisense strand to SEQ ID NO: 1648965
agguccagugagauaacag

SEQ ID NO: 1648967 - RNA, 19 nt, Artificial Sequence
  Description of Artificial Sequence: Synthetic oligonucleotide
  Sense strand starting at position 1429 of SEQ ID NO: 1561130
cuucgacuugccuaauucu

SEQ ID NO: 1648968 - RNA, 19 nt, Artificial Sequence
  Description of Artificial Sequence: Synthetic oligonucleotide
  Antisense strand to SEQ ID NO: 1648967
agaauuaggcaagucgaag

SEQ ID NO: 1648969 - RNA, 19 nt, Artificial Sequence
  Description of Artificial Sequence: Synthetic oligonucleotide
  Sense strand starting at position 1432 of SEQ ID NO: 1561130
cgacuugccuaauucucua

SEQ ID NO: 1648970 - RNA, 19 nt, Artificial Sequence
  Description of Artificial Sequence: Synthetic oligonucleotide
  Antisense strand to SEQ ID NO: 1648969
uagagaauuaggcaagucg

SEQ ID NO: 1648971 - RNA, 19 nt, Artificial Sequence
  Description of Artificial Sequence: Synthetic oligonucleotide
  Sense strand starting at position 1455 of SEQ ID NO: 1561130
uugagacaaucugggaguu

SEQ ID NO: 1648972 - RNA, 19 nt, Artificial Sequence
  Description of Artificial Sequence: Synthetic oligonucleotide
  Antisense strand to SEQ ID NO: 1648971
aacucccagauugucucaa

SEQ ID NO: 1648973 - RNA, 19 nt, Artificial Sequence
  Description of Artificial Sequence: Synthetic oligonucleotide
  Sense strand starting at position 2160 of SEQ ID NO: 1561130
ggcugaaacucauguuuga

SEQ ID NO: 1648974 - RNA, 19 nt, Artificial Sequence
  Description of Artificial Sequence: Synthetic oligonucleotide
  Antisense strand to SEQ ID NO: 1648973
ucaaacaugaguuucagcc

SEQ ID NO: 1648975 - RNA, 19 nt, Artificial Sequence
  Description of Artificial Sequence: Synthetic oligonucleotide
  Sense strand starting at position 2163 of SEQ ID NO: 1561130
ugaaacucauguuugaauu

SEQ ID NO: 1648976 - RNA, 19 nt, Artificial Sequence
  Description of Artificial Sequence: Synthetic oligonucleotide
  Antisense strand to SEQ ID NO: 1648975
aauucaaacaugaguuuca

SEQ ID NO: 1648977 - RNA, 19 nt, Artificial Sequence
  Description of Artificial Sequence: Synthetic oligonucleotide
  Sense strand starting at position 2176 of SEQ ID NO: 1561130
ugaauuuagugagccguuu

SEQ ID NO: 1648978 - RNA, 19 nt, Artificial Sequence
  Description of Artificial Sequence: Synthetic oligonucleotide
  Antisense strand to SEQ ID NO: 1648977
aaacggcucacuaaauuca

SEQ ID NO: 1648979 - RNA, 19 nt, Artificial Sequence
  Description of Artificial Sequence: Synthetic oligonucleotide
  Sense strand starting at position 2178 of SEQ ID NO: 1561130
aauuuagugagccguuugu

SEQ ID NO: 1648980 - RNA, 19 nt, Artificial Sequence
  Description of Artificial Sequence: Synthetic oligonucleotide
  Antisense strand to SEQ ID NO: 1648979
acaaacggcucacuaaauu

SEQ ID NO: 1648981 - RNA, 19 nt, Artificial Sequence
  Description of Artificial Sequence: Synthetic oligonucleotide
  Sense strand starting at position 2180 of SEQ ID NO: 1561130
uuuagugagccguuuguuc

SEQ ID NO: 1648982 - RNA, 19 nt, Artificial Sequence
  Description of Artificial Sequence: Synthetic oligonucleotide
  Antisense strand to SEQ ID NO: 1648981
gaacaaacggcucacuaaa

SEQ ID NO: 1648983 - RNA, 19 nt, Artificial Sequence
  Description of Artificial Sequence: Synthetic oligonucleotide
  Sense strand starting at position 2184 of SEQ ID NO: 1561130
gugagccguuuguucguua

SEQ ID NO: 1648984 - RNA, 19 nt, Artificial Sequence
  Description of Artificial Sequence: Synthetic oligonucleotide
  Antisense strand to SEQ ID NO: 1648983
uaacgaacaaacggcucac

SEQ ID NO: 1648985 - RNA, 19 nt, Artificial Sequence
  Description of Artificial Sequence: Synthetic oligonucleotide
  Sense strand starting at position 2195 of SEQ ID NO: 1561130
guucguuaguccggaacac

SEQ ID NO: 1648986 - RNA, 19 nt, Artificial Sequence
  Description of Artificial Sequence: Synthetic oligonucleotide
  Antisense strand to SEQ ID NO: 1648985
guguuccggacuaacgaac

SEQ ID NO: 1648987 - RNA, 19 nt, Artificial Sequence
  Description of Artificial Sequence: Synthetic oligonucleotide
  Sense strand starting at position 2196 of SEQ ID NO: 1561130
uucguuaguccggaacacu

SEQ ID NO: 1648988 - RNA, 19 nt, Artificial Sequence
  Description of Artificial Sequence: Synthetic oligonucleotide
  Antisense strand to SEQ ID NO: 1648987
aguguuccggacuaacgaa

SEQ ID NO: 1648989 - RNA, 19 nt, Artificial Sequence
  Description of Artificial Sequence: Synthetic oligonucleotide
  Sense strand starting at position 2242 of SEQ ID NO: 1561130
cggcgaaaucagcgaauag

SEQ ID NO: 1648990 - RNA, 19 nt, Artificial Sequence
  Description of Artificial Sequence: Synthetic oligonucleotide
  Antisense strand to SEQ ID NO: 1648989
cuauucgcugauuucgccg

SEQ ID NO: 1648991 - RNA, 19 nt, Artificial Sequence
  Description of Artificial Sequence: Synthetic oligonucleotide
  Sense strand starting at position 2246 of SEQ ID NO: 1561130
gaaaucagcgaauagcaaa

SEQ ID NO: 1648992 - RNA, 19 nt, Artificial Sequence
  Description of Artificial Sequence: Synthetic oligonucleotide
  Antisense strand to SEQ ID NO: 1648991
uuugcuauucgcugauuuc

SEQ ID NO: 1648993 - RNA, 19 nt, Artificial Sequence
  Description of Artificial Sequence: Synthetic oligonucleotide
  Sense strand starting at position 2701 of SEQ ID NO: 1561130
aaaugaaccuucgccugua

SEQ ID NO: 1648994 - RNA, 19 nt, Artificial Sequence
  Description of Artificial Sequence: Synthetic oligonucleotide
  Antisense strand to SEQ ID NO: 1648993
uacaggcgaagguucauuu

SEQ ID NO: 1648995 - RNA, 19 nt, Artificial Sequence
  Description of Artificial Sequence: Synthetic oligonucleotide
  Sense strand starting at position 2704 of SEQ ID NO: 1561130
ugaaccuucgccuguaauc

SEQ ID NO: 1648996 - RNA, 19 nt, Artificial Sequence
  Description of Artificial Sequence: Synthetic oligonucleotide
  Antisense strand to SEQ ID NO: 1648995
gauuacaggcgaagguuca

SEQ ID NO: 1648997 - RNA, 19 nt, Artificial Sequence
  Description of Artificial Sequence: Synthetic oligonucleotide
  Sense strand starting at position 3048 of SEQ ID NO: 1561130
aucagaagucuaugucagu

SEQ ID NO: 1648998 - RNA, 19 nt, Artificial Sequence
  Description of Artificial Sequence: Synthetic oligonucleotide
  Antisense strand to SEQ ID NO: 1648997
acugacauagacuucugau

SEQ ID NO: 1648999 - RNA, 19 nt, Artificial Sequence
  Description of Artificial Sequence: Synthetic oligonucleotide
  Sense strand starting at position 3211 of SEQ ID NO: 1561130
gcaugugccugugauucua

SEQ ID NO: 1649000 - RNA, 19 nt, Artificial Sequence
  Description of Artificial Sequence: Synthetic oligonucleotide
  Antisense strand to SEQ ID NO: 1648999
uagaaucacaggcacaugc

SEQ ID NO: 1649001 - RNA, 19 nt, Artificial Sequence
  Description of Artificial Sequence: Synthetic oligonucleotide
  Sense strand starting at position 3931 of SEQ ID NO: 1561130
gguggagguugcugugaca

SEQ ID NO: 1649002 - RNA, 19 nt, Artificial Sequence
  Description of Artificial Sequence: Synthetic oligonucleotide
  Antisense strand to SEQ ID NO: 1649001
ugucacagcaaccuccacc

SEQ ID NO: 1649003 - RNA, 19 nt, Artificial Sequence
  Description of Artificial Sequence: Synthetic oligonucleotide
  Sense strand starting at position 58 of SEQ ID NO: 1561131
cagaaauuagccugaugug

SEQ ID NO: 1649004 - RNA, 19 nt, Artificial Sequence
  Description of Artificial Sequence: Synthetic oligonucleotide
  Antisense strand to SEQ ID NO: 1649003
cacaucaggcuaauuucug

SEQ ID NO: 1649005 - RNA, 19 nt, Artificial Sequence
  Description of Artificial Sequence: Synthetic oligonucleotide
  Sense strand starting at position 155 of SEQ ID NO: 1561131
ugugcaaccuagugagaug

SEQ ID NO: 1649006 - RNA, 19 nt, Artificial Sequence
  Description of Artificial Sequence: Synthetic oligonucleotide
  Antisense strand to SEQ ID NO: 1649005
caucucacuagguugcaca

SEQ ID NO: 1649007 - RNA, 19 nt, Artificial Sequence
  Description of Artificial Sequence: Synthetic oligonucleotide
  Sense strand starting at position 407 of SEQ ID NO: 1561131
ugacuuggcucucauaaau

SEQ ID NO: 1649008 - RNA, 19 nt, Artificial Sequence
  Description of Artificial Sequence: Synthetic oligonucleotide
  Antisense strand to SEQ ID NO: 1649007
auuuaugagagccaaguca

SEQ ID NO: 1649009 - RNA, 19 nt, Artificial Sequence
  Description of Artificial Sequence: Synthetic oligonucleotide
  Sense strand starting at position 961 of SEQ ID NO: 1561131
cccguuguguuaccgagau

SEQ ID NO: 1649010 - RNA, 19 nt, Artificial Sequence
  Description of Artificial Sequence: Synthetic oligonucleotide
  Antisense strand to SEQ ID NO: 1649009
aucucgguaacacaacggg

SEQ ID NO: 1649011 - RNA, 19 nt, Artificial Sequence
  Description of Artificial Sequence: Synthetic oligonucleotide
  Sense strand starting at position 963 of SEQ ID NO: 1561131
cguuguguuaccgagauug

SEQ ID NO: 1649012 - RNA, 19 nt, Artificial Sequence
  Description of Artificial Sequence: Synthetic oligonucleotide
  Antisense strand to SEQ ID NO: 1649011
caaucucgguaacacaacg

SEQ ID NO: 1649013 - RNA, 19 nt, Artificial Sequence
  Description of Artificial Sequence: Synthetic oligonucleotide
  Sense strand starting at position 965 of SEQ ID NO: 1561131
uuguguuaccgagauugcu

SEQ ID NO: 1649014 - RNA, 19 nt, Artificial Sequence
  Description of Artificial Sequence: Synthetic oligonucleotide
  Antisense strand to SEQ ID NO: 1649013
agcaaucucgguaacacaa

SEQ ID NO: 1649015 - RNA, 19 nt, Artificial Sequence
  Description of Artificial Sequence: Synthetic oligonucleotide
  Sense strand starting at position 974 of SEQ ID NO: 1561131
cgagauugcucucaaacuu

SEQ ID NO: 1649016 - RNA, 19 nt, Artificial Sequence
  Description of Artificial Sequence: Synthetic oligonucleotide
  Antisense strand to SEQ ID NO: 1649015
aaguuugagagcaaucucg

SEQ ID NO: 1649017 - RNA, 19 nt, Artificial Sequence
  Description of Artificial Sequence: Synthetic oligonucleotide
  Sense strand starting at position 1031 of SEQ ID NO: 1561131
ccucguuaaucccugaaca

SEQ ID NO: 1649018 - RNA, 19 nt, Artificial Sequence
  Description of Artificial Sequence: Synthetic oligonucleotide
  Antisense strand to SEQ ID NO: 1649017
uguucagggauuaacgagg

SEQ ID NO: 1649019 - RNA, 19 nt, Artificial Sequence
  Description of Artificial Sequence: Synthetic oligonucleotide
  Sense strand starting at position 1032 of SEQ ID NO: 1561131
cucguuaaucccugaacac

SEQ ID NO: 1649020 - RNA, 19 nt, Artificial Sequence
  Description of Artificial Sequence: Synthetic oligonucleotide
  Antisense strand to SEQ ID NO: 1649019
guguucagggauuaacgag

SEQ ID NO: 1649021 - RNA, 19 nt, Artificial Sequence
  Description of Artificial Sequence: Synthetic oligonucleotide
  Sense strand starting at position 1163 of SEQ ID NO: 1561131
cccucagacucaugcugau

SEQ ID NO: 1649022 - RNA, 19 nt, Artificial Sequence
  Description of Artificial Sequence: Synthetic oligonucleotide
  Antisense strand to SEQ ID NO: 1649021
aucagcaugagucugaggg

SEQ ID NO: 1649023 - RNA, 19 nt, Artificial Sequence
  Description of Artificial Sequence: Synthetic oligonucleotide
  Sense strand starting at position 1260 of SEQ ID NO: 1561131
auaguuuauuccuuggcua

SEQ ID NO: 1649024 - RNA, 19 nt, Artificial Sequence
  Description of Artificial Sequence: Synthetic oligonucleotide
  Antisense strand to SEQ ID NO: 1649023
uagccaaggaauaaacuau

SEQ ID NO: 1649025 - RNA, 19 nt, Artificial Sequence
  Description of Artificial Sequence: Synthetic oligonucleotide
  Sense strand starting at position 1262 of SEQ ID NO: 1561131
aguuuauuccuuggcuaua

SEQ ID NO: 1649026 - RNA, 19 nt, Artificial Sequence
  Description of Artificial Sequence: Synthetic oligonucleotide
  Antisense strand to SEQ ID NO: 1649025
uauagccaaggaauaaacu

SEQ ID NO: 1649027 - RNA, 19 nt, Artificial Sequence
  Description of Artificial Sequence: Synthetic oligonucleotide
  Sense strand starting at position 1263 of SEQ ID NO: 1561131
guuuauuccuuggcuauau

SEQ ID NO: 1649028 - RNA, 19 nt, Artificial Sequence
  Description of Artificial Sequence: Synthetic oligonucleotide
  Antisense strand to SEQ ID NO: 1649027
auauagccaaggaauaaac

SEQ ID NO: 1649029 - RNA, 19 nt, Artificial Sequence
  Description of Artificial Sequence: Synthetic oligonucleotide
  Sense strand starting at position 1330 of SEQ ID NO: 1561131
gguguacccuaagagcaaa

SEQ ID NO: 1649030 - RNA, 19 nt, Artificial Sequence
  Description of Artificial Sequence: Synthetic oligonucleotide
  Antisense strand to SEQ ID NO: 1649029
uuugcucuuaggguacacc

SEQ ID NO: 1649031 - RNA, 19 nt, Artificial Sequence
  Description of Artificial Sequence: Synthetic oligonucleotide
  Sense strand starting at position 1347 of SEQ ID NO: 1561131
aagaauugcgccugguaca

SEQ ID NO: 1649032 - RNA, 19 nt, Artificial Sequence
  Description of Artificial Sequence: Synthetic oligonucleotide
  Antisense strand to SEQ ID NO: 1649031
uguaccaggcgcaauucuu

SEQ ID NO: 1649033 - RNA, 19 nt, Artificial Sequence
  Description of Artificial Sequence: Synthetic oligonucleotide
  Sense strand starting at position 1348 of SEQ ID NO: 1561131
agaauugcgccugguacau

SEQ ID NO: 1649034 - RNA, 19 nt, Artificial Sequence
  Description of Artificial Sequence: Synthetic oligonucleotide
  Antisense strand to SEQ ID NO: 1649033
auguaccaggcgcaauucu

SEQ ID NO: 1649035 - RNA, 19 nt, Artificial Sequence
  Description of Artificial Sequence: Synthetic oligonucleotide
  Sense strand starting at position 1378 of SEQ ID NO: 1561131
caaauauaguuauggaaug

SEQ ID NO: 1649036 - RNA, 19 nt, Artificial Sequence
  Description of Artificial Sequence: Synthetic oligonucleotide
  Antisense strand to SEQ ID NO: 1649035
cauuccauaacuauauuug

SEQ ID NO: 1649037 - RNA, 19 nt, Artificial Sequence
  Description of Artificial Sequence: Synthetic oligonucleotide
  Sense strand starting at position 1424 of SEQ ID NO: 1561131
augcuaagugcuuacuaua

SEQ ID NO: 1649038 - RNA, 19 nt, Artificial Sequence
  Description of Artificial Sequence: Synthetic oligonucleotide
  Antisense strand to SEQ ID NO: 1649037
uauaguaagcacuuagcau

SEQ ID NO: 1649039 - RNA, 19 nt, Artificial Sequence
  Description of Artificial Sequence: Synthetic oligonucleotide
  Sense strand starting at position 1473 of SEQ ID NO: 1561131
cuguuaucucacuggaccu

SEQ ID NO: 1649040 - RNA, 19 nt, Artificial Sequence
  Description of Artificial Sequence: Synthetic oligonucleotide
  Antisense strand to SEQ ID NO: 1649039
agguccagugagauaacag

SEQ ID NO: 1649041 - RNA, 19 nt, Artificial Sequence
  Description of Artificial Sequence: Synthetic oligonucleotide
  Sense strand starting at position 1531 of SEQ ID NO: 1561131
cuucgacuugccuaauucu

SEQ ID NO: 1649042 - RNA, 19 nt, Artificial Sequence
  Description of Artificial Sequence: Synthetic oligonucleotide
  Antisense strand to SEQ ID NO: 1649041
agaauuaggcaagucgaag

SEQ ID NO: 1649043 - RNA, 19 nt, Artificial Sequence
  Description of Artificial Sequence: Synthetic oligonucleotide
  Sense strand starting at position 1534 of SEQ ID NO: 1561131
cgacuugccuaauucucua

SEQ ID NO: 1649044 - RNA, 19 nt, Artificial Sequence
  Description of Artificial Sequence: Synthetic oligonucleotide
  Antisense strand to SEQ ID NO: 1649043
uagagaauuaggcaagucg

SEQ ID NO: 1649045 - RNA, 19 nt, Artificial Sequence
  Description of Artificial Sequence: Synthetic oligonucleotide
  Sense strand starting at position 1557 of SEQ ID NO: 1561131
uugagacaaucugggaguu

SEQ ID NO: 1649046 - RNA, 19 nt, Artificial Sequence
  Description of Artificial Sequence: Synthetic oligonucleotide
  Antisense strand to SEQ ID NO: 1649045
aacucccagauugucucaa

SEQ ID NO: 1649047 - RNA, 19 nt, Artificial Sequence
  Description of Artificial Sequence: Synthetic oligonucleotide
  Sense strand starting at position 2262 of SEQ ID NO: 1561131
ggcugaaacucauguuuga

SEQ ID NO: 1649048 - RNA, 19 nt, Artificial Sequence
  Description of Artificial Sequence: Synthetic oligonucleotide
  Antisense strand to SEQ ID NO: 1649047
ucaaacaugaguuucagcc

SEQ ID NO: 1649049 - RNA, 19 nt, Artificial Sequence
  Description of Artificial Sequence: Synthetic oligonucleotide
  Sense strand starting at position 2265 of SEQ ID NO: 1561131
ugaaacucauguuugaauu

SEQ ID NO: 1649050 - RNA, 19 nt, Artificial Sequence
  Description of Artificial Sequence: Synthetic oligonucleotide
  Antisense strand to SEQ ID NO: 1649049
aauucaaacaugaguuuca

SEQ ID NO: 1649051 - RNA, 19 nt, Artificial Sequence
  Description of Artificial Sequence: Synthetic oligonucleotide
  Sense strand starting at position 2278 of SEQ ID NO: 1561131
ugaauuuagugagccguuu

SEQ ID NO: 1649052 - RNA, 19 nt, Artificial Sequence
  Description of Artificial Sequence: Synthetic oligonucleotide
  Antisense strand to SEQ ID NO: 1649051
aaacggcucacuaaauuca

SEQ ID NO: 1649053 - RNA, 19 nt, Artificial Sequence
  Description of Artificial Sequence: Synthetic oligonucleotide
  Sense strand starting at position 2280 of SEQ ID NO: 1561131
aauuuagugagccguuugu

SEQ ID NO: 1649054 - RNA, 19 nt, Artificial Sequence
  Description of Artificial Sequence: Synthetic oligonucleotide
  Antisense strand to SEQ ID NO: 1649053
acaaacggcucacuaaauu

SEQ ID NO: 1649055 - RNA, 19 nt, Artificial Sequence
  Description of Artificial Sequence: Synthetic oligonucleotide
  Sense strand starting at position 2282 of SEQ ID NO: 1561131
uuuagugagccguuuguuc

SEQ ID NO: 1649056 - RNA, 19 nt, Artificial Sequence
  Description of Artificial Sequence: Synthetic oligonucleotide
  Antisense strand to SEQ ID NO: 1649055
gaacaaacggcucacuaaa

SEQ ID NO: 1649057 - RNA, 19 nt, Artificial Sequence
  Description of Artificial Sequence: Synthetic oligonucleotide
  Sense strand starting at position 2286 of SEQ ID NO: 1561131
gugagccguuuguucguua

SEQ ID NO: 1649058 - RNA, 19 nt, Artificial Sequence
  Description of Artificial Sequence: Synthetic oligonucleotide
  Antisense strand to SEQ ID NO: 1649057
uaacgaacaaacggcucac

SEQ ID NO: 1649059 - RNA, 19 nt, Artificial Sequence
  Description of Artificial Sequence: Synthetic oligonucleotide
  Sense strand starting at position 2297 of SEQ ID NO: 1561131
guucguuaguccggaacac

SEQ ID NO: 1649060 - RNA, 19 nt, Artificial Sequence
  Description of Artificial Sequence: Synthetic oligonucleotide
  Antisense strand to SEQ ID NO: 1649059
guguuccggacuaacgaac

SEQ ID NO: 1649061 - RNA, 19 nt, Artificial Sequence
  Description of Artificial Sequence: Synthetic oligonucleotide
  Sense strand starting at position 2298 of SEQ ID NO: 1561131
uucguuaguccggaacacu

SEQ ID NO: 1649062 - RNA, 19 nt, Artificial Sequence
  Description of Artificial Sequence: Synthetic oligonucleotide
  Antisense strand to SEQ ID NO: 1649061
aguguuccggacuaacgaa

SEQ ID NO: 1649063 - RNA, 19 nt, Artificial Sequence
  Description of Artificial Sequence: Synthetic oligonucleotide
  Sense strand starting at position 2344 of SEQ ID NO: 1561131
cggcgaaaucagcgaauag

SEQ ID NO: 1649064 - RNA, 19 nt, Artificial Sequence
  Description of Artificial Sequence: Synthetic oligonucleotide
  Antisense strand to SEQ ID NO: 1649063
cuauucgcugauuucgccg

SEQ ID NO: 1649065 - RNA, 19 nt, Artificial Sequence
  Description of Artificial Sequence: Synthetic oligonucleotide
  Sense strand starting at position 2348 of SEQ ID NO: 1561131
gaaaucagcgaauagcaaa

SEQ ID NO: 1649066 - RNA, 19 nt, Artificial Sequence
  Description of Artificial Sequence: Synthetic oligonucleotide
  Antisense strand to SEQ ID NO: 1649065
uuugcuauucgcugauuuc

SEQ ID NO: 1649067 - RNA, 19 nt, Artificial Sequence
  Description of Artificial Sequence: Synthetic oligonucleotide
  Sense strand starting at position 2803 of SEQ ID NO: 1561131
aaaugaaccuucgccugua

SEQ ID NO: 1649068 - RNA, 19 nt, Artificial Sequence
  Description of Artificial Sequence: Synthetic oligonucleotide
  Antisense strand to SEQ ID NO: 1649067
uacaggcgaagguucauuu

SEQ ID NO: 1649069 - RNA, 19 nt, Artificial Sequence
  Description of Artificial Sequence: Synthetic oligonucleotide
  Sense strand starting at position 2806 of SEQ ID NO: 1561131
ugaaccuucgccuguaauc

SEQ ID NO: 1649070 - RNA, 19 nt, Artificial Sequence
  Description of Artificial Sequence: Synthetic oligonucleotide
  Antisense strand to SEQ ID NO: 1649069
gauuacaggcgaagguuca

SEQ ID NO: 1649071 - RNA, 19 nt, Artificial Sequence
  Description of Artificial Sequence: Synthetic oligonucleotide
  Sense strand starting at position 3150 of SEQ ID NO: 1561131
aucagaagucuaugucagu

SEQ ID NO: 1649072 - RNA, 19 nt, Artificial Sequence
  Description of Artificial Sequence: Synthetic oligonucleotide
  Antisense strand to SEQ ID NO: 1649071
acugacauagacuucugau

SEQ ID NO: 1649073 - RNA, 19 nt, Artificial Sequence
  Description of Artificial Sequence: Synthetic oligonucleotide
  Sense strand starting at position 3313 of SEQ ID NO: 1561131
gcaugugccugugauucua

SEQ ID NO: 1649074 - RNA, 19 nt, Artificial Sequence
  Description of Artificial Sequence: Synthetic oligonucleotide
  Antisense strand to SEQ ID NO: 1649073
uagaaucacaggcacaugc

SEQ ID NO: 1649075 - RNA, 19 nt, Artificial Sequence
  Description of Artificial Sequence: Synthetic oligonucleotide
  Sense strand starting at position 122 of SEQ ID NO: 1561132
acaaguacuucugagagua

SEQ ID NO: 1649076 - RNA, 19 nt, Artificial Sequence
  Description of Artificial Sequence: Synthetic oligonucleotide
  Antisense strand to SEQ ID NO: 1649075
uacucucagaaguacuugu

SEQ ID NO: 1649077 - RNA, 19 nt, Artificial Sequence
  Description of Artificial Sequence: Synthetic oligonucleotide
  Sense strand starting at position 674 of SEQ ID NO: 1561132
ggcagcacaggucaauauu

SEQ ID NO: 1649078 - RNA, 19 nt, Artificial Sequence
  Description of Artificial Sequence: Synthetic oligonucleotide
  Antisense strand to SEQ ID NO: 1649077
aauauugaccugugcugcc

SEQ ID NO: 1649079 - RNA, 19 nt, Artificial Sequence
  Description of Artificial Sequence: Synthetic oligonucleotide
  Sense strand starting at position 1167 of SEQ ID NO: 1561132
cggagaagauccugggugu

SEQ ID NO: 1649080 - RNA, 19 nt, Artificial Sequence
  Description of Artificial Sequence: Synthetic oligonucleotide
  Antisense strand to SEQ ID NO: 1649079
acacccaggaucuucuccg

SEQ ID NO: 1649081 - RNA, 19 nt, Artificial Sequence
  Description of Artificial Sequence: Synthetic oligonucleotide
  Sense strand starting at position 1178 of SEQ ID NO: 1561132
cuggguguccagugaguga

SEQ ID NO: 1649082 - RNA, 19 nt, Artificial Sequence
  Description of Artificial Sequence: Synthetic oligonucleotide
  Antisense strand to SEQ ID NO: 1649081
ucacucacuggacacccag

SEQ ID NO: 1649083 - RNA, 19 nt, Artificial Sequence
  Description of Artificial Sequence: Synthetic oligonucleotide
  Sense strand starting at position 2121 of SEQ ID NO: 1561132
cccggcucucgucaauaca

SEQ ID NO: 1649084 - RNA, 19 nt, Artificial Sequence
  Description of Artificial Sequence: Synthetic oligonucleotide
  Antisense strand to SEQ ID NO: 1649083
uguauugacgagagccggg

SEQ ID NO: 1649085 - RNA, 19 nt, Artificial Sequence
  Description of Artificial Sequence: Synthetic oligonucleotide
  Sense strand starting at position 2181 of SEQ ID NO: 1561132
cgaacuguugucagugguu

SEQ ID NO: 1649086 - RNA, 19 nt, Artificial Sequence
  Description of Artificial Sequence: Synthetic oligonucleotide
  Antisense strand to SEQ ID NO: 1649085
aaccacugacaacaguucg

SEQ ID NO: 1649087 - RNA, 19 nt, Artificial Sequence
  Description of Artificial Sequence: Synthetic oligonucleotide
  Sense strand starting at position 2186 of SEQ ID NO: 1561132
uguugucagugguucacau

SEQ ID NO: 1649088 - RNA, 19 nt, Artificial Sequence
  Description of Artificial Sequence: Synthetic oligonucleotide
  Antisense strand to SEQ ID NO: 1649087
augugaaccacugacaaca

SEQ ID NO: 1649089 - RNA, 19 nt, Artificial Sequence
  Description of Artificial Sequence: Synthetic oligonucleotide
  Sense strand starting at position 2261 of SEQ ID NO: 1561132
ucgaaaucgacgcacucau

SEQ ID NO: 1649090 - RNA, 19 nt, Artificial Sequence
  Description of Artificial Sequence: Synthetic oligonucleotide
  Antisense strand to SEQ ID NO: 1649089
augagugcgucgauuucga

SEQ ID NO: 1649091 - RNA, 19 nt, Artificial Sequence
  Description of Artificial Sequence: Synthetic oligonucleotide
  Sense strand starting at position 2291 of SEQ ID NO: 1561132
gcagucucuccgggcgaaa

SEQ ID NO: 1649092 - RNA, 19 nt, Artificial Sequence
  Description of Artificial Sequence: Synthetic oligonucleotide
  Antisense strand to SEQ ID NO: 1649091
uuucgcccggagagacugc

SEQ ID NO: 1649093 - RNA, 19 nt, Artificial Sequence
  Description of Artificial Sequence: Synthetic oligonucleotide
  Sense strand starting at position 2312 of SEQ ID NO: 1561132
cgguuugggucggguuauu

SEQ ID NO: 1649094 - RNA, 19 nt, Artificial Sequence
  Description of Artificial Sequence: Synthetic oligonucleotide
  Antisense strand to SEQ ID NO: 1649093
aauaacccgacccaaaccg

SEQ ID NO: 1649095 - RNA, 19 nt, Artificial Sequence
  Description of Artificial Sequence: Synthetic oligonucleotide
  Sense strand starting at position 2321 of SEQ ID NO: 1561132
ucggguuauucagguccaa

SEQ ID NO: 1649096 - RNA, 19 nt, Artificial Sequence
  Description of Artificial Sequence: Synthetic oligonucleotide
  Antisense strand to SEQ ID NO: 1649095
uuggaccugaauaacccga

SEQ ID NO: 1649097 - RNA, 19 nt, Artificial Sequence
  Description of Artificial Sequence: Synthetic oligonucleotide
  Sense strand starting at position 2363 of SEQ ID NO: 1561132
agcuccaguagucguauau

SEQ ID NO: 1649098 - RNA, 19 nt, Artificial Sequence
  Description of Artificial Sequence: Synthetic oligonucleotide
  Antisense strand to SEQ ID NO: 1649097
auauacgacuacuggagcu

SEQ ID NO: 1649099 - RNA, 19 nt, Artificial Sequence
  Description of Artificial Sequence: Synthetic oligonucleotide
  Sense strand starting at position 2367 of SEQ ID NO: 1561132
ccaguagucguauaugauu

SEQ ID NO: 1649100 - RNA, 19 nt, Artificial Sequence
  Description of Artificial Sequence: Synthetic oligonucleotide
  Antisense strand to SEQ ID NO: 1649099
aaucauauacgacuacugg

SEQ ID NO: 1649101 - RNA, 19 nt, Artificial Sequence
  Description of Artificial Sequence: Synthetic oligonucleotide
  Sense strand starting at position 2417 of SEQ ID NO: 1561132
ggguaaggccuccguccau

SEQ ID NO: 1649102 - RNA, 19 nt, Artificial Sequence
  Description of Artificial Sequence: Synthetic oligonucleotide
  Antisense strand to SEQ ID NO: 1649101
auggacggaggccuuaccc

SEQ ID NO: 1649103 - RNA, 19 nt, Artificial Sequence
  Description of Artificial Sequence: Synthetic oligonucleotide
  Sense strand starting at position 2460 of SEQ ID NO: 1561132
uucuauuucuccgaggaaa

SEQ ID NO: 1649104 - RNA, 19 nt, Artificial Sequence
  Description of Artificial Sequence: Synthetic oligonucleotide
  Antisense strand to SEQ ID NO: 1649103
uuuccucggagaaauagaa

SEQ ID NO: 1649105 - RNA, 19 nt, Artificial Sequence
  Description of Artificial Sequence: Synthetic oligonucleotide
  Sense strand starting at position 2472 of SEQ ID NO: 1561132
gaggaaagcuucggccaca

SEQ ID NO: 1649106 - RNA, 19 nt, Artificial Sequence
  Description of Artificial Sequence: Synthetic oligonucleotide
  Antisense strand to SEQ ID NO: 1649105
uguggccgaagcuuuccuc

SEQ ID NO: 1649107 - RNA, 19 nt, Artificial Sequence
  Description of Artificial Sequence: Synthetic oligonucleotide
  Sense strand starting at position 2590 of SEQ ID NO: 1561132
gacgaaacuuuauugacag

SEQ ID NO: 1649108 - RNA, 19 nt, Artificial Sequence
  Description of Artificial Sequence: Synthetic oligonucleotide
  Antisense strand to SEQ ID NO: 1649107
cugucaauaaaguuucguc

SEQ ID NO: 1649109 - RNA, 19 nt, Artificial Sequence
  Description of Artificial Sequence: Synthetic oligonucleotide
  Sense strand starting at position 2696 of SEQ ID NO: 1561132
gugggaccuucccgcgaua

SEQ ID NO: 1649110 - RNA, 19 nt, Artificial Sequence
  Description of Artificial Sequence: Synthetic oligonucleotide
  Antisense strand to SEQ ID NO: 1649109
uaucgcgggaaggucccac

SEQ ID NO: 1649111 - RNA, 19 nt, Artificial Sequence
  Description of Artificial Sequence: Synthetic oligonucleotide
  Sense strand starting at position 2699 of SEQ ID NO: 1561132
ggaccuucccgcgauauga

SEQ ID NO: 1649112 - RNA, 19 nt, Artificial Sequence
  Description of Artificial Sequence: Synthetic oligonucleotide
  Antisense strand to SEQ ID NO: 1649111
ucauaucgcgggaaggucc

SEQ ID NO: 1649113 - RNA, 19 nt, Artificial Sequence
  Description of Artificial Sequence: Synthetic oligonucleotide
  Sense strand starting at position 2864 of SEQ ID NO: 1561132
caucauaauuacgccgaga

SEQ ID NO: 1649114 - RNA, 19 nt, Artificial Sequence
  Description of Artificial Sequence: Synthetic oligonucleotide
  Antisense strand to SEQ ID NO: 1649113
ucucggcguaauuaugaug

SEQ ID NO: 1649115 - RNA, 19 nt, Artificial Sequence
  Description of Artificial Sequence: Synthetic oligonucleotide
  Sense strand starting at position 2866 of SEQ ID NO: 1561132
ucauaauuacgccgagaau

SEQ ID NO: 1649116 - RNA, 19 nt, Artificial Sequence
  Description of Artificial Sequence: Synthetic oligonucleotide
  Antisense strand to SEQ ID NO: 1649115
auucucggcguaauuauga

SEQ ID NO: 1649117 - RNA, 19 nt, Artificial Sequence
  Description of Artificial Sequence: Synthetic oligonucleotide
  Sense strand starting at position 2867 of SEQ ID NO: 1561132
cauaauuacgccgagaaua

SEQ ID NO: 1649118 - RNA, 19 nt, Artificial Sequence
  Description of Artificial Sequence: Synthetic oligonucleotide
  Antisense strand to SEQ ID NO: 1649117
uauucucggcguaauuaug

SEQ ID NO: 1649119 - RNA, 19 nt, Artificial Sequence
  Description of Artificial Sequence: Synthetic oligonucleotide
  Sense strand starting at position 2869 of SEQ ID NO: 1561132
uaauuacgccgagaauaau

SEQ ID NO: 1649120 - RNA, 19 nt, Artificial Sequence
  Description of Artificial Sequence: Synthetic oligonucleotide
  Antisense strand to SEQ ID NO: 1649119
auuauucucggcguaauua

SEQ ID NO: 1649121 - RNA, 19 nt, Artificial Sequence
  Description of Artificial Sequence: Synthetic oligonucleotide
  Sense strand starting at position 2925 of SEQ ID NO: 1561132
guuuguuuguuucgccaca

SEQ ID NO: 1649122 - RNA, 19 nt, Artificial Sequence
  Description of Artificial Sequence: Synthetic oligonucleotide
  Antisense strand to SEQ ID NO: 1649121
uguggcgaaacaaacaaac

SEQ ID NO: 1649123 - RNA, 19 nt, Artificial Sequence
  Description of Artificial Sequence: Synthetic oligonucleotide
  Sense strand starting at position 2999 of SEQ ID NO: 1561132
gucgucauccugccagcau

SEQ ID NO: 1649124 - RNA, 19 nt, Artificial Sequence
  Description of Artificial Sequence: Synthetic oligonucleotide
  Antisense strand to SEQ ID NO: 1649123
augcuggcaggaugacgac

SEQ ID NO: 1649125 - RNA, 19 nt, Artificial Sequence
  Description of Artificial Sequence: Synthetic oligonucleotide
  Sense strand starting at position 3109 of SEQ ID NO: 1561132
gcauguuacuguccgguaa

SEQ ID NO: 1649126 - RNA, 19 nt, Artificial Sequence
  Description of Artificial Sequence: Synthetic oligonucleotide
  Antisense strand to SEQ ID NO: 1649125
uuaccggacaguaacaugc

SEQ ID NO: 1649127 - RNA, 19 nt, Artificial Sequence
  Description of Artificial Sequence: Synthetic oligonucleotide
  Sense strand starting at position 3111 of SEQ ID NO: 1561132
auguuacuguccgguaaca

SEQ ID NO: 1649128 - RNA, 19 nt, Artificial Sequence
  Description of Artificial Sequence: Synthetic oligonucleotide
  Antisense strand to SEQ ID NO: 1649127
uguuaccggacaguaacau

SEQ ID NO: 1649129 - RNA, 19 nt, Artificial Sequence
  Description of Artificial Sequence: Synthetic oligonucleotide
  Sense strand starting at position 3113 of SEQ ID NO: 1561132
guuacuguccgguaacaca

SEQ ID NO: 1649130 - RNA, 19 nt, Artificial Sequence
  Description of Artificial Sequence: Synthetic oligonucleotide
  Antisense strand to SEQ ID NO: 1649129
uguguuaccggacaguaac

SEQ ID NO: 1649131 - RNA, 19 nt, Artificial Sequence
  Description of Artificial Sequence: Synthetic oligonucleotide
  Sense strand starting at position 3138 of SEQ ID NO: 1561132
gcgcuugugugucuacaca

SEQ ID NO: 1649132 - RNA, 19 nt, Artificial Sequence
  Description of Artificial Sequence: Synthetic oligonucleotide
  Antisense strand to SEQ ID NO: 1649131
uguguagacacacaagcgc

SEQ ID NO: 1649133 - RNA, 19 nt, Artificial Sequence
  Description of Artificial Sequence: Synthetic oligonucleotide
  Sense strand starting at position 3159 of SEQ ID NO: 1561132
uaggaucacugucagacau

SEQ ID NO: 1649134 - RNA, 19 nt, Artificial Sequence
  Description of Artificial Sequence: Synthetic oligonucleotide
  Antisense strand to SEQ ID NO: 1649133
augucugacagugauccua

SEQ ID NO: 1649135 - RNA, 19 nt, Artificial Sequence
  Description of Artificial Sequence: Synthetic oligonucleotide
  Sense strand starting at position 3193 of SEQ ID NO: 1561132
gcuauagaucgugggcacu

SEQ ID NO: 1649136 - RNA, 19 nt, Artificial Sequence
  Description of Artificial Sequence: Synthetic oligonucleotide
  Antisense strand to SEQ ID NO: 1649135
agugcccacgaucuauagc

SEQ ID NO: 1649137 - RNA, 19 nt, Artificial Sequence
  Description of Artificial Sequence: Synthetic oligonucleotide
  Sense strand starting at position 3195 of SEQ ID NO: 1561132
uauagaucgugggcacuua

SEQ ID NO: 1649138 - RNA, 19 nt, Artificial Sequence
  Description of Artificial Sequence: Synthetic oligonucleotide
  Antisense strand to SEQ ID NO: 1649137
uaagugcccacgaucuaua

SEQ ID NO: 1649139 - RNA, 19 nt, Artificial Sequence
  Description of Artificial Sequence: Synthetic oligonucleotide
  Sense strand starting at position 3217 of SEQ ID NO: 1561132
caaugcaugccacagagua

SEQ ID NO: 1649140 - RNA, 19 nt, Artificial Sequence
  Description of Artificial Sequence: Synthetic oligonucleotide
  Antisense strand to SEQ ID NO: 1649139
uacucuguggcaugcauug

SEQ ID NO: 1649141 - RNA, 19 nt, Artificial Sequence
  Description of Artificial Sequence: Synthetic oligonucleotide
  Sense strand starting at position 3958 of SEQ ID NO: 1561132
cucggcuaauccuuuaauu

SEQ ID NO: 1649142 - RNA, 19 nt, Artificial Sequence
  Description of Artificial Sequence: Synthetic oligonucleotide
  Antisense strand to SEQ ID NO: 1649141
aauuaaaggauuagccgag

SEQ ID NO: 1649143 - RNA, 19 nt, Artificial Sequence
  Description of Artificial Sequence: Synthetic oligonucleotide
  Sense strand starting at position 1183 of SEQ ID NO: 1561133
ggaagcggaucuucuagaa

SEQ ID NO: 1649144 - RNA, 19 nt, Artificial Sequence
  Description of Artificial Sequence: Synthetic oligonucleotide
  Antisense strand to SEQ ID NO: 1649143
uucuagaagauccgcuucc

SEQ ID NO: 1649145 - RNA, 19 nt, Artificial Sequence
  Description of Artificial Sequence: Synthetic oligonucleotide
  Sense strand starting at position 1347 of SEQ ID NO: 1561133
cucaucacugccgaguauu

SEQ ID NO: 1649146 - RNA, 19 nt, Artificial Sequence
  Description of Artificial Sequence: Synthetic oligonucleotide
  Antisense strand to SEQ ID NO: 1649145
aauacucggcagugaugag

SEQ ID NO: 1649147 - RNA, 19 nt, Artificial Sequence
  Description of Artificial Sequence: Synthetic oligonucleotide
  Sense strand starting at position 1350 of SEQ ID NO: 1561133
aucacugccgaguauuagu

SEQ ID NO: 1649148 - RNA, 19 nt, Artificial Sequence
  Description of Artificial Sequence: Synthetic oligonucleotide
  Antisense strand to SEQ ID NO: 1649147
acuaauacucggcagugau

SEQ ID NO: 1649149 - RNA, 19 nt, Artificial Sequence
  Description of Artificial Sequence: Synthetic oligonucleotide
  Sense strand starting at position 1358 of SEQ ID NO: 1561133
cgaguauuaguugagggca

SEQ ID NO: 1649150 - RNA, 19 nt, Artificial Sequence
  Description of Artificial Sequence: Synthetic oligonucleotide
  Antisense strand to SEQ ID NO: 1649149
ugcccucaacuaauacucg

SEQ ID NO: 1649151 - RNA, 19 nt, Artificial Sequence
  Description of Artificial Sequence: Synthetic oligonucleotide
  Sense strand starting at position 1442 of SEQ ID NO: 1561133
ccagcauucucggucugac

SEQ ID NO: 1649152 - RNA, 19 nt, Artificial Sequence
  Description of Artificial Sequence: Synthetic oligonucleotide
  Antisense strand to SEQ ID NO: 1649151
gucagaccgagaaugcugg

SEQ ID NO: 1649153 - RNA, 19 nt, Artificial Sequence
  Description of Artificial Sequence: Synthetic oligonucleotide
  Sense strand starting at position 1704 of SEQ ID NO: 1561133
gucuaccuguuacucaaua

SEQ ID NO: 1649154 - RNA, 19 nt, Artificial Sequence
  Description of Artificial Sequence: Synthetic oligonucleotide
  Antisense strand to SEQ ID NO: 1649153
uauugaguaacagguagac

SEQ ID NO: 1649155 - RNA, 19 nt, Artificial Sequence
  Description of Artificial Sequence: Synthetic oligonucleotide
  Sense strand starting at position 1715 of SEQ ID NO: 1561133
acucaauaucccggaucua

SEQ ID NO: 1649156 - RNA, 19 nt, Artificial Sequence
  Description of Artificial Sequence: Synthetic oligonucleotide
  Antisense strand to SEQ ID NO: 1649155
uagauccgggauauugagu

SEQ ID NO: 1649157 - RNA, 19 nt, Artificial Sequence
  Description of Artificial Sequence: Synthetic oligonucleotide
  Sense strand starting at position 2113 of SEQ ID NO: 1561133
uuucucuauuggucuagga

SEQ ID NO: 1649158 - RNA, 19 nt, Artificial Sequence
  Description of Artificial Sequence: Synthetic oligonucleotide
  Antisense strand to SEQ ID NO: 1649157
uccuagaccaauagagaaa

SEQ ID NO: 1649159 - RNA, 19 nt, Artificial Sequence
  Description of Artificial Sequence: Synthetic oligonucleotide
  Sense strand starting at position 2115 of SEQ ID NO: 1561133
ucucuauuggucuaggaau

SEQ ID NO: 1649160 - RNA, 19 nt, Artificial Sequence
  Description of Artificial Sequence: Synthetic oligonucleotide
  Antisense strand to SEQ ID NO: 1649159
auuccuagaccaauagaga

SEQ ID NO: 1649161 - RNA, 19 nt, Artificial Sequence
  Description of Artificial Sequence: Synthetic oligonucleotide
  Sense strand starting at position 2117 of SEQ ID NO: 1561133
ucuauuggucuaggaaucu

SEQ ID NO: 1649162 - RNA, 19 nt, Artificial Sequence
  Description of Artificial Sequence: Synthetic oligonucleotide
  Antisense strand to SEQ ID NO: 1649161
agauuccuagaccaauaga

SEQ ID NO: 1649163 - RNA, 19 nt, Artificial Sequence
  Description of Artificial Sequence: Synthetic oligonucleotide
  Sense strand starting at position 2123 of SEQ ID NO: 1561133
ggucuaggaaucuguccau

SEQ ID NO: 1649164 - RNA, 19 nt, Artificial Sequence
  Description of Artificial Sequence: Synthetic oligonucleotide
  Antisense strand to SEQ ID NO: 1649163
auggacagauuccuagacc

SEQ ID NO: 1649165 - RNA, 19 nt, Artificial Sequence
  Description of Artificial Sequence: Synthetic oligonucleotide
  Sense strand starting at position 2126 of SEQ ID NO: 1561133
cuaggaaucuguccaucaa

SEQ ID NO: 1649166 - RNA, 19 nt, Artificial Sequence
  Description of Artificial Sequence: Synthetic oligonucleotide
  Antisense strand to SEQ ID NO: 1649165
uugauggacagauuccuag

SEQ ID NO: 1649167 - RNA, 19 nt, Artificial Sequence
  Description of Artificial Sequence: Synthetic oligonucleotide
  Sense strand starting at position 2190 of SEQ ID NO: 1561133
gaggaaugggugcauucga

SEQ ID NO: 1649168 - RNA, 19 nt, Artificial Sequence
  Description of Artificial Sequence: Synthetic oligonucleotide
  Antisense strand to SEQ ID NO: 1649167
ucgaaugcacccauuccuc

SEQ ID NO: 1649169 - RNA, 19 nt, Artificial Sequence
  Description of Artificial Sequence: Synthetic oligonucleotide
  Sense strand starting at position 2197 of SEQ ID NO: 1561133
gggugcauucgagggaaau

SEQ ID NO: 1649170 - RNA, 19 nt, Artificial Sequence
  Description of Artificial Sequence: Synthetic oligonucleotide
  Antisense strand to SEQ ID NO: 1649169
auuucccucgaaugcaccc

SEQ ID NO: 1649171 - RNA, 19 nt, Artificial Sequence
  Description of Artificial Sequence: Synthetic oligonucleotide
  Sense strand starting at position 2198 of SEQ ID NO: 1561133
ggugcauucgagggaaaua

SEQ ID NO: 1649172 - RNA, 19 nt, Artificial Sequence
  Description of Artificial Sequence: Synthetic oligonucleotide
  Antisense strand to SEQ ID NO: 1649171
uauuucccucgaaugcacc

SEQ ID NO: 1649173 - RNA, 19 nt, Artificial Sequence
  Description of Artificial Sequence: Synthetic oligonucleotide
  Sense strand starting at position 2199 of SEQ ID NO: 1561133
gugcauucgagggaaauaa

SEQ ID NO: 1649174 - RNA, 19 nt, Artificial Sequence
  Description of Artificial Sequence: Synthetic oligonucleotide
  Antisense strand to SEQ ID NO: 1649173
uuauuucccucgaaugcac

SEQ ID NO: 1649175 - RNA, 19 nt, Artificial Sequence
  Description of Artificial Sequence: Synthetic oligonucleotide
  Sense strand starting at position 2258 of SEQ ID NO: 1561133
auacuauuauugucagcua

SEQ ID NO: 1649176 - RNA, 19 nt, Artificial Sequence
  Description of Artificial Sequence: Synthetic oligonucleotide
  Antisense strand to SEQ ID NO: 1649175
uagcugacaauaauaguau

SEQ ID NO: 1649177 - RNA, 19 nt, Artificial Sequence
  Description of Artificial Sequence: Synthetic oligonucleotide
  Sense strand starting at position 2266 of SEQ ID NO: 1561133
auugucagcuaaucagaca

SEQ ID NO: 1649178 - RNA, 19 nt, Artificial Sequence
  Description of Artificial Sequence: Synthetic oligonucleotide
  Antisense strand to SEQ ID NO: 1649177
ugucugauuagcugacaau

SEQ ID NO: 1649179 - RNA, 19 nt, Artificial Sequence
  Description of Artificial Sequence: Synthetic oligonucleotide
  Sense strand starting at position 2294 of SEQ ID NO: 1561133
guugaaaguuggaggagua

SEQ ID NO: 1649180 - RNA, 19 nt, Artificial Sequence
  Description of Artificial Sequence: Synthetic oligonucleotide
  Antisense strand to SEQ ID NO: 1649179
uacuccuccaacuuucaac

SEQ ID NO: 1649181 - RNA, 19 nt, Artificial Sequence
  Description of Artificial Sequence: Synthetic oligonucleotide
  Sense strand starting at position 2316 of SEQ ID NO: 1561133
cagaaugagugacauauua

SEQ ID NO: 1649182 - RNA, 19 nt, Artificial Sequence
  Description of Artificial Sequence: Synthetic oligonucleotide
  Antisense strand to SEQ ID NO: 1649181
uaauaugucacucauucug

SEQ ID NO: 1649183 - RNA, 19 nt, Artificial Sequence
  Description of Artificial Sequence: Synthetic oligonucleotide
  Sense strand starting at position 2376 of SEQ ID NO: 1561133
ggcuuaugauaucucagag

SEQ ID NO: 1649184 - RNA, 19 nt, Artificial Sequence
  Description of Artificial Sequence: Synthetic oligonucleotide
  Antisense strand to SEQ ID NO: 1649183
cucugagauaucauaagcc

SEQ ID NO: 1649185 - RNA, 19 nt, Artificial Sequence
  Description of Artificial Sequence: Synthetic oligonucleotide
  Sense strand starting at position 2382 of SEQ ID NO: 1561133
ugauaucucagaggaguau

SEQ ID NO: 1649186 - RNA, 19 nt, Artificial Sequence
  Description of Artificial Sequence: Synthetic oligonucleotide
  Antisense strand to SEQ ID NO: 1649185
auacuccucugagauauca

SEQ ID NO: 1649187 - RNA, 19 nt, Artificial Sequence
  Description of Artificial Sequence: Synthetic oligonucleotide
  Sense strand starting at position 2394 of SEQ ID NO: 1561133
ggaguauugugaucggcau

SEQ ID NO: 1649188 - RNA, 19 nt, Artificial Sequence
  Description of Artificial Sequence: Synthetic oligonucleotide
  Antisense strand to SEQ ID NO: 1649187
augccgaucacaauacucc

SEQ ID NO: 1649189 - RNA, 19 nt, Artificial Sequence
  Description of Artificial Sequence: Synthetic oligonucleotide
  Sense strand starting at position 2395 of SEQ ID NO: 1561133
gaguauugugaucggcaug

SEQ ID NO: 1649190 - RNA, 19 nt, Artificial Sequence
  Description of Artificial Sequence: Synthetic oligonucleotide
  Antisense strand to SEQ ID NO: 1649189
caugccgaucacaauacuc

SEQ ID NO: 1649191 - RNA, 19 nt, Artificial Sequence
  Description of Artificial Sequence: Synthetic oligonucleotide
  Sense strand starting at position 2398 of SEQ ID NO: 1561133
uauugugaucggcauguau

SEQ ID NO: 1649192 - RNA, 19 nt, Artificial Sequence
  Description of Artificial Sequence: Synthetic oligonucleotide
  Antisense strand to SEQ ID NO: 1649191
auacaugccgaucacaaua

SEQ ID NO: 1649193 - RNA, 19 nt, Artificial Sequence
  Description of Artificial Sequence: Synthetic oligonucleotide
  Sense strand starting at position 2400 of SEQ ID NO: 1561133
uugugaucggcauguauuu

SEQ ID NO: 1649194 - RNA, 19 nt, Artificial Sequence
  Description of Artificial Sequence: Synthetic oligonucleotide
  Antisense strand to SEQ ID NO: 1649193
aaauacaugccgaucacaa

SEQ ID NO: 1649195 - RNA, 19 nt, Artificial Sequence
  Description of Artificial Sequence: Synthetic oligonucleotide
  Sense strand starting at position 2566 of SEQ ID NO: 1561133
cccgaaagucugugagaug

SEQ ID NO: 1649196 - RNA, 19 nt, Artificial Sequence
  Description of Artificial Sequence: Synthetic oligonucleotide
  Antisense strand to SEQ ID NO: 1649195
caucucacagacuuucggg

SEQ ID NO: 1649197 - RNA, 19 nt, Artificial Sequence
  Description of Artificial Sequence: Synthetic oligonucleotide
  Sense strand starting at position 2745 of SEQ ID NO: 1561133
ucacuucuguucuccagua

SEQ ID NO: 1649198 - RNA, 19 nt, Artificial Sequence
  Description of Artificial Sequence: Synthetic oligonucleotide
  Antisense strand to SEQ ID NO: 1649197
uacuggagaacagaaguga

SEQ ID NO: 1649199 - RNA, 19 nt, Artificial Sequence
  Description of Artificial Sequence: Synthetic oligonucleotide
  Sense strand starting at position 2780 of SEQ ID NO: 1561133
gcacauuuguagguucuca

SEQ ID NO: 1649200 - RNA, 19 nt, Artificial Sequence
  Description of Artificial Sequence: Synthetic oligonucleotide
  Antisense strand to SEQ ID NO: 1649199
ugagaaccuacaaaugugc

SEQ ID NO: 1649201 - RNA, 19 nt, Artificial Sequence
  Description of Artificial Sequence: Synthetic oligonucleotide
  Sense strand starting at position 2800 of SEQ ID NO: 1561133
auacgugcucguuaagaca

SEQ ID NO: 1649202 - RNA, 19 nt, Artificial Sequence
  Description of Artificial Sequence: Synthetic oligonucleotide
  Antisense strand to SEQ ID NO: 1649201
ugucuuaacgagcacguau

SEQ ID NO: 1649203 - RNA, 19 nt, Artificial Sequence
  Description of Artificial Sequence: Synthetic oligonucleotide
  Sense strand starting at position 2808 of SEQ ID NO: 1561133
ucguuaagacaaugaagga

SEQ ID NO: 1649204 - RNA, 19 nt, Artificial Sequence
  Description of Artificial Sequence: Synthetic oligonucleotide
  Antisense strand to SEQ ID NO: 1649203
uccuucauugucuuaacga

SEQ ID NO: 1649205 - RNA, 19 nt, Artificial Sequence
  Description of Artificial Sequence: Synthetic oligonucleotide
  Sense strand starting at position 2865 of SEQ ID NO: 1561133
gaacaaagugaaugaucgu

SEQ ID NO: 1649206 - RNA, 19 nt, Artificial Sequence
  Description of Artificial Sequence: Synthetic oligonucleotide
  Antisense strand to SEQ ID NO: 1649205
acgaucauucacuuuguuc

SEQ ID NO: 1649207 - RNA, 19 nt, Artificial Sequence
  Description of Artificial Sequence: Synthetic oligonucleotide
  Sense strand starting at position 2868 of SEQ ID NO: 1561133
caaagugaaugaucgugau

SEQ ID NO: 1649208 - RNA, 19 nt, Artificial Sequence
  Description of Artificial Sequence: Synthetic oligonucleotide
  Antisense strand to SEQ ID NO: 1649207
aucacgaucauucacuuug

SEQ ID NO: 1649209 - RNA, 19 nt, Artificial Sequence
  Description of Artificial Sequence: Synthetic oligonucleotide
  Sense strand starting at position 2872 of SEQ ID NO: 1561133
gugaaugaucgugaucccu

SEQ ID NO: 1649210 - RNA, 19 nt, Artificial Sequence
  Description of Artificial Sequence: Synthetic oligonucleotide
  Antisense strand to SEQ ID NO: 1649209
agggaucacgaucauucac

SEQ ID NO: 1649211 - RNA, 19 nt, Artificial Sequence
  Description of Artificial Sequence: Synthetic oligonucleotide
  Sense strand starting at position 2936 of SEQ ID NO: 1561133
gccuguguugcccuggcaa

SEQ ID NO: 1649212 - RNA, 19 nt, Artificial Sequence
  Description of Artificial Sequence: Synthetic oligonucleotide
  Antisense strand to SEQ ID NO: 1649211
uugccagggcaacacaggc

SEQ ID NO: 1649213 - RNA, 19 nt, Artificial Sequence
  Description of Artificial Sequence: Synthetic oligonucleotide
  Sense strand starting at position 2951 of SEQ ID NO: 1561133
gcaaccuugucuccuggua

SEQ ID NO: 1649214 - RNA, 19 nt, Artificial Sequence
  Description of Artificial Sequence: Synthetic oligonucleotide
  Antisense strand to SEQ ID NO: 1649213
uaccaggagacaagguugc

SEQ ID NO: 1649215 - RNA, 19 nt, Artificial Sequence
  Description of Artificial Sequence: Synthetic oligonucleotide
  Sense strand starting at position 3016 of SEQ ID NO: 1561133
gugagauuuccugggcuuu

SEQ ID NO: 1649216 - RNA, 19 nt, Artificial Sequence
  Description of Artificial Sequence: Synthetic oligonucleotide
  Antisense strand to SEQ ID NO: 1649215
aaagcccaggaaaucucac

SEQ ID NO: 1649217 - RNA, 19 nt, Artificial Sequence
  Description of Artificial Sequence: Synthetic oligonucleotide
  Sense strand starting at position 3150 of SEQ ID NO: 1561133
ggcaucucugaauauauuc

SEQ ID NO: 1649218 - RNA, 19 nt, Artificial Sequence
  Description of Artificial Sequence: Synthetic oligonucleotide
  Antisense strand to SEQ ID NO: 1649217
gaauauauucagagaugcc

SEQ ID NO: 1649219 - RNA, 19 nt, Artificial Sequence
  Description of Artificial Sequence: Synthetic oligonucleotide
  Sense strand starting at position 3335 of SEQ ID NO: 1561133
gauacacugcgcugucaaa

SEQ ID NO: 1649220 - RNA, 19 nt, Artificial Sequence
  Description of Artificial Sequence: Synthetic oligonucleotide
  Antisense strand to SEQ ID NO: 1649219
uuugacagcgcaguguauc

SEQ ID NO: 1649221 - RNA, 19 nt, Artificial Sequence
  Description of Artificial Sequence: Synthetic oligonucleotide
  Sense strand starting at position 3380 of SEQ ID NO: 1561133
gcagauauacaacgcauga

SEQ ID NO: 1649222 - RNA, 19 nt, Artificial Sequence
  Description of Artificial Sequence: Synthetic oligonucleotide
  Antisense strand to SEQ ID NO: 1649221
ucaugcguuguauaucugc

SEQ ID NO: 1649223 - RNA, 19 nt, Artificial Sequence
  Description of Artificial Sequence: Synthetic oligonucleotide
  Sense strand starting at position 807 of SEQ ID NO: 1561134
gccacugcguggugacaaa

SEQ ID NO: 1649224 - RNA, 19 nt, Artificial Sequence
  Description of Artificial Sequence: Synthetic oligonucleotide
  Antisense strand to SEQ ID NO: 1649223
uuugucaccacgcaguggc

SEQ ID NO: 1649225 - RNA, 19 nt, Artificial Sequence
  Description of Artificial Sequence: Synthetic oligonucleotide
  Sense strand starting at position 823 of SEQ ID NO: 1561134
aaagcaagacgcuguguua

SEQ ID NO: 1649226 - RNA, 19 nt, Artificial Sequence
  Description of Artificial Sequence: Synthetic oligonucleotide
  Antisense strand to SEQ ID NO: 1649225
uaacacagcgucuugcuuu

SEQ ID NO: 1649227 - RNA, 19 nt, Artificial Sequence
  Description of Artificial Sequence: Synthetic oligonucleotide
  Sense strand starting at position 867 of SEQ ID NO: 1561134
cuggcauagccuuguggaa

SEQ ID NO: 1649228 - RNA, 19 nt, Artificial Sequence
  Description of Artificial Sequence: Synthetic oligonucleotide
  Antisense strand to SEQ ID NO: 1649227
uuccacaaggcuaugccag

SEQ ID NO: 1649229 - RNA, 19 nt, Artificial Sequence
  Description of Artificial Sequence: Synthetic oligonucleotide
  Sense strand starting at position 869 of SEQ ID NO: 1561134
ggcauagccuuguggaaga

SEQ ID NO: 1649230 - RNA, 19 nt, Artificial Sequence
  Description of Artificial Sequence: Synthetic oligonucleotide
  Antisense strand to SEQ ID NO: 1649229
ucuuccacaaggcuaugcc

SEQ ID NO: 1649231 - RNA, 19 nt, Artificial Sequence
  Description of Artificial Sequence: Synthetic oligonucleotide
  Sense strand starting at position 934 of SEQ ID NO: 1561134
cugggaucuuccucaccua

SEQ ID NO: 1649232 - RNA, 19 nt, Artificial Sequence
  Description of Artificial Sequence: Synthetic oligonucleotide
  Antisense strand to SEQ ID NO: 1649231
uaggugaggaagaucccag

SEQ ID NO: 1649233 - RNA, 19 nt, Artificial Sequence
  Description of Artificial Sequence: Synthetic oligonucleotide
  Sense strand starting at position 1331 of SEQ ID NO: 1561134
gcuccuaacugguaugugu

SEQ ID NO: 1649234 - RNA, 19 nt, Artificial Sequence
  Description of Artificial Sequence: Synthetic oligonucleotide
  Antisense strand to SEQ ID NO: 1649233
acacauaccaguuaggagc

SEQ ID NO: 1649235 - RNA, 19 nt, Artificial Sequence
  Description of Artificial Sequence: Synthetic oligonucleotide
  Sense strand starting at position 1354 of SEQ ID NO: 1561134
gcuggaguccuucgagaaa

SEQ ID NO: 1649236 - RNA, 19 nt, Artificial Sequence
  Description of Artificial Sequence: Synthetic oligonucleotide
  Antisense strand to SEQ ID NO: 1649235
uuucucgaaggacuccagc

SEQ ID NO: 1649237 - RNA, 19 nt, Artificial Sequence
  Description of Artificial Sequence: Synthetic oligonucleotide
  Sense strand starting at position 1356 of SEQ ID NO: 1561134
uggaguccuucgagaaagg

SEQ ID NO: 1649238 - RNA, 19 nt, Artificial Sequence
  Description of Artificial Sequence: Synthetic oligonucleotide
  Antisense strand to SEQ ID NO: 1649237
ccuuucucgaaggacucca

SEQ ID NO: 1649239 - RNA, 19 nt, Artificial Sequence
  Description of Artificial Sequence: Synthetic oligonucleotide
  Sense strand starting at position 1725 of SEQ ID NO: 1561134
guguuugugccuuucucua

SEQ ID NO: 1649240 - RNA, 19 nt, Artificial Sequence
  Description of Artificial Sequence: Synthetic oligonucleotide
  Antisense strand to SEQ ID NO: 1649239
uagagaaaggcacaaacac

SEQ ID NO: 1649241 - RNA, 19 nt, Artificial Sequence
  Description of Artificial Sequence: Synthetic oligonucleotide
  Sense strand starting at position 1759 of SEQ ID NO: 1561134
gcgccauguguggaaauca

SEQ ID NO: 1649242 - RNA, 19 nt, Artificial Sequence
  Description of Artificial Sequence: Synthetic oligonucleotide
  Antisense strand to SEQ ID NO: 1649241
ugauuuccacacauggcgc

SEQ ID NO: 1649243 - RNA, 19 nt, Artificial Sequence
  Description of Artificial Sequence: Synthetic oligonucleotide
  Sense strand starting at position 1770 of SEQ ID NO: 1561134
ggaaaucagacccgucagu

SEQ ID NO: 1649244 - RNA, 19 nt, Artificial Sequence
  Description of Artificial Sequence: Synthetic oligonucleotide
  Antisense strand to SEQ ID NO: 1649243
acugacgggucugauuucc

SEQ ID NO: 1649245 - RNA, 19 nt, Artificial Sequence
  Description of Artificial Sequence: Synthetic oligonucleotide
  Sense strand starting at position 2258 of SEQ ID NO: 1561134
ccagguuauacggaucuca

SEQ ID NO: 1649246 - RNA, 19 nt, Artificial Sequence
  Description of Artificial Sequence: Synthetic oligonucleotide
  Antisense strand to SEQ ID NO: 1649245
ugagauccguauaaccugg

SEQ ID NO: 1649247 - RNA, 19 nt, Artificial Sequence
  Description of Artificial Sequence: Synthetic oligonucleotide
  Sense strand starting at position 2271 of SEQ ID NO: 1561134
aucucagaguccuguauuu

SEQ ID NO: 1649248 - RNA, 19 nt, Artificial Sequence
  Description of Artificial Sequence: Synthetic oligonucleotide
  Antisense strand to SEQ ID NO: 1649247
aaauacaggacucugagau

SEQ ID NO: 1649249 - RNA, 19 nt, Artificial Sequence
  Description of Artificial Sequence: Synthetic oligonucleotide
  Sense strand starting at position 2282 of SEQ ID NO: 1561134
cuguauuuauucggugcuu

SEQ ID NO: 1649250 - RNA, 19 nt, Artificial Sequence
  Description of Artificial Sequence: Synthetic oligonucleotide
  Antisense strand to SEQ ID NO: 1649249
aagcaccgaauaaauacag

SEQ ID NO: 1649251 - RNA, 19 nt, Artificial Sequence
  Description of Artificial Sequence: Synthetic oligonucleotide
  Sense strand starting at position 2284 of SEQ ID NO: 1561134
guauuuauucggugcuucu

SEQ ID NO: 1649252 - RNA, 19 nt, Artificial Sequence
  Description of Artificial Sequence: Synthetic oligonucleotide
  Antisense strand to SEQ ID NO: 1649251
agaagcaccgaauaaauac

SEQ ID NO: 1649253 - RNA, 19 nt, Artificial Sequence
  Description of Artificial Sequence: Synthetic oligonucleotide
  Sense strand starting at position 2950 of SEQ ID NO: 1561134
cucccaaagugcugucuca

SEQ ID NO: 1649254 - RNA, 19 nt, Artificial Sequence
  Description of Artificial Sequence: Synthetic oligonucleotide
  Antisense strand to SEQ ID NO: 1649253
ugagacagcacuuugggag

SEQ ID NO: 1649255 - RNA, 19 nt, Artificial Sequence
  Description of Artificial Sequence: Synthetic oligonucleotide
  Sense strand starting at position 2997 of SEQ ID NO: 1561134
uauugacuguaggucauaa

SEQ ID NO: 1649256 - RNA, 19 nt, Artificial Sequence
  Description of Artificial Sequence: Synthetic oligonucleotide
  Antisense strand to SEQ ID NO: 1649255
uuaugaccuacagucaaua

SEQ ID NO: 1649257 - RNA, 19 nt, Artificial Sequence
  Description of Artificial Sequence: Synthetic oligonucleotide
  Sense strand starting at position 3147 of SEQ ID NO: 1561134
ucagccuauuaguauuaga

SEQ ID NO: 1649258 - RNA, 19 nt, Artificial Sequence
  Description of Artificial Sequence: Synthetic oligonucleotide
  Antisense strand to SEQ ID NO: 1649257
ucuaauacuaauaggcuga

SEQ ID NO: 1649259 - RNA, 19 nt, Artificial Sequence
  Description of Artificial Sequence: Synthetic oligonucleotide
  Sense strand starting at position 3150 of SEQ ID NO: 1561134
gccuauuaguauuagacga

SEQ ID NO: 1649260 - RNA, 19 nt, Artificial Sequence
  Description of Artificial Sequence: Synthetic oligonucleotide
  Antisense strand to SEQ ID NO: 1649259
ucgucuaauacuaauaggc

SEQ ID NO: 1649261 - RNA, 19 nt, Artificial Sequence
  Description of Artificial Sequence: Synthetic oligonucleotide
  Sense strand starting at position 3278 of SEQ ID NO: 1561134
ucaagcgauucucagccaa

SEQ ID NO: 1649262 - RNA, 19 nt, Artificial Sequence
  Description of Artificial Sequence: Synthetic oligonucleotide
  Antisense strand to SEQ ID NO: 1649261
uuggcugagaaucgcuuga

SEQ ID NO: 1649263 - RNA, 19 nt, Artificial Sequence
  Description of Artificial Sequence: Synthetic oligonucleotide
  Sense strand starting at position 3430 of SEQ ID NO: 1561134
aagugucaggauuacaagu

SEQ ID NO: 1649264 - RNA, 19 nt, Artificial Sequence
  Description of Artificial Sequence: Synthetic oligonucleotide
  Antisense strand to SEQ ID NO: 1649263
acuuguaauccugacacuu

SEQ ID NO: 1649265 - RNA, 19 nt, Artificial Sequence
  Description of Artificial Sequence: Synthetic oligonucleotide
  Sense strand starting at position 3432 of SEQ ID NO: 1561134
gugucaggauuacaaguau

SEQ ID NO: 1649266 - RNA, 19 nt, Artificial Sequence
  Description of Artificial Sequence: Synthetic oligonucleotide
  Antisense strand to SEQ ID NO: 1649265
auacuuguaauccugacac

SEQ ID NO: 1649267 - RNA, 19 nt, Artificial Sequence
  Description of Artificial Sequence: Synthetic oligonucleotide
  Sense strand starting at position 3532 of SEQ ID NO: 1561134
ucauuaaucaggcauggug

SEQ ID NO: 1649268 - RNA, 19 nt, Artificial Sequence
  Description of Artificial Sequence: Synthetic oligonucleotide
  Antisense strand to SEQ ID NO: 1649267
caccaugccugauuaauga

SEQ ID NO: 1649269 - RNA, 19 nt, Artificial Sequence
  Description of Artificial Sequence: Synthetic oligonucleotide
  Sense strand starting at position 3679 of SEQ ID NO: 1561134
cccuguaucucuggaucuu

SEQ ID NO: 1649270 - RNA, 19 nt, Artificial Sequence
  Description of Artificial Sequence: Synthetic oligonucleotide
  Antisense strand to SEQ ID NO: 1649269
aagauccagagauacaggg

SEQ ID NO: 1649271 - RNA, 19 nt, Artificial Sequence
  Description of Artificial Sequence: Synthetic oligonucleotide
  Sense strand starting at position 3701 of SEQ ID NO: 1561134
ucugaaggcuugucaggua

SEQ ID NO: 1649272 - RNA, 19 nt, Artificial Sequence
  Description of Artificial Sequence: Synthetic oligonucleotide
  Antisense strand to SEQ ID NO: 1649271
uaccugacaagccuucaga

SEQ ID NO: 1649273 - RNA, 19 nt, Artificial Sequence
  Description of Artificial Sequence: Synthetic oligonucleotide
  Sense strand starting at position 3704 of SEQ ID NO: 1561134
gaaggcuugucagguaaca

SEQ ID NO: 1649274 - RNA, 19 nt, Artificial Sequence
  Description of Artificial Sequence: Synthetic oligonucleotide
  Antisense strand to SEQ ID NO: 1649273
uguuaccugacaagccuuc

SEQ ID NO: 1649275 - RNA, 19 nt, Artificial Sequence
  Description of Artificial Sequence: Synthetic oligonucleotide
  Sense strand starting at position 3706 of SEQ ID NO: 1561134
aggcuugucagguaacacu

SEQ ID NO: 1649276 - RNA, 19 nt, Artificial Sequence
  Description of Artificial Sequence: Synthetic oligonucleotide
  Antisense strand to SEQ ID NO: 1649275
aguguuaccugacaagccu

SEQ ID NO: 1649277 - RNA, 19 nt, Artificial Sequence
  Description of Artificial Sequence: Synthetic oligonucleotide
  Sense strand starting at position 3715 of SEQ ID NO: 1561134
agguaacacuaugaucaaa

SEQ ID NO: 1649278 - RNA, 19 nt, Artificial Sequence
  Description of Artificial Sequence: Synthetic oligonucleotide
  Antisense strand to SEQ ID NO: 1649277
uuugaucauaguguuaccu

SEQ ID NO: 1649279 - RNA, 19 nt, Artificial Sequence
  Description of Artificial Sequence: Synthetic oligonucleotide
  Sense strand starting at position 3860 of SEQ ID NO: 1561134
gcaagauuccaggguacuu

SEQ ID NO: 1649280 - RNA, 19 nt, Artificial Sequence
  Description of Artificial Sequence: Synthetic oligonucleotide
  Antisense strand to SEQ ID NO: 1649279
aaguacccuggaaucuugc

SEQ ID NO: 1649281 - RNA, 19 nt, Artificial Sequence
  Description of Artificial Sequence: Synthetic oligonucleotide
  Sense strand starting at position 3869 of SEQ ID NO: 1561134
caggguacuuguguuuauu

SEQ ID NO: 1649282 - RNA, 19 nt, Artificial Sequence
  Description of Artificial Sequence: Synthetic oligonucleotide
  Antisense strand to SEQ ID NO: 1649281
aauaaacacaaguacccug

SEQ ID NO: 1649283 - RNA, 19 nt, Artificial Sequence
  Description of Artificial Sequence: Synthetic oligonucleotide
  Sense strand starting at position 3871 of SEQ ID NO: 1561134
ggguacuuguguuuauuua

SEQ ID NO: 1649284 - RNA, 19 nt, Artificial Sequence
  Description of Artificial Sequence: Synthetic oligonucleotide
  Antisense strand to SEQ ID NO: 1649283
uaaauaaacacaaguaccc

SEQ ID NO: 1649285 - RNA, 19 nt, Artificial Sequence
  Description of Artificial Sequence: Synthetic oligonucleotide
  Sense strand starting at position 3878 of SEQ ID NO: 1561134
uguguuuauuuagacacau

SEQ ID NO: 1649286 - RNA, 19 nt, Artificial Sequence
  Description of Artificial Sequence: Synthetic oligonucleotide
  Antisense strand to SEQ ID NO: 1649285
augugucuaaauaaacaca

SEQ ID NO: 1649287 - RNA, 19 nt, Artificial Sequence
  Description of Artificial Sequence: Synthetic oligonucleotide
  Sense strand starting at position 169 of SEQ ID NO: 1561135
cgcccuaauguuuguauuu

SEQ ID NO: 1649288 - RNA, 19 nt, Artificial Sequence
  Description of Artificial Sequence: Synthetic oligonucleotide
  Antisense strand to SEQ ID NO: 1649287
aaauacaaacauuagggcg

SEQ ID NO: 1649289 - RNA, 19 nt, Artificial Sequence
  Description of Artificial Sequence: Synthetic oligonucleotide
  Sense strand starting at position 403 of SEQ ID NO: 1561135
gggcgugugucuucgugca

SEQ ID NO: 1649290 - RNA, 19 nt, Artificial Sequence
  Description of Artificial Sequence: Synthetic oligonucleotide
  Antisense strand to SEQ ID NO: 1649289
ugcacgaagacacacgccc

SEQ ID NO: 1649291 - RNA, 19 nt, Artificial Sequence
  Description of Artificial Sequence: Synthetic oligonucleotide
  Sense strand starting at position 405 of SEQ ID NO: 1561135
gcgugugucuucgugcaca

SEQ ID NO: 1649292 - RNA, 19 nt, Artificial Sequence
  Description of Artificial Sequence: Synthetic oligonucleotide
  Antisense strand to SEQ ID NO: 1649291
ugugcacgaagacacacgc

SEQ ID NO: 1649293 - RNA, 19 nt, Artificial Sequence
  Description of Artificial Sequence: Synthetic oligonucleotide
  Sense strand starting at position 440 of SEQ ID NO: 1561135
agucgauggcguguccuua

SEQ ID NO: 1649294 - RNA, 19 nt, Artificial Sequence
  Description of Artificial Sequence: Synthetic oligonucleotide
  Antisense strand to SEQ ID NO: 1649293
uaaggacacgccaucgacu

SEQ ID NO: 1649295 - RNA, 19 nt, Artificial Sequence
  Description of Artificial Sequence: Synthetic oligonucleotide
  Sense strand starting at position 441 of SEQ ID NO: 1561135
gucgauggcguguccuuau

SEQ ID NO: 1649296 - RNA, 19 nt, Artificial Sequence
  Description of Artificial Sequence: Synthetic oligonucleotide
  Antisense strand to SEQ ID NO: 1649295
auaaggacacgccaucgac

SEQ ID NO: 1649297 - RNA, 19 nt, Artificial Sequence
  Description of Artificial Sequence: Synthetic oligonucleotide
  Sense strand starting at position 451 of SEQ ID NO: 1561135
uguccuuauccauggcauu

SEQ ID NO: 1649298 - RNA, 19 nt, Artificial Sequence
  Description of Artificial Sequence: Synthetic oligonucleotide
  Antisense strand to SEQ ID NO: 1649297
aaugccauggauaaggaca

SEQ ID NO: 1649299 - RNA, 19 nt, Artificial Sequence
  Description of Artificial Sequence: Synthetic oligonucleotide
  Sense strand starting at position 772 of SEQ ID NO: 1561135
cccagagucuggugaguuc

SEQ ID NO: 1649300 - RNA, 19 nt, Artificial Sequence
  Description of Artificial Sequence: Synthetic oligonucleotide
  Antisense strand to SEQ ID NO: 1649299
gaacucaccagacucuggg

SEQ ID NO: 1649301 - RNA, 19 nt, Artificial Sequence
  Description of Artificial Sequence: Synthetic oligonucleotide
  Sense strand starting at position 781 of SEQ ID NO: 1561135
uggugaguucuagaagccu

SEQ ID NO: 1649302 - RNA, 19 nt, Artificial Sequence
  Description of Artificial Sequence: Synthetic oligonucleotide
  Antisense strand to SEQ ID NO: 1649301
aggcuucuagaacucacca

SEQ ID NO: 1649303 - RNA, 19 nt, Artificial Sequence
  Description of Artificial Sequence: Synthetic oligonucleotide
  Sense strand starting at position 787 of SEQ ID NO: 1561135
guucuagaagccugagacu

SEQ ID NO: 1649304 - RNA, 19 nt, Artificial Sequence
  Description of Artificial Sequence: Synthetic oligonucleotide
  Antisense strand to SEQ ID NO: 1649303
agucucaggcuucuagaac

SEQ ID NO: 1649305 - RNA, 19 nt, Artificial Sequence
  Description of Artificial Sequence: Synthetic oligonucleotide
  Sense strand starting at position 856 of SEQ ID NO: 1561135
gauccuagccugggaguuu

SEQ ID NO: 1649306 - RNA, 19 nt, Artificial Sequence
  Description of Artificial Sequence: Synthetic oligonucleotide
  Antisense strand to SEQ ID NO: 1649305
aaacucccaggcuaggauc

SEQ ID NO: 1649307 - RNA, 19 nt, Artificial Sequence
  Description of Artificial Sequence: Synthetic oligonucleotide
  Sense strand starting at position 934 of SEQ ID NO: 1561135
ggugucaccgcuggaucua

SEQ ID NO: 1649308 - RNA, 19 nt, Artificial Sequence
  Description of Artificial Sequence: Synthetic oligonucleotide
  Antisense strand to SEQ ID NO: 1649307
uagauccagcggugacacc

SEQ ID NO: 1649309 - RNA, 19 nt, Artificial Sequence
  Description of Artificial Sequence: Synthetic oligonucleotide
  Sense strand starting at position 1081 of SEQ ID NO: 1561135
uacacuggguguuccuaua

SEQ ID NO: 1649310 - RNA, 19 nt, Artificial Sequence
  Description of Artificial Sequence: Synthetic oligonucleotide
  Antisense strand to SEQ ID NO: 1649309
uauaggaacacccagugua

SEQ ID NO: 1649311 - RNA, 19 nt, Artificial Sequence
  Description of Artificial Sequence: Synthetic oligonucleotide
  Sense strand starting at position 1111 of SEQ ID NO: 1561135
agucuugaggucuggguua

SEQ ID NO: 1649312 - RNA, 19 nt, Artificial Sequence
  Description of Artificial Sequence: Synthetic oligonucleotide
  Antisense strand to SEQ ID NO: 1649311
uaacccagaccucaagacu

SEQ ID NO: 1649313 - RNA, 19 nt, Artificial Sequence
  Description of Artificial Sequence: Synthetic oligonucleotide
  Sense strand starting at position 1113 of SEQ ID NO: 1561135
ucuugaggucuggguuagu

SEQ ID NO: 1649314 - RNA, 19 nt, Artificial Sequence
  Description of Artificial Sequence: Synthetic oligonucleotide
  Antisense strand to SEQ ID NO: 1649313
acuaacccagaccucaaga

SEQ ID NO: 1649315 - RNA, 19 nt, Artificial Sequence
  Description of Artificial Sequence: Synthetic oligonucleotide
  Sense strand starting at position 1132 of SEQ ID NO: 1561135
uuuggagucugggagcuuu

SEQ ID NO: 1649316 - RNA, 19 nt, Artificial Sequence
  Description of Artificial Sequence: Synthetic oligonucleotide
  Antisense strand to SEQ ID NO: 1649315
aaagcucccagacuccaaa

SEQ ID NO: 1649317 - RNA, 19 nt, Artificial Sequence
  Description of Artificial Sequence: Synthetic oligonucleotide
  Sense strand starting at position 1143 of SEQ ID NO: 1561135
ggagcuuugagaugugaug

SEQ ID NO: 1649318 - RNA, 19 nt, Artificial Sequence
  Description of Artificial Sequence: Synthetic oligonucleotide
  Antisense strand to SEQ ID NO: 1649317
caucacaucucaaagcucc

SEQ ID NO: 1649319 - RNA, 19 nt, Artificial Sequence
  Description of Artificial Sequence: Synthetic oligonucleotide
  Sense strand starting at position 1145 of SEQ ID NO: 1561135
agcuuugagaugugaugau

SEQ ID NO: 1649320 - RNA, 19 nt, Artificial Sequence
  Description of Artificial Sequence: Synthetic oligonucleotide
  Antisense strand to SEQ ID NO: 1649319
aucaucacaucucaaagcu

SEQ ID NO: 1649321 - RNA, 19 nt, Artificial Sequence
  Description of Artificial Sequence: Synthetic oligonucleotide
  Sense strand starting at position 1273 of SEQ ID NO: 1561135
gguggguaggcggaagauu

SEQ ID NO: 1649322 - RNA, 19 nt, Artificial Sequence
  Description of Artificial Sequence: Synthetic oligonucleotide
  Antisense strand to SEQ ID NO: 1649321
aaucuuccgccuacccacc

SEQ ID NO: 1649323 - RNA, 19 nt, Artificial Sequence
  Description of Artificial Sequence: Synthetic oligonucleotide
  Sense strand starting at position 1302 of SEQ ID NO: 1561135
gaggguuggcucugaaucu

SEQ ID NO: 1649324 - RNA, 19 nt, Artificial Sequence
  Description of Artificial Sequence: Synthetic oligonucleotide
  Antisense strand to SEQ ID NO: 1649323
agauucagagccaacccuc

SEQ ID NO: 1649325 - RNA, 19 nt, Artificial Sequence
  Description of Artificial Sequence: Synthetic oligonucleotide
  Sense strand starting at position 1330 of SEQ ID NO: 1561135
ggcggaaaucuccguccca

SEQ ID NO: 1649326 - RNA, 19 nt, Artificial Sequence
  Description of Artificial Sequence: Synthetic oligonucleotide
  Antisense strand to SEQ ID NO: 1649325
ugggacggagauuuccgcc

SEQ ID NO: 1649327 - RNA, 19 nt, Artificial Sequence
  Description of Artificial Sequence: Synthetic oligonucleotide
  Sense strand starting at position 1461 of SEQ ID NO: 1561135
ccuggugcucccuguuaca

SEQ ID NO: 1649328 - RNA, 19 nt, Artificial Sequence
  Description of Artificial Sequence: Synthetic oligonucleotide
  Antisense strand to SEQ ID NO: 1649327
uguaacagggagcaccagg

SEQ ID NO: 1649329 - RNA, 19 nt, Artificial Sequence
  Description of Artificial Sequence: Synthetic oligonucleotide
  Sense strand starting at position 1607 of SEQ ID NO: 1561135
cggagauagcguuggacca

SEQ ID NO: 1649330 - RNA, 19 nt, Artificial Sequence
  Description of Artificial Sequence: Synthetic oligonucleotide
  Antisense strand to SEQ ID NO: 1649329
ugguccaacgcuaucuccg

SEQ ID NO: 1649331 - RNA, 19 nt, Artificial Sequence
  Description of Artificial Sequence: Synthetic oligonucleotide
  Sense strand starting at position 1620 of SEQ ID NO: 1561135
ggaccagucuccuaagaug

SEQ ID NO: 1649332 - RNA, 19 nt, Artificial Sequence
  Description of Artificial Sequence: Synthetic oligonucleotide
  Antisense strand to SEQ ID NO: 1649331
caucuuaggagacuggucc

SEQ ID NO: 1649333 - RNA, 19 nt, Artificial Sequence
  Description of Artificial Sequence: Synthetic oligonucleotide
  Sense strand starting at position 1676 of SEQ ID NO: 1561135
cagagaacuugugcgucuu

SEQ ID NO: 1649334 - RNA, 19 nt, Artificial Sequence
  Description of Artificial Sequence: Synthetic oligonucleotide
  Antisense strand to SEQ ID NO: 1649333
aagacgcacaaguucucug

SEQ ID NO: 1649335 - RNA, 19 nt, Artificial Sequence
  Description of Artificial Sequence: Synthetic oligonucleotide
  Sense strand starting at position 2044 of SEQ ID NO: 1561135
gggacaagcugcgagauaa

SEQ ID NO: 1649336 - RNA, 19 nt, Artificial Sequence
  Description of Artificial Sequence: Synthetic oligonucleotide
  Antisense strand to SEQ ID NO: 1649335
uuaucucgcagcuuguccc

SEQ ID NO: 1649337 - RNA, 19 nt, Artificial Sequence
  Description of Artificial Sequence: Synthetic oligonucleotide
  Sense strand starting at position 2179 of SEQ ID NO: 1561135
accuuaagauguuagguga

SEQ ID NO: 1649338 - RNA, 19 nt, Artificial Sequence
  Description of Artificial Sequence: Synthetic oligonucleotide
  Antisense strand to SEQ ID NO: 1649337
ucaccuaacaucuuaaggu

SEQ ID NO: 1649339 - RNA, 19 nt, Artificial Sequence
  Description of Artificial Sequence: Synthetic oligonucleotide
  Sense strand starting at position 2186 of SEQ ID NO: 1561135
gauguuaggugaccaacaa

SEQ ID NO: 1649340 - RNA, 19 nt, Artificial Sequence
  Description of Artificial Sequence: Synthetic oligonucleotide
  Antisense strand to SEQ ID NO: 1649339
uuguuggucaccuaacauc

SEQ ID NO: 1649341 - RNA, 19 nt, Artificial Sequence
  Description of Artificial Sequence: Synthetic oligonucleotide
  Sense strand starting at position 2239 of SEQ ID NO: 1561135
aggagucauuugcaacaca

SEQ ID NO: 1649342 - RNA, 19 nt, Artificial Sequence
  Description of Artificial Sequence: Synthetic oligonucleotide
  Antisense strand to SEQ ID NO: 1649341
uguguugcaaaugacuccu

SEQ ID NO: 1649343 - RNA, 19 nt, Artificial Sequence
  Description of Artificial Sequence: Synthetic oligonucleotide
  Sense strand starting at position 2258 of SEQ ID NO: 1561135
gaggguggcauagguuaau

SEQ ID NO: 1649344 - RNA, 19 nt, Artificial Sequence
  Description of Artificial Sequence: Synthetic oligonucleotide
  Antisense strand to SEQ ID NO: 1649343
auuaaccuaugccacccuc

SEQ ID NO: 1649345 - RNA, 19 nt, Artificial Sequence
  Description of Artificial Sequence: Synthetic oligonucleotide
  Sense strand starting at position 2261 of SEQ ID NO: 1561135
gguggcauagguuaauaga

SEQ ID NO: 1649346 - RNA, 19 nt, Artificial Sequence
  Description of Artificial Sequence: Synthetic oligonucleotide
  Antisense strand to SEQ ID NO: 1649345
ucuauuaaccuaugccacc

SEQ ID NO: 1649347 - RNA, 19 nt, Artificial Sequence
  Description of Artificial Sequence: Synthetic oligonucleotide
  Sense strand starting at position 2824 of SEQ ID NO: 1561135
ugggcaaucuucccaacca

SEQ ID NO: 1649348 - RNA, 19 nt, Artificial Sequence
  Description of Artificial Sequence: Synthetic oligonucleotide
  Antisense strand to SEQ ID NO: 1649347
ugguugggaagauugccca

SEQ ID NO: 1649349 - RNA, 19 nt, Artificial Sequence
  Description of Artificial Sequence: Synthetic oligonucleotide
  Sense strand starting at position 2825 of SEQ ID NO: 1561135
gggcaaucuucccaaccaa

SEQ ID NO: 1649350 - RNA, 19 nt, Artificial Sequence
  Description of Artificial Sequence: Synthetic oligonucleotide
  Antisense strand to SEQ ID NO: 1649349
uugguugggaagauugccc

SEQ ID NO: 1649351 - RNA, 19 nt, Artificial Sequence
  Description of Artificial Sequence: Synthetic oligonucleotide
  Sense strand starting at position 2851 of SEQ ID NO: 1561135
aauccagaaucugugaagu

SEQ ID NO: 1649352 - RNA, 19 nt, Artificial Sequence
  Description of Artificial Sequence: Synthetic oligonucleotide
  Antisense strand to SEQ ID NO: 1649351
acuucacagauucuggauu

SEQ ID NO: 1649353 - RNA, 19 nt, Artificial Sequence
  Description of Artificial Sequence: Synthetic oligonucleotide
  Sense strand starting at position 2853 of SEQ ID NO: 1561135
uccagaaucugugaaguac

SEQ ID NO: 1649354 - RNA, 19 nt, Artificial Sequence
  Description of Artificial Sequence: Synthetic oligonucleotide
  Antisense strand to SEQ ID NO: 1649353
guacuucacagauucugga

SEQ ID NO: 1649355 - RNA, 19 nt, Artificial Sequence
  Description of Artificial Sequence: Synthetic oligonucleotide
  Sense strand starting at position 2881 of SEQ ID NO: 1561135
guauuugcauaacacguua

SEQ ID NO: 1649356 - RNA, 19 nt, Artificial Sequence
  Description of Artificial Sequence: Synthetic oligonucleotide
  Antisense strand to SEQ ID NO: 1649355
uaacguguuaugcaaauac

SEQ ID NO: 1649357 - RNA, 19 nt, Artificial Sequence
  Description of Artificial Sequence: Synthetic oligonucleotide
  Sense strand starting at position 2907 of SEQ ID NO: 1561135
uuugcaagacaguguacaa

SEQ ID NO: 1649358 - RNA, 19 nt, Artificial Sequence
  Description of Artificial Sequence: Synthetic oligonucleotide
  Antisense strand to SEQ ID NO: 1649357
uuguacacugucuugcaaa

SEQ ID NO: 1649359 - RNA, 19 nt, Artificial Sequence
  Description of Artificial Sequence: Synthetic oligonucleotide
  Sense strand starting at position 3354 of SEQ ID NO: 1561135
ccaggagacuuucuuaacu

SEQ ID NO: 1649360 - RNA, 19 nt, Artificial Sequence
  Description of Artificial Sequence: Synthetic oligonucleotide
  Antisense strand to SEQ ID NO: 1649359
aguuaagaaagucuccugg

SEQ ID NO: 1649361 - RNA, 19 nt, Artificial Sequence
  Description of Artificial Sequence: Synthetic oligonucleotide
  Sense strand starting at position 3359 of SEQ ID NO: 1561135
agacuuucuuaacuaaggu

SEQ ID NO: 1649362 - RNA, 19 nt, Artificial Sequence
  Description of Artificial Sequence: Synthetic oligonucleotide
  Antisense strand to SEQ ID NO: 1649361
accuuaguuaagaaagucu

SEQ ID NO: 1649363 - RNA, 19 nt, Artificial Sequence
  Description of Artificial Sequence: Synthetic oligonucleotide
  Sense strand starting at position 3366 of SEQ ID NO: 1561135
cuuaacuaagguuggaaau

SEQ ID NO: 1649364 - RNA, 19 nt, Artificial Sequence
  Description of Artificial Sequence: Synthetic oligonucleotide
  Antisense strand to SEQ ID NO: 1649363
auuuccaaccuuaguuaag

SEQ ID NO: 1649365 - RNA, 19 nt, Artificial Sequence
  Description of Artificial Sequence: Synthetic oligonucleotide
  Sense strand starting at position 3963 of SEQ ID NO: 1561135
uuccaagguucuuuggagu

SEQ ID NO: 1649366 - RNA, 19 nt, Artificial Sequence
  Description of Artificial Sequence: Synthetic oligonucleotide
  Antisense strand to SEQ ID NO: 1649365
acuccaaagaaccuuggaa

SEQ ID NO: 1649367 - RNA, 19 nt, Artificial Sequence
  Description of Artificial Sequence: Synthetic oligonucleotide
  Sense strand starting at position 359 of SEQ ID NO: 1561136
agagcagcccugugcaauu

SEQ ID NO: 1649368 - RNA, 19 nt, Artificial Sequence
  Description of Artificial Sequence: Synthetic oligonucleotide
  Antisense strand to SEQ ID NO: 1649367
aauugcacagggcugcucu

SEQ ID NO: 1649369 - RNA, 19 nt, Artificial Sequence
  Description of Artificial Sequence: Synthetic oligonucleotide
  Sense strand starting at position 418 of SEQ ID NO: 1561136
cugauaagucaugguuccu

SEQ ID NO: 1649370 - RNA, 19 nt, Artificial Sequence
  Description of Artificial Sequence: Synthetic oligonucleotide
  Antisense strand to SEQ ID NO: 1649369
aggaaccaugacuuaucag

SEQ ID NO: 1649371 - RNA, 19 nt, Artificial Sequence
  Description of Artificial Sequence: Synthetic oligonucleotide
  Sense strand starting at position 423 of SEQ ID NO: 1561136
aagucaugguuccuuggau

SEQ ID NO: 1649372 - RNA, 19 nt, Artificial Sequence
  Description of Artificial Sequence: Synthetic oligonucleotide
  Antisense strand to SEQ ID NO: 1649371
auccaaggaaccaugacuu

SEQ ID NO: 1649373 - RNA, 19 nt, Artificial Sequence
  Description of Artificial Sequence: Synthetic oligonucleotide
  Sense strand starting at position 424 of SEQ ID NO: 1561136
agucaugguuccuuggauc

SEQ ID NO: 1649374 - RNA, 19 nt, Artificial Sequence
  Description of Artificial Sequence: Synthetic oligonucleotide
  Antisense strand to SEQ ID NO: 1649373
gauccaaggaaccaugacu

SEQ ID NO: 1649375 - RNA, 19 nt, Artificial Sequence
  Description of Artificial Sequence: Synthetic oligonucleotide
  Sense strand starting at position 479 of SEQ ID NO: 1561136
cgaucucaguuaucagcuu

SEQ ID NO: 1649376 - RNA, 19 nt, Artificial Sequence
  Description of Artificial Sequence: Synthetic oligonucleotide
  Antisense strand to SEQ ID NO: 1649375
aagcugauaacugagaucg

SEQ ID NO: 1649377 - RNA, 19 nt, Artificial Sequence
  Description of Artificial Sequence: Synthetic oligonucleotide
  Sense strand starting at position 485 of SEQ ID NO: 1561136
caguuaucagcuuagagca

SEQ ID NO: 1649378 - RNA, 19 nt, Artificial Sequence
  Description of Artificial Sequence: Synthetic oligonucleotide
  Antisense strand to SEQ ID NO: 1649377
ugcucuaagcugauaacug

SEQ ID NO: 1649379 - RNA, 19 nt, Artificial Sequence
  Description of Artificial Sequence: Synthetic oligonucleotide
  Sense strand starting at position 551 of SEQ ID NO: 1561136
gccucaggguucuaaguca

SEQ ID NO: 1649380 - RNA, 19 nt, Artificial Sequence
  Description of Artificial Sequence: Synthetic oligonucleotide
  Antisense strand to SEQ ID NO: 1649379
ugacuuagaacccugaggc

SEQ ID NO: 1649381 - RNA, 19 nt, Artificial Sequence
  Description of Artificial Sequence: Synthetic oligonucleotide
  Sense strand starting at position 621 of SEQ ID NO: 1561136
ucucaauaaccguggcaug

SEQ ID NO: 1649382 - RNA, 19 nt, Artificial Sequence
  Description of Artificial Sequence: Synthetic oligonucleotide
  Antisense strand to SEQ ID NO: 1649381
caugccacgguuauugaga

SEQ ID NO: 1649383 - RNA, 19 nt, Artificial Sequence
  Description of Artificial Sequence: Synthetic oligonucleotide
  Sense strand starting at position 691 of SEQ ID NO: 1561136
aguauccuccugugaaaug

SEQ ID NO: 1649384 - RNA, 19 nt, Artificial Sequence
  Description of Artificial Sequence: Synthetic oligonucleotide
  Antisense strand to SEQ ID NO: 1649383
cauuucacaggaggauacu

SEQ ID NO: 1649385 - RNA, 19 nt, Artificial Sequence
  Description of Artificial Sequence: Synthetic oligonucleotide
  Sense strand starting at position 779 of SEQ ID NO: 1561136
gcacuacgugcucaggagu

SEQ ID NO: 1649386 - RNA, 19 nt, Artificial Sequence
  Description of Artificial Sequence: Synthetic oligonucleotide
  Antisense strand to SEQ ID NO: 1649385
acuccugagcacguagugc

SEQ ID NO: 1649387 - RNA, 19 nt, Artificial Sequence
  Description of Artificial Sequence: Synthetic oligonucleotide
  Sense strand starting at position 933 of SEQ ID NO: 1561136
cgcucaaugcuuugggacu

SEQ ID NO: 1649388 - RNA, 19 nt, Artificial Sequence
  Description of Artificial Sequence: Synthetic oligonucleotide
  Antisense strand to SEQ ID NO: 1649387
agucccaaagcauugagcg

SEQ ID NO: 1649389 - RNA, 19 nt, Artificial Sequence
  Description of Artificial Sequence: Synthetic oligonucleotide
  Sense strand starting at position 1001 of SEQ ID NO: 1561136
guguguuuguguuugggca

SEQ ID NO: 1649390 - RNA, 19 nt, Artificial Sequence
  Description of Artificial Sequence: Synthetic oligonucleotide
  Antisense strand to SEQ ID NO: 1649389
ugcccaaacacaaacacac

SEQ ID NO: 1649391 - RNA, 19 nt, Artificial Sequence
  Description of Artificial Sequence: Synthetic oligonucleotide
  Sense strand starting at position 1033 of SEQ ID NO: 1561136
ucccuucccugggaacauu

SEQ ID NO: 1649392 - RNA, 19 nt, Artificial Sequence
  Description of Artificial Sequence: Synthetic oligonucleotide
  Antisense strand to SEQ ID NO: 1649391
aauguucccagggaaggga

SEQ ID NO: 1649393 - RNA, 19 nt, Artificial Sequence
  Description of Artificial Sequence: Synthetic oligonucleotide
  Sense strand starting at position 1149 of SEQ ID NO: 1561136
gcagcuguuucucuaaggu

SEQ ID NO: 1649394 - RNA, 19 nt, Artificial Sequence
  Description of Artificial Sequence: Synthetic oligonucleotide
  Antisense strand to SEQ ID NO: 1649393
accuuagagaaacagcugc

SEQ ID NO: 1649395 - RNA, 19 nt, Artificial Sequence
  Description of Artificial Sequence: Synthetic oligonucleotide
  Sense strand starting at position 1225 of SEQ ID NO: 1561136
gggucucuguuuguagcau

SEQ ID NO: 1649396 - RNA, 19 nt, Artificial Sequence
  Description of Artificial Sequence: Synthetic oligonucleotide
  Antisense strand to SEQ ID NO: 1649395
augcuacaaacagagaccc

SEQ ID NO: 1649397 - RNA, 19 nt, Artificial Sequence
  Description of Artificial Sequence: Synthetic oligonucleotide
  Sense strand starting at position 1356 of SEQ ID NO: 1561136
guugccgucacuguuagua

SEQ ID NO: 1649398 - RNA, 19 nt, Artificial Sequence
  Description of Artificial Sequence: Synthetic oligonucleotide
  Antisense strand to SEQ ID NO: 1649397
uacuaacagugacggcaac

SEQ ID NO: 1649399 - RNA, 19 nt, Artificial Sequence
  Description of Artificial Sequence: Synthetic oligonucleotide
  Sense strand starting at position 2049 of SEQ ID NO: 1561136
agcacauuccgggaaugcu

SEQ ID NO: 1649400 - RNA, 19 nt, Artificial Sequence
  Description of Artificial Sequence: Synthetic oligonucleotide
  Antisense strand to SEQ ID NO: 1649399
agcauucccggaaugugcu

SEQ ID NO: 1649401 - RNA, 19 nt, Artificial Sequence
  Description of Artificial Sequence: Synthetic oligonucleotide
  Sense strand starting at position 2057 of SEQ ID NO: 1561136
ccgggaaugcuuggcccaa

SEQ ID NO: 1649402 - RNA, 19 nt, Artificial Sequence
  Description of Artificial Sequence: Synthetic oligonucleotide
  Antisense strand to SEQ ID NO: 1649401
uugggccaagcauucccgg

SEQ ID NO: 1649403 - RNA, 19 nt, Artificial Sequence
  Description of Artificial Sequence: Synthetic oligonucleotide
  Sense strand starting at position 2058 of SEQ ID NO: 1561136
cgggaaugcuuggcccaaa

SEQ ID NO: 1649404 - RNA, 19 nt, Artificial Sequence
  Description of Artificial Sequence: Synthetic oligonucleotide
  Antisense strand to SEQ ID NO: 1649403
uuugggccaagcauucccg

SEQ ID NO: 1649405 - RNA, 19 nt, Artificial Sequence
  Description of Artificial Sequence: Synthetic oligonucleotide
  Sense strand starting at position 2281 of SEQ ID NO: 1561136
ccaggaaguucucuugggu

SEQ ID NO: 1649406 - RNA, 19 nt, Artificial Sequence
  Description of Artificial Sequence: Synthetic oligonucleotide
  Antisense strand to SEQ ID NO: 1649405
acccaagagaacuuccugg

SEQ ID NO: 1649407 - RNA, 19 nt, Artificial Sequence
  Description of Artificial Sequence: Synthetic oligonucleotide
  Sense strand starting at position 2294 of SEQ ID NO: 1561136
uugggucugucuccaaauc

SEQ ID NO: 1649408 - RNA, 19 nt, Artificial Sequence
  Description of Artificial Sequence: Synthetic oligonucleotide
  Antisense strand to SEQ ID NO: 1649407
gauuuggagacagacccaa

SEQ ID NO: 1649409 - RNA, 19 nt, Artificial Sequence
  Description of Artificial Sequence: Synthetic oligonucleotide
  Sense strand starting at position 2486 of SEQ ID NO: 1561136
acuacugcuguuugacaaa

SEQ ID NO: 1649410 - RNA, 19 nt, Artificial Sequence
  Description of Artificial Sequence: Synthetic oligonucleotide
  Antisense strand to SEQ ID NO: 1649409
uuugucaaacagcaguagu

SEQ ID NO: 1649411 - RNA, 19 nt, Artificial Sequence
  Description of Artificial Sequence: Synthetic oligonucleotide
  Sense strand starting at position 2528 of SEQ ID NO: 1561136
aaacaaccaugucgugauu

SEQ ID NO: 1649412 - RNA, 19 nt, Artificial Sequence
  Description of Artificial Sequence: Synthetic oligonucleotide
  Antisense strand to SEQ ID NO: 1649411
aaucacgacaugguuguuu

SEQ ID NO: 1649413 - RNA, 19 nt, Artificial Sequence
  Description of Artificial Sequence: Synthetic oligonucleotide
  Sense strand starting at position 2534 of SEQ ID NO: 1561136
ccaugucgugauugugaaa

SEQ ID NO: 1649414 - RNA, 19 nt, Artificial Sequence
  Description of Artificial Sequence: Synthetic oligonucleotide
  Antisense strand to SEQ ID NO: 1649413
uuucacaaucacgacaugg

SEQ ID NO: 1649415 - RNA, 19 nt, Artificial Sequence
  Description of Artificial Sequence: Synthetic oligonucleotide
  Sense strand starting at position 2537 of SEQ ID NO: 1561136
ugucgugauugugaaagga

SEQ ID NO: 1649416 - RNA, 19 nt, Artificial Sequence
  Description of Artificial Sequence: Synthetic oligonucleotide
  Antisense strand to SEQ ID NO: 1649415
uccuuucacaaucacgaca

SEQ ID NO: 1649417 - RNA, 19 nt, Artificial Sequence
  Description of Artificial Sequence: Synthetic oligonucleotide
  Sense strand starting at position 2598 of SEQ ID NO: 1561136
aagucaaacugguaacugu

SEQ ID NO: 1649418 - RNA, 19 nt, Artificial Sequence
  Description of Artificial Sequence: Synthetic oligonucleotide
  Antisense strand to SEQ ID NO: 1649417
acaguuaccaguuugacuu

SEQ ID NO: 1649419 - RNA, 19 nt, Artificial Sequence
  Description of Artificial Sequence: Synthetic oligonucleotide
  Sense strand starting at position 2606 of SEQ ID NO: 1561136
cugguaacuguguaggaca

SEQ ID NO: 1649420 - RNA, 19 nt, Artificial Sequence
  Description of Artificial Sequence: Synthetic oligonucleotide
  Antisense strand to SEQ ID NO: 1649419
uguccuacacaguuaccag

SEQ ID NO: 1649421 - RNA, 19 nt, Artificial Sequence
  Description of Artificial Sequence: Synthetic oligonucleotide
  Sense strand starting at position 2608 of SEQ ID NO: 1561136
gguaacuguguaggacaaa

SEQ ID NO: 1649422 - RNA, 19 nt, Artificial Sequence
  Description of Artificial Sequence: Synthetic oligonucleotide
  Antisense strand to SEQ ID NO: 1649421
uuuguccuacacaguuacc

SEQ ID NO: 1649423 - RNA, 19 nt, Artificial Sequence
  Description of Artificial Sequence: Synthetic oligonucleotide
  Sense strand starting at position 2650 of SEQ ID NO: 1561136
guaagauagcuacaagguu

SEQ ID NO: 1649424 - RNA, 19 nt, Artificial Sequence
  Description of Artificial Sequence: Synthetic oligonucleotide
  Antisense strand to SEQ ID NO: 1649423
aaccuuguagcuaucuuac

SEQ ID NO: 1649425 - RNA, 19 nt, Artificial Sequence
  Description of Artificial Sequence: Synthetic oligonucleotide
  Sense strand starting at position 2833 of SEQ ID NO: 1561136
gugggugggcacugguaau

SEQ ID NO: 1649426 - RNA, 19 nt, Artificial Sequence
  Description of Artificial Sequence: Synthetic oligonucleotide
  Antisense strand to SEQ ID NO: 1649425
auuaccagugcccacccac

SEQ ID NO: 1649427 - RNA, 19 nt, Artificial Sequence
  Description of Artificial Sequence: Synthetic oligonucleotide
  Sense strand starting at position 3146 of SEQ ID NO: 1561136
ggcauaagugacuaucucu

SEQ ID NO: 1649428 - RNA, 19 nt, Artificial Sequence
  Description of Artificial Sequence: Synthetic oligonucleotide
  Antisense strand to SEQ ID NO: 1649427
agagauagucacuuaugcc

SEQ ID NO: 1649429 - RNA, 19 nt, Artificial Sequence
  Description of Artificial Sequence: Synthetic oligonucleotide
  Sense strand starting at position 3149 of SEQ ID NO: 1561136
auaagugacuaucucugua

SEQ ID NO: 1649430 - RNA, 19 nt, Artificial Sequence
  Description of Artificial Sequence: Synthetic oligonucleotide
  Antisense strand to SEQ ID NO: 1649429
uacagagauagucacuuau

SEQ ID NO: 1649431 - RNA, 19 nt, Artificial Sequence
  Description of Artificial Sequence: Synthetic oligonucleotide
  Sense strand starting at position 3152 of SEQ ID NO: 1561136
agugacuaucucuguaaau

SEQ ID NO: 1649432 - RNA, 19 nt, Artificial Sequence
  Description of Artificial Sequence: Synthetic oligonucleotide
  Antisense strand to SEQ ID NO: 1649431
auuuacagagauagucacu

SEQ ID NO: 1649433 - RNA, 19 nt, Artificial Sequence
  Description of Artificial Sequence: Synthetic oligonucleotide
  Sense strand starting at position 3153 of SEQ ID NO: 1561136
gugacuaucucuguaaauu

SEQ ID NO: 1649434 - RNA, 19 nt, Artificial Sequence
  Description of Artificial Sequence: Synthetic oligonucleotide
  Antisense strand to SEQ ID NO: 1649433
aauuuacagagauagucac

SEQ ID NO: 1649435 - RNA, 19 nt, Artificial Sequence
  Description of Artificial Sequence: Synthetic oligonucleotide
  Sense strand starting at position 3154 of SEQ ID NO: 1561136
ugacuaucucuguaaauug

SEQ ID NO: 1649436 - RNA, 19 nt, Artificial Sequence
  Description of Artificial Sequence: Synthetic oligonucleotide
  Antisense strand to SEQ ID NO: 1649435
caauuuacagagauaguca

SEQ ID NO: 1649437 - RNA, 19 nt, Artificial Sequence
  Description of Artificial Sequence: Synthetic oligonucleotide
  Sense strand starting at position 3179 of SEQ ID NO: 1561136
cagaaaggcuagucagaaa

SEQ ID NO: 1649438 - RNA, 19 nt, Artificial Sequence
  Description of Artificial Sequence: Synthetic oligonucleotide
  Antisense strand to SEQ ID NO: 1649437
uuucugacuagccuuucug

SEQ ID NO: 1649439 - RNA, 19 nt, Artificial Sequence
  Description of Artificial Sequence: Synthetic oligonucleotide
  Sense strand starting at position 3289 of SEQ ID NO: 1561136
ccaugugcaucuuacauau

SEQ ID NO: 1649440 - RNA, 19 nt, Artificial Sequence
  Description of Artificial Sequence: Synthetic oligonucleotide
  Antisense strand to SEQ ID NO: 1649439
auauguaagaugcacaugg

SEQ ID NO: 1649441 - RNA, 19 nt, Artificial Sequence
  Description of Artificial Sequence: Synthetic oligonucleotide
  Sense strand starting at position 3939 of SEQ ID NO: 1561136
cccugacuacccuaguuua

SEQ ID NO: 1649442 - RNA, 19 nt, Artificial Sequence
  Description of Artificial Sequence: Synthetic oligonucleotide
  Antisense strand to SEQ ID NO: 1649441
uaaacuaggguagucaggg

SEQ ID NO: 1649443 - RNA, 19 nt, Artificial Sequence
  Description of Artificial Sequence: Synthetic oligonucleotide
  Sense strand starting at position 3951 of SEQ ID NO: 1561136
uaguuuauguugucaggag

SEQ ID NO: 1649444 - RNA, 19 nt, Artificial Sequence
  Description of Artificial Sequence: Synthetic oligonucleotide
  Antisense strand to SEQ ID NO: 1649443
cuccugacaacauaaacua

SEQ ID NO: 1649445 - RNA, 19 nt, Artificial Sequence
  Description of Artificial Sequence: Synthetic oligonucleotide
  Sense strand starting at position 3970 of SEQ ID NO: 1561136
cuucuaagucugugucaca

SEQ ID NO: 1649446 - RNA, 19 nt, Artificial Sequence
  Description of Artificial Sequence: Synthetic oligonucleotide
  Antisense strand to SEQ ID NO: 1649445
ugugacacagacuuagaag

SEQ ID NO: 1649447 - RNA, 19 nt, Artificial Sequence
  Description of Artificial Sequence: Synthetic oligonucleotide
  Sense strand starting at position 824 of SEQ ID NO: 1561137
gccacuauaucaguguaua

SEQ ID NO: 1649448 - RNA, 19 nt, Artificial Sequence
  Description of Artificial Sequence: Synthetic oligonucleotide
  Antisense strand to SEQ ID NO: 1649447
uauacacugauauaguggc

SEQ ID NO: 1649449 - RNA, 19 nt, Artificial Sequence
  Description of Artificial Sequence: Synthetic oligonucleotide
  Sense strand starting at position 825 of SEQ ID NO: 1561137
ccacuauaucaguguauag

SEQ ID NO: 1649450 - RNA, 19 nt, Artificial Sequence
  Description of Artificial Sequence: Synthetic oligonucleotide
  Antisense strand to SEQ ID NO: 1649449
cuauacacugauauagugg

SEQ ID NO: 1649451 - RNA, 19 nt, Artificial Sequence
  Description of Artificial Sequence: Synthetic oligonucleotide
  Sense strand starting at position 948 of SEQ ID NO: 1561137
gaacauuugggaugcgugu

SEQ ID NO: 1649452 - RNA, 19 nt, Artificial Sequence
  Description of Artificial Sequence: Synthetic oligonucleotide
  Antisense strand to SEQ ID NO: 1649451
acacgcaucccaaauguuc

SEQ ID NO: 1649453 - RNA, 19 nt, Artificial Sequence
  Description of Artificial Sequence: Synthetic oligonucleotide
  Sense strand starting at position 1009 of SEQ ID NO: 1561137
ucucgauguacucguuaag

SEQ ID NO: 1649454 - RNA, 19 nt, Artificial Sequence
  Description of Artificial Sequence: Synthetic oligonucleotide
  Antisense strand to SEQ ID NO: 1649453
cuuaacgaguacaucgaga

SEQ ID NO: 1649455 - RNA, 19 nt, Artificial Sequence
  Description of Artificial Sequence: Synthetic oligonucleotide
  Sense strand starting at position 1012 of SEQ ID NO: 1561137
cgauguacucguuaagaag

SEQ ID NO: 1649456 - RNA, 19 nt, Artificial Sequence
  Description of Artificial Sequence: Synthetic oligonucleotide
  Antisense strand to SEQ ID NO: 1649455
cuucuuaacgaguacaucg

SEQ ID NO: 1649457 - RNA, 19 nt, Artificial Sequence
  Description of Artificial Sequence: Synthetic oligonucleotide
  Sense strand starting at position 1053 of SEQ ID NO: 1561137
cuaggaaucugaugacuac

SEQ ID NO: 1649458 - RNA, 19 nt, Artificial Sequence
  Description of Artificial Sequence: Synthetic oligonucleotide
  Antisense strand to SEQ ID NO: 1649457
guagucaucagauuccuag

SEQ ID NO: 1649459 - RNA, 19 nt, Artificial Sequence
  Description of Artificial Sequence: Synthetic oligonucleotide
  Sense strand starting at position 1129 of SEQ ID NO: 1561137
gggcgucuccggcgugauu

SEQ ID NO: 1649460 - RNA, 19 nt, Artificial Sequence
  Description of Artificial Sequence: Synthetic oligonucleotide
  Antisense strand to SEQ ID NO: 1649459
aaucacgccggagacgccc

SEQ ID NO: 1649461 - RNA, 19 nt, Artificial Sequence
  Description of Artificial Sequence: Synthetic oligonucleotide
  Sense strand starting at position 1238 of SEQ ID NO: 1561137
cagauaagagucggauaac

SEQ ID NO: 1649462 - RNA, 19 nt, Artificial Sequence
  Description of Artificial Sequence: Synthetic oligonucleotide
  Antisense strand to SEQ ID NO: 1649461
guuauccgacucuuaucug

SEQ ID NO: 1649463 - RNA, 19 nt, Artificial Sequence
  Description of Artificial Sequence: Synthetic oligonucleotide
  Sense strand starting at position 1239 of SEQ ID NO: 1561137
agauaagagucggauaaca

SEQ ID NO: 1649464 - RNA, 19 nt, Artificial Sequence
  Description of Artificial Sequence: Synthetic oligonucleotide
  Antisense strand to SEQ ID NO: 1649463
uguuauccgacucuuaucu

SEQ ID NO: 1649465 - RNA, 19 nt, Artificial Sequence
  Description of Artificial Sequence: Synthetic oligonucleotide
  Sense strand starting at position 1244 of SEQ ID NO: 1561137
agagucggauaacaaauua

SEQ ID NO: 1649466 - RNA, 19 nt, Artificial Sequence
  Description of Artificial Sequence: Synthetic oligonucleotide
  Antisense strand to SEQ ID NO: 1649465
uaauuuguuauccgacucu

SEQ ID NO: 1649467 - RNA, 19 nt, Artificial Sequence
  Description of Artificial Sequence: Synthetic oligonucleotide
  Sense strand starting at position 1591 of SEQ ID NO: 1561137
gaacuuugccucgagggca

SEQ ID NO: 1649468 - RNA, 19 nt, Artificial Sequence
  Description of Artificial Sequence: Synthetic oligonucleotide
  Antisense strand to SEQ ID NO: 1649467
ugcccucgaggcaaaguuc

SEQ ID NO: 1649469 - RNA, 19 nt, Artificial Sequence
  Description of Artificial Sequence: Synthetic oligonucleotide
  Sense strand starting at position 1620 of SEQ ID NO: 1561137
aaggaaggguccugagcaa

SEQ ID NO: 1649470 - RNA, 19 nt, Artificial Sequence
  Description of Artificial Sequence: Synthetic oligonucleotide
  Antisense strand to SEQ ID NO: 1649469
uugcucaggacccuuccuu

SEQ ID NO: 1649471 - RNA, 19 nt, Artificial Sequence
  Description of Artificial Sequence: Synthetic oligonucleotide
  Sense strand starting at position 1643 of SEQ ID NO: 1561137
agaaacaugggucgcgaaa

SEQ ID NO: 1649472 - RNA, 19 nt, Artificial Sequence
  Description of Artificial Sequence: Synthetic oligonucleotide
  Antisense strand to SEQ ID NO: 1649471
uuucgcgacccauguuucu

SEQ ID NO: 1649473 - RNA, 19 nt, Artificial Sequence
  Description of Artificial Sequence: Synthetic oligonucleotide
  Sense strand starting at position 2016 of SEQ ID NO: 1561137
uaggccuucugggaaaugu

SEQ ID NO: 1649474 - RNA, 19 nt, Artificial Sequence
  Description of Artificial Sequence: Synthetic oligonucleotide
  Antisense strand to SEQ ID NO: 1649473
acauuucccagaaggccua

SEQ ID NO: 1649475 - RNA, 19 nt, Artificial Sequence
  Description of Artificial Sequence: Synthetic oligonucleotide
  Sense strand starting at position 2066 of SEQ ID NO: 1561137
gcuagagcauucugggaaa

SEQ ID NO: 1649476 - RNA, 19 nt, Artificial Sequence
  Description of Artificial Sequence: Synthetic oligonucleotide
  Antisense strand to SEQ ID NO: 1649475
uuucccagaaugcucuagc

SEQ ID NO: 1649477 - RNA, 19 nt, Artificial Sequence
  Description of Artificial Sequence: Synthetic oligonucleotide
  Sense strand starting at position 2068 of SEQ ID NO: 1561137
uagagcauucugggaaaug

SEQ ID NO: 1649478 - RNA, 19 nt, Artificial Sequence
  Description of Artificial Sequence: Synthetic oligonucleotide
  Antisense strand to SEQ ID NO: 1649477
cauuucccagaaugcucua

SEQ ID NO: 1649479 - RNA, 19 nt, Artificial Sequence
  Description of Artificial Sequence: Synthetic oligonucleotide
  Sense strand starting at position 2085 of SEQ ID NO: 1561137
uggaguucucaguggugcu

SEQ ID NO: 1649480 - RNA, 19 nt, Artificial Sequence
  Description of Artificial Sequence: Synthetic oligonucleotide
  Antisense strand to SEQ ID NO: 1649479
agcaccacugagaacucca

SEQ ID NO: 1649481 - RNA, 19 nt, Artificial Sequence
  Description of Artificial Sequence: Synthetic oligonucleotide
  Sense strand starting at position 2221 of SEQ ID NO: 1561137
ccuccaucuuuguucuuga

SEQ ID NO: 1649482 - RNA, 19 nt, Artificial Sequence
  Description of Artificial Sequence: Synthetic oligonucleotide
  Antisense strand to SEQ ID NO: 1649481
ucaagaacaaagauggagg

SEQ ID NO: 1649483 - RNA, 19 nt, Artificial Sequence
  Description of Artificial Sequence: Synthetic oligonucleotide
  Sense strand starting at position 2437 of SEQ ID NO: 1561137
cgccuagcuaguuguugua

SEQ ID NO: 1649484 - RNA, 19 nt, Artificial Sequence
  Description of Artificial Sequence: Synthetic oligonucleotide
  Antisense strand to SEQ ID NO: 1649483
uacaacaacuagcuaggcg

SEQ ID NO: 1649485 - RNA, 19 nt, Artificial Sequence
  Description of Artificial Sequence: Synthetic oligonucleotide
  Sense strand starting at position 2439 of SEQ ID NO: 1561137
ccuagcuaguuguuguauu

SEQ ID NO: 1649486 - RNA, 19 nt, Artificial Sequence
  Description of Artificial Sequence: Synthetic oligonucleotide
  Antisense strand to SEQ ID NO: 1649485
aauacaacaacuagcuagg

SEQ ID NO: 1649487 - RNA, 19 nt, Artificial Sequence
  Description of Artificial Sequence: Synthetic oligonucleotide
  Sense strand starting at position 2440 of SEQ ID NO: 1561137
cuagcuaguuguuguauuu

SEQ ID NO: 1649488 - RNA, 19 nt, Artificial Sequence
  Description of Artificial Sequence: Synthetic oligonucleotide
  Antisense strand to SEQ ID NO: 1649487
aaauacaacaacuagcuag

SEQ ID NO: 1649489 - RNA, 19 nt, Artificial Sequence
  Description of Artificial Sequence: Synthetic oligonucleotide
  Sense strand starting at position 2591 of SEQ ID NO: 1561137
agcauuucuagccgucgga

SEQ ID NO: 1649490 - RNA, 19 nt, Artificial Sequence
  Description of Artificial Sequence: Synthetic oligonucleotide
  Antisense strand to SEQ ID NO: 1649489
uccgacggcuagaaaugcu

SEQ ID NO: 1649491 - RNA, 19 nt, Artificial Sequence
  Description of Artificial Sequence: Synthetic oligonucleotide
  Sense strand starting at position 2616 of SEQ ID NO: 1561137
agucuuccugucuguccaa

SEQ ID NO: 1649492 - RNA, 19 nt, Artificial Sequence
  Description of Artificial Sequence: Synthetic oligonucleotide
  Antisense strand to SEQ ID NO: 1649491
uuggacagacaggaagacu

SEQ ID NO: 1649493 - RNA, 19 nt, Artificial Sequence
  Description of Artificial Sequence: Synthetic oligonucleotide
  Sense strand starting at position 2663 of SEQ ID NO: 1561137
ggguccuuguagucgcaua

SEQ ID NO: 1649494 - RNA, 19 nt, Artificial Sequence
  Description of Artificial Sequence: Synthetic oligonucleotide
  Antisense strand to SEQ ID NO: 1649493
uaugcgacuacaaggaccc

SEQ ID NO: 1649495 - RNA, 19 nt, Artificial Sequence
  Description of Artificial Sequence: Synthetic oligonucleotide
  Sense strand starting at position 2683 of SEQ ID NO: 1561137
uggcccuagcguucugauu

SEQ ID NO: 1649496 - RNA, 19 nt, Artificial Sequence
  Description of Artificial Sequence: Synthetic oligonucleotide
  Antisense strand to SEQ ID NO: 1649495
aaucagaacgcuagggcca

SEQ ID NO: 1649497 - RNA, 19 nt, Artificial Sequence
  Description of Artificial Sequence: Synthetic oligonucleotide
  Sense strand starting at position 2742 of SEQ ID NO: 1561137
cguccucuccugccgagau

SEQ ID NO: 1649498 - RNA, 19 nt, Artificial Sequence
  Description of Artificial Sequence: Synthetic oligonucleotide
  Antisense strand to SEQ ID NO: 1649497
aucucggcaggagaggacg

SEQ ID NO: 1649499 - RNA, 19 nt, Artificial Sequence
  Description of Artificial Sequence: Synthetic oligonucleotide
  Sense strand starting at position 2777 of SEQ ID NO: 1561137
guagaaaggcuccagaguu

SEQ ID NO: 1649500 - RNA, 19 nt, Artificial Sequence
  Description of Artificial Sequence: Synthetic oligonucleotide
  Antisense strand to SEQ ID NO: 1649499
aacucuggagccuuucuac

SEQ ID NO: 1649501 - RNA, 19 nt, Artificial Sequence
  Description of Artificial Sequence: Synthetic oligonucleotide
  Sense strand starting at position 2900 of SEQ ID NO: 1561137
aggucugucuccuggcgau

SEQ ID NO: 1649502 - RNA, 19 nt, Artificial Sequence
  Description of Artificial Sequence: Synthetic oligonucleotide
  Antisense strand to SEQ ID NO: 1649501
aucgccaggagacagaccu

SEQ ID NO: 1649503 - RNA, 19 nt, Artificial Sequence
  Description of Artificial Sequence: Synthetic oligonucleotide
  Sense strand starting at position 3486 of SEQ ID NO: 1561137
cgggucacaccuuaaacuu

SEQ ID NO: 1649504 - RNA, 19 nt, Artificial Sequence
  Description of Artificial Sequence: Synthetic oligonucleotide
  Antisense strand to SEQ ID NO: 1649503
aaguuuaaggugugacccg

SEQ ID NO: 1649505 - RNA, 19 nt, Artificial Sequence
  Description of Artificial Sequence: Synthetic oligonucleotide
  Sense strand starting at position 3564 of SEQ ID NO: 1561137
gaaucagaguuccagggua

SEQ ID NO: 1649506 - RNA, 19 nt, Artificial Sequence
  Description of Artificial Sequence: Synthetic oligonucleotide
  Antisense strand to SEQ ID NO: 1649505
uacccuggaacucugauuc

SEQ ID NO: 1649507 - RNA, 19 nt, Artificial Sequence
  Description of Artificial Sequence: Synthetic oligonucleotide
  Sense strand starting at position 3598 of SEQ ID NO: 1561137
gguuucaggaugugagguu

SEQ ID NO: 1649508 - RNA, 19 nt, Artificial Sequence
  Description of Artificial Sequence: Synthetic oligonucleotide
  Antisense strand to SEQ ID NO: 1649507
aaccucacauccugaaacc

SEQ ID NO: 1649509 - RNA, 19 nt, Artificial Sequence
  Description of Artificial Sequence: Synthetic oligonucleotide
  Sense strand starting at position 3605 of SEQ ID NO: 1561137
ggaugugagguucaaaguu

SEQ ID NO: 1649510 - RNA, 19 nt, Artificial Sequence
  Description of Artificial Sequence: Synthetic oligonucleotide
  Antisense strand to SEQ ID NO: 1649509
aacuuugaaccucacaucc

SEQ ID NO: 1649511 - RNA, 19 nt, Artificial Sequence
  Description of Artificial Sequence: Synthetic oligonucleotide
  Sense strand starting at position 3694 of SEQ ID NO: 1561137
gccagcacacaguguuaaa

SEQ ID NO: 1649512 - RNA, 19 nt, Artificial Sequence
  Description of Artificial Sequence: Synthetic oligonucleotide
  Antisense strand to SEQ ID NO: 1649511
uuuaacacugugugcuggc

SEQ ID NO: 1649513 - RNA, 19 nt, Artificial Sequence
  Description of Artificial Sequence: Synthetic oligonucleotide
  Sense strand starting at position 3697 of SEQ ID NO: 1561137
agcacacaguguuaaagaa

SEQ ID NO: 1649514 - RNA, 19 nt, Artificial Sequence
  Description of Artificial Sequence: Synthetic oligonucleotide
  Antisense strand to SEQ ID NO: 1649513
uucuuuaacacugugugcu

SEQ ID NO: 1649515 - RNA, 19 nt, Artificial Sequence
  Description of Artificial Sequence: Synthetic oligonucleotide
  Sense strand starting at position 3730 of SEQ ID NO: 1561137
uaaggaucagcugguaauc

SEQ ID NO: 1649516 - RNA, 19 nt, Artificial Sequence
  Description of Artificial Sequence: Synthetic oligonucleotide
  Antisense strand to SEQ ID NO: 1649515
gauuaccagcugauccuua

SEQ ID NO: 1649517 - RNA, 19 nt, Artificial Sequence
  Description of Artificial Sequence: Synthetic oligonucleotide
  Sense strand starting at position 3732 of SEQ ID NO: 1561137
aggaucagcugguaaucua

SEQ ID NO: 1649518 - RNA, 19 nt, Artificial Sequence
  Description of Artificial Sequence: Synthetic oligonucleotide
  Antisense strand to SEQ ID NO: 1649517
uagauuaccagcugauccu

SEQ ID NO: 1649519 - RNA, 19 nt, Artificial Sequence
  Description of Artificial Sequence: Synthetic oligonucleotide
  Sense strand starting at position 3830 of SEQ ID NO: 1561137
ugaaauaacagguggcuua

SEQ ID NO: 1649520 - RNA, 19 nt, Artificial Sequence
  Description of Artificial Sequence: Synthetic oligonucleotide
  Antisense strand to SEQ ID NO: 1649519
uaagccaccuguuauuuca

SEQ ID NO: 1649521 - RNA, 19 nt, Artificial Sequence
  Description of Artificial Sequence: Synthetic oligonucleotide
  Sense strand starting at position 3841 of SEQ ID NO: 1561137
guggcuuagaguugggcau

SEQ ID NO: 1649522 - RNA, 19 nt, Artificial Sequence
  Description of Artificial Sequence: Synthetic oligonucleotide
  Antisense strand to SEQ ID NO: 1649521
augcccaacucuaagccac

SEQ ID NO: 1649523 - RNA, 19 nt, Artificial Sequence
  Description of Artificial Sequence: Synthetic oligonucleotide
  Sense strand starting at position 3871 of SEQ ID NO: 1561137
agauguagccaucagcauu

SEQ ID NO: 1649524 - RNA, 19 nt, Artificial Sequence
  Description of Artificial Sequence: Synthetic oligonucleotide
  Antisense strand to SEQ ID NO: 1649523
aaugcugauggcuacaucu

SEQ ID NO: 1649525 - RNA, 19 nt, Artificial Sequence
  Description of Artificial Sequence: Synthetic oligonucleotide
  Sense strand starting at position 3955 of SEQ ID NO: 1561137
gucggaagauggagaguuu

SEQ ID NO: 1649526 - RNA, 19 nt, Artificial Sequence
  Description of Artificial Sequence: Synthetic oligonucleotide
  Antisense strand to SEQ ID NO: 1649525
aaacucuccaucuuccgac

SEQ ID NO: 1649527 - RNA, 19 nt, Artificial Sequence
  Description of Artificial Sequence: Synthetic oligonucleotide
  Sense strand starting at position 28 of SEQ ID NO: 1561138
gauggagucucgguaagcu

SEQ ID NO: 1649528 - RNA, 19 nt, Artificial Sequence
  Description of Artificial Sequence: Synthetic oligonucleotide
  Antisense strand to SEQ ID NO: 1649527
agcuuaccgagacuccauc

SEQ ID NO: 1649529 - RNA, 19 nt, Artificial Sequence
  Description of Artificial Sequence: Synthetic oligonucleotide
  Sense strand starting at position 474 of SEQ ID NO: 1561138
guaccuccaggccagaaau

SEQ ID NO: 1649530 - RNA, 19 nt, Artificial Sequence
  Description of Artificial Sequence: Synthetic oligonucleotide
  Antisense strand to SEQ ID NO: 1649529
auuucuggccuggagguac

SEQ ID NO: 1649531 - RNA, 19 nt, Artificial Sequence
  Description of Artificial Sequence: Synthetic oligonucleotide
  Sense strand starting at position 574 of SEQ ID NO: 1561138
ucuguaagcuucuggaaac

SEQ ID NO: 1649532 - RNA, 19 nt, Artificial Sequence
  Description of Artificial Sequence: Synthetic oligonucleotide
  Antisense strand to SEQ ID NO: 1649531
guuuccagaagcuuacaga

SEQ ID NO: 1649533 - RNA, 19 nt, Artificial Sequence
  Description of Artificial Sequence: Synthetic oligonucleotide
  Sense strand starting at position 575 of SEQ ID NO: 1561138
cuguaagcuucuggaaacu

SEQ ID NO: 1649534 - RNA, 19 nt, Artificial Sequence
  Description of Artificial Sequence: Synthetic oligonucleotide
  Antisense strand to SEQ ID NO: 1649533
aguuuccagaagcuuacag

SEQ ID NO: 1649535 - RNA, 19 nt, Artificial Sequence
  Description of Artificial Sequence: Synthetic oligonucleotide
  Sense strand starting at position 588 of SEQ ID NO: 1561138
gaaacuucucuguggcaca

SEQ ID NO: 1649536 - RNA, 19 nt, Artificial Sequence
  Description of Artificial Sequence: Synthetic oligonucleotide
  Antisense strand to SEQ ID NO: 1649535
ugugccacagagaaguuuc

SEQ ID NO: 1649537 - RNA, 19 nt, Artificial Sequence
  Description of Artificial Sequence: Synthetic oligonucleotide
  Sense strand starting at position 718 of SEQ ID NO: 1561138
ccuggaaacuuggaugugu

SEQ ID NO: 1649538 - RNA, 19 nt, Artificial Sequence
  Description of Artificial Sequence: Synthetic oligonucleotide
  Antisense strand to SEQ ID NO: 1649537
acacauccaaguuuccagg

SEQ ID NO: 1649539 - RNA, 19 nt, Artificial Sequence
  Description of Artificial Sequence: Synthetic oligonucleotide
  Sense strand starting at position 720 of SEQ ID NO: 1561138
uggaaacuuggauguguga

SEQ ID NO: 1649540 - RNA, 19 nt, Artificial Sequence
  Description of Artificial Sequence: Synthetic oligonucleotide
  Antisense strand to SEQ ID NO: 1649539
ucacacauccaaguuucca

SEQ ID NO: 1649541 - RNA, 19 nt, Artificial Sequence
  Description of Artificial Sequence: Synthetic oligonucleotide
  Sense strand starting at position 1284 of SEQ ID NO: 1561138
cccaguuggucagauauug

SEQ ID NO: 1649542 - RNA, 19 nt, Artificial Sequence
  Description of Artificial Sequence: Synthetic oligonucleotide
  Antisense strand to SEQ ID NO: 1649541
caauaucugaccaacuggg

SEQ ID NO: 1649543 - RNA, 19 nt, Artificial Sequence
  Description of Artificial Sequence: Synthetic oligonucleotide
  Sense strand starting at position 1289 of SEQ ID NO: 1561138
uuggucagauauugaaaca

SEQ ID NO: 1649544 - RNA, 19 nt, Artificial Sequence
  Description of Artificial Sequence: Synthetic oligonucleotide
  Antisense strand to SEQ ID NO: 1649543
uguuucaauaucugaccaa

SEQ ID NO: 1649545 - RNA, 19 nt, Artificial Sequence
  Description of Artificial Sequence: Synthetic oligonucleotide
  Sense strand starting at position 1480 of SEQ ID NO: 1561138
ggaagaggguguugaccau

SEQ ID NO: 1649546 - RNA, 19 nt, Artificial Sequence
  Description of Artificial Sequence: Synthetic oligonucleotide
  Antisense strand to SEQ ID NO: 1649545
auggucaacacccucuucc

SEQ ID NO: 1649547 - RNA, 19 nt, Artificial Sequence
  Description of Artificial Sequence: Synthetic oligonucleotide
  Sense strand starting at position 2892 of SEQ ID NO: 1561138
gagcaagugugcucacaau

SEQ ID NO: 1649548 - RNA, 19 nt, Artificial Sequence
  Description of Artificial Sequence: Synthetic oligonucleotide
  Antisense strand to SEQ ID NO: 1649547
auugugagcacacuugcuc

SEQ ID NO: 1649549 - RNA, 19 nt, Artificial Sequence
  Description of Artificial Sequence: Synthetic oligonucleotide
  Sense strand starting at position 2898 of SEQ ID NO: 1561138
gugugcucacaaugaugga

SEQ ID NO: 1649550 - RNA, 19 nt, Artificial Sequence
  Description of Artificial Sequence: Synthetic oligonucleotide
  Antisense strand to SEQ ID NO: 1649549
uccaucauugugagcacac

SEQ ID NO: 1649551 - RNA, 19 nt, Artificial Sequence
  Description of Artificial Sequence: Synthetic oligonucleotide
  Sense strand starting at position 2920 of SEQ ID NO: 1561138
uuuggugguucaggaguga

SEQ ID NO: 1649552 - RNA, 19 nt, Artificial Sequence
  Description of Artificial Sequence: Synthetic oligonucleotide
  Antisense strand to SEQ ID NO: 1649551
ucacuccugaaccaccaaa

SEQ ID NO: 1649553 - RNA, 19 nt, Artificial Sequence
  Description of Artificial Sequence: Synthetic oligonucleotide
  Sense strand starting at position 3008 of SEQ ID NO: 1561138
gcaggaucuagguggcaga

SEQ ID NO: 1649554 - RNA, 19 nt, Artificial Sequence
  Description of Artificial Sequence: Synthetic oligonucleotide
  Antisense strand to SEQ ID NO: 1649553
ucugccaccuagauccugc

SEQ ID NO: 1649555 - RNA, 19 nt, Artificial Sequence
  Description of Artificial Sequence: Synthetic oligonucleotide
  Sense strand starting at position 3326 of SEQ ID NO: 1561138
gggcguuucugugaacacu

SEQ ID NO: 1649556 - RNA, 19 nt, Artificial Sequence
  Description of Artificial Sequence: Synthetic oligonucleotide
  Antisense strand to SEQ ID NO: 1649555
aguguucacagaaacgccc

SEQ ID NO: 1649557 - RNA, 19 nt, Artificial Sequence
  Description of Artificial Sequence: Synthetic oligonucleotide
  Sense strand starting at position 3346 of SEQ ID NO: 1561138
gggugcuagaaaugcauca

SEQ ID NO: 1649558 - RNA, 19 nt, Artificial Sequence
  Description of Artificial Sequence: Synthetic oligonucleotide
  Antisense strand to SEQ ID NO: 1649557
ugaugcauuucuagcaccc

SEQ ID NO: 1649559 - RNA, 19 nt, Artificial Sequence
  Description of Artificial Sequence: Synthetic oligonucleotide
  Sense strand starting at position 3357 of SEQ ID NO: 1561138
augcaucacucagagaaau

SEQ ID NO: 1649560 - RNA, 19 nt, Artificial Sequence
  Description of Artificial Sequence: Synthetic oligonucleotide
  Antisense strand to SEQ ID NO: 1649559
auuucucugagugaugcau

SEQ ID NO: 1649561 - RNA, 19 nt, Artificial Sequence
  Description of Artificial Sequence: Synthetic oligonucleotide
  Sense strand starting at position 3635 of SEQ ID NO: 1561138
guugggugucugggaggaa

SEQ ID NO: 1649562 - RNA, 19 nt, Artificial Sequence
  Description of Artificial Sequence: Synthetic oligonucleotide
  Antisense strand to SEQ ID NO: 1649561
uuccucccagacacccaac

SEQ ID NO: 1649563 - RNA, 19 nt, Artificial Sequence
  Description of Artificial Sequence: Synthetic oligonucleotide
  Sense strand starting at position 3680 of SEQ ID NO: 1561138
ggaagguaucugggagagu

SEQ ID NO: 1649564 - RNA, 19 nt, Artificial Sequence
  Description of Artificial Sequence: Synthetic oligonucleotide
  Antisense strand to SEQ ID NO: 1649563
acucucccagauaccuucc

SEQ ID NO: 1649565 - RNA, 19 nt, Artificial Sequence
  Description of Artificial Sequence: Synthetic oligonucleotide
  Sense strand starting at position 3681 of SEQ ID NO: 1561138
gaagguaucugggagagug

SEQ ID NO: 1649566 - RNA, 19 nt, Artificial Sequence
  Description of Artificial Sequence: Synthetic oligonucleotide
  Antisense strand to SEQ ID NO: 1649565
cacucucccagauaccuuc

SEQ ID NO: 1649567 - RNA, 19 nt, Artificial Sequence
  Description of Artificial Sequence: Synthetic oligonucleotide
  Sense strand starting at position 3727 of SEQ ID NO: 1561138
ccaggucaucuuggaggau

SEQ ID NO: 1649568 - RNA, 19 nt, Artificial Sequence
  Description of Artificial Sequence: Synthetic oligonucleotide
  Antisense strand to SEQ ID NO: 1649567
auccuccaagaugaccugg

SEQ ID NO: 1649569 - RNA, 19 nt, Artificial Sequence
  Description of Artificial Sequence: Synthetic oligonucleotide
  Sense strand starting at position 3740 of SEQ ID NO: 1561138
gaggaugugcgagguugaa

SEQ ID NO: 1649570 - RNA, 19 nt, Artificial Sequence
  Description of Artificial Sequence: Synthetic oligonucleotide
  Antisense strand to SEQ ID NO: 1649569
uucaaccucgcacauccuc

SEQ ID NO: 1649571 - RNA, 19 nt, Artificial Sequence
  Description of Artificial Sequence: Synthetic oligonucleotide
  Sense strand starting at position 3865 of SEQ ID NO: 1561138
ggcugauggugcugacagu

SEQ ID NO: 1649572 - RNA, 19 nt, Artificial Sequence
  Description of Artificial Sequence: Synthetic oligonucleotide
  Antisense strand to SEQ ID NO: 1649571
acugucagcaccaucagcc

SEQ ID NO: 1649573 - RNA, 19 nt, Artificial Sequence
  Description of Artificial Sequence: Synthetic oligonucleotide
  Sense strand starting at position 5 of SEQ ID NO: 1561139
gauggagucucgguaagcu

SEQ ID NO: 1649574 - RNA, 19 nt, Artificial Sequence
  Description of Artificial Sequence: Synthetic oligonucleotide
  Antisense strand to SEQ ID NO: 1649573
agcuuaccgagacuccauc

SEQ ID NO: 1649575 - RNA, 19 nt, Artificial Sequence
  Description of Artificial Sequence: Synthetic oligonucleotide
  Sense strand starting at position 451 of SEQ ID NO: 1561139
guaccuccaggccagaaau

SEQ ID NO: 1649576 - RNA, 19 nt, Artificial Sequence
  Description of Artificial Sequence: Synthetic oligonucleotide
  Antisense strand to SEQ ID NO: 1649575
auuucuggccuggagguac

SEQ ID NO: 1649577 - RNA, 19 nt, Artificial Sequence
  Description of Artificial Sequence: Synthetic oligonucleotide
  Sense strand starting at position 551 of SEQ ID NO: 1561139
ucuguaagcuucuggaaac

SEQ ID NO: 1649578 - RNA, 19 nt, Artificial Sequence
  Description of Artificial Sequence: Synthetic oligonucleotide
  Antisense strand to SEQ ID NO: 1649577
guuuccagaagcuuacaga

SEQ ID NO: 1649579 - RNA, 19 nt, Artificial Sequence
  Description of Artificial Sequence: Synthetic oligonucleotide
  Sense strand starting at position 552 of SEQ ID NO: 1561139
cuguaagcuucuggaaacu

SEQ ID NO: 1649580 - RNA, 19 nt, Artificial Sequence
  Description of Artificial Sequence: Synthetic oligonucleotide
  Antisense strand to SEQ ID NO: 1649579
aguuuccagaagcuuacag

SEQ ID NO: 1649581 - RNA, 19 nt, Artificial Sequence
  Description of Artificial Sequence: Synthetic oligonucleotide
  Sense strand starting at position 565 of SEQ ID NO: 1561139
gaaacuucucuguggcaca

SEQ ID NO: 1649582 - RNA, 19 nt, Artificial Sequence
  Description of Artificial Sequence: Synthetic oligonucleotide
  Antisense strand to SEQ ID NO: 1649581
ugugccacagagaaguuuc

SEQ ID NO: 1649583 - RNA, 19 nt, Artificial Sequence
  Description of Artificial Sequence: Synthetic oligonucleotide
  Sense strand starting at position 695 of SEQ ID NO: 1561139
ccuggaaacuuggaugugu

SEQ ID NO: 1649584 - RNA, 19 nt, Artificial Sequence
  Description of Artificial Sequence: Synthetic oligonucleotide
  Antisense strand to SEQ ID NO: 1649583
acacauccaaguuuccagg

SEQ ID NO: 1649585 - RNA, 19 nt, Artificial Sequence
  Description of Artificial Sequence: Synthetic oligonucleotide
  Sense strand starting at position 697 of SEQ ID NO: 1561139
uggaaacuuggauguguga

SEQ ID NO: 1649586 - RNA, 19 nt, Artificial Sequence
  Description of Artificial Sequence: Synthetic oligonucleotide
  Antisense strand to SEQ ID NO: 1649585
ucacacauccaaguuucca

SEQ ID NO: 1649587 - RNA, 19 nt, Artificial Sequence
  Description of Artificial Sequence: Synthetic oligonucleotide
  Sense strand starting at position 1261 of SEQ ID NO: 1561139
cccaguuggucagauauug

SEQ ID NO: 1649588 - RNA, 19 nt, Artificial Sequence
  Description of Artificial Sequence: Synthetic oligonucleotide
  Antisense strand to SEQ ID NO: 1649587
caauaucugaccaacuggg

SEQ ID NO: 1649589 - RNA, 19 nt, Artificial Sequence
  Description of Artificial Sequence: Synthetic oligonucleotide
  Sense strand starting at position 1266 of SEQ ID NO: 1561139
uuggucagauauugaaaca

SEQ ID NO: 1649590 - RNA, 19 nt, Artificial Sequence
  Description of Artificial Sequence: Synthetic oligonucleotide
  Antisense strand to SEQ ID NO: 1649589
uguuucaauaucugaccaa

SEQ ID NO: 1649591 - RNA, 19 nt, Artificial Sequence
  Description of Artificial Sequence: Synthetic oligonucleotide
  Sense strand starting at position 1457 of SEQ ID NO: 1561139
ggaagaggguguugaccau

SEQ ID NO: 1649592 - RNA, 19 nt, Artificial Sequence
  Description of Artificial Sequence: Synthetic oligonucleotide
  Antisense strand to SEQ ID NO: 1649591
auggucaacacccucuucc

SEQ ID NO: 1649593 - RNA, 19 nt, Artificial Sequence
  Description of Artificial Sequence: Synthetic oligonucleotide
  Sense strand starting at position 2869 of SEQ ID NO: 1561139
gagcaagugugcucacaau

SEQ ID NO: 1649594 - RNA, 19 nt, Artificial Sequence
  Description of Artificial Sequence: Synthetic oligonucleotide
  Antisense strand to SEQ ID NO: 1649593
auugugagcacacuugcuc

SEQ ID NO: 1649595 - RNA, 19 nt, Artificial Sequence
  Description of Artificial Sequence: Synthetic oligonucleotide
  Sense strand starting at position 2875 of SEQ ID NO: 1561139
gugugcucacaaugaugga

SEQ ID NO: 1649596 - RNA, 19 nt, Artificial Sequence
  Description of Artificial Sequence: Synthetic oligonucleotide
  Antisense strand to SEQ ID NO: 1649595
uccaucauugugagcacac

SEQ ID NO: 1649597 - RNA, 19 nt, Artificial Sequence
  Description of Artificial Sequence: Synthetic oligonucleotide
  Sense strand starting at position 2897 of SEQ ID NO: 1561139
uuuggugguucaggaguga

SEQ ID NO: 1649598 - RNA, 19 nt, Artificial Sequence
  Description of Artificial Sequence: Synthetic oligonucleotide
  Antisense strand to SEQ ID NO: 1649597
ucacuccugaaccaccaaa

SEQ ID NO: 1649599 - RNA, 19 nt, Artificial Sequence
  Description of Artificial Sequence: Synthetic oligonucleotide
  Sense strand starting at position 2985 of SEQ ID NO: 1561139
gcaggaucuagguggcaga

SEQ ID NO: 1649600 - RNA, 19 nt, Artificial Sequence
  Description of Artificial Sequence: Synthetic oligonucleotide
  Antisense strand to SEQ ID NO: 1649599
ucugccaccuagauccugc

SEQ ID NO: 1649601 - RNA, 19 nt, Artificial Sequence
  Description of Artificial Sequence: Synthetic oligonucleotide
  Sense strand starting at position 3303 of SEQ ID NO: 1561139
gggcguuucugugaacacu

SEQ ID NO: 1649602 - RNA, 19 nt, Artificial Sequence
  Description of Artificial Sequence: Synthetic oligonucleotide
  Antisense strand to SEQ ID NO: 1649601
aguguucacagaaacgccc

SEQ ID NO: 1649603 - RNA, 19 nt, Artificial Sequence
  Description of Artificial Sequence: Synthetic oligonucleotide
  Sense strand starting at position 3323 of SEQ ID NO: 1561139
gggugcuagaaaugcauca

SEQ ID NO: 1649604 - RNA, 19 nt, Artificial Sequence
  Description of Artificial Sequence: Synthetic oligonucleotide
  Antisense strand to SEQ ID NO: 1649603
ugaugcauuucuagcaccc

SEQ ID NO: 1649605 - RNA, 19 nt, Artificial Sequence
  Description of Artificial Sequence: Synthetic oligonucleotide
  Sense strand starting at position 3334 of SEQ ID NO: 1561139
augcaucacucagagaaau

SEQ ID NO: 1649606 - RNA, 19 nt, Artificial Sequence
  Description of Artificial Sequence: Synthetic oligonucleotide
  Antisense strand to SEQ ID NO: 1649605
auuucucugagugaugcau

SEQ ID NO: 1649607 - RNA, 19 nt, Artificial Sequence
  Description of Artificial Sequence: Synthetic oligonucleotide
  Sense strand starting at position 3612 of SEQ ID NO: 1561139
guugggugucugggaggaa

SEQ ID NO: 1649608 - RNA, 19 nt, Artificial Sequence
  Description of Artificial Sequence: Synthetic oligonucleotide
  Antisense strand to SEQ ID NO: 1649607
uuccucccagacacccaac

SEQ ID NO: 1649609 - RNA, 19 nt, Artificial Sequence
  Description of Artificial Sequence: Synthetic oligonucleotide
  Sense strand starting at position 3657 of SEQ ID NO: 1561139
ggaagguaucugggagagu

SEQ ID NO: 1649610 - RNA, 19 nt, Artificial Sequence
  Description of Artificial Sequence: Synthetic oligonucleotide
  Antisense strand to SEQ ID NO: 1649609
acucucccagauaccuucc

SEQ ID NO: 1649611 - RNA, 19 nt, Artificial Sequence
  Description of Artificial Sequence: Synthetic oligonucleotide
  Sense strand starting at position 3658 of SEQ ID NO: 1561139
gaagguaucugggagagug

SEQ ID NO: 1649612 - RNA, 19 nt, Artificial Sequence
  Description of Artificial Sequence: Synthetic oligonucleotide
  Antisense strand to SEQ ID NO: 1649611
cacucucccagauaccuuc

SEQ ID NO: 1649613 - RNA, 19 nt, Artificial Sequence
  Description of Artificial Sequence: Synthetic oligonucleotide
  Sense strand starting at position 3704 of SEQ ID NO: 1561139
ccaggucaucuuggaggau

SEQ ID NO: 1649614 - RNA, 19 nt, Artificial Sequence
  Description of Artificial Sequence: Synthetic oligonucleotide
  Antisense strand to SEQ ID NO: 1649613
auccuccaagaugaccugg

SEQ ID NO: 1649615 - RNA, 19 nt, Artificial Sequence
  Description of Artificial Sequence: Synthetic oligonucleotide
  Sense strand starting at position 3717 of SEQ ID NO: 1561139
gaggaugugcgagguugaa

SEQ ID NO: 1649616 - RNA, 19 nt, Artificial Sequence
  Description of Artificial Sequence: Synthetic oligonucleotide
  Antisense strand to SEQ ID NO: 1649615
uucaaccucgcacauccuc

SEQ ID NO: 1649617 - RNA, 19 nt, Artificial Sequence
  Description of Artificial Sequence: Synthetic oligonucleotide
  Sense strand starting at position 3842 of SEQ ID NO: 1561139
ggcugauggugcugacagu

SEQ ID NO: 1649618 - RNA, 19 nt, Artificial Sequence
  Description of Artificial Sequence: Synthetic oligonucleotide
  Antisense strand to SEQ ID NO: 1649617
acugucagcaccaucagcc

SEQ ID NO: 1649619 - RNA, 19 nt, Artificial Sequence
  Description of Artificial Sequence: Synthetic oligonucleotide
  Sense strand starting at position 143 of SEQ ID NO: 1561140
augccuggcuaauuaagau

SEQ ID NO: 1649620 - RNA, 19 nt, Artificial Sequence
  Description of Artificial Sequence: Synthetic oligonucleotide
  Antisense strand to SEQ ID NO: 1649619
aucuuaauuagccaggcau

SEQ ID NO: 1649621 - RNA, 19 nt, Artificial Sequence
  Description of Artificial Sequence: Synthetic oligonucleotide
  Sense strand starting at position 206 of SEQ ID NO: 1561140
uuuguuaucucagagaugg

SEQ ID NO: 1649622 - RNA, 19 nt, Artificial Sequence
  Description of Artificial Sequence: Synthetic oligonucleotide
  Antisense strand to SEQ ID NO: 1649621
ccaucucugagauaacaaa

SEQ ID NO: 1649623 - RNA, 19 nt, Artificial Sequence
  Description of Artificial Sequence: Synthetic oligonucleotide
  Sense strand starting at position 244 of SEQ ID NO: 1561140
gagggcuguuccuuacuau

SEQ ID NO: 1649624 - RNA, 19 nt, Artificial Sequence
  Description of Artificial Sequence: Synthetic oligonucleotide
  Antisense strand to SEQ ID NO: 1649623
auaguaaggaacagcccuc

SEQ ID NO: 1649625 - RNA, 19 nt, Artificial Sequence
  Description of Artificial Sequence: Synthetic oligonucleotide
  Sense strand starting at position 248 of SEQ ID NO: 1561140
gcuguuccuuacuaugaga

SEQ ID NO: 1649626 - RNA, 19 nt, Artificial Sequence
  Description of Artificial Sequence: Synthetic oligonucleotide
  Antisense strand to SEQ ID NO: 1649625
ucucauaguaaggaacagc

SEQ ID NO: 1649627 - RNA, 19 nt, Artificial Sequence
  Description of Artificial Sequence: Synthetic oligonucleotide
  Sense strand starting at position 250 of SEQ ID NO: 1561140
uguuccuuacuaugagagu

SEQ ID NO: 1649628 - RNA, 19 nt, Artificial Sequence
  Description of Artificial Sequence: Synthetic oligonucleotide
  Antisense strand to SEQ ID NO: 1649627
acucucauaguaaggaaca

SEQ ID NO: 1649629 - RNA, 19 nt, Artificial Sequence
  Description of Artificial Sequence: Synthetic oligonucleotide
  Sense strand starting at position 267 of SEQ ID NO: 1561140
guccaucagugccucaaua

SEQ ID NO: 1649630 - RNA, 19 nt, Artificial Sequence
  Description of Artificial Sequence: Synthetic oligonucleotide
  Antisense strand to SEQ ID NO: 1649629
uauugaggcacugauggac

SEQ ID NO: 1649631 - RNA, 19 nt, Artificial Sequence
  Description of Artificial Sequence: Synthetic oligonucleotide
  Sense strand starting at position 385 of SEQ ID NO: 1561140
cgcacugugucugggaguu

SEQ ID NO: 1649632 - RNA, 19 nt, Artificial Sequence
  Description of Artificial Sequence: Synthetic oligonucleotide
  Antisense strand to SEQ ID NO: 1649631
aacucccagacacagugcg

SEQ ID NO: 1649633 - RNA, 19 nt, Artificial Sequence
  Description of Artificial Sequence: Synthetic oligonucleotide
  Sense strand starting at position 387 of SEQ ID NO: 1561140
cacugugucugggaguuga

SEQ ID NO: 1649634 - RNA, 19 nt, Artificial Sequence
  Description of Artificial Sequence: Synthetic oligonucleotide
  Antisense strand to SEQ ID NO: 1649633
ucaacucccagacacagug

SEQ ID NO: 1649635 - RNA, 19 nt, Artificial Sequence
  Description of Artificial Sequence: Synthetic oligonucleotide
  Sense strand starting at position 793 of SEQ ID NO: 1561140
ugcugagccucuuaggagu

SEQ ID NO: 1649636 - RNA, 19 nt, Artificial Sequence
  Description of Artificial Sequence: Synthetic oligonucleotide
  Antisense strand to SEQ ID NO: 1649635
acuccuaagaggcucagca

SEQ ID NO: 1649637 - RNA, 19 nt, Artificial Sequence
  Description of Artificial Sequence: Synthetic oligonucleotide
  Sense strand starting at position 885 of SEQ ID NO: 1561140
agggaaugagguugugugu

SEQ ID NO: 1649638 - RNA, 19 nt, Artificial Sequence
  Description of Artificial Sequence: Synthetic oligonucleotide
  Antisense strand to SEQ ID NO: 1649637
acacacaaccucauucccu

SEQ ID NO: 1649639 - RNA, 19 nt, Artificial Sequence
  Description of Artificial Sequence: Synthetic oligonucleotide
  Sense strand starting at position 1283 of SEQ ID NO: 1561140
ggguugagguguggguuaa

SEQ ID NO: 1649640 - RNA, 19 nt, Artificial Sequence
  Description of Artificial Sequence: Synthetic oligonucleotide
  Antisense strand to SEQ ID NO: 1649639
uuaacccacaccucaaccc

SEQ ID NO: 1649641 - RNA, 19 nt, Artificial Sequence
  Description of Artificial Sequence: Synthetic oligonucleotide
  Sense strand starting at position 1542 of SEQ ID NO: 1561140
ggguccuucugugagagga

SEQ ID NO: 1649642 - RNA, 19 nt, Artificial Sequence
  Description of Artificial Sequence: Synthetic oligonucleotide
  Antisense strand to SEQ ID NO: 1649641
uccucucacagaaggaccc

SEQ ID NO: 1649643 - RNA, 19 nt, Artificial Sequence
  Description of Artificial Sequence: Synthetic oligonucleotide
  Sense strand starting at position 1679 of SEQ ID NO: 1561140
ccagguaucucagggcaua

SEQ ID NO: 1649644 - RNA, 19 nt, Artificial Sequence
  Description of Artificial Sequence: Synthetic oligonucleotide
  Antisense strand to SEQ ID NO: 1649643
uaugcccugagauaccugg

SEQ ID NO: 1649645 - RNA, 19 nt, Artificial Sequence
  Description of Artificial Sequence: Synthetic oligonucleotide
  Sense strand starting at position 1680 of SEQ ID NO: 1561140
cagguaucucagggcauau

SEQ ID NO: 1649646 - RNA, 19 nt, Artificial Sequence
  Description of Artificial Sequence: Synthetic oligonucleotide
  Antisense strand to SEQ ID NO: 1649645
auaugcccugagauaccug

SEQ ID NO: 1649647 - RNA, 19 nt, Artificial Sequence
  Description of Artificial Sequence: Synthetic oligonucleotide
  Sense strand starting at position 1850 of SEQ ID NO: 1561140
ugggcuaccuucuuagaau

SEQ ID NO: 1649648 - RNA, 19 nt, Artificial Sequence
  Description of Artificial Sequence: Synthetic oligonucleotide
  Antisense strand to SEQ ID NO: 1649647
auucuaagaagguagccca

SEQ ID NO: 1649649 - RNA, 19 nt, Artificial Sequence
  Description of Artificial Sequence: Synthetic oligonucleotide
  Sense strand starting at position 1851 of SEQ ID NO: 1561140
gggcuaccuucuuagaauc

SEQ ID NO: 1649650 - RNA, 19 nt, Artificial Sequence
  Description of Artificial Sequence: Synthetic oligonucleotide
  Antisense strand to SEQ ID NO: 1649649
gauucuaagaagguagccc

SEQ ID NO: 1649651 - RNA, 19 nt, Artificial Sequence
  Description of Artificial Sequence: Synthetic oligonucleotide
  Sense strand starting at position 2352 of SEQ ID NO: 1561140
gggagucggcggugagaaa

SEQ ID NO: 1649652 - RNA, 19 nt, Artificial Sequence
  Description of Artificial Sequence: Synthetic oligonucleotide
  Antisense strand to SEQ ID NO: 1649651
uuucucaccgccgacuccc

SEQ ID NO: 1649653 - RNA, 19 nt, Artificial Sequence
  Description of Artificial Sequence: Synthetic oligonucleotide
  Sense strand starting at position 2353 of SEQ ID NO: 1561140
ggagucggcggugagaaau

SEQ ID NO: 1649654 - RNA, 19 nt, Artificial Sequence
  Description of Artificial Sequence: Synthetic oligonucleotide
  Antisense strand to SEQ ID NO: 1649653
auuucucaccgccgacucc

SEQ ID NO: 1649655 - RNA, 19 nt, Artificial Sequence
  Description of Artificial Sequence: Synthetic oligonucleotide
  Sense strand starting at position 2553 of SEQ ID NO: 1561140
gguaaccuuuacgagcauu

SEQ ID NO: 1649656 - RNA, 19 nt, Artificial Sequence
  Description of Artificial Sequence: Synthetic oligonucleotide
  Antisense strand to SEQ ID NO: 1649655
aaugcucguaaagguuacc

SEQ ID NO: 1649657 - RNA, 19 nt, Artificial Sequence
  Description of Artificial Sequence: Synthetic oligonucleotide
  Sense strand starting at position 2585 of SEQ ID NO: 1561140
agaucuaccucgcugucua

SEQ ID NO: 1649658 - RNA, 19 nt, Artificial Sequence
  Description of Artificial Sequence: Synthetic oligonucleotide
  Antisense strand to SEQ ID NO: 1649657
uagacagcgagguagaucu

SEQ ID NO: 1649659 - RNA, 19 nt, Artificial Sequence
  Description of Artificial Sequence: Synthetic oligonucleotide
  Sense strand starting at position 2610 of SEQ ID NO: 1561140
aaagaaacguuguaccacu

SEQ ID NO: 1649660 - RNA, 19 nt, Artificial Sequence
  Description of Artificial Sequence: Synthetic oligonucleotide
  Antisense strand to SEQ ID NO: 1649659
agugguacaacguuucuuu

SEQ ID NO: 1649661 - RNA, 19 nt, Artificial Sequence
  Description of Artificial Sequence: Synthetic oligonucleotide
  Sense strand starting at position 2870 of SEQ ID NO: 1561140
gggaaagggucuagccaug

SEQ ID NO: 1649662 - RNA, 19 nt, Artificial Sequence
  Description of Artificial Sequence: Synthetic oligonucleotide
  Antisense strand to SEQ ID NO: 1649661
cauggcuagacccuuuccc

SEQ ID NO: 1649663 - RNA, 19 nt, Artificial Sequence
  Description of Artificial Sequence: Synthetic oligonucleotide
  Sense strand starting at position 3083 of SEQ ID NO: 1561140
gcugcuccgccuccuaaua

SEQ ID NO: 1649664 - RNA, 19 nt, Artificial Sequence
  Description of Artificial Sequence: Synthetic oligonucleotide
  Antisense strand to SEQ ID NO: 1649663
uauuaggaggcggagcagc

SEQ ID NO: 1649665 - RNA, 19 nt, Artificial Sequence
  Description of Artificial Sequence: Synthetic oligonucleotide
  Sense strand starting at position 3271 of SEQ ID NO: 1561140
gagccaggucuccgagaug

SEQ ID NO: 1649666 - RNA, 19 nt, Artificial Sequence
  Description of Artificial Sequence: Synthetic oligonucleotide
  Antisense strand to SEQ ID NO: 1649665
caucucggagaccuggcuc

SEQ ID NO: 1649667 - RNA, 19 nt, Artificial Sequence
  Description of Artificial Sequence: Synthetic oligonucleotide
  Sense strand starting at position 3317 of SEQ ID NO: 1561140
gcuuguucugagggcuuga

SEQ ID NO: 1649668 - RNA, 19 nt, Artificial Sequence
  Description of Artificial Sequence: Synthetic oligonucleotide
  Antisense strand to SEQ ID NO: 1649667
ucaagcccucagaacaagc

SEQ ID NO: 1649669 - RNA, 19 nt, Artificial Sequence
  Description of Artificial Sequence: Synthetic oligonucleotide
  Sense strand starting at position 3364 of SEQ ID NO: 1561140
ccucuuuaagauggguaua

SEQ ID NO: 1649670 - RNA, 19 nt, Artificial Sequence
  Description of Artificial Sequence: Synthetic oligonucleotide
  Antisense strand to SEQ ID NO: 1649669
uauacccaucuuaaagagg

SEQ ID NO: 1649671 - RNA, 19 nt, Artificial Sequence
  Description of Artificial Sequence: Synthetic oligonucleotide
  Sense strand starting at position 3366 of SEQ ID NO: 1561140
ucuuuaagauggguauagu

SEQ ID NO: 1649672 - RNA, 19 nt, Artificial Sequence
  Description of Artificial Sequence: Synthetic oligonucleotide
  Antisense strand to SEQ ID NO: 1649671
acuauacccaucuuaaaga

SEQ ID NO: 1649673 - RNA, 19 nt, Artificial Sequence
  Description of Artificial Sequence: Synthetic oligonucleotide
  Sense strand starting at position 3438 of SEQ ID NO: 1561140
gucacaacgcuguaaucau

SEQ ID NO: 1649674 - RNA, 19 nt, Artificial Sequence
  Description of Artificial Sequence: Synthetic oligonucleotide
  Antisense strand to SEQ ID NO: 1649673
augauuacagcguugugac

SEQ ID NO: 1649675 - RNA, 19 nt, Artificial Sequence
  Description of Artificial Sequence: Synthetic oligonucleotide
  Sense strand starting at position 3517 of SEQ ID NO: 1561140
auuguugaaucaucaguaa

SEQ ID NO: 1649676 - RNA, 19 nt, Artificial Sequence
  Description of Artificial Sequence: Synthetic oligonucleotide
  Antisense strand to SEQ ID NO: 1649675
uuacugaugauucaacaau

SEQ ID NO: 1649677 - RNA, 19 nt, Artificial Sequence
  Description of Artificial Sequence: Synthetic oligonucleotide
  Sense strand starting at position 3520 of SEQ ID NO: 1561140
guugaaucaucaguaagag

SEQ ID NO: 1649678 - RNA, 19 nt, Artificial Sequence
  Description of Artificial Sequence: Synthetic oligonucleotide
  Antisense strand to SEQ ID NO: 1649677
cucuuacugaugauucaac

SEQ ID NO: 1649679 - RNA, 19 nt, Artificial Sequence
  Description of Artificial Sequence: Synthetic oligonucleotide
  Sense strand starting at position 3524 of SEQ ID NO: 1561140
aaucaucaguaagagagau

SEQ ID NO: 1649680 - RNA, 19 nt, Artificial Sequence
  Description of Artificial Sequence: Synthetic oligonucleotide
  Antisense strand to SEQ ID NO: 1649679
aucucucuuacugaugauu

SEQ ID NO: 1649681 - RNA, 19 nt, Artificial Sequence
  Description of Artificial Sequence: Synthetic oligonucleotide
  Sense strand starting at position 3613 of SEQ ID NO: 1561140
acaacauaguggcuuagau

SEQ ID NO: 1649682 - RNA, 19 nt, Artificial Sequence
  Description of Artificial Sequence: Synthetic oligonucleotide
  Antisense strand to SEQ ID NO: 1649681
aucuaagccacuauguugu

SEQ ID NO: 1649683 - RNA, 19 nt, Artificial Sequence
  Description of Artificial Sequence: Synthetic oligonucleotide
  Sense strand starting at position 3617 of SEQ ID NO: 1561140
cauaguggcuuagauuuga

SEQ ID NO: 1649684 - RNA, 19 nt, Artificial Sequence
  Description of Artificial Sequence: Synthetic oligonucleotide
  Antisense strand to SEQ ID NO: 1649683
ucaaaucuaagccacuaug

SEQ ID NO: 1649685 - RNA, 19 nt, Artificial Sequence
  Description of Artificial Sequence: Synthetic oligonucleotide
  Sense strand starting at position 3622 of SEQ ID NO: 1561140
uggcuuagauuugaaccaa

SEQ ID NO: 1649686 - RNA, 19 nt, Artificial Sequence
  Description of Artificial Sequence: Synthetic oligonucleotide
  Antisense strand to SEQ ID NO: 1649685
uugguucaaaucuaagcca

SEQ ID NO: 1649687 - RNA, 19 nt, Artificial Sequence
  Description of Artificial Sequence: Synthetic oligonucleotide
  Sense strand starting at position 3634 of SEQ ID NO: 1561140
gaaccaaaguggucugacu

SEQ ID NO: 1649688 - RNA, 19 nt, Artificial Sequence
  Description of Artificial Sequence: Synthetic oligonucleotide
  Antisense strand to SEQ ID NO: 1649687
agucagaccacuuugguuc

SEQ ID NO: 1649689 - RNA, 19 nt, Artificial Sequence
  Description of Artificial Sequence: Synthetic oligonucleotide
  Sense strand starting at position 3692 of SEQ ID NO: 1561140
cucgcuugacccuaagagu

SEQ ID NO: 1649690 - RNA, 19 nt, Artificial Sequence
  Description of Artificial Sequence: Synthetic oligonucleotide
  Antisense strand to SEQ ID NO: 1649689
acucuuagggucaagcgag

SEQ ID NO: 1649691 - RNA, 19 nt, Artificial Sequence
  Description of Artificial Sequence: Synthetic oligonucleotide
  Sense strand starting at position 3775 of SEQ ID NO: 1561140
ucuagaaccugaggucuua

SEQ ID NO: 1649692 - RNA, 19 nt, Artificial Sequence
  Description of Artificial Sequence: Synthetic oligonucleotide
  Antisense strand to SEQ ID NO: 1649691
uaagaccucagguucuaga

SEQ ID NO: 1649693 - RNA, 19 nt, Artificial Sequence
  Description of Artificial Sequence: Synthetic oligonucleotide
  Sense strand starting at position 3785 of SEQ ID NO: 1561140
gaggucuuauugccaccau

SEQ ID NO: 1649694 - RNA, 19 nt, Artificial Sequence
  Description of Artificial Sequence: Synthetic oligonucleotide
  Antisense strand to SEQ ID NO: 1649693
augguggcaauaagaccuc

SEQ ID NO: 1649695 - RNA, 19 nt, Artificial Sequence
  Description of Artificial Sequence: Synthetic oligonucleotide
  Sense strand starting at position 3806 of SEQ ID NO: 1561140
ucaucauugucauuauuga

SEQ ID NO: 1649696 - RNA, 19 nt, Artificial Sequence
  Description of Artificial Sequence: Synthetic oligonucleotide
  Antisense strand to SEQ ID NO: 1649695
ucaauaaugacaaugauga

SEQ ID NO: 1649697 - RNA, 19 nt, Artificial Sequence
  Description of Artificial Sequence: Synthetic oligonucleotide
  Sense strand starting at position 3810 of SEQ ID NO: 1561140
cauugucauuauugaggau

SEQ ID NO: 1649698 - RNA, 19 nt, Artificial Sequence
  Description of Artificial Sequence: Synthetic oligonucleotide
  Antisense strand to SEQ ID NO: 1649697
auccucaauaaugacaaug

SEQ ID NO: 1649699 - RNA, 19 nt, Artificial Sequence
  Description of Artificial Sequence: Synthetic oligonucleotide
  Sense strand starting at position 4 of SEQ ID NO: 1561141
agauuagggcugcacagau

SEQ ID NO: 1649700 - RNA, 19 nt, Artificial Sequence
  Description of Artificial Sequence: Synthetic oligonucleotide
  Antisense strand to SEQ ID NO: 1649699
aucugugcagcccuaaucu

SEQ ID NO: 1649701 - RNA, 19 nt, Artificial Sequence
  Description of Artificial Sequence: Synthetic oligonucleotide
  Sense strand starting at position 132 of SEQ ID NO: 1561141
cugcgaauccagcagagaa

SEQ ID NO: 1649702 - RNA, 19 nt, Artificial Sequence
  Description of Artificial Sequence: Synthetic oligonucleotide
  Antisense strand to SEQ ID NO: 1649701
uucucugcuggauucgcag

SEQ ID NO: 1649703 - RNA, 19 nt, Artificial Sequence
  Description of Artificial Sequence: Synthetic oligonucleotide
  Sense strand starting at position 147 of SEQ ID NO: 1561141
agaacaagguccuggaguu

SEQ ID NO: 1649704 - RNA, 19 nt, Artificial Sequence
  Description of Artificial Sequence: Synthetic oligonucleotide
  Antisense strand to SEQ ID NO: 1649703
aacuccaggaccuuguucu

SEQ ID NO: 1649705 - RNA, 19 nt, Artificial Sequence
  Description of Artificial Sequence: Synthetic oligonucleotide
  Sense strand starting at position 249 of SEQ ID NO: 1561141
gucagacugucugugagaa

SEQ ID NO: 1649706 - RNA, 19 nt, Artificial Sequence
  Description of Artificial Sequence: Synthetic oligonucleotide
  Antisense strand to SEQ ID NO: 1649705
uucucacagacagucugac

SEQ ID NO: 1649707 - RNA, 19 nt, Artificial Sequence
  Description of Artificial Sequence: Synthetic oligonucleotide
  Sense strand starting at position 250 of SEQ ID NO: 1561141
ucagacugucugugagaag

SEQ ID NO: 1649708 - RNA, 19 nt, Artificial Sequence
  Description of Artificial Sequence: Synthetic oligonucleotide
  Antisense strand to SEQ ID NO: 1649707
cuucucacagacagucuga

SEQ ID NO: 1649709 - RNA, 19 nt, Artificial Sequence
  Description of Artificial Sequence: Synthetic oligonucleotide
  Sense strand starting at position 285 of SEQ ID NO: 1561141
gcuggagaaugugucacaa

SEQ ID NO: 1649710 - RNA, 19 nt, Artificial Sequence
  Description of Artificial Sequence: Synthetic oligonucleotide
  Antisense strand to SEQ ID NO: 1649709
uugugacacauucuccagc

SEQ ID NO: 1649711 - RNA, 19 nt, Artificial Sequence
  Description of Artificial Sequence: Synthetic oligonucleotide
  Sense strand starting at position 287 of SEQ ID NO: 1561141
uggagaaugugucacaaag

SEQ ID NO: 1649712 - RNA, 19 nt, Artificial Sequence
  Description of Artificial Sequence: Synthetic oligonucleotide
  Antisense strand to SEQ ID NO: 1649711
cuuugugacacauucucca

SEQ ID NO: 1649713 - RNA, 19 nt, Artificial Sequence
  Description of Artificial Sequence: Synthetic oligonucleotide
  Sense strand starting at position 535 of SEQ ID NO: 1561141
ggauguggguagagagauu

SEQ ID NO: 1649714 - RNA, 19 nt, Artificial Sequence
  Description of Artificial Sequence: Synthetic oligonucleotide
  Antisense strand to SEQ ID NO: 1649713
aaucucucuacccacaucc

SEQ ID NO: 1649715 - RNA, 19 nt, Artificial Sequence
  Description of Artificial Sequence: Synthetic oligonucleotide
  Sense strand starting at position 669 of SEQ ID NO: 1561141
gacugaggcuccgaagaga

SEQ ID NO: 1649716 - RNA, 19 nt, Artificial Sequence
  Description of Artificial Sequence: Synthetic oligonucleotide
  Antisense strand to SEQ ID NO: 1649715
ucucuucggagccucaguc

SEQ ID NO: 1649717 - RNA, 19 nt, Artificial Sequence
  Description of Artificial Sequence: Synthetic oligonucleotide
  Sense strand starting at position 724 of SEQ ID NO: 1561141
gauugagacuugggaugga

SEQ ID NO: 1649718 - RNA, 19 nt, Artificial Sequence
  Description of Artificial Sequence: Synthetic oligonucleotide
  Antisense strand to SEQ ID NO: 1649717
uccaucccaagucucaauc

SEQ ID NO: 1649719 - RNA, 19 nt, Artificial Sequence
  Description of Artificial Sequence: Synthetic oligonucleotide
  Sense strand starting at position 825 of SEQ ID NO: 1561141
gcaggagugugggcagaaa

SEQ ID NO: 1649720 - RNA, 19 nt, Artificial Sequence
  Description of Artificial Sequence: Synthetic oligonucleotide
  Antisense strand to SEQ ID NO: 1649719
uuucugcccacacuccugc

SEQ ID NO: 1649721 - RNA, 19 nt, Artificial Sequence
  Description of Artificial Sequence: Synthetic oligonucleotide
  Sense strand starting at position 896 of SEQ ID NO: 1561141
agcagaugauggcuagaga

SEQ ID NO: 1649722 - RNA, 19 nt, Artificial Sequence
  Description of Artificial Sequence: Synthetic oligonucleotide
  Antisense strand to SEQ ID NO: 1649721
ucucuagccaucaucugcu

SEQ ID NO: 1649723 - RNA, 19 nt, Artificial Sequence
  Description of Artificial Sequence: Synthetic oligonucleotide
  Sense strand starting at position 897 of SEQ ID NO: 1561141
gcagaugauggcuagagau

SEQ ID NO: 1649724 - RNA, 19 nt, Artificial Sequence
  Description of Artificial Sequence: Synthetic oligonucleotide
  Antisense strand to SEQ ID NO: 1649723
aucucuagccaucaucugc

SEQ ID NO: 1649725 - RNA, 19 nt, Artificial Sequence
  Description of Artificial Sequence: Synthetic oligonucleotide
  Sense strand starting at position 1306 of SEQ ID NO: 1561141
gagagaaugucugaucuag

SEQ ID NO: 1649726 - RNA, 19 nt, Artificial Sequence
  Description of Artificial Sequence: Synthetic oligonucleotide
  Antisense strand to SEQ ID NO: 1649725
cuagaucagacauucucuc

SEQ ID NO: 1649727 - RNA, 19 nt, Artificial Sequence
  Description of Artificial Sequence: Synthetic oligonucleotide
  Sense strand starting at position 1497 of SEQ ID NO: 1561141
gcugcugcggcuucauaga

SEQ ID NO: 1649728 - RNA, 19 nt, Artificial Sequence
  Description of Artificial Sequence: Synthetic oligonucleotide
  Antisense strand to SEQ ID NO: 1649727
ucuaugaagccgcagcagc

SEQ ID NO: 1649729 - RNA, 19 nt, Artificial Sequence
  Description of Artificial Sequence: Synthetic oligonucleotide
  Sense strand starting at position 1525 of SEQ ID NO: 1561141
gcaggaucugcugggaguu

SEQ ID NO: 1649730 - RNA, 19 nt, Artificial Sequence
  Description of Artificial Sequence: Synthetic oligonucleotide
  Antisense strand to SEQ ID NO: 1649729
aacucccagcagauccugc

SEQ ID NO: 1649731 - RNA, 19 nt, Artificial Sequence
  Description of Artificial Sequence: Synthetic oligonucleotide
  Sense strand starting at position 1649 of SEQ ID NO: 1561141
gaacgauguccgggacuuc

SEQ ID NO: 1649732 - RNA, 19 nt, Artificial Sequence
  Description of Artificial Sequence: Synthetic oligonucleotide
  Antisense strand to SEQ ID NO: 1649731
gaagucccggacaucguuc

SEQ ID NO: 1649733 - RNA, 19 nt, Artificial Sequence
  Description of Artificial Sequence: Synthetic oligonucleotide
  Sense strand starting at position 1751 of SEQ ID NO: 1561141
gggauacacccagguguuu

SEQ ID NO: 1649734 - RNA, 19 nt, Artificial Sequence
  Description of Artificial Sequence: Synthetic oligonucleotide
  Antisense strand to SEQ ID NO: 1649733
aaacaccuggguguauccc

SEQ ID NO: 1649735 - RNA, 19 nt, Artificial Sequence
  Description of Artificial Sequence: Synthetic oligonucleotide
  Sense strand starting at position 2144 of SEQ ID NO: 1561141
gggagauugcccgggacua

SEQ ID NO: 1649736 - RNA, 19 nt, Artificial Sequence
  Description of Artificial Sequence: Synthetic oligonucleotide
  Antisense strand to SEQ ID NO: 1649735
uagucccgggcaaucuccc

SEQ ID NO: 1649737 - RNA, 19 nt, Artificial Sequence
  Description of Artificial Sequence: Synthetic oligonucleotide
  Sense strand starting at position 2145 of SEQ ID NO: 1561141
ggagauugcccgggacuaa

SEQ ID NO: 1649738 - RNA, 19 nt, Artificial Sequence
  Description of Artificial Sequence: Synthetic oligonucleotide
  Antisense strand to SEQ ID NO: 1649737
uuagucccgggcaaucucc

SEQ ID NO: 1649739 - RNA, 19 nt, Artificial Sequence
  Description of Artificial Sequence: Synthetic oligonucleotide
  Sense strand starting at position 2576 of SEQ ID NO: 1561141
ccaacuagguacuuaauga

SEQ ID NO: 1649740 - RNA, 19 nt, Artificial Sequence
  Description of Artificial Sequence: Synthetic oligonucleotide
  Antisense strand to SEQ ID NO: 1649739
ucauuaaguaccuaguugg

SEQ ID NO: 1649741 - RNA, 19 nt, Artificial Sequence
  Description of Artificial Sequence: Synthetic oligonucleotide
  Sense strand starting at position 2613 of SEQ ID NO: 1561141
gaguaacaguuucugguau

SEQ ID NO: 1649742 - RNA, 19 nt, Artificial Sequence
  Description of Artificial Sequence: Synthetic oligonucleotide
  Antisense strand to SEQ ID NO: 1649741
auaccagaaacuguuacuc

SEQ ID NO: 1649743 - RNA, 19 nt, Artificial Sequence
  Description of Artificial Sequence: Synthetic oligonucleotide
  Sense strand starting at position 2614 of SEQ ID NO: 1561141
aguaacaguuucugguaua

SEQ ID NO: 1649744 - RNA, 19 nt, Artificial Sequence
  Description of Artificial Sequence: Synthetic oligonucleotide
  Antisense strand to SEQ ID NO: 1649743
uauaccagaaacuguuacu

SEQ ID NO: 1649745 - RNA, 19 nt, Artificial Sequence
  Description of Artificial Sequence: Synthetic oligonucleotide
  Sense strand starting at position 2625 of SEQ ID NO: 1561141
cugguauauuaauagcagu

SEQ ID NO: 1649746 - RNA, 19 nt, Artificial Sequence
  Description of Artificial Sequence: Synthetic oligonucleotide
  Antisense strand to SEQ ID NO: 1649745
acugcuauuaauauaccag

SEQ ID NO: 1649747 - RNA, 19 nt, Artificial Sequence
  Description of Artificial Sequence: Synthetic oligonucleotide
  Sense strand starting at position 2647 of SEQ ID NO: 1561141
uggcaauugucauuuccua

SEQ ID NO: 1649748 - RNA, 19 nt, Artificial Sequence
  Description of Artificial Sequence: Synthetic oligonucleotide
  Antisense strand to SEQ ID NO: 1649747
uaggaaaugacaauugcca

SEQ ID NO: 1649749 - RNA, 19 nt, Artificial Sequence
  Description of Artificial Sequence: Synthetic oligonucleotide
  Sense strand starting at position 2652 of SEQ ID NO: 1561141
auugucauuuccuauaagu

SEQ ID NO: 1649750 - RNA, 19 nt, Artificial Sequence
  Description of Artificial Sequence: Synthetic oligonucleotide
  Antisense strand to SEQ ID NO: 1649749
acuuauaggaaaugacaau

SEQ ID NO: 1649751 - RNA, 19 nt, Artificial Sequence
  Description of Artificial Sequence: Synthetic oligonucleotide
  Sense strand starting at position 2661 of SEQ ID NO: 1561141
uccuauaaguggugaagug

SEQ ID NO: 1649752 - RNA, 19 nt, Artificial Sequence
  Description of Artificial Sequence: Synthetic oligonucleotide
  Antisense strand to SEQ ID NO: 1649751
cacuucaccacuuauagga

SEQ ID NO: 1649753 - RNA, 19 nt, Artificial Sequence
  Description of Artificial Sequence: Synthetic oligonucleotide
  Sense strand starting at position 2676 of SEQ ID NO: 1561141
agugcuaagugcuuugaaa

SEQ ID NO: 1649754 - RNA, 19 nt, Artificial Sequence
  Description of Artificial Sequence: Synthetic oligonucleotide
  Antisense strand to SEQ ID NO: 1649753
uuucaaagcacuuagcacu

SEQ ID NO: 1649755 - RNA, 19 nt, Artificial Sequence
  Description of Artificial Sequence: Synthetic oligonucleotide
  Sense strand starting at position 2678 of SEQ ID NO: 1561141
ugcuaagugcuuugaaagc

SEQ ID NO: 1649756 - RNA, 19 nt, Artificial Sequence
  Description of Artificial Sequence: Synthetic oligonucleotide
  Antisense strand to SEQ ID NO: 1649755
gcuuucaaagcacuuagca

SEQ ID NO: 1649757 - RNA, 19 nt, Artificial Sequence
  Description of Artificial Sequence: Synthetic oligonucleotide
  Sense strand starting at position 2771 of SEQ ID NO: 1561141
gagguuaaaucccuugggu

SEQ ID NO: 1649758 - RNA, 19 nt, Artificial Sequence
  Description of Artificial Sequence: Synthetic oligonucleotide
  Antisense strand to SEQ ID NO: 1649757
acccaagggauuuaaccuc

SEQ ID NO: 1649759 - RNA, 19 nt, Artificial Sequence
  Description of Artificial Sequence: Synthetic oligonucleotide
  Sense strand starting at position 2773 of SEQ ID NO: 1561141
gguuaaaucccuuggguaa

SEQ ID NO: 1649760 - RNA, 19 nt, Artificial Sequence
  Description of Artificial Sequence: Synthetic oligonucleotide
  Antisense strand to SEQ ID NO: 1649759
uuacccaagggauuuaacc

SEQ ID NO: 1649761 - RNA, 19 nt, Artificial Sequence
  Description of Artificial Sequence: Synthetic oligonucleotide
  Sense strand starting at position 2774 of SEQ ID NO: 1561141
guuaaaucccuuggguaag

SEQ ID NO: 1649762 - RNA, 19 nt, Artificial Sequence
  Description of Artificial Sequence: Synthetic oligonucleotide
  Antisense strand to SEQ ID NO: 1649761
cuuacccaagggauuuaac

SEQ ID NO: 1649763 - RNA, 19 nt, Artificial Sequence
  Description of Artificial Sequence: Synthetic oligonucleotide
  Sense strand starting at position 2784 of SEQ ID NO: 1561141
uuggguaaggucuagauca

SEQ ID NO: 1649764 - RNA, 19 nt, Artificial Sequence
  Description of Artificial Sequence: Synthetic oligonucleotide
  Antisense strand to SEQ ID NO: 1649763
ugaucuagaccuuacccaa

SEQ ID NO: 1649765 - RNA, 19 nt, Artificial Sequence
  Description of Artificial Sequence: Synthetic oligonucleotide
  Sense strand starting at position 2836 of SEQ ID NO: 1561141
auuguugucuugggcuaca

SEQ ID NO: 1649766 - RNA, 19 nt, Artificial Sequence
  Description of Artificial Sequence: Synthetic oligonucleotide
  Antisense strand to SEQ ID NO: 1649765
uguagcccaagacaacaau

SEQ ID NO: 1649767 - RNA, 19 nt, Artificial Sequence
  Description of Artificial Sequence: Synthetic oligonucleotide
  Sense strand starting at position 3057 of SEQ ID NO: 1561141
ugcucucaaucagugacau

SEQ ID NO: 1649768 - RNA, 19 nt, Artificial Sequence
  Description of Artificial Sequence: Synthetic oligonucleotide
  Antisense strand to SEQ ID NO: 1649767
augucacugauugagagca

SEQ ID NO: 1649769 - RNA, 19 nt, Artificial Sequence
  Description of Artificial Sequence: Synthetic oligonucleotide
  Sense strand starting at position 3058 of SEQ ID NO: 1561141
gcucucaaucagugacauc

SEQ ID NO: 1649770 - RNA, 19 nt, Artificial Sequence
  Description of Artificial Sequence: Synthetic oligonucleotide
  Antisense strand to SEQ ID NO: 1649769
gaugucacugauugagagc

SEQ ID NO: 1649771 - RNA, 19 nt, Artificial Sequence
  Description of Artificial Sequence: Synthetic oligonucleotide
  Sense strand starting at position 3112 of SEQ ID NO: 1561141
ugggcugacaccuguaaau

SEQ ID NO: 1649772 - RNA, 19 nt, Artificial Sequence
  Description of Artificial Sequence: Synthetic oligonucleotide
  Antisense strand to SEQ ID NO: 1649771
auuuacaggugucagccca

SEQ ID NO: 1649773 - RNA, 19 nt, Artificial Sequence
  Description of Artificial Sequence: Synthetic oligonucleotide
  Sense strand starting at position 240 of SEQ ID NO: 1561142
acaguuuccugaguucugu

SEQ ID NO: 1649774 - RNA, 19 nt, Artificial Sequence
  Description of Artificial Sequence: Synthetic oligonucleotide
  Antisense strand to SEQ ID NO: 1649773
acagaacucaggaaacugu

SEQ ID NO: 1649775 - RNA, 19 nt, Artificial Sequence
  Description of Artificial Sequence: Synthetic oligonucleotide
  Sense strand starting at position 251 of SEQ ID NO: 1561142
aguucugugagucaaugau

SEQ ID NO: 1649776 - RNA, 19 nt, Artificial Sequence
  Description of Artificial Sequence: Synthetic oligonucleotide
  Antisense strand to SEQ ID NO: 1649775
aucauugacucacagaacu

SEQ ID NO: 1649777 - RNA, 19 nt, Artificial Sequence
  Description of Artificial Sequence: Synthetic oligonucleotide
  Sense strand starting at position 314 of SEQ ID NO: 1561142
acuacagugcuguacuaga

SEQ ID NO: 1649778 - RNA, 19 nt, Artificial Sequence
  Description of Artificial Sequence: Synthetic oligonucleotide
  Antisense strand to SEQ ID NO: 1649777
ucuaguacagcacuguagu

SEQ ID NO: 1649779 - RNA, 19 nt, Artificial Sequence
  Description of Artificial Sequence: Synthetic oligonucleotide
  Sense strand starting at position 325 of SEQ ID NO: 1561142
guacuagacuaugcaggau

SEQ ID NO: 1649780 - RNA, 19 nt, Artificial Sequence
  Description of Artificial Sequence: Synthetic oligonucleotide
  Antisense strand to SEQ ID NO: 1649779
auccugcauagucuaguac

SEQ ID NO: 1649781 - RNA, 19 nt, Artificial Sequence
  Description of Artificial Sequence: Synthetic oligonucleotide
  Sense strand starting at position 398 of SEQ ID NO: 1561142
ggccuuaucccucaugacu

SEQ ID NO: 1649782 - RNA, 19 nt, Artificial Sequence
  Description of Artificial Sequence: Synthetic oligonucleotide
  Antisense strand to SEQ ID NO: 1649781
agucaugagggauaaggcc

SEQ ID NO: 1649783 - RNA, 19 nt, Artificial Sequence
  Description of Artificial Sequence: Synthetic oligonucleotide
  Sense strand starting at position 471 of SEQ ID NO: 1561142
gugugacugugguuguaau

SEQ ID NO: 1649784 - RNA, 19 nt, Artificial Sequence
  Description of Artificial Sequence: Synthetic oligonucleotide
  Antisense strand to SEQ ID NO: 1649783
auuacaaccacagucacac

SEQ ID NO: 1649785 - RNA, 19 nt, Artificial Sequence
  Description of Artificial Sequence: Synthetic oligonucleotide
  Sense strand starting at position 621 of SEQ ID NO: 1561142
cucaguuuccucuguugaa

SEQ ID NO: 1649786 - RNA, 19 nt, Artificial Sequence
  Description of Artificial Sequence: Synthetic oligonucleotide
  Antisense strand to SEQ ID NO: 1649785
uucaacagaggaaacugag

SEQ ID NO: 1649787 - RNA, 19 nt, Artificial Sequence
  Description of Artificial Sequence: Synthetic oligonucleotide
  Sense strand starting at position 622 of SEQ ID NO: 1561142
ucaguuuccucuguugaaa

SEQ ID NO: 1649788 - RNA, 19 nt, Artificial Sequence
  Description of Artificial Sequence: Synthetic oligonucleotide
  Antisense strand to SEQ ID NO: 1649787
uuucaacagaggaaacuga

SEQ ID NO: 1649789 - RNA, 19 nt, Artificial Sequence
  Description of Artificial Sequence: Synthetic oligonucleotide
  Sense strand starting at position 644 of SEQ ID NO: 1561142
gggauuauauguuccacaa

SEQ ID NO: 1649790 - RNA, 19 nt, Artificial Sequence
  Description of Artificial Sequence: Synthetic oligonucleotide
  Antisense strand to SEQ ID NO: 1649789
uuguggaacauauaauccc

SEQ ID NO: 1649791 - RNA, 19 nt, Artificial Sequence
  Description of Artificial Sequence: Synthetic oligonucleotide
  Sense strand starting at position 664 of SEQ ID NO: 1561142
gggucacugugaguaauca

SEQ ID NO: 1649792 - RNA, 19 nt, Artificial Sequence
  Description of Artificial Sequence: Synthetic oligonucleotide
  Antisense strand to SEQ ID NO: 1649791
ugauuacucacagugaccc

SEQ ID NO: 1649793 - RNA, 19 nt, Artificial Sequence
  Description of Artificial Sequence: Synthetic oligonucleotide
  Sense strand starting at position 665 of SEQ ID NO: 1561142
ggucacugugaguaaucau

SEQ ID NO: 1649794 - RNA, 19 nt, Artificial Sequence
  Description of Artificial Sequence: Synthetic oligonucleotide
  Antisense strand to SEQ ID NO: 1649793
augauuacucacagugacc

SEQ ID NO: 1649795 - RNA, 19 nt, Artificial Sequence
  Description of Artificial Sequence: Synthetic oligonucleotide
  Sense strand starting at position 668 of SEQ ID NO: 1561142
cacugugaguaaucauuga

SEQ ID NO: 1649796 - RNA, 19 nt, Artificial Sequence
  Description of Artificial Sequence: Synthetic oligonucleotide
  Antisense strand to SEQ ID NO: 1649795
ucaaugauuacucacagug

SEQ ID NO: 1649797 - RNA, 19 nt, Artificial Sequence
  Description of Artificial Sequence: Synthetic oligonucleotide
  Sense strand starting at position 672 of SEQ ID NO: 1561142
gugaguaaucauugagaug

SEQ ID NO: 1649798 - RNA, 19 nt, Artificial Sequence
  Description of Artificial Sequence: Synthetic oligonucleotide
  Antisense strand to SEQ ID NO: 1649797
caucucaaugauuacucac

SEQ ID NO: 1649799 - RNA, 19 nt, Artificial Sequence
  Description of Artificial Sequence: Synthetic oligonucleotide
  Sense strand starting at position 723 of SEQ ID NO: 1561142
guuggugcucaguaaguga

SEQ ID NO: 1649800 - RNA, 19 nt, Artificial Sequence
  Description of Artificial Sequence: Synthetic oligonucleotide
  Antisense strand to SEQ ID NO: 1649799
ucacuuacugagcaccaac

SEQ ID NO: 1649801 - RNA, 19 nt, Artificial Sequence
  Description of Artificial Sequence: Synthetic oligonucleotide
  Sense strand starting at position 737 of SEQ ID NO: 1561142
agugaaucccagcauuguu

SEQ ID NO: 1649802 - RNA, 19 nt, Artificial Sequence
  Description of Artificial Sequence: Synthetic oligonucleotide
  Antisense strand to SEQ ID NO: 1649801
aacaaugcugggauucacu

SEQ ID NO: 1649803 - RNA, 19 nt, Artificial Sequence
  Description of Artificial Sequence: Synthetic oligonucleotide
  Sense strand starting at position 856 of SEQ ID NO: 1561142
gaagaagagucacuuaccu

SEQ ID NO: 1649804 - RNA, 19 nt, Artificial Sequence
  Description of Artificial Sequence: Synthetic oligonucleotide
  Antisense strand to SEQ ID NO: 1649803
agguaagugacucuucuuc

SEQ ID NO: 1649805 - RNA, 19 nt, Artificial Sequence
  Description of Artificial Sequence: Synthetic oligonucleotide
  Sense strand starting at position 890 of SEQ ID NO: 1561142
uuaauaaagugagggagau

SEQ ID NO: 1649806 - RNA, 19 nt, Artificial Sequence
  Description of Artificial Sequence: Synthetic oligonucleotide
  Antisense strand to SEQ ID NO: 1649805
aucucccucacuuuauuaa

SEQ ID NO: 1649807 - RNA, 19 nt, Artificial Sequence
  Description of Artificial Sequence: Synthetic oligonucleotide
  Sense strand starting at position 926 of SEQ ID NO: 1561142
aagucagucugacucaaga

SEQ ID NO: 1649808 - RNA, 19 nt, Artificial Sequence
  Description of Artificial Sequence: Synthetic oligonucleotide
  Antisense strand to SEQ ID NO: 1649807
ucuugagucagacugacuu

SEQ ID NO: 1649809 - RNA, 19 nt, Artificial Sequence
  Description of Artificial Sequence: Synthetic oligonucleotide
  Sense strand starting at position 1063 of SEQ ID NO: 1561142
aucagagauuugggagaag

SEQ ID NO: 1649810 - RNA, 19 nt, Artificial Sequence
  Description of Artificial Sequence: Synthetic oligonucleotide
  Antisense strand to SEQ ID NO: 1649809
cuucucccaaaucucugau

SEQ ID NO: 1649811 - RNA, 19 nt, Artificial Sequence
  Description of Artificial Sequence: Synthetic oligonucleotide
  Sense strand starting at position 1243 of SEQ ID NO: 1561142
cucggauucggucauugaa

SEQ ID NO: 1649812 - RNA, 19 nt, Artificial Sequence
  Description of Artificial Sequence: Synthetic oligonucleotide
  Antisense strand to SEQ ID NO: 1649811
uucaaugaccgaauccgag

SEQ ID NO: 1649813 - RNA, 19 nt, Artificial Sequence
  Description of Artificial Sequence: Synthetic oligonucleotide
  Sense strand starting at position 1245 of SEQ ID NO: 1561142
cggauucggucauugaacu

SEQ ID NO: 1649814 - RNA, 19 nt, Artificial Sequence
  Description of Artificial Sequence: Synthetic oligonucleotide
  Antisense strand to SEQ ID NO: 1649813
aguucaaugaccgaauccg

SEQ ID NO: 1649815 - RNA, 19 nt, Artificial Sequence
  Description of Artificial Sequence: Synthetic oligonucleotide
  Sense strand starting at position 1611 of SEQ ID NO: 1561142
ggcagaaauuagggaugga

SEQ ID NO: 1649816 - RNA, 19 nt, Artificial Sequence
  Description of Artificial Sequence: Synthetic oligonucleotide
  Antisense strand to SEQ ID NO: 1649815
uccaucccuaauuucugcc

SEQ ID NO: 1649817 - RNA, 19 nt, Artificial Sequence
  Description of Artificial Sequence: Synthetic oligonucleotide
  Sense strand starting at position 1794 of SEQ ID NO: 1561142
agauuagggcugcacagau

SEQ ID NO: 1649818 - RNA, 19 nt, Artificial Sequence
  Description of Artificial Sequence: Synthetic oligonucleotide
  Antisense strand to SEQ ID NO: 1649817
aucugugcagcccuaaucu

SEQ ID NO: 1649819 - RNA, 19 nt, Artificial Sequence
  Description of Artificial Sequence: Synthetic oligonucleotide
  Sense strand starting at position 1922 of SEQ ID NO: 1561142
cugcgaauccagcagagaa

SEQ ID NO: 1649820 - RNA, 19 nt, Artificial Sequence
  Description of Artificial Sequence: Synthetic oligonucleotide
  Antisense strand to SEQ ID NO: 1649819
uucucugcuggauucgcag

SEQ ID NO: 1649821 - RNA, 19 nt, Artificial Sequence
  Description of Artificial Sequence: Synthetic oligonucleotide
  Sense strand starting at position 2039 of SEQ ID NO: 1561142
gucagacugucugugagaa

SEQ ID NO: 1649822 - RNA, 19 nt, Artificial Sequence
  Description of Artificial Sequence: Synthetic oligonucleotide
  Antisense strand to SEQ ID NO: 1649821
uucucacagacagucugac

SEQ ID NO: 1649823 - RNA, 19 nt, Artificial Sequence
  Description of Artificial Sequence: Synthetic oligonucleotide
  Sense strand starting at position 2040 of SEQ ID NO: 1561142
ucagacugucugugagaag

SEQ ID NO: 1649824 - RNA, 19 nt, Artificial Sequence
  Description of Artificial Sequence: Synthetic oligonucleotide
  Antisense strand to SEQ ID NO: 1649823
cuucucacagacagucuga

SEQ ID NO: 1649825 - RNA, 19 nt, Artificial Sequence
  Description of Artificial Sequence: Synthetic oligonucleotide
  Sense strand starting at position 2075 of SEQ ID NO: 1561142
gcuggagaaugugucacaa

SEQ ID NO: 1649826 - RNA, 19 nt, Artificial Sequence
  Description of Artificial Sequence: Synthetic oligonucleotide
  Antisense strand to SEQ ID NO: 1649825
uugugacacauucuccagc

SEQ ID NO: 1649827 - RNA, 19 nt, Artificial Sequence
  Description of Artificial Sequence: Synthetic oligonucleotide
  Sense strand starting at position 2077 of SEQ ID NO: 1561142
uggagaaugugucacaaag

SEQ ID NO: 1649828 - RNA, 19 nt, Artificial Sequence
  Description of Artificial Sequence: Synthetic oligonucleotide
  Antisense strand to SEQ ID NO: 1649827
cuuugugacacauucucca

SEQ ID NO: 1649829 - RNA, 19 nt, Artificial Sequence
  Description of Artificial Sequence: Synthetic oligonucleotide
  Sense strand starting at position 2325 of SEQ ID NO: 1561142
ggauguggguagagagauu

SEQ ID NO: 1649830 - RNA, 19 nt, Artificial Sequence
  Description of Artificial Sequence: Synthetic oligonucleotide
  Antisense strand to SEQ ID NO: 1649829
aaucucucuacccacaucc

SEQ ID NO: 1649831 - RNA, 19 nt, Artificial Sequence
  Description of Artificial Sequence: Synthetic oligonucleotide
  Sense strand starting at position 2514 of SEQ ID NO: 1561142
gauugagacuugggaugga

SEQ ID NO: 1649832 - RNA, 19 nt, Artificial Sequence
  Description of Artificial Sequence: Synthetic oligonucleotide
  Antisense strand to SEQ ID NO: 1649831
uccaucccaagucucaauc

SEQ ID NO: 1649833 - RNA, 19 nt, Artificial Sequence
  Description of Artificial Sequence: Synthetic oligonucleotide
  Sense strand starting at position 2615 of SEQ ID NO: 1561142
gcaggagugugggcagaaa

SEQ ID NO: 1649834 - RNA, 19 nt, Artificial Sequence
  Description of Artificial Sequence: Synthetic oligonucleotide
  Antisense strand to SEQ ID NO: 1649833
uuucugcccacacuccugc

SEQ ID NO: 1649835 - RNA, 19 nt, Artificial Sequence
  Description of Artificial Sequence: Synthetic oligonucleotide
  Sense strand starting at position 2686 of SEQ ID NO: 1561142
agcagaugauggcuagaga

SEQ ID NO: 1649836 - RNA, 19 nt, Artificial Sequence
  Description of Artificial Sequence: Synthetic oligonucleotide
  Antisense strand to SEQ ID NO: 1649835
ucucuagccaucaucugcu

SEQ ID NO: 1649837 - RNA, 19 nt, Artificial Sequence
  Description of Artificial Sequence: Synthetic oligonucleotide
  Sense strand starting at position 2687 of SEQ ID NO: 1561142
gcagaugauggcuagagau

SEQ ID NO: 1649838 - RNA, 19 nt, Artificial Sequence
  Description of Artificial Sequence: Synthetic oligonucleotide
  Antisense strand to SEQ ID NO: 1649837
aucucuagccaucaucugc

SEQ ID NO: 1649839 - RNA, 19 nt, Artificial Sequence
  Description of Artificial Sequence: Synthetic oligonucleotide
  Sense strand starting at position 3096 of SEQ ID NO: 1561142
gagagaaugucugaucuag

SEQ ID NO: 1649840 - RNA, 19 nt, Artificial Sequence
  Description of Artificial Sequence: Synthetic oligonucleotide
  Antisense strand to SEQ ID NO: 1649839
cuagaucagacauucucuc

SEQ ID NO: 1649841 - RNA, 19 nt, Artificial Sequence
  Description of Artificial Sequence: Synthetic oligonucleotide
  Sense strand starting at position 3287 of SEQ ID NO: 1561142
gcugcugcggcuucauaga

SEQ ID NO: 1649842 - RNA, 19 nt, Artificial Sequence
  Description of Artificial Sequence: Synthetic oligonucleotide
  Antisense strand to SEQ ID NO: 1649841
ucuaugaagccgcagcagc

SEQ ID NO: 1649843 - RNA, 19 nt, Artificial Sequence
  Description of Artificial Sequence: Synthetic oligonucleotide
  Sense strand starting at position 3315 of SEQ ID NO: 1561142
gcaggaucugcugggaguu

SEQ ID NO: 1649844 - RNA, 19 nt, Artificial Sequence
  Description of Artificial Sequence: Synthetic oligonucleotide
  Antisense strand to SEQ ID NO: 1649843
aacucccagcagauccugc

SEQ ID NO: 1649845 - RNA, 19 nt, Artificial Sequence
  Description of Artificial Sequence: Synthetic oligonucleotide
  Sense strand starting at position 3439 of SEQ ID NO: 1561142
gaacgauguccgggacuuc

SEQ ID NO: 1649846 - RNA, 19 nt, Artificial Sequence
  Description of Artificial Sequence: Synthetic oligonucleotide
  Antisense strand to SEQ ID NO: 1649845
gaagucccggacaucguuc

SEQ ID NO: 1649847 - RNA, 19 nt, Artificial Sequence
  Description of Artificial Sequence: Synthetic oligonucleotide
  Sense strand starting at position 3541 of SEQ ID NO: 1561142
gggauacacccagguguuu

SEQ ID NO: 1649848 - RNA, 19 nt, Artificial Sequence
  Description of Artificial Sequence: Synthetic oligonucleotide
  Antisense strand to SEQ ID NO: 1649847
aaacaccuggguguauccc

SEQ ID NO: 1649849 - RNA, 19 nt, Artificial Sequence
  Description of Artificial Sequence: Synthetic oligonucleotide
  Sense strand starting at position 3934 of SEQ ID NO: 1561142
gggagauugcccgggacua

SEQ ID NO: 1649850 - RNA, 19 nt, Artificial Sequence
  Description of Artificial Sequence: Synthetic oligonucleotide
  Antisense strand to SEQ ID NO: 1649849
uagucccgggcaaucuccc

SEQ ID NO: 1649851 - RNA, 19 nt, Artificial Sequence
  Description of Artificial Sequence: Synthetic oligonucleotide
  Sense strand starting at position 3935 of SEQ ID NO: 1561142
ggagauugcccgggacuaa

SEQ ID NO: 1649852 - RNA, 19 nt, Artificial Sequence
  Description of Artificial Sequence: Synthetic oligonucleotide
  Antisense strand to SEQ ID NO: 1649851
uuagucccgggcaaucucc

SEQ ID NO: 1649853 - RNA, 19 nt, Artificial Sequence
  Description of Artificial Sequence: Synthetic oligonucleotide
  Sense strand starting at position 80 of SEQ ID NO: 1561143
uuuaaaguauucuggcaca

SEQ ID NO: 1649854 - RNA, 19 nt, Artificial Sequence
  Description of Artificial Sequence: Synthetic oligonucleotide
  Antisense strand to SEQ ID NO: 1649853
ugugccagaauacuuuaaa

SEQ ID NO: 1649855 - RNA, 19 nt, Artificial Sequence
  Description of Artificial Sequence: Synthetic oligonucleotide
  Sense strand starting at position 83 of SEQ ID NO: 1561143
aaaguauucuggcacaaag

SEQ ID NO: 1649856 - RNA, 19 nt, Artificial Sequence
  Description of Artificial Sequence: Synthetic oligonucleotide
  Antisense strand to SEQ ID NO: 1649855
cuuugugccagaauacuuu

SEQ ID NO: 1649857 - RNA, 19 nt, Artificial Sequence
  Description of Artificial Sequence: Synthetic oligonucleotide
  Sense strand starting at position 424 of SEQ ID NO: 1561143
uuuauauguuucuguaggu

SEQ ID NO: 1649858 - RNA, 19 nt, Artificial Sequence
  Description of Artificial Sequence: Synthetic oligonucleotide
  Antisense strand to SEQ ID NO: 1649857
accuacagaaacauauaaa

SEQ ID NO: 1649859 - RNA, 19 nt, Artificial Sequence
  Description of Artificial Sequence: Synthetic oligonucleotide
  Sense strand starting at position 425 of SEQ ID NO: 1561143
uuauauguuucuguagguu

SEQ ID NO: 1649860 - RNA, 19 nt, Artificial Sequence
  Description of Artificial Sequence: Synthetic oligonucleotide
  Antisense strand to SEQ ID NO: 1649859
aaccuacagaaacauauaa

SEQ ID NO: 1649861 - RNA, 19 nt, Artificial Sequence
  Description of Artificial Sequence: Synthetic oligonucleotide
  Sense strand starting at position 429 of SEQ ID NO: 1561143
auguuucuguagguuucua

SEQ ID NO: 1649862 - RNA, 19 nt, Artificial Sequence
  Description of Artificial Sequence: Synthetic oligonucleotide
  Antisense strand to SEQ ID NO: 1649861
uagaaaccuacagaaacau

SEQ ID NO: 1649863 - RNA, 19 nt, Artificial Sequence
  Description of Artificial Sequence: Synthetic oligonucleotide
  Sense strand starting at position 433 of SEQ ID NO: 1561143
uucuguagguuucuauaca

SEQ ID NO: 1649864 - RNA, 19 nt, Artificial Sequence
  Description of Artificial Sequence: Synthetic oligonucleotide
  Antisense strand to SEQ ID NO: 1649863
uguauagaaaccuacagaa

SEQ ID NO: 1649865 - RNA, 19 nt, Artificial Sequence
  Description of Artificial Sequence: Synthetic oligonucleotide
  Sense strand starting at position 483 of SEQ ID NO: 1561143
ccuguaguauggcacauau

SEQ ID NO: 1649866 - RNA, 19 nt, Artificial Sequence
  Description of Artificial Sequence: Synthetic oligonucleotide
  Antisense strand to SEQ ID NO: 1649865
auaugugccauacuacagg

SEQ ID NO: 1649867 - RNA, 19 nt, Artificial Sequence
  Description of Artificial Sequence: Synthetic oligonucleotide
  Sense strand starting at position 485 of SEQ ID NO: 1561143
uguaguauggcacauauua

SEQ ID NO: 1649868 - RNA, 19 nt, Artificial Sequence
  Description of Artificial Sequence: Synthetic oligonucleotide
  Antisense strand to SEQ ID NO: 1649867
uaauaugugccauacuaca

SEQ ID NO: 1649869 - RNA, 19 nt, Artificial Sequence
  Description of Artificial Sequence: Synthetic oligonucleotide
  Sense strand starting at position 510 of SEQ ID NO: 1561143
guggugagugucuguguca

SEQ ID NO: 1649870 - RNA, 19 nt, Artificial Sequence
  Description of Artificial Sequence: Synthetic oligonucleotide
  Antisense strand to SEQ ID NO: 1649869
ugacacagacacucaccac

SEQ ID NO: 1649871 - RNA, 19 nt, Artificial Sequence
  Description of Artificial Sequence: Synthetic oligonucleotide
  Sense strand starting at position 512 of SEQ ID NO: 1561143
ggugagugucugugucagu

SEQ ID NO: 1649872 - RNA, 19 nt, Artificial Sequence
  Description of Artificial Sequence: Synthetic oligonucleotide
  Antisense strand to SEQ ID NO: 1649871
acugacacagacacucacc

SEQ ID NO: 1649873 - RNA, 19 nt, Artificial Sequence
  Description of Artificial Sequence: Synthetic oligonucleotide
  Sense strand starting at position 550 of SEQ ID NO: 1561143
cugggaaguucuugggaau

SEQ ID NO: 1649874 - RNA, 19 nt, Artificial Sequence
  Description of Artificial Sequence: Synthetic oligonucleotide
  Antisense strand to SEQ ID NO: 1649873
auucccaagaacuucccag

SEQ ID NO: 1649875 - RNA, 19 nt, Artificial Sequence
  Description of Artificial Sequence: Synthetic oligonucleotide
  Sense strand starting at position 551 of SEQ ID NO: 1561143
ugggaaguucuugggaaua

SEQ ID NO: 1649876 - RNA, 19 nt, Artificial Sequence
  Description of Artificial Sequence: Synthetic oligonucleotide
  Antisense strand to SEQ ID NO: 1649875
uauucccaagaacuuccca

SEQ ID NO: 1649877 - RNA, 19 nt, Artificial Sequence
  Description of Artificial Sequence: Synthetic oligonucleotide
  Sense strand starting at position 553 of SEQ ID NO: 1561143
ggaaguucuugggaauagc

SEQ ID NO: 1649878 - RNA, 19 nt, Artificial Sequence
  Description of Artificial Sequence: Synthetic oligonucleotide
  Antisense strand to SEQ ID NO: 1649877
gcuauucccaagaacuucc

SEQ ID NO: 1649879 - RNA, 19 nt, Artificial Sequence
  Description of Artificial Sequence: Synthetic oligonucleotide
  Sense strand starting at position 563 of SEQ ID NO: 1561143
gggaauagcaacuaguucu

SEQ ID NO: 1649880 - RNA, 19 nt, Artificial Sequence
  Description of Artificial Sequence: Synthetic oligonucleotide
  Antisense strand to SEQ ID NO: 1649879
agaacuaguugcuauuccc

SEQ ID NO: 1649881 - RNA, 19 nt, Artificial Sequence
  Description of Artificial Sequence: Synthetic oligonucleotide
  Sense strand starting at position 570 of SEQ ID NO: 1561143
gcaacuaguucuguuccau

SEQ ID NO: 1649882 - RNA, 19 nt, Artificial Sequence
  Description of Artificial Sequence: Synthetic oligonucleotide
  Antisense strand to SEQ ID NO: 1649881
auggaacagaacuaguugc

SEQ ID NO: 1649883 - RNA, 19 nt, Artificial Sequence
  Description of Artificial Sequence: Synthetic oligonucleotide
  Sense strand starting at position 746 of SEQ ID NO: 1561143
gccacaccuugucuaugua

SEQ ID NO: 1649884 - RNA, 19 nt, Artificial Sequence
  Description of Artificial Sequence: Synthetic oligonucleotide
  Antisense strand to SEQ ID NO: 1649883
uacauagacaagguguggc

SEQ ID NO: 1649885 - RNA, 19 nt, Artificial Sequence
  Description of Artificial Sequence: Synthetic oligonucleotide
  Sense strand starting at position 747 of SEQ ID NO: 1561143
ccacaccuugucuauguaa

SEQ ID NO: 1649886 - RNA, 19 nt, Artificial Sequence
  Description of Artificial Sequence: Synthetic oligonucleotide
  Antisense strand to SEQ ID NO: 1649885
uuacauagacaaggugugg

SEQ ID NO: 1649887 - RNA, 19 nt, Artificial Sequence
  Description of Artificial Sequence: Synthetic oligonucleotide
  Sense strand starting at position 749 of SEQ ID NO: 1561143
acaccuugucuauguaacu

SEQ ID NO: 1649888 - RNA, 19 nt, Artificial Sequence
  Description of Artificial Sequence: Synthetic oligonucleotide
  Antisense strand to SEQ ID NO: 1649887
aguuacauagacaaggugu

SEQ ID NO: 1649889 - RNA, 19 nt, Artificial Sequence
  Description of Artificial Sequence: Synthetic oligonucleotide
  Sense strand starting at position 1121 of SEQ ID NO: 1561143
uggauuugcuugcuuguua

SEQ ID NO: 1649890 - RNA, 19 nt, Artificial Sequence
  Description of Artificial Sequence: Synthetic oligonucleotide
  Antisense strand to SEQ ID NO: 1649889
uaacaagcaagcaaaucca

SEQ ID NO: 1649891 - RNA, 19 nt, Artificial Sequence
  Description of Artificial Sequence: Synthetic oligonucleotide
  Sense strand starting at position 1132 of SEQ ID NO: 1561143
gcuuguuaguucugccuuu

SEQ ID NO: 1649892 - RNA, 19 nt, Artificial Sequence
  Description of Artificial Sequence: Synthetic oligonucleotide
  Antisense strand to SEQ ID NO: 1649891
aaaggcagaacuaacaagc

SEQ ID NO: 1649893 - RNA, 19 nt, Artificial Sequence
  Description of Artificial Sequence: Synthetic oligonucleotide
  Sense strand starting at position 1177 of SEQ ID NO: 1561143
ugcucaacuccugaugcuu

SEQ ID NO: 1649894 - RNA, 19 nt, Artificial Sequence
  Description of Artificial Sequence: Synthetic oligonucleotide
  Antisense strand to SEQ ID NO: 1649893
aagcaucaggaguugagca

SEQ ID NO: 1649895 - RNA, 19 nt, Artificial Sequence
  Description of Artificial Sequence: Synthetic oligonucleotide
  Sense strand starting at position 1753 of SEQ ID NO: 1561143
cgcgagucaugcugggagu

SEQ ID NO: 1649896 - RNA, 19 nt, Artificial Sequence
  Description of Artificial Sequence: Synthetic oligonucleotide
  Antisense strand to SEQ ID NO: 1649895
acucccagcaugacucgcg

SEQ ID NO: 1649897 - RNA, 19 nt, Artificial Sequence
  Description of Artificial Sequence: Synthetic oligonucleotide
  Sense strand starting at position 1754 of SEQ ID NO: 1561143
gcgagucaugcugggaguu

SEQ ID NO: 1649898 - RNA, 19 nt, Artificial Sequence
  Description of Artificial Sequence: Synthetic oligonucleotide
  Antisense strand to SEQ ID NO: 1649897
aacucccagcaugacucgc

SEQ ID NO: 1649899 - RNA, 19 nt, Artificial Sequence
  Description of Artificial Sequence: Synthetic oligonucleotide
  Sense strand starting at position 1756 of SEQ ID NO: 1561143
gagucaugcugggaguugu

SEQ ID NO: 1649900 - RNA, 19 nt, Artificial Sequence
  Description of Artificial Sequence: Synthetic oligonucleotide
  Antisense strand to SEQ ID NO: 1649899
acaacucccagcaugacuc

SEQ ID NO: 1649901 - RNA, 19 nt, Artificial Sequence
  Description of Artificial Sequence: Synthetic oligonucleotide
  Sense strand starting at position 1760 of SEQ ID NO: 1561143
caugcugggaguuguagua

SEQ ID NO: 1649902 - RNA, 19 nt, Artificial Sequence
  Description of Artificial Sequence: Synthetic oligonucleotide
  Antisense strand to SEQ ID NO: 1649901
uacuacaacucccagcaug

SEQ ID NO: 1649903 - RNA, 19 nt, Artificial Sequence
  Description of Artificial Sequence: Synthetic oligonucleotide
  Sense strand starting at position 2014 of SEQ ID NO: 1561143
acggguuguugccaggaca

SEQ ID NO: 1649904 - RNA, 19 nt, Artificial Sequence
  Description of Artificial Sequence: Synthetic oligonucleotide
  Antisense strand to SEQ ID NO: 1649903
uguccuggcaacaacccgu

SEQ ID NO: 1649905 - RNA, 19 nt, Artificial Sequence
  Description of Artificial Sequence: Synthetic oligonucleotide
  Sense strand starting at position 2855 of SEQ ID NO: 1561143
gcgcgugugugguguguau

SEQ ID NO: 1649906 - RNA, 19 nt, Artificial Sequence
  Description of Artificial Sequence: Synthetic oligonucleotide
  Antisense strand to SEQ ID NO: 1649905
auacacaccacacacgcgc

SEQ ID NO: 1649907 - RNA, 19 nt, Artificial Sequence
  Description of Artificial Sequence: Synthetic oligonucleotide
  Sense strand starting at position 2966 of SEQ ID NO: 1561143
uguuuauccuggugcuuua

SEQ ID NO: 1649908 - RNA, 19 nt, Artificial Sequence
  Description of Artificial Sequence: Synthetic oligonucleotide
  Antisense strand to SEQ ID NO: 1649907
uaaagcaccaggauaaaca

SEQ ID NO: 1649909 - RNA, 19 nt, Artificial Sequence
  Description of Artificial Sequence: Synthetic oligonucleotide
  Sense strand starting at position 3062 of SEQ ID NO: 1561143
cccuguauagcccaaagaa

SEQ ID NO: 1649910 - RNA, 19 nt, Artificial Sequence
  Description of Artificial Sequence: Synthetic oligonucleotide
  Antisense strand to SEQ ID NO: 1649909
uucuuugggcuauacaggg

SEQ ID NO: 1649911 - RNA, 19 nt, Artificial Sequence
  Description of Artificial Sequence: Synthetic oligonucleotide
  Sense strand starting at position 3631 of SEQ ID NO: 1561143
cacugccuucucugagaga

SEQ ID NO: 1649912 - RNA, 19 nt, Artificial Sequence
  Description of Artificial Sequence: Synthetic oligonucleotide
  Antisense strand to SEQ ID NO: 1649911
ucucucagagaaggcagug

SEQ ID NO: 1649913 - RNA, 19 nt, Artificial Sequence
  Description of Artificial Sequence: Synthetic oligonucleotide
  Sense strand starting at position 3718 of SEQ ID NO: 1561143
ucgccucgaucccuagaua

SEQ ID NO: 1649914 - RNA, 19 nt, Artificial Sequence
  Description of Artificial Sequence: Synthetic oligonucleotide
  Antisense strand to SEQ ID NO: 1649913
uaucuagggaucgaggcga

SEQ ID NO: 1649915 - RNA, 19 nt, Artificial Sequence
  Description of Artificial Sequence: Synthetic oligonucleotide
  Sense strand starting at position 3721 of SEQ ID NO: 1561143
ccucgaucccuagauacca

SEQ ID NO: 1649916 - RNA, 19 nt, Artificial Sequence
  Description of Artificial Sequence: Synthetic oligonucleotide
  Antisense strand to SEQ ID NO: 1649915
ugguaucuagggaucgagg

SEQ ID NO: 1649917 - RNA, 19 nt, Artificial Sequence
  Description of Artificial Sequence: Synthetic oligonucleotide
  Sense strand starting at position 212 of SEQ ID NO: 1561144
uggauuugcuugcuuguua

SEQ ID NO: 1649918 - RNA, 19 nt, Artificial Sequence
  Description of Artificial Sequence: Synthetic oligonucleotide
  Antisense strand to SEQ ID NO: 1649917
uaacaagcaagcaaaucca

SEQ ID NO: 1649919 - RNA, 19 nt, Artificial Sequence
  Description of Artificial Sequence: Synthetic oligonucleotide
  Sense strand starting at position 223 of SEQ ID NO: 1561144
gcuuguuaguucugccuuu

SEQ ID NO: 1649920 - RNA, 19 nt, Artificial Sequence
  Description of Artificial Sequence: Synthetic oligonucleotide
  Antisense strand to SEQ ID NO: 1649919
aaaggcagaacuaacaagc

SEQ ID NO: 1649921 - RNA, 19 nt, Artificial Sequence
  Description of Artificial Sequence: Synthetic oligonucleotide
  Sense strand starting at position 268 of SEQ ID NO: 1561144
ugcucaacuccugaugcuu

SEQ ID NO: 1649922 - RNA, 19 nt, Artificial Sequence
  Description of Artificial Sequence: Synthetic oligonucleotide
  Antisense strand to SEQ ID NO: 1649921
aagcaucaggaguugagca

SEQ ID NO: 1649923 - RNA, 19 nt, Artificial Sequence
  Description of Artificial Sequence: Synthetic oligonucleotide
  Sense strand starting at position 844 of SEQ ID NO: 1561144
cgcgagucaugcugggagu

SEQ ID NO: 1649924 - RNA, 19 nt, Artificial Sequence
  Description of Artificial Sequence: Synthetic oligonucleotide
  Antisense strand to SEQ ID NO: 1649923
acucccagcaugacucgcg

SEQ ID NO: 1649925 - RNA, 19 nt, Artificial Sequence
  Description of Artificial Sequence: Synthetic oligonucleotide
  Sense strand starting at position 845 of SEQ ID NO: 1561144
gcgagucaugcugggaguu

SEQ ID NO: 1649926 - RNA, 19 nt, Artificial Sequence
  Description of Artificial Sequence: Synthetic oligonucleotide
  Antisense strand to SEQ ID NO: 1649925
aacucccagcaugacucgc

SEQ ID NO: 1649927 - RNA, 19 nt, Artificial Sequence
  Description of Artificial Sequence: Synthetic oligonucleotide
  Sense strand starting at position 847 of SEQ ID NO: 1561144
gagucaugcugggaguugu

SEQ ID NO: 1649928 - RNA, 19 nt, Artificial Sequence
  Description of Artificial Sequence: Synthetic oligonucleotide
  Antisense strand to SEQ ID NO: 1649927
acaacucccagcaugacuc

SEQ ID NO: 1649929 - RNA, 19 nt, Artificial Sequence
  Description of Artificial Sequence: Synthetic oligonucleotide
  Sense strand starting at position 851 of SEQ ID NO: 1561144
caugcugggaguuguagua

SEQ ID NO: 1649930 - RNA, 19 nt, Artificial Sequence
  Description of Artificial Sequence: Synthetic oligonucleotide
  Antisense strand to SEQ ID NO: 1649929
uacuacaacucccagcaug

SEQ ID NO: 1649931 - RNA, 19 nt, Artificial Sequence
  Description of Artificial Sequence: Synthetic oligonucleotide
  Sense strand starting at position 1105 of SEQ ID NO: 1561144
acggguuguugccaggaca

SEQ ID NO: 1649932 - RNA, 19 nt, Artificial Sequence
  Description of Artificial Sequence: Synthetic oligonucleotide
  Antisense strand to SEQ ID NO: 1649931
uguccuggcaacaacccgu

SEQ ID NO: 1649933 - RNA, 19 nt, Artificial Sequence
  Description of Artificial Sequence: Synthetic oligonucleotide
  Sense strand starting at position 1946 of SEQ ID NO: 1561144
gcgcgugugugguguguau

SEQ ID NO: 1649934 - RNA, 19 nt, Artificial Sequence
  Description of Artificial Sequence: Synthetic oligonucleotide
  Antisense strand to SEQ ID NO: 1649933
auacacaccacacacgcgc

SEQ ID NO: 1649935 - RNA, 19 nt, Artificial Sequence
  Description of Artificial Sequence: Synthetic oligonucleotide
  Sense strand starting at position 2057 of SEQ ID NO: 1561144
uguuuauccuggugcuuua

SEQ ID NO: 1649936 - RNA, 19 nt, Artificial Sequence
  Description of Artificial Sequence: Synthetic oligonucleotide
  Antisense strand to SEQ ID NO: 1649935
uaaagcaccaggauaaaca

SEQ ID NO: 1649937 - RNA, 19 nt, Artificial Sequence
  Description of Artificial Sequence: Synthetic oligonucleotide
  Sense strand starting at position 2153 of SEQ ID NO: 1561144
cccuguauagcccaaagaa

SEQ ID NO: 1649938 - RNA, 19 nt, Artificial Sequence
  Description of Artificial Sequence: Synthetic oligonucleotide
  Antisense strand to SEQ ID NO: 1649937
uucuuugggcuauacaggg

SEQ ID NO: 1649939 - RNA, 19 nt, Artificial Sequence
  Description of Artificial Sequence: Synthetic oligonucleotide
  Sense strand starting at position 2722 of SEQ ID NO: 1561144
cacugccuucucugagaga

SEQ ID NO: 1649940 - RNA, 19 nt, Artificial Sequence
  Description of Artificial Sequence: Synthetic oligonucleotide
  Antisense strand to SEQ ID NO: 1649939
ucucucagagaaggcagug

SEQ ID NO: 1649941 - RNA, 19 nt, Artificial Sequence
  Description of Artificial Sequence: Synthetic oligonucleotide
  Sense strand starting at position 2809 of SEQ ID NO: 1561144
ucgccucgaucccuagaua

SEQ ID NO: 1649942 - RNA, 19 nt, Artificial Sequence
  Description of Artificial Sequence: Synthetic oligonucleotide
  Antisense strand to SEQ ID NO: 1649941
uaucuagggaucgaggcga

SEQ ID NO: 1649943 - RNA, 19 nt, Artificial Sequence
  Description of Artificial Sequence: Synthetic oligonucleotide
  Sense strand starting at position 2812 of SEQ ID NO: 1561144
ccucgaucccuagauacca

SEQ ID NO: 1649944 - RNA, 19 nt, Artificial Sequence
  Description of Artificial Sequence: Synthetic oligonucleotide
  Antisense strand to SEQ ID NO: 1649943
ugguaucuagggaucgagg

SEQ ID NO: 1649945 - RNA, 19 nt, Artificial Sequence
  Description of Artificial Sequence: Synthetic oligonucleotide
  Sense strand starting at position 3321 of SEQ ID NO: 1561144
ucugcucuuccaggaaucu

SEQ ID NO: 1649946 - RNA, 19 nt, Artificial Sequence
  Description of Artificial Sequence: Synthetic oligonucleotide
  Antisense strand to SEQ ID NO: 1649945
agauuccuggaagagcaga

SEQ ID NO: 1649947 - RNA, 19 nt, Artificial Sequence
  Description of Artificial Sequence: Synthetic oligonucleotide
  Sense strand starting at position 3330 of SEQ ID NO: 1561144
ccaggaaucugggcucaag

SEQ ID NO: 1649948 - RNA, 19 nt, Artificial Sequence
  Description of Artificial Sequence: Synthetic oligonucleotide
  Antisense strand to SEQ ID NO: 1649947
cuugagcccagauuccugg

SEQ ID NO: 1649949 - RNA, 19 nt, Artificial Sequence
  Description of Artificial Sequence: Synthetic oligonucleotide
  Sense strand starting at position 3348 of SEQ ID NO: 1561144
guggguguccagagcuuga

SEQ ID NO: 1649950 - RNA, 19 nt, Artificial Sequence
  Description of Artificial Sequence: Synthetic oligonucleotide
  Antisense strand to SEQ ID NO: 1649949
ucaagcucuggacacccac

SEQ ID NO: 1649951 - RNA, 19 nt, Artificial Sequence
  Description of Artificial Sequence: Synthetic oligonucleotide
  Sense strand starting at position 3352 of SEQ ID NO: 1561144
guguccagagcuugaggau

SEQ ID NO: 1649952 - RNA, 19 nt, Artificial Sequence
  Description of Artificial Sequence: Synthetic oligonucleotide
  Antisense strand to SEQ ID NO: 1649951
auccucaagcucuggacac

SEQ ID NO: 1649953 - RNA, 19 nt, Artificial Sequence
  Description of Artificial Sequence: Synthetic oligonucleotide
  Sense strand starting at position 3431 of SEQ ID NO: 1561144
cggccacguucucguagau

SEQ ID NO: 1649954 - RNA, 19 nt, Artificial Sequence
  Description of Artificial Sequence: Synthetic oligonucleotide
  Antisense strand to SEQ ID NO: 1649953
aucuacgagaacguggccg

SEQ ID NO: 1649955 - RNA, 19 nt, Artificial Sequence
  Description of Artificial Sequence: Synthetic oligonucleotide
  Sense strand starting at position 3869 of SEQ ID NO: 1561144
agggaucuguguuugaaug

SEQ ID NO: 1649956 - RNA, 19 nt, Artificial Sequence
  Description of Artificial Sequence: Synthetic oligonucleotide
  Antisense strand to SEQ ID NO: 1649955
cauucaaacacagaucccu

SEQ ID NO: 1649957 - RNA, 19 nt, Artificial Sequence
  Description of Artificial Sequence: Synthetic oligonucleotide
  Sense strand starting at position 3870 of SEQ ID NO: 1561144
gggaucuguguuugaauga

SEQ ID NO: 1649958 - RNA, 19 nt, Artificial Sequence
  Description of Artificial Sequence: Synthetic oligonucleotide
  Antisense strand to SEQ ID NO: 1649957
ucauucaaacacagauccc

SEQ ID NO: 1649959 - RNA, 19 nt, Artificial Sequence
  Description of Artificial Sequence: Synthetic oligonucleotide
  Sense strand starting at position 3871 of SEQ ID NO: 1561144
ggaucuguguuugaaugau

SEQ ID NO: 1649960 - RNA, 19 nt, Artificial Sequence
  Description of Artificial Sequence: Synthetic oligonucleotide
  Antisense strand to SEQ ID NO: 1649959
aucauucaaacacagaucc

SEQ ID NO: 1649961 - RNA, 19 nt, Artificial Sequence
  Description of Artificial Sequence: Synthetic oligonucleotide
  Sense strand starting at position 3875 of SEQ ID NO: 1561144
cuguguuugaaugaugaca

SEQ ID NO: 1649962 - RNA, 19 nt, Artificial Sequence
  Description of Artificial Sequence: Synthetic oligonucleotide
  Antisense strand to SEQ ID NO: 1649961
ugucaucauucaaacacag

SEQ ID NO: 1649963 - RNA, 19 nt, Artificial Sequence
  Description of Artificial Sequence: Synthetic oligonucleotide
  Sense strand starting at position 3877 of SEQ ID NO: 1561144
guguuugaaugaugacaau

SEQ ID NO: 1649964 - RNA, 19 nt, Artificial Sequence
  Description of Artificial Sequence: Synthetic oligonucleotide
  Antisense strand to SEQ ID NO: 1649963
auugucaucauucaaacac

SEQ ID NO: 1649965 - RNA, 19 nt, Artificial Sequence
  Description of Artificial Sequence: Synthetic oligonucleotide
  Sense strand starting at position 3880 of SEQ ID NO: 1561144
uuugaaugaugacaauaac

SEQ ID NO: 1649966 - RNA, 19 nt, Artificial Sequence
  Description of Artificial Sequence: Synthetic oligonucleotide
  Antisense strand to SEQ ID NO: 1649965
guuauugucaucauucaaa

SEQ ID NO: 1649967 - RNA, 19 nt, Artificial Sequence
  Description of Artificial Sequence: Synthetic oligonucleotide
  Sense strand starting at position 1 of SEQ ID NO: 1561145
gggaauugugauuguuaau

SEQ ID NO: 1649968 - RNA, 19 nt, Artificial Sequence
  Description of Artificial Sequence: Synthetic oligonucleotide
  Antisense strand to SEQ ID NO: 1649967
auuaacaaucacaauuccc

SEQ ID NO: 1649969 - RNA, 19 nt, Artificial Sequence
  Description of Artificial Sequence: Synthetic oligonucleotide
  Sense strand starting at position 53 of SEQ ID NO: 1561145
ugggauaucugguuaaaca

SEQ ID NO: 1649970 - RNA, 19 nt, Artificial Sequence
  Description of Artificial Sequence: Synthetic oligonucleotide
  Antisense strand to SEQ ID NO: 1649969
uguuuaaccagauauccca

SEQ ID NO: 1649971 - RNA, 19 nt, Artificial Sequence
  Description of Artificial Sequence: Synthetic oligonucleotide
  Sense strand starting at position 108 of SEQ ID NO: 1561145
agaucagcauuugaaucua

SEQ ID NO: 1649972 - RNA, 19 nt, Artificial Sequence
  Description of Artificial Sequence: Synthetic oligonucleotide
  Antisense strand to SEQ ID NO: 1649971
uagauucaaaugcugaucu

SEQ ID NO: 1649973 - RNA, 19 nt, Artificial Sequence
  Description of Artificial Sequence: Synthetic oligonucleotide
  Sense strand starting at position 1278 of SEQ ID NO: 1561145
aguuaucuauuugacacua

SEQ ID NO: 1649974 - RNA, 19 nt, Artificial Sequence
  Description of Artificial Sequence: Synthetic oligonucleotide
  Antisense strand to SEQ ID NO: 1649973
uagugucaaauagauaacu

SEQ ID NO: 1649975 - RNA, 19 nt, Artificial Sequence
  Description of Artificial Sequence: Synthetic oligonucleotide
  Sense strand starting at position 1637 of SEQ ID NO: 1561145
agguuucuauucugaauac

SEQ ID NO: 1649976 - RNA, 19 nt, Artificial Sequence
  Description of Artificial Sequence: Synthetic oligonucleotide
  Antisense strand to SEQ ID NO: 1649975
guauucagaauagaaaccu

SEQ ID NO: 1649977 - RNA, 19 nt, Artificial Sequence
  Description of Artificial Sequence: Synthetic oligonucleotide
  Sense strand starting at position 1638 of SEQ ID NO: 1561145
gguuucuauucugaauacu

SEQ ID NO: 1649978 - RNA, 19 nt, Artificial Sequence
  Description of Artificial Sequence: Synthetic oligonucleotide
  Antisense strand to SEQ ID NO: 1649977
aguauucagaauagaaacc

SEQ ID NO: 1649979 - RNA, 19 nt, Artificial Sequence
  Description of Artificial Sequence: Synthetic oligonucleotide
  Sense strand starting at position 1677 of SEQ ID NO: 1561145
cagaguugauccugagaaa

SEQ ID NO: 1649980 - RNA, 19 nt, Artificial Sequence
  Description of Artificial Sequence: Synthetic oligonucleotide
  Antisense strand to SEQ ID NO: 1649979
uuucucaggaucaacucug

SEQ ID NO: 1649981 - RNA, 19 nt, Artificial Sequence
  Description of Artificial Sequence: Synthetic oligonucleotide
  Sense strand starting at position 1777 of SEQ ID NO: 1561145
agcacucguuuccagggaa

SEQ ID NO: 1649982 - RNA, 19 nt, Artificial Sequence
  Description of Artificial Sequence: Synthetic oligonucleotide
  Antisense strand to SEQ ID NO: 1649981
uucccuggaaacgagugcu

SEQ ID NO: 1649983 - RNA, 19 nt, Artificial Sequence
  Description of Artificial Sequence: Synthetic oligonucleotide
  Sense strand starting at position 1780 of SEQ ID NO: 1561145
acucguuuccagggaaugu

SEQ ID NO: 1649984 - RNA, 19 nt, Artificial Sequence
  Description of Artificial Sequence: Synthetic oligonucleotide
  Antisense strand to SEQ ID NO: 1649983
acauucccuggaaacgagu

SEQ ID NO: 1649985 - RNA, 19 nt, Artificial Sequence
  Description of Artificial Sequence: Synthetic oligonucleotide
  Sense strand starting at position 1790 of SEQ ID NO: 1561145
agggaaugucugcagugca

SEQ ID NO: 1649986 - RNA, 19 nt, Artificial Sequence
  Description of Artificial Sequence: Synthetic oligonucleotide
  Antisense strand to SEQ ID NO: 1649985
ugcacugcagacauucccu

SEQ ID NO: 1649987 - RNA, 19 nt, Artificial Sequence
  Description of Artificial Sequence: Synthetic oligonucleotide
  Sense strand starting at position 1832 of SEQ ID NO: 1561145
ccgugugcucaguaagcca

SEQ ID NO: 1649988 - RNA, 19 nt, Artificial Sequence
  Description of Artificial Sequence: Synthetic oligonucleotide
  Antisense strand to SEQ ID NO: 1649987
uggcuuacugagcacacgg

SEQ ID NO: 1649989 - RNA, 19 nt, Artificial Sequence
  Description of Artificial Sequence: Synthetic oligonucleotide
  Sense strand starting at position 1846 of SEQ ID NO: 1561145
agccaaaguugauguuauu

SEQ ID NO: 1649990 - RNA, 19 nt, Artificial Sequence
  Description of Artificial Sequence: Synthetic oligonucleotide
  Antisense strand to SEQ ID NO: 1649989
aauaacaucaacuuuggcu

SEQ ID NO: 1649991 - RNA, 19 nt, Artificial Sequence
  Description of Artificial Sequence: Synthetic oligonucleotide
  Sense strand starting at position 1918 of SEQ ID NO: 1561145
aguggauagcccugugaga

SEQ ID NO: 1649992 - RNA, 19 nt, Artificial Sequence
  Description of Artificial Sequence: Synthetic oligonucleotide
  Antisense strand to SEQ ID NO: 1649991
ucucacagggcuauccacu

SEQ ID NO: 1649993 - RNA, 19 nt, Artificial Sequence
  Description of Artificial Sequence: Synthetic oligonucleotide
  Sense strand starting at position 1920 of SEQ ID NO: 1561145
uggauagcccugugagacu

SEQ ID NO: 1649994 - RNA, 19 nt, Artificial Sequence
  Description of Artificial Sequence: Synthetic oligonucleotide
  Antisense strand to SEQ ID NO: 1649993
agucucacagggcuaucca

SEQ ID NO: 1649995 - RNA, 19 nt, Artificial Sequence
  Description of Artificial Sequence: Synthetic oligonucleotide
  Sense strand starting at position 1929 of SEQ ID NO: 1561145
cugugagacuuacugaaac

SEQ ID NO: 1649996 - RNA, 19 nt, Artificial Sequence
  Description of Artificial Sequence: Synthetic oligonucleotide
  Antisense strand to SEQ ID NO: 1649995
guuucaguaagucucacag

SEQ ID NO: 1649997 - RNA, 19 nt, Artificial Sequence
  Description of Artificial Sequence: Synthetic oligonucleotide
  Sense strand starting at position 1969 of SEQ ID NO: 1561145
ggaucaugauggcuccuua

SEQ ID NO: 1649998 - RNA, 19 nt, Artificial Sequence
  Description of Artificial Sequence: Synthetic oligonucleotide
  Antisense strand to SEQ ID NO: 1649997
uaaggagccaucaugaucc

SEQ ID NO: 1649999 - RNA, 19 nt, Artificial Sequence
  Description of Artificial Sequence: Synthetic oligonucleotide
  Sense strand starting at position 2009 of SEQ ID NO: 1561145
gguucugcaguccacagau

SEQ ID NO: 1650000 - RNA, 19 nt, Artificial Sequence
  Description of Artificial Sequence: Synthetic oligonucleotide
  Antisense strand to SEQ ID NO: 1649999
aucuguggacugcagaacc

SEQ ID NO: 1650001 - RNA, 19 nt, Artificial Sequence
  Description of Artificial Sequence: Synthetic oligonucleotide
  Sense strand starting at position 2127 of SEQ ID NO: 1561145
caggaaacauguugauguu

SEQ ID NO: 1650002 - RNA, 19 nt, Artificial Sequence
  Description of Artificial Sequence: Synthetic oligonucleotide
  Antisense strand to SEQ ID NO: 1650001
aacaucaacauguuuccug

SEQ ID NO: 1650003 - RNA, 19 nt, Artificial Sequence
  Description of Artificial Sequence: Synthetic oligonucleotide
  Sense strand starting at position 2140 of SEQ ID NO: 1561145
gauguugcugauugcaaca

SEQ ID NO: 1650004 - RNA, 19 nt, Artificial Sequence
  Description of Artificial Sequence: Synthetic oligonucleotide
  Antisense strand to SEQ ID NO: 1650003
uguugcaaucagcaacauc

SEQ ID NO: 1650005 - RNA, 19 nt, Artificial Sequence
  Description of Artificial Sequence: Synthetic oligonucleotide
  Sense strand starting at position 2185 of SEQ ID NO: 1561145
gcacuugacucacaggaaa

SEQ ID NO: 1650006 - RNA, 19 nt, Artificial Sequence
  Description of Artificial Sequence: Synthetic oligonucleotide
  Antisense strand to SEQ ID NO: 1650005
uuuccugugagucaagugc

SEQ ID NO: 1650007 - RNA, 19 nt, Artificial Sequence
  Description of Artificial Sequence: Synthetic oligonucleotide
  Sense strand starting at position 2198 of SEQ ID NO: 1561145
aggaaaugcuccucugucu

SEQ ID NO: 1650008 - RNA, 19 nt, Artificial Sequence
  Description of Artificial Sequence: Synthetic oligonucleotide
  Antisense strand to SEQ ID NO: 1650007
agacagaggagcauuuccu

SEQ ID NO: 1650009 - RNA, 19 nt, Artificial Sequence
  Description of Artificial Sequence: Synthetic oligonucleotide
  Sense strand starting at position 2207 of SEQ ID NO: 1561145
uccucugucucaggcagau

SEQ ID NO: 1650010 - RNA, 19 nt, Artificial Sequence
  Description of Artificial Sequence: Synthetic oligonucleotide
  Antisense strand to SEQ ID NO: 1650009
aucugccugagacagagga

SEQ ID NO: 1650011 - RNA, 19 nt, Artificial Sequence
  Description of Artificial Sequence: Synthetic oligonucleotide
  Sense strand starting at position 2270 of SEQ ID NO: 1561145
ccugaaggguucguauuga

SEQ ID NO: 1650012 - RNA, 19 nt, Artificial Sequence
  Description of Artificial Sequence: Synthetic oligonucleotide
  Antisense strand to SEQ ID NO: 1650011
ucaauacgaacccuucagg

SEQ ID NO: 1650013 - RNA, 19 nt, Artificial Sequence
  Description of Artificial Sequence: Synthetic oligonucleotide
  Sense strand starting at position 2274 of SEQ ID NO: 1561145
aaggguucguauugaagag

SEQ ID NO: 1650014 - RNA, 19 nt, Artificial Sequence
  Description of Artificial Sequence: Synthetic oligonucleotide
  Antisense strand to SEQ ID NO: 1650013
cucuucaauacgaacccuu

SEQ ID NO: 1650015 - RNA, 19 nt, Artificial Sequence
  Description of Artificial Sequence: Synthetic oligonucleotide
  Sense strand starting at position 2275 of SEQ ID NO: 1561145
aggguucguauugaagaga

SEQ ID NO: 1650016 - RNA, 19 nt, Artificial Sequence
  Description of Artificial Sequence: Synthetic oligonucleotide
  Antisense strand to SEQ ID NO: 1650015
ucucuucaauacgaacccu

SEQ ID NO: 1650017 - RNA, 19 nt, Artificial Sequence
  Description of Artificial Sequence: Synthetic oligonucleotide
  Sense strand starting at position 2276 of SEQ ID NO: 1561145
ggguucguauugaagagau

SEQ ID NO: 1650018 - RNA, 19 nt, Artificial Sequence
  Description of Artificial Sequence: Synthetic oligonucleotide
  Antisense strand to SEQ ID NO: 1650017
aucucuucaauacgaaccc

SEQ ID NO: 1650019 - RNA, 19 nt, Artificial Sequence
  Description of Artificial Sequence: Synthetic oligonucleotide
  Sense strand starting at position 2278 of SEQ ID NO: 1561145
guucguauugaagagauga

SEQ ID NO: 1650020 - RNA, 19 nt, Artificial Sequence
  Description of Artificial Sequence: Synthetic oligonucleotide
  Antisense strand to SEQ ID NO: 1650019
ucaucucuucaauacgaac

SEQ ID NO: 1650021 - RNA, 19 nt, Artificial Sequence
  Description of Artificial Sequence: Synthetic oligonucleotide
  Sense strand starting at position 2326 of SEQ ID NO: 1561145
gauggugucugguucuguu

SEQ ID NO: 1650022 - RNA, 19 nt, Artificial Sequence
  Description of Artificial Sequence: Synthetic oligonucleotide
  Antisense strand to SEQ ID NO: 1650021
aacagaaccagacaccauc

SEQ ID NO: 1650023 - RNA, 19 nt, Artificial Sequence
  Description of Artificial Sequence: Synthetic oligonucleotide
  Sense strand starting at position 3008 of SEQ ID NO: 1561145
cugucacaucaagaaaguu

SEQ ID NO: 1650024 - RNA, 19 nt, Artificial Sequence
  Description of Artificial Sequence: Synthetic oligonucleotide
  Antisense strand to SEQ ID NO: 1650023
aacuuucuugaugugacag

SEQ ID NO: 1650025 - RNA, 19 nt, Artificial Sequence
  Description of Artificial Sequence: Synthetic oligonucleotide
  Sense strand starting at position 3706 of SEQ ID NO: 1561145
acagguguuucuuugaaag

SEQ ID NO: 1650026 - RNA, 19 nt, Artificial Sequence
  Description of Artificial Sequence: Synthetic oligonucleotide
  Antisense strand to SEQ ID NO: 1650025
cuuucaaagaaacaccugu

SEQ ID NO: 1650027 - RNA, 19 nt, Artificial Sequence
  Description of Artificial Sequence: Synthetic oligonucleotide
  Sense strand starting at position 3708 of SEQ ID NO: 1561145
agguguuucuuugaaaguu

SEQ ID NO: 1650028 - RNA, 19 nt, Artificial Sequence
  Description of Artificial Sequence: Synthetic oligonucleotide
  Antisense strand to SEQ ID NO: 1650027
aacuuucaaagaaacaccu

SEQ ID NO: 1650029 - RNA, 19 nt, Artificial Sequence
  Description of Artificial Sequence: Synthetic oligonucleotide
  Sense strand starting at position 3855 of SEQ ID NO: 1561145
uuuaguucuccauauugua

SEQ ID NO: 1650030 - RNA, 19 nt, Artificial Sequence
  Description of Artificial Sequence: Synthetic oligonucleotide
  Antisense strand to SEQ ID NO: 1650029
uacaauauggagaacuaaa

SEQ ID NO: 1650031 - RNA, 19 nt, Artificial Sequence
  Description of Artificial Sequence: Synthetic oligonucleotide
  Sense strand starting at position 3885 of SEQ ID NO: 1561145
gacugauauucuugugaau

SEQ ID NO: 1650032 - RNA, 19 nt, Artificial Sequence
  Description of Artificial Sequence: Synthetic oligonucleotide
  Antisense strand to SEQ ID NO: 1650031
auucacaagaauaucaguc

SEQ ID NO: 1650033 - RNA, 19 nt, Artificial Sequence
  Description of Artificial Sequence: Synthetic oligonucleotide
  Sense strand starting at position 3887 of SEQ ID NO: 1561145
cugauauucuugugaaucu

SEQ ID NO: 1650034 - RNA, 19 nt, Artificial Sequence
  Description of Artificial Sequence: Synthetic oligonucleotide
  Antisense strand to SEQ ID NO: 1650033
agauucacaagaauaucag

SEQ ID NO: 1650035 - RNA, 19 nt, Artificial Sequence
  Description of Artificial Sequence: Synthetic oligonucleotide
  Sense strand starting at position 3888 of SEQ ID NO: 1561145
ugauauucuugugaaucuu

SEQ ID NO: 1650036 - RNA, 19 nt, Artificial Sequence
  Description of Artificial Sequence: Synthetic oligonucleotide
  Antisense strand to SEQ ID NO: 1650035
aagauucacaagaauauca

SEQ ID NO: 1650037 - RNA, 19 nt, Artificial Sequence
  Description of Artificial Sequence: Synthetic oligonucleotide
  Sense strand starting at position 3938 of SEQ ID NO: 1561145
uuaaauuaguguugugacu

SEQ ID NO: 1650038 - RNA, 19 nt, Artificial Sequence
  Description of Artificial Sequence: Synthetic oligonucleotide
  Antisense strand to SEQ ID NO: 1650037
agucacaacacuaauuuaa

SEQ ID NO: 1650039 - RNA, 19 nt, Artificial Sequence
  Description of Artificial Sequence: Synthetic oligonucleotide
  Sense strand starting at position 3940 of SEQ ID NO: 1561145
aaauuaguguugugacuca

SEQ ID NO: 1650040 - RNA, 19 nt, Artificial Sequence
  Description of Artificial Sequence: Synthetic oligonucleotide
  Antisense strand to SEQ ID NO: 1650039
ugagucacaacacuaauuu

SEQ ID NO: 1650041 - RNA, 19 nt, Artificial Sequence
  Description of Artificial Sequence: Synthetic oligonucleotide
  Sense strand starting at position 199 of SEQ ID NO: 1561146
uucugcugucccugaaaua

SEQ ID NO: 1650042 - RNA, 19 nt, Artificial Sequence
  Description of Artificial Sequence: Synthetic oligonucleotide
  Antisense strand to SEQ ID NO: 1650041
uauuucagggacagcagaa

SEQ ID NO: 1650043 - RNA, 19 nt, Artificial Sequence
  Description of Artificial Sequence: Synthetic oligonucleotide
  Sense strand starting at position 387 of SEQ ID NO: 1561146
ugggucuggaucugacuua

SEQ ID NO: 1650044 - RNA, 19 nt, Artificial Sequence
  Description of Artificial Sequence: Synthetic oligonucleotide
  Antisense strand to SEQ ID NO: 1650043
uaagucagauccagaccca

SEQ ID NO: 1650045 - RNA, 19 nt, Artificial Sequence
  Description of Artificial Sequence: Synthetic oligonucleotide
  Sense strand starting at position 388 of SEQ ID NO: 1561146
gggucuggaucugacuuau

SEQ ID NO: 1650046 - RNA, 19 nt, Artificial Sequence
  Description of Artificial Sequence: Synthetic oligonucleotide
  Antisense strand to SEQ ID NO: 1650045
auaagucagauccagaccc

SEQ ID NO: 1650047 - RNA, 19 nt, Artificial Sequence
  Description of Artificial Sequence: Synthetic oligonucleotide
  Sense strand starting at position 398 of SEQ ID NO: 1561146
cugacuuaucucugggucu

SEQ ID NO: 1650048 - RNA, 19 nt, Artificial Sequence
  Description of Artificial Sequence: Synthetic oligonucleotide
  Antisense strand to SEQ ID NO: 1650047
agacccagagauaagucag

SEQ ID NO: 1650049 - RNA, 19 nt, Artificial Sequence
  Description of Artificial Sequence: Synthetic oligonucleotide
  Sense strand starting at position 400 of SEQ ID NO: 1561146
gacuuaucucugggucuca

SEQ ID NO: 1650050 - RNA, 19 nt, Artificial Sequence
  Description of Artificial Sequence: Synthetic oligonucleotide
  Antisense strand to SEQ ID NO: 1650049
ugagacccagagauaaguc

SEQ ID NO: 1650051 - RNA, 19 nt, Artificial Sequence
  Description of Artificial Sequence: Synthetic oligonucleotide
  Sense strand starting at position 405 of SEQ ID NO: 1561146
aucucugggucucagaauu

SEQ ID NO: 1650052 - RNA, 19 nt, Artificial Sequence
  Description of Artificial Sequence: Synthetic oligonucleotide
  Antisense strand to SEQ ID NO: 1650051
aauucugagacccagagau

SEQ ID NO: 1650053 - RNA, 19 nt, Artificial Sequence
  Description of Artificial Sequence: Synthetic oligonucleotide
  Sense strand starting at position 754 of SEQ ID NO: 1561146
cgaguaggucugggauugu

SEQ ID NO: 1650054 - RNA, 19 nt, Artificial Sequence
  Description of Artificial Sequence: Synthetic oligonucleotide
  Antisense strand to SEQ ID NO: 1650053
acaaucccagaccuacucg

SEQ ID NO: 1650055 - RNA, 19 nt, Artificial Sequence
  Description of Artificial Sequence: Synthetic oligonucleotide
  Sense strand starting at position 771 of SEQ ID NO: 1561146
guacgcaggucccucaaau

SEQ ID NO: 1650056 - RNA, 19 nt, Artificial Sequence
  Description of Artificial Sequence: Synthetic oligonucleotide
  Antisense strand to SEQ ID NO: 1650055
auuugagggaccugcguac

SEQ ID NO: 1650057 - RNA, 19 nt, Artificial Sequence
  Description of Artificial Sequence: Synthetic oligonucleotide
  Sense strand starting at position 846 of SEQ ID NO: 1561146
gagccuaccuucuuggaga

SEQ ID NO: 1650058 - RNA, 19 nt, Artificial Sequence
  Description of Artificial Sequence: Synthetic oligonucleotide
  Antisense strand to SEQ ID NO: 1650057
ucuccaagaagguaggcuc

SEQ ID NO: 1650059 - RNA, 19 nt, Artificial Sequence
  Description of Artificial Sequence: Synthetic oligonucleotide
  Sense strand starting at position 849 of SEQ ID NO: 1561146
ccuaccuucuuggagaaga

SEQ ID NO: 1650060 - RNA, 19 nt, Artificial Sequence
  Description of Artificial Sequence: Synthetic oligonucleotide
  Antisense strand to SEQ ID NO: 1650059
ucuucuccaagaagguagg

SEQ ID NO: 1650061 - RNA, 19 nt, Artificial Sequence
  Description of Artificial Sequence: Synthetic oligonucleotide
  Sense strand starting at position 920 of SEQ ID NO: 1561146
gucauuguccuaggguaag

SEQ ID NO: 1650062 - RNA, 19 nt, Artificial Sequence
  Description of Artificial Sequence: Synthetic oligonucleotide
  Antisense strand to SEQ ID NO: 1650061
cuuacccuaggacaaugac

SEQ ID NO: 1650063 - RNA, 19 nt, Artificial Sequence
  Description of Artificial Sequence: Synthetic oligonucleotide
  Sense strand starting at position 1541 of SEQ ID NO: 1561146
gggugacggcgcguuuaua

SEQ ID NO: 1650064 - RNA, 19 nt, Artificial Sequence
  Description of Artificial Sequence: Synthetic oligonucleotide
  Antisense strand to SEQ ID NO: 1650063
uauaaacgcgccgucaccc

SEQ ID NO: 1650065 - RNA, 19 nt, Artificial Sequence
  Description of Artificial Sequence: Synthetic oligonucleotide
  Sense strand starting at position 1542 of SEQ ID NO: 1561146
ggugacggcgcguuuauaa

SEQ ID NO: 1650066 - RNA, 19 nt, Artificial Sequence
  Description of Artificial Sequence: Synthetic oligonucleotide
  Antisense strand to SEQ ID NO: 1650065
uuauaaacgcgccgucacc

SEQ ID NO: 1650067 - RNA, 19 nt, Artificial Sequence
  Description of Artificial Sequence: Synthetic oligonucleotide
  Sense strand starting at position 1551 of SEQ ID NO: 1561146
gcguuuauaagagaucggu

SEQ ID NO: 1650068 - RNA, 19 nt, Artificial Sequence
  Description of Artificial Sequence: Synthetic oligonucleotide
  Antisense strand to SEQ ID NO: 1650067
accgaucucuuauaaacgc

SEQ ID NO: 1650069 - RNA, 19 nt, Artificial Sequence
  Description of Artificial Sequence: Synthetic oligonucleotide
  Sense strand starting at position 1554 of SEQ ID NO: 1561146
uuuauaagagaucgguguu

SEQ ID NO: 1650070 - RNA, 19 nt, Artificial Sequence
  Description of Artificial Sequence: Synthetic oligonucleotide
  Antisense strand to SEQ ID NO: 1650069
aacaccgaucucuuauaaa

SEQ ID NO: 1650071 - RNA, 19 nt, Artificial Sequence
  Description of Artificial Sequence: Synthetic oligonucleotide
  Sense strand starting at position 1555 of SEQ ID NO: 1561146
uuauaagagaucgguguuu

SEQ ID NO: 1650072 - RNA, 19 nt, Artificial Sequence
  Description of Artificial Sequence: Synthetic oligonucleotide
  Antisense strand to SEQ ID NO: 1650071
aaacaccgaucucuuauaa

SEQ ID NO: 1650073 - RNA, 19 nt, Artificial Sequence
  Description of Artificial Sequence: Synthetic oligonucleotide
  Sense strand starting at position 1560 of SEQ ID NO: 1561146
agagaucgguguuugccaa

SEQ ID NO: 1650074 - RNA, 19 nt, Artificial Sequence
  Description of Artificial Sequence: Synthetic oligonucleotide
  Antisense strand to SEQ ID NO: 1650073
uuggcaaacaccgaucucu

SEQ ID NO: 1650075 - RNA, 19 nt, Artificial Sequence
  Description of Artificial Sequence: Synthetic oligonucleotide
  Sense strand starting at position 1586 of SEQ ID NO: 1561146
ccggauucucgagagccaa

SEQ ID NO: 1650076 - RNA, 19 nt, Artificial Sequence
  Description of Artificial Sequence: Synthetic oligonucleotide
  Antisense strand to SEQ ID NO: 1650075
uuggcucucgagaauccgg

SEQ ID NO: 1650077 - RNA, 19 nt, Artificial Sequence
  Description of Artificial Sequence: Synthetic oligonucleotide
  Sense strand starting at position 1636 of SEQ ID NO: 1561146
gcguuucgcauacacugaa

SEQ ID NO: 1650078 - RNA, 19 nt, Artificial Sequence
  Description of Artificial Sequence: Synthetic oligonucleotide
  Antisense strand to SEQ ID NO: 1650077
uucaguguaugcgaaacgc

SEQ ID NO: 1650079 - RNA, 19 nt, Artificial Sequence
  Description of Artificial Sequence: Synthetic oligonucleotide
  Sense strand starting at position 2104 of SEQ ID NO: 1561146
cagcuaaggccauguuaau

SEQ ID NO: 1650080 - RNA, 19 nt, Artificial Sequence
  Description of Artificial Sequence: Synthetic oligonucleotide
  Antisense strand to SEQ ID NO: 1650079
auuaacauggccuuagcug

SEQ ID NO: 1650081 - RNA, 19 nt, Artificial Sequence
  Description of Artificial Sequence: Synthetic oligonucleotide
  Sense strand starting at position 2278 of SEQ ID NO: 1561146
ggacgaauuucugagucac

SEQ ID NO: 1650082 - RNA, 19 nt, Artificial Sequence
  Description of Artificial Sequence: Synthetic oligonucleotide
  Antisense strand to SEQ ID NO: 1650081
gugacucagaaauucgucc

SEQ ID NO: 1650083 - RNA, 19 nt, Artificial Sequence
  Description of Artificial Sequence: Synthetic oligonucleotide
  Sense strand starting at position 2347 of SEQ ID NO: 1561146
gcaagaaaugcugccgugu

SEQ ID NO: 1650084 - RNA, 19 nt, Artificial Sequence
  Description of Artificial Sequence: Synthetic oligonucleotide
  Antisense strand to SEQ ID NO: 1650083
acacggcagcauuucuugc

SEQ ID NO: 1650085 - RNA, 19 nt, Artificial Sequence
  Description of Artificial Sequence: Synthetic oligonucleotide
  Sense strand starting at position 2526 of SEQ ID NO: 1561146
ggucgcuugccuucguuua

SEQ ID NO: 1650086 - RNA, 19 nt, Artificial Sequence
  Description of Artificial Sequence: Synthetic oligonucleotide
  Antisense strand to SEQ ID NO: 1650085
uaaacgaaggcaagcgacc

SEQ ID NO: 1650087 - RNA, 19 nt, Artificial Sequence
  Description of Artificial Sequence: Synthetic oligonucleotide
  Sense strand starting at position 2536 of SEQ ID NO: 1561146
cuucguuuacuguggucau

SEQ ID NO: 1650088 - RNA, 19 nt, Artificial Sequence
  Description of Artificial Sequence: Synthetic oligonucleotide
  Antisense strand to SEQ ID NO: 1650087
augaccacaguaaacgaag

SEQ ID NO: 1650089 - RNA, 19 nt, Artificial Sequence
  Description of Artificial Sequence: Synthetic oligonucleotide
  Sense strand starting at position 2539 of SEQ ID NO: 1561146
cguuuacuguggucaugau

SEQ ID NO: 1650090 - RNA, 19 nt, Artificial Sequence
  Description of Artificial Sequence: Synthetic oligonucleotide
  Antisense strand to SEQ ID NO: 1650089
aucaugaccacaguaaacg

SEQ ID NO: 1650091 - RNA, 19 nt, Artificial Sequence
  Description of Artificial Sequence: Synthetic oligonucleotide
  Sense strand starting at position 2540 of SEQ ID NO: 1561146
guuuacuguggucaugauu

SEQ ID NO: 1650092 - RNA, 19 nt, Artificial Sequence
  Description of Artificial Sequence: Synthetic oligonucleotide
  Antisense strand to SEQ ID NO: 1650091
aaucaugaccacaguaaac

SEQ ID NO: 1650093 - RNA, 19 nt, Artificial Sequence
  Description of Artificial Sequence: Synthetic oligonucleotide
  Sense strand starting at position 2546 of SEQ ID NO: 1561146
uguggucaugauugagcau

SEQ ID NO: 1650094 - RNA, 19 nt, Artificial Sequence
  Description of Artificial Sequence: Synthetic oligonucleotide
  Antisense strand to SEQ ID NO: 1650093
augcucaaucaugaccaca

SEQ ID NO: 1650095 - RNA, 19 nt, Artificial Sequence
  Description of Artificial Sequence: Synthetic oligonucleotide
  Sense strand starting at position 2547 of SEQ ID NO: 1561146
guggucaugauugagcaua

SEQ ID NO: 1650096 - RNA, 19 nt, Artificial Sequence
  Description of Artificial Sequence: Synthetic oligonucleotide
  Antisense strand to SEQ ID NO: 1650095
uaugcucaaucaugaccac

SEQ ID NO: 1650097 - RNA, 19 nt, Artificial Sequence
  Description of Artificial Sequence: Synthetic oligonucleotide
  Sense strand starting at position 2549 of SEQ ID NO: 1561146
ggucaugauugagcauaug

SEQ ID NO: 1650098 - RNA, 19 nt, Artificial Sequence
  Description of Artificial Sequence: Synthetic oligonucleotide
  Antisense strand to SEQ ID NO: 1650097
cauaugcucaaucaugacc

SEQ ID NO: 1650099 - RNA, 19 nt, Artificial Sequence
  Description of Artificial Sequence: Synthetic oligonucleotide
  Sense strand starting at position 2646 of SEQ ID NO: 1561146
cuugucaacugguucggau

SEQ ID NO: 1650100 - RNA, 19 nt, Artificial Sequence
  Description of Artificial Sequence: Synthetic oligonucleotide
  Antisense strand to SEQ ID NO: 1650099
auccgaaccaguugacaag

SEQ ID NO: 1650101 - RNA, 19 nt, Artificial Sequence
  Description of Artificial Sequence: Synthetic oligonucleotide
  Sense strand starting at position 2916 of SEQ ID NO: 1561146
ggguauggccugcacagau

SEQ ID NO: 1650102 - RNA, 19 nt, Artificial Sequence
  Description of Artificial Sequence: Synthetic oligonucleotide
  Antisense strand to SEQ ID NO: 1650101
aucugugcaggccauaccc

SEQ ID NO: 1650103 - RNA, 19 nt, Artificial Sequence
  Description of Artificial Sequence: Synthetic oligonucleotide
  Sense strand starting at position 2951 of SEQ ID NO: 1561146
gccagcgauccuuugcuga

SEQ ID NO: 1650104 - RNA, 19 nt, Artificial Sequence
  Description of Artificial Sequence: Synthetic oligonucleotide
  Antisense strand to SEQ ID NO: 1650103
ucagcaaaggaucgcuggc

SEQ ID NO: 1650105 - RNA, 19 nt, Artificial Sequence
  Description of Artificial Sequence: Synthetic oligonucleotide
  Sense strand starting at position 3620 of SEQ ID NO: 1561146
ggcaaagaggucuguggaa

SEQ ID NO: 1650106 - RNA, 19 nt, Artificial Sequence
  Description of Artificial Sequence: Synthetic oligonucleotide
  Antisense strand to SEQ ID NO: 1650105
uuccacagaccucuuugcc

SEQ ID NO: 1650107 - RNA, 19 nt, Artificial Sequence
  Description of Artificial Sequence: Synthetic oligonucleotide
  Sense strand starting at position 3709 of SEQ ID NO: 1561146
ucuuuaaucccguggcuac

SEQ ID NO: 1650108 - RNA, 19 nt, Artificial Sequence
  Description of Artificial Sequence: Synthetic oligonucleotide
  Antisense strand to SEQ ID NO: 1650107
guagccacgggauuaaaga

SEQ ID NO: 1650109 - RNA, 19 nt, Artificial Sequence
  Description of Artificial Sequence: Synthetic oligonucleotide
  Sense strand starting at position 3710 of SEQ ID NO: 1561146
cuuuaaucccguggcuacu

SEQ ID NO: 1650110 - RNA, 19 nt, Artificial Sequence
  Description of Artificial Sequence: Synthetic oligonucleotide
  Antisense strand to SEQ ID NO: 1650109
aguagccacgggauuaaag

SEQ ID NO: 1650111 - RNA, 19 nt, Artificial Sequence
  Description of Artificial Sequence: Synthetic oligonucleotide
  Sense strand starting at position 3733 of SEQ ID NO: 1561146
gauugaguacacggagagu

SEQ ID NO: 1650112 - RNA, 19 nt, Artificial Sequence
  Description of Artificial Sequence: Synthetic oligonucleotide
  Antisense strand to SEQ ID NO: 1650111
acucuccguguacucaauc

SEQ ID NO: 1650113 - RNA, 19 nt, Artificial Sequence
  Description of Artificial Sequence: Synthetic oligonucleotide
  Sense strand starting at position 3788 of SEQ ID NO: 1561146
cucuucuccgcaugucauu

SEQ ID NO: 1650114 - RNA, 19 nt, Artificial Sequence
  Description of Artificial Sequence: Synthetic oligonucleotide
  Antisense strand to SEQ ID NO: 1650113
aaugacaugcggagaagag

SEQ ID NO: 1650115 - RNA, 19 nt, Artificial Sequence
  Description of Artificial Sequence: Synthetic oligonucleotide
  Sense strand starting at position 3873 of SEQ ID NO: 1561146
agccauuucuugcuuagag

SEQ ID NO: 1650116 - RNA, 19 nt, Artificial Sequence
  Description of Artificial Sequence: Synthetic oligonucleotide
  Antisense strand to SEQ ID NO: 1650115
cucuaagcaagaaauggcu

SEQ ID NO: 1650117 - RNA, 19 nt, Artificial Sequence
  Description of Artificial Sequence: Synthetic oligonucleotide
  Sense strand starting at position 3918 of SEQ ID NO: 1561146
gaaggacauggguguguuu

SEQ ID NO: 1650118 - RNA, 19 nt, Artificial Sequence
  Description of Artificial Sequence: Synthetic oligonucleotide
  Antisense strand to SEQ ID NO: 1650117
aaacacacccauguccuuc

SEQ ID NO: 1650119 - RNA, 19 nt, Artificial Sequence
  Description of Artificial Sequence: Synthetic oligonucleotide
  Sense strand starting at position 3920 of SEQ ID NO: 1561146
aggacauggguguguuuga

SEQ ID NO: 1650120 - RNA, 19 nt, Artificial Sequence
  Description of Artificial Sequence: Synthetic oligonucleotide
  Antisense strand to SEQ ID NO: 1650119
ucaaacacacccauguccu

SEQ ID NO: 1650121 - RNA, 19 nt, Artificial Sequence
  Description of Artificial Sequence: Synthetic oligonucleotide
  Sense strand starting at position 11 of SEQ ID NO: 1561147
gagcaauguggcugcuaca

SEQ ID NO: 1650122 - RNA, 19 nt, Artificial Sequence
  Description of Artificial Sequence: Synthetic oligonucleotide
  Antisense strand to SEQ ID NO: 1650121
uguagcagccacauugcuc

SEQ ID NO: 1650123 - RNA, 19 nt, Artificial Sequence
  Description of Artificial Sequence: Synthetic oligonucleotide
  Sense strand starting at position 634 of SEQ ID NO: 1561147
cuaggcugucccugucuaa

SEQ ID NO: 1650124 - RNA, 19 nt, Artificial Sequence
  Description of Artificial Sequence: Synthetic oligonucleotide
  Antisense strand to SEQ ID NO: 1650123
uuagacagggacagccuag

SEQ ID NO: 1650125 - RNA, 19 nt, Artificial Sequence
  Description of Artificial Sequence: Synthetic oligonucleotide
  Sense strand starting at position 637 of SEQ ID NO: 1561147
ggcugucccugucuaauga

SEQ ID NO: 1650126 - RNA, 19 nt, Artificial Sequence
  Description of Artificial Sequence: Synthetic oligonucleotide
  Antisense strand to SEQ ID NO: 1650125
ucauuagacagggacagcc

SEQ ID NO: 1650127 - RNA, 19 nt, Artificial Sequence
  Description of Artificial Sequence: Synthetic oligonucleotide
  Sense strand starting at position 638 of SEQ ID NO: 1561147
gcugucccugucuaaugau

SEQ ID NO: 1650128 - RNA, 19 nt, Artificial Sequence
  Description of Artificial Sequence: Synthetic oligonucleotide
  Antisense strand to SEQ ID NO: 1650127
aucauuagacagggacagc

SEQ ID NO: 1650129 - RNA, 19 nt, Artificial Sequence
  Description of Artificial Sequence: Synthetic oligonucleotide
  Sense strand starting at position 646 of SEQ ID NO: 1561147
ugucuaaugaugggucugu

SEQ ID NO: 1650130 - RNA, 19 nt, Artificial Sequence
  Description of Artificial Sequence: Synthetic oligonucleotide
  Antisense strand to SEQ ID NO: 1650129
acagacccaucauuagaca

SEQ ID NO: 1650131 - RNA, 19 nt, Artificial Sequence
  Description of Artificial Sequence: Synthetic oligonucleotide
  Sense strand starting at position 650 of SEQ ID NO: 1561147
uaaugaugggucugucucu

SEQ ID NO: 1650132 - RNA, 19 nt, Artificial Sequence
  Description of Artificial Sequence: Synthetic oligonucleotide
  Antisense strand to SEQ ID NO: 1650131
agagacagacccaucauua

SEQ ID NO: 1650133 - RNA, 19 nt, Artificial Sequence
  Description of Artificial Sequence: Synthetic oligonucleotide
  Sense strand starting at position 701 of SEQ ID NO: 1561147
ggaccuaucucggguauga

SEQ ID NO: 1650134 - RNA, 19 nt, Artificial Sequence
  Description of Artificial Sequence: Synthetic oligonucleotide
  Antisense strand to SEQ ID NO: 1650133
ucauacccgagauaggucc

SEQ ID NO: 1650135 - RNA, 19 nt, Artificial Sequence
  Description of Artificial Sequence: Synthetic oligonucleotide
  Sense strand starting at position 703 of SEQ ID NO: 1561147
accuaucucggguaugacu

SEQ ID NO: 1650136 - RNA, 19 nt, Artificial Sequence
  Description of Artificial Sequence: Synthetic oligonucleotide
  Antisense strand to SEQ ID NO: 1650135
agucauacccgagauaggu

SEQ ID NO: 1650137 - RNA, 19 nt, Artificial Sequence
  Description of Artificial Sequence: Synthetic oligonucleotide
  Sense strand starting at position 712 of SEQ ID NO: 1561147
ggguaugacugagggcaaa

SEQ ID NO: 1650138 - RNA, 19 nt, Artificial Sequence
  Description of Artificial Sequence: Synthetic oligonucleotide
  Antisense strand to SEQ ID NO: 1650137
uuugcccucagucauaccc

SEQ ID NO: 1650139 - RNA, 19 nt, Artificial Sequence
  Description of Artificial Sequence: Synthetic oligonucleotide
  Sense strand starting at position 733 of SEQ ID NO: 1561147
ccagcaagugucuguugaa

SEQ ID NO: 1650140 - RNA, 19 nt, Artificial Sequence
  Description of Artificial Sequence: Synthetic oligonucleotide
  Antisense strand to SEQ ID NO: 1650139
uucaacagacacuugcugg

SEQ ID NO: 1650141 - RNA, 19 nt, Artificial Sequence
  Description of Artificial Sequence: Synthetic oligonucleotide
  Sense strand starting at position 740 of SEQ ID NO: 1561147
gugucuguugaauaaccaa

SEQ ID NO: 1650142 - RNA, 19 nt, Artificial Sequence
  Description of Artificial Sequence: Synthetic oligonucleotide
  Antisense strand to SEQ ID NO: 1650141
uugguuauucaacagacac

SEQ ID NO: 1650143 - RNA, 19 nt, Artificial Sequence
  Description of Artificial Sequence: Synthetic oligonucleotide
  Sense strand starting at position 787 of SEQ ID NO: 1561147
gauagagaguccucacgug

SEQ ID NO: 1650144 - RNA, 19 nt, Artificial Sequence
  Description of Artificial Sequence: Synthetic oligonucleotide
  Antisense strand to SEQ ID NO: 1650143
cacgugaggacucucuauc

SEQ ID NO: 1650145 - RNA, 19 nt, Artificial Sequence
  Description of Artificial Sequence: Synthetic oligonucleotide
  Sense strand starting at position 2165 of SEQ ID NO: 1561147
uggguauucgcuucugcca

SEQ ID NO: 1650146 - RNA, 19 nt, Artificial Sequence
  Description of Artificial Sequence: Synthetic oligonucleotide
  Antisense strand to SEQ ID NO: 1650145
uggcagaagcgaauaccca

SEQ ID NO: 1650147 - RNA, 19 nt, Artificial Sequence
  Description of Artificial Sequence: Synthetic oligonucleotide
  Sense strand starting at position 2472 of SEQ ID NO: 1561147
agaguccugucgucauauc

SEQ ID NO: 1650148 - RNA, 19 nt, Artificial Sequence
  Description of Artificial Sequence: Synthetic oligonucleotide
  Antisense strand to SEQ ID NO: 1650147
gauaugacgacaggacucu

SEQ ID NO: 1650149 - RNA, 19 nt, Artificial Sequence
  Description of Artificial Sequence: Synthetic oligonucleotide
  Sense strand starting at position 2482 of SEQ ID NO: 1561147
cgucauauccuccgggauc

SEQ ID NO: 1650150 - RNA, 19 nt, Artificial Sequence
  Description of Artificial Sequence: Synthetic oligonucleotide
  Antisense strand to SEQ ID NO: 1650149
gaucccggaggauaugacg

SEQ ID NO: 1650151 - RNA, 19 nt, Artificial Sequence
  Description of Artificial Sequence: Synthetic oligonucleotide
  Sense strand starting at position 2483 of SEQ ID NO: 1561147
gucauauccuccgggauca

SEQ ID NO: 1650152 - RNA, 19 nt, Artificial Sequence
  Description of Artificial Sequence: Synthetic oligonucleotide
  Antisense strand to SEQ ID NO: 1650151
ugaucccggaggauaugac

SEQ ID NO: 1650153 - RNA, 19 nt, Artificial Sequence
  Description of Artificial Sequence: Synthetic oligonucleotide
  Sense strand starting at position 2514 of SEQ ID NO: 1561147
cucccaaucuugucuggaa

SEQ ID NO: 1650154 - RNA, 19 nt, Artificial Sequence
  Description of Artificial Sequence: Synthetic oligonucleotide
  Antisense strand to SEQ ID NO: 1650153
uuccagacaagauugggag

SEQ ID NO: 1650155 - RNA, 19 nt, Artificial Sequence
  Description of Artificial Sequence: Synthetic oligonucleotide
  Sense strand starting at position 2515 of SEQ ID NO: 1561147
ucccaaucuugucuggaau

SEQ ID NO: 1650156 - RNA, 19 nt, Artificial Sequence
  Description of Artificial Sequence: Synthetic oligonucleotide
  Antisense strand to SEQ ID NO: 1650155
auuccagacaagauuggga

SEQ ID NO: 1650157 - RNA, 19 nt, Artificial Sequence
  Description of Artificial Sequence: Synthetic oligonucleotide
  Sense strand starting at position 2516 of SEQ ID NO: 1561147
cccaaucuugucuggaauc

SEQ ID NO: 1650158 - RNA, 19 nt, Artificial Sequence
  Description of Artificial Sequence: Synthetic oligonucleotide
  Antisense strand to SEQ ID NO: 1650157
gauuccagacaagauuggg

SEQ ID NO: 1650159 - RNA, 19 nt, Artificial Sequence
  Description of Artificial Sequence: Synthetic oligonucleotide
  Sense strand starting at position 2611 of SEQ ID NO: 1561147
agcugcaucuaugucaaca

SEQ ID NO: 1650160 - RNA, 19 nt, Artificial Sequence
  Description of Artificial Sequence: Synthetic oligonucleotide
  Antisense strand to SEQ ID NO: 1650159
uguugacauagaugcagcu

SEQ ID NO: 1650161 - RNA, 19 nt, Artificial Sequence
  Description of Artificial Sequence: Synthetic oligonucleotide
  Sense strand starting at position 2694 of SEQ ID NO: 1561147
ggcugggucugagcguaau

SEQ ID NO: 1650162 - RNA, 19 nt, Artificial Sequence
  Description of Artificial Sequence: Synthetic oligonucleotide
  Antisense strand to SEQ ID NO: 1650161
auuacgcucagacccagcc

SEQ ID NO: 1650163 - RNA, 19 nt, Artificial Sequence
  Description of Artificial Sequence: Synthetic oligonucleotide
  Sense strand starting at position 2734 of SEQ ID NO: 1561147
agcgaacugacccagauua

SEQ ID NO: 1650164 - RNA, 19 nt, Artificial Sequence
  Description of Artificial Sequence: Synthetic oligonucleotide
  Antisense strand to SEQ ID NO: 1650163
uaaucugggucaguucgcu

SEQ ID NO: 1650165 - RNA, 19 nt, Artificial Sequence
  Description of Artificial Sequence: Synthetic oligonucleotide
  Sense strand starting at position 2746 of SEQ ID NO: 1561147
cagauuaucgccgacgugu

SEQ ID NO: 1650166 - RNA, 19 nt, Artificial Sequence
  Description of Artificial Sequence: Synthetic oligonucleotide
  Antisense strand to SEQ ID NO: 1650165
acacgucggcgauaaucug

SEQ ID NO: 1650167 - RNA, 19 nt, Artificial Sequence
  Description of Artificial Sequence: Synthetic oligonucleotide
  Sense strand starting at position 2934 of SEQ ID NO: 1561147
gaggcuguguucuuccagu

SEQ ID NO: 1650168 - RNA, 19 nt, Artificial Sequence
  Description of Artificial Sequence: Synthetic oligonucleotide
  Antisense strand to SEQ ID NO: 1650167
acuggaagaacacagccuc

SEQ ID NO: 1650169 - RNA, 19 nt, Artificial Sequence
  Description of Artificial Sequence: Synthetic oligonucleotide
  Sense strand starting at position 2980 of SEQ ID NO: 1561147
gcgcgagggcuuucuaagu

SEQ ID NO: 1650170 - RNA, 19 nt, Artificial Sequence
  Description of Artificial Sequence: Synthetic oligonucleotide
  Antisense strand to SEQ ID NO: 1650169
acuuagaaagcccucgcgc

SEQ ID NO: 1650171 - RNA, 19 nt, Artificial Sequence
  Description of Artificial Sequence: Synthetic oligonucleotide
  Sense strand starting at position 3031 of SEQ ID NO: 1561147
gggauaucaauguggguga

SEQ ID NO: 1650172 - RNA, 19 nt, Artificial Sequence
  Description of Artificial Sequence: Synthetic oligonucleotide
  Antisense strand to SEQ ID NO: 1650171
ucacccacauugauauccc

SEQ ID NO: 1650173 - RNA, 19 nt, Artificial Sequence
  Description of Artificial Sequence: Synthetic oligonucleotide
  Sense strand starting at position 3079 of SEQ ID NO: 1561147
cuuaccuauuggugaaguu

SEQ ID NO: 1650174 - RNA, 19 nt, Artificial Sequence
  Description of Artificial Sequence: Synthetic oligonucleotide
  Antisense strand to SEQ ID NO: 1650173
aacuucaccaauagguaag

SEQ ID NO: 1650175 - RNA, 19 nt, Artificial Sequence
  Description of Artificial Sequence: Synthetic oligonucleotide
  Sense strand starting at position 3088 of SEQ ID NO: 1561147
uggugaaguucucuugccu

SEQ ID NO: 1650176 - RNA, 19 nt, Artificial Sequence
  Description of Artificial Sequence: Synthetic oligonucleotide
  Antisense strand to SEQ ID NO: 1650175
aggcaagagaacuucacca

SEQ ID NO: 1650177 - RNA, 19 nt, Artificial Sequence
  Description of Artificial Sequence: Synthetic oligonucleotide
  Sense strand starting at position 3131 of SEQ ID NO: 1561147
ggguccaaauccuuccuaa

SEQ ID NO: 1650178 - RNA, 19 nt, Artificial Sequence
  Description of Artificial Sequence: Synthetic oligonucleotide
  Antisense strand to SEQ ID NO: 1650177
uuaggaaggauuuggaccc

SEQ ID NO: 1650179 - RNA, 19 nt, Artificial Sequence
  Description of Artificial Sequence: Synthetic oligonucleotide
  Sense strand starting at position 3153 of SEQ ID NO: 1561147
ugcaucauuucugccagga

SEQ ID NO: 1650180 - RNA, 19 nt, Artificial Sequence
  Description of Artificial Sequence: Synthetic oligonucleotide
  Antisense strand to SEQ ID NO: 1650179
uccuggcagaaaugaugca

SEQ ID NO: 1650181 - RNA, 19 nt, Artificial Sequence
  Description of Artificial Sequence: Synthetic oligonucleotide
  Sense strand starting at position 3171 of SEQ ID NO: 1561147
acgccaugcgccuuuacua

SEQ ID NO: 1650182 - RNA, 19 nt, Artificial Sequence
  Description of Artificial Sequence: Synthetic oligonucleotide
  Antisense strand to SEQ ID NO: 1650181
uaguaaaggcgcauggcgu

SEQ ID NO: 1650183 - RNA, 19 nt, Artificial Sequence
  Description of Artificial Sequence: Synthetic oligonucleotide
  Sense strand starting at position 3262 of SEQ ID NO: 1561147
ccagauuccaugcgugagu

SEQ ID NO: 1650184 - RNA, 19 nt, Artificial Sequence
  Description of Artificial Sequence: Synthetic oligonucleotide
  Antisense strand to SEQ ID NO: 1650183
acucacgcauggaaucugg

SEQ ID NO: 1650185 - RNA, 19 nt, Artificial Sequence
  Description of Artificial Sequence: Synthetic oligonucleotide
  Sense strand starting at position 3263 of SEQ ID NO: 1561147
cagauuccaugcgugaguu

SEQ ID NO: 1650186 - RNA, 19 nt, Artificial Sequence
  Description of Artificial Sequence: Synthetic oligonucleotide
  Antisense strand to SEQ ID NO: 1650185
aacucacgcauggaaucug

SEQ ID NO: 1650187 - RNA, 19 nt, Artificial Sequence
  Description of Artificial Sequence: Synthetic oligonucleotide
  Sense strand starting at position 3264 of SEQ ID NO: 1561147
agauuccaugcgugaguuu

SEQ ID NO: 1650188 - RNA, 19 nt, Artificial Sequence
  Description of Artificial Sequence: Synthetic oligonucleotide
  Antisense strand to SEQ ID NO: 1650187
aaacucacgcauggaaucu

SEQ ID NO: 1650189 - RNA, 19 nt, Artificial Sequence
  Description of Artificial Sequence: Synthetic oligonucleotide
  Sense strand starting at position 3526 of SEQ ID NO: 1561147
gccggaucccugcacagau

SEQ ID NO: 1650190 - RNA, 19 nt, Artificial Sequence
  Description of Artificial Sequence: Synthetic oligonucleotide
  Antisense strand to SEQ ID NO: 1650189
aucugugcagggauccggc

SEQ ID NO: 1650191 - RNA, 19 nt, Artificial Sequence
  Description of Artificial Sequence: Synthetic oligonucleotide
  Sense strand starting at position 3574 of SEQ ID NO: 1561147
ggcaaugggcucuggacua

SEQ ID NO: 1650192 - RNA, 19 nt, Artificial Sequence
  Description of Artificial Sequence: Synthetic oligonucleotide
  Antisense strand to SEQ ID NO: 1650191
uaguccagagcccauugcc

SEQ ID NO: 1650193 - RNA, 19 nt, Artificial Sequence
  Description of Artificial Sequence: Synthetic oligonucleotide
  Sense strand starting at position 3605 of SEQ ID NO: 1561147
ccugcuuuccaguguugag

SEQ ID NO: 1650194 - RNA, 19 nt, Artificial Sequence
  Description of Artificial Sequence: Synthetic oligonucleotide
  Antisense strand to SEQ ID NO: 1650193
cucaacacuggaaagcagg

SEQ ID NO: 1650195 - RNA, 19 nt, Artificial Sequence
  Description of Artificial Sequence: Synthetic oligonucleotide
  Sense strand starting at position 3621 of SEQ ID NO: 1561147
gagcauuucugguaccuau

SEQ ID NO: 1650196 - RNA, 19 nt, Artificial Sequence
  Description of Artificial Sequence: Synthetic oligonucleotide
  Antisense strand to SEQ ID NO: 1650195
auagguaccagaaaugcuc

SEQ ID NO: 1650197 - RNA, 19 nt, Artificial Sequence
  Description of Artificial Sequence: Synthetic oligonucleotide
  Sense strand starting at position 3793 of SEQ ID NO: 1561147
uggagccugaaucguauaa

SEQ ID NO: 1650198 - RNA, 19 nt, Artificial Sequence
  Description of Artificial Sequence: Synthetic oligonucleotide
  Antisense strand to SEQ ID NO: 1650197
uuauacgauucaggcucca

SEQ ID NO: 1650199 - RNA, 19 nt, Artificial Sequence
  Description of Artificial Sequence: Synthetic oligonucleotide
  Sense strand starting at position 3890 of SEQ ID NO: 1561147
gagacaucaugucuugauu

SEQ ID NO: 1650200 - RNA, 19 nt, Artificial Sequence
  Description of Artificial Sequence: Synthetic oligonucleotide
  Antisense strand to SEQ ID NO: 1650199
aaucaagacaugaugucuc

SEQ ID NO: 1650201 - RNA, 19 nt, Artificial Sequence
  Description of Artificial Sequence: Synthetic oligonucleotide
  Sense strand starting at position 122 of SEQ ID NO: 1561148
uuauccuuguggucuuacu

SEQ ID NO: 1650202 - RNA, 19 nt, Artificial Sequence
  Description of Artificial Sequence: Synthetic oligonucleotide
  Antisense strand to SEQ ID NO: 1650201
aguaagaccacaaggauaa

SEQ ID NO: 1650203 - RNA, 19 nt, Artificial Sequence
  Description of Artificial Sequence: Synthetic oligonucleotide
  Sense strand starting at position 130 of SEQ ID NO: 1561148
guggucuuacuuuauggau

SEQ ID NO: 1650204 - RNA, 19 nt, Artificial Sequence
  Description of Artificial Sequence: Synthetic oligonucleotide
  Antisense strand to SEQ ID NO: 1650203
auccauaaaguaagaccac

SEQ ID NO: 1650205 - RNA, 19 nt, Artificial Sequence
  Description of Artificial Sequence: Synthetic oligonucleotide
  Sense strand starting at position 132 of SEQ ID NO: 1561148
ggucuuacuuuauggauuc

SEQ ID NO: 1650206 - RNA, 19 nt, Artificial Sequence
  Description of Artificial Sequence: Synthetic oligonucleotide
  Antisense strand to SEQ ID NO: 1650205
gaauccauaaaguaagacc

SEQ ID NO: 1650207 - RNA, 19 nt, Artificial Sequence
  Description of Artificial Sequence: Synthetic oligonucleotide
  Sense strand starting at position 535 of SEQ ID NO: 1561148
gggacacaguagugaauua

SEQ ID NO: 1650208 - RNA, 19 nt, Artificial Sequence
  Description of Artificial Sequence: Synthetic oligonucleotide
  Antisense strand to SEQ ID NO: 1650207
uaauucacuacuguguccc

SEQ ID NO: 1650209 - RNA, 19 nt, Artificial Sequence
  Description of Artificial Sequence: Synthetic oligonucleotide
  Sense strand starting at position 542 of SEQ ID NO: 1561148
aguagugaauuauagugau

SEQ ID NO: 1650210 - RNA, 19 nt, Artificial Sequence
  Description of Artificial Sequence: Synthetic oligonucleotide
  Antisense strand to SEQ ID NO: 1650209
aucacuauaauucacuacu

SEQ ID NO: 1650211 - RNA, 19 nt, Artificial Sequence
  Description of Artificial Sequence: Synthetic oligonucleotide
  Sense strand starting at position 545 of SEQ ID NO: 1561148
agugaauuauagugaucaa

SEQ ID NO: 1650212 - RNA, 19 nt, Artificial Sequence
  Description of Artificial Sequence: Synthetic oligonucleotide
  Antisense strand to SEQ ID NO: 1650211
uugaucacuauaauucacu

SEQ ID NO: 1650213 - RNA, 19 nt, Artificial Sequence
  Description of Artificial Sequence: Synthetic oligonucleotide
  Sense strand starting at position 630 of SEQ ID NO: 1561148
cagagugugucagaggaga

SEQ ID NO: 1650214 - RNA, 19 nt, Artificial Sequence
  Description of Artificial Sequence: Synthetic oligonucleotide
  Antisense strand to SEQ ID NO: 1650213
ucuccucugacacacucug

SEQ ID NO: 1650215 - RNA, 19 nt, Artificial Sequence
  Description of Artificial Sequence: Synthetic oligonucleotide
  Sense strand starting at position 632 of SEQ ID NO: 1561148
gagugugucagaggagaau

SEQ ID NO: 1650216 - RNA, 19 nt, Artificial Sequence
  Description of Artificial Sequence: Synthetic oligonucleotide
  Antisense strand to SEQ ID NO: 1650215
auucuccucugacacacuc

SEQ ID NO: 1650217 - RNA, 19 nt, Artificial Sequence
  Description of Artificial Sequence: Synthetic oligonucleotide
  Sense strand starting at position 699 of SEQ ID NO: 1561148
ugagguaaacguuaacacu

SEQ ID NO: 1650218 - RNA, 19 nt, Artificial Sequence
  Description of Artificial Sequence: Synthetic oligonucleotide
  Antisense strand to SEQ ID NO: 1650217
aguguuaacguuuaccuca

SEQ ID NO: 1650219 - RNA, 19 nt, Artificial Sequence
  Description of Artificial Sequence: Synthetic oligonucleotide
  Sense strand starting at position 853 of SEQ ID NO: 1561148
gagcaauguggcugcuaca

SEQ ID NO: 1650220 - RNA, 19 nt, Artificial Sequence
  Description of Artificial Sequence: Synthetic oligonucleotide
  Antisense strand to SEQ ID NO: 1650219
uguagcagccacauugcuc

SEQ ID NO: 1650221 - RNA, 19 nt, Artificial Sequence
  Description of Artificial Sequence: Synthetic oligonucleotide
  Sense strand starting at position 1476 of SEQ ID NO: 1561148
cuaggcugucccugucuaa

SEQ ID NO: 1650222 - RNA, 19 nt, Artificial Sequence
  Description of Artificial Sequence: Synthetic oligonucleotide
  Antisense strand to SEQ ID NO: 1650221
uuagacagggacagccuag

SEQ ID NO: 1650223 - RNA, 19 nt, Artificial Sequence
  Description of Artificial Sequence: Synthetic oligonucleotide
  Sense strand starting at position 1479 of SEQ ID NO: 1561148
ggcugucccugucuaauga

SEQ ID NO: 1650224 - RNA, 19 nt, Artificial Sequence
  Description of Artificial Sequence: Synthetic oligonucleotide
  Antisense strand to SEQ ID NO: 1650223
ucauuagacagggacagcc

SEQ ID NO: 1650225 - RNA, 19 nt, Artificial Sequence
  Description of Artificial Sequence: Synthetic oligonucleotide
  Sense strand starting at position 1480 of SEQ ID NO: 1561148
gcugucccugucuaaugau

SEQ ID NO: 1650226 - RNA, 19 nt, Artificial Sequence
  Description of Artificial Sequence: Synthetic oligonucleotide
  Antisense strand to SEQ ID NO: 1650225
aucauuagacagggacagc

SEQ ID NO: 1650227 - RNA, 19 nt, Artificial Sequence
  Description of Artificial Sequence: Synthetic oligonucleotide
  Sense strand starting at position 1488 of SEQ ID NO: 1561148
ugucuaaugaugggucugu

SEQ ID NO: 1650228 - RNA, 19 nt, Artificial Sequence
  Description of Artificial Sequence: Synthetic oligonucleotide
  Antisense strand to SEQ ID NO: 1650227
acagacccaucauuagaca

SEQ ID NO: 1650229 - RNA, 19 nt, Artificial Sequence
  Description of Artificial Sequence: Synthetic oligonucleotide
  Sense strand starting at position 1492 of SEQ ID NO: 1561148
uaaugaugggucugucucu

SEQ ID NO: 1650230 - RNA, 19 nt, Artificial Sequence
  Description of Artificial Sequence: Synthetic oligonucleotide
  Antisense strand to SEQ ID NO: 1650229
agagacagacccaucauua

SEQ ID NO: 1650231 - RNA, 19 nt, Artificial Sequence
  Description of Artificial Sequence: Synthetic oligonucleotide
  Sense strand starting at position 1543 of SEQ ID NO: 1561148
ggaccuaucucggguauga

SEQ ID NO: 1650232 - RNA, 19 nt, Artificial Sequence
  Description of Artificial Sequence: Synthetic oligonucleotide
  Antisense strand to SEQ ID NO: 1650231
ucauacccgagauaggucc

SEQ ID NO: 1650233 - RNA, 19 nt, Artificial Sequence
  Description of Artificial Sequence: Synthetic oligonucleotide
  Sense strand starting at position 1545 of SEQ ID NO: 1561148
accuaucucggguaugacu

SEQ ID NO: 1650234 - RNA, 19 nt, Artificial Sequence
  Description of Artificial Sequence: Synthetic oligonucleotide
  Antisense strand to SEQ ID NO: 1650233
agucauacccgagauaggu

SEQ ID NO: 1650235 - RNA, 19 nt, Artificial Sequence
  Description of Artificial Sequence: Synthetic oligonucleotide
  Sense strand starting at position 1554 of SEQ ID NO: 1561148
ggguaugacugagggcaaa

SEQ ID NO: 1650236 - RNA, 19 nt, Artificial Sequence
  Description of Artificial Sequence: Synthetic oligonucleotide
  Antisense strand to SEQ ID NO: 1650235
uuugcccucagucauaccc

SEQ ID NO: 1650237 - RNA, 19 nt, Artificial Sequence
  Description of Artificial Sequence: Synthetic oligonucleotide
  Sense strand starting at position 1575 of SEQ ID NO: 1561148
ccagcaagugucuguugaa

SEQ ID NO: 1650238 - RNA, 19 nt, Artificial Sequence
  Description of Artificial Sequence: Synthetic oligonucleotide
  Antisense strand to SEQ ID NO: 1650237
uucaacagacacuugcugg

SEQ ID NO: 1650239 - RNA, 19 nt, Artificial Sequence
  Description of Artificial Sequence: Synthetic oligonucleotide
  Sense strand starting at position 1582 of SEQ ID NO: 1561148
gugucuguugaauaaccaa

SEQ ID NO: 1650240 - RNA, 19 nt, Artificial Sequence
  Description of Artificial Sequence: Synthetic oligonucleotide
  Antisense strand to SEQ ID NO: 1650239
uugguuauucaacagacac

SEQ ID NO: 1650241 - RNA, 19 nt, Artificial Sequence
  Description of Artificial Sequence: Synthetic oligonucleotide
  Sense strand starting at position 1629 of SEQ ID NO: 1561148
gauagagaguccucacgug

SEQ ID NO: 1650242 - RNA, 19 nt, Artificial Sequence
  Description of Artificial Sequence: Synthetic oligonucleotide
  Antisense strand to SEQ ID NO: 1650241
cacgugaggacucucuauc

SEQ ID NO: 1650243 - RNA, 19 nt, Artificial Sequence
  Description of Artificial Sequence: Synthetic oligonucleotide
  Sense strand starting at position 3007 of SEQ ID NO: 1561148
uggguauucgcuucugcca

SEQ ID NO: 1650244 - RNA, 19 nt, Artificial Sequence
  Description of Artificial Sequence: Synthetic oligonucleotide
  Antisense strand to SEQ ID NO: 1650243
uggcagaagcgaauaccca

SEQ ID NO: 1650245 - RNA, 19 nt, Artificial Sequence
  Description of Artificial Sequence: Synthetic oligonucleotide
  Sense strand starting at position 3012 of SEQ ID NO: 1561148
auucgcuucugccaggaau

SEQ ID NO: 1650246 - RNA, 19 nt, Artificial Sequence
  Description of Artificial Sequence: Synthetic oligonucleotide
  Antisense strand to SEQ ID NO: 1650245
auuccuggcagaagcgaau

SEQ ID NO: 1650247 - RNA, 19 nt, Artificial Sequence
  Description of Artificial Sequence: Synthetic oligonucleotide
  Sense strand starting at position 3314 of SEQ ID NO: 1561148
agaguccugucgucauauc

SEQ ID NO: 1650248 - RNA, 19 nt, Artificial Sequence
  Description of Artificial Sequence: Synthetic oligonucleotide
  Antisense strand to SEQ ID NO: 1650247
gauaugacgacaggacucu

SEQ ID NO: 1650249 - RNA, 19 nt, Artificial Sequence
  Description of Artificial Sequence: Synthetic oligonucleotide
  Sense strand starting at position 3324 of SEQ ID NO: 1561148
cgucauauccuccgggauc

SEQ ID NO: 1650250 - RNA, 19 nt, Artificial Sequence
  Description of Artificial Sequence: Synthetic oligonucleotide
  Antisense strand to SEQ ID NO: 1650249
gaucccggaggauaugacg

SEQ ID NO: 1650251 - RNA, 19 nt, Artificial Sequence
  Description of Artificial Sequence: Synthetic oligonucleotide
  Sense strand starting at position 3325 of SEQ ID NO: 1561148
gucauauccuccgggauca

SEQ ID NO: 1650252 - RNA, 19 nt, Artificial Sequence
  Description of Artificial Sequence: Synthetic oligonucleotide
  Antisense strand to SEQ ID NO: 1650251
ugaucccggaggauaugac

SEQ ID NO: 1650253 - RNA, 19 nt, Artificial Sequence
  Description of Artificial Sequence: Synthetic oligonucleotide
  Sense strand starting at position 3356 of SEQ ID NO: 1561148
cucccaaucuugucuggaa

SEQ ID NO: 1650254 - RNA, 19 nt, Artificial Sequence
  Description of Artificial Sequence: Synthetic oligonucleotide
  Antisense strand to SEQ ID NO: 1650253
uuccagacaagauugggag

SEQ ID NO: 1650255 - RNA, 19 nt, Artificial Sequence
  Description of Artificial Sequence: Synthetic oligonucleotide
  Sense strand starting at position 3357 of SEQ ID NO: 1561148
ucccaaucuugucuggaau

SEQ ID NO: 1650256 - RNA, 19 nt, Artificial Sequence
  Description of Artificial Sequence: Synthetic oligonucleotide
  Antisense strand to SEQ ID NO: 1650255
auuccagacaagauuggga

SEQ ID NO: 1650257 - RNA, 19 nt, Artificial Sequence
  Description of Artificial Sequence: Synthetic oligonucleotide
  Sense strand starting at position 3358 of SEQ ID NO: 1561148
cccaaucuugucuggaauc

SEQ ID NO: 1650258 - RNA, 19 nt, Artificial Sequence
  Description of Artificial Sequence: Synthetic oligonucleotide
  Antisense strand to SEQ ID NO: 1650257
gauuccagacaagauuggg

SEQ ID NO: 1650259 - RNA, 19 nt, Artificial Sequence
  Description of Artificial Sequence: Synthetic oligonucleotide
  Sense strand starting at position 3453 of SEQ ID NO: 1561148
agcugcaucuaugucaaca

SEQ ID NO: 1650260 - RNA, 19 nt, Artificial Sequence
  Description of Artificial Sequence: Synthetic oligonucleotide
  Antisense strand to SEQ ID NO: 1650259
uguugacauagaugcagcu

SEQ ID NO: 1650261 - RNA, 19 nt, Artificial Sequence
  Description of Artificial Sequence: Synthetic oligonucleotide
  Sense strand starting at position 3536 of SEQ ID NO: 1561148
ggcugggucugagcguaau

SEQ ID NO: 1650262 - RNA, 19 nt, Artificial Sequence
  Description of Artificial Sequence: Synthetic oligonucleotide
  Antisense strand to SEQ ID NO: 1650261
auuacgcucagacccagcc

SEQ ID NO: 1650263 - RNA, 19 nt, Artificial Sequence
  Description of Artificial Sequence: Synthetic oligonucleotide
  Sense strand starting at position 3576 of SEQ ID NO: 1561148
agcgaacugacccagauua

SEQ ID NO: 1650264 - RNA, 19 nt, Artificial Sequence
  Description of Artificial Sequence: Synthetic oligonucleotide
  Antisense strand to SEQ ID NO: 1650263
uaaucugggucaguucgcu

SEQ ID NO: 1650265 - RNA, 19 nt, Artificial Sequence
  Description of Artificial Sequence: Synthetic oligonucleotide
  Sense strand starting at position 3588 of SEQ ID NO: 1561148
cagauuaucgccgacgugu

SEQ ID NO: 1650266 - RNA, 19 nt, Artificial Sequence
  Description of Artificial Sequence: Synthetic oligonucleotide
  Antisense strand to SEQ ID NO: 1650265
acacgucggcgauaaucug

SEQ ID NO: 1650267 - RNA, 19 nt, Artificial Sequence
  Description of Artificial Sequence: Synthetic oligonucleotide
  Sense strand starting at position 3776 of SEQ ID NO: 1561148
gaggcuguguucuuccagu

SEQ ID NO: 1650268 - RNA, 19 nt, Artificial Sequence
  Description of Artificial Sequence: Synthetic oligonucleotide
  Antisense strand to SEQ ID NO: 1650267
acuggaagaacacagccuc

SEQ ID NO: 1650269 - RNA, 19 nt, Artificial Sequence
  Description of Artificial Sequence: Synthetic oligonucleotide
  Sense strand starting at position 3822 of SEQ ID NO: 1561148
gcgcgagggcuuucuaagu

SEQ ID NO: 1650270 - RNA, 19 nt, Artificial Sequence
  Description of Artificial Sequence: Synthetic oligonucleotide
  Antisense strand to SEQ ID NO: 1650269
acuuagaaagcccucgcgc

SEQ ID NO: 1650271 - RNA, 19 nt, Artificial Sequence
  Description of Artificial Sequence: Synthetic oligonucleotide
  Sense strand starting at position 3873 of SEQ ID NO: 1561148
gggauaucaauguggguga

SEQ ID NO: 1650272 - RNA, 19 nt, Artificial Sequence
  Description of Artificial Sequence: Synthetic oligonucleotide
  Antisense strand to SEQ ID NO: 1650271
ucacccacauugauauccc

SEQ ID NO: 1650273 - RNA, 19 nt, Artificial Sequence
  Description of Artificial Sequence: Synthetic oligonucleotide
  Sense strand starting at position 3918 of SEQ ID NO: 1561148
gcccuuaccuauuggugaa

SEQ ID NO: 1650274 - RNA, 19 nt, Artificial Sequence
  Description of Artificial Sequence: Synthetic oligonucleotide
  Antisense strand to SEQ ID NO: 1650273
uucaccaauagguaagggc

SEQ ID NO: 1650275 - RNA, 19 nt, Artificial Sequence
  Description of Artificial Sequence: Synthetic oligonucleotide
  Sense strand starting at position 3921 of SEQ ID NO: 1561148
cuuaccuauuggugaaguu

SEQ ID NO: 1650276 - RNA, 19 nt, Artificial Sequence
  Description of Artificial Sequence: Synthetic oligonucleotide
  Antisense strand to SEQ ID NO: 1650275
aacuucaccaauagguaag

SEQ ID NO: 1650277 - RNA, 19 nt, Artificial Sequence
  Description of Artificial Sequence: Synthetic oligonucleotide
  Sense strand starting at position 3930 of SEQ ID NO: 1561148
uggugaaguucucuugccu

SEQ ID NO: 1650278 - RNA, 19 nt, Artificial Sequence
  Description of Artificial Sequence: Synthetic oligonucleotide
  Antisense strand to SEQ ID NO: 1650277
aggcaagagaacuucacca

SEQ ID NO: 1650279 - RNA, 19 nt, Artificial Sequence
  Description of Artificial Sequence: Synthetic oligonucleotide
  Sense strand starting at position 3973 of SEQ ID NO: 1561148
ggguccaaauccuuccuaa

SEQ ID NO: 1650280 - RNA, 19 nt, Artificial Sequence
  Description of Artificial Sequence: Synthetic oligonucleotide
  Antisense strand to SEQ ID NO: 1650279
uuaggaaggauuuggaccc

SEQ ID NO: 1650281 - RNA, 19 nt, Artificial Sequence
  Description of Artificial Sequence: Synthetic oligonucleotide
  Sense strand starting at position 80 of SEQ ID NO: 1561149
ucccaugccugcuguagau

SEQ ID NO: 1650282 - RNA, 19 nt, Artificial Sequence
  Description of Artificial Sequence: Synthetic oligonucleotide
  Antisense strand to SEQ ID NO: 1650281
aucuacagcaggcauggga

SEQ ID NO: 1650283 - RNA, 19 nt, Artificial Sequence
  Description of Artificial Sequence: Synthetic oligonucleotide
  Sense strand starting at position 92 of SEQ ID NO: 1561149
uguagaucugaacgcucau

SEQ ID NO: 1650284 - RNA, 19 nt, Artificial Sequence
  Description of Artificial Sequence: Synthetic oligonucleotide
  Antisense strand to SEQ ID NO: 1650283
augagcguucagaucuaca

SEQ ID NO: 1650285 - RNA, 19 nt, Artificial Sequence
  Description of Artificial Sequence: Synthetic oligonucleotide
  Sense strand starting at position 185 of SEQ ID NO: 1561149
agcuccauuuccgagaaca

SEQ ID NO: 1650286 - RNA, 19 nt, Artificial Sequence
  Description of Artificial Sequence: Synthetic oligonucleotide
  Antisense strand to SEQ ID NO: 1650285
uguucucggaaauggagcu

SEQ ID NO: 1650287 - RNA, 19 nt, Artificial Sequence
  Description of Artificial Sequence: Synthetic oligonucleotide
  Sense strand starting at position 197 of SEQ ID NO: 1561149
gagaacauuuccuguuugu

SEQ ID NO: 1650288 - RNA, 19 nt, Artificial Sequence
  Description of Artificial Sequence: Synthetic oligonucleotide
  Antisense strand to SEQ ID NO: 1650287
acaaacaggaaauguucuc

SEQ ID NO: 1650289 - RNA, 19 nt, Artificial Sequence
  Description of Artificial Sequence: Synthetic oligonucleotide
  Sense strand starting at position 678 of SEQ ID NO: 1561149
gcagaaaugugacagaaac

SEQ ID NO: 1650290 - RNA, 19 nt, Artificial Sequence
  Description of Artificial Sequence: Synthetic oligonucleotide
  Antisense strand to SEQ ID NO: 1650289
guuucugucacauuucugc

SEQ ID NO: 1650291 - RNA, 19 nt, Artificial Sequence
  Description of Artificial Sequence: Synthetic oligonucleotide
  Sense strand starting at position 1221 of SEQ ID NO: 1561149
cacagacucucggcagaaa

SEQ ID NO: 1650292 - RNA, 19 nt, Artificial Sequence
  Description of Artificial Sequence: Synthetic oligonucleotide
  Antisense strand to SEQ ID NO: 1650291
uuucugccgagagucugug

SEQ ID NO: 1650293 - RNA, 19 nt, Artificial Sequence
  Description of Artificial Sequence: Synthetic oligonucleotide
  Sense strand starting at position 2787 of SEQ ID NO: 1561149
gggaccgucucuuugcaga

SEQ ID NO: 1650294 - RNA, 19 nt, Artificial Sequence
  Description of Artificial Sequence: Synthetic oligonucleotide
  Antisense strand to SEQ ID NO: 1650293
ucugcaaagagacgguccc

SEQ ID NO: 1650295 - RNA, 19 nt, Artificial Sequence
  Description of Artificial Sequence: Synthetic oligonucleotide
  Sense strand starting at position 2849 of SEQ ID NO: 1561149
cggacagaaccuugaguua

SEQ ID NO: 1650296 - RNA, 19 nt, Artificial Sequence
  Description of Artificial Sequence: Synthetic oligonucleotide
  Antisense strand to SEQ ID NO: 1650295
uaacucaagguucuguccg

SEQ ID NO: 1650297 - RNA, 19 nt, Artificial Sequence
  Description of Artificial Sequence: Synthetic oligonucleotide
  Sense strand starting at position 3154 of SEQ ID NO: 1561149
cuccuauggauguggcaaa

SEQ ID NO: 1650298 - RNA, 19 nt, Artificial Sequence
  Description of Artificial Sequence: Synthetic oligonucleotide
  Antisense strand to SEQ ID NO: 1650297
uuugccacauccauaggag

SEQ ID NO: 1650299 - RNA, 19 nt, Artificial Sequence
  Description of Artificial Sequence: Synthetic oligonucleotide
  Sense strand starting at position 3250 of SEQ ID NO: 1561149
cagcuuauacagugggaca

SEQ ID NO: 1650300 - RNA, 19 nt, Artificial Sequence
  Description of Artificial Sequence: Synthetic oligonucleotide
  Antisense strand to SEQ ID NO: 1650299
ugucccacuguauaagcug

SEQ ID NO: 1650301 - RNA, 19 nt, Artificial Sequence
  Description of Artificial Sequence: Synthetic oligonucleotide
  Sense strand starting at position 3251 of SEQ ID NO: 1561149
agcuuauacagugggacaa

SEQ ID NO: 1650302 - RNA, 19 nt, Artificial Sequence
  Description of Artificial Sequence: Synthetic oligonucleotide
  Antisense strand to SEQ ID NO: 1650301
uugucccacuguauaagcu

SEQ ID NO: 1650303 - RNA, 19 nt, Artificial Sequence
  Description of Artificial Sequence: Synthetic oligonucleotide
  Sense strand starting at position 3252 of SEQ ID NO: 1561149
gcuuauacagugggacaau

SEQ ID NO: 1650304 - RNA, 19 nt, Artificial Sequence
  Description of Artificial Sequence: Synthetic oligonucleotide
  Antisense strand to SEQ ID NO: 1650303
auugucccacuguauaagc

SEQ ID NO: 1650305 - RNA, 19 nt, Artificial Sequence
  Description of Artificial Sequence: Synthetic oligonucleotide
  Sense strand starting at position 3253 of SEQ ID NO: 1561149
cuuauacagugggacaauu

SEQ ID NO: 1650306 - RNA, 19 nt, Artificial Sequence
  Description of Artificial Sequence: Synthetic oligonucleotide
  Antisense strand to SEQ ID NO: 1650305
aauugucccacuguauaag

SEQ ID NO: 1650307 - RNA, 19 nt, Artificial Sequence
  Description of Artificial Sequence: Synthetic oligonucleotide
  Sense strand starting at position 3264 of SEQ ID NO: 1561149
ggacaauuaugagcuccaa

SEQ ID NO: 1650308 - RNA, 19 nt, Artificial Sequence
  Description of Artificial Sequence: Synthetic oligonucleotide
  Antisense strand to SEQ ID NO: 1650307
uuggagcucauaauugucc

SEQ ID NO: 1650309 - RNA, 19 nt, Artificial Sequence
  Description of Artificial Sequence: Synthetic oligonucleotide
  Sense strand starting at position 3268 of SEQ ID NO: 1561149
aauuaugagcuccaaguga

SEQ ID NO: 1650310 - RNA, 19 nt, Artificial Sequence
  Description of Artificial Sequence: Synthetic oligonucleotide
  Antisense strand to SEQ ID NO: 1650309
ucacuuggagcucauaauu

SEQ ID NO: 1650311 - RNA, 19 nt, Artificial Sequence
  Description of Artificial Sequence: Synthetic oligonucleotide
  Sense strand starting at position 3421 of SEQ ID NO: 1561149
gaagacaucuugugaggag

SEQ ID NO: 1650312 - RNA, 19 nt, Artificial Sequence
  Description of Artificial Sequence: Synthetic oligonucleotide
  Antisense strand to SEQ ID NO: 1650311
cuccucacaagaugucuuc

SEQ ID NO: 1650313 - RNA, 19 nt, Artificial Sequence
  Description of Artificial Sequence: Synthetic oligonucleotide
  Sense strand starting at position 3422 of SEQ ID NO: 1561149
aagacaucuugugaggaga

SEQ ID NO: 1650314 - RNA, 19 nt, Artificial Sequence
  Description of Artificial Sequence: Synthetic oligonucleotide
  Antisense strand to SEQ ID NO: 1650313
ucuccucacaagaugucuu

SEQ ID NO: 1650315 - RNA, 19 nt, Artificial Sequence
  Description of Artificial Sequence: Synthetic oligonucleotide
  Sense strand starting at position 3506 of SEQ ID NO: 1561149
acaggaauugcauguauaa

SEQ ID NO: 1650316 - RNA, 19 nt, Artificial Sequence
  Description of Artificial Sequence: Synthetic oligonucleotide
  Antisense strand to SEQ ID NO: 1650315
uuauacaugcaauuccugu

SEQ ID NO: 1650317 - RNA, 19 nt, Artificial Sequence
  Description of Artificial Sequence: Synthetic oligonucleotide
  Sense strand starting at position 3519 of SEQ ID NO: 1561149
guauaaagcuuuggaggca

SEQ ID NO: 1650318 - RNA, 19 nt, Artificial Sequence
  Description of Artificial Sequence: Synthetic oligonucleotide
  Antisense strand to SEQ ID NO: 1650317
ugccuccaaagcuuuauac

SEQ ID NO: 1650319 - RNA, 19 nt, Artificial Sequence
  Description of Artificial Sequence: Synthetic oligonucleotide
  Sense strand starting at position 3545 of SEQ ID NO: 1561149
gcaugaggcccuugcuaca

SEQ ID NO: 1650320 - RNA, 19 nt, Artificial Sequence
  Description of Artificial Sequence: Synthetic oligonucleotide
  Antisense strand to SEQ ID NO: 1650319
uguagcaagggccucaugc

SEQ ID NO: 1650321 - RNA, 19 nt, Artificial Sequence
  Description of Artificial Sequence: Synthetic oligonucleotide
  Sense strand starting at position 3669 of SEQ ID NO: 1561149
uguccucggcccugagaua

SEQ ID NO: 1650322 - RNA, 19 nt, Artificial Sequence
  Description of Artificial Sequence: Synthetic oligonucleotide
  Antisense strand to SEQ ID NO: 1650321
uaucucagggccgaggaca

SEQ ID NO: 1650323 - RNA, 19 nt, Artificial Sequence
  Description of Artificial Sequence: Synthetic oligonucleotide
  Sense strand starting at position 3670 of SEQ ID NO: 1561149
guccucggcccugagauaa

SEQ ID NO: 1650324 - RNA, 19 nt, Artificial Sequence
  Description of Artificial Sequence: Synthetic oligonucleotide
  Antisense strand to SEQ ID NO: 1650323
uuaucucagggccgaggac

SEQ ID NO: 1650325 - RNA, 19 nt, Artificial Sequence
  Description of Artificial Sequence: Synthetic oligonucleotide
  Sense strand starting at position 3698 of SEQ ID NO: 1561149
ugacucuucugggaaacag

SEQ ID NO: 1650326 - RNA, 19 nt, Artificial Sequence
  Description of Artificial Sequence: Synthetic oligonucleotide
  Antisense strand to SEQ ID NO: 1650325
cuguuucccagaagaguca

SEQ ID NO: 1650327 - RNA, 19 nt, Artificial Sequence
  Description of Artificial Sequence: Synthetic oligonucleotide
  Sense strand starting at position 3852 of SEQ ID NO: 1561149
augugugggauuggaacau

SEQ ID NO: 1650328 - RNA, 19 nt, Artificial Sequence
  Description of Artificial Sequence: Synthetic oligonucleotide
  Antisense strand to SEQ ID NO: 1650327
auguuccaaucccacacau

SEQ ID NO: 1650329 - RNA, 19 nt, Artificial Sequence
  Description of Artificial Sequence: Synthetic oligonucleotide
  Sense strand starting at position 238 of SEQ ID NO: 1561150
cggucugugacuugucagu

SEQ ID NO: 1650330 - RNA, 19 nt, Artificial Sequence
  Description of Artificial Sequence: Synthetic oligonucleotide
  Antisense strand to SEQ ID NO: 1650329
acugacaagucacagaccg

SEQ ID NO: 1650331 - RNA, 19 nt, Artificial Sequence
  Description of Artificial Sequence: Synthetic oligonucleotide
  Sense strand starting at position 240 of SEQ ID NO: 1561150
gucugugacuugucaguuu

SEQ ID NO: 1650332 - RNA, 19 nt, Artificial Sequence
  Description of Artificial Sequence: Synthetic oligonucleotide
  Antisense strand to SEQ ID NO: 1650331
aaacugacaagucacagac

SEQ ID NO: 1650333 - RNA, 19 nt, Artificial Sequence
  Description of Artificial Sequence: Synthetic oligonucleotide
  Sense strand starting at position 243 of SEQ ID NO: 1561150
ugugacuugucaguuuaac

SEQ ID NO: 1650334 - RNA, 19 nt, Artificial Sequence
  Description of Artificial Sequence: Synthetic oligonucleotide
  Antisense strand to SEQ ID NO: 1650333
guuaaacugacaagucaca

SEQ ID NO: 1650335 - RNA, 19 nt, Artificial Sequence
  Description of Artificial Sequence: Synthetic oligonucleotide
  Sense strand starting at position 285 of SEQ ID NO: 1561150
ggguuacucagccagggaa

SEQ ID NO: 1650336 - RNA, 19 nt, Artificial Sequence
  Description of Artificial Sequence: Synthetic oligonucleotide
  Antisense strand to SEQ ID NO: 1650335
uucccuggcugaguaaccc

SEQ ID NO: 1650337 - RNA, 19 nt, Artificial Sequence
  Description of Artificial Sequence: Synthetic oligonucleotide
  Sense strand starting at position 394 of SEQ ID NO: 1561150
gccgguguuguuucaguuu

SEQ ID NO: 1650338 - RNA, 19 nt, Artificial Sequence
  Description of Artificial Sequence: Synthetic oligonucleotide
  Antisense strand to SEQ ID NO: 1650337
aaacugaaacaacaccggc

SEQ ID NO: 1650339 - RNA, 19 nt, Artificial Sequence
  Description of Artificial Sequence: Synthetic oligonucleotide
  Sense strand starting at position 545 of SEQ ID NO: 1561150
agcagaauuuaaggacauc

SEQ ID NO: 1650340 - RNA, 19 nt, Artificial Sequence
  Description of Artificial Sequence: Synthetic oligonucleotide
  Antisense strand to SEQ ID NO: 1650339
gauguccuuaaauucugcu

SEQ ID NO: 1650341 - RNA, 19 nt, Artificial Sequence
  Description of Artificial Sequence: Synthetic oligonucleotide
  Sense strand starting at position 728 of SEQ ID NO: 1561150
gccugaacugugugacuuc

SEQ ID NO: 1650342 - RNA, 19 nt, Artificial Sequence
  Description of Artificial Sequence: Synthetic oligonucleotide
  Antisense strand to SEQ ID NO: 1650341
gaagucacacaguucaggc

SEQ ID NO: 1650343 - RNA, 19 nt, Artificial Sequence
  Description of Artificial Sequence: Synthetic oligonucleotide
  Sense strand starting at position 731 of SEQ ID NO: 1561150
ugaacugugugacuucuga

SEQ ID NO: 1650344 - RNA, 19 nt, Artificial Sequence
  Description of Artificial Sequence: Synthetic oligonucleotide
  Antisense strand to SEQ ID NO: 1650343
ucagaagucacacaguuca

SEQ ID NO: 1650345 - RNA, 19 nt, Artificial Sequence
  Description of Artificial Sequence: Synthetic oligonucleotide
  Sense strand starting at position 817 of SEQ ID NO: 1561150
accuaagacucugaagaag

SEQ ID NO: 1650346 - RNA, 19 nt, Artificial Sequence
  Description of Artificial Sequence: Synthetic oligonucleotide
  Antisense strand to SEQ ID NO: 1650345
cuucuucagagucuuaggu

SEQ ID NO: 1650347 - RNA, 19 nt, Artificial Sequence
  Description of Artificial Sequence: Synthetic oligonucleotide
  Sense strand starting at position 861 of SEQ ID NO: 1561150
gccugcuccgcagugauaa

SEQ ID NO: 1650348 - RNA, 19 nt, Artificial Sequence
  Description of Artificial Sequence: Synthetic oligonucleotide
  Antisense strand to SEQ ID NO: 1650347
uuaucacugcggagcaggc

SEQ ID NO: 1650349 - RNA, 19 nt, Artificial Sequence
  Description of Artificial Sequence: Synthetic oligonucleotide
  Sense strand starting at position 871 of SEQ ID NO: 1561150
cagugauaaccguggcagu

SEQ ID NO: 1650350 - RNA, 19 nt, Artificial Sequence
  Description of Artificial Sequence: Synthetic oligonucleotide
  Antisense strand to SEQ ID NO: 1650349
acugccacgguuaucacug

SEQ ID NO: 1650351 - RNA, 19 nt, Artificial Sequence
  Description of Artificial Sequence: Synthetic oligonucleotide
  Sense strand starting at position 995 of SEQ ID NO: 1561150
acccacgugugacuaauua

SEQ ID NO: 1650352 - RNA, 19 nt, Artificial Sequence
  Description of Artificial Sequence: Synthetic oligonucleotide
  Antisense strand to SEQ ID NO: 1650351
uaauuagucacacgugggu

SEQ ID NO: 1650353 - RNA, 19 nt, Artificial Sequence
  Description of Artificial Sequence: Synthetic oligonucleotide
  Sense strand starting at position 999 of SEQ ID NO: 1561150
acgugugacuaauuaacca

SEQ ID NO: 1650354 - RNA, 19 nt, Artificial Sequence
  Description of Artificial Sequence: Synthetic oligonucleotide
  Antisense strand to SEQ ID NO: 1650353
ugguuaauuagucacacgu

SEQ ID NO: 1650355 - RNA, 19 nt, Artificial Sequence
  Description of Artificial Sequence: Synthetic oligonucleotide
  Sense strand starting at position 1127 of SEQ ID NO: 1561150
uccuuuacuucuuugagga

SEQ ID NO: 1650356 - RNA, 19 nt, Artificial Sequence
  Description of Artificial Sequence: Synthetic oligonucleotide
  Antisense strand to SEQ ID NO: 1650355
uccucaaagaaguaaagga

SEQ ID NO: 1650357 - RNA, 19 nt, Artificial Sequence
  Description of Artificial Sequence: Synthetic oligonucleotide
  Sense strand starting at position 1128 of SEQ ID NO: 1561150
ccuuuacuucuuugaggaa

SEQ ID NO: 1650358 - RNA, 19 nt, Artificial Sequence
  Description of Artificial Sequence: Synthetic oligonucleotide
  Antisense strand to SEQ ID NO: 1650357
uuccucaaagaaguaaagg

SEQ ID NO: 1650359 - RNA, 19 nt, Artificial Sequence
  Description of Artificial Sequence: Synthetic oligonucleotide
  Sense strand starting at position 1129 of SEQ ID NO: 1561150
cuuuacuucuuugaggaag

SEQ ID NO: 1650360 - RNA, 19 nt, Artificial Sequence
  Description of Artificial Sequence: Synthetic oligonucleotide
  Antisense strand to SEQ ID NO: 1650359
cuuccucaaagaaguaaag

SEQ ID NO: 1650361 - RNA, 19 nt, Artificial Sequence
  Description of Artificial Sequence: Synthetic oligonucleotide
  Sense strand starting at position 1131 of SEQ ID NO: 1561150
uuacuucuuugaggaagga

SEQ ID NO: 1650362 - RNA, 19 nt, Artificial Sequence
  Description of Artificial Sequence: Synthetic oligonucleotide
  Antisense strand to SEQ ID NO: 1650361
uccuuccucaaagaaguaa

SEQ ID NO: 1650363 - RNA, 19 nt, Artificial Sequence
  Description of Artificial Sequence: Synthetic oligonucleotide
  Sense strand starting at position 1141 of SEQ ID NO: 1561150
gaggaaggaucuuacucua

SEQ ID NO: 1650364 - RNA, 19 nt, Artificial Sequence
  Description of Artificial Sequence: Synthetic oligonucleotide
  Antisense strand to SEQ ID NO: 1650363
uagaguaagauccuuccuc

SEQ ID NO: 1650365 - RNA, 19 nt, Artificial Sequence
  Description of Artificial Sequence: Synthetic oligonucleotide
  Sense strand starting at position 1333 of SEQ ID NO: 1561150
cuauguuuccugggcugga

SEQ ID NO: 1650366 - RNA, 19 nt, Artificial Sequence
  Description of Artificial Sequence: Synthetic oligonucleotide
  Antisense strand to SEQ ID NO: 1650365
uccagcccaggaaacauag

SEQ ID NO: 1650367 - RNA, 19 nt, Artificial Sequence
  Description of Artificial Sequence: Synthetic oligonucleotide
  Sense strand starting at position 1485 of SEQ ID NO: 1561150
acuggagugcagugaucuu

SEQ ID NO: 1650368 - RNA, 19 nt, Artificial Sequence
  Description of Artificial Sequence: Synthetic oligonucleotide
  Antisense strand to SEQ ID NO: 1650367
aagaucacugcacuccagu

SEQ ID NO: 1650369 - RNA, 19 nt, Artificial Sequence
  Description of Artificial Sequence: Synthetic oligonucleotide
  Sense strand starting at position 1521 of SEQ ID NO: 1561150
uuguaucuacaaugaggua

SEQ ID NO: 1650370 - RNA, 19 nt, Artificial Sequence
  Description of Artificial Sequence: Synthetic oligonucleotide
  Antisense strand to SEQ ID NO: 1650369
uaccucauuguagauacaa

SEQ ID NO: 1650371 - RNA, 19 nt, Artificial Sequence
  Description of Artificial Sequence: Synthetic oligonucleotide
  Sense strand starting at position 1786 of SEQ ID NO: 1561150
aggcuccaucgcugaagua

SEQ ID NO: 1650372 - RNA, 19 nt, Artificial Sequence
  Description of Artificial Sequence: Synthetic oligonucleotide
  Antisense strand to SEQ ID NO: 1650371
uacuucagcgauggagccu

SEQ ID NO: 1650373 - RNA, 19 nt, Artificial Sequence
  Description of Artificial Sequence: Synthetic oligonucleotide
  Sense strand starting at position 1787 of SEQ ID NO: 1561150
ggcuccaucgcugaaguau

SEQ ID NO: 1650374 - RNA, 19 nt, Artificial Sequence
  Description of Artificial Sequence: Synthetic oligonucleotide
  Antisense strand to SEQ ID NO: 1650373
auacuucagcgauggagcc

SEQ ID NO: 1650375 - RNA, 19 nt, Artificial Sequence
  Description of Artificial Sequence: Synthetic oligonucleotide
  Sense strand starting at position 1836 of SEQ ID NO: 1561150
cgugaacuguggaggcaaa

SEQ ID NO: 1650376 - RNA, 19 nt, Artificial Sequence
  Description of Artificial Sequence: Synthetic oligonucleotide
  Antisense strand to SEQ ID NO: 1650375
uuugccuccacaguucacg

SEQ ID NO: 1650377 - RNA, 19 nt, Artificial Sequence
  Description of Artificial Sequence: Synthetic oligonucleotide
  Sense strand starting at position 2051 of SEQ ID NO: 1561150
aagaguugugaguggucaa

SEQ ID NO: 1650378 - RNA, 19 nt, Artificial Sequence
  Description of Artificial Sequence: Synthetic oligonucleotide
  Antisense strand to SEQ ID NO: 1650377
uugaccacucacaacucuu

SEQ ID NO: 1650379 - RNA, 19 nt, Artificial Sequence
  Description of Artificial Sequence: Synthetic oligonucleotide
  Sense strand starting at position 2052 of SEQ ID NO: 1561150
agaguugugaguggucaaa

SEQ ID NO: 1650380 - RNA, 19 nt, Artificial Sequence
  Description of Artificial Sequence: Synthetic oligonucleotide
  Antisense strand to SEQ ID NO: 1650379
uuugaccacucacaacucu

SEQ ID NO: 1650381 - RNA, 19 nt, Artificial Sequence
  Description of Artificial Sequence: Synthetic oligonucleotide
  Sense strand starting at position 2115 of SEQ ID NO: 1561150
gggucugaguuccagcaga

SEQ ID NO: 1650382 - RNA, 19 nt, Artificial Sequence
  Description of Artificial Sequence: Synthetic oligonucleotide
  Antisense strand to SEQ ID NO: 1650381
ucugcuggaacucagaccc

SEQ ID NO: 1650383 - RNA, 19 nt, Artificial Sequence
  Description of Artificial Sequence: Synthetic oligonucleotide
  Sense strand starting at position 2175 of SEQ ID NO: 1561150
gcuggaauuccagagucua

SEQ ID NO: 1650384 - RNA, 19 nt, Artificial Sequence
  Description of Artificial Sequence: Synthetic oligonucleotide
  Antisense strand to SEQ ID NO: 1650383
uagacucuggaauuccagc

SEQ ID NO: 1650385 - RNA, 19 nt, Artificial Sequence
  Description of Artificial Sequence: Synthetic oligonucleotide
  Sense strand starting at position 2187 of SEQ ID NO: 1561150
gagucuaggucccugcaga

SEQ ID NO: 1650386 - RNA, 19 nt, Artificial Sequence
  Description of Artificial Sequence: Synthetic oligonucleotide
  Antisense strand to SEQ ID NO: 1650385
ucugcagggaccuagacuc

SEQ ID NO: 1650387 - RNA, 19 nt, Artificial Sequence
  Description of Artificial Sequence: Synthetic oligonucleotide
  Sense strand starting at position 2698 of SEQ ID NO: 1561150
auugcuuuacugucgcgau

SEQ ID NO: 1650388 - RNA, 19 nt, Artificial Sequence
  Description of Artificial Sequence: Synthetic oligonucleotide
  Antisense strand to SEQ ID NO: 1650387
aucgcgacaguaaagcaau

SEQ ID NO: 1650389 - RNA, 19 nt, Artificial Sequence
  Description of Artificial Sequence: Synthetic oligonucleotide
  Sense strand starting at position 2702 of SEQ ID NO: 1561150
cuuuacugucgcgauguau

SEQ ID NO: 1650390 - RNA, 19 nt, Artificial Sequence
  Description of Artificial Sequence: Synthetic oligonucleotide
  Antisense strand to SEQ ID NO: 1650389
auacaucgcgacaguaaag

SEQ ID NO: 1650391 - RNA, 19 nt, Artificial Sequence
  Description of Artificial Sequence: Synthetic oligonucleotide
  Sense strand starting at position 2709 of SEQ ID NO: 1561150
gucgcgauguauccgggaa

SEQ ID NO: 1650392 - RNA, 19 nt, Artificial Sequence
  Description of Artificial Sequence: Synthetic oligonucleotide
  Antisense strand to SEQ ID NO: 1650391
uucccggauacaucgcgac

SEQ ID NO: 1650393 - RNA, 19 nt, Artificial Sequence
  Description of Artificial Sequence: Synthetic oligonucleotide
  Sense strand starting at position 2710 of SEQ ID NO: 1561150
ucgcgauguauccgggaau

SEQ ID NO: 1650394 - RNA, 19 nt, Artificial Sequence
  Description of Artificial Sequence: Synthetic oligonucleotide
  Antisense strand to SEQ ID NO: 1650393
auucccggauacaucgcga

SEQ ID NO: 1650395 - RNA, 19 nt, Artificial Sequence
  Description of Artificial Sequence: Synthetic oligonucleotide
  Sense strand starting at position 2713 of SEQ ID NO: 1561150
cgauguauccgggaauuau

SEQ ID NO: 1650396 - RNA, 19 nt, Artificial Sequence
  Description of Artificial Sequence: Synthetic oligonucleotide
  Antisense strand to SEQ ID NO: 1650395
auaauucccggauacaucg

SEQ ID NO: 1650397 - RNA, 19 nt, Artificial Sequence
  Description of Artificial Sequence: Synthetic oligonucleotide
  Sense strand starting at position 3292 of SEQ ID NO: 1561150
caaggacuuugagagacuu

SEQ ID NO: 1650398 - RNA, 19 nt, Artificial Sequence
  Description of Artificial Sequence: Synthetic oligonucleotide
  Antisense strand to SEQ ID NO: 1650397
aagucucucaaaguccuug

SEQ ID NO: 1650399 - RNA, 19 nt, Artificial Sequence
  Description of Artificial Sequence: Synthetic oligonucleotide
  Sense strand starting at position 3300 of SEQ ID NO: 1561150
uugagagacuuggagaaug

SEQ ID NO: 1650400 - RNA, 19 nt, Artificial Sequence
  Description of Artificial Sequence: Synthetic oligonucleotide
  Antisense strand to SEQ ID NO: 1650399
cauucuccaagucucucaa

SEQ ID NO: 1650401 - RNA, 19 nt, Artificial Sequence
  Description of Artificial Sequence: Synthetic oligonucleotide
  Sense strand starting at position 3310 of SEQ ID NO: 1561150
uggagaauguuugaagcca

SEQ ID NO: 1650402 - RNA, 19 nt, Artificial Sequence
  Description of Artificial Sequence: Synthetic oligonucleotide
  Antisense strand to SEQ ID NO: 1650401
uggcuucaaacauucucca

SEQ ID NO: 1650403 - RNA, 19 nt, Artificial Sequence
  Description of Artificial Sequence: Synthetic oligonucleotide
  Sense strand starting at position 3752 of SEQ ID NO: 1561150
gcuuaaaguuucccgaagu

SEQ ID NO: 1650404 - RNA, 19 nt, Artificial Sequence
  Description of Artificial Sequence: Synthetic oligonucleotide
  Antisense strand to SEQ ID NO: 1650403
acuucgggaaacuuuaagc

SEQ ID NO: 1650405 - RNA, 19 nt, Artificial Sequence
  Description of Artificial Sequence: Synthetic oligonucleotide
  Sense strand starting at position 3842 of SEQ ID NO: 1561150
gcgcgaaguuggagaacaa

SEQ ID NO: 1650406 - RNA, 19 nt, Artificial Sequence
  Description of Artificial Sequence: Synthetic oligonucleotide
  Antisense strand to SEQ ID NO: 1650405
uuguucuccaacuucgcgc

SEQ ID NO: 1650407 - RNA, 19 nt, Artificial Sequence
  Description of Artificial Sequence: Synthetic oligonucleotide
  Sense strand starting at position 3843 of SEQ ID NO: 1561150
cgcgaaguuggagaacaau

SEQ ID NO: 1650408 - RNA, 19 nt, Artificial Sequence
  Description of Artificial Sequence: Synthetic oligonucleotide
  Antisense strand to SEQ ID NO: 1650407
auuguucuccaacuucgcg

SEQ ID NO: 1650409 - RNA, 19 nt, Artificial Sequence
  Description of Artificial Sequence: Synthetic oligonucleotide
  Sense strand starting at position 9 of SEQ ID NO: 1561151
aagaguugugaguggucaa

SEQ ID NO: 1650410 - RNA, 19 nt, Artificial Sequence
  Description of Artificial Sequence: Synthetic oligonucleotide
  Antisense strand to SEQ ID NO: 1650409
uugaccacucacaacucuu

SEQ ID NO: 1650411 - RNA, 19 nt, Artificial Sequence
  Description of Artificial Sequence: Synthetic oligonucleotide
  Sense strand starting at position 10 of SEQ ID NO: 1561151
agaguugugaguggucaaa

SEQ ID NO: 1650412 - RNA, 19 nt, Artificial Sequence
  Description of Artificial Sequence: Synthetic oligonucleotide
  Antisense strand to SEQ ID NO: 1650411
uuugaccacucacaacucu

SEQ ID NO: 1650413 - RNA, 19 nt, Artificial Sequence
  Description of Artificial Sequence: Synthetic oligonucleotide
  Sense strand starting at position 73 of SEQ ID NO: 1561151
gggucugaguuccagcaga

SEQ ID NO: 1650414 - RNA, 19 nt, Artificial Sequence
  Description of Artificial Sequence: Synthetic oligonucleotide
  Antisense strand to SEQ ID NO: 1650413
ucugcuggaacucagaccc

SEQ ID NO: 1650415 - RNA, 19 nt, Artificial Sequence
  Description of Artificial Sequence: Synthetic oligonucleotide
  Sense strand starting at position 133 of SEQ ID NO: 1561151
gcuggaauuccagagucua

SEQ ID NO: 1650416 - RNA, 19 nt, Artificial Sequence
  Description of Artificial Sequence: Synthetic oligonucleotide
  Antisense strand to SEQ ID NO: 1650415
uagacucuggaauuccagc

SEQ ID NO: 1650417 - RNA, 19 nt, Artificial Sequence
  Description of Artificial Sequence: Synthetic oligonucleotide
  Sense strand starting at position 145 of SEQ ID NO: 1561151
gagucuaggucccugcaga

SEQ ID NO: 1650418 - RNA, 19 nt, Artificial Sequence
  Description of Artificial Sequence: Synthetic oligonucleotide
  Antisense strand to SEQ ID NO: 1650417
ucugcagggaccuagacuc

SEQ ID NO: 1650419 - RNA, 19 nt, Artificial Sequence
  Description of Artificial Sequence: Synthetic oligonucleotide
  Sense strand starting at position 250 of SEQ ID NO: 1561151
gcaucaaguugccaaguuu

SEQ ID NO: 1650420 - RNA, 19 nt, Artificial Sequence
  Description of Artificial Sequence: Synthetic oligonucleotide
  Antisense strand to SEQ ID NO: 1650419
aaacuuggcaacuugaugc

SEQ ID NO: 1650421 - RNA, 19 nt, Artificial Sequence
  Description of Artificial Sequence: Synthetic oligonucleotide
  Sense strand starting at position 656 of SEQ ID NO: 1561151
auugcuuuacugucgcgau

SEQ ID NO: 1650422 - RNA, 19 nt, Artificial Sequence
  Description of Artificial Sequence: Synthetic oligonucleotide
  Antisense strand to SEQ ID NO: 1650421
aucgcgacaguaaagcaau

SEQ ID NO: 1650423 - RNA, 19 nt, Artificial Sequence
  Description of Artificial Sequence: Synthetic oligonucleotide
  Sense strand starting at position 659 of SEQ ID NO: 1561151
gcuuuacugucgcgaugua

SEQ ID NO: 1650424 - RNA, 19 nt, Artificial Sequence
  Description of Artificial Sequence: Synthetic oligonucleotide
  Antisense strand to SEQ ID NO: 1650423
uacaucgcgacaguaaagc

SEQ ID NO: 1650425 - RNA, 19 nt, Artificial Sequence
  Description of Artificial Sequence: Synthetic oligonucleotide
  Sense strand starting at position 660 of SEQ ID NO: 1561151
cuuuacugucgcgauguau

SEQ ID NO: 1650426 - RNA, 19 nt, Artificial Sequence
  Description of Artificial Sequence: Synthetic oligonucleotide
  Antisense strand to SEQ ID NO: 1650425
auacaucgcgacaguaaag

SEQ ID NO: 1650427 - RNA, 19 nt, Artificial Sequence
  Description of Artificial Sequence: Synthetic oligonucleotide
  Sense strand starting at position 667 of SEQ ID NO: 1561151
gucgcgauguauccgggaa

SEQ ID NO: 1650428 - RNA, 19 nt, Artificial Sequence
  Description of Artificial Sequence: Synthetic oligonucleotide
  Antisense strand to SEQ ID NO: 1650427
uucccggauacaucgcgac

SEQ ID NO: 1650429 - RNA, 19 nt, Artificial Sequence
  Description of Artificial Sequence: Synthetic oligonucleotide
  Sense strand starting at position 668 of SEQ ID NO: 1561151
ucgcgauguauccgggaau

SEQ ID NO: 1650430 - RNA, 19 nt, Artificial Sequence
  Description of Artificial Sequence: Synthetic oligonucleotide
  Antisense strand to SEQ ID NO: 1650429
auucccggauacaucgcga

SEQ ID NO: 1650431 - RNA, 19 nt, Artificial Sequence
  Description of Artificial Sequence: Synthetic oligonucleotide
  Sense strand starting at position 669 of SEQ ID NO: 1561151
cgcgauguauccgggaauu

SEQ ID NO: 1650432 - RNA, 19 nt, Artificial Sequence
  Description of Artificial Sequence: Synthetic oligonucleotide
  Antisense strand to SEQ ID NO: 1650431
aauucccggauacaucgcg

SEQ ID NO: 1650433 - RNA, 19 nt, Artificial Sequence
  Description of Artificial Sequence: Synthetic oligonucleotide
  Sense strand starting at position 671 of SEQ ID NO: 1561151
cgauguauccgggaauuau

SEQ ID NO: 1650434 - RNA, 19 nt, Artificial Sequence
  Description of Artificial Sequence: Synthetic oligonucleotide
  Antisense strand to SEQ ID NO: 1650433
auaauucccggauacaucg

SEQ ID NO: 1650435 - RNA, 19 nt, Artificial Sequence
  Description of Artificial Sequence: Synthetic oligonucleotide
  Sense strand starting at position 1250 of SEQ ID NO: 1561151
caaggacuuugagagacuu

SEQ ID NO: 1650436 - RNA, 19 nt, Artificial Sequence
  Description of Artificial Sequence: Synthetic oligonucleotide
  Antisense strand to SEQ ID NO: 1650435
aagucucucaaaguccuug

SEQ ID NO: 1650437 - RNA, 19 nt, Artificial Sequence
  Description of Artificial Sequence: Synthetic oligonucleotide
  Sense strand starting at position 1258 of SEQ ID NO: 1561151
uugagagacuuggagaaug

SEQ ID NO: 1650438 - RNA, 19 nt, Artificial Sequence
  Description of Artificial Sequence: Synthetic oligonucleotide
  Antisense strand to SEQ ID NO: 1650437
cauucuccaagucucucaa

SEQ ID NO: 1650439 - RNA, 19 nt, Artificial Sequence
  Description of Artificial Sequence: Synthetic oligonucleotide
  Sense strand starting at position 1268 of SEQ ID NO: 1561151
uggagaauguuugaagcca

SEQ ID NO: 1650440 - RNA, 19 nt, Artificial Sequence
  Description of Artificial Sequence: Synthetic oligonucleotide
  Antisense strand to SEQ ID NO: 1650439
uggcuucaaacauucucca

SEQ ID NO: 1650441 - RNA, 19 nt, Artificial Sequence
  Description of Artificial Sequence: Synthetic oligonucleotide
  Sense strand starting at position 1710 of SEQ ID NO: 1561151
gcuuaaaguuucccgaagu

SEQ ID NO: 1650442 - RNA, 19 nt, Artificial Sequence
  Description of Artificial Sequence: Synthetic oligonucleotide
  Antisense strand to SEQ ID NO: 1650441
acuucgggaaacuuuaagc

SEQ ID NO: 1650443 - RNA, 19 nt, Artificial Sequence
  Description of Artificial Sequence: Synthetic oligonucleotide
  Sense strand starting at position 1711 of SEQ ID NO: 1561151
cuuaaaguuucccgaagug

SEQ ID NO: 1650444 - RNA, 19 nt, Artificial Sequence
  Description of Artificial Sequence: Synthetic oligonucleotide
  Antisense strand to SEQ ID NO: 1650443
cacuucgggaaacuuuaag

SEQ ID NO: 1650445 - RNA, 19 nt, Artificial Sequence
  Description of Artificial Sequence: Synthetic oligonucleotide
  Sense strand starting at position 1800 of SEQ ID NO: 1561151
gcgcgaaguuggagaacaa

SEQ ID NO: 1650446 - RNA, 19 nt, Artificial Sequence
  Description of Artificial Sequence: Synthetic oligonucleotide
  Antisense strand to SEQ ID NO: 1650445
uuguucuccaacuucgcgc

SEQ ID NO: 1650447 - RNA, 19 nt, Artificial Sequence
  Description of Artificial Sequence: Synthetic oligonucleotide
  Sense strand starting at position 1801 of SEQ ID NO: 1561151
cgcgaaguuggagaacaau

SEQ ID NO: 1650448 - RNA, 19 nt, Artificial Sequence
  Description of Artificial Sequence: Synthetic oligonucleotide
  Antisense strand to SEQ ID NO: 1650447
auuguucuccaacuucgcg

SEQ ID NO: 1650449 - RNA, 19 nt, Artificial Sequence
  Description of Artificial Sequence: Synthetic oligonucleotide
  Sense strand starting at position 2561 of SEQ ID NO: 1561151
gcgcuuaguccaugacgca

SEQ ID NO: 1650450 - RNA, 19 nt, Artificial Sequence
  Description of Artificial Sequence: Synthetic oligonucleotide
  Antisense strand to SEQ ID NO: 1650449
ugcgucauggacuaagcgc

SEQ ID NO: 1650451 - RNA, 19 nt, Artificial Sequence
  Description of Artificial Sequence: Synthetic oligonucleotide
  Sense strand starting at position 2562 of SEQ ID NO: 1561151
cgcuuaguccaugacgcaa

SEQ ID NO: 1650452 - RNA, 19 nt, Artificial Sequence
  Description of Artificial Sequence: Synthetic oligonucleotide
  Antisense strand to SEQ ID NO: 1650451
uugcgucauggacuaagcg

SEQ ID NO: 1650453 - RNA, 19 nt, Artificial Sequence
  Description of Artificial Sequence: Synthetic oligonucleotide
  Sense strand starting at position 2581 of SEQ ID NO: 1561151
gcgaguaaggcccgugaga

SEQ ID NO: 1650454 - RNA, 19 nt, Artificial Sequence
  Description of Artificial Sequence: Synthetic oligonucleotide
  Antisense strand to SEQ ID NO: 1650453
ucucacgggccuuacucgc

SEQ ID NO: 1650455 - RNA, 19 nt, Artificial Sequence
  Description of Artificial Sequence: Synthetic oligonucleotide
  Sense strand starting at position 2583 of SEQ ID NO: 1561151
gaguaaggcccgugagauu

SEQ ID NO: 1650456 - RNA, 19 nt, Artificial Sequence
  Description of Artificial Sequence: Synthetic oligonucleotide
  Antisense strand to SEQ ID NO: 1650455
aaucucacgggccuuacuc

SEQ ID NO: 1650457 - RNA, 19 nt, Artificial Sequence
  Description of Artificial Sequence: Synthetic oligonucleotide
  Sense strand starting at position 2611 of SEQ ID NO: 1561151
ggcagagcagucuggucaa

SEQ ID NO: 1650458 - RNA, 19 nt, Artificial Sequence
  Description of Artificial Sequence: Synthetic oligonucleotide
  Antisense strand to SEQ ID NO: 1650457
uugaccagacugcucugcc

SEQ ID NO: 1650459 - RNA, 19 nt, Artificial Sequence
  Description of Artificial Sequence: Synthetic oligonucleotide
  Sense strand starting at position 2806 of SEQ ID NO: 1561151
ggagccuucugcuugguua

SEQ ID NO: 1650460 - RNA, 19 nt, Artificial Sequence
  Description of Artificial Sequence: Synthetic oligonucleotide
  Antisense strand to SEQ ID NO: 1650459
uaaccaagcagaaggcucc

SEQ ID NO: 1650461 - RNA, 19 nt, Artificial Sequence
  Description of Artificial Sequence: Synthetic oligonucleotide
  Sense strand starting at position 2807 of SEQ ID NO: 1561151
gagccuucugcuugguuau

SEQ ID NO: 1650462 - RNA, 19 nt, Artificial Sequence
  Description of Artificial Sequence: Synthetic oligonucleotide
  Antisense strand to SEQ ID NO: 1650461
auaaccaagcagaaggcuc

SEQ ID NO: 1650463 - RNA, 19 nt, Artificial Sequence
  Description of Artificial Sequence: Synthetic oligonucleotide
  Sense strand starting at position 2808 of SEQ ID NO: 1561151
agccuucugcuugguuaua

SEQ ID NO: 1650464 - RNA, 19 nt, Artificial Sequence
  Description of Artificial Sequence: Synthetic oligonucleotide
  Antisense strand to SEQ ID NO: 1650463
uauaaccaagcagaaggcu

SEQ ID NO: 1650465 - RNA, 19 nt, Artificial Sequence
  Description of Artificial Sequence: Synthetic oligonucleotide
  Sense strand starting at position 2809 of SEQ ID NO: 1561151
gccuucugcuugguuauau

SEQ ID NO: 1650466 - RNA, 19 nt, Artificial Sequence
  Description of Artificial Sequence: Synthetic oligonucleotide
  Antisense strand to SEQ ID NO: 1650465
auauaaccaagcagaaggc

SEQ ID NO: 1650467 - RNA, 19 nt, Artificial Sequence
  Description of Artificial Sequence: Synthetic oligonucleotide
  Sense strand starting at position 2810 of SEQ ID NO: 1561151
ccuucugcuugguuauauu

SEQ ID NO: 1650468 - RNA, 19 nt, Artificial Sequence
  Description of Artificial Sequence: Synthetic oligonucleotide
  Antisense strand to SEQ ID NO: 1650467
aauauaaccaagcagaagg

SEQ ID NO: 1650469 - RNA, 19 nt, Artificial Sequence
  Description of Artificial Sequence: Synthetic oligonucleotide
  Sense strand starting at position 2819 of SEQ ID NO: 1561151
ugguuauauuugcguuccu

SEQ ID NO: 1650470 - RNA, 19 nt, Artificial Sequence
  Description of Artificial Sequence: Synthetic oligonucleotide
  Antisense strand to SEQ ID NO: 1650469
aggaacgcaaauauaacca

SEQ ID NO: 1650471 - RNA, 19 nt, Artificial Sequence
  Description of Artificial Sequence: Synthetic oligonucleotide
  Sense strand starting at position 2975 of SEQ ID NO: 1561151
ugccuuugccgacuugagu

SEQ ID NO: 1650472 - RNA, 19 nt, Artificial Sequence
  Description of Artificial Sequence: Synthetic oligonucleotide
  Antisense strand to SEQ ID NO: 1650471
acucaagucggcaaaggca

SEQ ID NO: 1650473 - RNA, 19 nt, Artificial Sequence
  Description of Artificial Sequence: Synthetic oligonucleotide
  Sense strand starting at position 2997 of SEQ ID NO: 1561151
cgucucggcaucugugaau

SEQ ID NO: 1650474 - RNA, 19 nt, Artificial Sequence
  Description of Artificial Sequence: Synthetic oligonucleotide
  Antisense strand to SEQ ID NO: 1650473
auucacagaugccgagacg

SEQ ID NO: 1650475 - RNA, 19 nt, Artificial Sequence
  Description of Artificial Sequence: Synthetic oligonucleotide
  Sense strand starting at position 3018 of SEQ ID NO: 1561151
ggaccugacuuuggacaga

SEQ ID NO: 1650476 - RNA, 19 nt, Artificial Sequence
  Description of Artificial Sequence: Synthetic oligonucleotide
  Antisense strand to SEQ ID NO: 1650475
ucuguccaaagucaggucc

SEQ ID NO: 1650477 - RNA, 19 nt, Artificial Sequence
  Description of Artificial Sequence: Synthetic oligonucleotide
  Sense strand starting at position 3054 of SEQ ID NO: 1561151
cuuccugauucuuaguagu

SEQ ID NO: 1650478 - RNA, 19 nt, Artificial Sequence
  Description of Artificial Sequence: Synthetic oligonucleotide
  Antisense strand to SEQ ID NO: 1650477
acuacuaagaaucaggaag

SEQ ID NO: 1650479 - RNA, 19 nt, Artificial Sequence
  Description of Artificial Sequence: Synthetic oligonucleotide
  Sense strand starting at position 3064 of SEQ ID NO: 1561151
cuuaguaguccgugucuac

SEQ ID NO: 1650480 - RNA, 19 nt, Artificial Sequence
  Description of Artificial Sequence: Synthetic oligonucleotide
  Antisense strand to SEQ ID NO: 1650479
guagacacggacuacuaag

SEQ ID NO: 1650481 - RNA, 19 nt, Artificial Sequence
  Description of Artificial Sequence: Synthetic oligonucleotide
  Sense strand starting at position 3067 of SEQ ID NO: 1561151
aguaguccgugucuacauu

SEQ ID NO: 1650482 - RNA, 19 nt, Artificial Sequence
  Description of Artificial Sequence: Synthetic oligonucleotide
  Antisense strand to SEQ ID NO: 1650481
aauguagacacggacuacu

SEQ ID NO: 1650483 - RNA, 19 nt, Artificial Sequence
  Description of Artificial Sequence: Synthetic oligonucleotide
  Sense strand starting at position 3362 of SEQ ID NO: 1561151
ucgagaccucucuggccaa

SEQ ID NO: 1650484 - RNA, 19 nt, Artificial Sequence
  Description of Artificial Sequence: Synthetic oligonucleotide
  Antisense strand to SEQ ID NO: 1650483
uuggccagagaggucucga

SEQ ID NO: 1650485 - RNA, 19 nt, Artificial Sequence
  Description of Artificial Sequence: Synthetic oligonucleotide
  Sense strand starting at position 440 of SEQ ID NO: 1561152
ggcccacugaagugugauu

SEQ ID NO: 1650486 - RNA, 19 nt, Artificial Sequence
  Description of Artificial Sequence: Synthetic oligonucleotide
  Antisense strand to SEQ ID NO: 1650485
aaucacacuucagugggcc

SEQ ID NO: 1650487 - RNA, 19 nt, Artificial Sequence
  Description of Artificial Sequence: Synthetic oligonucleotide
  Sense strand starting at position 814 of SEQ ID NO: 1561152
cgagcauucggaggagcaa

SEQ ID NO: 1650488 - RNA, 19 nt, Artificial Sequence
  Description of Artificial Sequence: Synthetic oligonucleotide
  Antisense strand to SEQ ID NO: 1650487
uugcuccuccgaaugcucg

SEQ ID NO: 1650489 - RNA, 19 nt, Artificial Sequence
  Description of Artificial Sequence: Synthetic oligonucleotide
  Sense strand starting at position 877 of SEQ ID NO: 1561152
ccgugaaacccgggcucau

SEQ ID NO: 1650490 - RNA, 19 nt, Artificial Sequence
  Description of Artificial Sequence: Synthetic oligonucleotide
  Antisense strand to SEQ ID NO: 1650489
augagcccggguuucacgg

SEQ ID NO: 1650491 - RNA, 19 nt, Artificial Sequence
  Description of Artificial Sequence: Synthetic oligonucleotide
  Sense strand starting at position 2214 of SEQ ID NO: 1561152
gcggcugaguccguuggaa

SEQ ID NO: 1650492 - RNA, 19 nt, Artificial Sequence
  Description of Artificial Sequence: Synthetic oligonucleotide
  Antisense strand to SEQ ID NO: 1650491
uuccaacggacucagccgc

SEQ ID NO: 1650493 - RNA, 19 nt, Artificial Sequence
  Description of Artificial Sequence: Synthetic oligonucleotide
  Sense strand starting at position 2216 of SEQ ID NO: 1561152
ggcugaguccguuggaaac

SEQ ID NO: 1650494 - RNA, 19 nt, Artificial Sequence
  Description of Artificial Sequence: Synthetic oligonucleotide
  Antisense strand to SEQ ID NO: 1650493
guuuccaacggacucagcc

SEQ ID NO: 1650495 - RNA, 19 nt, Artificial Sequence
  Description of Artificial Sequence: Synthetic oligonucleotide
  Sense strand starting at position 2257 of SEQ ID NO: 1561152
aggaaauugugauggugaa

SEQ ID NO: 1650496 - RNA, 19 nt, Artificial Sequence
  Description of Artificial Sequence: Synthetic oligonucleotide
  Antisense strand to SEQ ID NO: 1650495
uucaccaucacaauuuccu

SEQ ID NO: 1650497 - RNA, 19 nt, Artificial Sequence
  Description of Artificial Sequence: Synthetic oligonucleotide
  Sense strand starting at position 2258 of SEQ ID NO: 1561152
ggaaauugugauggugaaa

SEQ ID NO: 1650498 - RNA, 19 nt, Artificial Sequence
  Description of Artificial Sequence: Synthetic oligonucleotide
  Antisense strand to SEQ ID NO: 1650497
uuucaccaucacaauuucc

SEQ ID NO: 1650499 - RNA, 19 nt, Artificial Sequence
  Description of Artificial Sequence: Synthetic oligonucleotide
  Sense strand starting at position 2326 of SEQ ID NO: 1561152
uuguuuauuccugggcgga

SEQ ID NO: 1650500 - RNA, 19 nt, Artificial Sequence
  Description of Artificial Sequence: Synthetic oligonucleotide
  Antisense strand to SEQ ID NO: 1650499
uccgcccaggaauaaacaa

SEQ ID NO: 1650501 - RNA, 19 nt, Artificial Sequence
  Description of Artificial Sequence: Synthetic oligonucleotide
  Sense strand starting at position 2327 of SEQ ID NO: 1561152
uguuuauuccugggcggaa

SEQ ID NO: 1650502 - RNA, 19 nt, Artificial Sequence
  Description of Artificial Sequence: Synthetic oligonucleotide
  Antisense strand to SEQ ID NO: 1650501
uuccgcccaggaauaaaca

SEQ ID NO: 1650503 - RNA, 19 nt, Artificial Sequence
  Description of Artificial Sequence: Synthetic oligonucleotide
  Sense strand starting at position 2328 of SEQ ID NO: 1561152
guuuauuccugggcggaag

SEQ ID NO: 1650504 - RNA, 19 nt, Artificial Sequence
  Description of Artificial Sequence: Synthetic oligonucleotide
  Antisense strand to SEQ ID NO: 1650503
cuuccgcccaggaauaaac

SEQ ID NO: 1650505 - RNA, 19 nt, Artificial Sequence
  Description of Artificial Sequence: Synthetic oligonucleotide
  Sense strand starting at position 2399 of SEQ ID NO: 1561152
uugauaagagccugugaau

SEQ ID NO: 1650506 - RNA, 19 nt, Artificial Sequence
  Description of Artificial Sequence: Synthetic oligonucleotide
  Antisense strand to SEQ ID NO: 1650505
auucacaggcucuuaucaa

SEQ ID NO: 1650507 - RNA, 19 nt, Artificial Sequence
  Description of Artificial Sequence: Synthetic oligonucleotide
  Sense strand starting at position 2522 of SEQ ID NO: 1561152
cggaucaccugauaagguu

SEQ ID NO: 1650508 - RNA, 19 nt, Artificial Sequence
  Description of Artificial Sequence: Synthetic oligonucleotide
  Antisense strand to SEQ ID NO: 1650507
aaccuuaucaggugauccg

SEQ ID NO: 1650509 - RNA, 19 nt, Artificial Sequence
  Description of Artificial Sequence: Synthetic oligonucleotide
  Sense strand starting at position 2550 of SEQ ID NO: 1561152
agacuagcauccucgacau

SEQ ID NO: 1650510 - RNA, 19 nt, Artificial Sequence
  Description of Artificial Sequence: Synthetic oligonucleotide
  Antisense strand to SEQ ID NO: 1650509
augucgaggaugcuagucu

SEQ ID NO: 1650511 - RNA, 19 nt, Artificial Sequence
  Description of Artificial Sequence: Synthetic oligonucleotide
  Sense strand starting at position 2556 of SEQ ID NO: 1561152
gcauccucgacauggugaa

SEQ ID NO: 1650512 - RNA, 19 nt, Artificial Sequence
  Description of Artificial Sequence: Synthetic oligonucleotide
  Antisense strand to SEQ ID NO: 1650511
uucaccaugucgaggaugc

SEQ ID NO: 1650513 - RNA, 19 nt, Artificial Sequence
  Description of Artificial Sequence: Synthetic oligonucleotide
  Sense strand starting at position 2557 of SEQ ID NO: 1561152
cauccucgacauggugaaa

SEQ ID NO: 1650514 - RNA, 19 nt, Artificial Sequence
  Description of Artificial Sequence: Synthetic oligonucleotide
  Antisense strand to SEQ ID NO: 1650513
uuucaccaugucgaggaug

SEQ ID NO: 1650515 - RNA, 19 nt, Artificial Sequence
  Description of Artificial Sequence: Synthetic oligonucleotide
  Sense strand starting at position 2840 of SEQ ID NO: 1561152
cgaggcacagcuuguguua

SEQ ID NO: 1650516 - RNA, 19 nt, Artificial Sequence
  Description of Artificial Sequence: Synthetic oligonucleotide
  Antisense strand to SEQ ID NO: 1650515
uaacacaagcugugccucg

SEQ ID NO: 1650517 - RNA, 19 nt, Artificial Sequence
  Description of Artificial Sequence: Synthetic oligonucleotide
  Sense strand starting at position 2842 of SEQ ID NO: 1561152
aggcacagcuuguguuaaa

SEQ ID NO: 1650518 - RNA, 19 nt, Artificial Sequence
  Description of Artificial Sequence: Synthetic oligonucleotide
  Antisense strand to SEQ ID NO: 1650517
uuuaacacaagcugugccu

SEQ ID NO: 1650519 - RNA, 19 nt, Artificial Sequence
  Description of Artificial Sequence: Synthetic oligonucleotide
  Sense strand starting at position 2843 of SEQ ID NO: 1561152
ggcacagcuuguguuaaag

SEQ ID NO: 1650520 - RNA, 19 nt, Artificial Sequence
  Description of Artificial Sequence: Synthetic oligonucleotide
  Antisense strand to SEQ ID NO: 1650519
cuuuaacacaagcugugcc

SEQ ID NO: 1650521 - RNA, 19 nt, Artificial Sequence
  Description of Artificial Sequence: Synthetic oligonucleotide
  Sense strand starting at position 2845 of SEQ ID NO: 1561152
cacagcuuguguuaaaguu

SEQ ID NO: 1650522 - RNA, 19 nt, Artificial Sequence
  Description of Artificial Sequence: Synthetic oligonucleotide
  Antisense strand to SEQ ID NO: 1650521
aacuuuaacacaagcugug

SEQ ID NO: 1650523 - RNA, 19 nt, Artificial Sequence
  Description of Artificial Sequence: Synthetic oligonucleotide
  Sense strand starting at position 2876 of SEQ ID NO: 1561152
gguucuuggugucuugaag

SEQ ID NO: 1650524 - RNA, 19 nt, Artificial Sequence
  Description of Artificial Sequence: Synthetic oligonucleotide
  Antisense strand to SEQ ID NO: 1650523
cuucaagacaccaagaacc

SEQ ID NO: 1650525 - RNA, 19 nt, Artificial Sequence
  Description of Artificial Sequence: Synthetic oligonucleotide
  Sense strand starting at position 3041 of SEQ ID NO: 1561152
ggguacgcccgauguaaau

SEQ ID NO: 1650526 - RNA, 19 nt, Artificial Sequence
  Description of Artificial Sequence: Synthetic oligonucleotide
  Antisense strand to SEQ ID NO: 1650525
auuuacaucgggcguaccc

SEQ ID NO: 1650527 - RNA, 19 nt, Artificial Sequence
  Description of Artificial Sequence: Synthetic oligonucleotide
  Sense strand starting at position 3056 of SEQ ID NO: 1561152
aaaugaagacggugaagua

SEQ ID NO: 1650528 - RNA, 19 nt, Artificial Sequence
  Description of Artificial Sequence: Synthetic oligonucleotide
  Antisense strand to SEQ ID NO: 1650527
uacuucaccgucuucauuu

SEQ ID NO: 1650529 - RNA, 19 nt, Artificial Sequence
  Description of Artificial Sequence: Synthetic oligonucleotide
  Sense strand starting at position 3082 of SEQ ID NO: 1561152
gaagucauuuacucggugu

SEQ ID NO: 1650530 - RNA, 19 nt, Artificial Sequence
  Description of Artificial Sequence: Synthetic oligonucleotide
  Antisense strand to SEQ ID NO: 1650529
acaccgaguaaaugacuuc

SEQ ID NO: 1650531 - RNA, 19 nt, Artificial Sequence
  Description of Artificial Sequence: Synthetic oligonucleotide
  Sense strand starting at position 3136 of SEQ ID NO: 1561152
aagcgugaaucggccuuau

SEQ ID NO: 1650532 - RNA, 19 nt, Artificial Sequence
  Description of Artificial Sequence: Synthetic oligonucleotide
  Antisense strand to SEQ ID NO: 1650531
auaaggccgauucacgcuu

SEQ ID NO: 1650533 - RNA, 19 nt, Artificial Sequence
  Description of Artificial Sequence: Synthetic oligonucleotide
  Sense strand starting at position 3232 of SEQ ID NO: 1561152
gaaucagcucaguggauca

SEQ ID NO: 1650534 - RNA, 19 nt, Artificial Sequence
  Description of Artificial Sequence: Synthetic oligonucleotide
  Antisense strand to SEQ ID NO: 1650533
ugauccacugagcugauuc

SEQ ID NO: 1650535 - RNA, 19 nt, Artificial Sequence
  Description of Artificial Sequence: Synthetic oligonucleotide
  Sense strand starting at position 3394 of SEQ ID NO: 1561152
ccgcccaauugucuuuaaa

SEQ ID NO: 1650536 - RNA, 19 nt, Artificial Sequence
  Description of Artificial Sequence: Synthetic oligonucleotide
  Antisense strand to SEQ ID NO: 1650535
uuuaaagacaauugggcgg

SEQ ID NO: 1650537 - RNA, 19 nt, Artificial Sequence
  Description of Artificial Sequence: Synthetic oligonucleotide
  Sense strand starting at position 3422 of SEQ ID NO: 1561152
ccucaaaugcucggagaga

SEQ ID NO: 1650538 - RNA, 19 nt, Artificial Sequence
  Description of Artificial Sequence: Synthetic oligonucleotide
  Antisense strand to SEQ ID NO: 1650537
ucucuccgagcauuugagg

SEQ ID NO: 1650539 - RNA, 19 nt, Artificial Sequence
  Description of Artificial Sequence: Synthetic oligonucleotide
  Sense strand starting at position 3564 of SEQ ID NO: 1561152
ccauuaggugguuacaagu

SEQ ID NO: 1650540 - RNA, 19 nt, Artificial Sequence
  Description of Artificial Sequence: Synthetic oligonucleotide
  Antisense strand to SEQ ID NO: 1650539
acuuguaaccaccuaaugg

SEQ ID NO: 1650541 - RNA, 19 nt, Artificial Sequence
  Description of Artificial Sequence: Synthetic oligonucleotide
  Sense strand starting at position 3893 of SEQ ID NO: 1561152
gguccuuguugccugcuaa

SEQ ID NO: 1650542 - RNA, 19 nt, Artificial Sequence
  Description of Artificial Sequence: Synthetic oligonucleotide
  Antisense strand to SEQ ID NO: 1650541
uuagcaggcaacaaggacc

SEQ ID NO: 1650543 - RNA, 19 nt, Artificial Sequence
  Description of Artificial Sequence: Synthetic oligonucleotide
  Sense strand starting at position 3973 of SEQ ID NO: 1561152
aagccuugguggugaggaa

SEQ ID NO: 1650544 - RNA, 19 nt, Artificial Sequence
  Description of Artificial Sequence: Synthetic oligonucleotide
  Antisense strand to SEQ ID NO: 1650543
uuccucaccaccaaggcuu

SEQ ID NO: 1650545 - RNA, 19 nt, Artificial Sequence
  Description of Artificial Sequence: Synthetic oligonucleotide
  Sense strand starting at position 8 of SEQ ID NO: 1561153
augggaguguucucagagu

SEQ ID NO: 1650546 - RNA, 19 nt, Artificial Sequence
  Description of Artificial Sequence: Synthetic oligonucleotide
  Antisense strand to SEQ ID NO: 1650545
acucugagaacacucccau

SEQ ID NO: 1650547 - RNA, 19 nt, Artificial Sequence
  Description of Artificial Sequence: Synthetic oligonucleotide
  Sense strand starting at position 22 of SEQ ID NO: 1561153
agaguuuccagaggaacuc

SEQ ID NO: 1650548 - RNA, 19 nt, Artificial Sequence
  Description of Artificial Sequence: Synthetic oligonucleotide
  Antisense strand to SEQ ID NO: 1650547
gaguuccucuggaaacucu

SEQ ID NO: 1650549 - RNA, 19 nt, Artificial Sequence
  Description of Artificial Sequence: Synthetic oligonucleotide
  Sense strand starting at position 34 of SEQ ID NO: 1561153
ggaacucaauugugaugaa

SEQ ID NO: 1650550 - RNA, 19 nt, Artificial Sequence
  Description of Artificial Sequence: Synthetic oligonucleotide
  Antisense strand to SEQ ID NO: 1650549
uucaucacaauugaguucc

SEQ ID NO: 1650551 - RNA, 19 nt, Artificial Sequence
  Description of Artificial Sequence: Synthetic oligonucleotide
  Sense strand starting at position 35 of SEQ ID NO: 1561153
gaacucaauugugaugaag

SEQ ID NO: 1650552 - RNA, 19 nt, Artificial Sequence
  Description of Artificial Sequence: Synthetic oligonucleotide
  Antisense strand to SEQ ID NO: 1650551
cuucaucacaauugaguuc

SEQ ID NO: 1650553 - RNA, 19 nt, Artificial Sequence
  Description of Artificial Sequence: Synthetic oligonucleotide
  Sense strand starting at position 37 of SEQ ID NO: 1561153
acucaauugugaugaaguc

SEQ ID NO: 1650554 - RNA, 19 nt, Artificial Sequence
  Description of Artificial Sequence: Synthetic oligonucleotide
  Antisense strand to SEQ ID NO: 1650553
gacuucaucacaauugagu

SEQ ID NO: 1650555 - RNA, 19 nt, Artificial Sequence
  Description of Artificial Sequence: Synthetic oligonucleotide
  Sense strand starting at position 38 of SEQ ID NO: 1561153
cucaauugugaugaaguca

SEQ ID NO: 1650556 - RNA, 19 nt, Artificial Sequence
  Description of Artificial Sequence: Synthetic oligonucleotide
  Antisense strand to SEQ ID NO: 1650555
ugacuucaucacaauugag

SEQ ID NO: 1650557 - RNA, 19 nt, Artificial Sequence
  Description of Artificial Sequence: Synthetic oligonucleotide
  Sense strand starting at position 71 of SEQ ID NO: 1561153
gaguaaugccgagggccau

SEQ ID NO: 1650558 - RNA, 19 nt, Artificial Sequence
  Description of Artificial Sequence: Synthetic oligonucleotide
  Antisense strand to SEQ ID NO: 1650557
auggcccucggcauuacuc

SEQ ID NO: 1650559 - RNA, 19 nt, Artificial Sequence
  Description of Artificial Sequence: Synthetic oligonucleotide
  Sense strand starting at position 92 of SEQ ID NO: 1561153
aggcuaaagguucggguau

SEQ ID NO: 1650560 - RNA, 19 nt, Artificial Sequence
  Description of Artificial Sequence: Synthetic oligonucleotide
  Antisense strand to SEQ ID NO: 1650559
auacccgaaccuuuagccu

SEQ ID NO: 1650561 - RNA, 19 nt, Artificial Sequence
  Description of Artificial Sequence: Synthetic oligonucleotide
  Sense strand starting at position 98 of SEQ ID NO: 1561153
aagguucggguaugaauua

SEQ ID NO: 1650562 - RNA, 19 nt, Artificial Sequence
  Description of Artificial Sequence: Synthetic oligonucleotide
  Antisense strand to SEQ ID NO: 1650561
uaauucauacccgaaccuu

SEQ ID NO: 1650563 - RNA, 19 nt, Artificial Sequence
  Description of Artificial Sequence: Synthetic oligonucleotide
  Sense strand starting at position 160 of SEQ ID NO: 1561153
ggaaggugugggugaaacu

SEQ ID NO: 1650564 - RNA, 19 nt, Artificial Sequence
  Description of Artificial Sequence: Synthetic oligonucleotide
  Antisense strand to SEQ ID NO: 1650563
aguuucacccacaccuucc

SEQ ID NO: 1650565 - RNA, 19 nt, Artificial Sequence
  Description of Artificial Sequence: Synthetic oligonucleotide
  Sense strand starting at position 161 of SEQ ID NO: 1561153
gaaggugugggugaaacuu

SEQ ID NO: 1650566 - RNA, 19 nt, Artificial Sequence
  Description of Artificial Sequence: Synthetic oligonucleotide
  Antisense strand to SEQ ID NO: 1650565
aaguuucacccacaccuuc

SEQ ID NO: 1650567 - RNA, 19 nt, Artificial Sequence
  Description of Artificial Sequence: Synthetic oligonucleotide
  Sense strand starting at position 1186 of SEQ ID NO: 1561153
ucaaguucccagugacuuu

SEQ ID NO: 1650568 - RNA, 19 nt, Artificial Sequence
  Description of Artificial Sequence: Synthetic oligonucleotide
  Antisense strand to SEQ ID NO: 1650567
aaagucacugggaacuuga

SEQ ID NO: 1650569 - RNA, 19 nt, Artificial Sequence
  Description of Artificial Sequence: Synthetic oligonucleotide
  Sense strand starting at position 1439 of SEQ ID NO: 1561153
gguggagccggguaagaaa

SEQ ID NO: 1650570 - RNA, 19 nt, Artificial Sequence
  Description of Artificial Sequence: Synthetic oligonucleotide
  Antisense strand to SEQ ID NO: 1650569
uuucuuacccggcuccacc

SEQ ID NO: 1650571 - RNA, 19 nt, Artificial Sequence
  Description of Artificial Sequence: Synthetic oligonucleotide
  Sense strand starting at position 1555 of SEQ ID NO: 1561153
ccucccuucuccguaagaa

SEQ ID NO: 1650572 - RNA, 19 nt, Artificial Sequence
  Description of Artificial Sequence: Synthetic oligonucleotide
  Antisense strand to SEQ ID NO: 1650571
uucuuacggagaagggagg

SEQ ID NO: 1650573 - RNA, 19 nt, Artificial Sequence
  Description of Artificial Sequence: Synthetic oligonucleotide
  Sense strand starting at position 1556 of SEQ ID NO: 1561153
cucccuucuccguaagaag

SEQ ID NO: 1650574 - RNA, 19 nt, Artificial Sequence
  Description of Artificial Sequence: Synthetic oligonucleotide
  Antisense strand to SEQ ID NO: 1650573
cuucuuacggagaagggag

SEQ ID NO: 1650575 - RNA, 19 nt, Artificial Sequence
  Description of Artificial Sequence: Synthetic oligonucleotide
  Sense strand starting at position 1602 of SEQ ID NO: 1561153
ggguccuucucacuccaaa

SEQ ID NO: 1650576 - RNA, 19 nt, Artificial Sequence
  Description of Artificial Sequence: Synthetic oligonucleotide
  Antisense strand to SEQ ID NO: 1650575
uuuggagugagaaggaccc

SEQ ID NO: 1650577 - RNA, 19 nt, Artificial Sequence
  Description of Artificial Sequence: Synthetic oligonucleotide
  Sense strand starting at position 1966 of SEQ ID NO: 1561153
gaaaguugccgggagcuuu

SEQ ID NO: 1650578 - RNA, 19 nt, Artificial Sequence
  Description of Artificial Sequence: Synthetic oligonucleotide
  Antisense strand to SEQ ID NO: 1650577
aaagcucccggcaacuuuc

SEQ ID NO: 1650579 - RNA, 19 nt, Artificial Sequence
  Description of Artificial Sequence: Synthetic oligonucleotide
  Sense strand starting at position 1974 of SEQ ID NO: 1561153
ccgggagcuuuguuuggga

SEQ ID NO: 1650580 - RNA, 19 nt, Artificial Sequence
  Description of Artificial Sequence: Synthetic oligonucleotide
  Antisense strand to SEQ ID NO: 1650579
ucccaaacaaagcucccgg

SEQ ID NO: 1650581 - RNA, 19 nt, Artificial Sequence
  Description of Artificial Sequence: Synthetic oligonucleotide
  Sense strand starting at position 1976 of SEQ ID NO: 1561153
gggagcuuuguuugggaaa

SEQ ID NO: 1650582 - RNA, 19 nt, Artificial Sequence
  Description of Artificial Sequence: Synthetic oligonucleotide
  Antisense strand to SEQ ID NO: 1650581
uuucccaaacaaagcuccc

SEQ ID NO: 1650583 - RNA, 19 nt, Artificial Sequence
  Description of Artificial Sequence: Synthetic oligonucleotide
  Sense strand starting at position 2079 of SEQ ID NO: 1561153
uuugcuuugggagagauua

SEQ ID NO: 1650584 - RNA, 19 nt, Artificial Sequence
  Description of Artificial Sequence: Synthetic oligonucleotide
  Antisense strand to SEQ ID NO: 1650583
uaaucucucccaaagcaaa

SEQ ID NO: 1650585 - RNA, 19 nt, Artificial Sequence
  Description of Artificial Sequence: Synthetic oligonucleotide
  Sense strand starting at position 2081 of SEQ ID NO: 1561153
ugcuuugggagagauuagu

SEQ ID NO: 1650586 - RNA, 19 nt, Artificial Sequence
  Description of Artificial Sequence: Synthetic oligonucleotide
  Antisense strand to SEQ ID NO: 1650585
acuaaucucucccaaagca

SEQ ID NO: 1650587 - RNA, 19 nt, Artificial Sequence
  Description of Artificial Sequence: Synthetic oligonucleotide
  Sense strand starting at position 2087 of SEQ ID NO: 1561153
gggagagauuagucuaucu

SEQ ID NO: 1650588 - RNA, 19 nt, Artificial Sequence
  Description of Artificial Sequence: Synthetic oligonucleotide
  Antisense strand to SEQ ID NO: 1650587
agauagacuaaucucuccc

SEQ ID NO: 1650589 - RNA, 19 nt, Artificial Sequence
  Description of Artificial Sequence: Synthetic oligonucleotide
  Sense strand starting at position 2089 of SEQ ID NO: 1561153
gagagauuagucuaucucg

SEQ ID NO: 1650590 - RNA, 19 nt, Artificial Sequence
  Description of Artificial Sequence: Synthetic oligonucleotide
  Antisense strand to SEQ ID NO: 1650589
cgagauagacuaaucucuc

SEQ ID NO: 1650591 - RNA, 19 nt, Artificial Sequence
  Description of Artificial Sequence: Synthetic oligonucleotide
  Sense strand starting at position 2377 of SEQ ID NO: 1561153
gcggaagugauacgaauac

SEQ ID NO: 1650592 - RNA, 19 nt, Artificial Sequence
  Description of Artificial Sequence: Synthetic oligonucleotide
  Antisense strand to SEQ ID NO: 1650591
guauucguaucacuuccgc

SEQ ID NO: 1650593 - RNA, 19 nt, Artificial Sequence
  Description of Artificial Sequence: Synthetic oligonucleotide
  Sense strand starting at position 2397 of SEQ ID NO: 1561153
aagagucuuuacuguuaag

SEQ ID NO: 1650594 - RNA, 19 nt, Artificial Sequence
  Description of Artificial Sequence: Synthetic oligonucleotide
  Antisense strand to SEQ ID NO: 1650593
cuuaacaguaaagacucuu

SEQ ID NO: 1650595 - RNA, 19 nt, Artificial Sequence
  Description of Artificial Sequence: Synthetic oligonucleotide
  Sense strand starting at position 2407 of SEQ ID NO: 1561153
acuguuaagcccugagguu

SEQ ID NO: 1650596 - RNA, 19 nt, Artificial Sequence
  Description of Artificial Sequence: Synthetic oligonucleotide
  Antisense strand to SEQ ID NO: 1650595
aaccucagggcuuaacagu

SEQ ID NO: 1650597 - RNA, 19 nt, Artificial Sequence
  Description of Artificial Sequence: Synthetic oligonucleotide
  Sense strand starting at position 2408 of SEQ ID NO: 1561153
cuguuaagcccugagguuu

SEQ ID NO: 1650598 - RNA, 19 nt, Artificial Sequence
  Description of Artificial Sequence: Synthetic oligonucleotide
  Antisense strand to SEQ ID NO: 1650597
aaaccucagggcuuaacag

SEQ ID NO: 1650599 - RNA, 19 nt, Artificial Sequence
  Description of Artificial Sequence: Synthetic oligonucleotide
  Sense strand starting at position 2521 of SEQ ID NO: 1561153
gacugauuccuaugacgac

SEQ ID NO: 1650600 - RNA, 19 nt, Artificial Sequence
  Description of Artificial Sequence: Synthetic oligonucleotide
  Antisense strand to SEQ ID NO: 1650599
gucgucauaggaaucaguc

SEQ ID NO: 1650601 - RNA, 19 nt, Artificial Sequence
  Description of Artificial Sequence: Synthetic oligonucleotide
  Sense strand starting at position 2551 of SEQ ID NO: 1561153
gugaccucaccacaguuaa

SEQ ID NO: 1650602 - RNA, 19 nt, Artificial Sequence
  Description of Artificial Sequence: Synthetic oligonucleotide
  Antisense strand to SEQ ID NO: 1650601
uuaacuguggugaggucac

SEQ ID NO: 1650603 - RNA, 19 nt, Artificial Sequence
  Description of Artificial Sequence: Synthetic oligonucleotide
  Sense strand starting at position 2614 of SEQ ID NO: 1561153
ggugcagauuccucaucua

SEQ ID NO: 1650604 - RNA, 19 nt, Artificial Sequence
  Description of Artificial Sequence: Synthetic oligonucleotide
  Antisense strand to SEQ ID NO: 1650603
uagaugaggaaucugcacc

SEQ ID NO: 1650605 - RNA, 19 nt, Artificial Sequence
  Description of Artificial Sequence: Synthetic oligonucleotide
  Sense strand starting at position 2617 of SEQ ID NO: 1561153
gcagauuccucaucuacag

SEQ ID NO: 1650606 - RNA, 19 nt, Artificial Sequence
  Description of Artificial Sequence: Synthetic oligonucleotide
  Antisense strand to SEQ ID NO: 1650605
cuguagaugaggaaucugc

SEQ ID NO: 1650607 - RNA, 19 nt, Artificial Sequence
  Description of Artificial Sequence: Synthetic oligonucleotide
  Sense strand starting at position 2685 of SEQ ID NO: 1561153
agcuuuggugccugaggga

SEQ ID NO: 1650608 - RNA, 19 nt, Artificial Sequence
  Description of Artificial Sequence: Synthetic oligonucleotide
  Antisense strand to SEQ ID NO: 1650607
ucccucaggcaccaaagcu

SEQ ID NO: 1650609 - RNA, 19 nt, Artificial Sequence
  Description of Artificial Sequence: Synthetic oligonucleotide
  Sense strand starting at position 2730 of SEQ ID NO: 1561153
gggugaaaggcugcguguu

SEQ ID NO: 1650610 - RNA, 19 nt, Artificial Sequence
  Description of Artificial Sequence: Synthetic oligonucleotide
  Antisense strand to SEQ ID NO: 1650609
aacacgcagccuuucaccc

SEQ ID NO: 1650611 - RNA, 19 nt, Artificial Sequence
  Description of Artificial Sequence: Synthetic oligonucleotide
  Sense strand starting at position 2812 of SEQ ID NO: 1561153
gauucuggguuccuuggaa

SEQ ID NO: 1650612 - RNA, 19 nt, Artificial Sequence
  Description of Artificial Sequence: Synthetic oligonucleotide
  Antisense strand to SEQ ID NO: 1650611
uuccaaggaacccagaauc

SEQ ID NO: 1650613 - RNA, 19 nt, Artificial Sequence
  Description of Artificial Sequence: Synthetic oligonucleotide
  Sense strand starting at position 2816 of SEQ ID NO: 1561153
cuggguuccuuggaagaug

SEQ ID NO: 1650614 - RNA, 19 nt, Artificial Sequence
  Description of Artificial Sequence: Synthetic oligonucleotide
  Antisense strand to SEQ ID NO: 1650613
caucuuccaaggaacccag

SEQ ID NO: 1650615 - RNA, 19 nt, Artificial Sequence
  Description of Artificial Sequence: Synthetic oligonucleotide
  Sense strand starting at position 2941 of SEQ ID NO: 1561153
caauuagagugagagcuaa

SEQ ID NO: 1650616 - RNA, 19 nt, Artificial Sequence
  Description of Artificial Sequence: Synthetic oligonucleotide
  Antisense strand to SEQ ID NO: 1650615
uuagcucucacucuaauug

SEQ ID NO: 1650617 - RNA, 19 nt, Artificial Sequence
  Description of Artificial Sequence: Synthetic oligonucleotide
  Sense strand starting at position 3172 of SEQ ID NO: 1561153
ggacuuggucuccaggacu

SEQ ID NO: 1650618 - RNA, 19 nt, Artificial Sequence
  Description of Artificial Sequence: Synthetic oligonucleotide
  Antisense strand to SEQ ID NO: 1650617
aguccuggagaccaagucc

SEQ ID NO: 1650619 - RNA, 19 nt, Artificial Sequence
  Description of Artificial Sequence: Synthetic oligonucleotide
  Sense strand starting at position 3555 of SEQ ID NO: 1561153
aggauugagaucugguggu

SEQ ID NO: 1650620 - RNA, 19 nt, Artificial Sequence
  Description of Artificial Sequence: Synthetic oligonucleotide
  Antisense strand to SEQ ID NO: 1650619
accaccagaucucaauccu

SEQ ID NO: 1650621 - RNA, 19 nt, Artificial Sequence
  Description of Artificial Sequence: Synthetic oligonucleotide
  Sense strand starting at position 3559 of SEQ ID NO: 1561153
uugagaucugguggugaac

SEQ ID NO: 1650622 - RNA, 19 nt, Artificial Sequence
  Description of Artificial Sequence: Synthetic oligonucleotide
  Antisense strand to SEQ ID NO: 1650621
guucaccaccagaucucaa

SEQ ID NO: 1650623 - RNA, 19 nt, Artificial Sequence
  Description of Artificial Sequence: Synthetic oligonucleotide
  Sense strand starting at position 3874 of SEQ ID NO: 1561153
uacagagucucggucucaa

SEQ ID NO: 1650624 - RNA, 19 nt, Artificial Sequence
  Description of Artificial Sequence: Synthetic oligonucleotide
  Antisense strand to SEQ ID NO: 1650623
uugagaccgagacucugua

SEQ ID NO: 1650625 - RNA, 19 nt, Artificial Sequence
  Description of Artificial Sequence: Synthetic oligonucleotide
  Sense strand starting at position 290 of SEQ ID NO: 1561154
cuugguuacugucauuauu

SEQ ID NO: 1650626 - RNA, 19 nt, Artificial Sequence
  Description of Artificial Sequence: Synthetic oligonucleotide
  Antisense strand to SEQ ID NO: 1650625
aauaaugacaguaaccaag

SEQ ID NO: 1650627 - RNA, 19 nt, Artificial Sequence
  Description of Artificial Sequence: Synthetic oligonucleotide
  Sense strand starting at position 418 of SEQ ID NO: 1561154
ccuggaagcucugcucaau

SEQ ID NO: 1650628 - RNA, 19 nt, Artificial Sequence
  Description of Artificial Sequence: Synthetic oligonucleotide
  Antisense strand to SEQ ID NO: 1650627
auugagcagagcuuccagg

SEQ ID NO: 1650629 - RNA, 19 nt, Artificial Sequence
  Description of Artificial Sequence: Synthetic oligonucleotide
  Sense strand starting at position 947 of SEQ ID NO: 1561154
cuggauuucuuggaaagcu

SEQ ID NO: 1650630 - RNA, 19 nt, Artificial Sequence
  Description of Artificial Sequence: Synthetic oligonucleotide
  Antisense strand to SEQ ID NO: 1650629
agcuuuccaagaaauccag

SEQ ID NO: 1650631 - RNA, 19 nt, Artificial Sequence
  Description of Artificial Sequence: Synthetic oligonucleotide
  Sense strand starting at position 970 of SEQ ID NO: 1561154
augggaguguucucagagu

SEQ ID NO: 1650632 - RNA, 19 nt, Artificial Sequence
  Description of Artificial Sequence: Synthetic oligonucleotide
  Antisense strand to SEQ ID NO: 1650631
acucugagaacacucccau

SEQ ID NO: 1650633 - RNA, 19 nt, Artificial Sequence
  Description of Artificial Sequence: Synthetic oligonucleotide
  Sense strand starting at position 984 of SEQ ID NO: 1561154
agaguuuccagaggaacuc

SEQ ID NO: 1650634 - RNA, 19 nt, Artificial Sequence
  Description of Artificial Sequence: Synthetic oligonucleotide
  Antisense strand to SEQ ID NO: 1650633
gaguuccucuggaaacucu

SEQ ID NO: 1650635 - RNA, 19 nt, Artificial Sequence
  Description of Artificial Sequence: Synthetic oligonucleotide
  Sense strand starting at position 996 of SEQ ID NO: 1561154
ggaacucaauugugaugaa

SEQ ID NO: 1650636 - RNA, 19 nt, Artificial Sequence
  Description of Artificial Sequence: Synthetic oligonucleotide
  Antisense strand to SEQ ID NO: 1650635
uucaucacaauugaguucc

SEQ ID NO: 1650637 - RNA, 19 nt, Artificial Sequence
  Description of Artificial Sequence: Synthetic oligonucleotide
  Sense strand starting at position 997 of SEQ ID NO: 1561154
gaacucaauugugaugaag

SEQ ID NO: 1650638 - RNA, 19 nt, Artificial Sequence
  Description of Artificial Sequence: Synthetic oligonucleotide
  Antisense strand to SEQ ID NO: 1650637
cuucaucacaauugaguuc

SEQ ID NO: 1650639 - RNA, 19 nt, Artificial Sequence
  Description of Artificial Sequence: Synthetic oligonucleotide
  Sense strand starting at position 999 of SEQ ID NO: 1561154
acucaauugugaugaaguc

SEQ ID NO: 1650640 - RNA, 19 nt, Artificial Sequence
  Description of Artificial Sequence: Synthetic oligonucleotide
  Antisense strand to SEQ ID NO: 1650639
gacuucaucacaauugagu

SEQ ID NO: 1650641 - RNA, 19 nt, Artificial Sequence
  Description of Artificial Sequence: Synthetic oligonucleotide
  Sense strand starting at position 1000 of SEQ ID NO: 1561154
cucaauugugaugaaguca

SEQ ID NO: 1650642 - RNA, 19 nt, Artificial Sequence
  Description of Artificial Sequence: Synthetic oligonucleotide
  Antisense strand to SEQ ID NO: 1650641
ugacuucaucacaauugag

SEQ ID NO: 1650643 - RNA, 19 nt, Artificial Sequence
  Description of Artificial Sequence: Synthetic oligonucleotide
  Sense strand starting at position 1033 of SEQ ID NO: 1561154
gaguaaugccgagggccau

SEQ ID NO: 1650644 - RNA, 19 nt, Artificial Sequence
  Description of Artificial Sequence: Synthetic oligonucleotide
  Antisense strand to SEQ ID NO: 1650643
auggcccucggcauuacuc

SEQ ID NO: 1650645 - RNA, 19 nt, Artificial Sequence
  Description of Artificial Sequence: Synthetic oligonucleotide
  Sense strand starting at position 1054 of SEQ ID NO: 1561154
aggcuaaagguucggguau

SEQ ID NO: 1650646 - RNA, 19 nt, Artificial Sequence
  Description of Artificial Sequence: Synthetic oligonucleotide
  Antisense strand to SEQ ID NO: 1650645
auacccgaaccuuuagccu

SEQ ID NO: 1650647 - RNA, 19 nt, Artificial Sequence
  Description of Artificial Sequence: Synthetic oligonucleotide
  Sense strand starting at position 1056 of SEQ ID NO: 1561154
gcuaaagguucggguauga

SEQ ID NO: 1650648 - RNA, 19 nt, Artificial Sequence
  Description of Artificial Sequence: Synthetic oligonucleotide
  Antisense strand to SEQ ID NO: 1650647
ucauacccgaaccuuuagc

SEQ ID NO: 1650649 - RNA, 19 nt, Artificial Sequence
  Description of Artificial Sequence: Synthetic oligonucleotide
  Sense strand starting at position 1060 of SEQ ID NO: 1561154
aagguucggguaugaauua

SEQ ID NO: 1650650 - RNA, 19 nt, Artificial Sequence
  Description of Artificial Sequence: Synthetic oligonucleotide
  Antisense strand to SEQ ID NO: 1650649
uaauucauacccgaaccuu

SEQ ID NO: 1650651 - RNA, 19 nt, Artificial Sequence
  Description of Artificial Sequence: Synthetic oligonucleotide
  Sense strand starting at position 1122 of SEQ ID NO: 1561154
ggaaggugugggugaaacu

SEQ ID NO: 1650652 - RNA, 19 nt, Artificial Sequence
  Description of Artificial Sequence: Synthetic oligonucleotide
  Antisense strand to SEQ ID NO: 1650651
aguuucacccacaccuucc

SEQ ID NO: 1650653 - RNA, 19 nt, Artificial Sequence
  Description of Artificial Sequence: Synthetic oligonucleotide
  Sense strand starting at position 1123 of SEQ ID NO: 1561154
gaaggugugggugaaacuu

SEQ ID NO: 1650654 - RNA, 19 nt, Artificial Sequence
  Description of Artificial Sequence: Synthetic oligonucleotide
  Antisense strand to SEQ ID NO: 1650653
aaguuucacccacaccuuc

SEQ ID NO: 1650655 - RNA, 19 nt, Artificial Sequence
  Description of Artificial Sequence: Synthetic oligonucleotide
  Sense strand starting at position 2148 of SEQ ID NO: 1561154
ucaaguucccagugacuuu

SEQ ID NO: 1650656 - RNA, 19 nt, Artificial Sequence
  Description of Artificial Sequence: Synthetic oligonucleotide
  Antisense strand to SEQ ID NO: 1650655
aaagucacugggaacuuga

SEQ ID NO: 1650657 - RNA, 19 nt, Artificial Sequence
  Description of Artificial Sequence: Synthetic oligonucleotide
  Sense strand starting at position 2401 of SEQ ID NO: 1561154
gguggagccggguaagaaa

SEQ ID NO: 1650658 - RNA, 19 nt, Artificial Sequence
  Description of Artificial Sequence: Synthetic oligonucleotide
  Antisense strand to SEQ ID NO: 1650657
uuucuuacccggcuccacc

SEQ ID NO: 1650659 - RNA, 19 nt, Artificial Sequence
  Description of Artificial Sequence: Synthetic oligonucleotide
  Sense strand starting at position 2517 of SEQ ID NO: 1561154
ccucccuucuccguaagaa

SEQ ID NO: 1650660 - RNA, 19 nt, Artificial Sequence
  Description of Artificial Sequence: Synthetic oligonucleotide
  Antisense strand to SEQ ID NO: 1650659
uucuuacggagaagggagg

SEQ ID NO: 1650661 - RNA, 19 nt, Artificial Sequence
  Description of Artificial Sequence: Synthetic oligonucleotide
  Sense strand starting at position 2518 of SEQ ID NO: 1561154
cucccuucuccguaagaag

SEQ ID NO: 1650662 - RNA, 19 nt, Artificial Sequence
  Description of Artificial Sequence: Synthetic oligonucleotide
  Antisense strand to SEQ ID NO: 1650661
cuucuuacggagaagggag

SEQ ID NO: 1650663 - RNA, 19 nt, Artificial Sequence
  Description of Artificial Sequence: Synthetic oligonucleotide
  Sense strand starting at position 2564 of SEQ ID NO: 1561154
ggguccuucucacuccaaa

SEQ ID NO: 1650664 - RNA, 19 nt, Artificial Sequence
  Description of Artificial Sequence: Synthetic oligonucleotide
  Antisense strand to SEQ ID NO: 1650663
uuuggagugagaaggaccc

SEQ ID NO: 1650665 - RNA, 19 nt, Artificial Sequence
  Description of Artificial Sequence: Synthetic oligonucleotide
  Sense strand starting at position 2928 of SEQ ID NO: 1561154
gaaaguugccgggagcuuu

SEQ ID NO: 1650666 - RNA, 19 nt, Artificial Sequence
  Description of Artificial Sequence: Synthetic oligonucleotide
  Antisense strand to SEQ ID NO: 1650665
aaagcucccggcaacuuuc

SEQ ID NO: 1650667 - RNA, 19 nt, Artificial Sequence
  Description of Artificial Sequence: Synthetic oligonucleotide
  Sense strand starting at position 2936 of SEQ ID NO: 1561154
ccgggagcuuuguuuggga

SEQ ID NO: 1650668 - RNA, 19 nt, Artificial Sequence
  Description of Artificial Sequence: Synthetic oligonucleotide
  Antisense strand to SEQ ID NO: 1650667
ucccaaacaaagcucccgg

SEQ ID NO: 1650669 - RNA, 19 nt, Artificial Sequence
  Description of Artificial Sequence: Synthetic oligonucleotide
  Sense strand starting at position 2938 of SEQ ID NO: 1561154
gggagcuuuguuugggaaa

SEQ ID NO: 1650670 - RNA, 19 nt, Artificial Sequence
  Description of Artificial Sequence: Synthetic oligonucleotide
  Antisense strand to SEQ ID NO: 1650669
uuucccaaacaaagcuccc

SEQ ID NO: 1650671 - RNA, 19 nt, Artificial Sequence
  Description of Artificial Sequence: Synthetic oligonucleotide
  Sense strand starting at position 3041 of SEQ ID NO: 1561154
uuugcuuugggagagauua

SEQ ID NO: 1650672 - RNA, 19 nt, Artificial Sequence
  Description of Artificial Sequence: Synthetic oligonucleotide
  Antisense strand to SEQ ID NO: 1650671
uaaucucucccaaagcaaa

SEQ ID NO: 1650673 - RNA, 19 nt, Artificial Sequence
  Description of Artificial Sequence: Synthetic oligonucleotide
  Sense strand starting at position 3043 of SEQ ID NO: 1561154
ugcuuugggagagauuagu

SEQ ID NO: 1650674 - RNA, 19 nt, Artificial Sequence
  Description of Artificial Sequence: Synthetic oligonucleotide
  Antisense strand to SEQ ID NO: 1650673
acuaaucucucccaaagca

SEQ ID NO: 1650675 - RNA, 19 nt, Artificial Sequence
  Description of Artificial Sequence: Synthetic oligonucleotide
  Sense strand starting at position 3049 of SEQ ID NO: 1561154
gggagagauuagucuaucu

SEQ ID NO: 1650676 - RNA, 19 nt, Artificial Sequence
  Description of Artificial Sequence: Synthetic oligonucleotide
  Antisense strand to SEQ ID NO: 1650675
agauagacuaaucucuccc

SEQ ID NO: 1650677 - RNA, 19 nt, Artificial Sequence
  Description of Artificial Sequence: Synthetic oligonucleotide
  Sense strand starting at position 3051 of SEQ ID NO: 1561154
gagagauuagucuaucucg

SEQ ID NO: 1650678 - RNA, 19 nt, Artificial Sequence
  Description of Artificial Sequence: Synthetic oligonucleotide
  Antisense strand to SEQ ID NO: 1650677
cgagauagacuaaucucuc

SEQ ID NO: 1650679 - RNA, 19 nt, Artificial Sequence
  Description of Artificial Sequence: Synthetic oligonucleotide
  Sense strand starting at position 3339 of SEQ ID NO: 1561154
gcggaagugauacgaauac

SEQ ID NO: 1650680 - RNA, 19 nt, Artificial Sequence
  Description of Artificial Sequence: Synthetic oligonucleotide
  Antisense strand to SEQ ID NO: 1650679
guauucguaucacuuccgc

SEQ ID NO: 1650681 - RNA, 19 nt, Artificial Sequence
  Description of Artificial Sequence: Synthetic oligonucleotide
  Sense strand starting at position 3359 of SEQ ID NO: 1561154
aagagucuuuacuguuaag

SEQ ID NO: 1650682 - RNA, 19 nt, Artificial Sequence
  Description of Artificial Sequence: Synthetic oligonucleotide
  Antisense strand to SEQ ID NO: 1650681
cuuaacaguaaagacucuu

SEQ ID NO: 1650683 - RNA, 19 nt, Artificial Sequence
  Description of Artificial Sequence: Synthetic oligonucleotide
  Sense strand starting at position 3369 of SEQ ID NO: 1561154
acuguuaagcccugagguu

SEQ ID NO: 1650684 - RNA, 19 nt, Artificial Sequence
  Description of Artificial Sequence: Synthetic oligonucleotide
  Antisense strand to SEQ ID NO: 1650683
aaccucagggcuuaacagu

SEQ ID NO: 1650685 - RNA, 19 nt, Artificial Sequence
  Description of Artificial Sequence: Synthetic oligonucleotide
  Sense strand starting at position 3370 of SEQ ID NO: 1561154
cuguuaagcccugagguuu

SEQ ID NO: 1650686 - RNA, 19 nt, Artificial Sequence
  Description of Artificial Sequence: Synthetic oligonucleotide
  Antisense strand to SEQ ID NO: 1650685
aaaccucagggcuuaacag

SEQ ID NO: 1650687 - RNA, 19 nt, Artificial Sequence
  Description of Artificial Sequence: Synthetic oligonucleotide
  Sense strand starting at position 3483 of SEQ ID NO: 1561154
gacugauuccuaugacgac

SEQ ID NO: 1650688 - RNA, 19 nt, Artificial Sequence
  Description of Artificial Sequence: Synthetic oligonucleotide
  Antisense strand to SEQ ID NO: 1650687
gucgucauaggaaucaguc

SEQ ID NO: 1650689 - RNA, 19 nt, Artificial Sequence
  Description of Artificial Sequence: Synthetic oligonucleotide
  Sense strand starting at position 3513 of SEQ ID NO: 1561154
gugaccucaccacaguuaa

SEQ ID NO: 1650690 - RNA, 19 nt, Artificial Sequence
  Description of Artificial Sequence: Synthetic oligonucleotide
  Antisense strand to SEQ ID NO: 1650689
uuaacuguggugaggucac

SEQ ID NO: 1650691 - RNA, 19 nt, Artificial Sequence
  Description of Artificial Sequence: Synthetic oligonucleotide
  Sense strand starting at position 3576 of SEQ ID NO: 1561154
ggugcagauuccucaucua

SEQ ID NO: 1650692 - RNA, 19 nt, Artificial Sequence
  Description of Artificial Sequence: Synthetic oligonucleotide
  Antisense strand to SEQ ID NO: 1650691
uagaugaggaaucugcacc

SEQ ID NO: 1650693 - RNA, 19 nt, Artificial Sequence
  Description of Artificial Sequence: Synthetic oligonucleotide
  Sense strand starting at position 3579 of SEQ ID NO: 1561154
gcagauuccucaucuacag

SEQ ID NO: 1650694 - RNA, 19 nt, Artificial Sequence
  Description of Artificial Sequence: Synthetic oligonucleotide
  Antisense strand to SEQ ID NO: 1650693
cuguagaugaggaaucugc

SEQ ID NO: 1650695 - RNA, 19 nt, Artificial Sequence
  Description of Artificial Sequence: Synthetic oligonucleotide
  Sense strand starting at position 3647 of SEQ ID NO: 1561154
agcuuuggugccugaggga

SEQ ID NO: 1650696 - RNA, 19 nt, Artificial Sequence
  Description of Artificial Sequence: Synthetic oligonucleotide
  Antisense strand to SEQ ID NO: 1650695
ucccucaggcaccaaagcu

SEQ ID NO: 1650697 - RNA, 19 nt, Artificial Sequence
  Description of Artificial Sequence: Synthetic oligonucleotide
  Sense strand starting at position 3692 of SEQ ID NO: 1561154
gggugaaaggcugcguguu

SEQ ID NO: 1650698 - RNA, 19 nt, Artificial Sequence
  Description of Artificial Sequence: Synthetic oligonucleotide
  Antisense strand to SEQ ID NO: 1650697
aacacgcagccuuucaccc

SEQ ID NO: 1650699 - RNA, 19 nt, Artificial Sequence
  Description of Artificial Sequence: Synthetic oligonucleotide
  Sense strand starting at position 3774 of SEQ ID NO: 1561154
gauucuggguuccuuggaa

SEQ ID NO: 1650700 - RNA, 19 nt, Artificial Sequence
  Description of Artificial Sequence: Synthetic oligonucleotide
  Antisense strand to SEQ ID NO: 1650699
uuccaaggaacccagaauc

SEQ ID NO: 1650701 - RNA, 19 nt, Artificial Sequence
  Description of Artificial Sequence: Synthetic oligonucleotide
  Sense strand starting at position 3778 of SEQ ID NO: 1561154
cuggguuccuuggaagaug

SEQ ID NO: 1650702 - RNA, 19 nt, Artificial Sequence
  Description of Artificial Sequence: Synthetic oligonucleotide
  Antisense strand to SEQ ID NO: 1650701
caucuuccaaggaacccag

SEQ ID NO: 1650703 - RNA, 19 nt, Artificial Sequence
  Description of Artificial Sequence: Synthetic oligonucleotide
  Sense strand starting at position 3903 of SEQ ID NO: 1561154
caauuagagugagagcuaa

SEQ ID NO: 1650704 - RNA, 19 nt, Artificial Sequence
  Description of Artificial Sequence: Synthetic oligonucleotide
  Antisense strand to SEQ ID NO: 1650703
uuagcucucacucuaauug

SEQ ID NO: 1650705 - RNA, 19 nt, Artificial Sequence
  Description of Artificial Sequence: Synthetic oligonucleotide
  Sense strand starting at position 139 of SEQ ID NO: 1561155
uucaaaggauuguggguaa

SEQ ID NO: 1650706 - RNA, 19 nt, Artificial Sequence
  Description of Artificial Sequence: Synthetic oligonucleotide
  Antisense strand to SEQ ID NO: 1650705
uuacccacaauccuuugaa

SEQ ID NO: 1650707 - RNA, 19 nt, Artificial Sequence
  Description of Artificial Sequence: Synthetic oligonucleotide
  Sense strand starting at position 142 of SEQ ID NO: 1561155
aaaggauuguggguaaauu

SEQ ID NO: 1650708 - RNA, 19 nt, Artificial Sequence
  Description of Artificial Sequence: Synthetic oligonucleotide
  Antisense strand to SEQ ID NO: 1650707
aauuuacccacaauccuuu

SEQ ID NO: 1650709 - RNA, 19 nt, Artificial Sequence
  Description of Artificial Sequence: Synthetic oligonucleotide
  Sense strand starting at position 577 of SEQ ID NO: 1561155
acggaaugguggcugagua

SEQ ID NO: 1650710 - RNA, 19 nt, Artificial Sequence
  Description of Artificial Sequence: Synthetic oligonucleotide
  Antisense strand to SEQ ID NO: 1650709
uacucagccaccauuccgu

SEQ ID NO: 1650711 - RNA, 19 nt, Artificial Sequence
  Description of Artificial Sequence: Synthetic oligonucleotide
  Sense strand starting at position 579 of SEQ ID NO: 1561155
ggaaugguggcugaguaga

SEQ ID NO: 1650712 - RNA, 19 nt, Artificial Sequence
  Description of Artificial Sequence: Synthetic oligonucleotide
  Antisense strand to SEQ ID NO: 1650711
ucuacucagccaccauucc

SEQ ID NO: 1650713 - RNA, 19 nt, Artificial Sequence
  Description of Artificial Sequence: Synthetic oligonucleotide
  Sense strand starting at position 581 of SEQ ID NO: 1561155
aaugguggcugaguagaau

SEQ ID NO: 1650714 - RNA, 19 nt, Artificial Sequence
  Description of Artificial Sequence: Synthetic oligonucleotide
  Antisense strand to SEQ ID NO: 1650713
auucuacucagccaccauu

SEQ ID NO: 1650715 - RNA, 19 nt, Artificial Sequence
  Description of Artificial Sequence: Synthetic oligonucleotide
  Sense strand starting at position 633 of SEQ ID NO: 1561155
gggaguuaguauuuaacgu

SEQ ID NO: 1650716 - RNA, 19 nt, Artificial Sequence
  Description of Artificial Sequence: Synthetic oligonucleotide
  Antisense strand to SEQ ID NO: 1650715
acguuaaauacuaacuccc

SEQ ID NO: 1650717 - RNA, 19 nt, Artificial Sequence
  Description of Artificial Sequence: Synthetic oligonucleotide
  Sense strand starting at position 637 of SEQ ID NO: 1561155
guuaguauuuaacgucuac

SEQ ID NO: 1650718 - RNA, 19 nt, Artificial Sequence
  Description of Artificial Sequence: Synthetic oligonucleotide
  Antisense strand to SEQ ID NO: 1650717
guagacguuaaauacuaac

SEQ ID NO: 1650719 - RNA, 19 nt, Artificial Sequence
  Description of Artificial Sequence: Synthetic oligonucleotide
  Sense strand starting at position 641 of SEQ ID NO: 1561155
guauuuaacgucuacagcu

SEQ ID NO: 1650720 - RNA, 19 nt, Artificial Sequence
  Description of Artificial Sequence: Synthetic oligonucleotide
  Antisense strand to SEQ ID NO: 1650719
agcuguagacguuaaauac

SEQ ID NO: 1650721 - RNA, 19 nt, Artificial Sequence
  Description of Artificial Sequence: Synthetic oligonucleotide
  Sense strand starting at position 825 of SEQ ID NO: 1561155
caagaaaucgcucgaccug

SEQ ID NO: 1650722 - RNA, 19 nt, Artificial Sequence
  Description of Artificial Sequence: Synthetic oligonucleotide
  Antisense strand to SEQ ID NO: 1650721
caggucgagcgauuucuug

SEQ ID NO: 1650723 - RNA, 19 nt, Artificial Sequence
  Description of Artificial Sequence: Synthetic oligonucleotide
  Sense strand starting at position 1005 of SEQ ID NO: 1561155
guucuuauacaagguaaca

SEQ ID NO: 1650724 - RNA, 19 nt, Artificial Sequence
  Description of Artificial Sequence: Synthetic oligonucleotide
  Antisense strand to SEQ ID NO: 1650723
uguuaccuuguauaagaac

SEQ ID NO: 1650725 - RNA, 19 nt, Artificial Sequence
  Description of Artificial Sequence: Synthetic oligonucleotide
  Sense strand starting at position 1169 of SEQ ID NO: 1561155
gggcgauaagcacaucaga

SEQ ID NO: 1650726 - RNA, 19 nt, Artificial Sequence
  Description of Artificial Sequence: Synthetic oligonucleotide
  Antisense strand to SEQ ID NO: 1650725
ucugaugugcuuaucgccc

SEQ ID NO: 1650727 - RNA, 19 nt, Artificial Sequence
  Description of Artificial Sequence: Synthetic oligonucleotide
  Sense strand starting at position 1232 of SEQ ID NO: 1561155
agacuugggcuucaagagu

SEQ ID NO: 1650728 - RNA, 19 nt, Artificial Sequence
  Description of Artificial Sequence: Synthetic oligonucleotide
  Antisense strand to SEQ ID NO: 1650727
acucuugaagcccaagucu

SEQ ID NO: 1650729 - RNA, 19 nt, Artificial Sequence
  Description of Artificial Sequence: Synthetic oligonucleotide
  Sense strand starting at position 1302 of SEQ ID NO: 1561155
agaugaccucuuugauaac

SEQ ID NO: 1650730 - RNA, 19 nt, Artificial Sequence
  Description of Artificial Sequence: Synthetic oligonucleotide
  Antisense strand to SEQ ID NO: 1650729
guuaucaaagaggucaucu

SEQ ID NO: 1650731 - RNA, 19 nt, Artificial Sequence
  Description of Artificial Sequence: Synthetic oligonucleotide
  Sense strand starting at position 1386 of SEQ ID NO: 1561155
cuaagucucccgggaacgu

SEQ ID NO: 1650732 - RNA, 19 nt, Artificial Sequence
  Description of Artificial Sequence: Synthetic oligonucleotide
  Antisense strand to SEQ ID NO: 1650731
acguucccgggagacuuag

SEQ ID NO: 1650733 - RNA, 19 nt, Artificial Sequence
  Description of Artificial Sequence: Synthetic oligonucleotide
  Sense strand starting at position 1429 of SEQ ID NO: 1561155
ggucguacacaagaauacu

SEQ ID NO: 1650734 - RNA, 19 nt, Artificial Sequence
  Description of Artificial Sequence: Synthetic oligonucleotide
  Antisense strand to SEQ ID NO: 1650733
aguauucuuguguacgacc

SEQ ID NO: 1650735 - RNA, 19 nt, Artificial Sequence
  Description of Artificial Sequence: Synthetic oligonucleotide
  Sense strand starting at position 1485 of SEQ ID NO: 1561155
uggcgcaagauuugugcaa

SEQ ID NO: 1650736 - RNA, 19 nt, Artificial Sequence
  Description of Artificial Sequence: Synthetic oligonucleotide
  Antisense strand to SEQ ID NO: 1650735
uugcacaaaucuugcgcca

SEQ ID NO: 1650737 - RNA, 19 nt, Artificial Sequence
  Description of Artificial Sequence: Synthetic oligonucleotide
  Sense strand starting at position 1498 of SEQ ID NO: 1561155
gugcaagacucccucggau

SEQ ID NO: 1650738 - RNA, 19 nt, Artificial Sequence
  Description of Artificial Sequence: Synthetic oligonucleotide
  Antisense strand to SEQ ID NO: 1650737
auccgagggagucuugcac

SEQ ID NO: 1650739 - RNA, 19 nt, Artificial Sequence
  Description of Artificial Sequence: Synthetic oligonucleotide
  Sense strand starting at position 1500 of SEQ ID NO: 1561155
gcaagacucccucggauug

SEQ ID NO: 1650740 - RNA, 19 nt, Artificial Sequence
  Description of Artificial Sequence: Synthetic oligonucleotide
  Antisense strand to SEQ ID NO: 1650739
caauccgagggagucuugc

SEQ ID NO: 1650741 - RNA, 19 nt, Artificial Sequence
  Description of Artificial Sequence: Synthetic oligonucleotide
  Sense strand starting at position 1551 of SEQ ID NO: 1561155
ugacaaagucugcaacuca

SEQ ID NO: 1650742 - RNA, 19 nt, Artificial Sequence
  Description of Artificial Sequence: Synthetic oligonucleotide
  Antisense strand to SEQ ID NO: 1650741
ugaguugcagacuuuguca

SEQ ID NO: 1650743 - RNA, 19 nt, Artificial Sequence
  Description of Artificial Sequence: Synthetic oligonucleotide
  Sense strand starting at position 1655 of SEQ ID NO: 1561155
guugcagauuuauaaauac

SEQ ID NO: 1650744 - RNA, 19 nt, Artificial Sequence
  Description of Artificial Sequence: Synthetic oligonucleotide
  Antisense strand to SEQ ID NO: 1650743
guauuuauaaaucugcaac

SEQ ID NO: 1650745 - RNA, 19 nt, Artificial Sequence
  Description of Artificial Sequence: Synthetic oligonucleotide
  Sense strand starting at position 1680 of SEQ ID NO: 1561155
cgcacaugcgcauuggaau

SEQ ID NO: 1650746 - RNA, 19 nt, Artificial Sequence
  Description of Artificial Sequence: Synthetic oligonucleotide
  Antisense strand to SEQ ID NO: 1650745
auuccaaugcgcaugugcg

SEQ ID NO: 1650747 - RNA, 19 nt, Artificial Sequence
  Description of Artificial Sequence: Synthetic oligonucleotide
  Sense strand starting at position 1681 of SEQ ID NO: 1561155
gcacaugcgcauuggaauu

SEQ ID NO: 1650748 - RNA, 19 nt, Artificial Sequence
  Description of Artificial Sequence: Synthetic oligonucleotide
  Antisense strand to SEQ ID NO: 1650747
aauuccaaugcgcaugugc

SEQ ID NO: 1650749 - RNA, 19 nt, Artificial Sequence
  Description of Artificial Sequence: Synthetic oligonucleotide
  Sense strand starting at position 1837 of SEQ ID NO: 1561155
cccuguuucucgcuucuua

SEQ ID NO: 1650750 - RNA, 19 nt, Artificial Sequence
  Description of Artificial Sequence: Synthetic oligonucleotide
  Antisense strand to SEQ ID NO: 1650749
uaagaagcgagaaacaggg

SEQ ID NO: 1650751 - RNA, 19 nt, Artificial Sequence
  Description of Artificial Sequence: Synthetic oligonucleotide
  Sense strand starting at position 1847 of SEQ ID NO: 1561155
cgcuucuuaccucguaaug

SEQ ID NO: 1650752 - RNA, 19 nt, Artificial Sequence
  Description of Artificial Sequence: Synthetic oligonucleotide
  Antisense strand to SEQ ID NO: 1650751
cauuacgagguaagaagcg

SEQ ID NO: 1650753 - RNA, 19 nt, Artificial Sequence
  Description of Artificial Sequence: Synthetic oligonucleotide
  Sense strand starting at position 2111 of SEQ ID NO: 1561155
aucaacuugcgagaccaau

SEQ ID NO: 1650754 - RNA, 19 nt, Artificial Sequence
  Description of Artificial Sequence: Synthetic oligonucleotide
  Antisense strand to SEQ ID NO: 1650753
auuggucucgcaaguugau

SEQ ID NO: 1650755 - RNA, 19 nt, Artificial Sequence
  Description of Artificial Sequence: Synthetic oligonucleotide
  Sense strand starting at position 2234 of SEQ ID NO: 1561155
gauggcgucgcuguggaaa

SEQ ID NO: 1650756 - RNA, 19 nt, Artificial Sequence
  Description of Artificial Sequence: Synthetic oligonucleotide
  Antisense strand to SEQ ID NO: 1650755
uuuccacagcgacgccauc

SEQ ID NO: 1650757 - RNA, 19 nt, Artificial Sequence
  Description of Artificial Sequence: Synthetic oligonucleotide
  Sense strand starting at position 2455 of SEQ ID NO: 1561155
aggagacucuugaguggga

SEQ ID NO: 1650758 - RNA, 19 nt, Artificial Sequence
  Description of Artificial Sequence: Synthetic oligonucleotide
  Antisense strand to SEQ ID NO: 1650757
ucccacucaagagucuccu

SEQ ID NO: 1650759 - RNA, 19 nt, Artificial Sequence
  Description of Artificial Sequence: Synthetic oligonucleotide
  Sense strand starting at position 2629 of SEQ ID NO: 1561155
gaaacaaucucguucuguc

SEQ ID NO: 1650760 - RNA, 19 nt, Artificial Sequence
  Description of Artificial Sequence: Synthetic oligonucleotide
  Antisense strand to SEQ ID NO: 1650759
gacagaacgagauuguuuc

SEQ ID NO: 1650761 - RNA, 19 nt, Artificial Sequence
  Description of Artificial Sequence: Synthetic oligonucleotide
  Sense strand starting at position 2949 of SEQ ID NO: 1561155
uacauuggucucugccuga

SEQ ID NO: 1650762 - RNA, 19 nt, Artificial Sequence
  Description of Artificial Sequence: Synthetic oligonucleotide
  Antisense strand to SEQ ID NO: 1650761
ucaggcagagaccaaugua

SEQ ID NO: 1650763 - RNA, 19 nt, Artificial Sequence
  Description of Artificial Sequence: Synthetic oligonucleotide
  Sense strand starting at position 2962 of SEQ ID NO: 1561155
gccugacguccagaaucgu

SEQ ID NO: 1650764 - RNA, 19 nt, Artificial Sequence
  Description of Artificial Sequence: Synthetic oligonucleotide
  Antisense strand to SEQ ID NO: 1650763
acgauucuggacgucaggc

SEQ ID NO: 1650765 - RNA, 19 nt, Artificial Sequence
  Description of Artificial Sequence: Synthetic oligonucleotide
  Sense strand starting at position 3740 of SEQ ID NO: 1561155
ccuuacucuuguuuccaga

SEQ ID NO: 1650766 - RNA, 19 nt, Artificial Sequence
  Description of Artificial Sequence: Synthetic oligonucleotide
  Antisense strand to SEQ ID NO: 1650765
ucuggaaacaagaguaagg

SEQ ID NO: 1650767 - RNA, 19 nt, Artificial Sequence
  Description of Artificial Sequence: Synthetic oligonucleotide
  Sense strand starting at position 3775 of SEQ ID NO: 1561155
ucaugagcuguugaaccau

SEQ ID NO: 1650768 - RNA, 19 nt, Artificial Sequence
  Description of Artificial Sequence: Synthetic oligonucleotide
  Antisense strand to SEQ ID NO: 1650767
augguucaacagcucauga

SEQ ID NO: 1650769 - RNA, 19 nt, Artificial Sequence
  Description of Artificial Sequence: Synthetic oligonucleotide
  Sense strand starting at position 3784 of SEQ ID NO: 1561155
guugaaccaucuggaauuc

SEQ ID NO: 1650770 - RNA, 19 nt, Artificial Sequence
  Description of Artificial Sequence: Synthetic oligonucleotide
  Antisense strand to SEQ ID NO: 1650769
gaauuccagaugguucaac

SEQ ID NO: 1650771 - RNA, 19 nt, Artificial Sequence
  Description of Artificial Sequence: Synthetic oligonucleotide
  Sense strand starting at position 3803 of SEQ ID NO: 1561155
acaggccugucaugagaga

SEQ ID NO: 1650772 - RNA, 19 nt, Artificial Sequence
  Description of Artificial Sequence: Synthetic oligonucleotide
  Antisense strand to SEQ ID NO: 1650771
ucucucaugacaggccugu

SEQ ID NO: 1650773 - RNA, 19 nt, Artificial Sequence
  Description of Artificial Sequence: Synthetic oligonucleotide
  Sense strand starting at position 3839 of SEQ ID NO: 1561155
aaagguagaucacugauuc

SEQ ID NO: 1650774 - RNA, 19 nt, Artificial Sequence
  Description of Artificial Sequence: Synthetic oligonucleotide
  Antisense strand to SEQ ID NO: 1650773
gaaucagugaucuaccuuu

SEQ ID NO: 1650775 - RNA, 19 nt, Artificial Sequence
  Description of Artificial Sequence: Synthetic oligonucleotide
  Sense strand starting at position 3882 of SEQ ID NO: 1561155
gugagucagugcuuggaac

SEQ ID NO: 1650776 - RNA, 19 nt, Artificial Sequence
  Description of Artificial Sequence: Synthetic oligonucleotide
  Antisense strand to SEQ ID NO: 1650775
guuccaagcacugacucac

SEQ ID NO: 1650777 - RNA, 19 nt, Artificial Sequence
  Description of Artificial Sequence: Synthetic oligonucleotide
  Sense strand starting at position 3883 of SEQ ID NO: 1561155
ugagucagugcuuggaacu

SEQ ID NO: 1650778 - RNA, 19 nt, Artificial Sequence
  Description of Artificial Sequence: Synthetic oligonucleotide
  Antisense strand to SEQ ID NO: 1650777
aguuccaagcacugacuca

SEQ ID NO: 1650779 - RNA, 19 nt, Artificial Sequence
  Description of Artificial Sequence: Synthetic oligonucleotide
  Sense strand starting at position 3890 of SEQ ID NO: 1561155
gugcuuggaacucagucau

SEQ ID NO: 1650780 - RNA, 19 nt, Artificial Sequence
  Description of Artificial Sequence: Synthetic oligonucleotide
  Antisense strand to SEQ ID NO: 1650779
augacugaguuccaagcac

SEQ ID NO: 1650781 - RNA, 19 nt, Artificial Sequence
  Description of Artificial Sequence: Synthetic oligonucleotide
  Sense strand starting at position 3896 of SEQ ID NO: 1561155
ggaacucagucauccagau

SEQ ID NO: 1650782 - RNA, 19 nt, Artificial Sequence
  Description of Artificial Sequence: Synthetic oligonucleotide
  Antisense strand to SEQ ID NO: 1650781
aucuggaugacugaguucc

SEQ ID NO: 1650783 - RNA, 19 nt, Artificial Sequence
  Description of Artificial Sequence: Synthetic oligonucleotide
  Sense strand starting at position 3911 of SEQ ID NO: 1561155
agauuuggcucuggaaacu

SEQ ID NO: 1650784 - RNA, 19 nt, Artificial Sequence
  Description of Artificial Sequence: Synthetic oligonucleotide
  Antisense strand to SEQ ID NO: 1650783
aguuuccagagccaaaucu

SEQ ID NO: 1650785 - RNA, 19 nt, Artificial Sequence
  Description of Artificial Sequence: Synthetic oligonucleotide
  Sense strand starting at position 162 of SEQ ID NO: 1561156
guguuuagaucccaaugaa

SEQ ID NO: 1650786 - RNA, 19 nt, Artificial Sequence
  Description of Artificial Sequence: Synthetic oligonucleotide
  Antisense strand to SEQ ID NO: 1650785
uucauugggaucuaaacac

SEQ ID NO: 1650787 - RNA, 19 nt, Artificial Sequence
  Description of Artificial Sequence: Synthetic oligonucleotide
  Sense strand starting at position 199 of SEQ ID NO: 1561156
uuacuugaacugugaggua

SEQ ID NO: 1650788 - RNA, 19 nt, Artificial Sequence
  Description of Artificial Sequence: Synthetic oligonucleotide
  Antisense strand to SEQ ID NO: 1650787
uaccucacaguucaaguaa

SEQ ID NO: 1650789 - RNA, 19 nt, Artificial Sequence
  Description of Artificial Sequence: Synthetic oligonucleotide
  Sense strand starting at position 285 of SEQ ID NO: 1561156
uauggaguuucucuuagua

SEQ ID NO: 1650790 - RNA, 19 nt, Artificial Sequence
  Description of Artificial Sequence: Synthetic oligonucleotide
  Antisense strand to SEQ ID NO: 1650789
uacuaagagaaacuccaua

SEQ ID NO: 1650791 - RNA, 19 nt, Artificial Sequence
  Description of Artificial Sequence: Synthetic oligonucleotide
  Sense strand starting at position 504 of SEQ ID NO: 1561156
cucagucccuguuaugaga

SEQ ID NO: 1650792 - RNA, 19 nt, Artificial Sequence
  Description of Artificial Sequence: Synthetic oligonucleotide
  Antisense strand to SEQ ID NO: 1650791
ucucauaacagggacugag

SEQ ID NO: 1650793 - RNA, 19 nt, Artificial Sequence
  Description of Artificial Sequence: Synthetic oligonucleotide
  Sense strand starting at position 541 of SEQ ID NO: 1561156
gaugguggccgucacaauu

SEQ ID NO: 1650794 - RNA, 19 nt, Artificial Sequence
  Description of Artificial Sequence: Synthetic oligonucleotide
  Antisense strand to SEQ ID NO: 1650793
aauugugacggccaccauc

SEQ ID NO: 1650795 - RNA, 19 nt, Artificial Sequence
  Description of Artificial Sequence: Synthetic oligonucleotide
  Sense strand starting at position 552 of SEQ ID NO: 1561156
ucacaauuggccuggacga

SEQ ID NO: 1650796 - RNA, 19 nt, Artificial Sequence
  Description of Artificial Sequence: Synthetic oligonucleotide
  Antisense strand to SEQ ID NO: 1650795
ucguccaggccaauuguga

SEQ ID NO: 1650797 - RNA, 19 nt, Artificial Sequence
  Description of Artificial Sequence: Synthetic oligonucleotide
  Sense strand starting at position 553 of SEQ ID NO: 1561156
cacaauuggccuggacgaa

SEQ ID NO: 1650798 - RNA, 19 nt, Artificial Sequence
  Description of Artificial Sequence: Synthetic oligonucleotide
  Antisense strand to SEQ ID NO: 1650797
uucguccaggccaauugug

SEQ ID NO: 1650799 - RNA, 19 nt, Artificial Sequence
  Description of Artificial Sequence: Synthetic oligonucleotide
  Sense strand starting at position 577 of SEQ ID NO: 1561156
caagcauuggcauggagau

SEQ ID NO: 1650800 - RNA, 19 nt, Artificial Sequence
  Description of Artificial Sequence: Synthetic oligonucleotide
  Antisense strand to SEQ ID NO: 1650799
aucuccaugccaaugcuug

SEQ ID NO: 1650801 - RNA, 19 nt, Artificial Sequence
  Description of Artificial Sequence: Synthetic oligonucleotide
  Sense strand starting at position 578 of SEQ ID NO: 1561156
aagcauuggcauggagaua

SEQ ID NO: 1650802 - RNA, 19 nt, Artificial Sequence
  Description of Artificial Sequence: Synthetic oligonucleotide
  Antisense strand to SEQ ID NO: 1650801
uaucuccaugccaaugcuu

SEQ ID NO: 1650803 - RNA, 19 nt, Artificial Sequence
  Description of Artificial Sequence: Synthetic oligonucleotide
  Sense strand starting at position 993 of SEQ ID NO: 1561156
cuggucuggaucugugaau

SEQ ID NO: 1650804 - RNA, 19 nt, Artificial Sequence
  Description of Artificial Sequence: Synthetic oligonucleotide
  Antisense strand to SEQ ID NO: 1650803
auucacagauccagaccag

SEQ ID NO: 1650805 - RNA, 19 nt, Artificial Sequence
  Description of Artificial Sequence: Synthetic oligonucleotide
  Sense strand starting at position 994 of SEQ ID NO: 1561156
uggucuggaucugugaauu

SEQ ID NO: 1650806 - RNA, 19 nt, Artificial Sequence
  Description of Artificial Sequence: Synthetic oligonucleotide
  Antisense strand to SEQ ID NO: 1650805
aauucacagauccagacca

SEQ ID NO: 1650807 - RNA, 19 nt, Artificial Sequence
  Description of Artificial Sequence: Synthetic oligonucleotide
  Sense strand starting at position 1004 of SEQ ID NO: 1561156
cugugaauuugauggagag

SEQ ID NO: 1650808 - RNA, 19 nt, Artificial Sequence
  Description of Artificial Sequence: Synthetic oligonucleotide
  Antisense strand to SEQ ID NO: 1650807
cucuccaucaaauucacag

SEQ ID NO: 1650809 - RNA, 19 nt, Artificial Sequence
  Description of Artificial Sequence: Synthetic oligonucleotide
  Sense strand starting at position 1046 of SEQ ID NO: 1561156
agugcaugagaucaaaucu

SEQ ID NO: 1650810 - RNA, 19 nt, Artificial Sequence
  Description of Artificial Sequence: Synthetic oligonucleotide
  Antisense strand to SEQ ID NO: 1650809
agauuugaucucaugcacu

SEQ ID NO: 1650811 - RNA, 19 nt, Artificial Sequence
  Description of Artificial Sequence: Synthetic oligonucleotide
  Sense strand starting at position 1413 of SEQ ID NO: 1561156
ggguuuaugguguauauga

SEQ ID NO: 1650812 - RNA, 19 nt, Artificial Sequence
  Description of Artificial Sequence: Synthetic oligonucleotide
  Antisense strand to SEQ ID NO: 1650811
ucauauacaccauaaaccc

SEQ ID NO: 1650813 - RNA, 19 nt, Artificial Sequence
  Description of Artificial Sequence: Synthetic oligonucleotide
  Sense strand starting at position 1421 of SEQ ID NO: 1561156
gguguauaugaccacgacu

SEQ ID NO: 1650814 - RNA, 19 nt, Artificial Sequence
  Description of Artificial Sequence: Synthetic oligonucleotide
  Antisense strand to SEQ ID NO: 1650813
agucguggucauauacacc

SEQ ID NO: 1650815 - RNA, 19 nt, Artificial Sequence
  Description of Artificial Sequence: Synthetic oligonucleotide
  Sense strand starting at position 1442 of SEQ ID NO: 1561156
uaaagucguucugucccua

SEQ ID NO: 1650816 - RNA, 19 nt, Artificial Sequence
  Description of Artificial Sequence: Synthetic oligonucleotide
  Antisense strand to SEQ ID NO: 1650815
uagggacagaacgacuuua

SEQ ID NO: 1650817 - RNA, 19 nt, Artificial Sequence
  Description of Artificial Sequence: Synthetic oligonucleotide
  Sense strand starting at position 1695 of SEQ ID NO: 1561156
cguccuauguagggaucga

SEQ ID NO: 1650818 - RNA, 19 nt, Artificial Sequence
  Description of Artificial Sequence: Synthetic oligonucleotide
  Antisense strand to SEQ ID NO: 1650817
ucgaucccuacauaggacg

SEQ ID NO: 1650819 - RNA, 19 nt, Artificial Sequence
  Description of Artificial Sequence: Synthetic oligonucleotide
  Sense strand starting at position 1711 of SEQ ID NO: 1561156
cgaggagucuggguuccaa

SEQ ID NO: 1650820 - RNA, 19 nt, Artificial Sequence
  Description of Artificial Sequence: Synthetic oligonucleotide
  Antisense strand to SEQ ID NO: 1650819
uuggaacccagacuccucg

SEQ ID NO: 1650821 - RNA, 19 nt, Artificial Sequence
  Description of Artificial Sequence: Synthetic oligonucleotide
  Sense strand starting at position 1985 of SEQ ID NO: 1561156
gcauucucuuacgacgcaa

SEQ ID NO: 1650822 - RNA, 19 nt, Artificial Sequence
  Description of Artificial Sequence: Synthetic oligonucleotide
  Antisense strand to SEQ ID NO: 1650821
uugcgucguaagagaaugc

SEQ ID NO: 1650823 - RNA, 19 nt, Artificial Sequence
  Description of Artificial Sequence: Synthetic oligonucleotide
  Sense strand starting at position 2061 of SEQ ID NO: 1561156
cggauaaguucauuggaug

SEQ ID NO: 1650824 - RNA, 19 nt, Artificial Sequence
  Description of Artificial Sequence: Synthetic oligonucleotide
  Antisense strand to SEQ ID NO: 1650823
cauccaaugaacuuauccg

SEQ ID NO: 1650825 - RNA, 19 nt, Artificial Sequence
  Description of Artificial Sequence: Synthetic oligonucleotide
  Sense strand starting at position 2114 of SEQ ID NO: 1561156
agaagucaauuccuggcaa

SEQ ID NO: 1650826 - RNA, 19 nt, Artificial Sequence
  Description of Artificial Sequence: Synthetic oligonucleotide
  Antisense strand to SEQ ID NO: 1650825
uugccaggaauugacuucu

SEQ ID NO: 1650827 - RNA, 19 nt, Artificial Sequence
  Description of Artificial Sequence: Synthetic oligonucleotide
  Sense strand starting at position 2482 of SEQ ID NO: 1561156
aucugauugcgcuaucgca

SEQ ID NO: 1650828 - RNA, 19 nt, Artificial Sequence
  Description of Artificial Sequence: Synthetic oligonucleotide
  Antisense strand to SEQ ID NO: 1650827
ugcgauagcgcaaucagau

SEQ ID NO: 1650829 - RNA, 19 nt, Artificial Sequence
  Description of Artificial Sequence: Synthetic oligonucleotide
  Sense strand starting at position 2634 of SEQ ID NO: 1561156
gugucaggaccaugaagaa

SEQ ID NO: 1650830 - RNA, 19 nt, Artificial Sequence
  Description of Artificial Sequence: Synthetic oligonucleotide
  Antisense strand to SEQ ID NO: 1650829
uucuucaugguccugacac

SEQ ID NO: 1650831 - RNA, 19 nt, Artificial Sequence
  Description of Artificial Sequence: Synthetic oligonucleotide
  Sense strand starting at position 2650 of SEQ ID NO: 1561156
gaagacaugucacucggau

SEQ ID NO: 1650832 - RNA, 19 nt, Artificial Sequence
  Description of Artificial Sequence: Synthetic oligonucleotide
  Antisense strand to SEQ ID NO: 1650831
auccgagugacaugucuuc

SEQ ID NO: 1650833 - RNA, 19 nt, Artificial Sequence
  Description of Artificial Sequence: Synthetic oligonucleotide
  Sense strand starting at position 2654 of SEQ ID NO: 1561156
acaugucacucggauuugu

SEQ ID NO: 1650834 - RNA, 19 nt, Artificial Sequence
  Description of Artificial Sequence: Synthetic oligonucleotide
  Antisense strand to SEQ ID NO: 1650833
acaaauccgagugacaugu

SEQ ID NO: 1650835 - RNA, 19 nt, Artificial Sequence
  Description of Artificial Sequence: Synthetic oligonucleotide
  Sense strand starting at position 2665 of SEQ ID NO: 1561156
ggauuuguugcucauggcu

SEQ ID NO: 1650836 - RNA, 19 nt, Artificial Sequence
  Description of Artificial Sequence: Synthetic oligonucleotide
  Antisense strand to SEQ ID NO: 1650835
agccaugagcaacaaaucc

SEQ ID NO: 1650837 - RNA, 19 nt, Artificial Sequence
  Description of Artificial Sequence: Synthetic oligonucleotide
  Sense strand starting at position 3217 of SEQ ID NO: 1561156
guaagcuuuccagguguga

SEQ ID NO: 1650838 - RNA, 19 nt, Artificial Sequence
  Description of Artificial Sequence: Synthetic oligonucleotide
  Antisense strand to SEQ ID NO: 1650837
ucacaccuggaaagcuuac

SEQ ID NO: 1650839 - RNA, 19 nt, Artificial Sequence
  Description of Artificial Sequence: Synthetic oligonucleotide
  Sense strand starting at position 3226 of SEQ ID NO: 1561156
ccaggugugacaugaaguu

SEQ ID NO: 1650840 - RNA, 19 nt, Artificial Sequence
  Description of Artificial Sequence: Synthetic oligonucleotide
  Antisense strand to SEQ ID NO: 1650839
aacuucaugucacaccugg

SEQ ID NO: 1650841 - RNA, 19 nt, Artificial Sequence
  Description of Artificial Sequence: Synthetic oligonucleotide
  Sense strand starting at position 3232 of SEQ ID NO: 1561156
gugacaugaaguuguagca

SEQ ID NO: 1650842 - RNA, 19 nt, Artificial Sequence
  Description of Artificial Sequence: Synthetic oligonucleotide
  Antisense strand to SEQ ID NO: 1650841
ugcuacaacuucaugucac

SEQ ID NO: 1650843 - RNA, 19 nt, Artificial Sequence
  Description of Artificial Sequence: Synthetic oligonucleotide
  Sense strand starting at position 3270 of SEQ ID NO: 1561156
cuccucagauacuggauua

SEQ ID NO: 1650844 - RNA, 19 nt, Artificial Sequence
  Description of Artificial Sequence: Synthetic oligonucleotide
  Antisense strand to SEQ ID NO: 1650843
uaauccaguaucugaggag

SEQ ID NO: 1650845 - RNA, 19 nt, Artificial Sequence
  Description of Artificial Sequence: Synthetic oligonucleotide
  Sense strand starting at position 3702 of SEQ ID NO: 1561156
augaaagggucgugauaaa

SEQ ID NO: 1650846 - RNA, 19 nt, Artificial Sequence
  Description of Artificial Sequence: Synthetic oligonucleotide
  Antisense strand to SEQ ID NO: 1650845
uuuaucacgacccuuucau

SEQ ID NO: 1650847 - RNA, 19 nt, Artificial Sequence
  Description of Artificial Sequence: Synthetic oligonucleotide
  Sense strand starting at position 3795 of SEQ ID NO: 1561156
ucauauaaugucuggaacu

SEQ ID NO: 1650848 - RNA, 19 nt, Artificial Sequence
  Description of Artificial Sequence: Synthetic oligonucleotide
  Antisense strand to SEQ ID NO: 1650847
aguuccagacauuauauga

SEQ ID NO: 1650849 - RNA, 19 nt, Artificial Sequence
  Description of Artificial Sequence: Synthetic oligonucleotide
  Sense strand starting at position 3843 of SEQ ID NO: 1561156
gguugcuguuauuauuauu

SEQ ID NO: 1650850 - RNA, 19 nt, Artificial Sequence
  Description of Artificial Sequence: Synthetic oligonucleotide
  Antisense strand to SEQ ID NO: 1650849
aauaauaauaacagcaacc

SEQ ID NO: 1650851 - RNA, 19 nt, Artificial Sequence
  Description of Artificial Sequence: Synthetic oligonucleotide
  Sense strand starting at position 199 of SEQ ID NO: 1561157
uggugaauucuauguuaua

SEQ ID NO: 1650852 - RNA, 19 nt, Artificial Sequence
  Description of Artificial Sequence: Synthetic oligonucleotide
  Antisense strand to SEQ ID NO: 1650851
uauaacauagaauucacca

SEQ ID NO: 1650853 - RNA, 19 nt, Artificial Sequence
  Description of Artificial Sequence: Synthetic oligonucleotide
  Sense strand starting at position 200 of SEQ ID NO: 1561157
ggugaauucuauguuauau

SEQ ID NO: 1650854 - RNA, 19 nt, Artificial Sequence
  Description of Artificial Sequence: Synthetic oligonucleotide
  Antisense strand to SEQ ID NO: 1650853
auauaacauagaauucacc

SEQ ID NO: 1650855 - RNA, 19 nt, Artificial Sequence
  Description of Artificial Sequence: Synthetic oligonucleotide
  Sense strand starting at position 462 of SEQ ID NO: 1561157
auguaauggagcugaagga

SEQ ID NO: 1650856 - RNA, 19 nt, Artificial Sequence
  Description of Artificial Sequence: Synthetic oligonucleotide
  Antisense strand to SEQ ID NO: 1650855
uccuucagcuccauuacau

SEQ ID NO: 1650857 - RNA, 19 nt, Artificial Sequence
  Description of Artificial Sequence: Synthetic oligonucleotide
  Sense strand starting at position 635 of SEQ ID NO: 1561157
ucaucucugccacagagaa

SEQ ID NO: 1650858 - RNA, 19 nt, Artificial Sequence
  Description of Artificial Sequence: Synthetic oligonucleotide
  Antisense strand to SEQ ID NO: 1650857
uucucuguggcagagauga

SEQ ID NO: 1650859 - RNA, 19 nt, Artificial Sequence
  Description of Artificial Sequence: Synthetic oligonucleotide
  Sense strand starting at position 1324 of SEQ ID NO: 1561157
gucugugucccuccugcaa

SEQ ID NO: 1650860 - RNA, 19 nt, Artificial Sequence
  Description of Artificial Sequence: Synthetic oligonucleotide
  Antisense strand to SEQ ID NO: 1650859
uugcaggagggacacagac

SEQ ID NO: 1650861 - RNA, 19 nt, Artificial Sequence
  Description of Artificial Sequence: Synthetic oligonucleotide
  Sense strand starting at position 1368 of SEQ ID NO: 1561157
ggcuuccuccuugggaaga

SEQ ID NO: 1650862 - RNA, 19 nt, Artificial Sequence
  Description of Artificial Sequence: Synthetic oligonucleotide
  Antisense strand to SEQ ID NO: 1650861
ucuucccaaggaggaagcc

SEQ ID NO: 1650863 - RNA, 19 nt, Artificial Sequence
  Description of Artificial Sequence: Synthetic oligonucleotide
  Sense strand starting at position 1451 of SEQ ID NO: 1561157
guguuccaccuggagaguu

SEQ ID NO: 1650864 - RNA, 19 nt, Artificial Sequence
  Description of Artificial Sequence: Synthetic oligonucleotide
  Antisense strand to SEQ ID NO: 1650863
aacucuccagguggaacac

SEQ ID NO: 1650865 - RNA, 19 nt, Artificial Sequence
  Description of Artificial Sequence: Synthetic oligonucleotide
  Sense strand starting at position 1538 of SEQ ID NO: 1561157
gguuucugccuagaguuag

SEQ ID NO: 1650866 - RNA, 19 nt, Artificial Sequence
  Description of Artificial Sequence: Synthetic oligonucleotide
  Antisense strand to SEQ ID NO: 1650865
cuaacucuaggcagaaacc

SEQ ID NO: 1650867 - RNA, 19 nt, Artificial Sequence
  Description of Artificial Sequence: Synthetic oligonucleotide
  Sense strand starting at position 1542 of SEQ ID NO: 1561157
ucugccuagaguuagagau

SEQ ID NO: 1650868 - RNA, 19 nt, Artificial Sequence
  Description of Artificial Sequence: Synthetic oligonucleotide
  Antisense strand to SEQ ID NO: 1650867
aucucuaacucuaggcaga

SEQ ID NO: 1650869 - RNA, 19 nt, Artificial Sequence
  Description of Artificial Sequence: Synthetic oligonucleotide
  Sense strand starting at position 1802 of SEQ ID NO: 1561157
cuugucuuaugacugagua

SEQ ID NO: 1650870 - RNA, 19 nt, Artificial Sequence
  Description of Artificial Sequence: Synthetic oligonucleotide
  Antisense strand to SEQ ID NO: 1650869
uacucagucauaagacaag

SEQ ID NO: 1650871 - RNA, 19 nt, Artificial Sequence
  Description of Artificial Sequence: Synthetic oligonucleotide
  Sense strand starting at position 1803 of SEQ ID NO: 1561157
uugucuuaugacugaguaa

SEQ ID NO: 1650872 - RNA, 19 nt, Artificial Sequence
  Description of Artificial Sequence: Synthetic oligonucleotide
  Antisense strand to SEQ ID NO: 1650871
uuacucagucauaagacaa

SEQ ID NO: 1650873 - RNA, 19 nt, Artificial Sequence
  Description of Artificial Sequence: Synthetic oligonucleotide
  Sense strand starting at position 1804 of SEQ ID NO: 1561157
ugucuuaugacugaguaag

SEQ ID NO: 1650874 - RNA, 19 nt, Artificial Sequence
  Description of Artificial Sequence: Synthetic oligonucleotide
  Antisense strand to SEQ ID NO: 1650873
cuuacucagucauaagaca

SEQ ID NO: 1650875 - RNA, 19 nt, Artificial Sequence
  Description of Artificial Sequence: Synthetic oligonucleotide
  Sense strand starting at position 1806 of SEQ ID NO: 1561157
ucuuaugacugaguaagca

SEQ ID NO: 1650876 - RNA, 19 nt, Artificial Sequence
  Description of Artificial Sequence: Synthetic oligonucleotide
  Antisense strand to SEQ ID NO: 1650875
ugcuuacucagucauaaga

SEQ ID NO: 1650877 - RNA, 19 nt, Artificial Sequence
  Description of Artificial Sequence: Synthetic oligonucleotide
  Sense strand starting at position 1814 of SEQ ID NO: 1561157
cugaguaagcauuaagcca

SEQ ID NO: 1650878 - RNA, 19 nt, Artificial Sequence
  Description of Artificial Sequence: Synthetic oligonucleotide
  Antisense strand to SEQ ID NO: 1650877
uggcuuaaugcuuacucag

SEQ ID NO: 1650879 - RNA, 19 nt, Artificial Sequence
  Description of Artificial Sequence: Synthetic oligonucleotide
  Sense strand starting at position 1837 of SEQ ID NO: 1561157
gugauacaaucugcuaaga

SEQ ID NO: 1650880 - RNA, 19 nt, Artificial Sequence
  Description of Artificial Sequence: Synthetic oligonucleotide
  Antisense strand to SEQ ID NO: 1650879
ucuuagcagauuguaucac

SEQ ID NO: 1650881 - RNA, 19 nt, Artificial Sequence
  Description of Artificial Sequence: Synthetic oligonucleotide
  Sense strand starting at position 2033 of SEQ ID NO: 1561157
guuaauuggcuuuauccac

SEQ ID NO: 1650882 - RNA, 19 nt, Artificial Sequence
  Description of Artificial Sequence: Synthetic oligonucleotide
  Antisense strand to SEQ ID NO: 1650881
guggauaaagccaauuaac

SEQ ID NO: 1650883 - RNA, 19 nt, Artificial Sequence
  Description of Artificial Sequence: Synthetic oligonucleotide
  Sense strand starting at position 2070 of SEQ ID NO: 1561157
uuaucuaugacaggaggua

SEQ ID NO: 1650884 - RNA, 19 nt, Artificial Sequence
  Description of Artificial Sequence: Synthetic oligonucleotide
  Antisense strand to SEQ ID NO: 1650883
uaccuccugucauagauaa

SEQ ID NO: 1650885 - RNA, 19 nt, Artificial Sequence
  Description of Artificial Sequence: Synthetic oligonucleotide
  Sense strand starting at position 2238 of SEQ ID NO: 1561157
aggcaagaugcuuauguau

SEQ ID NO: 1650886 - RNA, 19 nt, Artificial Sequence
  Description of Artificial Sequence: Synthetic oligonucleotide
  Antisense strand to SEQ ID NO: 1650885
auacauaagcaucuugccu

SEQ ID NO: 1650887 - RNA, 19 nt, Artificial Sequence
  Description of Artificial Sequence: Synthetic oligonucleotide
  Sense strand starting at position 2249 of SEQ ID NO: 1561157
uuauguaugcuuuagaaag

SEQ ID NO: 1650888 - RNA, 19 nt, Artificial Sequence
  Description of Artificial Sequence: Synthetic oligonucleotide
  Antisense strand to SEQ ID NO: 1650887
cuuucuaaagcauacauaa

SEQ ID NO: 1650889 - RNA, 19 nt, Artificial Sequence
  Description of Artificial Sequence: Synthetic oligonucleotide
  Sense strand starting at position 2395 of SEQ ID NO: 1561157
ucaauuugcugggcauagu

SEQ ID NO: 1650890 - RNA, 19 nt, Artificial Sequence
  Description of Artificial Sequence: Synthetic oligonucleotide
  Antisense strand to SEQ ID NO: 1650889
acuaugcccagcaaauuga

SEQ ID NO: 1650891 - RNA, 19 nt, Artificial Sequence
  Description of Artificial Sequence: Synthetic oligonucleotide
  Sense strand starting at position 2603 of SEQ ID NO: 1561157
agaggagagucucuaucuu

SEQ ID NO: 1650892 - RNA, 19 nt, Artificial Sequence
  Description of Artificial Sequence: Synthetic oligonucleotide
  Antisense strand to SEQ ID NO: 1650891
aagauagagacucuccucu

SEQ ID NO: 1650893 - RNA, 19 nt, Artificial Sequence
  Description of Artificial Sequence: Synthetic oligonucleotide
  Sense strand starting at position 2656 of SEQ ID NO: 1561157
auauuugccucacagagau

SEQ ID NO: 1650894 - RNA, 19 nt, Artificial Sequence
  Description of Artificial Sequence: Synthetic oligonucleotide
  Antisense strand to SEQ ID NO: 1650893
aucucugugaggcaaauau

SEQ ID NO: 1650895 - RNA, 19 nt, Artificial Sequence
  Description of Artificial Sequence: Synthetic oligonucleotide
  Sense strand starting at position 2738 of SEQ ID NO: 1561157
cagguuuagcaauaaagca

SEQ ID NO: 1650896 - RNA, 19 nt, Artificial Sequence
  Description of Artificial Sequence: Synthetic oligonucleotide
  Antisense strand to SEQ ID NO: 1650895
ugcuuuauugcuaaaccug

SEQ ID NO: 1650897 - RNA, 19 nt, Artificial Sequence
  Description of Artificial Sequence: Synthetic oligonucleotide
  Sense strand starting at position 2772 of SEQ ID NO: 1561157
caguacaagcaauguuaga

SEQ ID NO: 1650898 - RNA, 19 nt, Artificial Sequence
  Description of Artificial Sequence: Synthetic oligonucleotide
  Antisense strand to SEQ ID NO: 1650897
ucuaacauugcuuguacug

SEQ ID NO: 1650899 - RNA, 19 nt, Artificial Sequence
  Description of Artificial Sequence: Synthetic oligonucleotide
  Sense strand starting at position 2870 of SEQ ID NO: 1561157
gaagaugcuugagcgagaa

SEQ ID NO: 1650900 - RNA, 19 nt, Artificial Sequence
  Description of Artificial Sequence: Synthetic oligonucleotide
  Antisense strand to SEQ ID NO: 1650899
uucucgcucaagcaucuuc

SEQ ID NO: 1650901 - RNA, 19 nt, Artificial Sequence
  Description of Artificial Sequence: Synthetic oligonucleotide
  Sense strand starting at position 2872 of SEQ ID NO: 1561157
agaugcuugagcgagaaga

SEQ ID NO: 1650902 - RNA, 19 nt, Artificial Sequence
  Description of Artificial Sequence: Synthetic oligonucleotide
  Antisense strand to SEQ ID NO: 1650901
ucuucucgcucaagcaucu

SEQ ID NO: 1650903 - RNA, 19 nt, Artificial Sequence
  Description of Artificial Sequence: Synthetic oligonucleotide
  Sense strand starting at position 2874 of SEQ ID NO: 1561157
augcuugagcgagaagaaa

SEQ ID NO: 1650904 - RNA, 19 nt, Artificial Sequence
  Description of Artificial Sequence: Synthetic oligonucleotide
  Antisense strand to SEQ ID NO: 1650903
uuucuucucgcucaagcau

SEQ ID NO: 1650905 - RNA, 19 nt, Artificial Sequence
  Description of Artificial Sequence: Synthetic oligonucleotide
  Sense strand starting at position 3038 of SEQ ID NO: 1561157
aggaguauguggucagagu

SEQ ID NO: 1650906 - RNA, 19 nt, Artificial Sequence
  Description of Artificial Sequence: Synthetic oligonucleotide
  Antisense strand to SEQ ID NO: 1650905
acucugaccacauacuccu

SEQ ID NO: 1650907 - RNA, 19 nt, Artificial Sequence
  Description of Artificial Sequence: Synthetic oligonucleotide
  Sense strand starting at position 3039 of SEQ ID NO: 1561157
ggaguauguggucagaguu

SEQ ID NO: 1650908 - RNA, 19 nt, Artificial Sequence
  Description of Artificial Sequence: Synthetic oligonucleotide
  Antisense strand to SEQ ID NO: 1650907
aacucugaccacauacucc

SEQ ID NO: 1650909 - RNA, 19 nt, Artificial Sequence
  Description of Artificial Sequence: Synthetic oligonucleotide
  Sense strand starting at position 3045 of SEQ ID NO: 1561157
uguggucagaguuaaagcu

SEQ ID NO: 1650910 - RNA, 19 nt, Artificial Sequence
  Description of Artificial Sequence: Synthetic oligonucleotide
  Antisense strand to SEQ ID NO: 1650909
agcuuuaacucugaccaca

SEQ ID NO: 1650911 - RNA, 19 nt, Artificial Sequence
  Description of Artificial Sequence: Synthetic oligonucleotide
  Sense strand starting at position 3069 of SEQ ID NO: 1561157
uguuucugggaucagguaa

SEQ ID NO: 1650912 - RNA, 19 nt, Artificial Sequence
  Description of Artificial Sequence: Synthetic oligonucleotide
  Antisense strand to SEQ ID NO: 1650911
uuaccugaucccagaaaca

SEQ ID NO: 1650913 - RNA, 19 nt, Artificial Sequence
  Description of Artificial Sequence: Synthetic oligonucleotide
  Sense strand starting at position 3088 of SEQ ID NO: 1561157
gaggucaguguccagagaa

SEQ ID NO: 1650914 - RNA, 19 nt, Artificial Sequence
  Description of Artificial Sequence: Synthetic oligonucleotide
  Antisense strand to SEQ ID NO: 1650913
uucucuggacacugaccuc

SEQ ID NO: 1650915 - RNA, 19 nt, Artificial Sequence
  Description of Artificial Sequence: Synthetic oligonucleotide
  Sense strand starting at position 3108 of SEQ ID NO: 1561157
agagguggaucuucagauc

SEQ ID NO: 1650916 - RNA, 19 nt, Artificial Sequence
  Description of Artificial Sequence: Synthetic oligonucleotide
  Antisense strand to SEQ ID NO: 1650915
gaucugaagauccaccucu

SEQ ID NO: 1650917 - RNA, 19 nt, Artificial Sequence
  Description of Artificial Sequence: Synthetic oligonucleotide
  Sense strand starting at position 3355 of SEQ ID NO: 1561157
guggaaaucaaacgaguau

SEQ ID NO: 1650918 - RNA, 19 nt, Artificial Sequence
  Description of Artificial Sequence: Synthetic oligonucleotide
  Antisense strand to SEQ ID NO: 1650917
auacucguuugauuuccac

SEQ ID NO: 1650919 - RNA, 19 nt, Artificial Sequence
  Description of Artificial Sequence: Synthetic oligonucleotide
  Sense strand starting at position 3498 of SEQ ID NO: 1561157
cuuguaaccugguuacaca

SEQ ID NO: 1650920 - RNA, 19 nt, Artificial Sequence
  Description of Artificial Sequence: Synthetic oligonucleotide
  Antisense strand to SEQ ID NO: 1650919
uguguaaccagguuacaag

SEQ ID NO: 1650921 - RNA, 19 nt, Artificial Sequence
  Description of Artificial Sequence: Synthetic oligonucleotide
  Sense strand starting at position 3610 of SEQ ID NO: 1561157
gaauuuacauaggguaaau

SEQ ID NO: 1650922 - RNA, 19 nt, Artificial Sequence
  Description of Artificial Sequence: Synthetic oligonucleotide
  Antisense strand to SEQ ID NO: 1650921
auuuacccuauguaaauuc

SEQ ID NO: 1650923 - RNA, 19 nt, Artificial Sequence
  Description of Artificial Sequence: Synthetic oligonucleotide
  Sense strand starting at position 3623 of SEQ ID NO: 1561157
guaaauaucaaaggucgaa

SEQ ID NO: 1650924 - RNA, 19 nt, Artificial Sequence
  Description of Artificial Sequence: Synthetic oligonucleotide
  Antisense strand to SEQ ID NO: 1650923
uucgaccuuugauauuuac

SEQ ID NO: 1650925 - RNA, 19 nt, Artificial Sequence
  Description of Artificial Sequence: Synthetic oligonucleotide
  Sense strand starting at position 3626 of SEQ ID NO: 1561157
aauaucaaaggucgaaagu

SEQ ID NO: 1650926 - RNA, 19 nt, Artificial Sequence
  Description of Artificial Sequence: Synthetic oligonucleotide
  Antisense strand to SEQ ID NO: 1650925
acuuucgaccuuugauauu

SEQ ID NO: 1650927 - RNA, 19 nt, Artificial Sequence
  Description of Artificial Sequence: Synthetic oligonucleotide
  Sense strand starting at position 3691 of SEQ ID NO: 1561157
cuguuuaagccacaacaga

SEQ ID NO: 1650928 - RNA, 19 nt, Artificial Sequence
  Description of Artificial Sequence: Synthetic oligonucleotide
  Antisense strand to SEQ ID NO: 1650927
ucuguuguggcuuaaacag

SEQ ID NO: 1650929 - RNA, 19 nt, Artificial Sequence
  Description of Artificial Sequence: Synthetic oligonucleotide
  Sense strand starting at position 3702 of SEQ ID NO: 1561157
acaacagaauuaucguaga

SEQ ID NO: 1650930 - RNA, 19 nt, Artificial Sequence
  Description of Artificial Sequence: Synthetic oligonucleotide
  Antisense strand to SEQ ID NO: 1650929
ucuacgauaauucuguugu

SEQ ID NO: 1650931 - RNA, 19 nt, Artificial Sequence
  Description of Artificial Sequence: Synthetic oligonucleotide
  Sense strand starting at position 3 of SEQ ID NO: 1561158
guuuaauccucauugauug

SEQ ID NO: 1650932 - RNA, 19 nt, Artificial Sequence
  Description of Artificial Sequence: Synthetic oligonucleotide
  Antisense strand to SEQ ID NO: 1650931
caaucaaugaggauuaaac

SEQ ID NO: 1650933 - RNA, 19 nt, Artificial Sequence
  Description of Artificial Sequence: Synthetic oligonucleotide
  Sense strand starting at position 8 of SEQ ID NO: 1561158
auccucauugauugauuga

SEQ ID NO: 1650934 - RNA, 19 nt, Artificial Sequence
  Description of Artificial Sequence: Synthetic oligonucleotide
  Antisense strand to SEQ ID NO: 1650933
ucaaucaaucaaugaggau

SEQ ID NO: 1650935 - RNA, 19 nt, Artificial Sequence
  Description of Artificial Sequence: Synthetic oligonucleotide
  Sense strand starting at position 318 of SEQ ID NO: 1561158
uccuuauucucagcaagga

SEQ ID NO: 1650936 - RNA, 19 nt, Artificial Sequence
  Description of Artificial Sequence: Synthetic oligonucleotide
  Antisense strand to SEQ ID NO: 1650935
uccuugcugagaauaagga

SEQ ID NO: 1650937 - RNA, 19 nt, Artificial Sequence
  Description of Artificial Sequence: Synthetic oligonucleotide
  Sense strand starting at position 402 of SEQ ID NO: 1561158
ggagaaggguccagagaca

SEQ ID NO: 1650938 - RNA, 19 nt, Artificial Sequence
  Description of Artificial Sequence: Synthetic oligonucleotide
  Antisense strand to SEQ ID NO: 1650937
ugucucuggacccuucucc

SEQ ID NO: 1650939 - RNA, 19 nt, Artificial Sequence
  Description of Artificial Sequence: Synthetic oligonucleotide
  Sense strand starting at position 430 of SEQ ID NO: 1561158
cggaaugaaugagucgaga

SEQ ID NO: 1650940 - RNA, 19 nt, Artificial Sequence
  Description of Artificial Sequence: Synthetic oligonucleotide
  Antisense strand to SEQ ID NO: 1650939
ucucgacucauucauuccg

SEQ ID NO: 1650941 - RNA, 19 nt, Artificial Sequence
  Description of Artificial Sequence: Synthetic oligonucleotide
  Sense strand starting at position 466 of SEQ ID NO: 1561158
ggguaugggagaugugaag

SEQ ID NO: 1650942 - RNA, 19 nt, Artificial Sequence
  Description of Artificial Sequence: Synthetic oligonucleotide
  Antisense strand to SEQ ID NO: 1650941
cuucacaucucccauaccc

SEQ ID NO: 1650943 - RNA, 19 nt, Artificial Sequence
  Description of Artificial Sequence: Synthetic oligonucleotide
  Sense strand starting at position 553 of SEQ ID NO: 1561158
cugcguugucagggaagcu

SEQ ID NO: 1650944 - RNA, 19 nt, Artificial Sequence
  Description of Artificial Sequence: Synthetic oligonucleotide
  Antisense strand to SEQ ID NO: 1650943
agcuucccugacaacgcag

SEQ ID NO: 1650945 - RNA, 19 nt, Artificial Sequence
  Description of Artificial Sequence: Synthetic oligonucleotide
  Sense strand starting at position 624 of SEQ ID NO: 1561158
augcuaaaugacugaauau

SEQ ID NO: 1650946 - RNA, 19 nt, Artificial Sequence
  Description of Artificial Sequence: Synthetic oligonucleotide
  Antisense strand to SEQ ID NO: 1650945
auauucagucauuuagcau

SEQ ID NO: 1650947 - RNA, 19 nt, Artificial Sequence
  Description of Artificial Sequence: Synthetic oligonucleotide
  Sense strand starting at position 657 of SEQ ID NO: 1561158
ugaauauaucagcaagcca

SEQ ID NO: 1650948 - RNA, 19 nt, Artificial Sequence
  Description of Artificial Sequence: Synthetic oligonucleotide
  Antisense strand to SEQ ID NO: 1650947
uggcuugcugauauauuca

SEQ ID NO: 1650949 - RNA, 19 nt, Artificial Sequence
  Description of Artificial Sequence: Synthetic oligonucleotide
  Sense strand starting at position 800 of SEQ ID NO: 1561158
cugguacuuucugcgauuu

SEQ ID NO: 1650950 - RNA, 19 nt, Artificial Sequence
  Description of Artificial Sequence: Synthetic oligonucleotide
  Antisense strand to SEQ ID NO: 1650949
aaaucgcagaaaguaccag

SEQ ID NO: 1650951 - RNA, 19 nt, Artificial Sequence
  Description of Artificial Sequence: Synthetic oligonucleotide
  Sense strand starting at position 801 of SEQ ID NO: 1561158
ugguacuuucugcgauuua

SEQ ID NO: 1650952 - RNA, 19 nt, Artificial Sequence
  Description of Artificial Sequence: Synthetic oligonucleotide
  Antisense strand to SEQ ID NO: 1650951
uaaaucgcagaaaguacca

SEQ ID NO: 1650953 - RNA, 19 nt, Artificial Sequence
  Description of Artificial Sequence: Synthetic oligonucleotide
  Sense strand starting at position 802 of SEQ ID NO: 1561158
gguacuuucugcgauuuaa

SEQ ID NO: 1650954 - RNA, 19 nt, Artificial Sequence
  Description of Artificial Sequence: Synthetic oligonucleotide
  Antisense strand to SEQ ID NO: 1650953
uuaaaucgcagaaaguacc

SEQ ID NO: 1650955 - RNA, 19 nt, Artificial Sequence
  Description of Artificial Sequence: Synthetic oligonucleotide
  Sense strand starting at position 1363 of SEQ ID NO: 1561158
accuccuagucugucagau

SEQ ID NO: 1650956 - RNA, 19 nt, Artificial Sequence
  Description of Artificial Sequence: Synthetic oligonucleotide
  Antisense strand to SEQ ID NO: 1650955
aucugacagacuaggaggu

SEQ ID NO: 1650957 - RNA, 19 nt, Artificial Sequence
  Description of Artificial Sequence: Synthetic oligonucleotide
  Sense strand starting at position 1437 of SEQ ID NO: 1561158
aggguucuaagguaaagca

SEQ ID NO: 1650958 - RNA, 19 nt, Artificial Sequence
  Description of Artificial Sequence: Synthetic oligonucleotide
  Antisense strand to SEQ ID NO: 1650957
ugcuuuaccuuagaacccu

SEQ ID NO: 1650959 - RNA, 19 nt, Artificial Sequence
  Description of Artificial Sequence: Synthetic oligonucleotide
  Sense strand starting at position 1450 of SEQ ID NO: 1561158
aaagcaguugcaugaacua

SEQ ID NO: 1650960 - RNA, 19 nt, Artificial Sequence
  Description of Artificial Sequence: Synthetic oligonucleotide
  Antisense strand to SEQ ID NO: 1650959
uaguucaugcaacugcuuu

SEQ ID NO: 1650961 - RNA, 19 nt, Artificial Sequence
  Description of Artificial Sequence: Synthetic oligonucleotide
  Sense strand starting at position 1648 of SEQ ID NO: 1561158
uagguuaagccguucgcaa

SEQ ID NO: 1650962 - RNA, 19 nt, Artificial Sequence
  Description of Artificial Sequence: Synthetic oligonucleotide
  Antisense strand to SEQ ID NO: 1650961
uugcgaacggcuuaaccua

SEQ ID NO: 1650963 - RNA, 19 nt, Artificial Sequence
  Description of Artificial Sequence: Synthetic oligonucleotide
  Sense strand starting at position 1649 of SEQ ID NO: 1561158
agguuaagccguucgcaaa

SEQ ID NO: 1650964 - RNA, 19 nt, Artificial Sequence
  Description of Artificial Sequence: Synthetic oligonucleotide
  Antisense strand to SEQ ID NO: 1650963
uuugcgaacggcuuaaccu

SEQ ID NO: 1650965 - RNA, 19 nt, Artificial Sequence
  Description of Artificial Sequence: Synthetic oligonucleotide
  Sense strand starting at position 1718 of SEQ ID NO: 1561158
aggccuugugggaguugua

SEQ ID NO: 1650966 - RNA, 19 nt, Artificial Sequence
  Description of Artificial Sequence: Synthetic oligonucleotide
  Antisense strand to SEQ ID NO: 1650965
uacaacucccacaaggccu

SEQ ID NO: 1650967 - RNA, 19 nt, Artificial Sequence
  Description of Artificial Sequence: Synthetic oligonucleotide
  Sense strand starting at position 2175 of SEQ ID NO: 1561158
agaagaagugugugaggaa

SEQ ID NO: 1650968 - RNA, 19 nt, Artificial Sequence
  Description of Artificial Sequence: Synthetic oligonucleotide
  Antisense strand to SEQ ID NO: 1650967
uuccucacacacuucuucu

SEQ ID NO: 1650969 - RNA, 19 nt, Artificial Sequence
  Description of Artificial Sequence: Synthetic oligonucleotide
  Sense strand starting at position 2176 of SEQ ID NO: 1561158
gaagaagugugugaggaaa

SEQ ID NO: 1650970 - RNA, 19 nt, Artificial Sequence
  Description of Artificial Sequence: Synthetic oligonucleotide
  Antisense strand to SEQ ID NO: 1650969
uuuccucacacacuucuuc

SEQ ID NO: 1650971 - RNA, 19 nt, Artificial Sequence
  Description of Artificial Sequence: Synthetic oligonucleotide
  Sense strand starting at position 2920 of SEQ ID NO: 1561158
cucuuagagcuuugguuga

SEQ ID NO: 1650972 - RNA, 19 nt, Artificial Sequence
  Description of Artificial Sequence: Synthetic oligonucleotide
  Antisense strand to SEQ ID NO: 1650971
ucaaccaaagcucuaagag

SEQ ID NO: 1650973 - RNA, 19 nt, Artificial Sequence
  Description of Artificial Sequence: Synthetic oligonucleotide
  Sense strand starting at position 2922 of SEQ ID NO: 1561158
cuuagagcuuugguugaug

SEQ ID NO: 1650974 - RNA, 19 nt, Artificial Sequence
  Description of Artificial Sequence: Synthetic oligonucleotide
  Antisense strand to SEQ ID NO: 1650973
caucaaccaaagcucuaag

SEQ ID NO: 1650975 - RNA, 19 nt, Artificial Sequence
  Description of Artificial Sequence: Synthetic oligonucleotide
  Sense strand starting at position 2931 of SEQ ID NO: 1561158
uugguugaugccuggcaga

SEQ ID NO: 1650976 - RNA, 19 nt, Artificial Sequence
  Description of Artificial Sequence: Synthetic oligonucleotide
  Antisense strand to SEQ ID NO: 1650975
ucugccaggcaucaaccaa

SEQ ID NO: 1650977 - RNA, 19 nt, Artificial Sequence
  Description of Artificial Sequence: Synthetic oligonucleotide
  Sense strand starting at position 2945 of SEQ ID NO: 1561158
gcagacaggcuuuaucaaa

SEQ ID NO: 1650978 - RNA, 19 nt, Artificial Sequence
  Description of Artificial Sequence: Synthetic oligonucleotide
  Antisense strand to SEQ ID NO: 1650977
uuugauaaagccugucugc

SEQ ID NO: 1650979 - RNA, 19 nt, Artificial Sequence
  Description of Artificial Sequence: Synthetic oligonucleotide
  Sense strand starting at position 2988 of SEQ ID NO: 1561158
ugugaagugccuuacugua

SEQ ID NO: 1650980 - RNA, 19 nt, Artificial Sequence
  Description of Artificial Sequence: Synthetic oligonucleotide
  Antisense strand to SEQ ID NO: 1650979
uacaguaaggcacuucaca

SEQ ID NO: 1650981 - RNA, 19 nt, Artificial Sequence
  Description of Artificial Sequence: Synthetic oligonucleotide
  Sense strand starting at position 2990 of SEQ ID NO: 1561158
ugaagugccuuacuguaga

SEQ ID NO: 1650982 - RNA, 19 nt, Artificial Sequence
  Description of Artificial Sequence: Synthetic oligonucleotide
  Antisense strand to SEQ ID NO: 1650981
ucuacaguaaggcacuuca

SEQ ID NO: 1650983 - RNA, 19 nt, Artificial Sequence
  Description of Artificial Sequence: Synthetic oligonucleotide
  Sense strand starting at position 3022 of SEQ ID NO: 1561158
cgggacacguuaucacaaa

SEQ ID NO: 1650984 - RNA, 19 nt, Artificial Sequence
  Description of Artificial Sequence: Synthetic oligonucleotide
  Antisense strand to SEQ ID NO: 1650983
uuugugauaacgugucccg

SEQ ID NO: 1650985 - RNA, 19 nt, Artificial Sequence
  Description of Artificial Sequence: Synthetic oligonucleotide
  Sense strand starting at position 3462 of SEQ ID NO: 1561158
ccacuuuaguuacaaggga

SEQ ID NO: 1650986 - RNA, 19 nt, Artificial Sequence
  Description of Artificial Sequence: Synthetic oligonucleotide
  Antisense strand to SEQ ID NO: 1650985
ucccuuguaacuaaagugg

SEQ ID NO: 1650987 - RNA, 19 nt, Artificial Sequence
  Description of Artificial Sequence: Synthetic oligonucleotide
  Sense strand starting at position 3502 of SEQ ID NO: 1561158
gcgggaagagaccgauaau

SEQ ID NO: 1650988 - RNA, 19 nt, Artificial Sequence
  Description of Artificial Sequence: Synthetic oligonucleotide
  Antisense strand to SEQ ID NO: 1650987
auuaucggucucuucccgc

SEQ ID NO: 1650989 - RNA, 19 nt, Artificial Sequence
  Description of Artificial Sequence: Synthetic oligonucleotide
  Sense strand starting at position 3591 of SEQ ID NO: 1561158
ugaucaaaugcucgcagau

SEQ ID NO: 1650990 - RNA, 19 nt, Artificial Sequence
  Description of Artificial Sequence: Synthetic oligonucleotide
  Antisense strand to SEQ ID NO: 1650989
aucugcgagcauuugauca

SEQ ID NO: 1650991 - RNA, 19 nt, Artificial Sequence
  Description of Artificial Sequence: Synthetic oligonucleotide
  Sense strand starting at position 3604 of SEQ ID NO: 1561158
gcagaugagaaauggccaa

SEQ ID NO: 1650992 - RNA, 19 nt, Artificial Sequence
  Description of Artificial Sequence: Synthetic oligonucleotide
  Antisense strand to SEQ ID NO: 1650991
uuggccauuucucaucugc

SEQ ID NO: 1650993 - RNA, 19 nt, Artificial Sequence
  Description of Artificial Sequence: Synthetic oligonucleotide
  Sense strand starting at position 3619 of SEQ ID NO: 1561158
ccaagcuaaugucuuuaga

SEQ ID NO: 1650994 - RNA, 19 nt, Artificial Sequence
  Description of Artificial Sequence: Synthetic oligonucleotide
  Antisense strand to SEQ ID NO: 1650993
ucuaaagacauuagcuugg

SEQ ID NO: 1650995 - RNA, 19 nt, Artificial Sequence
  Description of Artificial Sequence: Synthetic oligonucleotide
  Sense strand starting at position 3622 of SEQ ID NO: 1561158
agcuaaugucuuuagaaga

SEQ ID NO: 1650996 - RNA, 19 nt, Artificial Sequence
  Description of Artificial Sequence: Synthetic oligonucleotide
  Antisense strand to SEQ ID NO: 1650995
ucuucuaaagacauuagcu

SEQ ID NO: 1650997 - RNA, 19 nt, Artificial Sequence
  Description of Artificial Sequence: Synthetic oligonucleotide
  Sense strand starting at position 3705 of SEQ ID NO: 1561158
ggaguggugcuggguacaa

SEQ ID NO: 1650998 - RNA, 19 nt, Artificial Sequence
  Description of Artificial Sequence: Synthetic oligonucleotide
  Antisense strand to SEQ ID NO: 1650997
uuguacccagcaccacucc

SEQ ID NO: 1650999 - RNA, 19 nt, Artificial Sequence
  Description of Artificial Sequence: Synthetic oligonucleotide
  Sense strand starting at position 3793 of SEQ ID NO: 1561158
caacaauggccacguugua

SEQ ID NO: 1651000 - RNA, 19 nt, Artificial Sequence
  Description of Artificial Sequence: Synthetic oligonucleotide
  Antisense strand to SEQ ID NO: 1650999
uacaacguggccauuguug

SEQ ID NO: 1651001 - RNA, 19 nt, Artificial Sequence
  Description of Artificial Sequence: Synthetic oligonucleotide
  Sense strand starting at position 3806 of SEQ ID NO: 1561158
guuguagauugaucgccuu

SEQ ID NO: 1651002 - RNA, 19 nt, Artificial Sequence
  Description of Artificial Sequence: Synthetic oligonucleotide
  Antisense strand to SEQ ID NO: 1651001
aaggcgaucaaucuacaac

SEQ ID NO: 1651003 - RNA, 19 nt, Artificial Sequence
  Description of Artificial Sequence: Synthetic oligonucleotide
  Sense strand starting at position 3809 of SEQ ID NO: 1561158
guagauugaucgccuugag

SEQ ID NO: 1651004 - RNA, 19 nt, Artificial Sequence
  Description of Artificial Sequence: Synthetic oligonucleotide
  Antisense strand to SEQ ID NO: 1651003
cucaaggcgaucaaucuac

SEQ ID NO: 1651005 - RNA, 19 nt, Artificial Sequence
  Description of Artificial Sequence: Synthetic oligonucleotide
  Sense strand starting at position 3812 of SEQ ID NO: 1561158
gauugaucgccuugaggug

SEQ ID NO: 1651006 - RNA, 19 nt, Artificial Sequence
  Description of Artificial Sequence: Synthetic oligonucleotide
  Antisense strand to SEQ ID NO: 1651005
caccucaaggcgaucaauc

SEQ ID NO: 1651007 - RNA, 19 nt, Artificial Sequence
  Description of Artificial Sequence: Synthetic oligonucleotide
  Sense strand starting at position 3824 of SEQ ID NO: 1561158
ugaggugaucucuggaguu

SEQ ID NO: 1651008 - RNA, 19 nt, Artificial Sequence
  Description of Artificial Sequence: Synthetic oligonucleotide
  Antisense strand to SEQ ID NO: 1651007
aacuccagagaucaccuca

SEQ ID NO: 1651009 - RNA, 19 nt, Artificial Sequence
  Description of Artificial Sequence: Synthetic oligonucleotide
  Sense strand starting at position 3851 of SEQ ID NO: 1561158
ggguuuccauaccuaguuu

SEQ ID NO: 1651010 - RNA, 19 nt, Artificial Sequence
  Description of Artificial Sequence: Synthetic oligonucleotide
  Antisense strand to SEQ ID NO: 1651009
aaacuagguauggaaaccc

SEQ ID NO: 1651011 - RNA, 19 nt, Artificial Sequence
  Description of Artificial Sequence: Synthetic oligonucleotide
  Sense strand starting at position 660 of SEQ ID NO: 1561159
gccaguuucuucugccagu

SEQ ID NO: 1651012 - RNA, 19 nt, Artificial Sequence
  Description of Artificial Sequence: Synthetic oligonucleotide
  Antisense strand to SEQ ID NO: 1651011
acuggcagaagaaacuggc

SEQ ID NO: 1651013 - RNA, 19 nt, Artificial Sequence
  Description of Artificial Sequence: Synthetic oligonucleotide
  Sense strand starting at position 784 of SEQ ID NO: 1561159
gggugaccuccuuggcgua

SEQ ID NO: 1651014 - RNA, 19 nt, Artificial Sequence
  Description of Artificial Sequence: Synthetic oligonucleotide
  Antisense strand to SEQ ID NO: 1651013
uacgccaaggaggucaccc

SEQ ID NO: 1651015 - RNA, 19 nt, Artificial Sequence
  Description of Artificial Sequence: Synthetic oligonucleotide
  Sense strand starting at position 994 of SEQ ID NO: 1561159
gcuccaugucgauagucuu

SEQ ID NO: 1651016 - RNA, 19 nt, Artificial Sequence
  Description of Artificial Sequence: Synthetic oligonucleotide
  Antisense strand to SEQ ID NO: 1651015
aagacuaucgacauggagc

SEQ ID NO: 1651017 - RNA, 19 nt, Artificial Sequence
  Description of Artificial Sequence: Synthetic oligonucleotide
  Sense strand starting at position 1000 of SEQ ID NO: 1561159
ugucgauagucuugcaggu

SEQ ID NO: 1651018 - RNA, 19 nt, Artificial Sequence
  Description of Artificial Sequence: Synthetic oligonucleotide
  Antisense strand to SEQ ID NO: 1651017
accugcaagacuaucgaca

SEQ ID NO: 1651019 - RNA, 19 nt, Artificial Sequence
  Description of Artificial Sequence: Synthetic oligonucleotide
  Sense strand starting at position 1004 of SEQ ID NO: 1561159
gauagucuugcagguggau

SEQ ID NO: 1651020 - RNA, 19 nt, Artificial Sequence
  Description of Artificial Sequence: Synthetic oligonucleotide
  Antisense strand to SEQ ID NO: 1651019
auccaccugcaagacuauc

SEQ ID NO: 1651021 - RNA, 19 nt, Artificial Sequence
  Description of Artificial Sequence: Synthetic oligonucleotide
  Sense strand starting at position 1288 of SEQ ID NO: 1561159
gucucaguaucccacggaa

SEQ ID NO: 1651022 - RNA, 19 nt, Artificial Sequence
  Description of Artificial Sequence: Synthetic oligonucleotide
  Antisense strand to SEQ ID NO: 1651021
uuccgugggauacugagac

SEQ ID NO: 1651023 - RNA, 19 nt, Artificial Sequence
  Description of Artificial Sequence: Synthetic oligonucleotide
  Sense strand starting at position 1290 of SEQ ID NO: 1561159
cucaguaucccacggaaau

SEQ ID NO: 1651024 - RNA, 19 nt, Artificial Sequence
  Description of Artificial Sequence: Synthetic oligonucleotide
  Antisense strand to SEQ ID NO: 1651023
auuuccgugggauacugag

SEQ ID NO: 1651025 - RNA, 19 nt, Artificial Sequence
  Description of Artificial Sequence: Synthetic oligonucleotide
  Sense strand starting at position 1291 of SEQ ID NO: 1561159
ucaguaucccacggaaaua

SEQ ID NO: 1651026 - RNA, 19 nt, Artificial Sequence
  Description of Artificial Sequence: Synthetic oligonucleotide
  Antisense strand to SEQ ID NO: 1651025
uauuuccgugggauacuga

SEQ ID NO: 1651027 - RNA, 19 nt, Artificial Sequence
  Description of Artificial Sequence: Synthetic oligonucleotide
  Sense strand starting at position 1336 of SEQ ID NO: 1561159
gaagguggguggucuugaa

SEQ ID NO: 1651028 - RNA, 19 nt, Artificial Sequence
  Description of Artificial Sequence: Synthetic oligonucleotide
  Antisense strand to SEQ ID NO: 1651027
uucaagaccacccaccuuc

SEQ ID NO: 1651029 - RNA, 19 nt, Artificial Sequence
  Description of Artificial Sequence: Synthetic oligonucleotide
  Sense strand starting at position 1339 of SEQ ID NO: 1561159
gguggguggucuugaauag

SEQ ID NO: 1651030 - RNA, 19 nt, Artificial Sequence
  Description of Artificial Sequence: Synthetic oligonucleotide
  Antisense strand to SEQ ID NO: 1651029
cuauucaagaccacccacc

SEQ ID NO: 1651031 - RNA, 19 nt, Artificial Sequence
  Description of Artificial Sequence: Synthetic oligonucleotide
  Sense strand starting at position 1383 of SEQ ID NO: 1561159
auccgucuccuggaggaga

SEQ ID NO: 1651032 - RNA, 19 nt, Artificial Sequence
  Description of Artificial Sequence: Synthetic oligonucleotide
  Antisense strand to SEQ ID NO: 1651031
ucuccuccaggagacggau

SEQ ID NO: 1651033 - RNA, 19 nt, Artificial Sequence
  Description of Artificial Sequence: Synthetic oligonucleotide
  Sense strand starting at position 2388 of SEQ ID NO: 1561159
agaagagggucugucaaca

SEQ ID NO: 1651034 - RNA, 19 nt, Artificial Sequence
  Description of Artificial Sequence: Synthetic oligonucleotide
  Antisense strand to SEQ ID NO: 1651033
uguugacagacccucuucu

SEQ ID NO: 1651035 - RNA, 19 nt, Artificial Sequence
  Description of Artificial Sequence: Synthetic oligonucleotide
  Sense strand starting at position 2665 of SEQ ID NO: 1561159
cucugacagucucuagagu

SEQ ID NO: 1651036 - RNA, 19 nt, Artificial Sequence
  Description of Artificial Sequence: Synthetic oligonucleotide
  Antisense strand to SEQ ID NO: 1651035
acucuagagacugucagag

SEQ ID NO: 1651037 - RNA, 19 nt, Artificial Sequence
  Description of Artificial Sequence: Synthetic oligonucleotide
  Sense strand starting at position 3121 of SEQ ID NO: 1561159
ggaccagacuccugcugau

SEQ ID NO: 1651038 - RNA, 19 nt, Artificial Sequence
  Description of Artificial Sequence: Synthetic oligonucleotide
  Antisense strand to SEQ ID NO: 1651037
aucagcaggagucuggucc

SEQ ID NO: 1651039 - RNA, 19 nt, Artificial Sequence
  Description of Artificial Sequence: Synthetic oligonucleotide
  Sense strand starting at position 3148 of SEQ ID NO: 1561159
cccugauacucacuggaga

SEQ ID NO: 1651040 - RNA, 19 nt, Artificial Sequence
  Description of Artificial Sequence: Synthetic oligonucleotide
  Antisense strand to SEQ ID NO: 1651039
ucuccagugaguaucaggg

SEQ ID NO: 1651041 - RNA, 19 nt, Artificial Sequence
  Description of Artificial Sequence: Synthetic oligonucleotide
  Sense strand starting at position 3192 of SEQ ID NO: 1561159
ggguuucugucccagaguu

SEQ ID NO: 1651042 - RNA, 19 nt, Artificial Sequence
  Description of Artificial Sequence: Synthetic oligonucleotide
  Antisense strand to SEQ ID NO: 1651041
aacucugggacagaaaccc

SEQ ID NO: 1651043 - RNA, 19 nt, Artificial Sequence
  Description of Artificial Sequence: Synthetic oligonucleotide
  Sense strand starting at position 3194 of SEQ ID NO: 1561159
guuucugucccagaguuuc

SEQ ID NO: 1651044 - RNA, 19 nt, Artificial Sequence
  Description of Artificial Sequence: Synthetic oligonucleotide
  Antisense strand to SEQ ID NO: 1651043
gaaacucugggacagaaac

SEQ ID NO: 1651045 - RNA, 19 nt, Artificial Sequence
  Description of Artificial Sequence: Synthetic oligonucleotide
  Sense strand starting at position 3234 of SEQ ID NO: 1561159
cucccaccgucuuaucuau

SEQ ID NO: 1651046 - RNA, 19 nt, Artificial Sequence
  Description of Artificial Sequence: Synthetic oligonucleotide
  Antisense strand to SEQ ID NO: 1651045
auagauaagacggugggag

SEQ ID NO: 1651047 - RNA, 19 nt, Artificial Sequence
  Description of Artificial Sequence: Synthetic oligonucleotide
  Sense strand starting at position 3300 of SEQ ID NO: 1561159
ugcuaaggauccuuccaua

SEQ ID NO: 1651048 - RNA, 19 nt, Artificial Sequence
  Description of Artificial Sequence: Synthetic oligonucleotide
  Antisense strand to SEQ ID NO: 1651047
uauggaaggauccuuagca

SEQ ID NO: 1651049 - RNA, 19 nt, Artificial Sequence
  Description of Artificial Sequence: Synthetic oligonucleotide
  Sense strand starting at position 3376 of SEQ ID NO: 1561159
ucagaccucugcugaauuu

SEQ ID NO: 1651050 - RNA, 19 nt, Artificial Sequence
  Description of Artificial Sequence: Synthetic oligonucleotide
  Antisense strand to SEQ ID NO: 1651049
aaauucagcagaggucuga

SEQ ID NO: 1651051 - RNA, 19 nt, Artificial Sequence
  Description of Artificial Sequence: Synthetic oligonucleotide
  Sense strand starting at position 3385 of SEQ ID NO: 1561159
ugcugaauuuccucucugu

SEQ ID NO: 1651052 - RNA, 19 nt, Artificial Sequence
  Description of Artificial Sequence: Synthetic oligonucleotide
  Antisense strand to SEQ ID NO: 1651051
acagagaggaaauucagca

SEQ ID NO: 1651053 - RNA, 19 nt, Artificial Sequence
  Description of Artificial Sequence: Synthetic oligonucleotide
  Sense strand starting at position 3402 of SEQ ID NO: 1561159
guguuauccuccuccauga

SEQ ID NO: 1651054 - RNA, 19 nt, Artificial Sequence
  Description of Artificial Sequence: Synthetic oligonucleotide
  Antisense strand to SEQ ID NO: 1651053
ucauggaggaggauaacac

SEQ ID NO: 1651055 - RNA, 19 nt, Artificial Sequence
  Description of Artificial Sequence: Synthetic oligonucleotide
  Sense strand starting at position 3609 of SEQ ID NO: 1561159
ugcccauguccucagaaca

SEQ ID NO: 1651056 - RNA, 19 nt, Artificial Sequence
  Description of Artificial Sequence: Synthetic oligonucleotide
  Antisense strand to SEQ ID NO: 1651055
uguucugaggacaugggca

SEQ ID NO: 1651057 - RNA, 19 nt, Artificial Sequence
  Description of Artificial Sequence: Synthetic oligonucleotide
  Sense strand starting at position 3637 of SEQ ID NO: 1561159
uccucagucugguagucaa

SEQ ID NO: 1651058 - RNA, 19 nt, Artificial Sequence
  Description of Artificial Sequence: Synthetic oligonucleotide
  Antisense strand to SEQ ID NO: 1651057
uugacuaccagacugagga

SEQ ID NO: 1651059 - RNA, 19 nt, Artificial Sequence
  Description of Artificial Sequence: Synthetic oligonucleotide
  Sense strand starting at position 3694 of SEQ ID NO: 1561159
ucccuucuccugugcuaga

SEQ ID NO: 1651060 - RNA, 19 nt, Artificial Sequence
  Description of Artificial Sequence: Synthetic oligonucleotide
  Antisense strand to SEQ ID NO: 1651059
ucuagcacaggagaaggga

SEQ ID NO: 1651061 - RNA, 19 nt, Artificial Sequence
  Description of Artificial Sequence: Synthetic oligonucleotide
  Sense strand starting at position 3707 of SEQ ID NO: 1561159
gcuagacucuguucuagcu

SEQ ID NO: 1651062 - RNA, 19 nt, Artificial Sequence
  Description of Artificial Sequence: Synthetic oligonucleotide
  Antisense strand to SEQ ID NO: 1651061
agcuagaacagagucuagc

SEQ ID NO: 1651063 - RNA, 19 nt, Artificial Sequence
  Description of Artificial Sequence: Synthetic oligonucleotide
  Sense strand starting at position 3778 of SEQ ID NO: 1561159
ccgugaagcugauauccua

SEQ ID NO: 1651064 - RNA, 19 nt, Artificial Sequence
  Description of Artificial Sequence: Synthetic oligonucleotide
  Antisense strand to SEQ ID NO: 1651063
uaggauaucagcuucacgg

SEQ ID NO: 1651065 - RNA, 19 nt, Artificial Sequence
  Description of Artificial Sequence: Synthetic oligonucleotide
  Sense strand starting at position 3794 of SEQ ID NO: 1561159
cuagacaacgaauguagua

SEQ ID NO: 1651066 - RNA, 19 nt, Artificial Sequence
  Description of Artificial Sequence: Synthetic oligonucleotide
  Antisense strand to SEQ ID NO: 1651065
uacuacauucguugucuag

SEQ ID NO: 1651067 - RNA, 19 nt, Artificial Sequence
  Description of Artificial Sequence: Synthetic oligonucleotide
  Sense strand starting at position 3799 of SEQ ID NO: 1561159
caacgaauguaguaaauaa

SEQ ID NO: 1651068 - RNA, 19 nt, Artificial Sequence
  Description of Artificial Sequence: Synthetic oligonucleotide
  Antisense strand to SEQ ID NO: 1651067
uuauuuacuacauucguug

SEQ ID NO: 1651069 - RNA, 19 nt, Artificial Sequence
  Description of Artificial Sequence: Synthetic oligonucleotide
  Sense strand starting at position 3817 of SEQ ID NO: 1561159
agcaaauuauaggguagau

SEQ ID NO: 1651070 - RNA, 19 nt, Artificial Sequence
  Description of Artificial Sequence: Synthetic oligonucleotide
  Antisense strand to SEQ ID NO: 1651069
aucuacccuauaauuugcu

SEQ ID NO: 1651071 - RNA, 19 nt, Artificial Sequence
  Description of Artificial Sequence: Synthetic oligonucleotide
  Sense strand starting at position 3829 of SEQ ID NO: 1561159
gguagaucagaugguggua

SEQ ID NO: 1651072 - RNA, 19 nt, Artificial Sequence
  Description of Artificial Sequence: Synthetic oligonucleotide
  Antisense strand to SEQ ID NO: 1651071
uaccaccaucugaucuacc

SEQ ID NO: 1651073 - RNA, 19 nt, Artificial Sequence
  Description of Artificial Sequence: Synthetic oligonucleotide
  Sense strand starting at position 3831 of SEQ ID NO: 1561159
uagaucagauggugguaau

SEQ ID NO: 1651074 - RNA, 19 nt, Artificial Sequence
  Description of Artificial Sequence: Synthetic oligonucleotide
  Antisense strand to SEQ ID NO: 1651073
auuaccaccaucugaucua

SEQ ID NO: 1651075 - RNA, 19 nt, Artificial Sequence
  Description of Artificial Sequence: Synthetic oligonucleotide
  Sense strand starting at position 3832 of SEQ ID NO: 1561159
agaucagauggugguaauu

SEQ ID NO: 1651076 - RNA, 19 nt, Artificial Sequence
  Description of Artificial Sequence: Synthetic oligonucleotide
  Antisense strand to SEQ ID NO: 1651075
aauuaccaccaucugaucu

SEQ ID NO: 1651077 - RNA, 19 nt, Artificial Sequence
  Description of Artificial Sequence: Synthetic oligonucleotide
  Sense strand starting at position 3843 of SEQ ID NO: 1561159
ugguaauugcugugaggga

SEQ ID NO: 1651078 - RNA, 19 nt, Artificial Sequence
  Description of Artificial Sequence: Synthetic oligonucleotide
  Antisense strand to SEQ ID NO: 1651077
ucccucacagcaauuacca

SEQ ID NO: 1651079 - RNA, 19 nt, Artificial Sequence
  Description of Artificial Sequence: Synthetic oligonucleotide
  Sense strand starting at position 3844 of SEQ ID NO: 1561159
gguaauugcugugagggaa

SEQ ID NO: 1651080 - RNA, 19 nt, Artificial Sequence
  Description of Artificial Sequence: Synthetic oligonucleotide
  Antisense strand to SEQ ID NO: 1651079
uucccucacagcaauuacc

SEQ ID NO: 1651081 - RNA, 19 nt, Artificial Sequence
  Description of Artificial Sequence: Synthetic oligonucleotide
  Sense strand starting at position 3888 of SEQ ID NO: 1561159
gggauaccgcuuuagcaag

SEQ ID NO: 1651082 - RNA, 19 nt, Artificial Sequence
  Description of Artificial Sequence: Synthetic oligonucleotide
  Antisense strand to SEQ ID NO: 1651081
cuugcuaaagcgguauccc

SEQ ID NO: 1651083 - RNA, 19 nt, Artificial Sequence
  Description of Artificial Sequence: Synthetic oligonucleotide
  Sense strand starting at position 1001 of SEQ ID NO: 1561160
ggauuccagagcuguccau

SEQ ID NO: 1651084 - RNA, 19 nt, Artificial Sequence
  Description of Artificial Sequence: Synthetic oligonucleotide
  Antisense strand to SEQ ID NO: 1651083
auggacagcucuggaaucc

SEQ ID NO: 1651085 - RNA, 19 nt, Artificial Sequence
  Description of Artificial Sequence: Synthetic oligonucleotide
  Sense strand starting at position 1047 of SEQ ID NO: 1561160
cggagaaacucugucggca

SEQ ID NO: 1651086 - RNA, 19 nt, Artificial Sequence
  Description of Artificial Sequence: Synthetic oligonucleotide
  Antisense strand to SEQ ID NO: 1651085
ugccgacagaguuucuccg

SEQ ID NO: 1651087 - RNA, 19 nt, Artificial Sequence
  Description of Artificial Sequence: Synthetic oligonucleotide
  Sense strand starting at position 1049 of SEQ ID NO: 1561160
gagaaacucugucggcaga

SEQ ID NO: 1651088 - RNA, 19 nt, Artificial Sequence
  Description of Artificial Sequence: Synthetic oligonucleotide
  Antisense strand to SEQ ID NO: 1651087
ucugccgacagaguuucuc

SEQ ID NO: 1651089 - RNA, 19 nt, Artificial Sequence
  Description of Artificial Sequence: Synthetic oligonucleotide
  Sense strand starting at position 1051 of SEQ ID NO: 1561160
gaaacucugucggcagaga

SEQ ID NO: 1651090 - RNA, 19 nt, Artificial Sequence
  Description of Artificial Sequence: Synthetic oligonucleotide
  Antisense strand to SEQ ID NO: 1651089
ucucugccgacagaguuuc

SEQ ID NO: 1651091 - RNA, 19 nt, Artificial Sequence
  Description of Artificial Sequence: Synthetic oligonucleotide
  Sense strand starting at position 1052 of SEQ ID NO: 1561160
aaacucugucggcagagau

SEQ ID NO: 1651092 - RNA, 19 nt, Artificial Sequence
  Description of Artificial Sequence: Synthetic oligonucleotide
  Antisense strand to SEQ ID NO: 1651091
aucucugccgacagaguuu

SEQ ID NO: 1651093 - RNA, 19 nt, Artificial Sequence
  Description of Artificial Sequence: Synthetic oligonucleotide
  Sense strand starting at position 1118 of SEQ ID NO: 1561160
agaguauccucuuuccacu

SEQ ID NO: 1651094 - RNA, 19 nt, Artificial Sequence
  Description of Artificial Sequence: Synthetic oligonucleotide
  Antisense strand to SEQ ID NO: 1651093
aguggaaagaggauacucu

SEQ ID NO: 1651095 - RNA, 19 nt, Artificial Sequence
  Description of Artificial Sequence: Synthetic oligonucleotide
  Sense strand starting at position 2373 of SEQ ID NO: 1561160
acgaaagauugccugcaca

SEQ ID NO: 1651096 - RNA, 19 nt, Artificial Sequence
  Description of Artificial Sequence: Synthetic oligonucleotide
  Antisense strand to SEQ ID NO: 1651095
ugugcaggcaaucuuucgu

SEQ ID NO: 1651097 - RNA, 19 nt, Artificial Sequence
  Description of Artificial Sequence: Synthetic oligonucleotide
  Sense strand starting at position 2516 of SEQ ID NO: 1561160
ucgaguagcuaugaccaca

SEQ ID NO: 1651098 - RNA, 19 nt, Artificial Sequence
  Description of Artificial Sequence: Synthetic oligonucleotide
  Antisense strand to SEQ ID NO: 1651097
uguggucauagcuacucga

SEQ ID NO: 1651099 - RNA, 19 nt, Artificial Sequence
  Description of Artificial Sequence: Synthetic oligonucleotide
  Sense strand starting at position 2840 of SEQ ID NO: 1561160
ccaccaaaggucuaguuga

SEQ ID NO: 1651100 - RNA, 19 nt, Artificial Sequence
  Description of Artificial Sequence: Synthetic oligonucleotide
  Antisense strand to SEQ ID NO: 1651099
ucaacuagaccuuuggugg

SEQ ID NO: 1651101 - RNA, 19 nt, Artificial Sequence
  Description of Artificial Sequence: Synthetic oligonucleotide
  Sense strand starting at position 3300 of SEQ ID NO: 1561160
agcugaggucggaguguuu

SEQ ID NO: 1651102 - RNA, 19 nt, Artificial Sequence
  Description of Artificial Sequence: Synthetic oligonucleotide
  Antisense strand to SEQ ID NO: 1651101
aaacacuccgaccucagcu

SEQ ID NO: 1651103 - RNA, 19 nt, Artificial Sequence
  Description of Artificial Sequence: Synthetic oligonucleotide
  Sense strand starting at position 3659 of SEQ ID NO: 1561160
cacagacucgguggaagaa

SEQ ID NO: 1651104 - RNA, 19 nt, Artificial Sequence
  Description of Artificial Sequence: Synthetic oligonucleotide
  Antisense strand to SEQ ID NO: 1651103
uucuuccaccgagucugug

SEQ ID NO: 1651105 - RNA, 19 nt, Artificial Sequence
  Description of Artificial Sequence: Synthetic oligonucleotide
  Sense strand starting at position 24 of SEQ ID NO: 1561161
ucauucuuacuugauguga

SEQ ID NO: 1651106 - RNA, 19 nt, Artificial Sequence
  Description of Artificial Sequence: Synthetic oligonucleotide
  Antisense strand to SEQ ID NO: 1651105
ucacaucaaguaagaauga

SEQ ID NO: 1651107 - RNA, 19 nt, Artificial Sequence
  Description of Artificial Sequence: Synthetic oligonucleotide
  Sense strand starting at position 49 of SEQ ID NO: 1561161
acagcaaaguuugugauca

SEQ ID NO: 1651108 - RNA, 19 nt, Artificial Sequence
  Description of Artificial Sequence: Synthetic oligonucleotide
  Antisense strand to SEQ ID NO: 1651107
ugaucacaaacuuugcugu

SEQ ID NO: 1651109 - RNA, 19 nt, Artificial Sequence
  Description of Artificial Sequence: Synthetic oligonucleotide
  Sense strand starting at position 59 of SEQ ID NO: 1561161
uugugaucaucucugacuu

SEQ ID NO: 1651110 - RNA, 19 nt, Artificial Sequence
  Description of Artificial Sequence: Synthetic oligonucleotide
  Antisense strand to SEQ ID NO: 1651109
aagucagagaugaucacaa

SEQ ID NO: 1651111 - RNA, 19 nt, Artificial Sequence
  Description of Artificial Sequence: Synthetic oligonucleotide
  Sense strand starting at position 60 of SEQ ID NO: 1561161
ugugaucaucucugacuuu

SEQ ID NO: 1651112 - RNA, 19 nt, Artificial Sequence
  Description of Artificial Sequence: Synthetic oligonucleotide
  Antisense strand to SEQ ID NO: 1651111
aaagucagagaugaucaca

SEQ ID NO: 1651113 - RNA, 19 nt, Artificial Sequence
  Description of Artificial Sequence: Synthetic oligonucleotide
  Sense strand starting at position 90 of SEQ ID NO: 1561161
guuuccuacuaagaaagca

SEQ ID NO: 1651114 - RNA, 19 nt, Artificial Sequence
  Description of Artificial Sequence: Synthetic oligonucleotide
  Antisense strand to SEQ ID NO: 1651113
ugcuuucuuaguaggaaac

SEQ ID NO: 1651115 - RNA, 19 nt, Artificial Sequence
  Description of Artificial Sequence: Synthetic oligonucleotide
  Sense strand starting at position 427 of SEQ ID NO: 1561161
cacggaguagcuggaauua

SEQ ID NO: 1651116 - RNA, 19 nt, Artificial Sequence
  Description of Artificial Sequence: Synthetic oligonucleotide
  Antisense strand to SEQ ID NO: 1651115
uaauuccagcuacuccgug

SEQ ID NO: 1651117 - RNA, 19 nt, Artificial Sequence
  Description of Artificial Sequence: Synthetic oligonucleotide
  Sense strand starting at position 849 of SEQ ID NO: 1561161
uggcuuaugucagccagau

SEQ ID NO: 1651118 - RNA, 19 nt, Artificial Sequence
  Description of Artificial Sequence: Synthetic oligonucleotide
  Antisense strand to SEQ ID NO: 1651117
aucuggcugacauaagcca

SEQ ID NO: 1651119 - RNA, 19 nt, Artificial Sequence
  Description of Artificial Sequence: Synthetic oligonucleotide
  Sense strand starting at position 853 of SEQ ID NO: 1561161
uuaugucagccagauaaau

SEQ ID NO: 1651120 - RNA, 19 nt, Artificial Sequence
  Description of Artificial Sequence: Synthetic oligonucleotide
  Antisense strand to SEQ ID NO: 1651119
auuuaucuggcugacauaa

SEQ ID NO: 1651121 - RNA, 19 nt, Artificial Sequence
  Description of Artificial Sequence: Synthetic oligonucleotide
  Sense strand starting at position 862 of SEQ ID NO: 1561161
ccagauaaauaaggagaca

SEQ ID NO: 1651122 - RNA, 19 nt, Artificial Sequence
  Description of Artificial Sequence: Synthetic oligonucleotide
  Antisense strand to SEQ ID NO: 1651121
ugucuccuuauuuaucugg

SEQ ID NO: 1651123 - RNA, 19 nt, Artificial Sequence
  Description of Artificial Sequence: Synthetic oligonucleotide
  Sense strand starting at position 912 of SEQ ID NO: 1561161
ucccaaguaugacgaaaga

SEQ ID NO: 1651124 - RNA, 19 nt, Artificial Sequence
  Description of Artificial Sequence: Synthetic oligonucleotide
  Antisense strand to SEQ ID NO: 1651123
ucuuucgucauacuuggga

SEQ ID NO: 1651125 - RNA, 19 nt, Artificial Sequence
  Description of Artificial Sequence: Synthetic oligonucleotide
  Sense strand starting at position 1157 of SEQ ID NO: 1561161
gcucgcuaucuguagucaa

SEQ ID NO: 1651126 - RNA, 19 nt, Artificial Sequence
  Description of Artificial Sequence: Synthetic oligonucleotide
  Antisense strand to SEQ ID NO: 1651125
uugacuacagauagcgagc

SEQ ID NO: 1651127 - RNA, 19 nt, Artificial Sequence
  Description of Artificial Sequence: Synthetic oligonucleotide
  Sense strand starting at position 1201 of SEQ ID NO: 1561161
gcaccuuuguaugugcaau

SEQ ID NO: 1651128 - RNA, 19 nt, Artificial Sequence
  Description of Artificial Sequence: Synthetic oligonucleotide
  Antisense strand to SEQ ID NO: 1651127
auugcacauacaaaggugc

SEQ ID NO: 1651129 - RNA, 19 nt, Artificial Sequence
  Description of Artificial Sequence: Synthetic oligonucleotide
  Sense strand starting at position 1843 of SEQ ID NO: 1561161
gcacauaguuccucuaggu

SEQ ID NO: 1651130 - RNA, 19 nt, Artificial Sequence
  Description of Artificial Sequence: Synthetic oligonucleotide
  Antisense strand to SEQ ID NO: 1651129
accuagaggaacuaugugc

SEQ ID NO: 1651131 - RNA, 19 nt, Artificial Sequence
  Description of Artificial Sequence: Synthetic oligonucleotide
  Sense strand starting at position 1889 of SEQ ID NO: 1561161
guggccuuagccucguaaa

SEQ ID NO: 1651132 - RNA, 19 nt, Artificial Sequence
  Description of Artificial Sequence: Synthetic oligonucleotide
  Antisense strand to SEQ ID NO: 1651131
uuuacgaggcuaaggccac

SEQ ID NO: 1651133 - RNA, 19 nt, Artificial Sequence
  Description of Artificial Sequence: Synthetic oligonucleotide
  Sense strand starting at position 1940 of SEQ ID NO: 1561161
aaacgcagucuggaugaaa

SEQ ID NO: 1651134 - RNA, 19 nt, Artificial Sequence
  Description of Artificial Sequence: Synthetic oligonucleotide
  Antisense strand to SEQ ID NO: 1651133
uuucauccagacugcguuu

SEQ ID NO: 1651135 - RNA, 19 nt, Artificial Sequence
  Description of Artificial Sequence: Synthetic oligonucleotide
  Sense strand starting at position 2387 of SEQ ID NO: 1561161
gugagaagcugcucgccau

SEQ ID NO: 1651136 - RNA, 19 nt, Artificial Sequence
  Description of Artificial Sequence: Synthetic oligonucleotide
  Antisense strand to SEQ ID NO: 1651135
auggcgagcagcuucucac

SEQ ID NO: 1651137 - RNA, 19 nt, Artificial Sequence
  Description of Artificial Sequence: Synthetic oligonucleotide
  Sense strand starting at position 2617 of SEQ ID NO: 1561161
gguucccacccguggaaau

SEQ ID NO: 1651138 - RNA, 19 nt, Artificial Sequence
  Description of Artificial Sequence: Synthetic oligonucleotide
  Antisense strand to SEQ ID NO: 1651137
auuuccacgggugggaacc

SEQ ID NO: 1651139 - RNA, 19 nt, Artificial Sequence
  Description of Artificial Sequence: Synthetic oligonucleotide
  Sense strand starting at position 2693 of SEQ ID NO: 1561161
cgccuuuagacgucacgau

SEQ ID NO: 1651140 - RNA, 19 nt, Artificial Sequence
  Description of Artificial Sequence: Synthetic oligonucleotide
  Antisense strand to SEQ ID NO: 1651139
aucgugacgucuaaaggcg

SEQ ID NO: 1651141 - RNA, 19 nt, Artificial Sequence
  Description of Artificial Sequence: Synthetic oligonucleotide
  Sense strand starting at position 2697 of SEQ ID NO: 1561161
uuuagacgucacgaucaua

SEQ ID NO: 1651142 - RNA, 19 nt, Artificial Sequence
  Description of Artificial Sequence: Synthetic oligonucleotide
  Antisense strand to SEQ ID NO: 1651141
uaugaucgugacgucuaaa

SEQ ID NO: 1651143 - RNA, 19 nt, Artificial Sequence
  Description of Artificial Sequence: Synthetic oligonucleotide
  Sense strand starting at position 2743 of SEQ ID NO: 1561161
cccgcugagucauuaaggu

SEQ ID NO: 1651144 - RNA, 19 nt, Artificial Sequence
  Description of Artificial Sequence: Synthetic oligonucleotide
  Antisense strand to SEQ ID NO: 1651143
accuuaaugacucagcggg

SEQ ID NO: 1651145 - RNA, 19 nt, Artificial Sequence
  Description of Artificial Sequence: Synthetic oligonucleotide
  Sense strand starting at position 2770 of SEQ ID NO: 1561161
ggguucgguccagaguguu

SEQ ID NO: 1651146 - RNA, 19 nt, Artificial Sequence
  Description of Artificial Sequence: Synthetic oligonucleotide
  Antisense strand to SEQ ID NO: 1651145
aacacucuggaccgaaccc

SEQ ID NO: 1651147 - RNA, 19 nt, Artificial Sequence
  Description of Artificial Sequence: Synthetic oligonucleotide
  Sense strand starting at position 2866 of SEQ ID NO: 1561161
ugggauucuuaauccauau

SEQ ID NO: 1651148 - RNA, 19 nt, Artificial Sequence
  Description of Artificial Sequence: Synthetic oligonucleotide
  Antisense strand to SEQ ID NO: 1651147
auauggauuaagaauccca

SEQ ID NO: 1651149 - RNA, 19 nt, Artificial Sequence
  Description of Artificial Sequence: Synthetic oligonucleotide
  Sense strand starting at position 2973 of SEQ ID NO: 1561161
ccuaaauccugagacagaa

SEQ ID NO: 1651150 - RNA, 19 nt, Artificial Sequence
  Description of Artificial Sequence: Synthetic oligonucleotide
  Antisense strand to SEQ ID NO: 1651149
uucugucucaggauuuagg

SEQ ID NO: 1651151 - RNA, 19 nt, Artificial Sequence
  Description of Artificial Sequence: Synthetic oligonucleotide
  Sense strand starting at position 3176 of SEQ ID NO: 1561161
gugggcuguucaccugaga

SEQ ID NO: 1651152 - RNA, 19 nt, Artificial Sequence
  Description of Artificial Sequence: Synthetic oligonucleotide
  Antisense strand to SEQ ID NO: 1651151
ucucaggugaacagcccac

SEQ ID NO: 1651153 - RNA, 19 nt, Artificial Sequence
  Description of Artificial Sequence: Synthetic oligonucleotide
  Sense strand starting at position 3430 of SEQ ID NO: 1561161
uauugcauuggagggaaau

SEQ ID NO: 1651154 - RNA, 19 nt, Artificial Sequence
  Description of Artificial Sequence: Synthetic oligonucleotide
  Antisense strand to SEQ ID NO: 1651153
auuucccuccaaugcaaua

SEQ ID NO: 1651155 - RNA, 19 nt, Artificial Sequence
  Description of Artificial Sequence: Synthetic oligonucleotide
  Sense strand starting at position 3461 of SEQ ID NO: 1561161
gugaucuucuuggcacgga

SEQ ID NO: 1651156 - RNA, 19 nt, Artificial Sequence
  Description of Artificial Sequence: Synthetic oligonucleotide
  Antisense strand to SEQ ID NO: 1651155
uccgugccaagaagaucac

SEQ ID NO: 1651157 - RNA, 19 nt, Artificial Sequence
  Description of Artificial Sequence: Synthetic oligonucleotide
  Sense strand starting at position 3539 of SEQ ID NO: 1561161
uuucuccugcacugugauu

SEQ ID NO: 1651158 - RNA, 19 nt, Artificial Sequence
  Description of Artificial Sequence: Synthetic oligonucleotide
  Antisense strand to SEQ ID NO: 1651157
aaucacagugcaggagaaa

SEQ ID NO: 1651159 - RNA, 19 nt, Artificial Sequence
  Description of Artificial Sequence: Synthetic oligonucleotide
  Sense strand starting at position 3604 of SEQ ID NO: 1561161
gcucucugucaccaagguu

SEQ ID NO: 1651160 - RNA, 19 nt, Artificial Sequence
  Description of Artificial Sequence: Synthetic oligonucleotide
  Antisense strand to SEQ ID NO: 1651159
aaccuuggugacagagagc

SEQ ID NO: 1651161 - RNA, 19 nt, Artificial Sequence
  Description of Artificial Sequence: Synthetic oligonucleotide
  Sense strand starting at position 3679 of SEQ ID NO: 1561161
uggccuuugugauugguga

SEQ ID NO: 1651162 - RNA, 19 nt, Artificial Sequence
  Description of Artificial Sequence: Synthetic oligonucleotide
  Antisense strand to SEQ ID NO: 1651161
ucaccaaucacaaaggcca

SEQ ID NO: 1651163 - RNA, 19 nt, Artificial Sequence
  Description of Artificial Sequence: Synthetic oligonucleotide
  Sense strand starting at position 3681 of SEQ ID NO: 1561161
gccuuugugauuggugagu

SEQ ID NO: 1651164 - RNA, 19 nt, Artificial Sequence
  Description of Artificial Sequence: Synthetic oligonucleotide
  Antisense strand to SEQ ID NO: 1651163
acucaccaaucacaaaggc

SEQ ID NO: 1651165 - RNA, 19 nt, Artificial Sequence
  Description of Artificial Sequence: Synthetic oligonucleotide
  Sense strand starting at position 3686 of SEQ ID NO: 1561161
ugugauuggugaguccuca

SEQ ID NO: 1651166 - RNA, 19 nt, Artificial Sequence
  Description of Artificial Sequence: Synthetic oligonucleotide
  Antisense strand to SEQ ID NO: 1651165
ugaggacucaccaaucaca

SEQ ID NO: 1651167 - RNA, 19 nt, Artificial Sequence
  Description of Artificial Sequence: Synthetic oligonucleotide
  Sense strand starting at position 3762 of SEQ ID NO: 1561161
gccugaaugucgcuaucuu

SEQ ID NO: 1651168 - RNA, 19 nt, Artificial Sequence
  Description of Artificial Sequence: Synthetic oligonucleotide
  Antisense strand to SEQ ID NO: 1651167
aagauagcgacauucaggc

SEQ ID NO: 1651169 - RNA, 19 nt, Artificial Sequence
  Description of Artificial Sequence: Synthetic oligonucleotide
  Sense strand starting at position 3763 of SEQ ID NO: 1561161
ccugaaugucgcuaucuug

SEQ ID NO: 1651170 - RNA, 19 nt, Artificial Sequence
  Description of Artificial Sequence: Synthetic oligonucleotide
  Antisense strand to SEQ ID NO: 1651169
caagauagcgacauucagg

SEQ ID NO: 1651171 - RNA, 19 nt, Artificial Sequence
  Description of Artificial Sequence: Synthetic oligonucleotide
  Sense strand starting at position 3766 of SEQ ID NO: 1561161
gaaugucgcuaucuugaaa

SEQ ID NO: 1651172 - RNA, 19 nt, Artificial Sequence
  Description of Artificial Sequence: Synthetic oligonucleotide
  Antisense strand to SEQ ID NO: 1651171
uuucaagauagcgacauuc

SEQ ID NO: 1651173 - RNA, 19 nt, Artificial Sequence
  Description of Artificial Sequence: Synthetic oligonucleotide
  Sense strand starting at position 3861 of SEQ ID NO: 1561161
ucuuauauguuccugaaag

SEQ ID NO: 1651174 - RNA, 19 nt, Artificial Sequence
  Description of Artificial Sequence: Synthetic oligonucleotide
  Antisense strand to SEQ ID NO: 1651173
cuuucaggaacauauaaga

SEQ ID NO: 1651175 - RNA, 19 nt, Artificial Sequence
  Description of Artificial Sequence: Synthetic oligonucleotide
  Sense strand starting at position 3863 of SEQ ID NO: 1561161
uuauauguuccugaaagug

SEQ ID NO: 1651176 - RNA, 19 nt, Artificial Sequence
  Description of Artificial Sequence: Synthetic oligonucleotide
  Antisense strand to SEQ ID NO: 1651175
cacuuucaggaacauauaa

SEQ ID NO: 1651177 - RNA, 19 nt, Artificial Sequence
  Description of Artificial Sequence: Synthetic oligonucleotide
  Sense strand starting at position 3871 of SEQ ID NO: 1561161
uccugaaagugcccuuuga

SEQ ID NO: 1651178 - RNA, 19 nt, Artificial Sequence
  Description of Artificial Sequence: Synthetic oligonucleotide
  Antisense strand to SEQ ID NO: 1651177
ucaaagggcacuuucagga

SEQ ID NO: 1651179 - RNA, 19 nt, Artificial Sequence
  Description of Artificial Sequence: Synthetic oligonucleotide
  Sense strand starting at position 3875 of SEQ ID NO: 1561161
gaaagugcccuuugagcua

SEQ ID NO: 1651180 - RNA, 19 nt, Artificial Sequence
  Description of Artificial Sequence: Synthetic oligonucleotide
  Antisense strand to SEQ ID NO: 1651179
uagcucaaagggcacuuuc

SEQ ID NO: 1651181 - RNA, 19 nt, Artificial Sequence
  Description of Artificial Sequence: Synthetic oligonucleotide
  Sense strand starting at position 3878 of SEQ ID NO: 1561161
agugcccuuugagcuauua

SEQ ID NO: 1651182 - RNA, 19 nt, Artificial Sequence
  Description of Artificial Sequence: Synthetic oligonucleotide
  Antisense strand to SEQ ID NO: 1651181
uaauagcucaaagggcacu

SEQ ID NO: 1651183 - RNA, 19 nt, Artificial Sequence
  Description of Artificial Sequence: Synthetic oligonucleotide
  Sense strand starting at position 3983 of SEQ ID NO: 1561161
caggcagccugagcuuaaa

SEQ ID NO: 1651184 - RNA, 19 nt, Artificial Sequence
  Description of Artificial Sequence: Synthetic oligonucleotide
  Antisense strand to SEQ ID NO: 1651183
uuuaagcucaggcugccug

SEQ ID NO: 1651185 - RNA, 19 nt, Artificial Sequence
  Description of Artificial Sequence: Synthetic oligonucleotide
  Sense strand starting at position 155 of SEQ ID NO: 1561162
cccuaaguuugcuggaugu

SEQ ID NO: 1651186 - RNA, 19 nt, Artificial Sequence
  Description of Artificial Sequence: Synthetic oligonucleotide
  Antisense strand to SEQ ID NO: 1651185
acauccagcaaacuuaggg

SEQ ID NO: 1651187 - RNA, 19 nt, Artificial Sequence
  Description of Artificial Sequence: Synthetic oligonucleotide
  Sense strand starting at position 383 of SEQ ID NO: 1561162
ggagcuucuggcugaugga

SEQ ID NO: 1651188 - RNA, 19 nt, Artificial Sequence
  Description of Artificial Sequence: Synthetic oligonucleotide
  Antisense strand to SEQ ID NO: 1651187
uccaucagccagaagcucc

SEQ ID NO: 1651189 - RNA, 19 nt, Artificial Sequence
  Description of Artificial Sequence: Synthetic oligonucleotide
  Sense strand starting at position 413 of SEQ ID NO: 1561162
gggagaauuccacguugaa

SEQ ID NO: 1651190 - RNA, 19 nt, Artificial Sequence
  Description of Artificial Sequence: Synthetic oligonucleotide
  Antisense strand to SEQ ID NO: 1651189
uucaacguggaauucuccc

SEQ ID NO: 1651191 - RNA, 19 nt, Artificial Sequence
  Description of Artificial Sequence: Synthetic oligonucleotide
  Sense strand starting at position 416 of SEQ ID NO: 1561162
agaauuccacguugaaguu

SEQ ID NO: 1651192 - RNA, 19 nt, Artificial Sequence
  Description of Artificial Sequence: Synthetic oligonucleotide
  Antisense strand to SEQ ID NO: 1651191
aacuucaacguggaauucu

SEQ ID NO: 1651193 - RNA, 19 nt, Artificial Sequence
  Description of Artificial Sequence: Synthetic oligonucleotide
  Sense strand starting at position 475 of SEQ ID NO: 1561162
aagcgugggucuugcucaa

SEQ ID NO: 1651194 - RNA, 19 nt, Artificial Sequence
  Description of Artificial Sequence: Synthetic oligonucleotide
  Antisense strand to SEQ ID NO: 1651193
uugagcaagacccacgcuu

SEQ ID NO: 1651195 - RNA, 19 nt, Artificial Sequence
  Description of Artificial Sequence: Synthetic oligonucleotide
  Sense strand starting at position 662 of SEQ ID NO: 1561162
cugugaauuggaggugaga

SEQ ID NO: 1651196 - RNA, 19 nt, Artificial Sequence
  Description of Artificial Sequence: Synthetic oligonucleotide
  Antisense strand to SEQ ID NO: 1651195
ucucaccuccaauucacag

SEQ ID NO: 1651197 - RNA, 19 nt, Artificial Sequence
  Description of Artificial Sequence: Synthetic oligonucleotide
  Sense strand starting at position 705 of SEQ ID NO: 1561162
uuuggugaguacuaaggua

SEQ ID NO: 1651198 - RNA, 19 nt, Artificial Sequence
  Description of Artificial Sequence: Synthetic oligonucleotide
  Antisense strand to SEQ ID NO: 1651197
uaccuuaguacucaccaaa

SEQ ID NO: 1651199 - RNA, 19 nt, Artificial Sequence
  Description of Artificial Sequence: Synthetic oligonucleotide
  Sense strand starting at position 710 of SEQ ID NO: 1561162
ugaguacuaagguaguguu

SEQ ID NO: 1651200 - RNA, 19 nt, Artificial Sequence
  Description of Artificial Sequence: Synthetic oligonucleotide
  Antisense strand to SEQ ID NO: 1651199
aacacuaccuuaguacuca

SEQ ID NO: 1651201 - RNA, 19 nt, Artificial Sequence
  Description of Artificial Sequence: Synthetic oligonucleotide
  Sense strand starting at position 713 of SEQ ID NO: 1561162
guacuaagguaguguuuac

SEQ ID NO: 1651202 - RNA, 19 nt, Artificial Sequence
  Description of Artificial Sequence: Synthetic oligonucleotide
  Antisense strand to SEQ ID NO: 1651201
guaaacacuaccuuaguac

SEQ ID NO: 1651203 - RNA, 19 nt, Artificial Sequence
  Description of Artificial Sequence: Synthetic oligonucleotide
  Sense strand starting at position 717 of SEQ ID NO: 1561162
uaagguaguguuuacucau

SEQ ID NO: 1651204 - RNA, 19 nt, Artificial Sequence
  Description of Artificial Sequence: Synthetic oligonucleotide
  Antisense strand to SEQ ID NO: 1651203
augaguaaacacuaccuua

SEQ ID NO: 1651205 - RNA, 19 nt, Artificial Sequence
  Description of Artificial Sequence: Synthetic oligonucleotide
  Sense strand starting at position 720 of SEQ ID NO: 1561162
gguaguguuuacucaucuc

SEQ ID NO: 1651206 - RNA, 19 nt, Artificial Sequence
  Description of Artificial Sequence: Synthetic oligonucleotide
  Antisense strand to SEQ ID NO: 1651205
gagaugaguaaacacuacc

SEQ ID NO: 1651207 - RNA, 19 nt, Artificial Sequence
  Description of Artificial Sequence: Synthetic oligonucleotide
  Sense strand starting at position 723 of SEQ ID NO: 1561162
aguguuuacucaucucaca

SEQ ID NO: 1651208 - RNA, 19 nt, Artificial Sequence
  Description of Artificial Sequence: Synthetic oligonucleotide
  Antisense strand to SEQ ID NO: 1651207
ugugagaugaguaaacacu

SEQ ID NO: 1651209 - RNA, 19 nt, Artificial Sequence
  Description of Artificial Sequence: Synthetic oligonucleotide
  Sense strand starting at position 747 of SEQ ID NO: 1561162
cugucaagugcuuacugua

SEQ ID NO: 1651210 - RNA, 19 nt, Artificial Sequence
  Description of Artificial Sequence: Synthetic oligonucleotide
  Antisense strand to SEQ ID NO: 1651209
uacaguaagcacuugacag

SEQ ID NO: 1651211 - RNA, 19 nt, Artificial Sequence
  Description of Artificial Sequence: Synthetic oligonucleotide
  Sense strand starting at position 876 of SEQ ID NO: 1561162
ggauaucugcccuguccuu

SEQ ID NO: 1651212 - RNA, 19 nt, Artificial Sequence
  Description of Artificial Sequence: Synthetic oligonucleotide
  Antisense strand to SEQ ID NO: 1651211
aaggacagggcagauaucc

SEQ ID NO: 1651213 - RNA, 19 nt, Artificial Sequence
  Description of Artificial Sequence: Synthetic oligonucleotide
  Sense strand starting at position 997 of SEQ ID NO: 1561162
uuuguucuugggcggcaaa

SEQ ID NO: 1651214 - RNA, 19 nt, Artificial Sequence
  Description of Artificial Sequence: Synthetic oligonucleotide
  Antisense strand to SEQ ID NO: 1651213
uuugccgcccaagaacaaa

SEQ ID NO: 1651215 - RNA, 19 nt, Artificial Sequence
  Description of Artificial Sequence: Synthetic oligonucleotide
  Sense strand starting at position 1096 of SEQ ID NO: 1561162
agccgagucccagagguau

SEQ ID NO: 1651216 - RNA, 19 nt, Artificial Sequence
  Description of Artificial Sequence: Synthetic oligonucleotide
  Antisense strand to SEQ ID NO: 1651215
auaccucugggacucggcu

SEQ ID NO: 1651217 - RNA, 19 nt, Artificial Sequence
  Description of Artificial Sequence: Synthetic oligonucleotide
  Sense strand starting at position 1205 of SEQ ID NO: 1561162
acguguuccucccgaccau

SEQ ID NO: 1651218 - RNA, 19 nt, Artificial Sequence
  Description of Artificial Sequence: Synthetic oligonucleotide
  Antisense strand to SEQ ID NO: 1651217
auggucgggaggaacacgu

SEQ ID NO: 1651219 - RNA, 19 nt, Artificial Sequence
  Description of Artificial Sequence: Synthetic oligonucleotide
  Sense strand starting at position 1206 of SEQ ID NO: 1561162
cguguuccucccgaccauu

SEQ ID NO: 1651220 - RNA, 19 nt, Artificial Sequence
  Description of Artificial Sequence: Synthetic oligonucleotide
  Antisense strand to SEQ ID NO: 1651219
aauggucgggaggaacacg

SEQ ID NO: 1651221 - RNA, 19 nt, Artificial Sequence
  Description of Artificial Sequence: Synthetic oligonucleotide
  Sense strand starting at position 1240 of SEQ ID NO: 1561162
acguguggugcuuagaaug

SEQ ID NO: 1651222 - RNA, 19 nt, Artificial Sequence
  Description of Artificial Sequence: Synthetic oligonucleotide
  Antisense strand to SEQ ID NO: 1651221
cauucuaagcaccacacgu

SEQ ID NO: 1651223 - RNA, 19 nt, Artificial Sequence
  Description of Artificial Sequence: Synthetic oligonucleotide
  Sense strand starting at position 1298 of SEQ ID NO: 1561162
ucuuauucucucugucuga

SEQ ID NO: 1651224 - RNA, 19 nt, Artificial Sequence
  Description of Artificial Sequence: Synthetic oligonucleotide
  Antisense strand to SEQ ID NO: 1651223
ucagacagagagaauaaga

SEQ ID NO: 1651225 - RNA, 19 nt, Artificial Sequence
  Description of Artificial Sequence: Synthetic oligonucleotide
  Sense strand starting at position 1322 of SEQ ID NO: 1561162
ggccaucacucgcuaaacu

SEQ ID NO: 1651226 - RNA, 19 nt, Artificial Sequence
  Description of Artificial Sequence: Synthetic oligonucleotide
  Antisense strand to SEQ ID NO: 1651225
aguuuagcgagugauggcc

SEQ ID NO: 1651227 - RNA, 19 nt, Artificial Sequence
  Description of Artificial Sequence: Synthetic oligonucleotide
  Sense strand starting at position 1331 of SEQ ID NO: 1561162
ucgcuaaacucugaacucu

SEQ ID NO: 1651228 - RNA, 19 nt, Artificial Sequence
  Description of Artificial Sequence: Synthetic oligonucleotide
  Antisense strand to SEQ ID NO: 1651227
agaguucagaguuuagcga

SEQ ID NO: 1651229 - RNA, 19 nt, Artificial Sequence
  Description of Artificial Sequence: Synthetic oligonucleotide
  Sense strand starting at position 1656 of SEQ ID NO: 1561162
ucaggaauguccucuucca

SEQ ID NO: 1651230 - RNA, 19 nt, Artificial Sequence
  Description of Artificial Sequence: Synthetic oligonucleotide
  Antisense strand to SEQ ID NO: 1651229
uggaagaggacauuccuga

SEQ ID NO: 1651231 - RNA, 19 nt, Artificial Sequence
  Description of Artificial Sequence: Synthetic oligonucleotide
  Sense strand starting at position 1704 of SEQ ID NO: 1561162
gaaagugccucuuugggau

SEQ ID NO: 1651232 - RNA, 19 nt, Artificial Sequence
  Description of Artificial Sequence: Synthetic oligonucleotide
  Antisense strand to SEQ ID NO: 1651231
aucccaaagaggcacuuuc

SEQ ID NO: 1651233 - RNA, 19 nt, Artificial Sequence
  Description of Artificial Sequence: Synthetic oligonucleotide
  Sense strand starting at position 1918 of SEQ ID NO: 1561162
ugggcugguucccgaguga

SEQ ID NO: 1651234 - RNA, 19 nt, Artificial Sequence
  Description of Artificial Sequence: Synthetic oligonucleotide
  Antisense strand to SEQ ID NO: 1651233
ucacucgggaaccagccca

SEQ ID NO: 1651235 - RNA, 19 nt, Artificial Sequence
  Description of Artificial Sequence: Synthetic oligonucleotide
  Sense strand starting at position 2031 of SEQ ID NO: 1561162
aggagagcguccgucacau

SEQ ID NO: 1651236 - RNA, 19 nt, Artificial Sequence
  Description of Artificial Sequence: Synthetic oligonucleotide
  Antisense strand to SEQ ID NO: 1651235
augugacggacgcucuccu

SEQ ID NO: 1651237 - RNA, 19 nt, Artificial Sequence
  Description of Artificial Sequence: Synthetic oligonucleotide
  Sense strand starting at position 2159 of SEQ ID NO: 1561162
aggauugguuuaggaagga

SEQ ID NO: 1651238 - RNA, 19 nt, Artificial Sequence
  Description of Artificial Sequence: Synthetic oligonucleotide
  Antisense strand to SEQ ID NO: 1651237
uccuuccuaaaccaauccu

SEQ ID NO: 1651239 - RNA, 19 nt, Artificial Sequence
  Description of Artificial Sequence: Synthetic oligonucleotide
  Sense strand starting at position 2282 of SEQ ID NO: 1561162
cgguaauguccagagccca

SEQ ID NO: 1651240 - RNA, 19 nt, Artificial Sequence
  Description of Artificial Sequence: Synthetic oligonucleotide
  Antisense strand to SEQ ID NO: 1651239
ugggcucuggacauuaccg

SEQ ID NO: 1651241 - RNA, 19 nt, Artificial Sequence
  Description of Artificial Sequence: Synthetic oligonucleotide
  Sense strand starting at position 2373 of SEQ ID NO: 1561162
ugucgagccucugaacuua

SEQ ID NO: 1651242 - RNA, 19 nt, Artificial Sequence
  Description of Artificial Sequence: Synthetic oligonucleotide
  Antisense strand to SEQ ID NO: 1651241
uaaguucagaggcucgaca

SEQ ID NO: 1651243 - RNA, 19 nt, Artificial Sequence
  Description of Artificial Sequence: Synthetic oligonucleotide
  Sense strand starting at position 2417 of SEQ ID NO: 1561162
caggcuucuuguuacuuga

SEQ ID NO: 1651244 - RNA, 19 nt, Artificial Sequence
  Description of Artificial Sequence: Synthetic oligonucleotide
  Antisense strand to SEQ ID NO: 1651243
ucaaguaacaagaagccug

SEQ ID NO: 1651245 - RNA, 19 nt, Artificial Sequence
  Description of Artificial Sequence: Synthetic oligonucleotide
  Sense strand starting at position 2419 of SEQ ID NO: 1561162
ggcuucuuguuacuugaaa

SEQ ID NO: 1651246 - RNA, 19 nt, Artificial Sequence
  Description of Artificial Sequence: Synthetic oligonucleotide
  Antisense strand to SEQ ID NO: 1651245
uuucaaguaacaagaagcc

SEQ ID NO: 1651247 - RNA, 19 nt, Artificial Sequence
  Description of Artificial Sequence: Synthetic oligonucleotide
  Sense strand starting at position 2420 of SEQ ID NO: 1561162
gcuucuuguuacuugaaac

SEQ ID NO: 1651248 - RNA, 19 nt, Artificial Sequence
  Description of Artificial Sequence: Synthetic oligonucleotide
  Antisense strand to SEQ ID NO: 1651247
guuucaaguaacaagaagc

SEQ ID NO: 1651249 - RNA, 19 nt, Artificial Sequence
  Description of Artificial Sequence: Synthetic oligonucleotide
  Sense strand starting at position 2437 of SEQ ID NO: 1561162
acaguaaguuuccuuagua

SEQ ID NO: 1651250 - RNA, 19 nt, Artificial Sequence
  Description of Artificial Sequence: Synthetic oligonucleotide
  Antisense strand to SEQ ID NO: 1651249
uacuaaggaaacuuacugu

SEQ ID NO: 1651251 - RNA, 19 nt, Artificial Sequence
  Description of Artificial Sequence: Synthetic oligonucleotide
  Sense strand starting at position 2496 of SEQ ID NO: 1561162
aacugcacccuaggugaua

SEQ ID NO: 1651252 - RNA, 19 nt, Artificial Sequence
  Description of Artificial Sequence: Synthetic oligonucleotide
  Antisense strand to SEQ ID NO: 1651251
uaucaccuagggugcaguu

SEQ ID NO: 1651253 - RNA, 19 nt, Artificial Sequence
  Description of Artificial Sequence: Synthetic oligonucleotide
  Sense strand starting at position 2588 of SEQ ID NO: 1561162
augguuauaacuggaguau

SEQ ID NO: 1651254 - RNA, 19 nt, Artificial Sequence
  Description of Artificial Sequence: Synthetic oligonucleotide
  Antisense strand to SEQ ID NO: 1651253
auacuccaguuauaaccau

SEQ ID NO: 1651255 - RNA, 19 nt, Artificial Sequence
  Description of Artificial Sequence: Synthetic oligonucleotide
  Sense strand starting at position 2624 of SEQ ID NO: 1561162
ucaggaauuccucguacgu

SEQ ID NO: 1651256 - RNA, 19 nt, Artificial Sequence
  Description of Artificial Sequence: Synthetic oligonucleotide
  Antisense strand to SEQ ID NO: 1651255
acguacgaggaauuccuga

SEQ ID NO: 1651257 - RNA, 19 nt, Artificial Sequence
  Description of Artificial Sequence: Synthetic oligonucleotide
  Sense strand starting at position 6 of SEQ ID NO: 1561163
gcuggcauuguucagagga

SEQ ID NO: 1651258 - RNA, 19 nt, Artificial Sequence
  Description of Artificial Sequence: Synthetic oligonucleotide
  Antisense strand to SEQ ID NO: 1651257
uccucugaacaaugccagc

SEQ ID NO: 1651259 - RNA, 19 nt, Artificial Sequence
  Description of Artificial Sequence: Synthetic oligonucleotide
  Sense strand starting at position 39 of SEQ ID NO: 1561163
ggaaauacuuuagcauucu

SEQ ID NO: 1651260 - RNA, 19 nt, Artificial Sequence
  Description of Artificial Sequence: Synthetic oligonucleotide
  Antisense strand to SEQ ID NO: 1651259
agaaugcuaaaguauuucc

SEQ ID NO: 1651261 - RNA, 19 nt, Artificial Sequence
  Description of Artificial Sequence: Synthetic oligonucleotide
  Sense strand starting at position 103 of SEQ ID NO: 1561163
guaacaugauaugcugaau

SEQ ID NO: 1651262 - RNA, 19 nt, Artificial Sequence
  Description of Artificial Sequence: Synthetic oligonucleotide
  Antisense strand to SEQ ID NO: 1651261
auucagcauaucauguuac

SEQ ID NO: 1651263 - RNA, 19 nt, Artificial Sequence
  Description of Artificial Sequence: Synthetic oligonucleotide
  Sense strand starting at position 155 of SEQ ID NO: 1561163
gaauuaaaugcuugaugga

SEQ ID NO: 1651264 - RNA, 19 nt, Artificial Sequence
  Description of Artificial Sequence: Synthetic oligonucleotide
  Antisense strand to SEQ ID NO: 1651263
uccaucaagcauuuaauuc

SEQ ID NO: 1651265 - RNA, 19 nt, Artificial Sequence
  Description of Artificial Sequence: Synthetic oligonucleotide
  Sense strand starting at position 164 of SEQ ID NO: 1561163
gcuugauggaauugacaua

SEQ ID NO: 1651266 - RNA, 19 nt, Artificial Sequence
  Description of Artificial Sequence: Synthetic oligonucleotide
  Antisense strand to SEQ ID NO: 1651265
uaugucaauuccaucaagc

SEQ ID NO: 1651267 - RNA, 19 nt, Artificial Sequence
  Description of Artificial Sequence: Synthetic oligonucleotide
  Sense strand starting at position 222 of SEQ ID NO: 1561163
uggugccaaucauugauau

SEQ ID NO: 1651268 - RNA, 19 nt, Artificial Sequence
  Description of Artificial Sequence: Synthetic oligonucleotide
  Antisense strand to SEQ ID NO: 1651267
auaucaaugauuggcacca

SEQ ID NO: 1651269 - RNA, 19 nt, Artificial Sequence
  Description of Artificial Sequence: Synthetic oligonucleotide
  Sense strand starting at position 223 of SEQ ID NO: 1561163
ggugccaaucauugauauu

SEQ ID NO: 1651270 - RNA, 19 nt, Artificial Sequence
  Description of Artificial Sequence: Synthetic oligonucleotide
  Antisense strand to SEQ ID NO: 1651269
aauaucaaugauuggcacc

SEQ ID NO: 1651271 - RNA, 19 nt, Artificial Sequence
  Description of Artificial Sequence: Synthetic oligonucleotide
  Sense strand starting at position 284 of SEQ ID NO: 1561163
uuccauuauuccuuguaga

SEQ ID NO: 1651272 - RNA, 19 nt, Artificial Sequence
  Description of Artificial Sequence: Synthetic oligonucleotide
  Antisense strand to SEQ ID NO: 1651271
ucuacaaggaauaauggaa

SEQ ID NO: 1651273 - RNA, 19 nt, Artificial Sequence
  Description of Artificial Sequence: Synthetic oligonucleotide
  Sense strand starting at position 285 of SEQ ID NO: 1561163
uccauuauuccuuguagac

SEQ ID NO: 1651274 - RNA, 19 nt, Artificial Sequence
  Description of Artificial Sequence: Synthetic oligonucleotide
  Antisense strand to SEQ ID NO: 1651273
gucuacaaggaauaaugga

SEQ ID NO: 1651275 - RNA, 19 nt, Artificial Sequence
  Description of Artificial Sequence: Synthetic oligonucleotide
  Sense strand starting at position 523 of SEQ ID NO: 1561163
auuguauaggaguacagua

SEQ ID NO: 1651276 - RNA, 19 nt, Artificial Sequence
  Description of Artificial Sequence: Synthetic oligonucleotide
  Antisense strand to SEQ ID NO: 1651275
uacuguacuccuauacaau

SEQ ID NO: 1651277 - RNA, 19 nt, Artificial Sequence
  Description of Artificial Sequence: Synthetic oligonucleotide
  Sense strand starting at position 644 of SEQ ID NO: 1561163
ggugguugugacugagauc

SEQ ID NO: 1651278 - RNA, 19 nt, Artificial Sequence
  Description of Artificial Sequence: Synthetic oligonucleotide
  Antisense strand to SEQ ID NO: 1651277
gaucucagucacaaccacc

SEQ ID NO: 1651279 - RNA, 19 nt, Artificial Sequence
  Description of Artificial Sequence: Synthetic oligonucleotide
  Sense strand starting at position 645 of SEQ ID NO: 1561163
gugguugugacugagaucu

SEQ ID NO: 1651280 - RNA, 19 nt, Artificial Sequence
  Description of Artificial Sequence: Synthetic oligonucleotide
  Antisense strand to SEQ ID NO: 1651279
agaucucagucacaaccac

SEQ ID NO: 1651281 - RNA, 19 nt, Artificial Sequence
  Description of Artificial Sequence: Synthetic oligonucleotide
  Sense strand starting at position 2089 of SEQ ID NO: 1561163
gcaggugauguugaagaua

SEQ ID NO: 1651282 - RNA, 19 nt, Artificial Sequence
  Description of Artificial Sequence: Synthetic oligonucleotide
  Antisense strand to SEQ ID NO: 1651281
uaucuucaacaucaccugc

SEQ ID NO: 1651283 - RNA, 19 nt, Artificial Sequence
  Description of Artificial Sequence: Synthetic oligonucleotide
  Sense strand starting at position 2100 of SEQ ID NO: 1561163
ugaagauagccaggugauc

SEQ ID NO: 1651284 - RNA, 19 nt, Artificial Sequence
  Description of Artificial Sequence: Synthetic oligonucleotide
  Antisense strand to SEQ ID NO: 1651283
gaucaccuggcuaucuuca

SEQ ID NO: 1651285 - RNA, 19 nt, Artificial Sequence
  Description of Artificial Sequence: Synthetic oligonucleotide
  Sense strand starting at position 2118 of SEQ ID NO: 1561163
cucugacuccuaggacuuu

SEQ ID NO: 1651286 - RNA, 19 nt, Artificial Sequence
  Description of Artificial Sequence: Synthetic oligonucleotide
  Antisense strand to SEQ ID NO: 1651285
aaaguccuaggagucagag

SEQ ID NO: 1651287 - RNA, 19 nt, Artificial Sequence
  Description of Artificial Sequence: Synthetic oligonucleotide
  Sense strand starting at position 2150 of SEQ ID NO: 1561163
cucguaucaagagagguua

SEQ ID NO: 1651288 - RNA, 19 nt, Artificial Sequence
  Description of Artificial Sequence: Synthetic oligonucleotide
  Antisense strand to SEQ ID NO: 1651287
uaaccucucuugauacgag

SEQ ID NO: 1651289 - RNA, 19 nt, Artificial Sequence
  Description of Artificial Sequence: Synthetic oligonucleotide
  Sense strand starting at position 2152 of SEQ ID NO: 1561163
cguaucaagagagguuacu

SEQ ID NO: 1651290 - RNA, 19 nt, Artificial Sequence
  Description of Artificial Sequence: Synthetic oligonucleotide
  Antisense strand to SEQ ID NO: 1651289
aguaaccucucuugauacg

SEQ ID NO: 1651291 - RNA, 19 nt, Artificial Sequence
  Description of Artificial Sequence: Synthetic oligonucleotide
  Sense strand starting at position 2239 of SEQ ID NO: 1561163
ccagcuguuagugagacau

SEQ ID NO: 1651292 - RNA, 19 nt, Artificial Sequence
  Description of Artificial Sequence: Synthetic oligonucleotide
  Antisense strand to SEQ ID NO: 1651291
augucucacuaacagcugg

SEQ ID NO: 1651293 - RNA, 19 nt, Artificial Sequence
  Description of Artificial Sequence: Synthetic oligonucleotide
  Sense strand starting at position 2243 of SEQ ID NO: 1561163
cuguuagugagacauuaug

SEQ ID NO: 1651294 - RNA, 19 nt, Artificial Sequence
  Description of Artificial Sequence: Synthetic oligonucleotide
  Antisense strand to SEQ ID NO: 1651293
cauaaugucucacuaacag

SEQ ID NO: 1651295 - RNA, 19 nt, Artificial Sequence
  Description of Artificial Sequence: Synthetic oligonucleotide
  Sense strand starting at position 2254 of SEQ ID NO: 1561163
acauuaugaugaguugguu

SEQ ID NO: 1651296 - RNA, 19 nt, Artificial Sequence
  Description of Artificial Sequence: Synthetic oligonucleotide
  Antisense strand to SEQ ID NO: 1651295
aaccaacucaucauaaugu

SEQ ID NO: 1651297 - RNA, 19 nt, Artificial Sequence
  Description of Artificial Sequence: Synthetic oligonucleotide
  Sense strand starting at position 2257 of SEQ ID NO: 1561163
uuaugaugaguugguuuac

SEQ ID NO: 1651298 - RNA, 19 nt, Artificial Sequence
  Description of Artificial Sequence: Synthetic oligonucleotide
  Antisense strand to SEQ ID NO: 1651297
guaaaccaacucaucauaa

SEQ ID NO: 1651299 - RNA, 19 nt, Artificial Sequence
  Description of Artificial Sequence: Synthetic oligonucleotide
  Sense strand starting at position 2258 of SEQ ID NO: 1561163
uaugaugaguugguuuaca

SEQ ID NO: 1651300 - RNA, 19 nt, Artificial Sequence
  Description of Artificial Sequence: Synthetic oligonucleotide
  Antisense strand to SEQ ID NO: 1651299
uguaaaccaacucaucaua

SEQ ID NO: 1651301 - RNA, 19 nt, Artificial Sequence
  Description of Artificial Sequence: Synthetic oligonucleotide
  Sense strand starting at position 2327 of SEQ ID NO: 1561163
uacacuauucugggaguuu

SEQ ID NO: 1651302 - RNA, 19 nt, Artificial Sequence
  Description of Artificial Sequence: Synthetic oligonucleotide
  Antisense strand to SEQ ID NO: 1651301
aaacucccagaauagugua

SEQ ID NO: 1651303 - RNA, 19 nt, Artificial Sequence
  Description of Artificial Sequence: Synthetic oligonucleotide
  Sense strand starting at position 2374 of SEQ ID NO: 1561163
uaugaaagguaaguguuau

SEQ ID NO: 1651304 - RNA, 19 nt, Artificial Sequence
  Description of Artificial Sequence: Synthetic oligonucleotide
  Antisense strand to SEQ ID NO: 1651303
auaacacuuaccuuucaua

SEQ ID NO: 1651305 - RNA, 19 nt, Artificial Sequence
  Description of Artificial Sequence: Synthetic oligonucleotide
  Sense strand starting at position 2375 of SEQ ID NO: 1561163
augaaagguaaguguuaug

SEQ ID NO: 1651306 - RNA, 19 nt, Artificial Sequence
  Description of Artificial Sequence: Synthetic oligonucleotide
  Antisense strand to SEQ ID NO: 1651305
cauaacacuuaccuuucau

SEQ ID NO: 1651307 - RNA, 19 nt, Artificial Sequence
  Description of Artificial Sequence: Synthetic oligonucleotide
  Sense strand starting at position 2459 of SEQ ID NO: 1561163
cacccaggugucuaugagu

SEQ ID NO: 1651308 - RNA, 19 nt, Artificial Sequence
  Description of Artificial Sequence: Synthetic oligonucleotide
  Antisense strand to SEQ ID NO: 1651307
acucauagacaccugggug

SEQ ID NO: 1651309 - RNA, 19 nt, Artificial Sequence
  Description of Artificial Sequence: Synthetic oligonucleotide
  Sense strand starting at position 2484 of SEQ ID NO: 1561163
gggcuuggaugaucuagaa

SEQ ID NO: 1651310 - RNA, 19 nt, Artificial Sequence
  Description of Artificial Sequence: Synthetic oligonucleotide
  Antisense strand to SEQ ID NO: 1651309
uucuagaucauccaagccc

SEQ ID NO: 1651311 - RNA, 19 nt, Artificial Sequence
  Description of Artificial Sequence: Synthetic oligonucleotide
  Sense strand starting at position 2497 of SEQ ID NO: 1561163
cuagaaugggcuugacuaa

SEQ ID NO: 1651312 - RNA, 19 nt, Artificial Sequence
  Description of Artificial Sequence: Synthetic oligonucleotide
  Antisense strand to SEQ ID NO: 1651311
uuagucaagcccauucuag

SEQ ID NO: 1651313 - RNA, 19 nt, Artificial Sequence
  Description of Artificial Sequence: Synthetic oligonucleotide
  Sense strand starting at position 3262 of SEQ ID NO: 1561163
augacuucuucccugaaag

SEQ ID NO: 1651314 - RNA, 19 nt, Artificial Sequence
  Description of Artificial Sequence: Synthetic oligonucleotide
  Antisense strand to SEQ ID NO: 1651313
cuuucagggaagaagucau

SEQ ID NO: 1651315 - RNA, 19 nt, Artificial Sequence
  Description of Artificial Sequence: Synthetic oligonucleotide
  Sense strand starting at position 3263 of SEQ ID NO: 1561163
ugacuucuucccugaaagu

SEQ ID NO: 1651316 - RNA, 19 nt, Artificial Sequence
  Description of Artificial Sequence: Synthetic oligonucleotide
  Antisense strand to SEQ ID NO: 1651315
acuuucagggaagaaguca

SEQ ID NO: 1651317 - RNA, 19 nt, Artificial Sequence
  Description of Artificial Sequence: Synthetic oligonucleotide
  Sense strand starting at position 3343 of SEQ ID NO: 1561163
agaagauguccaugggugu

SEQ ID NO: 1651318 - RNA, 19 nt, Artificial Sequence
  Description of Artificial Sequence: Synthetic oligonucleotide
  Antisense strand to SEQ ID NO: 1651317
acacccauggacaucuucu

SEQ ID NO: 1651319 - RNA, 19 nt, Artificial Sequence
  Description of Artificial Sequence: Synthetic oligonucleotide
  Sense strand starting at position 3357 of SEQ ID NO: 1561163
ggugucuuaagcuacgaaa

SEQ ID NO: 1651320 - RNA, 19 nt, Artificial Sequence
  Description of Artificial Sequence: Synthetic oligonucleotide
  Antisense strand to SEQ ID NO: 1651319
uuucguagcuuaagacacc

SEQ ID NO: 1651321 - RNA, 19 nt, Artificial Sequence
  Description of Artificial Sequence: Synthetic oligonucleotide
  Sense strand starting at position 3359 of SEQ ID NO: 1561163
ugucuuaagcuacgaaaga

SEQ ID NO: 1651322 - RNA, 19 nt, Artificial Sequence
  Description of Artificial Sequence: Synthetic oligonucleotide
  Antisense strand to SEQ ID NO: 1651321
ucuuucguagcuuaagaca

SEQ ID NO: 1651323 - RNA, 19 nt, Artificial Sequence
  Description of Artificial Sequence: Synthetic oligonucleotide
  Sense strand starting at position 3557 of SEQ ID NO: 1561163
gggcucucugcagauccaa

SEQ ID NO: 1651324 - RNA, 19 nt, Artificial Sequence
  Description of Artificial Sequence: Synthetic oligonucleotide
  Antisense strand to SEQ ID NO: 1651323
uuggaucugcagagagccc

SEQ ID NO: 1651325 - RNA, 19 nt, Artificial Sequence
  Description of Artificial Sequence: Synthetic oligonucleotide
  Sense strand starting at position 3625 of SEQ ID NO: 1561163
gucuacuucucauuuguuu

SEQ ID NO: 1651326 - RNA, 19 nt, Artificial Sequence
  Description of Artificial Sequence: Synthetic oligonucleotide
  Antisense strand to SEQ ID NO: 1651325
aaacaaaugagaaguagac

SEQ ID NO: 1651327 - RNA, 19 nt, Artificial Sequence
  Description of Artificial Sequence: Synthetic oligonucleotide
  Sense strand starting at position 3634 of SEQ ID NO: 1561163
ucauuuguuugagaacuca

SEQ ID NO: 1651328 - RNA, 19 nt, Artificial Sequence
  Description of Artificial Sequence: Synthetic oligonucleotide
  Antisense strand to SEQ ID NO: 1651327
ugaguucucaaacaaauga

SEQ ID NO: 1651329 - RNA, 19 nt, Artificial Sequence
  Description of Artificial Sequence: Synthetic oligonucleotide
  Sense strand starting at position 3655 of SEQ ID NO: 1561163
ggagaaggccucugauuag

SEQ ID NO: 1651330 - RNA, 19 nt, Artificial Sequence
  Description of Artificial Sequence: Synthetic oligonucleotide
  Antisense strand to SEQ ID NO: 1651329
cuaaucagaggccuucucc

SEQ ID NO: 1651331 - RNA, 19 nt, Artificial Sequence
  Description of Artificial Sequence: Synthetic oligonucleotide
  Sense strand starting at position 3658 of SEQ ID NO: 1561163
gaaggccucugauuagcau

SEQ ID NO: 1651332 - RNA, 19 nt, Artificial Sequence
  Description of Artificial Sequence: Synthetic oligonucleotide
  Antisense strand to SEQ ID NO: 1651331
augcuaaucagaggccuuc

SEQ ID NO: 1651333 - RNA, 19 nt, Artificial Sequence
  Description of Artificial Sequence: Synthetic oligonucleotide
  Sense strand starting at position 3716 of SEQ ID NO: 1561163
cagagcucccagggugaua

SEQ ID NO: 1651334 - RNA, 19 nt, Artificial Sequence
  Description of Artificial Sequence: Synthetic oligonucleotide
  Antisense strand to SEQ ID NO: 1651333
uaucacccugggagcucug

SEQ ID NO: 1651335 - RNA, 19 nt, Artificial Sequence
  Description of Artificial Sequence: Synthetic oligonucleotide
  Sense strand starting at position 3899 of SEQ ID NO: 1561163
cgcaucauaauguggaaga

SEQ ID NO: 1651336 - RNA, 19 nt, Artificial Sequence
  Description of Artificial Sequence: Synthetic oligonucleotide
  Antisense strand to SEQ ID NO: 1651335
ucuuccacauuaugaugcg

SEQ ID NO: 1651337 - RNA, 19 nt, Artificial Sequence
  Description of Artificial Sequence: Synthetic oligonucleotide
  Sense strand starting at position 388 of SEQ ID NO: 1561164
agcuuuguuuacucauuua

SEQ ID NO: 1651338 - RNA, 19 nt, Artificial Sequence
  Description of Artificial Sequence: Synthetic oligonucleotide
  Antisense strand to SEQ ID NO: 1651337
uaaaugaguaaacaaagcu

SEQ ID NO: 1651339 - RNA, 19 nt, Artificial Sequence
  Description of Artificial Sequence: Synthetic oligonucleotide
  Sense strand starting at position 464 of SEQ ID NO: 1561164
aaguguuugaaggaguucu

SEQ ID NO: 1651340 - RNA, 19 nt, Artificial Sequence
  Description of Artificial Sequence: Synthetic oligonucleotide
  Antisense strand to SEQ ID NO: 1651339
agaacuccuucaaacacuu

SEQ ID NO: 1651341 - RNA, 19 nt, Artificial Sequence
  Description of Artificial Sequence: Synthetic oligonucleotide
  Sense strand starting at position 472 of SEQ ID NO: 1561164
gaaggaguucuuugguaca

SEQ ID NO: 1651342 - RNA, 19 nt, Artificial Sequence
  Description of Artificial Sequence: Synthetic oligonucleotide
  Antisense strand to SEQ ID NO: 1651341
uguaccaaagaacuccuuc

SEQ ID NO: 1651343 - RNA, 19 nt, Artificial Sequence
  Description of Artificial Sequence: Synthetic oligonucleotide
  Sense strand starting at position 474 of SEQ ID NO: 1561164
aggaguucuuugguacaua

SEQ ID NO: 1651344 - RNA, 19 nt, Artificial Sequence
  Description of Artificial Sequence: Synthetic oligonucleotide
  Antisense strand to SEQ ID NO: 1651343
uauguaccaaagaacuccu

SEQ ID NO: 1651345 - RNA, 19 nt, Artificial Sequence
  Description of Artificial Sequence: Synthetic oligonucleotide
  Sense strand starting at position 768 of SEQ ID NO: 1561164
aucagauguugucuaugag

SEQ ID NO: 1651346 - RNA, 19 nt, Artificial Sequence
  Description of Artificial Sequence: Synthetic oligonucleotide
  Antisense strand to SEQ ID NO: 1651345
cucauagacaacaucugau

SEQ ID NO: 1651347 - RNA, 19 nt, Artificial Sequence
  Description of Artificial Sequence: Synthetic oligonucleotide
  Sense strand starting at position 769 of SEQ ID NO: 1561164
ucagauguugucuaugaga

SEQ ID NO: 1651348 - RNA, 19 nt, Artificial Sequence
  Description of Artificial Sequence: Synthetic oligonucleotide
  Antisense strand to SEQ ID NO: 1651347
ucucauagacaacaucuga

SEQ ID NO: 1651349 - RNA, 19 nt, Artificial Sequence
  Description of Artificial Sequence: Synthetic oligonucleotide
  Sense strand starting at position 896 of SEQ ID NO: 1561164
ccaggagagucccugaaua

SEQ ID NO: 1651350 - RNA, 19 nt, Artificial Sequence
  Description of Artificial Sequence: Synthetic oligonucleotide
  Antisense strand to SEQ ID NO: 1651349
uauucagggacucuccugg

SEQ ID NO: 1651351 - RNA, 19 nt, Artificial Sequence
  Description of Artificial Sequence: Synthetic oligonucleotide
  Sense strand starting at position 924 of SEQ ID NO: 1561164
ugcagaaacuccucugaca

SEQ ID NO: 1651352 - RNA, 19 nt, Artificial Sequence
  Description of Artificial Sequence: Synthetic oligonucleotide
  Antisense strand to SEQ ID NO: 1651351
ugucagaggaguuucugca

SEQ ID NO: 1651353 - RNA, 19 nt, Artificial Sequence
  Description of Artificial Sequence: Synthetic oligonucleotide
  Sense strand starting at position 1097 of SEQ ID NO: 1561164
uuagauauguacucacaug

SEQ ID NO: 1651354 - RNA, 19 nt, Artificial Sequence
  Description of Artificial Sequence: Synthetic oligonucleotide
  Antisense strand to SEQ ID NO: 1651353
caugugaguacauaucuaa

SEQ ID NO: 1651355 - RNA, 19 nt, Artificial Sequence
  Description of Artificial Sequence: Synthetic oligonucleotide
  Sense strand starting at position 1199 of SEQ ID NO: 1561164
uggucacuuccauaugaau

SEQ ID NO: 1651356 - RNA, 19 nt, Artificial Sequence
  Description of Artificial Sequence: Synthetic oligonucleotide
  Antisense strand to SEQ ID NO: 1651355
auucauauggaagugacca

SEQ ID NO: 1651357 - RNA, 19 nt, Artificial Sequence
  Description of Artificial Sequence: Synthetic oligonucleotide
  Sense strand starting at position 1367 of SEQ ID NO: 1561164
cugguucugagauaguuuc

SEQ ID NO: 1651358 - RNA, 19 nt, Artificial Sequence
  Description of Artificial Sequence: Synthetic oligonucleotide
  Antisense strand to SEQ ID NO: 1651357
gaaacuaucucagaaccag

SEQ ID NO: 1651359 - RNA, 19 nt, Artificial Sequence
  Description of Artificial Sequence: Synthetic oligonucleotide
  Sense strand starting at position 1418 of SEQ ID NO: 1561164
ccagcaugggucuaauuau

SEQ ID NO: 1651360 - RNA, 19 nt, Artificial Sequence
  Description of Artificial Sequence: Synthetic oligonucleotide
  Antisense strand to SEQ ID NO: 1651359
auaauuagacccaugcugg

SEQ ID NO: 1651361 - RNA, 19 nt, Artificial Sequence
  Description of Artificial Sequence: Synthetic oligonucleotide
  Sense strand starting at position 1427 of SEQ ID NO: 1561164
gucuaauuauuugaacaag

SEQ ID NO: 1651362 - RNA, 19 nt, Artificial Sequence
  Description of Artificial Sequence: Synthetic oligonucleotide
  Antisense strand to SEQ ID NO: 1651361
cuuguucaaauaauuagac

SEQ ID NO: 1651363 - RNA, 19 nt, Artificial Sequence
  Description of Artificial Sequence: Synthetic oligonucleotide
  Sense strand starting at position 1437 of SEQ ID NO: 1561164
uugaacaaguaauuggauu

SEQ ID NO: 1651364 - RNA, 19 nt, Artificial Sequence
  Description of Artificial Sequence: Synthetic oligonucleotide
  Antisense strand to SEQ ID NO: 1651363
aauccaauuacuuguucaa

SEQ ID NO: 1651365 - RNA, 19 nt, Artificial Sequence
  Description of Artificial Sequence: Synthetic oligonucleotide
  Sense strand starting at position 1485 of SEQ ID NO: 1561164
acgagagugaguugacuaa

SEQ ID NO: 1651366 - RNA, 19 nt, Artificial Sequence
  Description of Artificial Sequence: Synthetic oligonucleotide
  Antisense strand to SEQ ID NO: 1651365
uuagucaacucacucucgu

SEQ ID NO: 1651367 - RNA, 19 nt, Artificial Sequence
  Description of Artificial Sequence: Synthetic oligonucleotide
  Sense strand starting at position 1489 of SEQ ID NO: 1561164
gagugaguugacuaaucuu

SEQ ID NO: 1651368 - RNA, 19 nt, Artificial Sequence
  Description of Artificial Sequence: Synthetic oligonucleotide
  Antisense strand to SEQ ID NO: 1651367
aagauuagucaacucacuc

SEQ ID NO: 1651369 - RNA, 19 nt, Artificial Sequence
  Description of Artificial Sequence: Synthetic oligonucleotide
  Sense strand starting at position 1530 of SEQ ID NO: 1561164
guagauuccgaaugagagg

SEQ ID NO: 1651370 - RNA, 19 nt, Artificial Sequence
  Description of Artificial Sequence: Synthetic oligonucleotide
  Antisense strand to SEQ ID NO: 1651369
ccucucauucggaaucuac

SEQ ID NO: 1651371 - RNA, 19 nt, Artificial Sequence
  Description of Artificial Sequence: Synthetic oligonucleotide
  Sense strand starting at position 1535 of SEQ ID NO: 1561164
uuccgaaugagaggugaga

SEQ ID NO: 1651372 - RNA, 19 nt, Artificial Sequence
  Description of Artificial Sequence: Synthetic oligonucleotide
  Antisense strand to SEQ ID NO: 1651371
ucucaccucucauucggaa

SEQ ID NO: 1651373 - RNA, 19 nt, Artificial Sequence
  Description of Artificial Sequence: Synthetic oligonucleotide
  Sense strand starting at position 1584 of SEQ ID NO: 1561164
agaggccuuguuuauuaau

SEQ ID NO: 1651374 - RNA, 19 nt, Artificial Sequence
  Description of Artificial Sequence: Synthetic oligonucleotide
  Antisense strand to SEQ ID NO: 1651373
auuaauaaacaaggccucu

SEQ ID NO: 1651375 - RNA, 19 nt, Artificial Sequence
  Description of Artificial Sequence: Synthetic oligonucleotide
  Sense strand starting at position 1641 of SEQ ID NO: 1561164
cugucauaggcacaaguga

SEQ ID NO: 1651376 - RNA, 19 nt, Artificial Sequence
  Description of Artificial Sequence: Synthetic oligonucleotide
  Antisense strand to SEQ ID NO: 1651375
ucacuugugccuaugacag

SEQ ID NO: 1651377 - RNA, 19 nt, Artificial Sequence
  Description of Artificial Sequence: Synthetic oligonucleotide
  Sense strand starting at position 1654 of SEQ ID NO: 1561164
aagugauagguuuaucacu

SEQ ID NO: 1651378 - RNA, 19 nt, Artificial Sequence
  Description of Artificial Sequence: Synthetic oligonucleotide
  Antisense strand to SEQ ID NO: 1651377
agugauaaaccuaucacuu

SEQ ID NO: 1651379 - RNA, 19 nt, Artificial Sequence
  Description of Artificial Sequence: Synthetic oligonucleotide
  Sense strand starting at position 1656 of SEQ ID NO: 1561164
gugauagguuuaucacuag

SEQ ID NO: 1651380 - RNA, 19 nt, Artificial Sequence
  Description of Artificial Sequence: Synthetic oligonucleotide
  Antisense strand to SEQ ID NO: 1651379
cuagugauaaaccuaucac

SEQ ID NO: 1651381 - RNA, 19 nt, Artificial Sequence
  Description of Artificial Sequence: Synthetic oligonucleotide
  Sense strand starting at position 2474 of SEQ ID NO: 1561164
agagcauugcaguauugaa

SEQ ID NO: 1651382 - RNA, 19 nt, Artificial Sequence
  Description of Artificial Sequence: Synthetic oligonucleotide
  Antisense strand to SEQ ID NO: 1651381
uucaauacugcaaugcucu

SEQ ID NO: 1651383 - RNA, 19 nt, Artificial Sequence
  Description of Artificial Sequence: Synthetic oligonucleotide
  Sense strand starting at position 2484 of SEQ ID NO: 1561164
aguauugaaaggugguuaa

SEQ ID NO: 1651384 - RNA, 19 nt, Artificial Sequence
  Description of Artificial Sequence: Synthetic oligonucleotide
  Antisense strand to SEQ ID NO: 1651383
uuaaccaccuuucaauacu

SEQ ID NO: 1651385 - RNA, 19 nt, Artificial Sequence
  Description of Artificial Sequence: Synthetic oligonucleotide
  Sense strand starting at position 2768 of SEQ ID NO: 1561164
ucucaagaacugggaucuu

SEQ ID NO: 1651386 - RNA, 19 nt, Artificial Sequence
  Description of Artificial Sequence: Synthetic oligonucleotide
  Antisense strand to SEQ ID NO: 1651385
aagaucccaguucuugaga

SEQ ID NO: 1651387 - RNA, 19 nt, Artificial Sequence
  Description of Artificial Sequence: Synthetic oligonucleotide
  Sense strand starting at position 2797 of SEQ ID NO: 1561164
ugauaagauucugucaauu

SEQ ID NO: 1651388 - RNA, 19 nt, Artificial Sequence
  Description of Artificial Sequence: Synthetic oligonucleotide
  Antisense strand to SEQ ID NO: 1651387
aauugacagaaucuuauca

SEQ ID NO: 1651389 - RNA, 19 nt, Artificial Sequence
  Description of Artificial Sequence: Synthetic oligonucleotide
  Sense strand starting at position 2880 of SEQ ID NO: 1561164
guuuaacugguuuaacuuu

SEQ ID NO: 1651390 - RNA, 19 nt, Artificial Sequence
  Description of Artificial Sequence: Synthetic oligonucleotide
  Antisense strand to SEQ ID NO: 1651389
aaaguuaaaccaguuaaac

SEQ ID NO: 1651391 - RNA, 19 nt, Artificial Sequence
  Description of Artificial Sequence: Synthetic oligonucleotide
  Sense strand starting at position 2960 of SEQ ID NO: 1561164
auggcuaauaagugaguaa

SEQ ID NO: 1651392 - RNA, 19 nt, Artificial Sequence
  Description of Artificial Sequence: Synthetic oligonucleotide
  Antisense strand to SEQ ID NO: 1651391
uuacucacuuauuagccau

SEQ ID NO: 1651393 - RNA, 19 nt, Artificial Sequence
  Description of Artificial Sequence: Synthetic oligonucleotide
  Sense strand starting at position 2961 of SEQ ID NO: 1561164
uggcuaauaagugaguaau

SEQ ID NO: 1651394 - RNA, 19 nt, Artificial Sequence
  Description of Artificial Sequence: Synthetic oligonucleotide
  Antisense strand to SEQ ID NO: 1651393
auuacucacuuauuagcca

SEQ ID NO: 1651395 - RNA, 19 nt, Artificial Sequence
  Description of Artificial Sequence: Synthetic oligonucleotide
  Sense strand starting at position 3262 of SEQ ID NO: 1561164
accugauaagccuaaggua

SEQ ID NO: 1651396 - RNA, 19 nt, Artificial Sequence
  Description of Artificial Sequence: Synthetic oligonucleotide
  Antisense strand to SEQ ID NO: 1651395
uaccuuaggcuuaucaggu

SEQ ID NO: 1651397 - RNA, 19 nt, Artificial Sequence
  Description of Artificial Sequence: Synthetic oligonucleotide
  Sense strand starting at position 3557 of SEQ ID NO: 1561164
aguauaaaucuuggaugca

SEQ ID NO: 1651398 - RNA, 19 nt, Artificial Sequence
  Description of Artificial Sequence: Synthetic oligonucleotide
  Antisense strand to SEQ ID NO: 1651397
ugcauccaagauuuauacu

SEQ ID NO: 1651399 - RNA, 19 nt, Artificial Sequence
  Description of Artificial Sequence: Synthetic oligonucleotide
  Sense strand starting at position 3560 of SEQ ID NO: 1561164
auaaaucuuggaugcaaau

SEQ ID NO: 1651400 - RNA, 19 nt, Artificial Sequence
  Description of Artificial Sequence: Synthetic oligonucleotide
  Antisense strand to SEQ ID NO: 1651399
auuugcauccaagauuuau

SEQ ID NO: 1651401 - RNA, 19 nt, Artificial Sequence
  Description of Artificial Sequence: Synthetic oligonucleotide
  Sense strand starting at position 3665 of SEQ ID NO: 1561164
ugaggaauccacugauguc

SEQ ID NO: 1651402 - RNA, 19 nt, Artificial Sequence
  Description of Artificial Sequence: Synthetic oligonucleotide
  Antisense strand to SEQ ID NO: 1651401
gacaucaguggauuccuca

SEQ ID NO: 1651403 - RNA, 19 nt, Artificial Sequence
  Description of Artificial Sequence: Synthetic oligonucleotide
  Sense strand starting at position 3707 of SEQ ID NO: 1561164
cacuaaugugcagagucua

SEQ ID NO: 1651404 - RNA, 19 nt, Artificial Sequence
  Description of Artificial Sequence: Synthetic oligonucleotide
  Antisense strand to SEQ ID NO: 1651403
uagacucugcacauuagug

SEQ ID NO: 1651405 - RNA, 19 nt, Artificial Sequence
  Description of Artificial Sequence: Synthetic oligonucleotide
  Sense strand starting at position 3766 of SEQ ID NO: 1561164
gcagaagaguaaccauaac

SEQ ID NO: 1651406 - RNA, 19 nt, Artificial Sequence
  Description of Artificial Sequence: Synthetic oligonucleotide
  Antisense strand to SEQ ID NO: 1651405
guuaugguuacucuucugc

SEQ ID NO: 1651407 - RNA, 19 nt, Artificial Sequence
  Description of Artificial Sequence: Synthetic oligonucleotide
  Sense strand starting at position 3807 of SEQ ID NO: 1561164
agcuguugccaggcuguaa

SEQ ID NO: 1651408 - RNA, 19 nt, Artificial Sequence
  Description of Artificial Sequence: Synthetic oligonucleotide
  Antisense strand to SEQ ID NO: 1651407
uuacagccuggcaacagcu

SEQ ID NO: 1651409 - RNA, 19 nt, Artificial Sequence
  Description of Artificial Sequence: Synthetic oligonucleotide
  Sense strand starting at position 3808 of SEQ ID NO: 1561164
gcuguugccaggcuguaaa

SEQ ID NO: 1651410 - RNA, 19 nt, Artificial Sequence
  Description of Artificial Sequence: Synthetic oligonucleotide
  Antisense strand to SEQ ID NO: 1651409
uuuacagccuggcaacagc

SEQ ID NO: 1651411 - RNA, 19 nt, Artificial Sequence
  Description of Artificial Sequence: Synthetic oligonucleotide
  Sense strand starting at position 3823 of SEQ ID NO: 1561164
uaaacacauguuuguggaa

SEQ ID NO: 1651412 - RNA, 19 nt, Artificial Sequence
  Description of Artificial Sequence: Synthetic oligonucleotide
  Antisense strand to SEQ ID NO: 1651411
uuccacaaacauguguuua

SEQ ID NO: 1651413 - RNA, 19 nt, Artificial Sequence
  Description of Artificial Sequence: Synthetic oligonucleotide
  Sense strand starting at position 3824 of SEQ ID NO: 1561164
aaacacauguuuguggaau

SEQ ID NO: 1651414 - RNA, 19 nt, Artificial Sequence
  Description of Artificial Sequence: Synthetic oligonucleotide
  Antisense strand to SEQ ID NO: 1651413
auuccacaaacauguguuu

SEQ ID NO: 1651415 - RNA, 19 nt, Artificial Sequence
  Description of Artificial Sequence: Synthetic oligonucleotide
  Sense strand starting at position 3835 of SEQ ID NO: 1561164
uguggaauacucugaaaua

SEQ ID NO: 1651416 - RNA, 19 nt, Artificial Sequence
  Description of Artificial Sequence: Synthetic oligonucleotide
  Antisense strand to SEQ ID NO: 1651415
uauuucagaguauuccaca

SEQ ID NO: 1651417 - RNA, 19 nt, Artificial Sequence
  Description of Artificial Sequence: Synthetic oligonucleotide
  Sense strand starting at position 40 of SEQ ID NO: 1561165
aauucuccugcaggaguua

SEQ ID NO: 1651418 - RNA, 19 nt, Artificial Sequence
  Description of Artificial Sequence: Synthetic oligonucleotide
  Antisense strand to SEQ ID NO: 1651417
uaacuccugcaggagaauu

SEQ ID NO: 1651419 - RNA, 19 nt, Artificial Sequence
  Description of Artificial Sequence: Synthetic oligonucleotide
  Sense strand starting at position 153 of SEQ ID NO: 1561165
cuucccaaggccugaauau

SEQ ID NO: 1651420 - RNA, 19 nt, Artificial Sequence
  Description of Artificial Sequence: Synthetic oligonucleotide
  Antisense strand to SEQ ID NO: 1651419
auauucaggccuugggaag

SEQ ID NO: 1651421 - RNA, 19 nt, Artificial Sequence
  Description of Artificial Sequence: Synthetic oligonucleotide
  Sense strand starting at position 162 of SEQ ID NO: 1561165
gccugaauaucccugacua

SEQ ID NO: 1651422 - RNA, 19 nt, Artificial Sequence
  Description of Artificial Sequence: Synthetic oligonucleotide
  Antisense strand to SEQ ID NO: 1651421
uagucagggauauucaggc

SEQ ID NO: 1651423 - RNA, 19 nt, Artificial Sequence
  Description of Artificial Sequence: Synthetic oligonucleotide
  Sense strand starting at position 1447 of SEQ ID NO: 1561165
cguguuuaucugcaccaga

SEQ ID NO: 1651424 - RNA, 19 nt, Artificial Sequence
  Description of Artificial Sequence: Synthetic oligonucleotide
  Antisense strand to SEQ ID NO: 1651423
ucuggugcagauaaacacg

SEQ ID NO: 1651425 - RNA, 19 nt, Artificial Sequence
  Description of Artificial Sequence: Synthetic oligonucleotide
  Sense strand starting at position 1545 of SEQ ID NO: 1561165
cgggacuggagucguuaaa

SEQ ID NO: 1651426 - RNA, 19 nt, Artificial Sequence
  Description of Artificial Sequence: Synthetic oligonucleotide
  Antisense strand to SEQ ID NO: 1651425
uuuaacgacuccagucccg

SEQ ID NO: 1651427 - RNA, 19 nt, Artificial Sequence
  Description of Artificial Sequence: Synthetic oligonucleotide
  Sense strand starting at position 1615 of SEQ ID NO: 1561165
cgccaucaacuuugcagaa

SEQ ID NO: 1651428 - RNA, 19 nt, Artificial Sequence
  Description of Artificial Sequence: Synthetic oligonucleotide
  Antisense strand to SEQ ID NO: 1651427
uucugcaaaguugauggcg

SEQ ID NO: 1651429 - RNA, 19 nt, Artificial Sequence
  Description of Artificial Sequence: Synthetic oligonucleotide
  Sense strand starting at position 1616 of SEQ ID NO: 1561165
gccaucaacuuugcagaau

SEQ ID NO: 1651430 - RNA, 19 nt, Artificial Sequence
  Description of Artificial Sequence: Synthetic oligonucleotide
  Antisense strand to SEQ ID NO: 1651429
auucugcaaaguugauggc

SEQ ID NO: 1651431 - RNA, 19 nt, Artificial Sequence
  Description of Artificial Sequence: Synthetic oligonucleotide
  Sense strand starting at position 2284 of SEQ ID NO: 1561165
caggcuaccgcguuaaugu

SEQ ID NO: 1651432 - RNA, 19 nt, Artificial Sequence
  Description of Artificial Sequence: Synthetic oligonucleotide
  Antisense strand to SEQ ID NO: 1651431
acauuaacgcgguagccug

SEQ ID NO: 1651433 - RNA, 19 nt, Artificial Sequence
  Description of Artificial Sequence: Synthetic oligonucleotide
  Sense strand starting at position 2315 of SEQ ID NO: 1561165
cuucuuauagcuguguguu

SEQ ID NO: 1651434 - RNA, 19 nt, Artificial Sequence
  Description of Artificial Sequence: Synthetic oligonucleotide
  Antisense strand to SEQ ID NO: 1651433
aacacacagcuauaagaag

SEQ ID NO: 1651435 - RNA, 19 nt, Artificial Sequence
  Description of Artificial Sequence: Synthetic oligonucleotide
  Sense strand starting at position 2327 of SEQ ID NO: 1561165
guguguugggccaguguua

SEQ ID NO: 1651436 - RNA, 19 nt, Artificial Sequence
  Description of Artificial Sequence: Synthetic oligonucleotide
  Antisense strand to SEQ ID NO: 1651435
uaacacuggcccaacacac

SEQ ID NO: 1651437 - RNA, 19 nt, Artificial Sequence
  Description of Artificial Sequence: Synthetic oligonucleotide
  Sense strand starting at position 2328 of SEQ ID NO: 1561165
uguguugggccaguguuau

SEQ ID NO: 1651438 - RNA, 19 nt, Artificial Sequence
  Description of Artificial Sequence: Synthetic oligonucleotide
  Antisense strand to SEQ ID NO: 1651437
auaacacuggcccaacaca

SEQ ID NO: 1651439 - RNA, 19 nt, Artificial Sequence
  Description of Artificial Sequence: Synthetic oligonucleotide
  Sense strand starting at position 2334 of SEQ ID NO: 1561165
gggccaguguuauuauuga

SEQ ID NO: 1651440 - RNA, 19 nt, Artificial Sequence
  Description of Artificial Sequence: Synthetic oligonucleotide
  Antisense strand to SEQ ID NO: 1651439
ucaauaauaacacuggccc

SEQ ID NO: 1651441 - RNA, 19 nt, Artificial Sequence
  Description of Artificial Sequence: Synthetic oligonucleotide
  Sense strand starting at position 2348 of SEQ ID NO: 1561165
auugaucgcuuacuguaua

SEQ ID NO: 1651442 - RNA, 19 nt, Artificial Sequence
  Description of Artificial Sequence: Synthetic oligonucleotide
  Antisense strand to SEQ ID NO: 1651441
uauacaguaagcgaucaau

SEQ ID NO: 1651443 - RNA, 19 nt, Artificial Sequence
  Description of Artificial Sequence: Synthetic oligonucleotide
  Sense strand starting at position 2387 of SEQ ID NO: 1561165
aucugaauccgacgaauca

SEQ ID NO: 1651444 - RNA, 19 nt, Artificial Sequence
  Description of Artificial Sequence: Synthetic oligonucleotide
  Antisense strand to SEQ ID NO: 1651443
ugauucgucggauucagau

SEQ ID NO: 1651445 - RNA, 19 nt, Artificial Sequence
  Description of Artificial Sequence: Synthetic oligonucleotide
  Sense strand starting at position 2388 of SEQ ID NO: 1561165
ucugaauccgacgaaucaa

SEQ ID NO: 1651446 - RNA, 19 nt, Artificial Sequence
  Description of Artificial Sequence: Synthetic oligonucleotide
  Antisense strand to SEQ ID NO: 1651445
uugauucgucggauucaga

SEQ ID NO: 1651447 - RNA, 19 nt, Artificial Sequence
  Description of Artificial Sequence: Synthetic oligonucleotide
  Sense strand starting at position 2790 of SEQ ID NO: 1561165
acagguguuguggaacagu

SEQ ID NO: 1651448 - RNA, 19 nt, Artificial Sequence
  Description of Artificial Sequence: Synthetic oligonucleotide
  Antisense strand to SEQ ID NO: 1651447
acuguuccacaacaccugu

SEQ ID NO: 1651449 - RNA, 19 nt, Artificial Sequence
  Description of Artificial Sequence: Synthetic oligonucleotide
  Sense strand starting at position 2809 of SEQ ID NO: 1561165
gcaguagccugaccuacau

SEQ ID NO: 1651450 - RNA, 19 nt, Artificial Sequence
  Description of Artificial Sequence: Synthetic oligonucleotide
  Antisense strand to SEQ ID NO: 1651449
auguaggucaggcuacugc

SEQ ID NO: 1651451 - RNA, 19 nt, Artificial Sequence
  Description of Artificial Sequence: Synthetic oligonucleotide
  Sense strand starting at position 3315 of SEQ ID NO: 1561165
gccauuaaucgugcaugua

SEQ ID NO: 1651452 - RNA, 19 nt, Artificial Sequence
  Description of Artificial Sequence: Synthetic oligonucleotide
  Antisense strand to SEQ ID NO: 1651451
uacaugcacgauuaauggc

SEQ ID NO: 1651453 - RNA, 19 nt, Artificial Sequence
  Description of Artificial Sequence: Synthetic oligonucleotide
  Sense strand starting at position 3316 of SEQ ID NO: 1561165
ccauuaaucgugcauguau

SEQ ID NO: 1651454 - RNA, 19 nt, Artificial Sequence
  Description of Artificial Sequence: Synthetic oligonucleotide
  Antisense strand to SEQ ID NO: 1651453
auacaugcacgauuaaugg

SEQ ID NO: 1651455 - RNA, 19 nt, Artificial Sequence
  Description of Artificial Sequence: Synthetic oligonucleotide
  Sense strand starting at position 3318 of SEQ ID NO: 1561165
auuaaucgugcauguauuu

SEQ ID NO: 1651456 - RNA, 19 nt, Artificial Sequence
  Description of Artificial Sequence: Synthetic oligonucleotide
  Antisense strand to SEQ ID NO: 1651455
aaauacaugcacgauuaau

SEQ ID NO: 1651457 - RNA, 19 nt, Artificial Sequence
  Description of Artificial Sequence: Synthetic oligonucleotide
  Sense strand starting at position 3359 of SEQ ID NO: 1561165
ggagaacauuucuggcaac

SEQ ID NO: 1651458 - RNA, 19 nt, Artificial Sequence
  Description of Artificial Sequence: Synthetic oligonucleotide
  Antisense strand to SEQ ID NO: 1651457
guugccagaaauguucucc

SEQ ID NO: 1651459 - RNA, 19 nt, Artificial Sequence
  Description of Artificial Sequence: Synthetic oligonucleotide
  Sense strand starting at position 3362 of SEQ ID NO: 1561165
gaacauuucuggcaacugu

SEQ ID NO: 1651460 - RNA, 19 nt, Artificial Sequence
  Description of Artificial Sequence: Synthetic oligonucleotide
  Antisense strand to SEQ ID NO: 1651459
acaguugccagaaauguuc

SEQ ID NO: 1651461 - RNA, 19 nt, Artificial Sequence
  Description of Artificial Sequence: Synthetic oligonucleotide
  Sense strand starting at position 3371 of SEQ ID NO: 1561165
uggcaacuguaacuuagau

SEQ ID NO: 1651462 - RNA, 19 nt, Artificial Sequence
  Description of Artificial Sequence: Synthetic oligonucleotide
  Antisense strand to SEQ ID NO: 1651461
aucuaaguuacaguugcca

SEQ ID NO: 1651463 - RNA, 19 nt, Artificial Sequence
  Description of Artificial Sequence: Synthetic oligonucleotide
  Sense strand starting at position 3383 of SEQ ID NO: 1561165
cuuagauggugaucaguuu

SEQ ID NO: 1651464 - RNA, 19 nt, Artificial Sequence
  Description of Artificial Sequence: Synthetic oligonucleotide
  Antisense strand to SEQ ID NO: 1651463
aaacugaucaccaucuaag

SEQ ID NO: 1651465 - RNA, 19 nt, Artificial Sequence
  Description of Artificial Sequence: Synthetic oligonucleotide
  Sense strand starting at position 3407 of SEQ ID NO: 1561165
cguccuuggaaaugucuca

SEQ ID NO: 1651466 - RNA, 19 nt, Artificial Sequence
  Description of Artificial Sequence: Synthetic oligonucleotide
  Antisense strand to SEQ ID NO: 1651465
ugagacauuuccaaggacg

SEQ ID NO: 1651467 - RNA, 19 nt, Artificial Sequence
  Description of Artificial Sequence: Synthetic oligonucleotide
  Sense strand starting at position 3504 of SEQ ID NO: 1561165
ggacuuuccuauccuugaa

SEQ ID NO: 1651468 - RNA, 19 nt, Artificial Sequence
  Description of Artificial Sequence: Synthetic oligonucleotide
  Antisense strand to SEQ ID NO: 1651467
uucaaggauaggaaagucc

SEQ ID NO: 1651469 - RNA, 19 nt, Artificial Sequence
  Description of Artificial Sequence: Synthetic oligonucleotide
  Sense strand starting at position 3536 of SEQ ID NO: 1561165
ggaugaucuuuccuaccca

SEQ ID NO: 1651470 - RNA, 19 nt, Artificial Sequence
  Description of Artificial Sequence: Synthetic oligonucleotide
  Antisense strand to SEQ ID NO: 1651469
uggguaggaaagaucaucc

SEQ ID NO: 1651471 - RNA, 19 nt, Artificial Sequence
  Description of Artificial Sequence: Synthetic oligonucleotide
  Sense strand starting at position 3565 of SEQ ID NO: 1561165
cuuagcucccagugacaau

SEQ ID NO: 1651472 - RNA, 19 nt, Artificial Sequence
  Description of Artificial Sequence: Synthetic oligonucleotide
  Antisense strand to SEQ ID NO: 1651471
auugucacugggagcuaag

SEQ ID NO: 1651473 - RNA, 19 nt, Artificial Sequence
  Description of Artificial Sequence: Synthetic oligonucleotide
  Sense strand starting at position 3618 of SEQ ID NO: 1561165
cugugaaauuuguuucucu

SEQ ID NO: 1651474 - RNA, 19 nt, Artificial Sequence
  Description of Artificial Sequence: Synthetic oligonucleotide
  Antisense strand to SEQ ID NO: 1651473
agagaaacaaauuucacag

SEQ ID NO: 1651475 - RNA, 19 nt, Artificial Sequence
  Description of Artificial Sequence: Synthetic oligonucleotide
  Sense strand starting at position 3718 of SEQ ID NO: 1561165
gcugcuuugcaauaaauau

SEQ ID NO: 1651476 - RNA, 19 nt, Artificial Sequence
  Description of Artificial Sequence: Synthetic oligonucleotide
  Antisense strand to SEQ ID NO: 1651475
auauuuauugcaaagcagc

SEQ ID NO: 1651477 - RNA, 19 nt, Artificial Sequence
  Description of Artificial Sequence: Synthetic oligonucleotide
  Sense strand starting at position 3750 of SEQ ID NO: 1561165
ggcaccugcugucuacaaa

SEQ ID NO: 1651478 - RNA, 19 nt, Artificial Sequence
  Description of Artificial Sequence: Synthetic oligonucleotide
  Antisense strand to SEQ ID NO: 1651477
uuuguagacagcaggugcc

SEQ ID NO: 1651479 - RNA, 19 nt, Artificial Sequence
  Description of Artificial Sequence: Synthetic oligonucleotide
  Sense strand starting at position 3751 of SEQ ID NO: 1561165
gcaccugcugucuacaaau

SEQ ID NO: 1651480 - RNA, 19 nt, Artificial Sequence
  Description of Artificial Sequence: Synthetic oligonucleotide
  Antisense strand to SEQ ID NO: 1651479
auuuguagacagcaggugc

SEQ ID NO: 1651481 - RNA, 19 nt, Artificial Sequence
  Description of Artificial Sequence: Synthetic oligonucleotide
  Sense strand starting at position 3760 of SEQ ID NO: 1561165
gucuacaaauggcucuaua

SEQ ID NO: 1651482 - RNA, 19 nt, Artificial Sequence
  Description of Artificial Sequence: Synthetic oligonucleotide
  Antisense strand to SEQ ID NO: 1651481
uauagagccauuuguagac

SEQ ID NO: 1651483 - RNA, 19 nt, Artificial Sequence
  Description of Artificial Sequence: Synthetic oligonucleotide
  Sense strand starting at position 3787 of SEQ ID NO: 1561165
cgucucacacugcaugaaa

SEQ ID NO: 1651484 - RNA, 19 nt, Artificial Sequence
  Description of Artificial Sequence: Synthetic oligonucleotide
  Antisense strand to SEQ ID NO: 1651483
uuucaugcagugugagacg

SEQ ID NO: 1651485 - RNA, 19 nt, Artificial Sequence
  Description of Artificial Sequence: Synthetic oligonucleotide
  Sense strand starting at position 3807 of SEQ ID NO: 1561165
aaugcauuugugggugagu

SEQ ID NO: 1651486 - RNA, 19 nt, Artificial Sequence
  Description of Artificial Sequence: Synthetic oligonucleotide
  Antisense strand to SEQ ID NO: 1651485
acucacccacaaaugcauu

SEQ ID NO: 1651487 - RNA, 19 nt, Artificial Sequence
  Description of Artificial Sequence: Synthetic oligonucleotide
  Sense strand starting at position 3808 of SEQ ID NO: 1561165
augcauuugugggugagua

SEQ ID NO: 1651488 - RNA, 19 nt, Artificial Sequence
  Description of Artificial Sequence: Synthetic oligonucleotide
  Antisense strand to SEQ ID NO: 1651487
uacucacccacaaaugcau

SEQ ID NO: 1651489 - RNA, 19 nt, Artificial Sequence
  Description of Artificial Sequence: Synthetic oligonucleotide
  Sense strand starting at position 3809 of SEQ ID NO: 1561165
ugcauuugugggugaguag

SEQ ID NO: 1651490 - RNA, 19 nt, Artificial Sequence
  Description of Artificial Sequence: Synthetic oligonucleotide
  Antisense strand to SEQ ID NO: 1651489
cuacucacccacaaaugca

SEQ ID NO: 1651491 - RNA, 19 nt, Artificial Sequence
  Description of Artificial Sequence: Synthetic oligonucleotide
  Sense strand starting at position 3824 of SEQ ID NO: 1561165
guagaugggugggugaaua

SEQ ID NO: 1651492 - RNA, 19 nt, Artificial Sequence
  Description of Artificial Sequence: Synthetic oligonucleotide
  Antisense strand to SEQ ID NO: 1651491
uauucacccacccaucuac

SEQ ID NO: 1651493 - RNA, 19 nt, Artificial Sequence
  Description of Artificial Sequence: Synthetic oligonucleotide
  Sense strand starting at position 3854 of SEQ ID NO: 1561165
auaguaagcggguaacacu

SEQ ID NO: 1651494 - RNA, 19 nt, Artificial Sequence
  Description of Artificial Sequence: Synthetic oligonucleotide
  Antisense strand to SEQ ID NO: 1651493
aguguuacccgcuuacuau

SEQ ID NO: 1651495 - RNA, 19 nt, Artificial Sequence
  Description of Artificial Sequence: Synthetic oligonucleotide
  Sense strand starting at position 3975 of SEQ ID NO: 1561165
gcuggagucagccacuguu

SEQ ID NO: 1651496 - RNA, 19 nt, Artificial Sequence
  Description of Artificial Sequence: Synthetic oligonucleotide
  Antisense strand to SEQ ID NO: 1651495
aacaguggcugacuccagc

SEQ ID NO: 1651497 - RNA, 19 nt, Artificial Sequence
  Description of Artificial Sequence: Synthetic oligonucleotide
  Sense strand starting at position 303 of SEQ ID NO: 1561166
aggugaucugccugggauu

SEQ ID NO: 1651498 - RNA, 19 nt, Artificial Sequence
  Description of Artificial Sequence: Synthetic oligonucleotide
  Antisense strand to SEQ ID NO: 1651497
aaucccaggcagaucaccu

SEQ ID NO: 1651499 - RNA, 19 nt, Artificial Sequence
  Description of Artificial Sequence: Synthetic oligonucleotide
  Sense strand starting at position 790 of SEQ ID NO: 1561166
ucaugcaucgaauaugcau

SEQ ID NO: 1651500 - RNA, 19 nt, Artificial Sequence
  Description of Artificial Sequence: Synthetic oligonucleotide
  Antisense strand to SEQ ID NO: 1651499
augcauauucgaugcauga

SEQ ID NO: 1651501 - RNA, 19 nt, Artificial Sequence
  Description of Artificial Sequence: Synthetic oligonucleotide
  Sense strand starting at position 1059 of SEQ ID NO: 1561166
agguaacauugagcugaga

SEQ ID NO: 1651502 - RNA, 19 nt, Artificial Sequence
  Description of Artificial Sequence: Synthetic oligonucleotide
  Antisense strand to SEQ ID NO: 1651501
ucucagcucaauguuaccu

SEQ ID NO: 1651503 - RNA, 19 nt, Artificial Sequence
  Description of Artificial Sequence: Synthetic oligonucleotide
  Sense strand starting at position 1280 of SEQ ID NO: 1561166
cugggugucagggaagagu

SEQ ID NO: 1651504 - RNA, 19 nt, Artificial Sequence
  Description of Artificial Sequence: Synthetic oligonucleotide
  Antisense strand to SEQ ID NO: 1651503
acucuucccugacacccag

SEQ ID NO: 1651505 - RNA, 19 nt, Artificial Sequence
  Description of Artificial Sequence: Synthetic oligonucleotide
  Sense strand starting at position 1322 of SEQ ID NO: 1561166
gggugucugggaggaaucu

SEQ ID NO: 1651506 - RNA, 19 nt, Artificial Sequence
  Description of Artificial Sequence: Synthetic oligonucleotide
  Antisense strand to SEQ ID NO: 1651505
agauuccucccagacaccc

SEQ ID NO: 1651507 - RNA, 19 nt, Artificial Sequence
  Description of Artificial Sequence: Synthetic oligonucleotide
  Sense strand starting at position 1350 of SEQ ID NO: 1561166
gggagggauccuggguguu

SEQ ID NO: 1651508 - RNA, 19 nt, Artificial Sequence
  Description of Artificial Sequence: Synthetic oligonucleotide
  Antisense strand to SEQ ID NO: 1651507
aacacccaggaucccuccc

SEQ ID NO: 1651509 - RNA, 19 nt, Artificial Sequence
  Description of Artificial Sequence: Synthetic oligonucleotide
  Sense strand starting at position 1371 of SEQ ID NO: 1561166
ggaagaauccaggguguca

SEQ ID NO: 1651510 - RNA, 19 nt, Artificial Sequence
  Description of Artificial Sequence: Synthetic oligonucleotide
  Antisense strand to SEQ ID NO: 1651509
ugacacccuggauucuucc

SEQ ID NO: 1651511 - RNA, 19 nt, Artificial Sequence
  Description of Artificial Sequence: Synthetic oligonucleotide
  Sense strand starting at position 1373 of SEQ ID NO: 1561166
aagaauccagggugucaga

SEQ ID NO: 1651512 - RNA, 19 nt, Artificial Sequence
  Description of Artificial Sequence: Synthetic oligonucleotide
  Antisense strand to SEQ ID NO: 1651511
ucugacacccuggauucuu

SEQ ID NO: 1651513 - RNA, 19 nt, Artificial Sequence
  Description of Artificial Sequence: Synthetic oligonucleotide
  Sense strand starting at position 1400 of SEQ ID NO: 1561166
cugggugucacggaggaau

SEQ ID NO: 1651514 - RNA, 19 nt, Artificial Sequence
  Description of Artificial Sequence: Synthetic oligonucleotide
  Antisense strand to SEQ ID NO: 1651513
auuccuccgugacacccag

SEQ ID NO: 1651515 - RNA, 19 nt, Artificial Sequence
  Description of Artificial Sequence: Synthetic oligonucleotide
  Sense strand starting at position 1451 of SEQ ID NO: 1561166
ggagaaauucagggcguug

SEQ ID NO: 1651516 - RNA, 19 nt, Artificial Sequence
  Description of Artificial Sequence: Synthetic oligonucleotide
  Antisense strand to SEQ ID NO: 1651515
caacgcccugaauuucucc

SEQ ID NO: 1651517 - RNA, 19 nt, Artificial Sequence
  Description of Artificial Sequence: Synthetic oligonucleotide
  Sense strand starting at position 1456 of SEQ ID NO: 1561166
aauucagggcguugagaga

SEQ ID NO: 1651518 - RNA, 19 nt, Artificial Sequence
  Description of Artificial Sequence: Synthetic oligonucleotide
  Antisense strand to SEQ ID NO: 1651517
ucucucaacgcccugaauu

SEQ ID NO: 1651519 - RNA, 19 nt, Artificial Sequence
  Description of Artificial Sequence: Synthetic oligonucleotide
  Sense strand starting at position 1543 of SEQ ID NO: 1561166
guaggaauccuggguguug

SEQ ID NO: 1651520 - RNA, 19 nt, Artificial Sequence
  Description of Artificial Sequence: Synthetic oligonucleotide
  Antisense strand to SEQ ID NO: 1651519
caacacccaggauuccuac

SEQ ID NO: 1651521 - RNA, 19 nt, Artificial Sequence
  Description of Artificial Sequence: Synthetic oligonucleotide
  Sense strand starting at position 2248 of SEQ ID NO: 1561166
aauuguaaagugggaucau

SEQ ID NO: 1651522 - RNA, 19 nt, Artificial Sequence
  Description of Artificial Sequence: Synthetic oligonucleotide
  Antisense strand to SEQ ID NO: 1651521
augaucccacuuuacaauu

SEQ ID NO: 1651523 - RNA, 19 nt, Artificial Sequence
  Description of Artificial Sequence: Synthetic oligonucleotide
  Sense strand starting at position 2257 of SEQ ID NO: 1561166
gugggaucaucuccguuag

SEQ ID NO: 1651524 - RNA, 19 nt, Artificial Sequence
  Description of Artificial Sequence: Synthetic oligonucleotide
  Antisense strand to SEQ ID NO: 1651523
cuaacggagaugaucccac

SEQ ID NO: 1651525 - RNA, 19 nt, Artificial Sequence
  Description of Artificial Sequence: Synthetic oligonucleotide
  Sense strand starting at position 2258 of SEQ ID NO: 1561166
ugggaucaucuccguuagu

SEQ ID NO: 1651526 - RNA, 19 nt, Artificial Sequence
  Description of Artificial Sequence: Synthetic oligonucleotide
  Antisense strand to SEQ ID NO: 1651525
acuaacggagaugauccca

SEQ ID NO: 1651527 - RNA, 19 nt, Artificial Sequence
  Description of Artificial Sequence: Synthetic oligonucleotide
  Sense strand starting at position 2259 of SEQ ID NO: 1561166
gggaucaucuccguuagug

SEQ ID NO: 1651528 - RNA, 19 nt, Artificial Sequence
  Description of Artificial Sequence: Synthetic oligonucleotide
  Antisense strand to SEQ ID NO: 1651527
cacuaacggagaugauccc

SEQ ID NO: 1651529 - RNA, 19 nt, Artificial Sequence
  Description of Artificial Sequence: Synthetic oligonucleotide
  Sense strand starting at position 2261 of SEQ ID NO: 1561166
gaucaucuccguuagugau

SEQ ID NO: 1651530 - RNA, 19 nt, Artificial Sequence
  Description of Artificial Sequence: Synthetic oligonucleotide
  Antisense strand to SEQ ID NO: 1651529
aucacuaacggagaugauc

SEQ ID NO: 1651531 - RNA, 19 nt, Artificial Sequence
  Description of Artificial Sequence: Synthetic oligonucleotide
  Sense strand starting at position 2269 of SEQ ID NO: 1561166
ccguuagugauaggugcuu

SEQ ID NO: 1651532 - RNA, 19 nt, Artificial Sequence
  Description of Artificial Sequence: Synthetic oligonucleotide
  Antisense strand to SEQ ID NO: 1651531
aagcaccuaucacuaacgg

SEQ ID NO: 1651533 - RNA, 19 nt, Artificial Sequence
  Description of Artificial Sequence: Synthetic oligonucleotide
  Sense strand starting at position 2278 of SEQ ID NO: 1561166
auaggugcuuuccaggaaa

SEQ ID NO: 1651534 - RNA, 19 nt, Artificial Sequence
  Description of Artificial Sequence: Synthetic oligonucleotide
  Antisense strand to SEQ ID NO: 1651533
uuuccuggaaagcaccuau

SEQ ID NO: 1651535 - RNA, 19 nt, Artificial Sequence
  Description of Artificial Sequence: Synthetic oligonucleotide
  Sense strand starting at position 2280 of SEQ ID NO: 1561166
aggugcuuuccaggaaaua

SEQ ID NO: 1651536 - RNA, 19 nt, Artificial Sequence
  Description of Artificial Sequence: Synthetic oligonucleotide
  Antisense strand to SEQ ID NO: 1651535
uauuuccuggaaagcaccu

SEQ ID NO: 1651537 - RNA, 19 nt, Artificial Sequence
  Description of Artificial Sequence: Synthetic oligonucleotide
  Sense strand starting at position 2281 of SEQ ID NO: 1561166
ggugcuuuccaggaaauaa

SEQ ID NO: 1651538 - RNA, 19 nt, Artificial Sequence
  Description of Artificial Sequence: Synthetic oligonucleotide
  Antisense strand to SEQ ID NO: 1651537
uuauuuccuggaaagcacc

SEQ ID NO: 1651539 - RNA, 19 nt, Artificial Sequence
  Description of Artificial Sequence: Synthetic oligonucleotide
  Sense strand starting at position 3164 of SEQ ID NO: 1561166
cguggugacaagugucaga

SEQ ID NO: 1651540 - RNA, 19 nt, Artificial Sequence
  Description of Artificial Sequence: Synthetic oligonucleotide
  Antisense strand to SEQ ID NO: 1651539
ucugacacuugucaccacg

SEQ ID NO: 1651541 - RNA, 19 nt, Artificial Sequence
  Description of Artificial Sequence: Synthetic oligonucleotide
  Sense strand starting at position 3171 of SEQ ID NO: 1561166
acaagugucagauguguuu

SEQ ID NO: 1651542 - RNA, 19 nt, Artificial Sequence
  Description of Artificial Sequence: Synthetic oligonucleotide
  Antisense strand to SEQ ID NO: 1651541
aaacacaucugacacuugu

SEQ ID NO: 1651543 - RNA, 19 nt, Artificial Sequence
  Description of Artificial Sequence: Synthetic oligonucleotide
  Sense strand starting at position 3182 of SEQ ID NO: 1561166
auguguuucugguugcaau

SEQ ID NO: 1651544 - RNA, 19 nt, Artificial Sequence
  Description of Artificial Sequence: Synthetic oligonucleotide
  Antisense strand to SEQ ID NO: 1651543
auugcaaccagaaacacau

SEQ ID NO: 1651545 - RNA, 19 nt, Artificial Sequence
  Description of Artificial Sequence: Synthetic oligonucleotide
  Sense strand starting at position 3183 of SEQ ID NO: 1561166
uguguuucugguugcaaug

SEQ ID NO: 1651546 - RNA, 19 nt, Artificial Sequence
  Description of Artificial Sequence: Synthetic oligonucleotide
  Antisense strand to SEQ ID NO: 1651545
cauugcaaccagaaacaca

SEQ ID NO: 1651547 - RNA, 19 nt, Artificial Sequence
  Description of Artificial Sequence: Synthetic oligonucleotide
  Sense strand starting at position 3206 of SEQ ID NO: 1561166
cugaaaguaucugugguuu

SEQ ID NO: 1651548 - RNA, 19 nt, Artificial Sequence
  Description of Artificial Sequence: Synthetic oligonucleotide
  Antisense strand to SEQ ID NO: 1651547
aaaccacagauacuuucag

SEQ ID NO: 1651549 - RNA, 19 nt, Artificial Sequence
  Description of Artificial Sequence: Synthetic oligonucleotide
  Sense strand starting at position 3271 of SEQ ID NO: 1561166
auuaauaauugagggaaug

SEQ ID NO: 1651550 - RNA, 19 nt, Artificial Sequence
  Description of Artificial Sequence: Synthetic oligonucleotide
  Antisense strand to SEQ ID NO: 1651549
cauucccucaauuauuaau

SEQ ID NO: 1651551 - RNA, 19 nt, Artificial Sequence
  Description of Artificial Sequence: Synthetic oligonucleotide
  Sense strand starting at position 3288 of SEQ ID NO: 1561166
ugguaauuaucaguuagag

SEQ ID NO: 1651552 - RNA, 19 nt, Artificial Sequence
  Description of Artificial Sequence: Synthetic oligonucleotide
  Antisense strand to SEQ ID NO: 1651551
cucuaacugauaauuacca

SEQ ID NO: 1651553 - RNA, 19 nt, Artificial Sequence
  Description of Artificial Sequence: Synthetic oligonucleotide
  Sense strand starting at position 3290 of SEQ ID NO: 1561166
guaauuaucaguuagaguc

SEQ ID NO: 1651554 - RNA, 19 nt, Artificial Sequence
  Description of Artificial Sequence: Synthetic oligonucleotide
  Antisense strand to SEQ ID NO: 1651553
gacucuaacugauaauuac

SEQ ID NO: 1651555 - RNA, 19 nt, Artificial Sequence
  Description of Artificial Sequence: Synthetic oligonucleotide
  Sense strand starting at position 3296 of SEQ ID NO: 1561166
aucaguuagagucagugaa

SEQ ID NO: 1651556 - RNA, 19 nt, Artificial Sequence
  Description of Artificial Sequence: Synthetic oligonucleotide
  Antisense strand to SEQ ID NO: 1651555
uucacugacucuaacugau

SEQ ID NO: 1651557 - RNA, 19 nt, Artificial Sequence
  Description of Artificial Sequence: Synthetic oligonucleotide
  Sense strand starting at position 3408 of SEQ ID NO: 1561166
aaaguucuuguagggagau

SEQ ID NO: 1651558 - RNA, 19 nt, Artificial Sequence
  Description of Artificial Sequence: Synthetic oligonucleotide
  Antisense strand to SEQ ID NO: 1651557
aucucccuacaagaacuuu

SEQ ID NO: 1651559 - RNA, 19 nt, Artificial Sequence
  Description of Artificial Sequence: Synthetic oligonucleotide
  Sense strand starting at position 3420 of SEQ ID NO: 1561166
gggagauagcaauggaagu

SEQ ID NO: 1651560 - RNA, 19 nt, Artificial Sequence
  Description of Artificial Sequence: Synthetic oligonucleotide
  Antisense strand to SEQ ID NO: 1651559
acuuccauugcuaucuccc

SEQ ID NO: 1651561 - RNA, 19 nt, Artificial Sequence
  Description of Artificial Sequence: Synthetic oligonucleotide
  Sense strand starting at position 3421 of SEQ ID NO: 1561166
ggagauagcaauggaaguu

SEQ ID NO: 1651562 - RNA, 19 nt, Artificial Sequence
  Description of Artificial Sequence: Synthetic oligonucleotide
  Antisense strand to SEQ ID NO: 1651561
aacuuccauugcuaucucc

SEQ ID NO: 1651563 - RNA, 19 nt, Artificial Sequence
  Description of Artificial Sequence: Synthetic oligonucleotide
  Sense strand starting at position 3433 of SEQ ID NO: 1561166
ggaaguuauguugauguca

SEQ ID NO: 1651564 - RNA, 19 nt, Artificial Sequence
  Description of Artificial Sequence: Synthetic oligonucleotide
  Antisense strand to SEQ ID NO: 1651563
ugacaucaacauaacuucc

SEQ ID NO: 1651565 - RNA, 19 nt, Artificial Sequence
  Description of Artificial Sequence: Synthetic oligonucleotide
  Sense strand starting at position 3473 of SEQ ID NO: 1561166
uugaguacuucucuccagu

SEQ ID NO: 1651566 - RNA, 19 nt, Artificial Sequence
  Description of Artificial Sequence: Synthetic oligonucleotide
  Antisense strand to SEQ ID NO: 1651565
acuggagagaaguacucaa

SEQ ID NO: 1651567 - RNA, 19 nt, Artificial Sequence
  Description of Artificial Sequence: Synthetic oligonucleotide
  Sense strand starting at position 3475 of SEQ ID NO: 1561166
gaguacuucucuccaguga

SEQ ID NO: 1651568 - RNA, 19 nt, Artificial Sequence
  Description of Artificial Sequence: Synthetic oligonucleotide
  Antisense strand to SEQ ID NO: 1651567
ucacuggagagaaguacuc

SEQ ID NO: 1651569 - RNA, 19 nt, Artificial Sequence
  Description of Artificial Sequence: Synthetic oligonucleotide
  Sense strand starting at position 3479 of SEQ ID NO: 1561166
acuucucuccagugaggga

SEQ ID NO: 1651570 - RNA, 19 nt, Artificial Sequence
  Description of Artificial Sequence: Synthetic oligonucleotide
  Antisense strand to SEQ ID NO: 1651569
ucccucacuggagagaagu

SEQ ID NO: 1651571 - RNA, 19 nt, Artificial Sequence
  Description of Artificial Sequence: Synthetic oligonucleotide
  Sense strand starting at position 3516 of SEQ ID NO: 1561166
gacuguguuccaggaacgu

SEQ ID NO: 1651572 - RNA, 19 nt, Artificial Sequence
  Description of Artificial Sequence: Synthetic oligonucleotide
  Antisense strand to SEQ ID NO: 1651571
acguuccuggaacacaguc

SEQ ID NO: 1651573 - RNA, 19 nt, Artificial Sequence
  Description of Artificial Sequence: Synthetic oligonucleotide
  Sense strand starting at position 3531 of SEQ ID NO: 1561166
acgucuaggcucugggaau

SEQ ID NO: 1651574 - RNA, 19 nt, Artificial Sequence
  Description of Artificial Sequence: Synthetic oligonucleotide
  Antisense strand to SEQ ID NO: 1651573
auucccagagccuagacgu

SEQ ID NO: 1651575 - RNA, 19 nt, Artificial Sequence
  Description of Artificial Sequence: Synthetic oligonucleotide
  Sense strand starting at position 3683 of SEQ ID NO: 1561166
ggugcuuguacccaugcaa

SEQ ID NO: 1651576 - RNA, 19 nt, Artificial Sequence
  Description of Artificial Sequence: Synthetic oligonucleotide
  Antisense strand to SEQ ID NO: 1651575
uugcauggguacaagcacc

SEQ ID NO: 1651577 - RNA, 19 nt, Artificial Sequence
  Description of Artificial Sequence: Synthetic oligonucleotide
  Sense strand starting at position 193 of SEQ ID NO: 1561167
ccgagacucuacgugaaag

SEQ ID NO: 1651578 - RNA, 19 nt, Artificial Sequence
  Description of Artificial Sequence: Synthetic oligonucleotide
  Antisense strand to SEQ ID NO: 1651577
cuuucacguagagucucgg

SEQ ID NO: 1651579 - RNA, 19 nt, Artificial Sequence
  Description of Artificial Sequence: Synthetic oligonucleotide
  Sense strand starting at position 495 of SEQ ID NO: 1561167
acacauuccucgugacuca

SEQ ID NO: 1651580 - RNA, 19 nt, Artificial Sequence
  Description of Artificial Sequence: Synthetic oligonucleotide
  Antisense strand to SEQ ID NO: 1651579
ugagucacgaggaaugugu

SEQ ID NO: 1651581 - RNA, 19 nt, Artificial Sequence
  Description of Artificial Sequence: Synthetic oligonucleotide
  Sense strand starting at position 983 of SEQ ID NO: 1561167
aaagcacguuuauggaaau

SEQ ID NO: 1651582 - RNA, 19 nt, Artificial Sequence
  Description of Artificial Sequence: Synthetic oligonucleotide
  Antisense strand to SEQ ID NO: 1651581
auuuccauaaacgugcuuu

SEQ ID NO: 1651583 - RNA, 19 nt, Artificial Sequence
  Description of Artificial Sequence: Synthetic oligonucleotide
  Sense strand starting at position 1052 of SEQ ID NO: 1561167
gcugcagccgcgaguugua

SEQ ID NO: 1651584 - RNA, 19 nt, Artificial Sequence
  Description of Artificial Sequence: Synthetic oligonucleotide
  Antisense strand to SEQ ID NO: 1651583
uacaacucgcggcugcagc

SEQ ID NO: 1651585 - RNA, 19 nt, Artificial Sequence
  Description of Artificial Sequence: Synthetic oligonucleotide
  Sense strand starting at position 1061 of SEQ ID NO: 1561167
gcgaguuguaggcgcgaga

SEQ ID NO: 1651586 - RNA, 19 nt, Artificial Sequence
  Description of Artificial Sequence: Synthetic oligonucleotide
  Antisense strand to SEQ ID NO: 1651585
ucucgcgccuacaacucgc

SEQ ID NO: 1651587 - RNA, 19 nt, Artificial Sequence
  Description of Artificial Sequence: Synthetic oligonucleotide
  Sense strand starting at position 1342 of SEQ ID NO: 1561167
gcucggaguuguccaggga

SEQ ID NO: 1651588 - RNA, 19 nt, Artificial Sequence
  Description of Artificial Sequence: Synthetic oligonucleotide
  Antisense strand to SEQ ID NO: 1651587
ucccuggacaacuccgagc

SEQ ID NO: 1651589 - RNA, 19 nt, Artificial Sequence
  Description of Artificial Sequence: Synthetic oligonucleotide
  Sense strand starting at position 1375 of SEQ ID NO: 1561167
cuauacacuuccggaaaca

SEQ ID NO: 1651590 - RNA, 19 nt, Artificial Sequence
  Description of Artificial Sequence: Synthetic oligonucleotide
  Antisense strand to SEQ ID NO: 1651589
uguuuccggaaguguauag

SEQ ID NO: 1651591 - RNA, 19 nt, Artificial Sequence
  Description of Artificial Sequence: Synthetic oligonucleotide
  Sense strand starting at position 1387 of SEQ ID NO: 1561167
ggaaacacuuguccgucau

SEQ ID NO: 1651592 - RNA, 19 nt, Artificial Sequence
  Description of Artificial Sequence: Synthetic oligonucleotide
  Antisense strand to SEQ ID NO: 1651591
augacggacaaguguuucc

SEQ ID NO: 1651593 - RNA, 19 nt, Artificial Sequence
  Description of Artificial Sequence: Synthetic oligonucleotide
  Sense strand starting at position 1388 of SEQ ID NO: 1561167
gaaacacuuguccgucauc

SEQ ID NO: 1651594 - RNA, 19 nt, Artificial Sequence
  Description of Artificial Sequence: Synthetic oligonucleotide
  Antisense strand to SEQ ID NO: 1651593
gaugacggacaaguguuuc

SEQ ID NO: 1651595 - RNA, 19 nt, Artificial Sequence
  Description of Artificial Sequence: Synthetic oligonucleotide
  Sense strand starting at position 1399 of SEQ ID NO: 1561167
ccgucauccucuguggaga

SEQ ID NO: 1651596 - RNA, 19 nt, Artificial Sequence
  Description of Artificial Sequence: Synthetic oligonucleotide
  Antisense strand to SEQ ID NO: 1651595
ucuccacagaggaugacgg

SEQ ID NO: 1651597 - RNA, 19 nt, Artificial Sequence
  Description of Artificial Sequence: Synthetic oligonucleotide
  Sense strand starting at position 2027 of SEQ ID NO: 1561167
ggucgcaucacgugacgaa

SEQ ID NO: 1651598 - RNA, 19 nt, Artificial Sequence
  Description of Artificial Sequence: Synthetic oligonucleotide
  Antisense strand to SEQ ID NO: 1651597
uucgucacgugaugcgacc

SEQ ID NO: 1651599 - RNA, 19 nt, Artificial Sequence
  Description of Artificial Sequence: Synthetic oligonucleotide
  Sense strand starting at position 2031 of SEQ ID NO: 1561167
gcaucacgugacgaagagu

SEQ ID NO: 1651600 - RNA, 19 nt, Artificial Sequence
  Description of Artificial Sequence: Synthetic oligonucleotide
  Antisense strand to SEQ ID NO: 1651599
acucuucgucacgugaugc

SEQ ID NO: 1651601 - RNA, 19 nt, Artificial Sequence
  Description of Artificial Sequence: Synthetic oligonucleotide
  Sense strand starting at position 2045 of SEQ ID NO: 1561167
agagucagcuugugcaaca

SEQ ID NO: 1651602 - RNA, 19 nt, Artificial Sequence
  Description of Artificial Sequence: Synthetic oligonucleotide
  Antisense strand to SEQ ID NO: 1651601
uguugcacaagcugacucu

SEQ ID NO: 1651603 - RNA, 19 nt, Artificial Sequence
  Description of Artificial Sequence: Synthetic oligonucleotide
  Sense strand starting at position 2066 of SEQ ID NO: 1561167
gucggaggcucacuagaaa

SEQ ID NO: 1651604 - RNA, 19 nt, Artificial Sequence
  Description of Artificial Sequence: Synthetic oligonucleotide
  Antisense strand to SEQ ID NO: 1651603
uuucuagugagccuccgac

SEQ ID NO: 1651605 - RNA, 19 nt, Artificial Sequence
  Description of Artificial Sequence: Synthetic oligonucleotide
  Sense strand starting at position 2166 of SEQ ID NO: 1561167
agggaucuuucuuagacau

SEQ ID NO: 1651606 - RNA, 19 nt, Artificial Sequence
  Description of Artificial Sequence: Synthetic oligonucleotide
  Antisense strand to SEQ ID NO: 1651605
augucuaagaaagaucccu

SEQ ID NO: 1651607 - RNA, 19 nt, Artificial Sequence
  Description of Artificial Sequence: Synthetic oligonucleotide
  Sense strand starting at position 2258 of SEQ ID NO: 1561167
aaauguuuauuggaguguu

SEQ ID NO: 1651608 - RNA, 19 nt, Artificial Sequence
  Description of Artificial Sequence: Synthetic oligonucleotide
  Antisense strand to SEQ ID NO: 1651607
aacacuccaauaaacauuu

SEQ ID NO: 1651609 - RNA, 19 nt, Artificial Sequence
  Description of Artificial Sequence: Synthetic oligonucleotide
  Sense strand starting at position 2261 of SEQ ID NO: 1561167
uguuuauuggaguguugua

SEQ ID NO: 1651610 - RNA, 19 nt, Artificial Sequence
  Description of Artificial Sequence: Synthetic oligonucleotide
  Antisense strand to SEQ ID NO: 1651609
uacaacacuccaauaaaca

SEQ ID NO: 1651611 - RNA, 19 nt, Artificial Sequence
  Description of Artificial Sequence: Synthetic oligonucleotide
  Sense strand starting at position 2342 of SEQ ID NO: 1561167
aggcaugcaucuucuuaaa

SEQ ID NO: 1651612 - RNA, 19 nt, Artificial Sequence
  Description of Artificial Sequence: Synthetic oligonucleotide
  Antisense strand to SEQ ID NO: 1651611
uuuaagaagaugcaugccu

SEQ ID NO: 1651613 - RNA, 19 nt, Artificial Sequence
  Description of Artificial Sequence: Synthetic oligonucleotide
  Sense strand starting at position 2491 of SEQ ID NO: 1561167
aggagucccucagaucuuu

SEQ ID NO: 1651614 - RNA, 19 nt, Artificial Sequence
  Description of Artificial Sequence: Synthetic oligonucleotide
  Antisense strand to SEQ ID NO: 1651613
aaagaucugagggacuccu

SEQ ID NO: 1651615 - RNA, 19 nt, Artificial Sequence
  Description of Artificial Sequence: Synthetic oligonucleotide
  Sense strand starting at position 2717 of SEQ ID NO: 1561167
gucugaugcuucgcaggga

SEQ ID NO: 1651616 - RNA, 19 nt, Artificial Sequence
  Description of Artificial Sequence: Synthetic oligonucleotide
  Antisense strand to SEQ ID NO: 1651615
ucccugcgaagcaucagac

SEQ ID NO: 1651617 - RNA, 19 nt, Artificial Sequence
  Description of Artificial Sequence: Synthetic oligonucleotide
  Sense strand starting at position 2780 of SEQ ID NO: 1561167
augguuucgcaucguucua

SEQ ID NO: 1651618 - RNA, 19 nt, Artificial Sequence
  Description of Artificial Sequence: Synthetic oligonucleotide
  Antisense strand to SEQ ID NO: 1651617
uagaacgaugcgaaaccau

SEQ ID NO: 1651619 - RNA, 19 nt, Artificial Sequence
  Description of Artificial Sequence: Synthetic oligonucleotide
  Sense strand starting at position 2781 of SEQ ID NO: 1561167
ugguuucgcaucguucuaa

SEQ ID NO: 1651620 - RNA, 19 nt, Artificial Sequence
  Description of Artificial Sequence: Synthetic oligonucleotide
  Antisense strand to SEQ ID NO: 1651619
uuagaacgaugcgaaacca

SEQ ID NO: 1651621 - RNA, 19 nt, Artificial Sequence
  Description of Artificial Sequence: Synthetic oligonucleotide
  Sense strand starting at position 2877 of SEQ ID NO: 1561167
uucuuaguguuuccaaaga

SEQ ID NO: 1651622 - RNA, 19 nt, Artificial Sequence
  Description of Artificial Sequence: Synthetic oligonucleotide
  Antisense strand to SEQ ID NO: 1651621
ucuuuggaaacacuaagaa

SEQ ID NO: 1651623 - RNA, 19 nt, Artificial Sequence
  Description of Artificial Sequence: Synthetic oligonucleotide
  Sense strand starting at position 3131 of SEQ ID NO: 1561167
caaggcugucggcaaauca

SEQ ID NO: 1651624 - RNA, 19 nt, Artificial Sequence
  Description of Artificial Sequence: Synthetic oligonucleotide
  Antisense strand to SEQ ID NO: 1651623
ugauuugccgacagccuug

SEQ ID NO: 1651625 - RNA, 19 nt, Artificial Sequence
  Description of Artificial Sequence: Synthetic oligonucleotide
  Sense strand starting at position 3297 of SEQ ID NO: 1561167
ggugauuccugcuaugaag

SEQ ID NO: 1651626 - RNA, 19 nt, Artificial Sequence
  Description of Artificial Sequence: Synthetic oligonucleotide
  Antisense strand to SEQ ID NO: 1651625
cuucauagcaggaaucacc

SEQ ID NO: 1651627 - RNA, 19 nt, Artificial Sequence
  Description of Artificial Sequence: Synthetic oligonucleotide
  Sense strand starting at position 3299 of SEQ ID NO: 1561167
ugauuccugcuaugaaggu

SEQ ID NO: 1651628 - RNA, 19 nt, Artificial Sequence
  Description of Artificial Sequence: Synthetic oligonucleotide
  Antisense strand to SEQ ID NO: 1651627
accuucauagcaggaauca

SEQ ID NO: 1651629 - RNA, 19 nt, Artificial Sequence
  Description of Artificial Sequence: Synthetic oligonucleotide
  Sense strand starting at position 3305 of SEQ ID NO: 1561167
cugcuaugaaggugggaaa

SEQ ID NO: 1651630 - RNA, 19 nt, Artificial Sequence
  Description of Artificial Sequence: Synthetic oligonucleotide
  Antisense strand to SEQ ID NO: 1651629
uuucccaccuucauagcag

SEQ ID NO: 1651631 - RNA, 19 nt, Artificial Sequence
  Description of Artificial Sequence: Synthetic oligonucleotide
  Sense strand starting at position 3330 of SEQ ID NO: 1561167
acagucugucgccagcauu

SEQ ID NO: 1651632 - RNA, 19 nt, Artificial Sequence
  Description of Artificial Sequence: Synthetic oligonucleotide
  Antisense strand to SEQ ID NO: 1651631
aaugcuggcgacagacugu

SEQ ID NO: 1651633 - RNA, 19 nt, Artificial Sequence
  Description of Artificial Sequence: Synthetic oligonucleotide
  Sense strand starting at position 3440 of SEQ ID NO: 1561167
gaggaaaugcuuugguaag

SEQ ID NO: 1651634 - RNA, 19 nt, Artificial Sequence
  Description of Artificial Sequence: Synthetic oligonucleotide
  Antisense strand to SEQ ID NO: 1651633
cuuaccaaagcauuuccuc

SEQ ID NO: 1651635 - RNA, 19 nt, Artificial Sequence
  Description of Artificial Sequence: Synthetic oligonucleotide
  Sense strand starting at position 3441 of SEQ ID NO: 1561167
aggaaaugcuuugguaaga

SEQ ID NO: 1651636 - RNA, 19 nt, Artificial Sequence
  Description of Artificial Sequence: Synthetic oligonucleotide
  Antisense strand to SEQ ID NO: 1651635
ucuuaccaaagcauuuccu

SEQ ID NO: 1651637 - RNA, 19 nt, Artificial Sequence
  Description of Artificial Sequence: Synthetic oligonucleotide
  Sense strand starting at position 3442 of SEQ ID NO: 1561167
ggaaaugcuuugguaagau

SEQ ID NO: 1651638 - RNA, 19 nt, Artificial Sequence
  Description of Artificial Sequence: Synthetic oligonucleotide
  Antisense strand to SEQ ID NO: 1651637
aucuuaccaaagcauuucc

SEQ ID NO: 1651639 - RNA, 19 nt, Artificial Sequence
  Description of Artificial Sequence: Synthetic oligonucleotide
  Sense strand starting at position 3486 of SEQ ID NO: 1561167
cgggacuucugagagcaag

SEQ ID NO: 1651640 - RNA, 19 nt, Artificial Sequence
  Description of Artificial Sequence: Synthetic oligonucleotide
  Antisense strand to SEQ ID NO: 1651639
cuugcucucagaagucccg

SEQ ID NO: 1651641 - RNA, 19 nt, Artificial Sequence
  Description of Artificial Sequence: Synthetic oligonucleotide
  Sense strand starting at position 3712 of SEQ ID NO: 1561167
uggugucuuuaagacuuga

SEQ ID NO: 1651642 - RNA, 19 nt, Artificial Sequence
  Description of Artificial Sequence: Synthetic oligonucleotide
  Antisense strand to SEQ ID NO: 1651641
ucaagucuuaaagacacca

SEQ ID NO: 1651643 - RNA, 19 nt, Artificial Sequence
  Description of Artificial Sequence: Synthetic oligonucleotide
  Sense strand starting at position 3716 of SEQ ID NO: 1561167
gucuuuaagacuugagcug

SEQ ID NO: 1651644 - RNA, 19 nt, Artificial Sequence
  Description of Artificial Sequence: Synthetic oligonucleotide
  Antisense strand to SEQ ID NO: 1651643
cagcucaagucuuaaagac

SEQ ID NO: 1651645 - RNA, 19 nt, Artificial Sequence
  Description of Artificial Sequence: Synthetic oligonucleotide
  Sense strand starting at position 3833 of SEQ ID NO: 1561167
ugaccuguguacugaccaa

SEQ ID NO: 1651646 - RNA, 19 nt, Artificial Sequence
  Description of Artificial Sequence: Synthetic oligonucleotide
  Antisense strand to SEQ ID NO: 1651645
uuggucaguacacagguca

SEQ ID NO: 1651647 - RNA, 19 nt, Artificial Sequence
  Description of Artificial Sequence: Synthetic oligonucleotide
  Sense strand starting at position 3837 of SEQ ID NO: 1561167
cuguguacugaccaaugua

SEQ ID NO: 1651648 - RNA, 19 nt, Artificial Sequence
  Description of Artificial Sequence: Synthetic oligonucleotide
  Antisense strand to SEQ ID NO: 1651647
uacauuggucaguacacag

SEQ ID NO: 1651649 - RNA, 19 nt, Artificial Sequence
  Description of Artificial Sequence: Synthetic oligonucleotide
  Sense strand starting at position 3880 of SEQ ID NO: 1561167
auaacuucuguguaucuau

SEQ ID NO: 1651650 - RNA, 19 nt, Artificial Sequence
  Description of Artificial Sequence: Synthetic oligonucleotide
  Antisense strand to SEQ ID NO: 1651649
auagauacacagaaguuau

SEQ ID NO: 1651651 - RNA, 19 nt, Artificial Sequence
  Description of Artificial Sequence: Synthetic oligonucleotide
  Sense strand starting at position 3905 of SEQ ID NO: 1561167
ggguguaaacggugagcua

SEQ ID NO: 1651652 - RNA, 19 nt, Artificial Sequence
  Description of Artificial Sequence: Synthetic oligonucleotide
  Antisense strand to SEQ ID NO: 1651651
uagcucaccguuuacaccc

SEQ ID NO: 1651653 - RNA, 19 nt, Artificial Sequence
  Description of Artificial Sequence: Synthetic oligonucleotide
  Sense strand starting at position 3906 of SEQ ID NO: 1561167
gguguaaacggugagcuau

SEQ ID NO: 1651654 - RNA, 19 nt, Artificial Sequence
  Description of Artificial Sequence: Synthetic oligonucleotide
  Antisense strand to SEQ ID NO: 1651653
auagcucaccguuuacacc

SEQ ID NO: 1651655 - RNA, 19 nt, Artificial Sequence
  Description of Artificial Sequence: Synthetic oligonucleotide
  Sense strand starting at position 3967 of SEQ ID NO: 1561167
gcuugggugcgucgugaua

SEQ ID NO: 1651656 - RNA, 19 nt, Artificial Sequence
  Description of Artificial Sequence: Synthetic oligonucleotide
  Antisense strand to SEQ ID NO: 1651655
uaucacgacgcacccaagc

SEQ ID NO: 1651657 - RNA, 19 nt, Artificial Sequence
  Description of Artificial Sequence: Synthetic oligonucleotide
  Sense strand starting at position 406 of SEQ ID NO: 1561168
cccacacaccuguaguauu

SEQ ID NO: 1651658 - RNA, 19 nt, Artificial Sequence
  Description of Artificial Sequence: Synthetic oligonucleotide
  Antisense strand to SEQ ID NO: 1651657
aauacuacagguguguggg

SEQ ID NO: 1651659 - RNA, 19 nt, Artificial Sequence
  Description of Artificial Sequence: Synthetic oligonucleotide
  Sense strand starting at position 459 of SEQ ID NO: 1561168
gagaucuugccuuaaguuc

SEQ ID NO: 1651660 - RNA, 19 nt, Artificial Sequence
  Description of Artificial Sequence: Synthetic oligonucleotide
  Antisense strand to SEQ ID NO: 1651659
gaacuuaaggcaagaucuc

SEQ ID NO: 1651661 - RNA, 19 nt, Artificial Sequence
  Description of Artificial Sequence: Synthetic oligonucleotide
  Sense strand starting at position 768 of SEQ ID NO: 1561168
cucugagaacccuaugcaa

SEQ ID NO: 1651662 - RNA, 19 nt, Artificial Sequence
  Description of Artificial Sequence: Synthetic oligonucleotide
  Antisense strand to SEQ ID NO: 1651661
uugcauaggguucucagag

SEQ ID NO: 1651663 - RNA, 19 nt, Artificial Sequence
  Description of Artificial Sequence: Synthetic oligonucleotide
  Sense strand starting at position 770 of SEQ ID NO: 1561168
cugagaacccuaugcaaca

SEQ ID NO: 1651664 - RNA, 19 nt, Artificial Sequence
  Description of Artificial Sequence: Synthetic oligonucleotide
  Antisense strand to SEQ ID NO: 1651663
uguugcauaggguucucag

SEQ ID NO: 1651665 - RNA, 19 nt, Artificial Sequence
  Description of Artificial Sequence: Synthetic oligonucleotide
  Sense strand starting at position 771 of SEQ ID NO: 1561168
ugagaacccuaugcaacau

SEQ ID NO: 1651666 - RNA, 19 nt, Artificial Sequence
  Description of Artificial Sequence: Synthetic oligonucleotide
  Antisense strand to SEQ ID NO: 1651665
auguugcauaggguucuca

SEQ ID NO: 1651667 - RNA, 19 nt, Artificial Sequence
  Description of Artificial Sequence: Synthetic oligonucleotide
  Sense strand starting at position 821 of SEQ ID NO: 1561168
guauuuacuugaggauaac

SEQ ID NO: 1651668 - RNA, 19 nt, Artificial Sequence
  Description of Artificial Sequence: Synthetic oligonucleotide
  Antisense strand to SEQ ID NO: 1651667
guuauccucaaguaaauac

SEQ ID NO: 1651669 - RNA, 19 nt, Artificial Sequence
  Description of Artificial Sequence: Synthetic oligonucleotide
  Sense strand starting at position 1256 of SEQ ID NO: 1561168
gcacgagcaauaugaagua

SEQ ID NO: 1651670 - RNA, 19 nt, Artificial Sequence
  Description of Artificial Sequence: Synthetic oligonucleotide
  Antisense strand to SEQ ID NO: 1651669
uacuucauauugcucgugc

SEQ ID NO: 1651671 - RNA, 19 nt, Artificial Sequence
  Description of Artificial Sequence: Synthetic oligonucleotide
  Sense strand starting at position 1392 of SEQ ID NO: 1561168
agaaaugcucucgguagag

SEQ ID NO: 1651672 - RNA, 19 nt, Artificial Sequence
  Description of Artificial Sequence: Synthetic oligonucleotide
  Antisense strand to SEQ ID NO: 1651671
cucuaccgagagcauuucu

SEQ ID NO: 1651673 - RNA, 19 nt, Artificial Sequence
  Description of Artificial Sequence: Synthetic oligonucleotide
  Sense strand starting at position 1394 of SEQ ID NO: 1561168
aaaugcucucgguagagaa

SEQ ID NO: 1651674 - RNA, 19 nt, Artificial Sequence
  Description of Artificial Sequence: Synthetic oligonucleotide
  Antisense strand to SEQ ID NO: 1651673
uucucuaccgagagcauuu

SEQ ID NO: 1651675 - RNA, 19 nt, Artificial Sequence
  Description of Artificial Sequence: Synthetic oligonucleotide
  Sense strand starting at position 1417 of SEQ ID NO: 1561168
gcauuuaaccgcgagcugu

SEQ ID NO: 1651676 - RNA, 19 nt, Artificial Sequence
  Description of Artificial Sequence: Synthetic oligonucleotide
  Antisense strand to SEQ ID NO: 1651675
acagcucgcgguuaaaugc

SEQ ID NO: 1651677 - RNA, 19 nt, Artificial Sequence
  Description of Artificial Sequence: Synthetic oligonucleotide
  Sense strand starting at position 1423 of SEQ ID NO: 1561168
aaccgcgagcugugaauuu

SEQ ID NO: 1651678 - RNA, 19 nt, Artificial Sequence
  Description of Artificial Sequence: Synthetic oligonucleotide
  Antisense strand to SEQ ID NO: 1651677
aaauucacagcucgcgguu

SEQ ID NO: 1651679 - RNA, 19 nt, Artificial Sequence
  Description of Artificial Sequence: Synthetic oligonucleotide
  Sense strand starting at position 1831 of SEQ ID NO: 1561168
uggagaaucgugugaccuu

SEQ ID NO: 1651680 - RNA, 19 nt, Artificial Sequence
  Description of Artificial Sequence: Synthetic oligonucleotide
  Antisense strand to SEQ ID NO: 1651679
aaggucacacgauucucca

SEQ ID NO: 1651681 - RNA, 19 nt, Artificial Sequence
  Description of Artificial Sequence: Synthetic oligonucleotide
  Sense strand starting at position 2000 of SEQ ID NO: 1561168
uagagagcuugaccucuga

SEQ ID NO: 1651682 - RNA, 19 nt, Artificial Sequence
  Description of Artificial Sequence: Synthetic oligonucleotide
  Antisense strand to SEQ ID NO: 1651681
ucagaggucaagcucucua

SEQ ID NO: 1651683 - RNA, 19 nt, Artificial Sequence
  Description of Artificial Sequence: Synthetic oligonucleotide
  Sense strand starting at position 2004 of SEQ ID NO: 1561168
gagcuugaccucugauagg

SEQ ID NO: 1651684 - RNA, 19 nt, Artificial Sequence
  Description of Artificial Sequence: Synthetic oligonucleotide
  Antisense strand to SEQ ID NO: 1651683
ccuaucagaggucaagcuc

SEQ ID NO: 1651685 - RNA, 19 nt, Artificial Sequence
  Description of Artificial Sequence: Synthetic oligonucleotide
  Sense strand starting at position 2083 of SEQ ID NO: 1561168
gagggucagaucugugauu

SEQ ID NO: 1651686 - RNA, 19 nt, Artificial Sequence
  Description of Artificial Sequence: Synthetic oligonucleotide
  Antisense strand to SEQ ID NO: 1651685
aaucacagaucugacccuc

SEQ ID NO: 1651687 - RNA, 19 nt, Artificial Sequence
  Description of Artificial Sequence: Synthetic oligonucleotide
  Sense strand starting at position 2085 of SEQ ID NO: 1561168
gggucagaucugugauugg

SEQ ID NO: 1651688 - RNA, 19 nt, Artificial Sequence
  Description of Artificial Sequence: Synthetic oligonucleotide
  Antisense strand to SEQ ID NO: 1651687
ccaaucacagaucugaccc

SEQ ID NO: 1651689 - RNA, 19 nt, Artificial Sequence
  Description of Artificial Sequence: Synthetic oligonucleotide
  Sense strand starting at position 2133 of SEQ ID NO: 1561168
gcguguauuccgucacuug

SEQ ID NO: 1651690 - RNA, 19 nt, Artificial Sequence
  Description of Artificial Sequence: Synthetic oligonucleotide
  Antisense strand to SEQ ID NO: 1651689
caagugacggaauacacgc

SEQ ID NO: 1651691 - RNA, 19 nt, Artificial Sequence
  Description of Artificial Sequence: Synthetic oligonucleotide
  Sense strand starting at position 2152 of SEQ ID NO: 1561168
cggugauucggcuacagaa

SEQ ID NO: 1651692 - RNA, 19 nt, Artificial Sequence
  Description of Artificial Sequence: Synthetic oligonucleotide
  Antisense strand to SEQ ID NO: 1651691
uucuguagccgaaucaccg

SEQ ID NO: 1651693 - RNA, 19 nt, Artificial Sequence
  Description of Artificial Sequence: Synthetic oligonucleotide
  Sense strand starting at position 2225 of SEQ ID NO: 1561168
gacggauucgauuggauuc

SEQ ID NO: 1651694 - RNA, 19 nt, Artificial Sequence
  Description of Artificial Sequence: Synthetic oligonucleotide
  Antisense strand to SEQ ID NO: 1651693
gaauccaaucgaauccguc

SEQ ID NO: 1651695 - RNA, 19 nt, Artificial Sequence
  Description of Artificial Sequence: Synthetic oligonucleotide
  Sense strand starting at position 2256 of SEQ ID NO: 1561168
ggaccagcuccagaguaau

SEQ ID NO: 1651696 - RNA, 19 nt, Artificial Sequence
  Description of Artificial Sequence: Synthetic oligonucleotide
  Antisense strand to SEQ ID NO: 1651695
auuacucuggagcuggucc

SEQ ID NO: 1651697 - RNA, 19 nt, Artificial Sequence
  Description of Artificial Sequence: Synthetic oligonucleotide
  Sense strand starting at position 2267 of SEQ ID NO: 1561168
agaguaauugucuauggcu

SEQ ID NO: 1651698 - RNA, 19 nt, Artificial Sequence
  Description of Artificial Sequence: Synthetic oligonucleotide
  Antisense strand to SEQ ID NO: 1651697
agccauagacaauuacucu

SEQ ID NO: 1651699 - RNA, 19 nt, Artificial Sequence
  Description of Artificial Sequence: Synthetic oligonucleotide
  Sense strand starting at position 2288 of SEQ ID NO: 1561168
cccugcaaugacugauuga

SEQ ID NO: 1651700 - RNA, 19 nt, Artificial Sequence
  Description of Artificial Sequence: Synthetic oligonucleotide
  Antisense strand to SEQ ID NO: 1651699
ucaaucagucauugcaggg

SEQ ID NO: 1651701 - RNA, 19 nt, Artificial Sequence
  Description of Artificial Sequence: Synthetic oligonucleotide
  Sense strand starting at position 2576 of SEQ ID NO: 1561168
ccaugcaauccggguauga

SEQ ID NO: 1651702 - RNA, 19 nt, Artificial Sequence
  Description of Artificial Sequence: Synthetic oligonucleotide
  Antisense strand to SEQ ID NO: 1651701
ucauacccggauugcaugg

SEQ ID NO: 1651703 - RNA, 19 nt, Artificial Sequence
  Description of Artificial Sequence: Synthetic oligonucleotide
  Sense strand starting at position 2823 of SEQ ID NO: 1561168
uugcauuacuaaccuguga

SEQ ID NO: 1651704 - RNA, 19 nt, Artificial Sequence
  Description of Artificial Sequence: Synthetic oligonucleotide
  Antisense strand to SEQ ID NO: 1651703
ucacagguuaguaaugcaa

SEQ ID NO: 1651705 - RNA, 19 nt, Artificial Sequence
  Description of Artificial Sequence: Synthetic oligonucleotide
  Sense strand starting at position 2827 of SEQ ID NO: 1561168
auuacuaaccugugauaug

SEQ ID NO: 1651706 - RNA, 19 nt, Artificial Sequence
  Description of Artificial Sequence: Synthetic oligonucleotide
  Antisense strand to SEQ ID NO: 1651705
cauaucacagguuaguaau

SEQ ID NO: 1651707 - RNA, 19 nt, Artificial Sequence
  Description of Artificial Sequence: Synthetic oligonucleotide
  Sense strand starting at position 2834 of SEQ ID NO: 1561168
accugugauauggguuuau

SEQ ID NO: 1651708 - RNA, 19 nt, Artificial Sequence
  Description of Artificial Sequence: Synthetic oligonucleotide
  Antisense strand to SEQ ID NO: 1651707
auaaacccauaucacaggu

SEQ ID NO: 1651709 - RNA, 19 nt, Artificial Sequence
  Description of Artificial Sequence: Synthetic oligonucleotide
  Sense strand starting at position 2916 of SEQ ID NO: 1561168
gauggauagacuuguguuc

SEQ ID NO: 1651710 - RNA, 19 nt, Artificial Sequence
  Description of Artificial Sequence: Synthetic oligonucleotide
  Antisense strand to SEQ ID NO: 1651709
gaacacaagucuauccauc

SEQ ID NO: 1651711 - RNA, 19 nt, Artificial Sequence
  Description of Artificial Sequence: Synthetic oligonucleotide
  Sense strand starting at position 2921 of SEQ ID NO: 1561168
auagacuuguguucuccau

SEQ ID NO: 1651712 - RNA, 19 nt, Artificial Sequence
  Description of Artificial Sequence: Synthetic oligonucleotide
  Antisense strand to SEQ ID NO: 1651711
auggagaacacaagucuau

SEQ ID NO: 1651713 - RNA, 19 nt, Artificial Sequence
  Description of Artificial Sequence: Synthetic oligonucleotide
  Sense strand starting at position 2923 of SEQ ID NO: 1561168
agacuuguguucuccaucu

SEQ ID NO: 1651714 - RNA, 19 nt, Artificial Sequence
  Description of Artificial Sequence: Synthetic oligonucleotide
  Antisense strand to SEQ ID NO: 1651713
agauggagaacacaagucu

SEQ ID NO: 1651715 - RNA, 19 nt, Artificial Sequence
  Description of Artificial Sequence: Synthetic oligonucleotide
  Sense strand starting at position 2925 of SEQ ID NO: 1561168
acuuguguucuccaucuca

SEQ ID NO: 1651716 - RNA, 19 nt, Artificial Sequence
  Description of Artificial Sequence: Synthetic oligonucleotide
  Antisense strand to SEQ ID NO: 1651715
ugagauggagaacacaagu

SEQ ID NO: 1651717 - RNA, 19 nt, Artificial Sequence
  Description of Artificial Sequence: Synthetic oligonucleotide
  Sense strand starting at position 2998 of SEQ ID NO: 1561168
ucgagaugucuugaugcca

SEQ ID NO: 1651718 - RNA, 19 nt, Artificial Sequence
  Description of Artificial Sequence: Synthetic oligonucleotide
  Antisense strand to SEQ ID NO: 1651717
uggcaucaagacaucucga

SEQ ID NO: 1651719 - RNA, 19 nt, Artificial Sequence
  Description of Artificial Sequence: Synthetic oligonucleotide
  Sense strand starting at position 3049 of SEQ ID NO: 1561168
acagguguguugcuaagaa

SEQ ID NO: 1651720 - RNA, 19 nt, Artificial Sequence
  Description of Artificial Sequence: Synthetic oligonucleotide
  Antisense strand to SEQ ID NO: 1651719
uucuuagcaacacaccugu

SEQ ID NO: 1651721 - RNA, 19 nt, Artificial Sequence
  Description of Artificial Sequence: Synthetic oligonucleotide
  Sense strand starting at position 3063 of SEQ ID NO: 1561168
aagaauaaggucugggcua

SEQ ID NO: 1651722 - RNA, 19 nt, Artificial Sequence
  Description of Artificial Sequence: Synthetic oligonucleotide
  Antisense strand to SEQ ID NO: 1651721
uagcccagaccuuauucuu

SEQ ID NO: 1651723 - RNA, 19 nt, Artificial Sequence
  Description of Artificial Sequence: Synthetic oligonucleotide
  Sense strand starting at position 3065 of SEQ ID NO: 1561168
gaauaaggucugggcuaga

SEQ ID NO: 1651724 - RNA, 19 nt, Artificial Sequence
  Description of Artificial Sequence: Synthetic oligonucleotide
  Antisense strand to SEQ ID NO: 1651723
ucuagcccagaccuuauuc

SEQ ID NO: 1651725 - RNA, 19 nt, Artificial Sequence
  Description of Artificial Sequence: Synthetic oligonucleotide
  Sense strand starting at position 3076 of SEQ ID NO: 1561168
gggcuagaaauauggauuc

SEQ ID NO: 1651726 - RNA, 19 nt, Artificial Sequence
  Description of Artificial Sequence: Synthetic oligonucleotide
  Antisense strand to SEQ ID NO: 1651725
gaauccauauuucuagccc

SEQ ID NO: 1651727 - RNA, 19 nt, Artificial Sequence
  Description of Artificial Sequence: Synthetic oligonucleotide
  Sense strand starting at position 3095 of SEQ ID NO: 1561168
uuaguugugguugaaagua

SEQ ID NO: 1651728 - RNA, 19 nt, Artificial Sequence
  Description of Artificial Sequence: Synthetic oligonucleotide
  Antisense strand to SEQ ID NO: 1651727
uacuuucaaccacaacuaa

SEQ ID NO: 1651729 - RNA, 19 nt, Artificial Sequence
  Description of Artificial Sequence: Synthetic oligonucleotide
  Sense strand starting at position 3501 of SEQ ID NO: 1561168
gugucauauaagcauguca

SEQ ID NO: 1651730 - RNA, 19 nt, Artificial Sequence
  Description of Artificial Sequence: Synthetic oligonucleotide
  Antisense strand to SEQ ID NO: 1651729
ugacaugcuuauaugacac

SEQ ID NO: 1651731 - RNA, 19 nt, Artificial Sequence
  Description of Artificial Sequence: Synthetic oligonucleotide
  Sense strand starting at position 3503 of SEQ ID NO: 1561168
gucauauaagcaugucaaa

SEQ ID NO: 1651732 - RNA, 19 nt, Artificial Sequence
  Description of Artificial Sequence: Synthetic oligonucleotide
  Antisense strand to SEQ ID NO: 1651731
uuugacaugcuuauaugac

SEQ ID NO: 1651733 - RNA, 19 nt, Artificial Sequence
  Description of Artificial Sequence: Synthetic oligonucleotide
  Sense strand starting at position 3542 of SEQ ID NO: 1561168
auagaagacuccuuuaagc

SEQ ID NO: 1651734 - RNA, 19 nt, Artificial Sequence
  Description of Artificial Sequence: Synthetic oligonucleotide
  Antisense strand to SEQ ID NO: 1651733
gcuuaaaggagucuucuau

SEQ ID NO: 1651735 - RNA, 19 nt, Artificial Sequence
  Description of Artificial Sequence: Synthetic oligonucleotide
  Sense strand starting at position 3821 of SEQ ID NO: 1561168
gcaugagaccuccaucucu

SEQ ID NO: 1651736 - RNA, 19 nt, Artificial Sequence
  Description of Artificial Sequence: Synthetic oligonucleotide
  Antisense strand to SEQ ID NO: 1651735
agagauggaggucucaugc

SEQ ID NO: 1651737 - RNA, 19 nt, Artificial Sequence
  Description of Artificial Sequence: Synthetic oligonucleotide
  Sense strand starting at position 35 of SEQ ID NO: 1561169
gccgggucugugggauuua

SEQ ID NO: 1651738 - RNA, 19 nt, Artificial Sequence
  Description of Artificial Sequence: Synthetic oligonucleotide
  Antisense strand to SEQ ID NO: 1651737
uaaaucccacagacccggc

SEQ ID NO: 1651739 - RNA, 19 nt, Artificial Sequence
  Description of Artificial Sequence: Synthetic oligonucleotide
  Sense strand starting at position 36 of SEQ ID NO: 1561169
ccgggucugugggauuuaa

SEQ ID NO: 1651740 - RNA, 19 nt, Artificial Sequence
  Description of Artificial Sequence: Synthetic oligonucleotide
  Antisense strand to SEQ ID NO: 1651739
uuaaaucccacagacccgg

SEQ ID NO: 1651741 - RNA, 19 nt, Artificial Sequence
  Description of Artificial Sequence: Synthetic oligonucleotide
  Sense strand starting at position 149 of SEQ ID NO: 1561169
ccuuuauccugguacagga

SEQ ID NO: 1651742 - RNA, 19 nt, Artificial Sequence
  Description of Artificial Sequence: Synthetic oligonucleotide
  Antisense strand to SEQ ID NO: 1651741
uccuguaccaggauaaagg

SEQ ID NO: 1651743 - RNA, 19 nt, Artificial Sequence
  Description of Artificial Sequence: Synthetic oligonucleotide
  Sense strand starting at position 211 of SEQ ID NO: 1561169
aaagaagacuucccugguu

SEQ ID NO: 1651744 - RNA, 19 nt, Artificial Sequence
  Description of Artificial Sequence: Synthetic oligonucleotide
  Antisense strand to SEQ ID NO: 1651743
aaccagggaagucuucuuu

SEQ ID NO: 1651745 - RNA, 19 nt, Artificial Sequence
  Description of Artificial Sequence: Synthetic oligonucleotide
  Sense strand starting at position 236 of SEQ ID NO: 1561169
guaggugucuuauuuggcu

SEQ ID NO: 1651746 - RNA, 19 nt, Artificial Sequence
  Description of Artificial Sequence: Synthetic oligonucleotide
  Antisense strand to SEQ ID NO: 1651745
agccaaauaagacaccuac

SEQ ID NO: 1651747 - RNA, 19 nt, Artificial Sequence
  Description of Artificial Sequence: Synthetic oligonucleotide
  Sense strand starting at position 242 of SEQ ID NO: 1561169
gucuuauuuggcugcccua

SEQ ID NO: 1651748 - RNA, 19 nt, Artificial Sequence
  Description of Artificial Sequence: Synthetic oligonucleotide
  Antisense strand to SEQ ID NO: 1651747
uagggcagccaaauaagac

SEQ ID NO: 1651749 - RNA, 19 nt, Artificial Sequence
  Description of Artificial Sequence: Synthetic oligonucleotide
  Sense strand starting at position 363 of SEQ ID NO: 1561169
agggauaugucccucacca

SEQ ID NO: 1651750 - RNA, 19 nt, Artificial Sequence
  Description of Artificial Sequence: Synthetic oligonucleotide
  Antisense strand to SEQ ID NO: 1651749
uggugagggacauaucccu

SEQ ID NO: 1651751 - RNA, 19 nt, Artificial Sequence
  Description of Artificial Sequence: Synthetic oligonucleotide
  Sense strand starting at position 526 of SEQ ID NO: 1561169
gcggccugcgguugagaaa

SEQ ID NO: 1651752 - RNA, 19 nt, Artificial Sequence
  Description of Artificial Sequence: Synthetic oligonucleotide
  Antisense strand to SEQ ID NO: 1651751
uuucucaaccgcaggccgc

SEQ ID NO: 1651753 - RNA, 19 nt, Artificial Sequence
  Description of Artificial Sequence: Synthetic oligonucleotide
  Sense strand starting at position 834 of SEQ ID NO: 1561169
ggccuaaacacugggauga

SEQ ID NO: 1651754 - RNA, 19 nt, Artificial Sequence
  Description of Artificial Sequence: Synthetic oligonucleotide
  Antisense strand to SEQ ID NO: 1651753
ucaucccaguguuuaggcc

SEQ ID NO: 1651755 - RNA, 19 nt, Artificial Sequence
  Description of Artificial Sequence: Synthetic oligonucleotide
  Sense strand starting at position 836 of SEQ ID NO: 1561169
ccuaaacacugggaugaga

SEQ ID NO: 1651756 - RNA, 19 nt, Artificial Sequence
  Description of Artificial Sequence: Synthetic oligonucleotide
  Antisense strand to SEQ ID NO: 1651755
ucucaucccaguguuuagg

SEQ ID NO: 1651757 - RNA, 19 nt, Artificial Sequence
  Description of Artificial Sequence: Synthetic oligonucleotide
  Sense strand starting at position 935 of SEQ ID NO: 1561169
guagcagaguuauagggua

SEQ ID NO: 1651758 - RNA, 19 nt, Artificial Sequence
  Description of Artificial Sequence: Synthetic oligonucleotide
  Antisense strand to SEQ ID NO: 1651757
uacccuauaacucugcuac

SEQ ID NO: 1651759 - RNA, 19 nt, Artificial Sequence
  Description of Artificial Sequence: Synthetic oligonucleotide
  Sense strand starting at position 937 of SEQ ID NO: 1561169
agcagaguuauaggguaag

SEQ ID NO: 1651760 - RNA, 19 nt, Artificial Sequence
  Description of Artificial Sequence: Synthetic oligonucleotide
  Antisense strand to SEQ ID NO: 1651759
cuuacccuauaacucugcu

SEQ ID NO: 1651761 - RNA, 19 nt, Artificial Sequence
  Description of Artificial Sequence: Synthetic oligonucleotide
  Sense strand starting at position 1018 of SEQ ID NO: 1561169
aagugauagacuuggaggu

SEQ ID NO: 1651762 - RNA, 19 nt, Artificial Sequence
  Description of Artificial Sequence: Synthetic oligonucleotide
  Antisense strand to SEQ ID NO: 1651761
accuccaagucuaucacuu

SEQ ID NO: 1651763 - RNA, 19 nt, Artificial Sequence
  Description of Artificial Sequence: Synthetic oligonucleotide
  Sense strand starting at position 1020 of SEQ ID NO: 1561169
gugauagacuuggagguca

SEQ ID NO: 1651764 - RNA, 19 nt, Artificial Sequence
  Description of Artificial Sequence: Synthetic oligonucleotide
  Antisense strand to SEQ ID NO: 1651763
ugaccuccaagucuaucac

SEQ ID NO: 1651765 - RNA, 19 nt, Artificial Sequence
  Description of Artificial Sequence: Synthetic oligonucleotide
  Sense strand starting at position 1171 of SEQ ID NO: 1561169
gcucaaguaucaccugagu

SEQ ID NO: 1651766 - RNA, 19 nt, Artificial Sequence
  Description of Artificial Sequence: Synthetic oligonucleotide
  Antisense strand to SEQ ID NO: 1651765
acucaggugauacuugagc

SEQ ID NO: 1651767 - RNA, 19 nt, Artificial Sequence
  Description of Artificial Sequence: Synthetic oligonucleotide
  Sense strand starting at position 1174 of SEQ ID NO: 1561169
caaguaucaccugaguggu

SEQ ID NO: 1651768 - RNA, 19 nt, Artificial Sequence
  Description of Artificial Sequence: Synthetic oligonucleotide
  Antisense strand to SEQ ID NO: 1651767
accacucaggugauacuug

SEQ ID NO: 1651769 - RNA, 19 nt, Artificial Sequence
  Description of Artificial Sequence: Synthetic oligonucleotide
  Sense strand starting at position 1180 of SEQ ID NO: 1561169
ucaccugaguggucacuga

SEQ ID NO: 1651770 - RNA, 19 nt, Artificial Sequence
  Description of Artificial Sequence: Synthetic oligonucleotide
  Antisense strand to SEQ ID NO: 1651769
ucagugaccacucagguga

SEQ ID NO: 1651771 - RNA, 19 nt, Artificial Sequence
  Description of Artificial Sequence: Synthetic oligonucleotide
  Sense strand starting at position 1328 of SEQ ID NO: 1561169
acacaagcggcguuucauu

SEQ ID NO: 1651772 - RNA, 19 nt, Artificial Sequence
  Description of Artificial Sequence: Synthetic oligonucleotide
  Antisense strand to SEQ ID NO: 1651771
aaugaaacgccgcuugugu

SEQ ID NO: 1651773 - RNA, 19 nt, Artificial Sequence
  Description of Artificial Sequence: Synthetic oligonucleotide
  Sense strand starting at position 1384 of SEQ ID NO: 1561169
ggcggcgauauguccguaa

SEQ ID NO: 1651774 - RNA, 19 nt, Artificial Sequence
  Description of Artificial Sequence: Synthetic oligonucleotide
  Antisense strand to SEQ ID NO: 1651773
uuacggacauaucgccgcc

SEQ ID NO: 1651775 - RNA, 19 nt, Artificial Sequence
  Description of Artificial Sequence: Synthetic oligonucleotide
  Sense strand starting at position 1386 of SEQ ID NO: 1561169
cggcgauauguccguaacu

SEQ ID NO: 1651776 - RNA, 19 nt, Artificial Sequence
  Description of Artificial Sequence: Synthetic oligonucleotide
  Antisense strand to SEQ ID NO: 1651775
aguuacggacauaucgccg

SEQ ID NO: 1651777 - RNA, 19 nt, Artificial Sequence
  Description of Artificial Sequence: Synthetic oligonucleotide
  Sense strand starting at position 1387 of SEQ ID NO: 1561169
ggcgauauguccguaacuc

SEQ ID NO: 1651778 - RNA, 19 nt, Artificial Sequence
  Description of Artificial Sequence: Synthetic oligonucleotide
  Antisense strand to SEQ ID NO: 1651777
gaguuacggacauaucgcc

SEQ ID NO: 1651779 - RNA, 19 nt, Artificial Sequence
  Description of Artificial Sequence: Synthetic oligonucleotide
  Sense strand starting at position 1388 of SEQ ID NO: 1561169
gcgauauguccguaacucc

SEQ ID NO: 1651780 - RNA, 19 nt, Artificial Sequence
  Description of Artificial Sequence: Synthetic oligonucleotide
  Antisense strand to SEQ ID NO: 1651779
ggaguuacggacauaucgc

SEQ ID NO: 1651781 - RNA, 19 nt, Artificial Sequence
  Description of Artificial Sequence: Synthetic oligonucleotide
  Sense strand starting at position 2178 of SEQ ID NO: 1561169
gggaugcgucagggucaua

SEQ ID NO: 1651782 - RNA, 19 nt, Artificial Sequence
  Description of Artificial Sequence: Synthetic oligonucleotide
  Antisense strand to SEQ ID NO: 1651781
uaugacccugacgcauccc

SEQ ID NO: 1651783 - RNA, 19 nt, Artificial Sequence
  Description of Artificial Sequence: Synthetic oligonucleotide
  Sense strand starting at position 2183 of SEQ ID NO: 1561169
gcgucagggucauaggaua

SEQ ID NO: 1651784 - RNA, 19 nt, Artificial Sequence
  Description of Artificial Sequence: Synthetic oligonucleotide
  Antisense strand to SEQ ID NO: 1651783
uauccuaugacccugacgc

SEQ ID NO: 1651785 - RNA, 19 nt, Artificial Sequence
  Description of Artificial Sequence: Synthetic oligonucleotide
  Sense strand starting at position 2259 of SEQ ID NO: 1561169
agaauuaaaugcuguacuu

SEQ ID NO: 1651786 - RNA, 19 nt, Artificial Sequence
  Description of Artificial Sequence: Synthetic oligonucleotide
  Antisense strand to SEQ ID NO: 1651785
aaguacagcauuuaauucu

SEQ ID NO: 1651787 - RNA, 19 nt, Artificial Sequence
  Description of Artificial Sequence: Synthetic oligonucleotide
  Sense strand starting at position 2822 of SEQ ID NO: 1561169
aggguaugguuauagauua

SEQ ID NO: 1651788 - RNA, 19 nt, Artificial Sequence
  Description of Artificial Sequence: Synthetic oligonucleotide
  Antisense strand to SEQ ID NO: 1651787
uaaucuauaaccauacccu

SEQ ID NO: 1651789 - RNA, 19 nt, Artificial Sequence
  Description of Artificial Sequence: Synthetic oligonucleotide
  Sense strand starting at position 2946 of SEQ ID NO: 1561169
cccacauugucagaaauag

SEQ ID NO: 1651790 - RNA, 19 nt, Artificial Sequence
  Description of Artificial Sequence: Synthetic oligonucleotide
  Antisense strand to SEQ ID NO: 1651789
cuauuucugacaauguggg

SEQ ID NO: 1651791 - RNA, 19 nt, Artificial Sequence
  Description of Artificial Sequence: Synthetic oligonucleotide
  Sense strand starting at position 3597 of SEQ ID NO: 1561169
agcaguaucuggcuguaca

SEQ ID NO: 1651792 - RNA, 19 nt, Artificial Sequence
  Description of Artificial Sequence: Synthetic oligonucleotide
  Antisense strand to SEQ ID NO: 1651791
uguacagccagauacugcu

SEQ ID NO: 1651793 - RNA, 19 nt, Artificial Sequence
  Description of Artificial Sequence: Synthetic oligonucleotide
  Sense strand starting at position 3616 of SEQ ID NO: 1561169
gggcuugagugagaaacga

SEQ ID NO: 1651794 - RNA, 19 nt, Artificial Sequence
  Description of Artificial Sequence: Synthetic oligonucleotide
  Antisense strand to SEQ ID NO: 1651793
ucguuucucacucaagccc

SEQ ID NO: 1651795 - RNA, 19 nt, Artificial Sequence
  Description of Artificial Sequence: Synthetic oligonucleotide
  Sense strand starting at position 3620 of SEQ ID NO: 1561169
uugagugagaaacgaauua

SEQ ID NO: 1651796 - RNA, 19 nt, Artificial Sequence
  Description of Artificial Sequence: Synthetic oligonucleotide
  Antisense strand to SEQ ID NO: 1651795
uaauucguuucucacucaa

SEQ ID NO: 1651797 - RNA, 19 nt, Artificial Sequence
  Description of Artificial Sequence: Synthetic oligonucleotide
  Sense strand starting at position 3690 of SEQ ID NO: 1561169
aucagauccuguuuaugua

SEQ ID NO: 1651798 - RNA, 19 nt, Artificial Sequence
  Description of Artificial Sequence: Synthetic oligonucleotide
  Antisense strand to SEQ ID NO: 1651797
uacauaaacaggaucugau

SEQ ID NO: 1651799 - RNA, 19 nt, Artificial Sequence
  Description of Artificial Sequence: Synthetic oligonucleotide
  Sense strand starting at position 3691 of SEQ ID NO: 1561169
ucagauccuguuuauguaa

SEQ ID NO: 1651800 - RNA, 19 nt, Artificial Sequence
  Description of Artificial Sequence: Synthetic oligonucleotide
  Antisense strand to SEQ ID NO: 1651799
uuacauaaacaggaucuga

SEQ ID NO: 1651801 - RNA, 19 nt, Artificial Sequence
  Description of Artificial Sequence: Synthetic oligonucleotide
  Sense strand starting at position 3804 of SEQ ID NO: 1561169
gauuuagggugcugcugaa

SEQ ID NO: 1651802 - RNA, 19 nt, Artificial Sequence
  Description of Artificial Sequence: Synthetic oligonucleotide
  Antisense strand to SEQ ID NO: 1651801
uucagcagcacccuaaauc

SEQ ID NO: 1651803 - RNA, 19 nt, Artificial Sequence
  Description of Artificial Sequence: Synthetic oligonucleotide
  Sense strand starting at position 3823 of SEQ ID NO: 1561169
guggguccuaucuaguaca

SEQ ID NO: 1651804 - RNA, 19 nt, Artificial Sequence
  Description of Artificial Sequence: Synthetic oligonucleotide
  Antisense strand to SEQ ID NO: 1651803
uguacuagauaggacccac

SEQ ID NO: 1651805 - RNA, 19 nt, Artificial Sequence
  Description of Artificial Sequence: Synthetic oligonucleotide
  Sense strand starting at position 3826 of SEQ ID NO: 1561169
gguccuaucuaguacauau

SEQ ID NO: 1651806 - RNA, 19 nt, Artificial Sequence
  Description of Artificial Sequence: Synthetic oligonucleotide
  Antisense strand to SEQ ID NO: 1651805
auauguacuagauaggacc

SEQ ID NO: 1651807 - RNA, 19 nt, Artificial Sequence
  Description of Artificial Sequence: Synthetic oligonucleotide
  Sense strand starting at position 3878 of SEQ ID NO: 1561169
auugguguucuugguauau

SEQ ID NO: 1651808 - RNA, 19 nt, Artificial Sequence
  Description of Artificial Sequence: Synthetic oligonucleotide
  Antisense strand to SEQ ID NO: 1651807
auauaccaagaacaccaau

SEQ ID NO: 1651809 - RNA, 19 nt, Artificial Sequence
  Description of Artificial Sequence: Synthetic oligonucleotide
  Sense strand starting at position 3880 of SEQ ID NO: 1561169
ugguguucuugguauauaa

SEQ ID NO: 1651810 - RNA, 19 nt, Artificial Sequence
  Description of Artificial Sequence: Synthetic oligonucleotide
  Antisense strand to SEQ ID NO: 1651809
uuauauaccaagaacacca

SEQ ID NO: 1651811 - RNA, 19 nt, Artificial Sequence
  Description of Artificial Sequence: Synthetic oligonucleotide
  Sense strand starting at position 3882 of SEQ ID NO: 1561169
guguucuugguauauaauc

SEQ ID NO: 1651812 - RNA, 19 nt, Artificial Sequence
  Description of Artificial Sequence: Synthetic oligonucleotide
  Antisense strand to SEQ ID NO: 1651811
gauuauauaccaagaacac

SEQ ID NO: 1651813 - RNA, 19 nt, Artificial Sequence
  Description of Artificial Sequence: Synthetic oligonucleotide
  Sense strand starting at position 3887 of SEQ ID NO: 1561169
cuugguauauaaucuugaa

SEQ ID NO: 1651814 - RNA, 19 nt, Artificial Sequence
  Description of Artificial Sequence: Synthetic oligonucleotide
  Antisense strand to SEQ ID NO: 1651813
uucaagauuauauaccaag

SEQ ID NO: 1651815 - RNA, 19 nt, Artificial Sequence
  Description of Artificial Sequence: Synthetic oligonucleotide
  Sense strand starting at position 3891 of SEQ ID NO: 1561169
guauauaaucuugaacguc

SEQ ID NO: 1651816 - RNA, 19 nt, Artificial Sequence
  Description of Artificial Sequence: Synthetic oligonucleotide
  Antisense strand to SEQ ID NO: 1651815
gacguucaagauuauauac

SEQ ID NO: 1651817 - RNA, 19 nt, Artificial Sequence
  Description of Artificial Sequence: Synthetic oligonucleotide
  Sense strand starting at position 52 of SEQ ID NO: 1561170
uccgauucggaccgggaua

SEQ ID NO: 1651818 - RNA, 19 nt, Artificial Sequence
  Description of Artificial Sequence: Synthetic oligonucleotide
  Antisense strand to SEQ ID NO: 1651817
uaucccgguccgaaucgga

SEQ ID NO: 1651819 - RNA, 19 nt, Artificial Sequence
  Description of Artificial Sequence: Synthetic oligonucleotide
  Sense strand starting at position 64 of SEQ ID NO: 1561170
cgggauagcucgucuugac

SEQ ID NO: 1651820 - RNA, 19 nt, Artificial Sequence
  Description of Artificial Sequence: Synthetic oligonucleotide
  Antisense strand to SEQ ID NO: 1651819
gucaagacgagcuaucccg

SEQ ID NO: 1651821 - RNA, 19 nt, Artificial Sequence
  Description of Artificial Sequence: Synthetic oligonucleotide
  Sense strand starting at position 140 of SEQ ID NO: 1561170
gugccuuggugacuccaua

SEQ ID NO: 1651822 - RNA, 19 nt, Artificial Sequence
  Description of Artificial Sequence: Synthetic oligonucleotide
  Antisense strand to SEQ ID NO: 1651821
uauggagucaccaaggcac

SEQ ID NO: 1651823 - RNA, 19 nt, Artificial Sequence
  Description of Artificial Sequence: Synthetic oligonucleotide
  Sense strand starting at position 322 of SEQ ID NO: 1561170
ccaccauauucggcucauu

SEQ ID NO: 1651824 - RNA, 19 nt, Artificial Sequence
  Description of Artificial Sequence: Synthetic oligonucleotide
  Antisense strand to SEQ ID NO: 1651823
aaugagccgaauauggugg

SEQ ID NO: 1651825 - RNA, 19 nt, Artificial Sequence
  Description of Artificial Sequence: Synthetic oligonucleotide
  Sense strand starting at position 694 of SEQ ID NO: 1561170
ccacuaugcgaucauccau

SEQ ID NO: 1651826 - RNA, 19 nt, Artificial Sequence
  Description of Artificial Sequence: Synthetic oligonucleotide
  Antisense strand to SEQ ID NO: 1651825
auggaugaucgcauagugg

SEQ ID NO: 1651827 - RNA, 19 nt, Artificial Sequence
  Description of Artificial Sequence: Synthetic oligonucleotide
  Sense strand starting at position 734 of SEQ ID NO: 1561170
ccucuugguucuggagaga

SEQ ID NO: 1651828 - RNA, 19 nt, Artificial Sequence
  Description of Artificial Sequence: Synthetic oligonucleotide
  Antisense strand to SEQ ID NO: 1651827
ucucuccagaaccaagagg

SEQ ID NO: 1651829 - RNA, 19 nt, Artificial Sequence
  Description of Artificial Sequence: Synthetic oligonucleotide
  Sense strand starting at position 771 of SEQ ID NO: 1561170
acacuuggcucacgaggaa

SEQ ID NO: 1651830 - RNA, 19 nt, Artificial Sequence
  Description of Artificial Sequence: Synthetic oligonucleotide
  Antisense strand to SEQ ID NO: 1651829
uuccucgugagccaagugu

SEQ ID NO: 1651831 - RNA, 19 nt, Artificial Sequence
  Description of Artificial Sequence: Synthetic oligonucleotide
  Sense strand starting at position 1248 of SEQ ID NO: 1561170
ugcaaagcuccuggagguu

SEQ ID NO: 1651832 - RNA, 19 nt, Artificial Sequence
  Description of Artificial Sequence: Synthetic oligonucleotide
  Antisense strand to SEQ ID NO: 1651831
aaccuccaggagcuuugca

SEQ ID NO: 1651833 - RNA, 19 nt, Artificial Sequence
  Description of Artificial Sequence: Synthetic oligonucleotide
  Sense strand starting at position 1260 of SEQ ID NO: 1561170
ggagguuccagcggugaga

SEQ ID NO: 1651834 - RNA, 19 nt, Artificial Sequence
  Description of Artificial Sequence: Synthetic oligonucleotide
  Antisense strand to SEQ ID NO: 1651833
ucucaccgcuggaaccucc

SEQ ID NO: 1651835 - RNA, 19 nt, Artificial Sequence
  Description of Artificial Sequence: Synthetic oligonucleotide
  Sense strand starting at position 1299 of SEQ ID NO: 1561170
gcgggagacgcaguuguuu

SEQ ID NO: 1651836 - RNA, 19 nt, Artificial Sequence
  Description of Artificial Sequence: Synthetic oligonucleotide
  Antisense strand to SEQ ID NO: 1651835
aaacaacugcgucucccgc

SEQ ID NO: 1651837 - RNA, 19 nt, Artificial Sequence
  Description of Artificial Sequence: Synthetic oligonucleotide
  Sense strand starting at position 1301 of SEQ ID NO: 1561170
gggagacgcaguuguuuca

SEQ ID NO: 1651838 - RNA, 19 nt, Artificial Sequence
  Description of Artificial Sequence: Synthetic oligonucleotide
  Antisense strand to SEQ ID NO: 1651837
ugaaacaacugcgucuccc

SEQ ID NO: 1651839 - RNA, 19 nt, Artificial Sequence
  Description of Artificial Sequence: Synthetic oligonucleotide
  Sense strand starting at position 1349 of SEQ ID NO: 1561170
gaggcucagagaugaguga

SEQ ID NO: 1651840 - RNA, 19 nt, Artificial Sequence
  Description of Artificial Sequence: Synthetic oligonucleotide
  Antisense strand to SEQ ID NO: 1651839
ucacucaucucugagccuc

SEQ ID NO: 1651841 - RNA, 19 nt, Artificial Sequence
  Description of Artificial Sequence: Synthetic oligonucleotide
  Sense strand starting at position 1427 of SEQ ID NO: 1561170
cuccgucuggacugauauc

SEQ ID NO: 1651842 - RNA, 19 nt, Artificial Sequence
  Description of Artificial Sequence: Synthetic oligonucleotide
  Antisense strand to SEQ ID NO: 1651841
gauaucaguccagacggag

SEQ ID NO: 1651843 - RNA, 19 nt, Artificial Sequence
  Description of Artificial Sequence: Synthetic oligonucleotide
  Sense strand starting at position 1512 of SEQ ID NO: 1561170
gcgccaccuagguaacaau

SEQ ID NO: 1651844 - RNA, 19 nt, Artificial Sequence
  Description of Artificial Sequence: Synthetic oligonucleotide
  Antisense strand to SEQ ID NO: 1651843
auuguuaccuagguggcgc

SEQ ID NO: 1651845 - RNA, 19 nt, Artificial Sequence
  Description of Artificial Sequence: Synthetic oligonucleotide
  Sense strand starting at position 1577 of SEQ ID NO: 1561170
gcaguaacugccggucaga

SEQ ID NO: 1651846 - RNA, 19 nt, Artificial Sequence
  Description of Artificial Sequence: Synthetic oligonucleotide
  Antisense strand to SEQ ID NO: 1651845
ucugaccggcaguuacugc

SEQ ID NO: 1651847 - RNA, 19 nt, Artificial Sequence
  Description of Artificial Sequence: Synthetic oligonucleotide
  Sense strand starting at position 1580 of SEQ ID NO: 1561170
guaacugccggucagauaa

SEQ ID NO: 1651848 - RNA, 19 nt, Artificial Sequence
  Description of Artificial Sequence: Synthetic oligonucleotide
  Antisense strand to SEQ ID NO: 1651847
uuaucugaccggcaguuac

SEQ ID NO: 1651849 - RNA, 19 nt, Artificial Sequence
  Description of Artificial Sequence: Synthetic oligonucleotide
  Sense strand starting at position 1590 of SEQ ID NO: 1561170
gucagauaaucccuacgaa

SEQ ID NO: 1651850 - RNA, 19 nt, Artificial Sequence
  Description of Artificial Sequence: Synthetic oligonucleotide
  Antisense strand to SEQ ID NO: 1651849
uucguagggauuaucugac

SEQ ID NO: 1651851 - RNA, 19 nt, Artificial Sequence
  Description of Artificial Sequence: Synthetic oligonucleotide
  Sense strand starting at position 1593 of SEQ ID NO: 1561170
agauaaucccuacgaaacu

SEQ ID NO: 1651852 - RNA, 19 nt, Artificial Sequence
  Description of Artificial Sequence: Synthetic oligonucleotide
  Antisense strand to SEQ ID NO: 1651851
aguuucguagggauuaucu

SEQ ID NO: 1651853 - RNA, 19 nt, Artificial Sequence
  Description of Artificial Sequence: Synthetic oligonucleotide
  Sense strand starting at position 1602 of SEQ ID NO: 1561170
cuacgaaacuaugucagau

SEQ ID NO: 1651854 - RNA, 19 nt, Artificial Sequence
  Description of Artificial Sequence: Synthetic oligonucleotide
  Antisense strand to SEQ ID NO: 1651853
aucugacauaguuucguag

SEQ ID NO: 1651855 - RNA, 19 nt, Artificial Sequence
  Description of Artificial Sequence: Synthetic oligonucleotide
  Sense strand starting at position 1769 of SEQ ID NO: 1561170
ggacuuaccugucuaggag

SEQ ID NO: 1651856 - RNA, 19 nt, Artificial Sequence
  Description of Artificial Sequence: Synthetic oligonucleotide
  Antisense strand to SEQ ID NO: 1651855
cuccuagacagguaagucc

SEQ ID NO: 1651857 - RNA, 19 nt, Artificial Sequence
  Description of Artificial Sequence: Synthetic oligonucleotide
  Sense strand starting at position 2122 of SEQ ID NO: 1561170
guaucaagcguccgcacau

SEQ ID NO: 1651858 - RNA, 19 nt, Artificial Sequence
  Description of Artificial Sequence: Synthetic oligonucleotide
  Antisense strand to SEQ ID NO: 1651857
augugcggacgcuugauac

SEQ ID NO: 1651859 - RNA, 19 nt, Artificial Sequence
  Description of Artificial Sequence: Synthetic oligonucleotide
  Sense strand starting at position 2138 of SEQ ID NO: 1561170
caugguaggugcuuaggaa

SEQ ID NO: 1651860 - RNA, 19 nt, Artificial Sequence
  Description of Artificial Sequence: Synthetic oligonucleotide
  Antisense strand to SEQ ID NO: 1651859
uuccuaagcaccuaccaug

SEQ ID NO: 1651861 - RNA, 19 nt, Artificial Sequence
  Description of Artificial Sequence: Synthetic oligonucleotide
  Sense strand starting at position 2139 of SEQ ID NO: 1561170
augguaggugcuuaggaaa

SEQ ID NO: 1651862 - RNA, 19 nt, Artificial Sequence
  Description of Artificial Sequence: Synthetic oligonucleotide
  Antisense strand to SEQ ID NO: 1651861
uuuccuaagcaccuaccau

SEQ ID NO: 1651863 - RNA, 19 nt, Artificial Sequence
  Description of Artificial Sequence: Synthetic oligonucleotide
  Sense strand starting at position 2152 of SEQ ID NO: 1561170
aggaaacccucguuggcua

SEQ ID NO: 1651864 - RNA, 19 nt, Artificial Sequence
  Description of Artificial Sequence: Synthetic oligonucleotide
  Antisense strand to SEQ ID NO: 1651863
uagccaacgaggguuuccu

SEQ ID NO: 1651865 - RNA, 19 nt, Artificial Sequence
  Description of Artificial Sequence: Synthetic oligonucleotide
  Sense strand starting at position 2347 of SEQ ID NO: 1561170
cgaagugacuggguuccua

SEQ ID NO: 1651866 - RNA, 19 nt, Artificial Sequence
  Description of Artificial Sequence: Synthetic oligonucleotide
  Antisense strand to SEQ ID NO: 1651865
uaggaacccagucacuucg

SEQ ID NO: 1651867 - RNA, 19 nt, Artificial Sequence
  Description of Artificial Sequence: Synthetic oligonucleotide
  Sense strand starting at position 2355 of SEQ ID NO: 1561170
cuggguuccuacguacaga

SEQ ID NO: 1651868 - RNA, 19 nt, Artificial Sequence
  Description of Artificial Sequence: Synthetic oligonucleotide
  Antisense strand to SEQ ID NO: 1651867
ucuguacguaggaacccag

SEQ ID NO: 1651869 - RNA, 19 nt, Artificial Sequence
  Description of Artificial Sequence: Synthetic oligonucleotide
  Sense strand starting at position 2356 of SEQ ID NO: 1561170
uggguuccuacguacagaa

SEQ ID NO: 1651870 - RNA, 19 nt, Artificial Sequence
  Description of Artificial Sequence: Synthetic oligonucleotide
  Antisense strand to SEQ ID NO: 1651869
uucuguacguaggaaccca

SEQ ID NO: 1651871 - RNA, 19 nt, Artificial Sequence
  Description of Artificial Sequence: Synthetic oligonucleotide
  Sense strand starting at position 3666 of SEQ ID NO: 1561170
gggagaauugcuugaguua

SEQ ID NO: 1651872 - RNA, 19 nt, Artificial Sequence
  Description of Artificial Sequence: Synthetic oligonucleotide
  Antisense strand to SEQ ID NO: 1651871
uaacucaagcaauucuccc

SEQ ID NO: 1651873 - RNA, 19 nt, Artificial Sequence
  Description of Artificial Sequence: Synthetic oligonucleotide
  Sense strand starting at position 3667 of SEQ ID NO: 1561170
ggagaauugcuugaguuag

SEQ ID NO: 1651874 - RNA, 19 nt, Artificial Sequence
  Description of Artificial Sequence: Synthetic oligonucleotide
  Antisense strand to SEQ ID NO: 1651873
cuaacucaagcaauucucc

SEQ ID NO: 1651875 - RNA, 19 nt, Artificial Sequence
  Description of Artificial Sequence: Synthetic oligonucleotide
  Sense strand starting at position 3669 of SEQ ID NO: 1561170
agaauugcuugaguuagga

SEQ ID NO: 1651876 - RNA, 19 nt, Artificial Sequence
  Description of Artificial Sequence: Synthetic oligonucleotide
  Antisense strand to SEQ ID NO: 1651875
uccuaacucaagcaauucu

SEQ ID NO: 1651877 - RNA, 19 nt, Artificial Sequence
  Description of Artificial Sequence: Synthetic oligonucleotide
  Sense strand starting at position 3671 of SEQ ID NO: 1561170
aauugcuugaguuaggagu

SEQ ID NO: 1651878 - RNA, 19 nt, Artificial Sequence
  Description of Artificial Sequence: Synthetic oligonucleotide
  Antisense strand to SEQ ID NO: 1651877
acuccuaacucaagcaauu

SEQ ID NO: 1651879 - RNA, 19 nt, Artificial Sequence
  Description of Artificial Sequence: Synthetic oligonucleotide
  Sense strand starting at position 3927 of SEQ ID NO: 1561170
cacagaggucauggacuuu

SEQ ID NO: 1651880 - RNA, 19 nt, Artificial Sequence
  Description of Artificial Sequence: Synthetic oligonucleotide
  Antisense strand to SEQ ID NO: 1651879
aaaguccaugaccucugug

SEQ ID NO: 1651881 - RNA, 19 nt, Artificial Sequence
  Description of Artificial Sequence: Synthetic oligonucleotide
  Sense strand starting at position 3938 of SEQ ID NO: 1561170
uggacuuugucgugcucau

SEQ ID NO: 1651882 - RNA, 19 nt, Artificial Sequence
  Description of Artificial Sequence: Synthetic oligonucleotide
  Antisense strand to SEQ ID NO: 1651881
augagcacgacaaagucca

SEQ ID NO: 1651883 - RNA, 19 nt, Artificial Sequence
  Description of Artificial Sequence: Synthetic oligonucleotide
  Sense strand starting at position 238 of SEQ ID NO: 1561171
cuuuaaccaucgguuagua

SEQ ID NO: 1651884 - RNA, 19 nt, Artificial Sequence
  Description of Artificial Sequence: Synthetic oligonucleotide
  Antisense strand to SEQ ID NO: 1651883
uacuaaccgaugguuaaag

SEQ ID NO: 1651885 - RNA, 19 nt, Artificial Sequence
  Description of Artificial Sequence: Synthetic oligonucleotide
  Sense strand starting at position 250 of SEQ ID NO: 1561171
guuaguauguuucuggucu

SEQ ID NO: 1651886 - RNA, 19 nt, Artificial Sequence
  Description of Artificial Sequence: Synthetic oligonucleotide
  Antisense strand to SEQ ID NO: 1651885
agaccagaaacauacuaac

SEQ ID NO: 1651887 - RNA, 19 nt, Artificial Sequence
  Description of Artificial Sequence: Synthetic oligonucleotide
  Sense strand starting at position 269 of SEQ ID NO: 1561171
uuccucuuaggcugugaaa

SEQ ID NO: 1651888 - RNA, 19 nt, Artificial Sequence
  Description of Artificial Sequence: Synthetic oligonucleotide
  Antisense strand to SEQ ID NO: 1651887
uuucacagccuaagaggaa

SEQ ID NO: 1651889 - RNA, 19 nt, Artificial Sequence
  Description of Artificial Sequence: Synthetic oligonucleotide
  Sense strand starting at position 287 of SEQ ID NO: 1561171
aggagacaugucugucucu

SEQ ID NO: 1651890 - RNA, 19 nt, Artificial Sequence
  Description of Artificial Sequence: Synthetic oligonucleotide
  Antisense strand to SEQ ID NO: 1651889
agagacagacaugucuccu

SEQ ID NO: 1651891 - RNA, 19 nt, Artificial Sequence
  Description of Artificial Sequence: Synthetic oligonucleotide
  Sense strand starting at position 312 of SEQ ID NO: 1561171
acuuaaggcccaggugauu

SEQ ID NO: 1651892 - RNA, 19 nt, Artificial Sequence
  Description of Artificial Sequence: Synthetic oligonucleotide
  Antisense strand to SEQ ID NO: 1651891
aaucaccugggccuuaagu

SEQ ID NO: 1651893 - RNA, 19 nt, Artificial Sequence
  Description of Artificial Sequence: Synthetic oligonucleotide
  Sense strand starting at position 578 of SEQ ID NO: 1561171
agggaagaguuugaggaau

SEQ ID NO: 1651894 - RNA, 19 nt, Artificial Sequence
  Description of Artificial Sequence: Synthetic oligonucleotide
  Antisense strand to SEQ ID NO: 1651893
auuccucaaacucuucccu

SEQ ID NO: 1651895 - RNA, 19 nt, Artificial Sequence
  Description of Artificial Sequence: Synthetic oligonucleotide
  Sense strand starting at position 580 of SEQ ID NO: 1561171
ggaagaguuugaggaauga

SEQ ID NO: 1651896 - RNA, 19 nt, Artificial Sequence
  Description of Artificial Sequence: Synthetic oligonucleotide
  Antisense strand to SEQ ID NO: 1651895
ucauuccucaaacucuucc

SEQ ID NO: 1651897 - RNA, 19 nt, Artificial Sequence
  Description of Artificial Sequence: Synthetic oligonucleotide
  Sense strand starting at position 584 of SEQ ID NO: 1561171
gaguuugaggaaugaguga

SEQ ID NO: 1651898 - RNA, 19 nt, Artificial Sequence
  Description of Artificial Sequence: Synthetic oligonucleotide
  Antisense strand to SEQ ID NO: 1651897
ucacucauuccucaaacuc

SEQ ID NO: 1651899 - RNA, 19 nt, Artificial Sequence
  Description of Artificial Sequence: Synthetic oligonucleotide
  Sense strand starting at position 595 of SEQ ID NO: 1561171
augagugaaugguugagua

SEQ ID NO: 1651900 - RNA, 19 nt, Artificial Sequence
  Description of Artificial Sequence: Synthetic oligonucleotide
  Antisense strand to SEQ ID NO: 1651899
uacucaaccauucacucau

SEQ ID NO: 1651901 - RNA, 19 nt, Artificial Sequence
  Description of Artificial Sequence: Synthetic oligonucleotide
  Sense strand starting at position 1037 of SEQ ID NO: 1561171
gcuggugggucugaagaaa

SEQ ID NO: 1651902 - RNA, 19 nt, Artificial Sequence
  Description of Artificial Sequence: Synthetic oligonucleotide
  Antisense strand to SEQ ID NO: 1651901
uuucuucagacccaccagc

SEQ ID NO: 1651903 - RNA, 19 nt, Artificial Sequence
  Description of Artificial Sequence: Synthetic oligonucleotide
  Sense strand starting at position 1081 of SEQ ID NO: 1561171
gugaaaucccuccggagac

SEQ ID NO: 1651904 - RNA, 19 nt, Artificial Sequence
  Description of Artificial Sequence: Synthetic oligonucleotide
  Antisense strand to SEQ ID NO: 1651903
gucuccggagggauuucac

SEQ ID NO: 1651905 - RNA, 19 nt, Artificial Sequence
  Description of Artificial Sequence: Synthetic oligonucleotide
  Sense strand starting at position 1082 of SEQ ID NO: 1561171
ugaaaucccuccggagaca

SEQ ID NO: 1651906 - RNA, 19 nt, Artificial Sequence
  Description of Artificial Sequence: Synthetic oligonucleotide
  Antisense strand to SEQ ID NO: 1651905
ugucuccggagggauuuca

SEQ ID NO: 1651907 - RNA, 19 nt, Artificial Sequence
  Description of Artificial Sequence: Synthetic oligonucleotide
  Sense strand starting at position 1161 of SEQ ID NO: 1561171
ccugccucugccugguaau

SEQ ID NO: 1651908 - RNA, 19 nt, Artificial Sequence
  Description of Artificial Sequence: Synthetic oligonucleotide
  Antisense strand to SEQ ID NO: 1651907
auuaccaggcagaggcagg

SEQ ID NO: 1651909 - RNA, 19 nt, Artificial Sequence
  Description of Artificial Sequence: Synthetic oligonucleotide
  Sense strand starting at position 1171 of SEQ ID NO: 1561171
ccugguaaugccuguuaau

SEQ ID NO: 1651910 - RNA, 19 nt, Artificial Sequence
  Description of Artificial Sequence: Synthetic oligonucleotide
  Antisense strand to SEQ ID NO: 1651909
auuaacaggcauuaccagg

SEQ ID NO: 1651911 - RNA, 19 nt, Artificial Sequence
  Description of Artificial Sequence: Synthetic oligonucleotide
  Sense strand starting at position 1180 of SEQ ID NO: 1561171
gccuguuaauagcuuugua

SEQ ID NO: 1651912 - RNA, 19 nt, Artificial Sequence
  Description of Artificial Sequence: Synthetic oligonucleotide
  Antisense strand to SEQ ID NO: 1651911
uacaaagcuauuaacaggc

SEQ ID NO: 1651913 - RNA, 19 nt, Artificial Sequence
  Description of Artificial Sequence: Synthetic oligonucleotide
  Sense strand starting at position 1183 of SEQ ID NO: 1561171
uguuaauagcuuuguacac

SEQ ID NO: 1651914 - RNA, 19 nt, Artificial Sequence
  Description of Artificial Sequence: Synthetic oligonucleotide
  Antisense strand to SEQ ID NO: 1651913
guguacaaagcuauuaaca

SEQ ID NO: 1651915 - RNA, 19 nt, Artificial Sequence
  Description of Artificial Sequence: Synthetic oligonucleotide
  Sense strand starting at position 1184 of SEQ ID NO: 1561171
guuaauagcuuuguacaca

SEQ ID NO: 1651916 - RNA, 19 nt, Artificial Sequence
  Description of Artificial Sequence: Synthetic oligonucleotide
  Antisense strand to SEQ ID NO: 1651915
uguguacaaagcuauuaac

SEQ ID NO: 1651917 - RNA, 19 nt, Artificial Sequence
  Description of Artificial Sequence: Synthetic oligonucleotide
  Sense strand starting at position 1238 of SEQ ID NO: 1561171
agccuuguaggaggugaau

SEQ ID NO: 1651918 - RNA, 19 nt, Artificial Sequence
  Description of Artificial Sequence: Synthetic oligonucleotide
  Antisense strand to SEQ ID NO: 1651917
auucaccuccuacaaggcu

SEQ ID NO: 1651919 - RNA, 19 nt, Artificial Sequence
  Description of Artificial Sequence: Synthetic oligonucleotide
  Sense strand starting at position 1247 of SEQ ID NO: 1561171
ggaggugaauguucaccaa

SEQ ID NO: 1651920 - RNA, 19 nt, Artificial Sequence
  Description of Artificial Sequence: Synthetic oligonucleotide
  Antisense strand to SEQ ID NO: 1651919
uuggugaacauucaccucc

SEQ ID NO: 1651921 - RNA, 19 nt, Artificial Sequence
  Description of Artificial Sequence: Synthetic oligonucleotide
  Sense strand starting at position 1520 of SEQ ID NO: 1561171
ccagcccugcgguauuaaa

SEQ ID NO: 1651922 - RNA, 19 nt, Artificial Sequence
  Description of Artificial Sequence: Synthetic oligonucleotide
  Antisense strand to SEQ ID NO: 1651921
uuuaauaccgcagggcugg

SEQ ID NO: 1651923 - RNA, 19 nt, Artificial Sequence
  Description of Artificial Sequence: Synthetic oligonucleotide
  Sense strand starting at position 1566 of SEQ ID NO: 1561171
uccagaagagauggucuuu

SEQ ID NO: 1651924 - RNA, 19 nt, Artificial Sequence
  Description of Artificial Sequence: Synthetic oligonucleotide
  Antisense strand to SEQ ID NO: 1651923
aaagaccaucucuucugga

SEQ ID NO: 1651925 - RNA, 19 nt, Artificial Sequence
  Description of Artificial Sequence: Synthetic oligonucleotide
  Sense strand starting at position 1777 of SEQ ID NO: 1561171
gaggguuacucgccuggaa

SEQ ID NO: 1651926 - RNA, 19 nt, Artificial Sequence
  Description of Artificial Sequence: Synthetic oligonucleotide
  Antisense strand to SEQ ID NO: 1651925
uuccaggcgaguaacccuc

SEQ ID NO: 1651927 - RNA, 19 nt, Artificial Sequence
  Description of Artificial Sequence: Synthetic oligonucleotide
  Sense strand starting at position 1779 of SEQ ID NO: 1561171
ggguuacucgccuggaauc

SEQ ID NO: 1651928 - RNA, 19 nt, Artificial Sequence
  Description of Artificial Sequence: Synthetic oligonucleotide
  Antisense strand to SEQ ID NO: 1651927
gauuccaggcgaguaaccc

SEQ ID NO: 1651929 - RNA, 19 nt, Artificial Sequence
  Description of Artificial Sequence: Synthetic oligonucleotide
  Sense strand starting at position 1780 of SEQ ID NO: 1561171
gguuacucgccuggaaucu

SEQ ID NO: 1651930 - RNA, 19 nt, Artificial Sequence
  Description of Artificial Sequence: Synthetic oligonucleotide
  Antisense strand to SEQ ID NO: 1651929
agauuccaggcgaguaacc

SEQ ID NO: 1651931 - RNA, 19 nt, Artificial Sequence
  Description of Artificial Sequence: Synthetic oligonucleotide
  Sense strand starting at position 2217 of SEQ ID NO: 1561171
agguguuuccguccgcgaa

SEQ ID NO: 1651932 - RNA, 19 nt, Artificial Sequence
  Description of Artificial Sequence: Synthetic oligonucleotide
  Antisense strand to SEQ ID NO: 1651931
uucgcggacggaaacaccu

SEQ ID NO: 1651933 - RNA, 19 nt, Artificial Sequence
  Description of Artificial Sequence: Synthetic oligonucleotide
  Sense strand starting at position 2261 of SEQ ID NO: 1561171
ggaggccucuuggauuaga

SEQ ID NO: 1651934 - RNA, 19 nt, Artificial Sequence
  Description of Artificial Sequence: Synthetic oligonucleotide
  Antisense strand to SEQ ID NO: 1651933
ucuaauccaagaggccucc

SEQ ID NO: 1651935 - RNA, 19 nt, Artificial Sequence
  Description of Artificial Sequence: Synthetic oligonucleotide
  Sense strand starting at position 2272 of SEQ ID NO: 1561171
ggauuagaagcuugucgaa

SEQ ID NO: 1651936 - RNA, 19 nt, Artificial Sequence
  Description of Artificial Sequence: Synthetic oligonucleotide
  Antisense strand to SEQ ID NO: 1651935
uucgacaagcuucuaaucc

SEQ ID NO: 1651937 - RNA, 19 nt, Artificial Sequence
  Description of Artificial Sequence: Synthetic oligonucleotide
  Sense strand starting at position 2330 of SEQ ID NO: 1561171
accuuaucucuggaagguu

SEQ ID NO: 1651938 - RNA, 19 nt, Artificial Sequence
  Description of Artificial Sequence: Synthetic oligonucleotide
  Antisense strand to SEQ ID NO: 1651937
aaccuuccagagauaaggu

SEQ ID NO: 1651939 - RNA, 19 nt, Artificial Sequence
  Description of Artificial Sequence: Synthetic oligonucleotide
  Sense strand starting at position 2391 of SEQ ID NO: 1561171
aggcguggacucugaagau

SEQ ID NO: 1651940 - RNA, 19 nt, Artificial Sequence
  Description of Artificial Sequence: Synthetic oligonucleotide
  Antisense strand to SEQ ID NO: 1651939
aucuucagaguccacgccu

SEQ ID NO: 1651941 - RNA, 19 nt, Artificial Sequence
  Description of Artificial Sequence: Synthetic oligonucleotide
  Sense strand starting at position 2896 of SEQ ID NO: 1561171
gaguaaaggucguuuccuu

SEQ ID NO: 1651942 - RNA, 19 nt, Artificial Sequence
  Description of Artificial Sequence: Synthetic oligonucleotide
  Antisense strand to SEQ ID NO: 1651941
aaggaaacgaccuuuacuc

SEQ ID NO: 1651943 - RNA, 19 nt, Artificial Sequence
  Description of Artificial Sequence: Synthetic oligonucleotide
  Sense strand starting at position 3294 of SEQ ID NO: 1561171
ugguuaagaguuugcuuag

SEQ ID NO: 1651944 - RNA, 19 nt, Artificial Sequence
  Description of Artificial Sequence: Synthetic oligonucleotide
  Antisense strand to SEQ ID NO: 1651943
cuaagcaaacucuuaacca

SEQ ID NO: 1651945 - RNA, 19 nt, Artificial Sequence
  Description of Artificial Sequence: Synthetic oligonucleotide
  Sense strand starting at position 3295 of SEQ ID NO: 1561171
gguuaagaguuugcuuagu

SEQ ID NO: 1651946 - RNA, 19 nt, Artificial Sequence
  Description of Artificial Sequence: Synthetic oligonucleotide
  Antisense strand to SEQ ID NO: 1651945
acuaagcaaacucuuaacc

SEQ ID NO: 1651947 - RNA, 19 nt, Artificial Sequence
  Description of Artificial Sequence: Synthetic oligonucleotide
  Sense strand starting at position 3297 of SEQ ID NO: 1561171
uuaagaguuugcuuaguaa

SEQ ID NO: 1651948 - RNA, 19 nt, Artificial Sequence
  Description of Artificial Sequence: Synthetic oligonucleotide
  Antisense strand to SEQ ID NO: 1651947
uuacuaagcaaacucuuaa

SEQ ID NO: 1651949 - RNA, 19 nt, Artificial Sequence
  Description of Artificial Sequence: Synthetic oligonucleotide
  Sense strand starting at position 3300 of SEQ ID NO: 1561171
agaguuugcuuaguaaaca

SEQ ID NO: 1651950 - RNA, 19 nt, Artificial Sequence
  Description of Artificial Sequence: Synthetic oligonucleotide
  Antisense strand to SEQ ID NO: 1651949
uguuuacuaagcaaacucu

SEQ ID NO: 1651951 - RNA, 19 nt, Artificial Sequence
  Description of Artificial Sequence: Synthetic oligonucleotide
  Sense strand starting at position 3451 of SEQ ID NO: 1561171
cgaauaaagcauugccaaa

SEQ ID NO: 1651952 - RNA, 19 nt, Artificial Sequence
  Description of Artificial Sequence: Synthetic oligonucleotide
  Antisense strand to SEQ ID NO: 1651951
uuuggcaaugcuuuauucg

SEQ ID NO: 1651953 - RNA, 19 nt, Artificial Sequence
  Description of Artificial Sequence: Synthetic oligonucleotide
  Sense strand starting at position 3748 of SEQ ID NO: 1561171
gcaauauagcgagacccaa

SEQ ID NO: 1651954 - RNA, 19 nt, Artificial Sequence
  Description of Artificial Sequence: Synthetic oligonucleotide
  Antisense strand to SEQ ID NO: 1651953
uugggucucgcuauauugc

SEQ ID NO: 1651955 - RNA, 19 nt, Artificial Sequence
  Description of Artificial Sequence: Synthetic oligonucleotide
  Sense strand starting at position 3875 of SEQ ID NO: 1561171
cgaagcaagaauuguagaa

SEQ ID NO: 1651956 - RNA, 19 nt, Artificial Sequence
  Description of Artificial Sequence: Synthetic oligonucleotide
  Antisense strand to SEQ ID NO: 1651955
uucuacaauucuugcuucg

SEQ ID NO: 1651957 - RNA, 19 nt, Artificial Sequence
  Description of Artificial Sequence: Synthetic oligonucleotide
  Sense strand starting at position 3879 of SEQ ID NO: 1561171
gcaagaauuguagaaggca

SEQ ID NO: 1651958 - RNA, 19 nt, Artificial Sequence
  Description of Artificial Sequence: Synthetic oligonucleotide
  Antisense strand to SEQ ID NO: 1651957
ugccuucuacaauucuugc

SEQ ID NO: 1651959 - RNA, 19 nt, Artificial Sequence
  Description of Artificial Sequence: Synthetic oligonucleotide
  Sense strand starting at position 3918 of SEQ ID NO: 1561171
ucgcaugaagguuauaugu

SEQ ID NO: 1651960 - RNA, 19 nt, Artificial Sequence
  Description of Artificial Sequence: Synthetic oligonucleotide
  Antisense strand to SEQ ID NO: 1651959
acauauaaccuucaugcga

SEQ ID NO: 1651961 - RNA, 19 nt, Artificial Sequence
  Description of Artificial Sequence: Synthetic oligonucleotide
  Sense strand starting at position 3927 of SEQ ID NO: 1561171
gguuauaugucuucccuuc

SEQ ID NO: 1651962 - RNA, 19 nt, Artificial Sequence
  Description of Artificial Sequence: Synthetic oligonucleotide
  Antisense strand to SEQ ID NO: 1651961
gaagggaagacauauaacc

SEQ ID NO: 1651963 - RNA, 19 nt, Artificial Sequence
  Description of Artificial Sequence: Synthetic oligonucleotide
  Sense strand starting at position 89 of SEQ ID NO: 1561172
gccuguaauccugaagcag

SEQ ID NO: 1651964 - RNA, 19 nt, Artificial Sequence
  Description of Artificial Sequence: Synthetic oligonucleotide
  Antisense strand to SEQ ID NO: 1651963
cugcuucaggauuacaggc

SEQ ID NO: 1651965 - RNA, 19 nt, Artificial Sequence
  Description of Artificial Sequence: Synthetic oligonucleotide
  Sense strand starting at position 211 of SEQ ID NO: 1561172
ugguuaagauccugaauuu

SEQ ID NO: 1651966 - RNA, 19 nt, Artificial Sequence
  Description of Artificial Sequence: Synthetic oligonucleotide
  Antisense strand to SEQ ID NO: 1651965
aaauucaggaucuuaacca

SEQ ID NO: 1651967 - RNA, 19 nt, Artificial Sequence
  Description of Artificial Sequence: Synthetic oligonucleotide
  Sense strand starting at position 312 of SEQ ID NO: 1561172
agagaauccuuugagagau

SEQ ID NO: 1651968 - RNA, 19 nt, Artificial Sequence
  Description of Artificial Sequence: Synthetic oligonucleotide
  Antisense strand to SEQ ID NO: 1651967
aucucucaaaggauucucu

SEQ ID NO: 1651969 - RNA, 19 nt, Artificial Sequence
  Description of Artificial Sequence: Synthetic oligonucleotide
  Sense strand starting at position 355 of SEQ ID NO: 1561172
cacugcuggaggcgugaua

SEQ ID NO: 1651970 - RNA, 19 nt, Artificial Sequence
  Description of Artificial Sequence: Synthetic oligonucleotide
  Antisense strand to SEQ ID NO: 1651969
uaucacgccuccagcagug

SEQ ID NO: 1651971 - RNA, 19 nt, Artificial Sequence
  Description of Artificial Sequence: Synthetic oligonucleotide
  Sense strand starting at position 392 of SEQ ID NO: 1561172
gccgguauuacuguuguua

SEQ ID NO: 1651972 - RNA, 19 nt, Artificial Sequence
  Description of Artificial Sequence: Synthetic oligonucleotide
  Antisense strand to SEQ ID NO: 1651971
uaacaacaguaauaccggc

SEQ ID NO: 1651973 - RNA, 19 nt, Artificial Sequence
  Description of Artificial Sequence: Synthetic oligonucleotide
  Sense strand starting at position 396 of SEQ ID NO: 1561172
guauuacuguuguuaucuu

SEQ ID NO: 1651974 - RNA, 19 nt, Artificial Sequence
  Description of Artificial Sequence: Synthetic oligonucleotide
  Antisense strand to SEQ ID NO: 1651973
aagauaacaacaguaauac

SEQ ID NO: 1651975 - RNA, 19 nt, Artificial Sequence
  Description of Artificial Sequence: Synthetic oligonucleotide
  Sense strand starting at position 511 of SEQ ID NO: 1561172
auuccugcccuugagcaau

SEQ ID NO: 1651976 - RNA, 19 nt, Artificial Sequence
  Description of Artificial Sequence: Synthetic oligonucleotide
  Antisense strand to SEQ ID NO: 1651975
auugcucaagggcaggaau

SEQ ID NO: 1651977 - RNA, 19 nt, Artificial Sequence
  Description of Artificial Sequence: Synthetic oligonucleotide
  Sense strand starting at position 580 of SEQ ID NO: 1561172
gcgggaucauuucuagcuc

SEQ ID NO: 1651978 - RNA, 19 nt, Artificial Sequence
  Description of Artificial Sequence: Synthetic oligonucleotide
  Antisense strand to SEQ ID NO: 1651977
gagcuagaaaugaucccgc

SEQ ID NO: 1651979 - RNA, 19 nt, Artificial Sequence
  Description of Artificial Sequence: Synthetic oligonucleotide
  Sense strand starting at position 679 of SEQ ID NO: 1561172
ggcucagcugcagacaauu

SEQ ID NO: 1651980 - RNA, 19 nt, Artificial Sequence
  Description of Artificial Sequence: Synthetic oligonucleotide
  Antisense strand to SEQ ID NO: 1651979
aauugucugcagcugagcc

SEQ ID NO: 1651981 - RNA, 19 nt, Artificial Sequence
  Description of Artificial Sequence: Synthetic oligonucleotide
  Sense strand starting at position 722 of SEQ ID NO: 1561172
ccugacugugaaugucuaa

SEQ ID NO: 1651982 - RNA, 19 nt, Artificial Sequence
  Description of Artificial Sequence: Synthetic oligonucleotide
  Antisense strand to SEQ ID NO: 1651981
uuagacauucacagucagg

SEQ ID NO: 1651983 - RNA, 19 nt, Artificial Sequence
  Description of Artificial Sequence: Synthetic oligonucleotide
  Sense strand starting at position 734 of SEQ ID NO: 1561172
ugucuaaugcguccuagcu

SEQ ID NO: 1651984 - RNA, 19 nt, Artificial Sequence
  Description of Artificial Sequence: Synthetic oligonucleotide
  Antisense strand to SEQ ID NO: 1651983
agcuaggacgcauuagaca

SEQ ID NO: 1651985 - RNA, 19 nt, Artificial Sequence
  Description of Artificial Sequence: Synthetic oligonucleotide
  Sense strand starting at position 735 of SEQ ID NO: 1561172
gucuaaugcguccuagcuu

SEQ ID NO: 1651986 - RNA, 19 nt, Artificial Sequence
  Description of Artificial Sequence: Synthetic oligonucleotide
  Antisense strand to SEQ ID NO: 1651985
aagcuaggacgcauuagac

SEQ ID NO: 1651987 - RNA, 19 nt, Artificial Sequence
  Description of Artificial Sequence: Synthetic oligonucleotide
  Sense strand starting at position 1067 of SEQ ID NO: 1561172
gcuggaacgucccucagaa

SEQ ID NO: 1651988 - RNA, 19 nt, Artificial Sequence
  Description of Artificial Sequence: Synthetic oligonucleotide
  Antisense strand to SEQ ID NO: 1651987
uucugagggacguuccagc

SEQ ID NO: 1651989 - RNA, 19 nt, Artificial Sequence
  Description of Artificial Sequence: Synthetic oligonucleotide
  Sense strand starting at position 1581 of SEQ ID NO: 1561172
ggcccauuagccgaucaau

SEQ ID NO: 1651990 - RNA, 19 nt, Artificial Sequence
  Description of Artificial Sequence: Synthetic oligonucleotide
  Antisense strand to SEQ ID NO: 1651989
auugaucggcuaaugggcc

SEQ ID NO: 1651991 - RNA, 19 nt, Artificial Sequence
  Description of Artificial Sequence: Synthetic oligonucleotide
  Sense strand starting at position 1584 of SEQ ID NO: 1561172
ccauuagccgaucaauuag

SEQ ID NO: 1651992 - RNA, 19 nt, Artificial Sequence
  Description of Artificial Sequence: Synthetic oligonucleotide
  Antisense strand to SEQ ID NO: 1651991
cuaauugaucggcuaaugg

SEQ ID NO: 1651993 - RNA, 19 nt, Artificial Sequence
  Description of Artificial Sequence: Synthetic oligonucleotide
  Sense strand starting at position 2007 of SEQ ID NO: 1561172
uugagaucagagcgugacu

SEQ ID NO: 1651994 - RNA, 19 nt, Artificial Sequence
  Description of Artificial Sequence: Synthetic oligonucleotide
  Antisense strand to SEQ ID NO: 1651993
agucacgcucugaucucaa

SEQ ID NO: 1651995 - RNA, 19 nt, Artificial Sequence
  Description of Artificial Sequence: Synthetic oligonucleotide
  Sense strand starting at position 2095 of SEQ ID NO: 1561172
aguucuuucuauguguaga

SEQ ID NO: 1651996 - RNA, 19 nt, Artificial Sequence
  Description of Artificial Sequence: Synthetic oligonucleotide
  Antisense strand to SEQ ID NO: 1651995
ucuacacauagaaagaacu

SEQ ID NO: 1651997 - RNA, 19 nt, Artificial Sequence
  Description of Artificial Sequence: Synthetic oligonucleotide
  Sense strand starting at position 2096 of SEQ ID NO: 1561172
guucuuucuauguguagau

SEQ ID NO: 1651998 - RNA, 19 nt, Artificial Sequence
  Description of Artificial Sequence: Synthetic oligonucleotide
  Antisense strand to SEQ ID NO: 1651997
aucuacacauagaaagaac

SEQ ID NO: 1651999 - RNA, 19 nt, Artificial Sequence
  Description of Artificial Sequence: Synthetic oligonucleotide
  Sense strand starting at position 2097 of SEQ ID NO: 1561172
uucuuucuauguguagauu

SEQ ID NO: 1652000 - RNA, 19 nt, Artificial Sequence
  Description of Artificial Sequence: Synthetic oligonucleotide
  Antisense strand to SEQ ID NO: 1651999
aaucuacacauagaaagaa

SEQ ID NO: 1652001 - RNA, 19 nt, Artificial Sequence
  Description of Artificial Sequence: Synthetic oligonucleotide
  Sense strand starting at position 2164 of SEQ ID NO: 1561172
ccuagucuuucucuaucga

SEQ ID NO: 1652002 - RNA, 19 nt, Artificial Sequence
  Description of Artificial Sequence: Synthetic oligonucleotide
  Antisense strand to SEQ ID NO: 1652001
ucgauagagaaagacuagg

SEQ ID NO: 1652003 - RNA, 19 nt, Artificial Sequence
  Description of Artificial Sequence: Synthetic oligonucleotide
  Sense strand starting at position 2189 of SEQ ID NO: 1561172
cgcugacacgccguauauu

SEQ ID NO: 1652004 - RNA, 19 nt, Artificial Sequence
  Description of Artificial Sequence: Synthetic oligonucleotide
  Antisense strand to SEQ ID NO: 1652003
aauauacggcgugucagcg

SEQ ID NO: 1652005 - RNA, 19 nt, Artificial Sequence
  Description of Artificial Sequence: Synthetic oligonucleotide
  Sense strand starting at position 2190 of SEQ ID NO: 1561172
gcugacacgccguauauuu

SEQ ID NO: 1652006 - RNA, 19 nt, Artificial Sequence
  Description of Artificial Sequence: Synthetic oligonucleotide
  Antisense strand to SEQ ID NO: 1652005
aaauauacggcgugucagc

SEQ ID NO: 1652007 - RNA, 19 nt, Artificial Sequence
  Description of Artificial Sequence: Synthetic oligonucleotide
  Sense strand starting at position 2283 of SEQ ID NO: 1561172
aggguagagucuccacaga

SEQ ID NO: 1652008 - RNA, 19 nt, Artificial Sequence
  Description of Artificial Sequence: Synthetic oligonucleotide
  Antisense strand to SEQ ID NO: 1652007
ucuguggagacucuacccu

SEQ ID NO: 1652009 - RNA, 19 nt, Artificial Sequence
  Description of Artificial Sequence: Synthetic oligonucleotide
  Sense strand starting at position 2557 of SEQ ID NO: 1561172
cugcaugaucugggcgaca

SEQ ID NO: 1652010 - RNA, 19 nt, Artificial Sequence
  Description of Artificial Sequence: Synthetic oligonucleotide
  Antisense strand to SEQ ID NO: 1652009
ugucgcccagaucaugcag

SEQ ID NO: 1652011 - RNA, 19 nt, Artificial Sequence
  Description of Artificial Sequence: Synthetic oligonucleotide
  Sense strand starting at position 2559 of SEQ ID NO: 1561172
gcaugaucugggcgacaga

SEQ ID NO: 1652012 - RNA, 19 nt, Artificial Sequence
  Description of Artificial Sequence: Synthetic oligonucleotide
  Antisense strand to SEQ ID NO: 1652011
ucugucgcccagaucaugc

SEQ ID NO: 1652013 - RNA, 19 nt, Artificial Sequence
  Description of Artificial Sequence: Synthetic oligonucleotide
  Sense strand starting at position 2638 of SEQ ID NO: 1561172
gugagcacuuuccuuggau

SEQ ID NO: 1652014 - RNA, 19 nt, Artificial Sequence
  Description of Artificial Sequence: Synthetic oligonucleotide
  Antisense strand to SEQ ID NO: 1652013
auccaaggaaagugcucac

SEQ ID NO: 1652015 - RNA, 19 nt, Artificial Sequence
  Description of Artificial Sequence: Synthetic oligonucleotide
  Sense strand starting at position 2639 of SEQ ID NO: 1561172
ugagcacuuuccuuggauu

SEQ ID NO: 1652016 - RNA, 19 nt, Artificial Sequence
  Description of Artificial Sequence: Synthetic oligonucleotide
  Antisense strand to SEQ ID NO: 1652015
aauccaaggaaagugcuca

SEQ ID NO: 1652017 - RNA, 19 nt, Artificial Sequence
  Description of Artificial Sequence: Synthetic oligonucleotide
  Sense strand starting at position 2640 of SEQ ID NO: 1561172
gagcacuuuccuuggauua

SEQ ID NO: 1652018 - RNA, 19 nt, Artificial Sequence
  Description of Artificial Sequence: Synthetic oligonucleotide
  Antisense strand to SEQ ID NO: 1652017
uaauccaaggaaagugcuc

SEQ ID NO: 1652019 - RNA, 19 nt, Artificial Sequence
  Description of Artificial Sequence: Synthetic oligonucleotide
  Sense strand starting at position 2641 of SEQ ID NO: 1561172
agcacuuuccuuggauuaa

SEQ ID NO: 1652020 - RNA, 19 nt, Artificial Sequence
  Description of Artificial Sequence: Synthetic oligonucleotide
  Antisense strand to SEQ ID NO: 1652019
uuaauccaaggaaagugcu

SEQ ID NO: 1652021 - RNA, 19 nt, Artificial Sequence
  Description of Artificial Sequence: Synthetic oligonucleotide
  Sense strand starting at position 2664 of SEQ ID NO: 1561172
gggucuuccuaacaaggau

SEQ ID NO: 1652022 - RNA, 19 nt, Artificial Sequence
  Description of Artificial Sequence: Synthetic oligonucleotide
  Antisense strand to SEQ ID NO: 1652021
auccuuguuaggaagaccc

SEQ ID NO: 1652023 - RNA, 19 nt, Artificial Sequence
  Description of Artificial Sequence: Synthetic oligonucleotide
  Sense strand starting at position 2678 of SEQ ID NO: 1561172
aggaucgguucugugauua

SEQ ID NO: 1652024 - RNA, 19 nt, Artificial Sequence
  Description of Artificial Sequence: Synthetic oligonucleotide
  Antisense strand to SEQ ID NO: 1652023
uaaucacagaaccgauccu

SEQ ID NO: 1652025 - RNA, 19 nt, Artificial Sequence
  Description of Artificial Sequence: Synthetic oligonucleotide
  Sense strand starting at position 2739 of SEQ ID NO: 1561172
agccacuugccugaaucaa

SEQ ID NO: 1652026 - RNA, 19 nt, Artificial Sequence
  Description of Artificial Sequence: Synthetic oligonucleotide
  Antisense strand to SEQ ID NO: 1652025
uugauucaggcaaguggcu

SEQ ID NO: 1652027 - RNA, 19 nt, Artificial Sequence
  Description of Artificial Sequence: Synthetic oligonucleotide
  Sense strand starting at position 2810 of SEQ ID NO: 1561172
cgaggaacauccuaggaca

SEQ ID NO: 1652028 - RNA, 19 nt, Artificial Sequence
  Description of Artificial Sequence: Synthetic oligonucleotide
  Antisense strand to SEQ ID NO: 1652027
uguccuaggauguuccucg

SEQ ID NO: 1652029 - RNA, 19 nt, Artificial Sequence
  Description of Artificial Sequence: Synthetic oligonucleotide
  Sense strand starting at position 3495 of SEQ ID NO: 1561172
uagagaugaugucuuccua

SEQ ID NO: 1652030 - RNA, 19 nt, Artificial Sequence
  Description of Artificial Sequence: Synthetic oligonucleotide
  Antisense strand to SEQ ID NO: 1652029
uaggaagacaucaucucua

SEQ ID NO: 1652031 - RNA, 19 nt, Artificial Sequence
  Description of Artificial Sequence: Synthetic oligonucleotide
  Sense strand starting at position 3618 of SEQ ID NO: 1561172
cagggucuuugugugggaa

SEQ ID NO: 1652032 - RNA, 19 nt, Artificial Sequence
  Description of Artificial Sequence: Synthetic oligonucleotide
  Antisense strand to SEQ ID NO: 1652031
uucccacacaaagacccug

SEQ ID NO: 1652033 - RNA, 19 nt, Artificial Sequence
  Description of Artificial Sequence: Synthetic oligonucleotide
  Sense strand starting at position 3714 of SEQ ID NO: 1561172
uagggagucucagagaauu

SEQ ID NO: 1652034 - RNA, 19 nt, Artificial Sequence
  Description of Artificial Sequence: Synthetic oligonucleotide
  Antisense strand to SEQ ID NO: 1652033
aauucucugagacucccua

SEQ ID NO: 1652035 - RNA, 19 nt, Artificial Sequence
  Description of Artificial Sequence: Synthetic oligonucleotide
  Sense strand starting at position 3832 of SEQ ID NO: 1561172
ggcugcagccuguugagua

SEQ ID NO: 1652036 - RNA, 19 nt, Artificial Sequence
  Description of Artificial Sequence: Synthetic oligonucleotide
  Antisense strand to SEQ ID NO: 1652035
uacucaacaggcugcagcc

SEQ ID NO: 1652037 - RNA, 19 nt, Artificial Sequence
  Description of Artificial Sequence: Synthetic oligonucleotide
  Sense strand starting at position 3839 of SEQ ID NO: 1561172
gccuguugaguaggaguga

SEQ ID NO: 1652038 - RNA, 19 nt, Artificial Sequence
  Description of Artificial Sequence: Synthetic oligonucleotide
  Antisense strand to SEQ ID NO: 1652037
ucacuccuacucaacaggc

SEQ ID NO: 1652039 - RNA, 19 nt, Artificial Sequence
  Description of Artificial Sequence: Synthetic oligonucleotide
  Sense strand starting at position 3889 of SEQ ID NO: 1561172
ggugaagaauuucgaauua

SEQ ID NO: 1652040 - RNA, 19 nt, Artificial Sequence
  Description of Artificial Sequence: Synthetic oligonucleotide
  Antisense strand to SEQ ID NO: 1652039
uaauucgaaauucuucacc

SEQ ID NO: 1652041 - RNA, 19 nt, Artificial Sequence
  Description of Artificial Sequence: Synthetic oligonucleotide
  Sense strand starting at position 3916 of SEQ ID NO: 1561172
ggcagugagagccaaagau

SEQ ID NO: 1652042 - RNA, 19 nt, Artificial Sequence
  Description of Artificial Sequence: Synthetic oligonucleotide
  Antisense strand to SEQ ID NO: 1652041
aucuuuggcucucacugcc

SEQ ID NO: 1652043 - RNA, 19 nt, Artificial Sequence
  Description of Artificial Sequence: Synthetic oligonucleotide
  Sense strand starting at position 42 of SEQ ID NO: 1561173
ugaaaucugucuuccuggu

SEQ ID NO: 1652044 - RNA, 19 nt, Artificial Sequence
  Description of Artificial Sequence: Synthetic oligonucleotide
  Antisense strand to SEQ ID NO: 1652043
accaggaagacagauuuca

SEQ ID NO: 1652045 - RNA, 19 nt, Artificial Sequence
  Description of Artificial Sequence: Synthetic oligonucleotide
  Sense strand starting at position 48 of SEQ ID NO: 1561173
cugucuuccuggucccaga

SEQ ID NO: 1652046 - RNA, 19 nt, Artificial Sequence
  Description of Artificial Sequence: Synthetic oligonucleotide
  Antisense strand to SEQ ID NO: 1652045
ucugggaccaggaagacag

SEQ ID NO: 1652047 - RNA, 19 nt, Artificial Sequence
  Description of Artificial Sequence: Synthetic oligonucleotide
  Sense strand starting at position 75 of SEQ ID NO: 1561173
cugugaccucugcggagau

SEQ ID NO: 1652048 - RNA, 19 nt, Artificial Sequence
  Description of Artificial Sequence: Synthetic oligonucleotide
  Antisense strand to SEQ ID NO: 1652047
aucuccgcagaggucacag

SEQ ID NO: 1652049 - RNA, 19 nt, Artificial Sequence
  Description of Artificial Sequence: Synthetic oligonucleotide
  Sense strand starting at position 207 of SEQ ID NO: 1561173
ccaguuaccugcuuaugca

SEQ ID NO: 1652050 - RNA, 19 nt, Artificial Sequence
  Description of Artificial Sequence: Synthetic oligonucleotide
  Antisense strand to SEQ ID NO: 1652049
ugcauaagcagguaacugg

SEQ ID NO: 1652051 - RNA, 19 nt, Artificial Sequence
  Description of Artificial Sequence: Synthetic oligonucleotide
  Sense strand starting at position 229 of SEQ ID NO: 1561173
caauguugagcccguacga

SEQ ID NO: 1652052 - RNA, 19 nt, Artificial Sequence
  Description of Artificial Sequence: Synthetic oligonucleotide
  Antisense strand to SEQ ID NO: 1652051
ucguacgggcucaacauug

SEQ ID NO: 1652053 - RNA, 19 nt, Artificial Sequence
  Description of Artificial Sequence: Synthetic oligonucleotide
  Sense strand starting at position 324 of SEQ ID NO: 1561173
augccagggucuuccaaga

SEQ ID NO: 1652054 - RNA, 19 nt, Artificial Sequence
  Description of Artificial Sequence: Synthetic oligonucleotide
  Antisense strand to SEQ ID NO: 1652053
ucuuggaagacccuggcau

SEQ ID NO: 1652055 - RNA, 19 nt, Artificial Sequence
  Description of Artificial Sequence: Synthetic oligonucleotide
  Sense strand starting at position 708 of SEQ ID NO: 1561173
gacauaaugucgcugcauu

SEQ ID NO: 1652056 - RNA, 19 nt, Artificial Sequence
  Description of Artificial Sequence: Synthetic oligonucleotide
  Antisense strand to SEQ ID NO: 1652055
aaugcagcgacauuauguc

SEQ ID NO: 1652057 - RNA, 19 nt, Artificial Sequence
  Description of Artificial Sequence: Synthetic oligonucleotide
  Sense strand starting at position 709 of SEQ ID NO: 1561173
acauaaugucgcugcauuu

SEQ ID NO: 1652058 - RNA, 19 nt, Artificial Sequence
  Description of Artificial Sequence: Synthetic oligonucleotide
  Antisense strand to SEQ ID NO: 1652057
aaaugcagcgacauuaugu

SEQ ID NO: 1652059 - RNA, 19 nt, Artificial Sequence
  Description of Artificial Sequence: Synthetic oligonucleotide
  Sense strand starting at position 759 of SEQ ID NO: 1561173
uagcuugaggcugagaaga

SEQ ID NO: 1652060 - RNA, 19 nt, Artificial Sequence
  Description of Artificial Sequence: Synthetic oligonucleotide
  Antisense strand to SEQ ID NO: 1652059
ucuucucagccucaagcua

SEQ ID NO: 1652061 - RNA, 19 nt, Artificial Sequence
  Description of Artificial Sequence: Synthetic oligonucleotide
  Sense strand starting at position 1095 of SEQ ID NO: 1561173
ugguauugagccugaagaa

SEQ ID NO: 1652062 - RNA, 19 nt, Artificial Sequence
  Description of Artificial Sequence: Synthetic oligonucleotide
  Antisense strand to SEQ ID NO: 1652061
uucuucaggcucaauacca

SEQ ID NO: 1652063 - RNA, 19 nt, Artificial Sequence
  Description of Artificial Sequence: Synthetic oligonucleotide
  Sense strand starting at position 1135 of SEQ ID NO: 1561173
ggucgcagaucuccaagau

SEQ ID NO: 1652064 - RNA, 19 nt, Artificial Sequence
  Description of Artificial Sequence: Synthetic oligonucleotide
  Antisense strand to SEQ ID NO: 1652063
aucuuggagaucugcgacc

SEQ ID NO: 1652065 - RNA, 19 nt, Artificial Sequence
  Description of Artificial Sequence: Synthetic oligonucleotide
  Sense strand starting at position 1136 of SEQ ID NO: 1561173
gucgcagaucuccaagauc

SEQ ID NO: 1652066 - RNA, 19 nt, Artificial Sequence
  Description of Artificial Sequence: Synthetic oligonucleotide
  Antisense strand to SEQ ID NO: 1652065
gaucuuggagaucugcgac

SEQ ID NO: 1652067 - RNA, 19 nt, Artificial Sequence
  Description of Artificial Sequence: Synthetic oligonucleotide
  Sense strand starting at position 1218 of SEQ ID NO: 1561173
gucugaguucccggacacu

SEQ ID NO: 1652068 - RNA, 19 nt, Artificial Sequence
  Description of Artificial Sequence: Synthetic oligonucleotide
  Antisense strand to SEQ ID NO: 1652067
aguguccgggaacucagac

SEQ ID NO: 1652069 - RNA, 19 nt, Artificial Sequence
  Description of Artificial Sequence: Synthetic oligonucleotide
  Sense strand starting at position 1318 of SEQ ID NO: 1561173
gccaccagagcuugaugau

SEQ ID NO: 1652070 - RNA, 19 nt, Artificial Sequence
  Description of Artificial Sequence: Synthetic oligonucleotide
  Antisense strand to SEQ ID NO: 1652069
aucaucaagcucugguggc

SEQ ID NO: 1652071 - RNA, 19 nt, Artificial Sequence
  Description of Artificial Sequence: Synthetic oligonucleotide
  Sense strand starting at position 1973 of SEQ ID NO: 1561173
ccagucuggagucggaaau

SEQ ID NO: 1652072 - RNA, 19 nt, Artificial Sequence
  Description of Artificial Sequence: Synthetic oligonucleotide
  Antisense strand to SEQ ID NO: 1652071
auuuccgacuccagacugg

SEQ ID NO: 1652073 - RNA, 19 nt, Artificial Sequence
  Description of Artificial Sequence: Synthetic oligonucleotide
  Sense strand starting at position 2003 of SEQ ID NO: 1561173
gcaagugacauuggguuga

SEQ ID NO: 1652074 - RNA, 19 nt, Artificial Sequence
  Description of Artificial Sequence: Synthetic oligonucleotide
  Antisense strand to SEQ ID NO: 1652073
ucaacccaaugucacuugc

SEQ ID NO: 1652075 - RNA, 19 nt, Artificial Sequence
  Description of Artificial Sequence: Synthetic oligonucleotide
  Sense strand starting at position 2005 of SEQ ID NO: 1561173
aagugacauuggguugaga

SEQ ID NO: 1652076 - RNA, 19 nt, Artificial Sequence
  Description of Artificial Sequence: Synthetic oligonucleotide
  Antisense strand to SEQ ID NO: 1652075
ucucaacccaaugucacuu

SEQ ID NO: 1652077 - RNA, 19 nt, Artificial Sequence
  Description of Artificial Sequence: Synthetic oligonucleotide
  Sense strand starting at position 2007 of SEQ ID NO: 1561173
gugacauuggguugagauu

SEQ ID NO: 1652078 - RNA, 19 nt, Artificial Sequence
  Description of Artificial Sequence: Synthetic oligonucleotide
  Antisense strand to SEQ ID NO: 1652077
aaucucaacccaaugucac

SEQ ID NO: 1652079 - RNA, 19 nt, Artificial Sequence
  Description of Artificial Sequence: Synthetic oligonucleotide
  Sense strand starting at position 2016 of SEQ ID NO: 1561173
gguugagauugaaggguca

SEQ ID NO: 1652080 - RNA, 19 nt, Artificial Sequence
  Description of Artificial Sequence: Synthetic oligonucleotide
  Antisense strand to SEQ ID NO: 1652079
ugacccuucaaucucaacc

SEQ ID NO: 1652081 - RNA, 19 nt, Artificial Sequence
  Description of Artificial Sequence: Synthetic oligonucleotide
  Sense strand starting at position 2170 of SEQ ID NO: 1561173
gugcgcuaucuuuaggguu

SEQ ID NO: 1652082 - RNA, 19 nt, Artificial Sequence
  Description of Artificial Sequence: Synthetic oligonucleotide
  Antisense strand to SEQ ID NO: 1652081
aacccuaaagauagcgcac

SEQ ID NO: 1652083 - RNA, 19 nt, Artificial Sequence
  Description of Artificial Sequence: Synthetic oligonucleotide
  Sense strand starting at position 2484 of SEQ ID NO: 1561173
gggcacugcacuuaaauga

SEQ ID NO: 1652084 - RNA, 19 nt, Artificial Sequence
  Description of Artificial Sequence: Synthetic oligonucleotide
  Antisense strand to SEQ ID NO: 1652083
ucauuuaagugcagugccc

SEQ ID NO: 1652085 - RNA, 19 nt, Artificial Sequence
  Description of Artificial Sequence: Synthetic oligonucleotide
  Sense strand starting at position 2509 of SEQ ID NO: 1561173
gcaugaacgcugucagccu

SEQ ID NO: 1652086 - RNA, 19 nt, Artificial Sequence
  Description of Artificial Sequence: Synthetic oligonucleotide
  Antisense strand to SEQ ID NO: 1652085
aggcugacagcguucaugc

SEQ ID NO: 1652087 - RNA, 19 nt, Artificial Sequence
  Description of Artificial Sequence: Synthetic oligonucleotide
  Sense strand starting at position 2538 of SEQ ID NO: 1561173
agagcaaacuuccacagau

SEQ ID NO: 1652088 - RNA, 19 nt, Artificial Sequence
  Description of Artificial Sequence: Synthetic oligonucleotide
  Antisense strand to SEQ ID NO: 1652087
aucuguggaaguuugcucu

SEQ ID NO: 1652089 - RNA, 19 nt, Artificial Sequence
  Description of Artificial Sequence: Synthetic oligonucleotide
  Sense strand starting at position 2556 of SEQ ID NO: 1561173
ugggaauuguguuccuacu

SEQ ID NO: 1652090 - RNA, 19 nt, Artificial Sequence
  Description of Artificial Sequence: Synthetic oligonucleotide
  Antisense strand to SEQ ID NO: 1652089
aguaggaacacaauuccca

SEQ ID NO: 1652091 - RNA, 19 nt, Artificial Sequence
  Description of Artificial Sequence: Synthetic oligonucleotide
  Sense strand starting at position 2766 of SEQ ID NO: 1561173
ggaaguucuuauucucuuu

SEQ ID NO: 1652092 - RNA, 19 nt, Artificial Sequence
  Description of Artificial Sequence: Synthetic oligonucleotide
  Antisense strand to SEQ ID NO: 1652091
aaagagaauaagaacuucc

SEQ ID NO: 1652093 - RNA, 19 nt, Artificial Sequence
  Description of Artificial Sequence: Synthetic oligonucleotide
  Sense strand starting at position 2769 of SEQ ID NO: 1561173
aguucuuauucucuuugga

SEQ ID NO: 1652094 - RNA, 19 nt, Artificial Sequence
  Description of Artificial Sequence: Synthetic oligonucleotide
  Antisense strand to SEQ ID NO: 1652093
uccaaagagaauaagaacu

SEQ ID NO: 1652095 - RNA, 19 nt, Artificial Sequence
  Description of Artificial Sequence: Synthetic oligonucleotide
  Sense strand starting at position 2771 of SEQ ID NO: 1561173
uucuuauucucuuuggaga

SEQ ID NO: 1652096 - RNA, 19 nt, Artificial Sequence
  Description of Artificial Sequence: Synthetic oligonucleotide
  Antisense strand to SEQ ID NO: 1652095
ucuccaaagagaauaagaa

SEQ ID NO: 1652097 - RNA, 19 nt, Artificial Sequence
  Description of Artificial Sequence: Synthetic oligonucleotide
  Sense strand starting at position 2772 of SEQ ID NO: 1561173
ucuuauucucuuuggagaa

SEQ ID NO: 1652098 - RNA, 19 nt, Artificial Sequence
  Description of Artificial Sequence: Synthetic oligonucleotide
  Antisense strand to SEQ ID NO: 1652097
uucuccaaagagaauaaga

SEQ ID NO: 1652099 - RNA, 19 nt, Artificial Sequence
  Description of Artificial Sequence: Synthetic oligonucleotide
  Sense strand starting at position 2794 of SEQ ID NO: 1561173
ucaggagagguuugugaag

SEQ ID NO: 1652100 - RNA, 19 nt, Artificial Sequence
  Description of Artificial Sequence: Synthetic oligonucleotide
  Antisense strand to SEQ ID NO: 1652099
cuucacaaaccucuccuga

SEQ ID NO: 1652101 - RNA, 19 nt, Artificial Sequence
  Description of Artificial Sequence: Synthetic oligonucleotide
  Sense strand starting at position 2817 of SEQ ID NO: 1561173
ucaacaaacguguacuaaa

SEQ ID NO: 1652102 - RNA, 19 nt, Artificial Sequence
  Description of Artificial Sequence: Synthetic oligonucleotide
  Antisense strand to SEQ ID NO: 1652101
uuuaguacacguuuguuga

SEQ ID NO: 1652103 - RNA, 19 nt, Artificial Sequence
  Description of Artificial Sequence: Synthetic oligonucleotide
  Sense strand starting at position 2923 of SEQ ID NO: 1561173
ggacuuguguccuuaggug

SEQ ID NO: 1652104 - RNA, 19 nt, Artificial Sequence
  Description of Artificial Sequence: Synthetic oligonucleotide
  Antisense strand to SEQ ID NO: 1652103
caccuaaggacacaagucc

SEQ ID NO: 1652105 - RNA, 19 nt, Artificial Sequence
  Description of Artificial Sequence: Synthetic oligonucleotide
  Sense strand starting at position 2931 of SEQ ID NO: 1561173
guccuuaggugaucgagua

SEQ ID NO: 1652106 - RNA, 19 nt, Artificial Sequence
  Description of Artificial Sequence: Synthetic oligonucleotide
  Antisense strand to SEQ ID NO: 1652105
uacucgaucaccuaaggac

SEQ ID NO: 1652107 - RNA, 19 nt, Artificial Sequence
  Description of Artificial Sequence: Synthetic oligonucleotide
  Sense strand starting at position 3439 of SEQ ID NO: 1561173
agggauuguaaggguggau

SEQ ID NO: 1652108 - RNA, 19 nt, Artificial Sequence
  Description of Artificial Sequence: Synthetic oligonucleotide
  Antisense strand to SEQ ID NO: 1652107
auccacccuuacaaucccu

SEQ ID NO: 1652109 - RNA, 19 nt, Artificial Sequence
  Description of Artificial Sequence: Synthetic oligonucleotide
  Sense strand starting at position 3484 of SEQ ID NO: 1561173
gaguuugugggaugugagu

SEQ ID NO: 1652110 - RNA, 19 nt, Artificial Sequence
  Description of Artificial Sequence: Synthetic oligonucleotide
  Antisense strand to SEQ ID NO: 1652109
acucacaucccacaaacuc

SEQ ID NO: 1652111 - RNA, 19 nt, Artificial Sequence
  Description of Artificial Sequence: Synthetic oligonucleotide
  Sense strand starting at position 3526 of SEQ ID NO: 1561173
uugguaauuaugggacuau

SEQ ID NO: 1652112 - RNA, 19 nt, Artificial Sequence
  Description of Artificial Sequence: Synthetic oligonucleotide
  Antisense strand to SEQ ID NO: 1652111
auagucccauaauuaccaa

SEQ ID NO: 1652113 - RNA, 19 nt, Artificial Sequence
  Description of Artificial Sequence: Synthetic oligonucleotide
  Sense strand starting at position 3527 of SEQ ID NO: 1561173
ugguaauuaugggacuauu

SEQ ID NO: 1652114 - RNA, 19 nt, Artificial Sequence
  Description of Artificial Sequence: Synthetic oligonucleotide
  Antisense strand to SEQ ID NO: 1652113
aauagucccauaauuacca

SEQ ID NO: 1652115 - RNA, 19 nt, Artificial Sequence
  Description of Artificial Sequence: Synthetic oligonucleotide
  Sense strand starting at position 3562 of SEQ ID NO: 1561173
gaguuuagagggcagugau

SEQ ID NO: 1652116 - RNA, 19 nt, Artificial Sequence
  Description of Artificial Sequence: Synthetic oligonucleotide
  Antisense strand to SEQ ID NO: 1652115
aucacugcccucuaaacuc

SEQ ID NO: 1652117 - RNA, 19 nt, Artificial Sequence
  Description of Artificial Sequence: Synthetic oligonucleotide
  Sense strand starting at position 3565 of SEQ ID NO: 1561173
uuuagagggcagugauaga

SEQ ID NO: 1652118 - RNA, 19 nt, Artificial Sequence
  Description of Artificial Sequence: Synthetic oligonucleotide
  Antisense strand to SEQ ID NO: 1652117
ucuaucacugcccucuaaa

SEQ ID NO: 1652119 - RNA, 19 nt, Artificial Sequence
  Description of Artificial Sequence: Synthetic oligonucleotide
  Sense strand starting at position 3638 of SEQ ID NO: 1561173
gaggguagccuuggagaug

SEQ ID NO: 1652120 - RNA, 19 nt, Artificial Sequence
  Description of Artificial Sequence: Synthetic oligonucleotide
  Antisense strand to SEQ ID NO: 1652119
caucuccaaggcuacccuc

SEQ ID NO: 1652121 - RNA, 19 nt, Artificial Sequence
  Description of Artificial Sequence: Synthetic oligonucleotide
  Sense strand starting at position 3657 of SEQ ID NO: 1561173
agaccugaacgaugagguu

SEQ ID NO: 1652122 - RNA, 19 nt, Artificial Sequence
  Description of Artificial Sequence: Synthetic oligonucleotide
  Antisense strand to SEQ ID NO: 1652121
aaccucaucguucaggucu

SEQ ID NO: 1652123 - RNA, 19 nt, Artificial Sequence
  Description of Artificial Sequence: Synthetic oligonucleotide
  Sense strand starting at position 17 of SEQ ID NO: 1561174
ggcucagagccuuacgaca

SEQ ID NO: 1652124 - RNA, 19 nt, Artificial Sequence
  Description of Artificial Sequence: Synthetic oligonucleotide
  Antisense strand to SEQ ID NO: 1652123
ugucguaaggcucugagcc

SEQ ID NO: 1652125 - RNA, 19 nt, Artificial Sequence
  Description of Artificial Sequence: Synthetic oligonucleotide
  Sense strand starting at position 139 of SEQ ID NO: 1561174
agaacaaucuuggaaccuu

SEQ ID NO: 1652126 - RNA, 19 nt, Artificial Sequence
  Description of Artificial Sequence: Synthetic oligonucleotide
  Antisense strand to SEQ ID NO: 1652125
aagguuccaagauuguucu

SEQ ID NO: 1652127 - RNA, 19 nt, Artificial Sequence
  Description of Artificial Sequence: Synthetic oligonucleotide
  Sense strand starting at position 230 of SEQ ID NO: 1561174
ucagacuuucuggguugaa

SEQ ID NO: 1652128 - RNA, 19 nt, Artificial Sequence
  Description of Artificial Sequence: Synthetic oligonucleotide
  Antisense strand to SEQ ID NO: 1652127
uucaacccagaaagucuga

SEQ ID NO: 1652129 - RNA, 19 nt, Artificial Sequence
  Description of Artificial Sequence: Synthetic oligonucleotide
  Sense strand starting at position 231 of SEQ ID NO: 1561174
cagacuuucuggguugaaa

SEQ ID NO: 1652130 - RNA, 19 nt, Artificial Sequence
  Description of Artificial Sequence: Synthetic oligonucleotide
  Antisense strand to SEQ ID NO: 1652129
uuucaacccagaaagucug

SEQ ID NO: 1652131 - RNA, 19 nt, Artificial Sequence
  Description of Artificial Sequence: Synthetic oligonucleotide
  Sense strand starting at position 455 of SEQ ID NO: 1561174
ugaaaucugucuuccuggu

SEQ ID NO: 1652132 - RNA, 19 nt, Artificial Sequence
  Description of Artificial Sequence: Synthetic oligonucleotide
  Antisense strand to SEQ ID NO: 1652131
accaggaagacagauuuca

SEQ ID NO: 1652133 - RNA, 19 nt, Artificial Sequence
  Description of Artificial Sequence: Synthetic oligonucleotide
  Sense strand starting at position 461 of SEQ ID NO: 1561174
cugucuuccuggucccaga

SEQ ID NO: 1652134 - RNA, 19 nt, Artificial Sequence
  Description of Artificial Sequence: Synthetic oligonucleotide
  Antisense strand to SEQ ID NO: 1652133
ucugggaccaggaagacag

SEQ ID NO: 1652135 - RNA, 19 nt, Artificial Sequence
  Description of Artificial Sequence: Synthetic oligonucleotide
  Sense strand starting at position 488 of SEQ ID NO: 1561174
cugugaccucugcggagau

SEQ ID NO: 1652136 - RNA, 19 nt, Artificial Sequence
  Description of Artificial Sequence: Synthetic oligonucleotide
  Antisense strand to SEQ ID NO: 1652135
aucuccgcagaggucacag

SEQ ID NO: 1652137 - RNA, 19 nt, Artificial Sequence
  Description of Artificial Sequence: Synthetic oligonucleotide
  Sense strand starting at position 620 of SEQ ID NO: 1561174
ccaguuaccugcuuaugca

SEQ ID NO: 1652138 - RNA, 19 nt, Artificial Sequence
  Description of Artificial Sequence: Synthetic oligonucleotide
  Antisense strand to SEQ ID NO: 1652137
ugcauaagcagguaacugg

SEQ ID NO: 1652139 - RNA, 19 nt, Artificial Sequence
  Description of Artificial Sequence: Synthetic oligonucleotide
  Sense strand starting at position 642 of SEQ ID NO: 1561174
caauguugagcccguacga

SEQ ID NO: 1652140 - RNA, 19 nt, Artificial Sequence
  Description of Artificial Sequence: Synthetic oligonucleotide
  Antisense strand to SEQ ID NO: 1652139
ucguacgggcucaacauug

SEQ ID NO: 1652141 - RNA, 19 nt, Artificial Sequence
  Description of Artificial Sequence: Synthetic oligonucleotide
  Sense strand starting at position 737 of SEQ ID NO: 1561174
augccagggucuuccaaga

SEQ ID NO: 1652142 - RNA, 19 nt, Artificial Sequence
  Description of Artificial Sequence: Synthetic oligonucleotide
  Antisense strand to SEQ ID NO: 1652141
ucuuggaagacccuggcau

SEQ ID NO: 1652143 - RNA, 19 nt, Artificial Sequence
  Description of Artificial Sequence: Synthetic oligonucleotide
  Sense strand starting at position 1121 of SEQ ID NO: 1561174
gacauaaugucgcugcauu

SEQ ID NO: 1652144 - RNA, 19 nt, Artificial Sequence
  Description of Artificial Sequence: Synthetic oligonucleotide
  Antisense strand to SEQ ID NO: 1652143
aaugcagcgacauuauguc

SEQ ID NO: 1652145 - RNA, 19 nt, Artificial Sequence
  Description of Artificial Sequence: Synthetic oligonucleotide
  Sense strand starting at position 1122 of SEQ ID NO: 1561174
acauaaugucgcugcauuu

SEQ ID NO: 1652146 - RNA, 19 nt, Artificial Sequence
  Description of Artificial Sequence: Synthetic oligonucleotide
  Antisense strand to SEQ ID NO: 1652145
aaaugcagcgacauuaugu

SEQ ID NO: 1652147 - RNA, 19 nt, Artificial Sequence
  Description of Artificial Sequence: Synthetic oligonucleotide
  Sense strand starting at position 1172 of SEQ ID NO: 1561174
uagcuugaggcugagaaga

SEQ ID NO: 1652148 - RNA, 19 nt, Artificial Sequence
  Description of Artificial Sequence: Synthetic oligonucleotide
  Antisense strand to SEQ ID NO: 1652147
ucuucucagccucaagcua

SEQ ID NO: 1652149 - RNA, 19 nt, Artificial Sequence
  Description of Artificial Sequence: Synthetic oligonucleotide
  Sense strand starting at position 1508 of SEQ ID NO: 1561174
ugguauugagccugaagaa

SEQ ID NO: 1652150 - RNA, 19 nt, Artificial Sequence
  Description of Artificial Sequence: Synthetic oligonucleotide
  Antisense strand to SEQ ID NO: 1652149
uucuucaggcucaauacca

SEQ ID NO: 1652151 - RNA, 19 nt, Artificial Sequence
  Description of Artificial Sequence: Synthetic oligonucleotide
  Sense strand starting at position 1548 of SEQ ID NO: 1561174
ggucgcagaucuccaagau

SEQ ID NO: 1652152 - RNA, 19 nt, Artificial Sequence
  Description of Artificial Sequence: Synthetic oligonucleotide
  Antisense strand to SEQ ID NO: 1652151
aucuuggagaucugcgacc

SEQ ID NO: 1652153 - RNA, 19 nt, Artificial Sequence
  Description of Artificial Sequence: Synthetic oligonucleotide
  Sense strand starting at position 1549 of SEQ ID NO: 1561174
gucgcagaucuccaagauc

SEQ ID NO: 1652154 - RNA, 19 nt, Artificial Sequence
  Description of Artificial Sequence: Synthetic oligonucleotide
  Antisense strand to SEQ ID NO: 1652153
gaucuuggagaucugcgac

SEQ ID NO: 1652155 - RNA, 19 nt, Artificial Sequence
  Description of Artificial Sequence: Synthetic oligonucleotide
  Sense strand starting at position 1631 of SEQ ID NO: 1561174
gucugaguucccggacacu

SEQ ID NO: 1652156 - RNA, 19 nt, Artificial Sequence
  Description of Artificial Sequence: Synthetic oligonucleotide
  Antisense strand to SEQ ID NO: 1652155
aguguccgggaacucagac

SEQ ID NO: 1652157 - RNA, 19 nt, Artificial Sequence
  Description of Artificial Sequence: Synthetic oligonucleotide
  Sense strand starting at position 1731 of SEQ ID NO: 1561174
gccaccagagcuugaugau

SEQ ID NO: 1652158 - RNA, 19 nt, Artificial Sequence
  Description of Artificial Sequence: Synthetic oligonucleotide
  Antisense strand to SEQ ID NO: 1652157
aucaucaagcucugguggc

SEQ ID NO: 1652159 - RNA, 19 nt, Artificial Sequence
  Description of Artificial Sequence: Synthetic oligonucleotide
  Sense strand starting at position 2386 of SEQ ID NO: 1561174
ccagucuggagucggaaau

SEQ ID NO: 1652160 - RNA, 19 nt, Artificial Sequence
  Description of Artificial Sequence: Synthetic oligonucleotide
  Antisense strand to SEQ ID NO: 1652159
auuuccgacuccagacugg

SEQ ID NO: 1652161 - RNA, 19 nt, Artificial Sequence
  Description of Artificial Sequence: Synthetic oligonucleotide
  Sense strand starting at position 2416 of SEQ ID NO: 1561174
gcaagugacauuggguuga

SEQ ID NO: 1652162 - RNA, 19 nt, Artificial Sequence
  Description of Artificial Sequence: Synthetic oligonucleotide
  Antisense strand to SEQ ID NO: 1652161
ucaacccaaugucacuugc

SEQ ID NO: 1652163 - RNA, 19 nt, Artificial Sequence
  Description of Artificial Sequence: Synthetic oligonucleotide
  Sense strand starting at position 2418 of SEQ ID NO: 1561174
aagugacauuggguugaga

SEQ ID NO: 1652164 - RNA, 19 nt, Artificial Sequence
  Description of Artificial Sequence: Synthetic oligonucleotide
  Antisense strand to SEQ ID NO: 1652163
ucucaacccaaugucacuu

SEQ ID NO: 1652165 - RNA, 19 nt, Artificial Sequence
  Description of Artificial Sequence: Synthetic oligonucleotide
  Sense strand starting at position 2420 of SEQ ID NO: 1561174
gugacauuggguugagauu

SEQ ID NO: 1652166 - RNA, 19 nt, Artificial Sequence
  Description of Artificial Sequence: Synthetic oligonucleotide
  Antisense strand to SEQ ID NO: 1652165
aaucucaacccaaugucac

SEQ ID NO: 1652167 - RNA, 19 nt, Artificial Sequence
  Description of Artificial Sequence: Synthetic oligonucleotide
  Sense strand starting at position 2429 of SEQ ID NO: 1561174
gguugagauugaaggguca

SEQ ID NO: 1652168 - RNA, 19 nt, Artificial Sequence
  Description of Artificial Sequence: Synthetic oligonucleotide
  Antisense strand to SEQ ID NO: 1652167
ugacccuucaaucucaacc

SEQ ID NO: 1652169 - RNA, 19 nt, Artificial Sequence
  Description of Artificial Sequence: Synthetic oligonucleotide
  Sense strand starting at position 2897 of SEQ ID NO: 1561174
gggcacugcacuuaaauga

SEQ ID NO: 1652170 - RNA, 19 nt, Artificial Sequence
  Description of Artificial Sequence: Synthetic oligonucleotide
  Antisense strand to SEQ ID NO: 1652169
ucauuuaagugcagugccc

SEQ ID NO: 1652171 - RNA, 19 nt, Artificial Sequence
  Description of Artificial Sequence: Synthetic oligonucleotide
  Sense strand starting at position 2922 of SEQ ID NO: 1561174
gcaugaacgcugucagccu

SEQ ID NO: 1652172 - RNA, 19 nt, Artificial Sequence
  Description of Artificial Sequence: Synthetic oligonucleotide
  Antisense strand to SEQ ID NO: 1652171
aggcugacagcguucaugc

SEQ ID NO: 1652173 - RNA, 19 nt, Artificial Sequence
  Description of Artificial Sequence: Synthetic oligonucleotide
  Sense strand starting at position 2951 of SEQ ID NO: 1561174
agagcaaacuuccacagau

SEQ ID NO: 1652174 - RNA, 19 nt, Artificial Sequence
  Description of Artificial Sequence: Synthetic oligonucleotide
  Antisense strand to SEQ ID NO: 1652173
aucuguggaaguuugcucu

SEQ ID NO: 1652175 - RNA, 19 nt, Artificial Sequence
  Description of Artificial Sequence: Synthetic oligonucleotide
  Sense strand starting at position 2969 of SEQ ID NO: 1561174
ugggaauuguguuccuacu

SEQ ID NO: 1652176 - RNA, 19 nt, Artificial Sequence
  Description of Artificial Sequence: Synthetic oligonucleotide
  Antisense strand to SEQ ID NO: 1652175
aguaggaacacaauuccca

SEQ ID NO: 1652177 - RNA, 19 nt, Artificial Sequence
  Description of Artificial Sequence: Synthetic oligonucleotide
  Sense strand starting at position 3179 of SEQ ID NO: 1561174
ggaaguucuuauucucuuu

SEQ ID NO: 1652178 - RNA, 19 nt, Artificial Sequence
  Description of Artificial Sequence: Synthetic oligonucleotide
  Antisense strand to SEQ ID NO: 1652177
aaagagaauaagaacuucc

SEQ ID NO: 1652179 - RNA, 19 nt, Artificial Sequence
  Description of Artificial Sequence: Synthetic oligonucleotide
  Sense strand starting at position 3182 of SEQ ID NO: 1561174
aguucuuauucucuuugga

SEQ ID NO: 1652180 - RNA, 19 nt, Artificial Sequence
  Description of Artificial Sequence: Synthetic oligonucleotide
  Antisense strand to SEQ ID NO: 1652179
uccaaagagaauaagaacu

SEQ ID NO: 1652181 - RNA, 19 nt, Artificial Sequence
  Description of Artificial Sequence: Synthetic oligonucleotide
  Sense strand starting at position 3184 of SEQ ID NO: 1561174
uucuuauucucuuuggaga

SEQ ID NO: 1652182 - RNA, 19 nt, Artificial Sequence
  Description of Artificial Sequence: Synthetic oligonucleotide
  Antisense strand to SEQ ID NO: 1652181
ucuccaaagagaauaagaa

SEQ ID NO: 1652183 - RNA, 19 nt, Artificial Sequence
  Description of Artificial Sequence: Synthetic oligonucleotide
  Sense strand starting at position 3185 of SEQ ID NO: 1561174
ucuuauucucuuuggagaa

SEQ ID NO: 1652184 - RNA, 19 nt, Artificial Sequence
  Description of Artificial Sequence: Synthetic oligonucleotide
  Antisense strand to SEQ ID NO: 1652183
uucuccaaagagaauaaga

SEQ ID NO: 1652185 - RNA, 19 nt, Artificial Sequence
  Description of Artificial Sequence: Synthetic oligonucleotide
  Sense strand starting at position 3207 of SEQ ID NO: 1561174
ucaggagagguuugugaag

SEQ ID NO: 1652186 - RNA, 19 nt, Artificial Sequence
  Description of Artificial Sequence: Synthetic oligonucleotide
  Antisense strand to SEQ ID NO: 1652185
cuucacaaaccucuccuga

SEQ ID NO: 1652187 - RNA, 19 nt, Artificial Sequence
  Description of Artificial Sequence: Synthetic oligonucleotide
  Sense strand starting at position 3230 of SEQ ID NO: 1561174
ucaacaaacguguacuaaa

SEQ ID NO: 1652188 - RNA, 19 nt, Artificial Sequence
  Description of Artificial Sequence: Synthetic oligonucleotide
  Antisense strand to SEQ ID NO: 1652187
uuuaguacacguuuguuga

SEQ ID NO: 1652189 - RNA, 19 nt, Artificial Sequence
  Description of Artificial Sequence: Synthetic oligonucleotide
  Sense strand starting at position 3336 of SEQ ID NO: 1561174
ggacuuguguccuuaggug

SEQ ID NO: 1652190 - RNA, 19 nt, Artificial Sequence
  Description of Artificial Sequence: Synthetic oligonucleotide
  Antisense strand to SEQ ID NO: 1652189
caccuaaggacacaagucc

SEQ ID NO: 1652191 - RNA, 19 nt, Artificial Sequence
  Description of Artificial Sequence: Synthetic oligonucleotide
  Sense strand starting at position 3344 of SEQ ID NO: 1561174
guccuuaggugaucgagua

SEQ ID NO: 1652192 - RNA, 19 nt, Artificial Sequence
  Description of Artificial Sequence: Synthetic oligonucleotide
  Antisense strand to SEQ ID NO: 1652191
uacucgaucaccuaaggac

SEQ ID NO: 1652193 - RNA, 19 nt, Artificial Sequence
  Description of Artificial Sequence: Synthetic oligonucleotide
  Sense strand starting at position 3852 of SEQ ID NO: 1561174
agggauuguaaggguggau

SEQ ID NO: 1652194 - RNA, 19 nt, Artificial Sequence
  Description of Artificial Sequence: Synthetic oligonucleotide
  Antisense strand to SEQ ID NO: 1652193
auccacccuuacaaucccu

SEQ ID NO: 1652195 - RNA, 19 nt, Artificial Sequence
  Description of Artificial Sequence: Synthetic oligonucleotide
  Sense strand starting at position 3897 of SEQ ID NO: 1561174
gaguuugugggaugugagu

SEQ ID NO: 1652196 - RNA, 19 nt, Artificial Sequence
  Description of Artificial Sequence: Synthetic oligonucleotide
  Antisense strand to SEQ ID NO: 1652195
acucacaucccacaaacuc

SEQ ID NO: 1652197 - RNA, 19 nt, Artificial Sequence
  Description of Artificial Sequence: Synthetic oligonucleotide
  Sense strand starting at position 3939 of SEQ ID NO: 1561174
uugguaauuaugggacuau

SEQ ID NO: 1652198 - RNA, 19 nt, Artificial Sequence
  Description of Artificial Sequence: Synthetic oligonucleotide
  Antisense strand to SEQ ID NO: 1652197
auagucccauaauuaccaa

SEQ ID NO: 1652199 - RNA, 19 nt, Artificial Sequence
  Description of Artificial Sequence: Synthetic oligonucleotide
  Sense strand starting at position 3975 of SEQ ID NO: 1561174
gaguuuagagggcagugau

SEQ ID NO: 1652200 - RNA, 19 nt, Artificial Sequence
  Description of Artificial Sequence: Synthetic oligonucleotide
  Antisense strand to SEQ ID NO: 1652199
aucacugcccucuaaacuc

SEQ ID NO: 1652201 - RNA, 19 nt, Artificial Sequence
  Description of Artificial Sequence: Synthetic oligonucleotide
  Sense strand starting at position 3978 of SEQ ID NO: 1561174
uuuagagggcagugauaga

SEQ ID NO: 1652202 - RNA, 19 nt, Artificial Sequence
  Description of Artificial Sequence: Synthetic oligonucleotide
  Antisense strand to SEQ ID NO: 1652201
ucuaucacugcccucuaaa

SEQ ID NO: 1652203 - RNA, 19 nt, Artificial Sequence
  Description of Artificial Sequence: Synthetic oligonucleotide
  Sense strand starting at position 2 of SEQ ID NO: 1561175
ccugaagucugucucagaa

SEQ ID NO: 1652204 - RNA, 19 nt, Artificial Sequence
  Description of Artificial Sequence: Synthetic oligonucleotide
  Antisense strand to SEQ ID NO: 1652203
uucugagacagacuucagg

SEQ ID NO: 1652205 - RNA, 19 nt, Artificial Sequence
  Description of Artificial Sequence: Synthetic oligonucleotide
  Sense strand starting at position 12 of SEQ ID NO: 1561175
gucucagaaccuuggauca

SEQ ID NO: 1652206 - RNA, 19 nt, Artificial Sequence
  Description of Artificial Sequence: Synthetic oligonucleotide
  Antisense strand to SEQ ID NO: 1652205
ugauccaagguucugagac

SEQ ID NO: 1652207 - RNA, 19 nt, Artificial Sequence
  Description of Artificial Sequence: Synthetic oligonucleotide
  Sense strand starting at position 14 of SEQ ID NO: 1561175
cucagaaccuuggaucaca

SEQ ID NO: 1652208 - RNA, 19 nt, Artificial Sequence
  Description of Artificial Sequence: Synthetic oligonucleotide
  Antisense strand to SEQ ID NO: 1652207
ugugauccaagguucugag

SEQ ID NO: 1652209 - RNA, 19 nt, Artificial Sequence
  Description of Artificial Sequence: Synthetic oligonucleotide
  Sense strand starting at position 51 of SEQ ID NO: 1561175
ggcucagagccuuacgaca

SEQ ID NO: 1652210 - RNA, 19 nt, Artificial Sequence
  Description of Artificial Sequence: Synthetic oligonucleotide
  Antisense strand to SEQ ID NO: 1652209
ugucguaaggcucugagcc

SEQ ID NO: 1652211 - RNA, 19 nt, Artificial Sequence
  Description of Artificial Sequence: Synthetic oligonucleotide
  Sense strand starting at position 173 of SEQ ID NO: 1561175
agaacaaucuuggaaccuu

SEQ ID NO: 1652212 - RNA, 19 nt, Artificial Sequence
  Description of Artificial Sequence: Synthetic oligonucleotide
  Antisense strand to SEQ ID NO: 1652211
aagguuccaagauuguucu

SEQ ID NO: 1652213 - RNA, 19 nt, Artificial Sequence
  Description of Artificial Sequence: Synthetic oligonucleotide
  Sense strand starting at position 264 of SEQ ID NO: 1561175
ucagacuuucuggguugaa

SEQ ID NO: 1652214 - RNA, 19 nt, Artificial Sequence
  Description of Artificial Sequence: Synthetic oligonucleotide
  Antisense strand to SEQ ID NO: 1652213
uucaacccagaaagucuga

SEQ ID NO: 1652215 - RNA, 19 nt, Artificial Sequence
  Description of Artificial Sequence: Synthetic oligonucleotide
  Sense strand starting at position 265 of SEQ ID NO: 1561175
cagacuuucuggguugaaa

SEQ ID NO: 1652216 - RNA, 19 nt, Artificial Sequence
  Description of Artificial Sequence: Synthetic oligonucleotide
  Antisense strand to SEQ ID NO: 1652215
uuucaacccagaaagucug

SEQ ID NO: 1652217 - RNA, 19 nt, Artificial Sequence
  Description of Artificial Sequence: Synthetic oligonucleotide
  Sense strand starting at position 489 of SEQ ID NO: 1561175
ugaaaucugucuuccuggu

SEQ ID NO: 1652218 - RNA, 19 nt, Artificial Sequence
  Description of Artificial Sequence: Synthetic oligonucleotide
  Antisense strand to SEQ ID NO: 1652217
accaggaagacagauuuca

SEQ ID NO: 1652219 - RNA, 19 nt, Artificial Sequence
  Description of Artificial Sequence: Synthetic oligonucleotide
  Sense strand starting at position 495 of SEQ ID NO: 1561175
cugucuuccuggucccaga

SEQ ID NO: 1652220 - RNA, 19 nt, Artificial Sequence
  Description of Artificial Sequence: Synthetic oligonucleotide
  Antisense strand to SEQ ID NO: 1652219
ucugggaccaggaagacag

SEQ ID NO: 1652221 - RNA, 19 nt, Artificial Sequence
  Description of Artificial Sequence: Synthetic oligonucleotide
  Sense strand starting at position 522 of SEQ ID NO: 1561175
cugugaccucugcggagau

SEQ ID NO: 1652222 - RNA, 19 nt, Artificial Sequence
  Description of Artificial Sequence: Synthetic oligonucleotide
  Antisense strand to SEQ ID NO: 1652221
aucuccgcagaggucacag

SEQ ID NO: 1652223 - RNA, 19 nt, Artificial Sequence
  Description of Artificial Sequence: Synthetic oligonucleotide
  Sense strand starting at position 654 of SEQ ID NO: 1561175
ccaguuaccugcuuaugca

SEQ ID NO: 1652224 - RNA, 19 nt, Artificial Sequence
  Description of Artificial Sequence: Synthetic oligonucleotide
  Antisense strand to SEQ ID NO: 1652223
ugcauaagcagguaacugg

SEQ ID NO: 1652225 - RNA, 19 nt, Artificial Sequence
  Description of Artificial Sequence: Synthetic oligonucleotide
  Sense strand starting at position 771 of SEQ ID NO: 1561175
augccagggucuuccaaga

SEQ ID NO: 1652226 - RNA, 19 nt, Artificial Sequence
  Description of Artificial Sequence: Synthetic oligonucleotide
  Antisense strand to SEQ ID NO: 1652225
ucuuggaagacccuggcau

SEQ ID NO: 1652227 - RNA, 19 nt, Artificial Sequence
  Description of Artificial Sequence: Synthetic oligonucleotide
  Sense strand starting at position 1155 of SEQ ID NO: 1561175
gacauaaugucgcugcauu

SEQ ID NO: 1652228 - RNA, 19 nt, Artificial Sequence
  Description of Artificial Sequence: Synthetic oligonucleotide
  Antisense strand to SEQ ID NO: 1652227
aaugcagcgacauuauguc

SEQ ID NO: 1652229 - RNA, 19 nt, Artificial Sequence
  Description of Artificial Sequence: Synthetic oligonucleotide
  Sense strand starting at position 1156 of SEQ ID NO: 1561175
acauaaugucgcugcauuu

SEQ ID NO: 1652230 - RNA, 19 nt, Artificial Sequence
  Description of Artificial Sequence: Synthetic oligonucleotide
  Antisense strand to SEQ ID NO: 1652229
aaaugcagcgacauuaugu

SEQ ID NO: 1652231 - RNA, 19 nt, Artificial Sequence
  Description of Artificial Sequence: Synthetic oligonucleotide
  Sense strand starting at position 1206 of SEQ ID NO: 1561175
uagcuugaggcugagaaga

SEQ ID NO: 1652232 - RNA, 19 nt, Artificial Sequence
  Description of Artificial Sequence: Synthetic oligonucleotide
  Antisense strand to SEQ ID NO: 1652231
ucuucucagccucaagcua

SEQ ID NO: 1652233 - RNA, 19 nt, Artificial Sequence
  Description of Artificial Sequence: Synthetic oligonucleotide
  Sense strand starting at position 1542 of SEQ ID NO: 1561175
ugguauugagccugaagaa

SEQ ID NO: 1652234 - RNA, 19 nt, Artificial Sequence
  Description of Artificial Sequence: Synthetic oligonucleotide
  Antisense strand to SEQ ID NO: 1652233
uucuucaggcucaauacca

SEQ ID NO: 1652235 - RNA, 19 nt, Artificial Sequence
  Description of Artificial Sequence: Synthetic oligonucleotide
  Sense strand starting at position 1582 of SEQ ID NO: 1561175
ggucgcagaucuccaagau

SEQ ID NO: 1652236 - RNA, 19 nt, Artificial Sequence
  Description of Artificial Sequence: Synthetic oligonucleotide
  Antisense strand to SEQ ID NO: 1652235
aucuuggagaucugcgacc

SEQ ID NO: 1652237 - RNA, 19 nt, Artificial Sequence
  Description of Artificial Sequence: Synthetic oligonucleotide
  Sense strand starting at position 1583 of SEQ ID NO: 1561175
gucgcagaucuccaagauc

SEQ ID NO: 1652238 - RNA, 19 nt, Artificial Sequence
  Description of Artificial Sequence: Synthetic oligonucleotide
  Antisense strand to SEQ ID NO: 1652237
gaucuuggagaucugcgac

SEQ ID NO: 1652239 - RNA, 19 nt, Artificial Sequence
  Description of Artificial Sequence: Synthetic oligonucleotide
  Sense strand starting at position 1665 of SEQ ID NO: 1561175
gucugaguucccggacacu

SEQ ID NO: 1652240 - RNA, 19 nt, Artificial Sequence
  Description of Artificial Sequence: Synthetic oligonucleotide
  Antisense strand to SEQ ID NO: 1652239
aguguccgggaacucagac

SEQ ID NO: 1652241 - RNA, 19 nt, Artificial Sequence
  Description of Artificial Sequence: Synthetic oligonucleotide
  Sense strand starting at position 1765 of SEQ ID NO: 1561175
gccaccagagcuugaugau

SEQ ID NO: 1652242 - RNA, 19 nt, Artificial Sequence
  Description of Artificial Sequence: Synthetic oligonucleotide
  Antisense strand to SEQ ID NO: 1652241
aucaucaagcucugguggc

SEQ ID NO: 1652243 - RNA, 19 nt, Artificial Sequence
  Description of Artificial Sequence: Synthetic oligonucleotide
  Sense strand starting at position 2420 of SEQ ID NO: 1561175
ccagucuggagucggaaau

SEQ ID NO: 1652244 - RNA, 19 nt, Artificial Sequence
  Description of Artificial Sequence: Synthetic oligonucleotide
  Antisense strand to SEQ ID NO: 1652243
auuuccgacuccagacugg

SEQ ID NO: 1652245 - RNA, 19 nt, Artificial Sequence
  Description of Artificial Sequence: Synthetic oligonucleotide
  Sense strand starting at position 2450 of SEQ ID NO: 1561175
gcaagugacauuggguuga

SEQ ID NO: 1652246 - RNA, 19 nt, Artificial Sequence
  Description of Artificial Sequence: Synthetic oligonucleotide
  Antisense strand to SEQ ID NO: 1652245
ucaacccaaugucacuugc

SEQ ID NO: 1652247 - RNA, 19 nt, Artificial Sequence
  Description of Artificial Sequence: Synthetic oligonucleotide
  Sense strand starting at position 2452 of SEQ ID NO: 1561175
aagugacauuggguugaga

SEQ ID NO: 1652248 - RNA, 19 nt, Artificial Sequence
  Description of Artificial Sequence: Synthetic oligonucleotide
  Antisense strand to SEQ ID NO: 1652247
ucucaacccaaugucacuu

SEQ ID NO: 1652249 - RNA, 19 nt, Artificial Sequence
  Description of Artificial Sequence: Synthetic oligonucleotide
  Sense strand starting at position 2454 of SEQ ID NO: 1561175
gugacauuggguugagauu

SEQ ID NO: 1652250 - RNA, 19 nt, Artificial Sequence
  Description of Artificial Sequence: Synthetic oligonucleotide
  Antisense strand to SEQ ID NO: 1652249
aaucucaacccaaugucac

SEQ ID NO: 1652251 - RNA, 19 nt, Artificial Sequence
  Description of Artificial Sequence: Synthetic oligonucleotide
  Sense strand starting at position 2463 of SEQ ID NO: 1561175
gguugagauugaaggguca

SEQ ID NO: 1652252 - RNA, 19 nt, Artificial Sequence
  Description of Artificial Sequence: Synthetic oligonucleotide
  Antisense strand to SEQ ID NO: 1652251
ugacccuucaaucucaacc

SEQ ID NO: 1652253 - RNA, 19 nt, Artificial Sequence
  Description of Artificial Sequence: Synthetic oligonucleotide
  Sense strand starting at position 2931 of SEQ ID NO: 1561175
gggcacugcacuuaaauga

SEQ ID NO: 1652254 - RNA, 19 nt, Artificial Sequence
  Description of Artificial Sequence: Synthetic oligonucleotide
  Antisense strand to SEQ ID NO: 1652253
ucauuuaagugcagugccc

SEQ ID NO: 1652255 - RNA, 19 nt, Artificial Sequence
  Description of Artificial Sequence: Synthetic oligonucleotide
  Sense strand starting at position 2956 of SEQ ID NO: 1561175
gcaugaacgcugucagccu

SEQ ID NO: 1652256 - RNA, 19 nt, Artificial Sequence
  Description of Artificial Sequence: Synthetic oligonucleotide
  Antisense strand to SEQ ID NO: 1652255
aggcugacagcguucaugc

SEQ ID NO: 1652257 - RNA, 19 nt, Artificial Sequence
  Description of Artificial Sequence: Synthetic oligonucleotide
  Sense strand starting at position 2985 of SEQ ID NO: 1561175
agagcaaacuuccacagau

SEQ ID NO: 1652258 - RNA, 19 nt, Artificial Sequence
  Description of Artificial Sequence: Synthetic oligonucleotide
  Antisense strand to SEQ ID NO: 1652257
aucuguggaaguuugcucu

SEQ ID NO: 1652259 - RNA, 19 nt, Artificial Sequence
  Description of Artificial Sequence: Synthetic oligonucleotide
  Sense strand starting at position 3003 of SEQ ID NO: 1561175
ugggaauuguguuccuacu

SEQ ID NO: 1652260 - RNA, 19 nt, Artificial Sequence
  Description of Artificial Sequence: Synthetic oligonucleotide
  Antisense strand to SEQ ID NO: 1652259
aguaggaacacaauuccca

SEQ ID NO: 1652261 - RNA, 19 nt, Artificial Sequence
  Description of Artificial Sequence: Synthetic oligonucleotide
  Sense strand starting at position 3213 of SEQ ID NO: 1561175
ggaaguucuuauucucuuu

SEQ ID NO: 1652262 - RNA, 19 nt, Artificial Sequence
  Description of Artificial Sequence: Synthetic oligonucleotide
  Antisense strand to SEQ ID NO: 1652261
aaagagaauaagaacuucc

SEQ ID NO: 1652263 - RNA, 19 nt, Artificial Sequence
  Description of Artificial Sequence: Synthetic oligonucleotide
  Sense strand starting at position 3216 of SEQ ID NO: 1561175
aguucuuauucucuuugga

SEQ ID NO: 1652264 - RNA, 19 nt, Artificial Sequence
  Description of Artificial Sequence: Synthetic oligonucleotide
  Antisense strand to SEQ ID NO: 1652263
uccaaagagaauaagaacu

SEQ ID NO: 1652265 - RNA, 19 nt, Artificial Sequence
  Description of Artificial Sequence: Synthetic oligonucleotide
  Sense strand starting at position 3218 of SEQ ID NO: 1561175
uucuuauucucuuuggaga

SEQ ID NO: 1652266 - RNA, 19 nt, Artificial Sequence
  Description of Artificial Sequence: Synthetic oligonucleotide
  Antisense strand to SEQ ID NO: 1652265
ucuccaaagagaauaagaa

SEQ ID NO: 1652267 - RNA, 19 nt, Artificial Sequence
  Description of Artificial Sequence: Synthetic oligonucleotide
  Sense strand starting at position 3219 of SEQ ID NO: 1561175
ucuuauucucuuuggagaa

SEQ ID NO: 1652268 - RNA, 19 nt, Artificial Sequence
  Description of Artificial Sequence: Synthetic oligonucleotide
  Antisense strand to SEQ ID NO: 1652267
uucuccaaagagaauaaga

SEQ ID NO: 1652269 - RNA, 19 nt, Artificial Sequence
  Description of Artificial Sequence: Synthetic oligonucleotide
  Sense strand starting at position 3241 of SEQ ID NO: 1561175
ucaggagagguuugugaag

SEQ ID NO: 1652270 - RNA, 19 nt, Artificial Sequence
  Description of Artificial Sequence: Synthetic oligonucleotide
  Antisense strand to SEQ ID NO: 1652269
cuucacaaaccucuccuga

SEQ ID NO: 1652271 - RNA, 19 nt, Artificial Sequence
  Description of Artificial Sequence: Synthetic oligonucleotide
  Sense strand starting at position 3264 of SEQ ID NO: 1561175
ucaacaaacguguacuaaa

SEQ ID NO: 1652272 - RNA, 19 nt, Artificial Sequence
  Description of Artificial Sequence: Synthetic oligonucleotide
  Antisense strand to SEQ ID NO: 1652271
uuuaguacacguuuguuga

SEQ ID NO: 1652273 - RNA, 19 nt, Artificial Sequence
  Description of Artificial Sequence: Synthetic oligonucleotide
  Sense strand starting at position 3370 of SEQ ID NO: 1561175
ggacuuguguccuuaggug

SEQ ID NO: 1652274 - RNA, 19 nt, Artificial Sequence
  Description of Artificial Sequence: Synthetic oligonucleotide
  Antisense strand to SEQ ID NO: 1652273
caccuaaggacacaagucc

SEQ ID NO: 1652275 - RNA, 19 nt, Artificial Sequence
  Description of Artificial Sequence: Synthetic oligonucleotide
  Sense strand starting at position 3378 of SEQ ID NO: 1561175
guccuuaggugaucgagua

SEQ ID NO: 1652276 - RNA, 19 nt, Artificial Sequence
  Description of Artificial Sequence: Synthetic oligonucleotide
  Antisense strand to SEQ ID NO: 1652275
uacucgaucaccuaaggac

SEQ ID NO: 1652277 - RNA, 19 nt, Artificial Sequence
  Description of Artificial Sequence: Synthetic oligonucleotide
  Sense strand starting at position 3886 of SEQ ID NO: 1561175
agggauuguaaggguggau

SEQ ID NO: 1652278 - RNA, 19 nt, Artificial Sequence
  Description of Artificial Sequence: Synthetic oligonucleotide
  Antisense strand to SEQ ID NO: 1652277
auccacccuuacaaucccu

SEQ ID NO: 1652279 - RNA, 19 nt, Artificial Sequence
  Description of Artificial Sequence: Synthetic oligonucleotide
  Sense strand starting at position 3931 of SEQ ID NO: 1561175
gaguuugugggaugugagu

SEQ ID NO: 1652280 - RNA, 19 nt, Artificial Sequence
  Description of Artificial Sequence: Synthetic oligonucleotide
  Antisense strand to SEQ ID NO: 1652279
acucacaucccacaaacuc

SEQ ID NO: 1652281 - RNA, 19 nt, Artificial Sequence
  Description of Artificial Sequence: Synthetic oligonucleotide
  Sense strand starting at position 3973 of SEQ ID NO: 1561175
uugguaauuaugggacuau

SEQ ID NO: 1652282 - RNA, 19 nt, Artificial Sequence
  Description of Artificial Sequence: Synthetic oligonucleotide
  Antisense strand to SEQ ID NO: 1652281
auagucccauaauuaccaa

SEQ ID NO: 1652283 - RNA, 19 nt, Artificial Sequence
  Description of Artificial Sequence: Synthetic oligonucleotide
  Sense strand starting at position 277 of SEQ ID NO: 1561176
uaaagucucuuggccaagu

SEQ ID NO: 1652284 - RNA, 19 nt, Artificial Sequence
  Description of Artificial Sequence: Synthetic oligonucleotide
  Antisense strand to SEQ ID NO: 1652283
acuuggccaagagacuuua

SEQ ID NO: 1652285 - RNA, 19 nt, Artificial Sequence
  Description of Artificial Sequence: Synthetic oligonucleotide
  Sense strand starting at position 668 of SEQ ID NO: 1561176
uggucaucucugggacgca

SEQ ID NO: 1652286 - RNA, 19 nt, Artificial Sequence
  Description of Artificial Sequence: Synthetic oligonucleotide
  Antisense strand to SEQ ID NO: 1652285
ugcgucccagagaugacca

SEQ ID NO: 1652287 - RNA, 19 nt, Artificial Sequence
  Description of Artificial Sequence: Synthetic oligonucleotide
  Sense strand starting at position 669 of SEQ ID NO: 1561176
ggucaucucugggacgcaa

SEQ ID NO: 1652288 - RNA, 19 nt, Artificial Sequence
  Description of Artificial Sequence: Synthetic oligonucleotide
  Antisense strand to SEQ ID NO: 1652287
uugcgucccagagaugacc

SEQ ID NO: 1652289 - RNA, 19 nt, Artificial Sequence
  Description of Artificial Sequence: Synthetic oligonucleotide
  Sense strand starting at position 730 of SEQ ID NO: 1561176
caugauguguuccuguguu

SEQ ID NO: 1652290 - RNA, 19 nt, Artificial Sequence
  Description of Artificial Sequence: Synthetic oligonucleotide
  Antisense strand to SEQ ID NO: 1652289
aacacaggaacacaucaug

SEQ ID NO: 1652291 - RNA, 19 nt, Artificial Sequence
  Description of Artificial Sequence: Synthetic oligonucleotide
  Sense strand starting at position 753 of SEQ ID NO: 1561176
ucacauaugugauuagaug

SEQ ID NO: 1652292 - RNA, 19 nt, Artificial Sequence
  Description of Artificial Sequence: Synthetic oligonucleotide
  Antisense strand to SEQ ID NO: 1652291
caucuaaucacauauguga

SEQ ID NO: 1652293 - RNA, 19 nt, Artificial Sequence
  Description of Artificial Sequence: Synthetic oligonucleotide
  Sense strand starting at position 761 of SEQ ID NO: 1561176
gugauuagaugcuacauuu

SEQ ID NO: 1652294 - RNA, 19 nt, Artificial Sequence
  Description of Artificial Sequence: Synthetic oligonucleotide
  Antisense strand to SEQ ID NO: 1652293
aaauguagcaucuaaucac

SEQ ID NO: 1652295 - RNA, 19 nt, Artificial Sequence
  Description of Artificial Sequence: Synthetic oligonucleotide
  Sense strand starting at position 925 of SEQ ID NO: 1561176
ccagcugauucuucuaguu

SEQ ID NO: 1652296 - RNA, 19 nt, Artificial Sequence
  Description of Artificial Sequence: Synthetic oligonucleotide
  Antisense strand to SEQ ID NO: 1652295
aacuagaagaaucagcugg

SEQ ID NO: 1652297 - RNA, 19 nt, Artificial Sequence
  Description of Artificial Sequence: Synthetic oligonucleotide
  Sense strand starting at position 1106 of SEQ ID NO: 1561176
ggcaccugucuugagugua

SEQ ID NO: 1652298 - RNA, 19 nt, Artificial Sequence
  Description of Artificial Sequence: Synthetic oligonucleotide
  Antisense strand to SEQ ID NO: 1652297
uacacucaagacaggugcc

SEQ ID NO: 1652299 - RNA, 19 nt, Artificial Sequence
  Description of Artificial Sequence: Synthetic oligonucleotide
  Sense strand starting at position 1109 of SEQ ID NO: 1561176
accugucuugaguguagca

SEQ ID NO: 1652300 - RNA, 19 nt, Artificial Sequence
  Description of Artificial Sequence: Synthetic oligonucleotide
  Antisense strand to SEQ ID NO: 1652299
ugcuacacucaagacaggu

SEQ ID NO: 1652301 - RNA, 19 nt, Artificial Sequence
  Description of Artificial Sequence: Synthetic oligonucleotide
  Sense strand starting at position 1326 of SEQ ID NO: 1561176
agacuuuagccagagucua

SEQ ID NO: 1652302 - RNA, 19 nt, Artificial Sequence
  Description of Artificial Sequence: Synthetic oligonucleotide
  Antisense strand to SEQ ID NO: 1652301
uagacucuggcuaaagucu

SEQ ID NO: 1652303 - RNA, 19 nt, Artificial Sequence
  Description of Artificial Sequence: Synthetic oligonucleotide
  Sense strand starting at position 1361 of SEQ ID NO: 1561176
gcaggucuugagggacaga

SEQ ID NO: 1652304 - RNA, 19 nt, Artificial Sequence
  Description of Artificial Sequence: Synthetic oligonucleotide
  Antisense strand to SEQ ID NO: 1652303
ucugucccucaagaccugc

SEQ ID NO: 1652305 - RNA, 19 nt, Artificial Sequence
  Description of Artificial Sequence: Synthetic oligonucleotide
  Sense strand starting at position 1435 of SEQ ID NO: 1561176
uuugguaagucuccaggga

SEQ ID NO: 1652306 - RNA, 19 nt, Artificial Sequence
  Description of Artificial Sequence: Synthetic oligonucleotide
  Antisense strand to SEQ ID NO: 1652305
ucccuggagacuuaccaaa

SEQ ID NO: 1652307 - RNA, 19 nt, Artificial Sequence
  Description of Artificial Sequence: Synthetic oligonucleotide
  Sense strand starting at position 1485 of SEQ ID NO: 1561176
agguccuguccucacuuau

SEQ ID NO: 1652308 - RNA, 19 nt, Artificial Sequence
  Description of Artificial Sequence: Synthetic oligonucleotide
  Antisense strand to SEQ ID NO: 1652307
auaagugaggacaggaccu

SEQ ID NO: 1652309 - RNA, 19 nt, Artificial Sequence
  Description of Artificial Sequence: Synthetic oligonucleotide
  Sense strand starting at position 1732 of SEQ ID NO: 1561176
aggaguuagccaggugcau

SEQ ID NO: 1652310 - RNA, 19 nt, Artificial Sequence
  Description of Artificial Sequence: Synthetic oligonucleotide
  Antisense strand to SEQ ID NO: 1652309
augcaccuggcuaacuccu

SEQ ID NO: 1652311 - RNA, 19 nt, Artificial Sequence
  Description of Artificial Sequence: Synthetic oligonucleotide
  Sense strand starting at position 1734 of SEQ ID NO: 1561176
gaguuagccaggugcauua

SEQ ID NO: 1652312 - RNA, 19 nt, Artificial Sequence
  Description of Artificial Sequence: Synthetic oligonucleotide
  Antisense strand to SEQ ID NO: 1652311
uaaugcaccuggcuaacuc

SEQ ID NO: 1652313 - RNA, 19 nt, Artificial Sequence
  Description of Artificial Sequence: Synthetic oligonucleotide
  Sense strand starting at position 1745 of SEQ ID NO: 1561176
gugcauuaggcggaauuca

SEQ ID NO: 1652314 - RNA, 19 nt, Artificial Sequence
  Description of Artificial Sequence: Synthetic oligonucleotide
  Antisense strand to SEQ ID NO: 1652313
ugaauuccgccuaaugcac

SEQ ID NO: 1652315 - RNA, 19 nt, Artificial Sequence
  Description of Artificial Sequence: Synthetic oligonucleotide
  Sense strand starting at position 2292 of SEQ ID NO: 1561176
ggcggacuugcagagcuau

SEQ ID NO: 1652316 - RNA, 19 nt, Artificial Sequence
  Description of Artificial Sequence: Synthetic oligonucleotide
  Antisense strand to SEQ ID NO: 1652315
auagcucugcaaguccgcc

SEQ ID NO: 1652317 - RNA, 19 nt, Artificial Sequence
  Description of Artificial Sequence: Synthetic oligonucleotide
  Sense strand starting at position 2300 of SEQ ID NO: 1561176
ugcagagcuauaggcaauu

SEQ ID NO: 1652318 - RNA, 19 nt, Artificial Sequence
  Description of Artificial Sequence: Synthetic oligonucleotide
  Antisense strand to SEQ ID NO: 1652317
aauugccuauagcucugca

SEQ ID NO: 1652319 - RNA, 19 nt, Artificial Sequence
  Description of Artificial Sequence: Synthetic oligonucleotide
  Sense strand starting at position 2446 of SEQ ID NO: 1561176
ggcuuauggcuggagguga

SEQ ID NO: 1652320 - RNA, 19 nt, Artificial Sequence
  Description of Artificial Sequence: Synthetic oligonucleotide
  Antisense strand to SEQ ID NO: 1652319
ucaccuccagccauaagcc

SEQ ID NO: 1652321 - RNA, 19 nt, Artificial Sequence
  Description of Artificial Sequence: Synthetic oligonucleotide
  Sense strand starting at position 2510 of SEQ ID NO: 1561176
uucuuagauacgggcuaau

SEQ ID NO: 1652322 - RNA, 19 nt, Artificial Sequence
  Description of Artificial Sequence: Synthetic oligonucleotide
  Antisense strand to SEQ ID NO: 1652321
auuagcccguaucuaagaa

SEQ ID NO: 1652323 - RNA, 19 nt, Artificial Sequence
  Description of Artificial Sequence: Synthetic oligonucleotide
  Sense strand starting at position 2630 of SEQ ID NO: 1561176
cuaugcauuuaucaccgaa

SEQ ID NO: 1652324 - RNA, 19 nt, Artificial Sequence
  Description of Artificial Sequence: Synthetic oligonucleotide
  Antisense strand to SEQ ID NO: 1652323
uucggugauaaaugcauag

SEQ ID NO: 1652325 - RNA, 19 nt, Artificial Sequence
  Description of Artificial Sequence: Synthetic oligonucleotide
  Sense strand starting at position 2726 of SEQ ID NO: 1561176
uacaguauugccggaugca

SEQ ID NO: 1652326 - RNA, 19 nt, Artificial Sequence
  Description of Artificial Sequence: Synthetic oligonucleotide
  Antisense strand to SEQ ID NO: 1652325
ugcauccggcaauacugua

SEQ ID NO: 1652327 - RNA, 19 nt, Artificial Sequence
  Description of Artificial Sequence: Synthetic oligonucleotide
  Sense strand starting at position 2727 of SEQ ID NO: 1561176
acaguauugccggaugcaa

SEQ ID NO: 1652328 - RNA, 19 nt, Artificial Sequence
  Description of Artificial Sequence: Synthetic oligonucleotide
  Antisense strand to SEQ ID NO: 1652327
uugcauccggcaauacugu

SEQ ID NO: 1652329 - RNA, 19 nt, Artificial Sequence
  Description of Artificial Sequence: Synthetic oligonucleotide
  Sense strand starting at position 2755 of SEQ ID NO: 1561176
gggagagagugguggguau

SEQ ID NO: 1652330 - RNA, 19 nt, Artificial Sequence
  Description of Artificial Sequence: Synthetic oligonucleotide
  Antisense strand to SEQ ID NO: 1652329
auacccaccacucucuccc

SEQ ID NO: 1652331 - RNA, 19 nt, Artificial Sequence
  Description of Artificial Sequence: Synthetic oligonucleotide
  Sense strand starting at position 2756 of SEQ ID NO: 1561176
ggagagagugguggguauu

SEQ ID NO: 1652332 - RNA, 19 nt, Artificial Sequence
  Description of Artificial Sequence: Synthetic oligonucleotide
  Antisense strand to SEQ ID NO: 1652331
aauacccaccacucucucc

SEQ ID NO: 1652333 - RNA, 19 nt, Artificial Sequence
  Description of Artificial Sequence: Synthetic oligonucleotide
  Sense strand starting at position 2759 of SEQ ID NO: 1561176
gagagugguggguauucca

SEQ ID NO: 1652334 - RNA, 19 nt, Artificial Sequence
  Description of Artificial Sequence: Synthetic oligonucleotide
  Antisense strand to SEQ ID NO: 1652333
uggaauacccaccacucuc

SEQ ID NO: 1652335 - RNA, 19 nt, Artificial Sequence
  Description of Artificial Sequence: Synthetic oligonucleotide
  Sense strand starting at position 3127 of SEQ ID NO: 1561176
agccaagugugguggucau

SEQ ID NO: 1652336 - RNA, 19 nt, Artificial Sequence
  Description of Artificial Sequence: Synthetic oligonucleotide
  Antisense strand to SEQ ID NO: 1652335
augaccaccacacuuggcu

SEQ ID NO: 1652337 - RNA, 19 nt, Artificial Sequence
  Description of Artificial Sequence: Synthetic oligonucleotide
  Sense strand starting at position 3202 of SEQ ID NO: 1561176
gagguugagucuggaguga

SEQ ID NO: 1652338 - RNA, 19 nt, Artificial Sequence
  Description of Artificial Sequence: Synthetic oligonucleotide
  Antisense strand to SEQ ID NO: 1652337
ucacuccagacucaaccuc

SEQ ID NO: 1652339 - RNA, 19 nt, Artificial Sequence
  Description of Artificial Sequence: Synthetic oligonucleotide
  Sense strand starting at position 3206 of SEQ ID NO: 1561176
uugagucuggagugagcua

SEQ ID NO: 1652340 - RNA, 19 nt, Artificial Sequence
  Description of Artificial Sequence: Synthetic oligonucleotide
  Antisense strand to SEQ ID NO: 1652339
uagcucacuccagacucaa

SEQ ID NO: 1652341 - RNA, 19 nt, Artificial Sequence
  Description of Artificial Sequence: Synthetic oligonucleotide
  Sense strand starting at position 3211 of SEQ ID NO: 1561176
ucuggagugagcuaugauc

SEQ ID NO: 1652342 - RNA, 19 nt, Artificial Sequence
  Description of Artificial Sequence: Synthetic oligonucleotide
  Antisense strand to SEQ ID NO: 1652341
gaucauagcucacuccaga

SEQ ID NO: 1652343 - RNA, 19 nt, Artificial Sequence
  Description of Artificial Sequence: Synthetic oligonucleotide
  Sense strand starting at position 3332 of SEQ ID NO: 1561176
agcugcaguucuggaguga

SEQ ID NO: 1652344 - RNA, 19 nt, Artificial Sequence
  Description of Artificial Sequence: Synthetic oligonucleotide
  Antisense strand to SEQ ID NO: 1652343
ucacuccagaacugcagcu

SEQ ID NO: 1652345 - RNA, 19 nt, Artificial Sequence
  Description of Artificial Sequence: Synthetic oligonucleotide
  Sense strand starting at position 3604 of SEQ ID NO: 1561176
ccgggucacaccuguaauc

SEQ ID NO: 1652346 - RNA, 19 nt, Artificial Sequence
  Description of Artificial Sequence: Synthetic oligonucleotide
  Antisense strand to SEQ ID NO: 1652345
gauuacaggugugacccgg

SEQ ID NO: 1652347 - RNA, 19 nt, Artificial Sequence
  Description of Artificial Sequence: Synthetic oligonucleotide
  Sense strand starting at position 43 of SEQ ID NO: 1561177
guuucuuccuucuggaaac

SEQ ID NO: 1652348 - RNA, 19 nt, Artificial Sequence
  Description of Artificial Sequence: Synthetic oligonucleotide
  Antisense strand to SEQ ID NO: 1652347
guuuccagaaggaagaaac

SEQ ID NO: 1652349 - RNA, 19 nt, Artificial Sequence
  Description of Artificial Sequence: Synthetic oligonucleotide
  Sense strand starting at position 593 of SEQ ID NO: 1561177
caucauuuguuauguguuu

SEQ ID NO: 1652350 - RNA, 19 nt, Artificial Sequence
  Description of Artificial Sequence: Synthetic oligonucleotide
  Antisense strand to SEQ ID NO: 1652349
aaacacauaacaaaugaug

SEQ ID NO: 1652351 - RNA, 19 nt, Artificial Sequence
  Description of Artificial Sequence: Synthetic oligonucleotide
  Sense strand starting at position 606 of SEQ ID NO: 1561177
guguuugacucagucuguu

SEQ ID NO: 1652352 - RNA, 19 nt, Artificial Sequence
  Description of Artificial Sequence: Synthetic oligonucleotide
  Antisense strand to SEQ ID NO: 1652351
aacagacugagucaaacac

SEQ ID NO: 1652353 - RNA, 19 nt, Artificial Sequence
  Description of Artificial Sequence: Synthetic oligonucleotide
  Sense strand starting at position 685 of SEQ ID NO: 1561177
ucgagugcucaguucugua

SEQ ID NO: 1652354 - RNA, 19 nt, Artificial Sequence
  Description of Artificial Sequence: Synthetic oligonucleotide
  Antisense strand to SEQ ID NO: 1652353
uacagaacugagcacucga

SEQ ID NO: 1652355 - RNA, 19 nt, Artificial Sequence
  Description of Artificial Sequence: Synthetic oligonucleotide
  Sense strand starting at position 689 of SEQ ID NO: 1561177
gugcucaguucuguagacu

SEQ ID NO: 1652356 - RNA, 19 nt, Artificial Sequence
  Description of Artificial Sequence: Synthetic oligonucleotide
  Antisense strand to SEQ ID NO: 1652355
agucuacagaacugagcac

SEQ ID NO: 1652357 - RNA, 19 nt, Artificial Sequence
  Description of Artificial Sequence: Synthetic oligonucleotide
  Sense strand starting at position 690 of SEQ ID NO: 1561177
ugcucaguucuguagacuu

SEQ ID NO: 1652358 - RNA, 19 nt, Artificial Sequence
  Description of Artificial Sequence: Synthetic oligonucleotide
  Antisense strand to SEQ ID NO: 1652357
aagucuacagaacugagca

SEQ ID NO: 1652359 - RNA, 19 nt, Artificial Sequence
  Description of Artificial Sequence: Synthetic oligonucleotide
  Sense strand starting at position 892 of SEQ ID NO: 1561177
gggaguacuguccaguugu

SEQ ID NO: 1652360 - RNA, 19 nt, Artificial Sequence
  Description of Artificial Sequence: Synthetic oligonucleotide
  Antisense strand to SEQ ID NO: 1652359
acaacuggacaguacuccc

SEQ ID NO: 1652361 - RNA, 19 nt, Artificial Sequence
  Description of Artificial Sequence: Synthetic oligonucleotide
  Sense strand starting at position 903 of SEQ ID NO: 1561177
ccaguuguccagggucaca

SEQ ID NO: 1652362 - RNA, 19 nt, Artificial Sequence
  Description of Artificial Sequence: Synthetic oligonucleotide
  Antisense strand to SEQ ID NO: 1652361
ugugacccuggacaacugg

SEQ ID NO: 1652363 - RNA, 19 nt, Artificial Sequence
  Description of Artificial Sequence: Synthetic oligonucleotide
  Sense strand starting at position 1012 of SEQ ID NO: 1561177
acauuauaguacucagaug

SEQ ID NO: 1652364 - RNA, 19 nt, Artificial Sequence
  Description of Artificial Sequence: Synthetic oligonucleotide
  Antisense strand to SEQ ID NO: 1652363
caucugaguacuauaaugu

SEQ ID NO: 1652365 - RNA, 19 nt, Artificial Sequence
  Description of Artificial Sequence: Synthetic oligonucleotide
  Sense strand starting at position 1056 of SEQ ID NO: 1561177
guuuauaauccuuaaccgu

SEQ ID NO: 1652366 - RNA, 19 nt, Artificial Sequence
  Description of Artificial Sequence: Synthetic oligonucleotide
  Antisense strand to SEQ ID NO: 1652365
acgguuaaggauuauaaac

SEQ ID NO: 1652367 - RNA, 19 nt, Artificial Sequence
  Description of Artificial Sequence: Synthetic oligonucleotide
  Sense strand starting at position 1069 of SEQ ID NO: 1561177
aaccguaacuaugagauga

SEQ ID NO: 1652368 - RNA, 19 nt, Artificial Sequence
  Description of Artificial Sequence: Synthetic oligonucleotide
  Antisense strand to SEQ ID NO: 1652367
ucaucucauaguuacgguu

SEQ ID NO: 1652369 - RNA, 19 nt, Artificial Sequence
  Description of Artificial Sequence: Synthetic oligonucleotide
  Sense strand starting at position 1071 of SEQ ID NO: 1561177
ccguaacuaugagaugaga

SEQ ID NO: 1652370 - RNA, 19 nt, Artificial Sequence
  Description of Artificial Sequence: Synthetic oligonucleotide
  Antisense strand to SEQ ID NO: 1652369
ucucaucucauaguuacgg

SEQ ID NO: 1652371 - RNA, 19 nt, Artificial Sequence
  Description of Artificial Sequence: Synthetic oligonucleotide
  Sense strand starting at position 1082 of SEQ ID NO: 1561177
agaugagaucuaggaucgu

SEQ ID NO: 1652372 - RNA, 19 nt, Artificial Sequence
  Description of Artificial Sequence: Synthetic oligonucleotide
  Antisense strand to SEQ ID NO: 1652371
acgauccuagaucucaucu

SEQ ID NO: 1652373 - RNA, 19 nt, Artificial Sequence
  Description of Artificial Sequence: Synthetic oligonucleotide
  Sense strand starting at position 1092 of SEQ ID NO: 1561177
uaggaucgugcccauuaca

SEQ ID NO: 1652374 - RNA, 19 nt, Artificial Sequence
  Description of Artificial Sequence: Synthetic oligonucleotide
  Antisense strand to SEQ ID NO: 1652373
uguaaugggcacgauccua

SEQ ID NO: 1652375 - RNA, 19 nt, Artificial Sequence
  Description of Artificial Sequence: Synthetic oligonucleotide
  Sense strand starting at position 1103 of SEQ ID NO: 1561177
ccauuacacugaugaggga

SEQ ID NO: 1652376 - RNA, 19 nt, Artificial Sequence
  Description of Artificial Sequence: Synthetic oligonucleotide
  Antisense strand to SEQ ID NO: 1652375
ucccucaucaguguaaugg

SEQ ID NO: 1652377 - RNA, 19 nt, Artificial Sequence
  Description of Artificial Sequence: Synthetic oligonucleotide
  Sense strand starting at position 1191 of SEQ ID NO: 1561177
gagccaggcucaugguuaa

SEQ ID NO: 1652378 - RNA, 19 nt, Artificial Sequence
  Description of Artificial Sequence: Synthetic oligonucleotide
  Antisense strand to SEQ ID NO: 1652377
uuaaccaugagccuggcuc

SEQ ID NO: 1652379 - RNA, 19 nt, Artificial Sequence
  Description of Artificial Sequence: Synthetic oligonucleotide
  Sense strand starting at position 1232 of SEQ ID NO: 1561177
ggguugagcuggguuuaga

SEQ ID NO: 1652380 - RNA, 19 nt, Artificial Sequence
  Description of Artificial Sequence: Synthetic oligonucleotide
  Antisense strand to SEQ ID NO: 1652379
ucuaaacccagcucaaccc

SEQ ID NO: 1652381 - RNA, 19 nt, Artificial Sequence
  Description of Artificial Sequence: Synthetic oligonucleotide
  Sense strand starting at position 1298 of SEQ ID NO: 1561177
gggcuaggaucuaggguua

SEQ ID NO: 1652382 - RNA, 19 nt, Artificial Sequence
  Description of Artificial Sequence: Synthetic oligonucleotide
  Antisense strand to SEQ ID NO: 1652381
uaacccuagauccuagccc

SEQ ID NO: 1652383 - RNA, 19 nt, Artificial Sequence
  Description of Artificial Sequence: Synthetic oligonucleotide
  Sense strand starting at position 1484 of SEQ ID NO: 1561177
gggccuuaucugggacaau

SEQ ID NO: 1652384 - RNA, 19 nt, Artificial Sequence
  Description of Artificial Sequence: Synthetic oligonucleotide
  Antisense strand to SEQ ID NO: 1652383
auugucccagauaaggccc

SEQ ID NO: 1652385 - RNA, 19 nt, Artificial Sequence
  Description of Artificial Sequence: Synthetic oligonucleotide
  Sense strand starting at position 1485 of SEQ ID NO: 1561177
ggccuuaucugggacaaua

SEQ ID NO: 1652386 - RNA, 19 nt, Artificial Sequence
  Description of Artificial Sequence: Synthetic oligonucleotide
  Antisense strand to SEQ ID NO: 1652385
uauugucccagauaaggcc

SEQ ID NO: 1652387 - RNA, 19 nt, Artificial Sequence
  Description of Artificial Sequence: Synthetic oligonucleotide
  Sense strand starting at position 2222 of SEQ ID NO: 1561177
aguuucccucacugucaaa

SEQ ID NO: 1652388 - RNA, 19 nt, Artificial Sequence
  Description of Artificial Sequence: Synthetic oligonucleotide
  Antisense strand to SEQ ID NO: 1652387
uuugacagugagggaaacu

SEQ ID NO: 1652389 - RNA, 19 nt, Artificial Sequence
  Description of Artificial Sequence: Synthetic oligonucleotide
  Sense strand starting at position 2258 of SEQ ID NO: 1561177
ucgggaugcuucugcucuu

SEQ ID NO: 1652390 - RNA, 19 nt, Artificial Sequence
  Description of Artificial Sequence: Synthetic oligonucleotide
  Antisense strand to SEQ ID NO: 1652389
aagagcagaagcaucccga

SEQ ID NO: 1652391 - RNA, 19 nt, Artificial Sequence
  Description of Artificial Sequence: Synthetic oligonucleotide
  Sense strand starting at position 2259 of SEQ ID NO: 1561177
cgggaugcuucugcucuua

SEQ ID NO: 1652392 - RNA, 19 nt, Artificial Sequence
  Description of Artificial Sequence: Synthetic oligonucleotide
  Antisense strand to SEQ ID NO: 1652391
uaagagcagaagcaucccg

SEQ ID NO: 1652393 - RNA, 19 nt, Artificial Sequence
  Description of Artificial Sequence: Synthetic oligonucleotide
  Sense strand starting at position 2329 of SEQ ID NO: 1561177
uccacaacuucguucuaag

SEQ ID NO: 1652394 - RNA, 19 nt, Artificial Sequence
  Description of Artificial Sequence: Synthetic oligonucleotide
  Antisense strand to SEQ ID NO: 1652393
cuuagaacgaaguugugga

SEQ ID NO: 1652395 - RNA, 19 nt, Artificial Sequence
  Description of Artificial Sequence: Synthetic oligonucleotide
  Sense strand starting at position 2332 of SEQ ID NO: 1561177
acaacuucguucuaaggaa

SEQ ID NO: 1652396 - RNA, 19 nt, Artificial Sequence
  Description of Artificial Sequence: Synthetic oligonucleotide
  Antisense strand to SEQ ID NO: 1652395
uuccuuagaacgaaguugu

SEQ ID NO: 1652397 - RNA, 19 nt, Artificial Sequence
  Description of Artificial Sequence: Synthetic oligonucleotide
  Sense strand starting at position 2477 of SEQ ID NO: 1561177
gccuuucagugggcuuaga

SEQ ID NO: 1652398 - RNA, 19 nt, Artificial Sequence
  Description of Artificial Sequence: Synthetic oligonucleotide
  Antisense strand to SEQ ID NO: 1652397
ucuaagcccacugaaaggc

SEQ ID NO: 1652399 - RNA, 19 nt, Artificial Sequence
  Description of Artificial Sequence: Synthetic oligonucleotide
  Sense strand starting at position 2827 of SEQ ID NO: 1561177
ggucuuuaagugugaggcu

SEQ ID NO: 1652400 - RNA, 19 nt, Artificial Sequence
  Description of Artificial Sequence: Synthetic oligonucleotide
  Antisense strand to SEQ ID NO: 1652399
agccucacacuuaaagacc

SEQ ID NO: 1652401 - RNA, 19 nt, Artificial Sequence
  Description of Artificial Sequence: Synthetic oligonucleotide
  Sense strand starting at position 2828 of SEQ ID NO: 1561177
gucuuuaagugugaggcuu

SEQ ID NO: 1652402 - RNA, 19 nt, Artificial Sequence
  Description of Artificial Sequence: Synthetic oligonucleotide
  Antisense strand to SEQ ID NO: 1652401
aagccucacacuuaaagac

SEQ ID NO: 1652403 - RNA, 19 nt, Artificial Sequence
  Description of Artificial Sequence: Synthetic oligonucleotide
  Sense strand starting at position 2942 of SEQ ID NO: 1561177
guuagaauaucgggaugga

SEQ ID NO: 1652404 - RNA, 19 nt, Artificial Sequence
  Description of Artificial Sequence: Synthetic oligonucleotide
  Antisense strand to SEQ ID NO: 1652403
uccaucccgauauucuaac

SEQ ID NO: 1652405 - RNA, 19 nt, Artificial Sequence
  Description of Artificial Sequence: Synthetic oligonucleotide
  Sense strand starting at position 2958 of SEQ ID NO: 1561177
ggagccaguuuggugaaga

SEQ ID NO: 1652406 - RNA, 19 nt, Artificial Sequence
  Description of Artificial Sequence: Synthetic oligonucleotide
  Antisense strand to SEQ ID NO: 1652405
ucuucaccaaacuggcucc

SEQ ID NO: 1652407 - RNA, 19 nt, Artificial Sequence
  Description of Artificial Sequence: Synthetic oligonucleotide
  Sense strand starting at position 2959 of SEQ ID NO: 1561177
gagccaguuuggugaagag

SEQ ID NO: 1652408 - RNA, 19 nt, Artificial Sequence
  Description of Artificial Sequence: Synthetic oligonucleotide
  Antisense strand to SEQ ID NO: 1652407
cucuucaccaaacuggcuc

SEQ ID NO: 1652409 - RNA, 19 nt, Artificial Sequence
  Description of Artificial Sequence: Synthetic oligonucleotide
  Sense strand starting at position 2971 of SEQ ID NO: 1561177
ugaagaguuugggaacggu

SEQ ID NO: 1652410 - RNA, 19 nt, Artificial Sequence
  Description of Artificial Sequence: Synthetic oligonucleotide
  Antisense strand to SEQ ID NO: 1652409
accguucccaaacucuuca

SEQ ID NO: 1652411 - RNA, 19 nt, Artificial Sequence
  Description of Artificial Sequence: Synthetic oligonucleotide
  Sense strand starting at position 3346 of SEQ ID NO: 1561177
ggucacaggucuuccugaa

SEQ ID NO: 1652412 - RNA, 19 nt, Artificial Sequence
  Description of Artificial Sequence: Synthetic oligonucleotide
  Antisense strand to SEQ ID NO: 1652411
uucaggaagaccugugacc

SEQ ID NO: 1652413 - RNA, 19 nt, Artificial Sequence
  Description of Artificial Sequence: Synthetic oligonucleotide
  Sense strand starting at position 3493 of SEQ ID NO: 1561177
gccugcuuucugucuguaa

SEQ ID NO: 1652414 - RNA, 19 nt, Artificial Sequence
  Description of Artificial Sequence: Synthetic oligonucleotide
  Antisense strand to SEQ ID NO: 1652413
uuacagacagaaagcaggc

SEQ ID NO: 1652415 - RNA, 19 nt, Artificial Sequence
  Description of Artificial Sequence: Synthetic oligonucleotide
  Sense strand starting at position 3494 of SEQ ID NO: 1561177
ccugcuuucugucuguaaa

SEQ ID NO: 1652416 - RNA, 19 nt, Artificial Sequence
  Description of Artificial Sequence: Synthetic oligonucleotide
  Antisense strand to SEQ ID NO: 1652415
uuuacagacagaaagcagg

SEQ ID NO: 1652417 - RNA, 19 nt, Artificial Sequence
  Description of Artificial Sequence: Synthetic oligonucleotide
  Sense strand starting at position 3511 of SEQ ID NO: 1561177
aaaugagccuucuuguaag

SEQ ID NO: 1652418 - RNA, 19 nt, Artificial Sequence
  Description of Artificial Sequence: Synthetic oligonucleotide
  Antisense strand to SEQ ID NO: 1652417
cuuacaagaaggcucauuu

SEQ ID NO: 1652419 - RNA, 19 nt, Artificial Sequence
  Description of Artificial Sequence: Synthetic oligonucleotide
  Sense strand starting at position 3632 of SEQ ID NO: 1561177
uggccuugucccguguaca

SEQ ID NO: 1652420 - RNA, 19 nt, Artificial Sequence
  Description of Artificial Sequence: Synthetic oligonucleotide
  Antisense strand to SEQ ID NO: 1652419
uguacacgggacaaggcca

SEQ ID NO: 1652421 - RNA, 19 nt, Artificial Sequence
  Description of Artificial Sequence: Synthetic oligonucleotide
  Sense strand starting at position 3735 of SEQ ID NO: 1561177
ccagguugcugagaacuga

SEQ ID NO: 1652422 - RNA, 19 nt, Artificial Sequence
  Description of Artificial Sequence: Synthetic oligonucleotide
  Antisense strand to SEQ ID NO: 1652421
ucaguucucagcaaccugg

SEQ ID NO: 1652423 - RNA, 19 nt, Artificial Sequence
  Description of Artificial Sequence: Synthetic oligonucleotide
  Sense strand starting at position 212 of SEQ ID NO: 1561178
caaauuaugcagugagaau

SEQ ID NO: 1652424 - RNA, 19 nt, Artificial Sequence
  Description of Artificial Sequence: Synthetic oligonucleotide
  Antisense strand to SEQ ID NO: 1652423
auucucacugcauaauuug

SEQ ID NO: 1652425 - RNA, 19 nt, Artificial Sequence
  Description of Artificial Sequence: Synthetic oligonucleotide
  Sense strand starting at position 804 of SEQ ID NO: 1561178
gcucguucagcacagaaga

SEQ ID NO: 1652426 - RNA, 19 nt, Artificial Sequence
  Description of Artificial Sequence: Synthetic oligonucleotide
  Antisense strand to SEQ ID NO: 1652425
ucuucugugcugaacgagc

SEQ ID NO: 1652427 - RNA, 19 nt, Artificial Sequence
  Description of Artificial Sequence: Synthetic oligonucleotide
  Sense strand starting at position 1652 of SEQ ID NO: 1561178
cccauaauaucaggaagug

SEQ ID NO: 1652428 - RNA, 19 nt, Artificial Sequence
  Description of Artificial Sequence: Synthetic oligonucleotide
  Antisense strand to SEQ ID NO: 1652427
cacuuccugauauuauggg

SEQ ID NO: 1652429 - RNA, 19 nt, Artificial Sequence
  Description of Artificial Sequence: Synthetic oligonucleotide
  Sense strand starting at position 1668 of SEQ ID NO: 1561178
guggaaccuucucucuuua

SEQ ID NO: 1652430 - RNA, 19 nt, Artificial Sequence
  Description of Artificial Sequence: Synthetic oligonucleotide
  Antisense strand to SEQ ID NO: 1652429
uaaagagagaagguuccac

SEQ ID NO: 1652431 - RNA, 19 nt, Artificial Sequence
  Description of Artificial Sequence: Synthetic oligonucleotide
  Sense strand starting at position 1745 of SEQ ID NO: 1561178
gccugaaggucggauggau

SEQ ID NO: 1652432 - RNA, 19 nt, Artificial Sequence
  Description of Artificial Sequence: Synthetic oligonucleotide
  Antisense strand to SEQ ID NO: 1652431
auccauccgaccuucaggc

SEQ ID NO: 1652433 - RNA, 19 nt, Artificial Sequence
  Description of Artificial Sequence: Synthetic oligonucleotide
  Sense strand starting at position 1753 of SEQ ID NO: 1561178
gucggauggaucugagcuu

SEQ ID NO: 1652434 - RNA, 19 nt, Artificial Sequence
  Description of Artificial Sequence: Synthetic oligonucleotide
  Antisense strand to SEQ ID NO: 1652433
aagcucagauccauccgac

SEQ ID NO: 1652435 - RNA, 19 nt, Artificial Sequence
  Description of Artificial Sequence: Synthetic oligonucleotide
  Sense strand starting at position 1764 of SEQ ID NO: 1561178
cugagcuucuccuggcauu

SEQ ID NO: 1652436 - RNA, 19 nt, Artificial Sequence
  Description of Artificial Sequence: Synthetic oligonucleotide
  Antisense strand to SEQ ID NO: 1652435
aaugccaggagaagcucag

SEQ ID NO: 1652437 - RNA, 19 nt, Artificial Sequence
  Description of Artificial Sequence: Synthetic oligonucleotide
  Sense strand starting at position 2010 of SEQ ID NO: 1561178
ugcgaaaggucuccuggga

SEQ ID NO: 1652438 - RNA, 19 nt, Artificial Sequence
  Description of Artificial Sequence: Synthetic oligonucleotide
  Antisense strand to SEQ ID NO: 1652437
ucccaggagaccuuucgca

SEQ ID NO: 1652439 - RNA, 19 nt, Artificial Sequence
  Description of Artificial Sequence: Synthetic oligonucleotide
  Sense strand starting at position 2100 of SEQ ID NO: 1561178
cugggacuugguggacuaa

SEQ ID NO: 1652440 - RNA, 19 nt, Artificial Sequence
  Description of Artificial Sequence: Synthetic oligonucleotide
  Antisense strand to SEQ ID NO: 1652439
uuaguccaccaagucccag

SEQ ID NO: 1652441 - RNA, 19 nt, Artificial Sequence
  Description of Artificial Sequence: Synthetic oligonucleotide
  Sense strand starting at position 2131 of SEQ ID NO: 1561178
guuuaucacccagauaccu

SEQ ID NO: 1652442 - RNA, 19 nt, Artificial Sequence
  Description of Artificial Sequence: Synthetic oligonucleotide
  Antisense strand to SEQ ID NO: 1652441
agguaucugggugauaaac

SEQ ID NO: 1652443 - RNA, 19 nt, Artificial Sequence
  Description of Artificial Sequence: Synthetic oligonucleotide
  Sense strand starting at position 2156 of SEQ ID NO: 1561178
acacgaugccuuugugcaa

SEQ ID NO: 1652444 - RNA, 19 nt, Artificial Sequence
  Description of Artificial Sequence: Synthetic oligonucleotide
  Antisense strand to SEQ ID NO: 1652443
uugcacaaaggcaucgugu

SEQ ID NO: 1652445 - RNA, 19 nt, Artificial Sequence
  Description of Artificial Sequence: Synthetic oligonucleotide
  Sense strand starting at position 2163 of SEQ ID NO: 1561178
gccuuugugcaacacuuua

SEQ ID NO: 1652446 - RNA, 19 nt, Artificial Sequence
  Description of Artificial Sequence: Synthetic oligonucleotide
  Antisense strand to SEQ ID NO: 1652445
uaaaguguugcacaaaggc

SEQ ID NO: 1652447 - RNA, 19 nt, Artificial Sequence
  Description of Artificial Sequence: Synthetic oligonucleotide
  Sense strand starting at position 2171 of SEQ ID NO: 1561178
gcaacacuuuauugggaaa

SEQ ID NO: 1652448 - RNA, 19 nt, Artificial Sequence
  Description of Artificial Sequence: Synthetic oligonucleotide
  Antisense strand to SEQ ID NO: 1652447
uuucccaauaaaguguugc

SEQ ID NO: 1652449 - RNA, 19 nt, Artificial Sequence
  Description of Artificial Sequence: Synthetic oligonucleotide
  Sense strand starting at position 2174 of SEQ ID NO: 1561178
acacuuuauugggaaagau

SEQ ID NO: 1652450 - RNA, 19 nt, Artificial Sequence
  Description of Artificial Sequence: Synthetic oligonucleotide
  Antisense strand to SEQ ID NO: 1652449
aucuuucccaauaaagugu

SEQ ID NO: 1652451 - RNA, 19 nt, Artificial Sequence
  Description of Artificial Sequence: Synthetic oligonucleotide
  Sense strand starting at position 2256 of SEQ ID NO: 1561178
cgagguggcucagauggaa

SEQ ID NO: 1652452 - RNA, 19 nt, Artificial Sequence
  Description of Artificial Sequence: Synthetic oligonucleotide
  Antisense strand to SEQ ID NO: 1652451
uuccaucugagccaccucg

SEQ ID NO: 1652453 - RNA, 19 nt, Artificial Sequence
  Description of Artificial Sequence: Synthetic oligonucleotide
  Sense strand starting at position 2359 of SEQ ID NO: 1561178
ucugcaauauuggugcgau

SEQ ID NO: 1652454 - RNA, 19 nt, Artificial Sequence
  Description of Artificial Sequence: Synthetic oligonucleotide
  Antisense strand to SEQ ID NO: 1652453
aucgcaccaauauugcaga

SEQ ID NO: 1652455 - RNA, 19 nt, Artificial Sequence
  Description of Artificial Sequence: Synthetic oligonucleotide
  Sense strand starting at position 2360 of SEQ ID NO: 1561178
cugcaauauuggugcgaug

SEQ ID NO: 1652456 - RNA, 19 nt, Artificial Sequence
  Description of Artificial Sequence: Synthetic oligonucleotide
  Antisense strand to SEQ ID NO: 1652455
caucgcaccaauauugcag

SEQ ID NO: 1652457 - RNA, 19 nt, Artificial Sequence
  Description of Artificial Sequence: Synthetic oligonucleotide
  Sense strand starting at position 2362 of SEQ ID NO: 1561178
gcaauauuggugcgaugag

SEQ ID NO: 1652458 - RNA, 19 nt, Artificial Sequence
  Description of Artificial Sequence: Synthetic oligonucleotide
  Antisense strand to SEQ ID NO: 1652457
cucaucgcaccaauauugc

SEQ ID NO: 1652459 - RNA, 19 nt, Artificial Sequence
  Description of Artificial Sequence: Synthetic oligonucleotide
  Sense strand starting at position 2522 of SEQ ID NO: 1561178
ugcagugcucucuggauac

SEQ ID NO: 1652460 - RNA, 19 nt, Artificial Sequence
  Description of Artificial Sequence: Synthetic oligonucleotide
  Antisense strand to SEQ ID NO: 1652459
guauccagagagcacugca

SEQ ID NO: 1652461 - RNA, 19 nt, Artificial Sequence
  Description of Artificial Sequence: Synthetic oligonucleotide
  Sense strand starting at position 2562 of SEQ ID NO: 1561178
agugacucuugucuggaca

SEQ ID NO: 1652462 - RNA, 19 nt, Artificial Sequence
  Description of Artificial Sequence: Synthetic oligonucleotide
  Antisense strand to SEQ ID NO: 1652461
uguccagacaagagucacu

SEQ ID NO: 1652463 - RNA, 19 nt, Artificial Sequence
  Description of Artificial Sequence: Synthetic oligonucleotide
  Sense strand starting at position 2563 of SEQ ID NO: 1561178
gugacucuugucuggacaa

SEQ ID NO: 1652464 - RNA, 19 nt, Artificial Sequence
  Description of Artificial Sequence: Synthetic oligonucleotide
  Antisense strand to SEQ ID NO: 1652463
uuguccagacaagagucac

SEQ ID NO: 1652465 - RNA, 19 nt, Artificial Sequence
  Description of Artificial Sequence: Synthetic oligonucleotide
  Sense strand starting at position 2564 of SEQ ID NO: 1561178
ugacucuugucuggacaau

SEQ ID NO: 1652466 - RNA, 19 nt, Artificial Sequence
  Description of Artificial Sequence: Synthetic oligonucleotide
  Antisense strand to SEQ ID NO: 1652465
auuguccagacaagaguca

SEQ ID NO: 1652467 - RNA, 19 nt, Artificial Sequence
  Description of Artificial Sequence: Synthetic oligonucleotide
  Sense strand starting at position 2573 of SEQ ID NO: 1561178
ucuggacaauacuuugauu

SEQ ID NO: 1652468 - RNA, 19 nt, Artificial Sequence
  Description of Artificial Sequence: Synthetic oligonucleotide
  Antisense strand to SEQ ID NO: 1652467
aaucaaaguauuguccaga

SEQ ID NO: 1652469 - RNA, 19 nt, Artificial Sequence
  Description of Artificial Sequence: Synthetic oligonucleotide
  Sense strand starting at position 2749 of SEQ ID NO: 1561178
cacagaauucccgggacca

SEQ ID NO: 1652470 - RNA, 19 nt, Artificial Sequence
  Description of Artificial Sequence: Synthetic oligonucleotide
  Antisense strand to SEQ ID NO: 1652469
uggucccgggaauucugug

SEQ ID NO: 1652471 - RNA, 19 nt, Artificial Sequence
  Description of Artificial Sequence: Synthetic oligonucleotide
  Sense strand starting at position 2750 of SEQ ID NO: 1561178
acagaauucccgggaccag

SEQ ID NO: 1652472 - RNA, 19 nt, Artificial Sequence
  Description of Artificial Sequence: Synthetic oligonucleotide
  Antisense strand to SEQ ID NO: 1652471
cuggucccgggaauucugu

SEQ ID NO: 1652473 - RNA, 19 nt, Artificial Sequence
  Description of Artificial Sequence: Synthetic oligonucleotide
  Sense strand starting at position 3111 of SEQ ID NO: 1561178
ucaggaagcucagguagua

SEQ ID NO: 1652474 - RNA, 19 nt, Artificial Sequence
  Description of Artificial Sequence: Synthetic oligonucleotide
  Antisense strand to SEQ ID NO: 1652473
uacuaccugagcuuccuga

SEQ ID NO: 1652475 - RNA, 19 nt, Artificial Sequence
  Description of Artificial Sequence: Synthetic oligonucleotide
  Sense strand starting at position 58 of SEQ ID NO: 1561179
caaggugguuuggagauuu

SEQ ID NO: 1652476 - RNA, 19 nt, Artificial Sequence
  Description of Artificial Sequence: Synthetic oligonucleotide
  Antisense strand to SEQ ID NO: 1652475
aaaucuccaaaccaccuug

SEQ ID NO: 1652477 - RNA, 19 nt, Artificial Sequence
  Description of Artificial Sequence: Synthetic oligonucleotide
  Sense strand starting at position 72 of SEQ ID NO: 1561179
gauuuacgguaugaguuau

SEQ ID NO: 1652478 - RNA, 19 nt, Artificial Sequence
  Description of Artificial Sequence: Synthetic oligonucleotide
  Antisense strand to SEQ ID NO: 1652477
auaacucauaccguaaauc

SEQ ID NO: 1652479 - RNA, 19 nt, Artificial Sequence
  Description of Artificial Sequence: Synthetic oligonucleotide
  Sense strand starting at position 94 of SEQ ID NO: 1561179
ugauaugaguuccuuaaac

SEQ ID NO: 1652480 - RNA, 19 nt, Artificial Sequence
  Description of Artificial Sequence: Synthetic oligonucleotide
  Antisense strand to SEQ ID NO: 1652479
guuuaaggaacucauauca

SEQ ID NO: 1652481 - RNA, 19 nt, Artificial Sequence
  Description of Artificial Sequence: Synthetic oligonucleotide
  Sense strand starting at position 112 of SEQ ID NO: 1561179
ccuuuacaccaggguuuau

SEQ ID NO: 1652482 - RNA, 19 nt, Artificial Sequence
  Description of Artificial Sequence: Synthetic oligonucleotide
  Antisense strand to SEQ ID NO: 1652481
auaaacccugguguaaagg

SEQ ID NO: 1652483 - RNA, 19 nt, Artificial Sequence
  Description of Artificial Sequence: Synthetic oligonucleotide
  Sense strand starting at position 121 of SEQ ID NO: 1561179
caggguuuauaccuagaaa

SEQ ID NO: 1652484 - RNA, 19 nt, Artificial Sequence
  Description of Artificial Sequence: Synthetic oligonucleotide
  Antisense strand to SEQ ID NO: 1652483
uuucuagguauaaacccug

SEQ ID NO: 1652485 - RNA, 19 nt, Artificial Sequence
  Description of Artificial Sequence: Synthetic oligonucleotide
  Sense strand starting at position 708 of SEQ ID NO: 1561179
gaggcugucaaagaucagu

SEQ ID NO: 1652486 - RNA, 19 nt, Artificial Sequence
  Description of Artificial Sequence: Synthetic oligonucleotide
  Antisense strand to SEQ ID NO: 1652485
acugaucuuugacagccuc

SEQ ID NO: 1652487 - RNA, 19 nt, Artificial Sequence
  Description of Artificial Sequence: Synthetic oligonucleotide
  Sense strand starting at position 755 of SEQ ID NO: 1561179
ugcugaaggaguugucaaa

SEQ ID NO: 1652488 - RNA, 19 nt, Artificial Sequence
  Description of Artificial Sequence: Synthetic oligonucleotide
  Antisense strand to SEQ ID NO: 1652487
uuugacaacuccuucagca

SEQ ID NO: 1652489 - RNA, 19 nt, Artificial Sequence
  Description of Artificial Sequence: Synthetic oligonucleotide
  Sense strand starting at position 1434 of SEQ ID NO: 1561179
agaguccuguccucucaga

SEQ ID NO: 1652490 - RNA, 19 nt, Artificial Sequence
  Description of Artificial Sequence: Synthetic oligonucleotide
  Antisense strand to SEQ ID NO: 1652489
ucugagaggacaggacucu

SEQ ID NO: 1652491 - RNA, 19 nt, Artificial Sequence
  Description of Artificial Sequence: Synthetic oligonucleotide
  Sense strand starting at position 1450 of SEQ ID NO: 1561179
agaggcucccuauacuuau

SEQ ID NO: 1652492 - RNA, 19 nt, Artificial Sequence
  Description of Artificial Sequence: Synthetic oligonucleotide
  Antisense strand to SEQ ID NO: 1652491
auaaguauagggagccucu

SEQ ID NO: 1652493 - RNA, 19 nt, Artificial Sequence
  Description of Artificial Sequence: Synthetic oligonucleotide
  Sense strand starting at position 1980 of SEQ ID NO: 1561179
guauguuguccguaaccag

SEQ ID NO: 1652494 - RNA, 19 nt, Artificial Sequence
  Description of Artificial Sequence: Synthetic oligonucleotide
  Antisense strand to SEQ ID NO: 1652493
cugguuacggacaacauac

SEQ ID NO: 1652495 - RNA, 19 nt, Artificial Sequence
  Description of Artificial Sequence: Synthetic oligonucleotide
  Sense strand starting at position 2052 of SEQ ID NO: 1561179
gccugaugugcccagaaac

SEQ ID NO: 1652496 - RNA, 19 nt, Artificial Sequence
  Description of Artificial Sequence: Synthetic oligonucleotide
  Antisense strand to SEQ ID NO: 1652495
guuucugggcacaucaggc

SEQ ID NO: 1652497 - RNA, 19 nt, Artificial Sequence
  Description of Artificial Sequence: Synthetic oligonucleotide
  Sense strand starting at position 2070 of SEQ ID NO: 1561179
cacucaaccgucugggaau

SEQ ID NO: 1652498 - RNA, 19 nt, Artificial Sequence
  Description of Artificial Sequence: Synthetic oligonucleotide
  Antisense strand to SEQ ID NO: 1652497
auucccagacgguugagug

SEQ ID NO: 1652499 - RNA, 19 nt, Artificial Sequence
  Description of Artificial Sequence: Synthetic oligonucleotide
  Sense strand starting at position 2072 of SEQ ID NO: 1561179
cucaaccgucugggaauau

SEQ ID NO: 1652500 - RNA, 19 nt, Artificial Sequence
  Description of Artificial Sequence: Synthetic oligonucleotide
  Antisense strand to SEQ ID NO: 1652499
auauucccagacgguugag

SEQ ID NO: 1652501 - RNA, 19 nt, Artificial Sequence
  Description of Artificial Sequence: Synthetic oligonucleotide
  Sense strand starting at position 2439 of SEQ ID NO: 1561179
gaggcaucagcguaucagu

SEQ ID NO: 1652502 - RNA, 19 nt, Artificial Sequence
  Description of Artificial Sequence: Synthetic oligonucleotide
  Antisense strand to SEQ ID NO: 1652501
acugauacgcugaugccuc

SEQ ID NO: 1652503 - RNA, 19 nt, Artificial Sequence
  Description of Artificial Sequence: Synthetic oligonucleotide
  Sense strand starting at position 2441 of SEQ ID NO: 1561179
ggcaucagcguaucaguuu

SEQ ID NO: 1652504 - RNA, 19 nt, Artificial Sequence
  Description of Artificial Sequence: Synthetic oligonucleotide
  Antisense strand to SEQ ID NO: 1652503
aaacugauacgcugaugcc

SEQ ID NO: 1652505 - RNA, 19 nt, Artificial Sequence
  Description of Artificial Sequence: Synthetic oligonucleotide
  Sense strand starting at position 2461 of SEQ ID NO: 1561179
cucguaagucgggagugau

SEQ ID NO: 1652506 - RNA, 19 nt, Artificial Sequence
  Description of Artificial Sequence: Synthetic oligonucleotide
  Antisense strand to SEQ ID NO: 1652505
aucacucccgacuuacgag

SEQ ID NO: 1652507 - RNA, 19 nt, Artificial Sequence
  Description of Artificial Sequence: Synthetic oligonucleotide
  Sense strand starting at position 2462 of SEQ ID NO: 1561179
ucguaagucgggagugaug

SEQ ID NO: 1652508 - RNA, 19 nt, Artificial Sequence
  Description of Artificial Sequence: Synthetic oligonucleotide
  Antisense strand to SEQ ID NO: 1652507
caucacucccgacuuacga

SEQ ID NO: 1652509 - RNA, 19 nt, Artificial Sequence
  Description of Artificial Sequence: Synthetic oligonucleotide
  Sense strand starting at position 2464 of SEQ ID NO: 1561179
guaagucgggagugaugga

SEQ ID NO: 1652510 - RNA, 19 nt, Artificial Sequence
  Description of Artificial Sequence: Synthetic oligonucleotide
  Antisense strand to SEQ ID NO: 1652509
uccaucacucccgacuuac

SEQ ID NO: 1652511 - RNA, 19 nt, Artificial Sequence
  Description of Artificial Sequence: Synthetic oligonucleotide
  Sense strand starting at position 2493 of SEQ ID NO: 1561179
uguagugcggcugugagaa

SEQ ID NO: 1652512 - RNA, 19 nt, Artificial Sequence
  Description of Artificial Sequence: Synthetic oligonucleotide
  Antisense strand to SEQ ID NO: 1652511
uucucacagccgcacuaca

SEQ ID NO: 1652513 - RNA, 19 nt, Artificial Sequence
  Description of Artificial Sequence: Synthetic oligonucleotide
  Sense strand starting at position 2506 of SEQ ID NO: 1561179
ugagaauugagaugaggcu

SEQ ID NO: 1652514 - RNA, 19 nt, Artificial Sequence
  Description of Artificial Sequence: Synthetic oligonucleotide
  Antisense strand to SEQ ID NO: 1652513
agccucaucucaauucuca

SEQ ID NO: 1652515 - RNA, 19 nt, Artificial Sequence
  Description of Artificial Sequence: Synthetic oligonucleotide
  Sense strand starting at position 2513 of SEQ ID NO: 1561179
ugagaugaggcuugguuca

SEQ ID NO: 1652516 - RNA, 19 nt, Artificial Sequence
  Description of Artificial Sequence: Synthetic oligonucleotide
  Antisense strand to SEQ ID NO: 1652515
ugaaccaagccucaucuca

SEQ ID NO: 1652517 - RNA, 19 nt, Artificial Sequence
  Description of Artificial Sequence: Synthetic oligonucleotide
  Sense strand starting at position 2515 of SEQ ID NO: 1561179
agaugaggcuugguucaua

SEQ ID NO: 1652518 - RNA, 19 nt, Artificial Sequence
  Description of Artificial Sequence: Synthetic oligonucleotide
  Antisense strand to SEQ ID NO: 1652517
uaugaaccaagccucaucu

SEQ ID NO: 1652519 - RNA, 19 nt, Artificial Sequence
  Description of Artificial Sequence: Synthetic oligonucleotide
  Sense strand starting at position 2790 of SEQ ID NO: 1561179
ggauaauaggccuacgcua

SEQ ID NO: 1652520 - RNA, 19 nt, Artificial Sequence
  Description of Artificial Sequence: Synthetic oligonucleotide
  Antisense strand to SEQ ID NO: 1652519
uagcguaggccuauuaucc

SEQ ID NO: 1652521 - RNA, 19 nt, Artificial Sequence
  Description of Artificial Sequence: Synthetic oligonucleotide
  Sense strand starting at position 2809 of SEQ ID NO: 1561179
cugggcugucuuuaggaua

SEQ ID NO: 1652522 - RNA, 19 nt, Artificial Sequence
  Description of Artificial Sequence: Synthetic oligonucleotide
  Antisense strand to SEQ ID NO: 1652521
uauccuaaagacagcccag

SEQ ID NO: 1652523 - RNA, 19 nt, Artificial Sequence
  Description of Artificial Sequence: Synthetic oligonucleotide
  Sense strand starting at position 2814 of SEQ ID NO: 1561179
cugucuuuaggauacguga

SEQ ID NO: 1652524 - RNA, 19 nt, Artificial Sequence
  Description of Artificial Sequence: Synthetic oligonucleotide
  Antisense strand to SEQ ID NO: 1652523
ucacguauccuaaagacag

SEQ ID NO: 1652525 - RNA, 19 nt, Artificial Sequence
  Description of Artificial Sequence: Synthetic oligonucleotide
  Sense strand starting at position 2816 of SEQ ID NO: 1561179
gucuuuaggauacgugaaa

SEQ ID NO: 1652526 - RNA, 19 nt, Artificial Sequence
  Description of Artificial Sequence: Synthetic oligonucleotide
  Antisense strand to SEQ ID NO: 1652525
uuucacguauccuaaagac

SEQ ID NO: 1652527 - RNA, 19 nt, Artificial Sequence
  Description of Artificial Sequence: Synthetic oligonucleotide
  Sense strand starting at position 2817 of SEQ ID NO: 1561179
ucuuuaggauacgugaaau

SEQ ID NO: 1652528 - RNA, 19 nt, Artificial Sequence
  Description of Artificial Sequence: Synthetic oligonucleotide
  Antisense strand to SEQ ID NO: 1652527
auuucacguauccuaaaga

SEQ ID NO: 1652529 - RNA, 19 nt, Artificial Sequence
  Description of Artificial Sequence: Synthetic oligonucleotide
  Sense strand starting at position 2827 of SEQ ID NO: 1561179
acgugaaaugcuuguugag

SEQ ID NO: 1652530 - RNA, 19 nt, Artificial Sequence
  Description of Artificial Sequence: Synthetic oligonucleotide
  Antisense strand to SEQ ID NO: 1652529
cucaacaagcauuucacgu

SEQ ID NO: 1652531 - RNA, 19 nt, Artificial Sequence
  Description of Artificial Sequence: Synthetic oligonucleotide
  Sense strand starting at position 2829 of SEQ ID NO: 1561179
gugaaaugcuuguugagug

SEQ ID NO: 1652532 - RNA, 19 nt, Artificial Sequence
  Description of Artificial Sequence: Synthetic oligonucleotide
  Antisense strand to SEQ ID NO: 1652531
cacucaacaagcauuucac

SEQ ID NO: 1652533 - RNA, 19 nt, Artificial Sequence
  Description of Artificial Sequence: Synthetic oligonucleotide
  Sense strand starting at position 2843 of SEQ ID NO: 1561179
gagugcuugcuuccgcagu

SEQ ID NO: 1652534 - RNA, 19 nt, Artificial Sequence
  Description of Artificial Sequence: Synthetic oligonucleotide
  Antisense strand to SEQ ID NO: 1652533
acugcggaagcaagcacuc

SEQ ID NO: 1652535 - RNA, 19 nt, Artificial Sequence
  Description of Artificial Sequence: Synthetic oligonucleotide
  Sense strand starting at position 2874 of SEQ ID NO: 1561179
acaggcccucaguaaauaa

SEQ ID NO: 1652536 - RNA, 19 nt, Artificial Sequence
  Description of Artificial Sequence: Synthetic oligonucleotide
  Antisense strand to SEQ ID NO: 1652535
uuauuuacugagggccugu

SEQ ID NO: 1652537 - RNA, 19 nt, Artificial Sequence
  Description of Artificial Sequence: Synthetic oligonucleotide
  Sense strand starting at position 2899 of SEQ ID NO: 1561179
guuauuugguucccgucua

SEQ ID NO: 1652538 - RNA, 19 nt, Artificial Sequence
  Description of Artificial Sequence: Synthetic oligonucleotide
  Antisense strand to SEQ ID NO: 1652537
uagacgggaaccaaauaac

SEQ ID NO: 1652539 - RNA, 19 nt, Artificial Sequence
  Description of Artificial Sequence: Synthetic oligonucleotide
  Sense strand starting at position 2904 of SEQ ID NO: 1561179
uugguucccgucuaaacau

SEQ ID NO: 1652540 - RNA, 19 nt, Artificial Sequence
  Description of Artificial Sequence: Synthetic oligonucleotide
  Antisense strand to SEQ ID NO: 1652539
auguuuagacgggaaccaa

SEQ ID NO: 1652541 - RNA, 19 nt, Artificial Sequence
  Description of Artificial Sequence: Synthetic oligonucleotide
  Sense strand starting at position 2933 of SEQ ID NO: 1561179
cagggagauguuuagucuu

SEQ ID NO: 1652542 - RNA, 19 nt, Artificial Sequence
  Description of Artificial Sequence: Synthetic oligonucleotide
  Antisense strand to SEQ ID NO: 1652541
aagacuaaacaucucccug

SEQ ID NO: 1652543 - RNA, 19 nt, Artificial Sequence
  Description of Artificial Sequence: Synthetic oligonucleotide
  Sense strand starting at position 2935 of SEQ ID NO: 1561179
gggagauguuuagucuuca

SEQ ID NO: 1652544 - RNA, 19 nt, Artificial Sequence
  Description of Artificial Sequence: Synthetic oligonucleotide
  Antisense strand to SEQ ID NO: 1652543
ugaagacuaaacaucuccc

SEQ ID NO: 1652545 - RNA, 19 nt, Artificial Sequence
  Description of Artificial Sequence: Synthetic oligonucleotide
  Sense strand starting at position 3047 of SEQ ID NO: 1561179
ggaaguagcucuuuguaau

SEQ ID NO: 1652546 - RNA, 19 nt, Artificial Sequence
  Description of Artificial Sequence: Synthetic oligonucleotide
  Antisense strand to SEQ ID NO: 1652545
auuacaaagagcuacuucc

SEQ ID NO: 1652547 - RNA, 19 nt, Artificial Sequence
  Description of Artificial Sequence: Synthetic oligonucleotide
  Sense strand starting at position 3048 of SEQ ID NO: 1561179
gaaguagcucuuuguaaua

SEQ ID NO: 1652548 - RNA, 19 nt, Artificial Sequence
  Description of Artificial Sequence: Synthetic oligonucleotide
  Antisense strand to SEQ ID NO: 1652547
uauuacaaagagcuacuuc

SEQ ID NO: 1652549 - RNA, 19 nt, Artificial Sequence
  Description of Artificial Sequence: Synthetic oligonucleotide
  Sense strand starting at position 3058 of SEQ ID NO: 1561179
uuuguaauaucaguuuggu

SEQ ID NO: 1652550 - RNA, 19 nt, Artificial Sequence
  Description of Artificial Sequence: Synthetic oligonucleotide
  Antisense strand to SEQ ID NO: 1652549
accaaacugauauuacaaa

SEQ ID NO: 1652551 - RNA, 19 nt, Artificial Sequence
  Description of Artificial Sequence: Synthetic oligonucleotide
  Sense strand starting at position 3061 of SEQ ID NO: 1561179
guaauaucaguuugguauu

SEQ ID NO: 1652552 - RNA, 19 nt, Artificial Sequence
  Description of Artificial Sequence: Synthetic oligonucleotide
  Antisense strand to SEQ ID NO: 1652551
aauaccaaacugauauuac

SEQ ID NO: 1652553 - RNA, 19 nt, Artificial Sequence
  Description of Artificial Sequence: Synthetic oligonucleotide
  Sense strand starting at position 3109 of SEQ ID NO: 1561179
acacucacugcuuggacaa

SEQ ID NO: 1652554 - RNA, 19 nt, Artificial Sequence
  Description of Artificial Sequence: Synthetic oligonucleotide
  Antisense strand to SEQ ID NO: 1652553
uuguccaagcagugagugu

SEQ ID NO: 1652555 - RNA, 19 nt, Artificial Sequence
  Description of Artificial Sequence: Synthetic oligonucleotide
  Sense strand starting at position 4 of SEQ ID NO: 1561180
ggagggcuacggugagaau

SEQ ID NO: 1652556 - RNA, 19 nt, Artificial Sequence
  Description of Artificial Sequence: Synthetic oligonucleotide
  Antisense strand to SEQ ID NO: 1652555
auucucaccguagcccucc

SEQ ID NO: 1652557 - RNA, 19 nt, Artificial Sequence
  Description of Artificial Sequence: Synthetic oligonucleotide
  Sense strand starting at position 5 of SEQ ID NO: 1561180
gagggcuacggugagaauu

SEQ ID NO: 1652558 - RNA, 19 nt, Artificial Sequence
  Description of Artificial Sequence: Synthetic oligonucleotide
  Antisense strand to SEQ ID NO: 1652557
aauucucaccguagcccuc

SEQ ID NO: 1652559 - RNA, 19 nt, Artificial Sequence
  Description of Artificial Sequence: Synthetic oligonucleotide
  Sense strand starting at position 13 of SEQ ID NO: 1561180
cggugagaauuugaugaga

SEQ ID NO: 1652560 - RNA, 19 nt, Artificial Sequence
  Description of Artificial Sequence: Synthetic oligonucleotide
  Antisense strand to SEQ ID NO: 1652559
ucucaucaaauucucaccg

SEQ ID NO: 1652561 - RNA, 19 nt, Artificial Sequence
  Description of Artificial Sequence: Synthetic oligonucleotide
  Sense strand starting at position 15 of SEQ ID NO: 1561180
gugagaauuugaugagauu

SEQ ID NO: 1652562 - RNA, 19 nt, Artificial Sequence
  Description of Artificial Sequence: Synthetic oligonucleotide
  Antisense strand to SEQ ID NO: 1652561
aaucucaucaaauucucac

SEQ ID NO: 1652563 - RNA, 19 nt, Artificial Sequence
  Description of Artificial Sequence: Synthetic oligonucleotide
  Sense strand starting at position 47 of SEQ ID NO: 1561180
auacacauguguuuacaua

SEQ ID NO: 1652564 - RNA, 19 nt, Artificial Sequence
  Description of Artificial Sequence: Synthetic oligonucleotide
  Antisense strand to SEQ ID NO: 1652563
uauguaaacacauguguau

SEQ ID NO: 1652565 - RNA, 19 nt, Artificial Sequence
  Description of Artificial Sequence: Synthetic oligonucleotide
  Sense strand starting at position 91 of SEQ ID NO: 1561180
guguguauauuuguguacu

SEQ ID NO: 1652566 - RNA, 19 nt, Artificial Sequence
  Description of Artificial Sequence: Synthetic oligonucleotide
  Antisense strand to SEQ ID NO: 1652565
aguacacaaauauacacac

SEQ ID NO: 1652567 - RNA, 19 nt, Artificial Sequence
  Description of Artificial Sequence: Synthetic oligonucleotide
  Sense strand starting at position 93 of SEQ ID NO: 1561180
guguauauuuguguacuuu

SEQ ID NO: 1652568 - RNA, 19 nt, Artificial Sequence
  Description of Artificial Sequence: Synthetic oligonucleotide
  Antisense strand to SEQ ID NO: 1652567
aaaguacacaaauauacac

SEQ ID NO: 1652569 - RNA, 19 nt, Artificial Sequence
  Description of Artificial Sequence: Synthetic oligonucleotide
  Sense strand starting at position 148 of SEQ ID NO: 1561180
ugugcauuuguauguguau

SEQ ID NO: 1652570 - RNA, 19 nt, Artificial Sequence
  Description of Artificial Sequence: Synthetic oligonucleotide
  Antisense strand to SEQ ID NO: 1652569
auacacauacaaaugcaca

SEQ ID NO: 1652571 - RNA, 19 nt, Artificial Sequence
  Description of Artificial Sequence: Synthetic oligonucleotide
  Sense strand starting at position 149 of SEQ ID NO: 1561180
gugcauuuguauguguaua

SEQ ID NO: 1652572 - RNA, 19 nt, Artificial Sequence
  Description of Artificial Sequence: Synthetic oligonucleotide
  Antisense strand to SEQ ID NO: 1652571
uauacacauacaaaugcac

SEQ ID NO: 1652573 - RNA, 19 nt, Artificial Sequence
  Description of Artificial Sequence: Synthetic oligonucleotide
  Sense strand starting at position 151 of SEQ ID NO: 1561180
gcauuuguauguguauauu

SEQ ID NO: 1652574 - RNA, 19 nt, Artificial Sequence
  Description of Artificial Sequence: Synthetic oligonucleotide
  Antisense strand to SEQ ID NO: 1652573
aauauacacauacaaaugc

SEQ ID NO: 1652575 - RNA, 19 nt, Artificial Sequence
  Description of Artificial Sequence: Synthetic oligonucleotide
  Sense strand starting at position 169 of SEQ ID NO: 1561180
uuguguauuuguguacaca

SEQ ID NO: 1652576 - RNA, 19 nt, Artificial Sequence
  Description of Artificial Sequence: Synthetic oligonucleotide
  Antisense strand to SEQ ID NO: 1652575
uguguacacaaauacacaa

SEQ ID NO: 1652577 - RNA, 19 nt, Artificial Sequence
  Description of Artificial Sequence: Synthetic oligonucleotide
  Sense strand starting at position 181 of SEQ ID NO: 1561180
guacacauauuuguguauu

SEQ ID NO: 1652578 - RNA, 19 nt, Artificial Sequence
  Description of Artificial Sequence: Synthetic oligonucleotide
  Antisense strand to SEQ ID NO: 1652577
aauacacaaauauguguac

SEQ ID NO: 1652579 - RNA, 19 nt, Artificial Sequence
  Description of Artificial Sequence: Synthetic oligonucleotide
  Sense strand starting at position 204 of SEQ ID NO: 1561180
uguguacuuguaugcauau

SEQ ID NO: 1652580 - RNA, 19 nt, Artificial Sequence
  Description of Artificial Sequence: Synthetic oligonucleotide
  Antisense strand to SEQ ID NO: 1652579
auaugcauacaaguacaca

SEQ ID NO: 1652581 - RNA, 19 nt, Artificial Sequence
  Description of Artificial Sequence: Synthetic oligonucleotide
  Sense strand starting at position 205 of SEQ ID NO: 1561180
guguacuuguaugcauaua

SEQ ID NO: 1652582 - RNA, 19 nt, Artificial Sequence
  Description of Artificial Sequence: Synthetic oligonucleotide
  Antisense strand to SEQ ID NO: 1652581
uauaugcauacaaguacac

SEQ ID NO: 1652583 - RNA, 19 nt, Artificial Sequence
  Description of Artificial Sequence: Synthetic oligonucleotide
  Sense strand starting at position 217 of SEQ ID NO: 1561180
gcauauacuuguguguauu

SEQ ID NO: 1652584 - RNA, 19 nt, Artificial Sequence
  Description of Artificial Sequence: Synthetic oligonucleotide
  Antisense strand to SEQ ID NO: 1652583
aauacacacaaguauaugc

SEQ ID NO: 1652585 - RNA, 19 nt, Artificial Sequence
  Description of Artificial Sequence: Synthetic oligonucleotide
  Sense strand starting at position 218 of SEQ ID NO: 1561180
cauauacuuguguguauuu

SEQ ID NO: 1652586 - RNA, 19 nt, Artificial Sequence
  Description of Artificial Sequence: Synthetic oligonucleotide
  Antisense strand to SEQ ID NO: 1652585
aaauacacacaaguauaug

SEQ ID NO: 1652587 - RNA, 19 nt, Artificial Sequence
  Description of Artificial Sequence: Synthetic oligonucleotide
  Sense strand starting at position 260 of SEQ ID NO: 1561180
ucaaguccagcacagaauu

SEQ ID NO: 1652588 - RNA, 19 nt, Artificial Sequence
  Description of Artificial Sequence: Synthetic oligonucleotide
  Antisense strand to SEQ ID NO: 1652587
aauucugugcuggacuuga

SEQ ID NO: 1652589 - RNA, 19 nt, Artificial Sequence
  Description of Artificial Sequence: Synthetic oligonucleotide
  Sense strand starting at position 669 of SEQ ID NO: 1561180
gcaauaagaccucagguuc

SEQ ID NO: 1652590 - RNA, 19 nt, Artificial Sequence
  Description of Artificial Sequence: Synthetic oligonucleotide
  Antisense strand to SEQ ID NO: 1652589
gaaccugaggucuuauugc

SEQ ID NO: 1652591 - RNA, 19 nt, Artificial Sequence
  Description of Artificial Sequence: Synthetic oligonucleotide
  Sense strand starting at position 918 of SEQ ID NO: 1561180
ggugguaucucucuuacug

SEQ ID NO: 1652592 - RNA, 19 nt, Artificial Sequence
  Description of Artificial Sequence: Synthetic oligonucleotide
  Antisense strand to SEQ ID NO: 1652591
caguaagagagauaccacc

SEQ ID NO: 1652593 - RNA, 19 nt, Artificial Sequence
  Description of Artificial Sequence: Synthetic oligonucleotide
  Sense strand starting at position 922 of SEQ ID NO: 1561180
guaucucucuuacugauga

SEQ ID NO: 1652594 - RNA, 19 nt, Artificial Sequence
  Description of Artificial Sequence: Synthetic oligonucleotide
  Antisense strand to SEQ ID NO: 1652593
ucaucaguaagagagauac

SEQ ID NO: 1652595 - RNA, 19 nt, Artificial Sequence
  Description of Artificial Sequence: Synthetic oligonucleotide
  Sense strand starting at position 986 of SEQ ID NO: 1561180
agcucaaauugugugauaa

SEQ ID NO: 1652596 - RNA, 19 nt, Artificial Sequence
  Description of Artificial Sequence: Synthetic oligonucleotide
  Antisense strand to SEQ ID NO: 1652595
uuaucacacaauuugagcu

SEQ ID NO: 1652597 - RNA, 19 nt, Artificial Sequence
  Description of Artificial Sequence: Synthetic oligonucleotide
  Sense strand starting at position 987 of SEQ ID NO: 1561180
gcucaaauugugugauaau

SEQ ID NO: 1652598 - RNA, 19 nt, Artificial Sequence
  Description of Artificial Sequence: Synthetic oligonucleotide
  Antisense strand to SEQ ID NO: 1652597
auuaucacacaauuugagc

SEQ ID NO: 1652599 - RNA, 19 nt, Artificial Sequence
  Description of Artificial Sequence: Synthetic oligonucleotide
  Sense strand starting at position 1011 of SEQ ID NO: 1561180
ugauuacagcguugugacu

SEQ ID NO: 1652600 - RNA, 19 nt, Artificial Sequence
  Description of Artificial Sequence: Synthetic oligonucleotide
  Antisense strand to SEQ ID NO: 1652599
agucacaacgcuguaauca

SEQ ID NO: 1652601 - RNA, 19 nt, Artificial Sequence
  Description of Artificial Sequence: Synthetic oligonucleotide
  Sense strand starting at position 1024 of SEQ ID NO: 1561180
gugacuuuauagguacaau

SEQ ID NO: 1652602 - RNA, 19 nt, Artificial Sequence
  Description of Artificial Sequence: Synthetic oligonucleotide
  Antisense strand to SEQ ID NO: 1652601
auuguaccuauaaagucac

SEQ ID NO: 1652603 - RNA, 19 nt, Artificial Sequence
  Description of Artificial Sequence: Synthetic oligonucleotide
  Sense strand starting at position 1036 of SEQ ID NO: 1561180
guacaauuauuaucaggua

SEQ ID NO: 1652604 - RNA, 19 nt, Artificial Sequence
  Description of Artificial Sequence: Synthetic oligonucleotide
  Antisense strand to SEQ ID NO: 1652603
uaccugauaauaauuguac

SEQ ID NO: 1652605 - RNA, 19 nt, Artificial Sequence
  Description of Artificial Sequence: Synthetic oligonucleotide
  Sense strand starting at position 1044 of SEQ ID NO: 1561180
auuaucagguaguagaaau

SEQ ID NO: 1652606 - RNA, 19 nt, Artificial Sequence
  Description of Artificial Sequence: Synthetic oligonucleotide
  Antisense strand to SEQ ID NO: 1652605
auuucuacuaccugauaau

SEQ ID NO: 1652607 - RNA, 19 nt, Artificial Sequence
  Description of Artificial Sequence: Synthetic oligonucleotide
  Sense strand starting at position 1351 of SEQ ID NO: 1561180
acaggcgguaccuguauua

SEQ ID NO: 1652608 - RNA, 19 nt, Artificial Sequence
  Description of Artificial Sequence: Synthetic oligonucleotide
  Antisense strand to SEQ ID NO: 1652607
uaauacagguaccgccugu

SEQ ID NO: 1652609 - RNA, 19 nt, Artificial Sequence
  Description of Artificial Sequence: Synthetic oligonucleotide
  Sense strand starting at position 1379 of SEQ ID NO: 1561180
gcagcugcuccuuggagaa

SEQ ID NO: 1652610 - RNA, 19 nt, Artificial Sequence
  Description of Artificial Sequence: Synthetic oligonucleotide
  Antisense strand to SEQ ID NO: 1652609
uucuccaaggagcagcugc

SEQ ID NO: 1652611 - RNA, 19 nt, Artificial Sequence
  Description of Artificial Sequence: Synthetic oligonucleotide
  Sense strand starting at position 1870 of SEQ ID NO: 1561180
cgagguagaucuuaggaga

SEQ ID NO: 1652612 - RNA, 19 nt, Artificial Sequence
  Description of Artificial Sequence: Synthetic oligonucleotide
  Antisense strand to SEQ ID NO: 1652611
ucuccuaagaucuaccucg

SEQ ID NO: 1652613 - RNA, 19 nt, Artificial Sequence
  Description of Artificial Sequence: Synthetic oligonucleotide
  Sense strand starting at position 1889 of SEQ ID NO: 1561180
gcaggaaaugcucguaaag

SEQ ID NO: 1652614 - RNA, 19 nt, Artificial Sequence
  Description of Artificial Sequence: Synthetic oligonucleotide
  Antisense strand to SEQ ID NO: 1652613
cuuuacgagcauuuccugc

SEQ ID NO: 1652615 - RNA, 19 nt, Artificial Sequence
  Description of Artificial Sequence: Synthetic oligonucleotide
  Sense strand starting at position 2197 of SEQ ID NO: 1561180
cuugucagcuugcuacaaa

SEQ ID NO: 1652616 - RNA, 19 nt, Artificial Sequence
  Description of Artificial Sequence: Synthetic oligonucleotide
  Antisense strand to SEQ ID NO: 1652615
uuuguagcaagcugacaag

SEQ ID NO: 1652617 - RNA, 19 nt, Artificial Sequence
  Description of Artificial Sequence: Synthetic oligonucleotide
  Sense strand starting at position 2329 of SEQ ID NO: 1561180
ucgugucagcuccugagua

SEQ ID NO: 1652618 - RNA, 19 nt, Artificial Sequence
  Description of Artificial Sequence: Synthetic oligonucleotide
  Antisense strand to SEQ ID NO: 1652617
uacucaggagcugacacga

SEQ ID NO: 1652619 - RNA, 19 nt, Artificial Sequence
  Description of Artificial Sequence: Synthetic oligonucleotide
  Sense strand starting at position 2723 of SEQ ID NO: 1561180
gcccuuauucugggaaaug

SEQ ID NO: 1652620 - RNA, 19 nt, Artificial Sequence
  Description of Artificial Sequence: Synthetic oligonucleotide
  Antisense strand to SEQ ID NO: 1652619
cauuucccagaauaagggc

SEQ ID NO: 1652621 - RNA, 19 nt, Artificial Sequence
  Description of Artificial Sequence: Synthetic oligonucleotide
  Sense strand starting at position 2724 of SEQ ID NO: 1561180
cccuuauucugggaaaugg

SEQ ID NO: 1652622 - RNA, 19 nt, Artificial Sequence
  Description of Artificial Sequence: Synthetic oligonucleotide
  Antisense strand to SEQ ID NO: 1652621
ccauuucccagaauaaggg

SEQ ID NO: 1652623 - RNA, 19 nt, Artificial Sequence
  Description of Artificial Sequence: Synthetic oligonucleotide
  Sense strand starting at position 2762 of SEQ ID NO: 1561180
ccugaaauaugcccugaga

SEQ ID NO: 1652624 - RNA, 19 nt, Artificial Sequence
  Description of Artificial Sequence: Synthetic oligonucleotide
  Antisense strand to SEQ ID NO: 1652623
ucucagggcauauuucagg

SEQ ID NO: 1652625 - RNA, 19 nt, Artificial Sequence
  Description of Artificial Sequence: Synthetic oligonucleotide
  Sense strand starting at position 2764 of SEQ ID NO: 1561180
ugaaauaugcccugagaua

SEQ ID NO: 1652626 - RNA, 19 nt, Artificial Sequence
  Description of Artificial Sequence: Synthetic oligonucleotide
  Antisense strand to SEQ ID NO: 1652625
uaucucagggcauauuuca

SEQ ID NO: 1652627 - RNA, 19 nt, Artificial Sequence
  Description of Artificial Sequence: Synthetic oligonucleotide
  Sense strand starting at position 2825 of SEQ ID NO: 1561180
agggauuauucgguuucag

SEQ ID NO: 1652628 - RNA, 19 nt, Artificial Sequence
  Description of Artificial Sequence: Synthetic oligonucleotide
  Antisense strand to SEQ ID NO: 1652627
cugaaaccgaauaaucccu

SEQ ID NO: 1652629 - RNA, 19 nt, Artificial Sequence
  Description of Artificial Sequence: Synthetic oligonucleotide
  Sense strand starting at position 2897 of SEQ ID NO: 1561180
ccaccuguguccucucaca

SEQ ID NO: 1652630 - RNA, 19 nt, Artificial Sequence
  Description of Artificial Sequence: Synthetic oligonucleotide
  Antisense strand to SEQ ID NO: 1652629
ugugagaggacacaggugg

SEQ ID NO: 1652631 - RNA, 19 nt, Artificial Sequence
  Description of Artificial Sequence: Synthetic oligonucleotide
  Sense strand starting at position 3131 of SEQ ID NO: 1561180
gcccucaccucucuggaau

SEQ ID NO: 1652632 - RNA, 19 nt, Artificial Sequence
  Description of Artificial Sequence: Synthetic oligonucleotide
  Antisense strand to SEQ ID NO: 1652631
auuccagagaggugagggc

SEQ ID NO: 1652633 - RNA, 19 nt, Artificial Sequence
  Description of Artificial Sequence: Synthetic oligonucleotide
  Sense strand starting at position 3787 of SEQ ID NO: 1561180
ccaucugugucaucccaca

SEQ ID NO: 1652634 - RNA, 19 nt, Artificial Sequence
  Description of Artificial Sequence: Synthetic oligonucleotide
  Antisense strand to SEQ ID NO: 1652633
ugugggaugacacagaugg

SEQ ID NO: 1652635 - RNA, 19 nt, Artificial Sequence
  Description of Artificial Sequence: Synthetic oligonucleotide
  Sense strand starting at position 142 of SEQ ID NO: 1561181
ccgauuugguaggaggagu

SEQ ID NO: 1652636 - RNA, 19 nt, Artificial Sequence
  Description of Artificial Sequence: Synthetic oligonucleotide
  Antisense strand to SEQ ID NO: 1652635
acuccuccuaccaaaucgg

SEQ ID NO: 1652637 - RNA, 19 nt, Artificial Sequence
  Description of Artificial Sequence: Synthetic oligonucleotide
  Sense strand starting at position 436 of SEQ ID NO: 1561181
acacuugcugagcgcaaua

SEQ ID NO: 1652638 - RNA, 19 nt, Artificial Sequence
  Description of Artificial Sequence: Synthetic oligonucleotide
  Antisense strand to SEQ ID NO: 1652637
uauugcgcucagcaagugu

SEQ ID NO: 1652639 - RNA, 19 nt, Artificial Sequence
  Description of Artificial Sequence: Synthetic oligonucleotide
  Sense strand starting at position 438 of SEQ ID NO: 1561181
acuugcugagcgcaauaua

SEQ ID NO: 1652640 - RNA, 19 nt, Artificial Sequence
  Description of Artificial Sequence: Synthetic oligonucleotide
  Antisense strand to SEQ ID NO: 1652639
uauauugcgcucagcaagu

SEQ ID NO: 1652641 - RNA, 19 nt, Artificial Sequence
  Description of Artificial Sequence: Synthetic oligonucleotide
  Sense strand starting at position 553 of SEQ ID NO: 1561181
gcugaagccuguccuugau

SEQ ID NO: 1652642 - RNA, 19 nt, Artificial Sequence
  Description of Artificial Sequence: Synthetic oligonucleotide
  Antisense strand to SEQ ID NO: 1652641
aucaaggacaggcuucagc

SEQ ID NO: 1652643 - RNA, 19 nt, Artificial Sequence
  Description of Artificial Sequence: Synthetic oligonucleotide
  Sense strand starting at position 1293 of SEQ ID NO: 1561181
ccugcauuucccgggaucu

SEQ ID NO: 1652644 - RNA, 19 nt, Artificial Sequence
  Description of Artificial Sequence: Synthetic oligonucleotide
  Antisense strand to SEQ ID NO: 1652643
agaucccgggaaaugcagg

SEQ ID NO: 1652645 - RNA, 19 nt, Artificial Sequence
  Description of Artificial Sequence: Synthetic oligonucleotide
  Sense strand starting at position 1294 of SEQ ID NO: 1561181
cugcauuucccgggaucuu

SEQ ID NO: 1652646 - RNA, 19 nt, Artificial Sequence
  Description of Artificial Sequence: Synthetic oligonucleotide
  Antisense strand to SEQ ID NO: 1652645
aagaucccgggaaaugcag

SEQ ID NO: 1652647 - RNA, 19 nt, Artificial Sequence
  Description of Artificial Sequence: Synthetic oligonucleotide
  Sense strand starting at position 1355 of SEQ ID NO: 1561181
accucauguccuggccaau

SEQ ID NO: 1652648 - RNA, 19 nt, Artificial Sequence
  Description of Artificial Sequence: Synthetic oligonucleotide
  Antisense strand to SEQ ID NO: 1652647
auuggccaggacaugaggu

SEQ ID NO: 1652649 - RNA, 19 nt, Artificial Sequence
  Description of Artificial Sequence: Synthetic oligonucleotide
  Sense strand starting at position 1361 of SEQ ID NO: 1561181
uguccuggccaauaucuaa

SEQ ID NO: 1652650 - RNA, 19 nt, Artificial Sequence
  Description of Artificial Sequence: Synthetic oligonucleotide
  Antisense strand to SEQ ID NO: 1652649
uuagauauuggccaggaca

SEQ ID NO: 1652651 - RNA, 19 nt, Artificial Sequence
  Description of Artificial Sequence: Synthetic oligonucleotide
  Sense strand starting at position 1504 of SEQ ID NO: 1561181
gggcucucugcugagugaa

SEQ ID NO: 1652652 - RNA, 19 nt, Artificial Sequence
  Description of Artificial Sequence: Synthetic oligonucleotide
  Antisense strand to SEQ ID NO: 1652651
uucacucagcagagagccc

SEQ ID NO: 1652653 - RNA, 19 nt, Artificial Sequence
  Description of Artificial Sequence: Synthetic oligonucleotide
  Sense strand starting at position 2104 of SEQ ID NO: 1561181
cuaucuucuccgcguggga

SEQ ID NO: 1652654 - RNA, 19 nt, Artificial Sequence
  Description of Artificial Sequence: Synthetic oligonucleotide
  Antisense strand to SEQ ID NO: 1652653
ucccacgcggagaagauag

SEQ ID NO: 1652655 - RNA, 19 nt, Artificial Sequence
  Description of Artificial Sequence: Synthetic oligonucleotide
  Sense strand starting at position 2165 of SEQ ID NO: 1561181
ccuggagucccguagauac

SEQ ID NO: 1652656 - RNA, 19 nt, Artificial Sequence
  Description of Artificial Sequence: Synthetic oligonucleotide
  Antisense strand to SEQ ID NO: 1652655
guaucuacgggacuccagg

SEQ ID NO: 1652657 - RNA, 19 nt, Artificial Sequence
  Description of Artificial Sequence: Synthetic oligonucleotide
  Sense strand starting at position 2173 of SEQ ID NO: 1561181
cccguagauaccuaugguu

SEQ ID NO: 1652658 - RNA, 19 nt, Artificial Sequence
  Description of Artificial Sequence: Synthetic oligonucleotide
  Antisense strand to SEQ ID NO: 1652657
aaccauagguaucuacggg

SEQ ID NO: 1652659 - RNA, 19 nt, Artificial Sequence
  Description of Artificial Sequence: Synthetic oligonucleotide
  Sense strand starting at position 2175 of SEQ ID NO: 1561181
cguagauaccuaugguuuc

SEQ ID NO: 1652660 - RNA, 19 nt, Artificial Sequence
  Description of Artificial Sequence: Synthetic oligonucleotide
  Antisense strand to SEQ ID NO: 1652659
gaaaccauagguaucuacg

SEQ ID NO: 1652661 - RNA, 19 nt, Artificial Sequence
  Description of Artificial Sequence: Synthetic oligonucleotide
  Sense strand starting at position 2186 of SEQ ID NO: 1561181
augguuuccuguguccuaa

SEQ ID NO: 1652662 - RNA, 19 nt, Artificial Sequence
  Description of Artificial Sequence: Synthetic oligonucleotide
  Antisense strand to SEQ ID NO: 1652661
uuaggacacaggaaaccau

SEQ ID NO: 1652663 - RNA, 19 nt, Artificial Sequence
  Description of Artificial Sequence: Synthetic oligonucleotide
  Sense strand starting at position 2208 of SEQ ID NO: 1561181
gaacucacgucuuccaaag

SEQ ID NO: 1652664 - RNA, 19 nt, Artificial Sequence
  Description of Artificial Sequence: Synthetic oligonucleotide
  Antisense strand to SEQ ID NO: 1652663
cuuuggaagacgugaguuc

SEQ ID NO: 1652665 - RNA, 19 nt, Artificial Sequence
  Description of Artificial Sequence: Synthetic oligonucleotide
  Sense strand starting at position 2606 of SEQ ID NO: 1561181
agucuuugauugcccauca

SEQ ID NO: 1652666 - RNA, 19 nt, Artificial Sequence
  Description of Artificial Sequence: Synthetic oligonucleotide
  Antisense strand to SEQ ID NO: 1652665
ugaugggcaaucaaagacu

SEQ ID NO: 1652667 - RNA, 19 nt, Artificial Sequence
  Description of Artificial Sequence: Synthetic oligonucleotide
  Sense strand starting at position 2650 of SEQ ID NO: 1561181
cuguguccauccuggaguu

SEQ ID NO: 1652668 - RNA, 19 nt, Artificial Sequence
  Description of Artificial Sequence: Synthetic oligonucleotide
  Antisense strand to SEQ ID NO: 1652667
aacuccaggauggacacag

SEQ ID NO: 1652669 - RNA, 19 nt, Artificial Sequence
  Description of Artificial Sequence: Synthetic oligonucleotide
  Sense strand starting at position 2662 of SEQ ID NO: 1561181
uggaguugccagcguucua

SEQ ID NO: 1652670 - RNA, 19 nt, Artificial Sequence
  Description of Artificial Sequence: Synthetic oligonucleotide
  Antisense strand to SEQ ID NO: 1652669
uagaacgcuggcaacucca

SEQ ID NO: 1652671 - RNA, 19 nt, Artificial Sequence
  Description of Artificial Sequence: Synthetic oligonucleotide
  Sense strand starting at position 2665 of SEQ ID NO: 1561181
aguugccagcguucuagau

SEQ ID NO: 1652672 - RNA, 19 nt, Artificial Sequence
  Description of Artificial Sequence: Synthetic oligonucleotide
  Antisense strand to SEQ ID NO: 1652671
aucuagaacgcuggcaacu

SEQ ID NO: 1652673 - RNA, 19 nt, Artificial Sequence
  Description of Artificial Sequence: Synthetic oligonucleotide
  Sense strand starting at position 2669 of SEQ ID NO: 1561181
gccagcguucuagaucuga

SEQ ID NO: 1652674 - RNA, 19 nt, Artificial Sequence
  Description of Artificial Sequence: Synthetic oligonucleotide
  Antisense strand to SEQ ID NO: 1652673
ucagaucuagaacgcuggc

SEQ ID NO: 1652675 - RNA, 19 nt, Artificial Sequence
  Description of Artificial Sequence: Synthetic oligonucleotide
  Sense strand starting at position 2673 of SEQ ID NO: 1561181
gcguucuagaucugaugca

SEQ ID NO: 1652676 - RNA, 19 nt, Artificial Sequence
  Description of Artificial Sequence: Synthetic oligonucleotide
  Antisense strand to SEQ ID NO: 1652675
ugcaucagaucuagaacgc

SEQ ID NO: 1652677 - RNA, 19 nt, Artificial Sequence
  Description of Artificial Sequence: Synthetic oligonucleotide
  Sense strand starting at position 2825 of SEQ ID NO: 1561181
gcuggguugcugugagaga

SEQ ID NO: 1652678 - RNA, 19 nt, Artificial Sequence
  Description of Artificial Sequence: Synthetic oligonucleotide
  Antisense strand to SEQ ID NO: 1652677
ucucucacagcaacccagc

SEQ ID NO: 1652679 - RNA, 19 nt, Artificial Sequence
  Description of Artificial Sequence: Synthetic oligonucleotide
  Sense strand starting at position 2851 of SEQ ID NO: 1561181
gguagugugagauagccaa

SEQ ID NO: 1652680 - RNA, 19 nt, Artificial Sequence
  Description of Artificial Sequence: Synthetic oligonucleotide
  Antisense strand to SEQ ID NO: 1652679
uuggcuaucucacacuacc

SEQ ID NO: 1652681 - RNA, 19 nt, Artificial Sequence
  Description of Artificial Sequence: Synthetic oligonucleotide
  Sense strand starting at position 3025 of SEQ ID NO: 1561181
augguuucccaguggacaa

SEQ ID NO: 1652682 - RNA, 19 nt, Artificial Sequence
  Description of Artificial Sequence: Synthetic oligonucleotide
  Antisense strand to SEQ ID NO: 1652681
uuguccacugggaaaccau

SEQ ID NO: 1652683 - RNA, 19 nt, Artificial Sequence
  Description of Artificial Sequence: Synthetic oligonucleotide
  Sense strand starting at position 3278 of SEQ ID NO: 1561181
gccaguuguugccaggaag

SEQ ID NO: 1652684 - RNA, 19 nt, Artificial Sequence
  Description of Artificial Sequence: Synthetic oligonucleotide
  Antisense strand to SEQ ID NO: 1652683
cuuccuggcaacaacuggc

SEQ ID NO: 1652685 - RNA, 19 nt, Artificial Sequence
  Description of Artificial Sequence: Synthetic oligonucleotide
  Sense strand starting at position 3281 of SEQ ID NO: 1561181
aguuguugccaggaaggau

SEQ ID NO: 1652686 - RNA, 19 nt, Artificial Sequence
  Description of Artificial Sequence: Synthetic oligonucleotide
  Antisense strand to SEQ ID NO: 1652685
auccuuccuggcaacaacu

SEQ ID NO: 1652687 - RNA, 19 nt, Artificial Sequence
  Description of Artificial Sequence: Synthetic oligonucleotide
  Sense strand starting at position 3300 of SEQ ID NO: 1561181
uguagugcugcugccagau

SEQ ID NO: 1652688 - RNA, 19 nt, Artificial Sequence
  Description of Artificial Sequence: Synthetic oligonucleotide
  Antisense strand to SEQ ID NO: 1652687
aucuggcagcagcacuaca

SEQ ID NO: 1652689 - RNA, 19 nt, Artificial Sequence
  Description of Artificial Sequence: Synthetic oligonucleotide
  Sense strand starting at position 3379 of SEQ ID NO: 1561181
caaacugccugguuuguaa

SEQ ID NO: 1652690 - RNA, 19 nt, Artificial Sequence
  Description of Artificial Sequence: Synthetic oligonucleotide
  Antisense strand to SEQ ID NO: 1652689
uuacaaaccaggcaguuug

SEQ ID NO: 1652691 - RNA, 19 nt, Artificial Sequence
  Description of Artificial Sequence: Synthetic oligonucleotide
  Sense strand starting at position 3403 of SEQ ID NO: 1561181
ggcaauugauuccaacauu

SEQ ID NO: 1652692 - RNA, 19 nt, Artificial Sequence
  Description of Artificial Sequence: Synthetic oligonucleotide
  Antisense strand to SEQ ID NO: 1652691
aauguuggaaucaauugcc

SEQ ID NO: 1652693 - RNA, 19 nt, Artificial Sequence
  Description of Artificial Sequence: Synthetic oligonucleotide
  Sense strand starting at position 3424 of SEQ ID NO: 1561181
aaacauaucgugggugaaa

SEQ ID NO: 1652694 - RNA, 19 nt, Artificial Sequence
  Description of Artificial Sequence: Synthetic oligonucleotide
  Antisense strand to SEQ ID NO: 1652693
uuucacccacgauauguuu

SEQ ID NO: 1652695 - RNA, 19 nt, Artificial Sequence
  Description of Artificial Sequence: Synthetic oligonucleotide
  Sense strand starting at position 3425 of SEQ ID NO: 1561181
aacauaucgugggugaaac

SEQ ID NO: 1652696 - RNA, 19 nt, Artificial Sequence
  Description of Artificial Sequence: Synthetic oligonucleotide
  Antisense strand to SEQ ID NO: 1652695
guuucacccacgauauguu

SEQ ID NO: 1652697 - RNA, 19 nt, Artificial Sequence
  Description of Artificial Sequence: Synthetic oligonucleotide
  Sense strand starting at position 3426 of SEQ ID NO: 1561181
acauaucgugggugaaacu

SEQ ID NO: 1652698 - RNA, 19 nt, Artificial Sequence
  Description of Artificial Sequence: Synthetic oligonucleotide
  Antisense strand to SEQ ID NO: 1652697
aguuucacccacgauaugu

SEQ ID NO: 1652699 - RNA, 19 nt, Artificial Sequence
  Description of Artificial Sequence: Synthetic oligonucleotide
  Sense strand starting at position 3427 of SEQ ID NO: 1561181
cauaucgugggugaaacua

SEQ ID NO: 1652700 - RNA, 19 nt, Artificial Sequence
  Description of Artificial Sequence: Synthetic oligonucleotide
  Antisense strand to SEQ ID NO: 1652699
uaguuucacccacgauaug

SEQ ID NO: 1652701 - RNA, 19 nt, Artificial Sequence
  Description of Artificial Sequence: Synthetic oligonucleotide
  Sense strand starting at position 3552 of SEQ ID NO: 1561181
ccagauguggcuuacucua

SEQ ID NO: 1652702 - RNA, 19 nt, Artificial Sequence
  Description of Artificial Sequence: Synthetic oligonucleotide
  Antisense strand to SEQ ID NO: 1652701
uagaguaagccacaucugg

SEQ ID NO: 1652703 - RNA, 19 nt, Artificial Sequence
  Description of Artificial Sequence: Synthetic oligonucleotide
  Sense strand starting at position 28 of SEQ ID NO: 1561182
acgguauugggagacaguu

SEQ ID NO: 1652704 - RNA, 19 nt, Artificial Sequence
  Description of Artificial Sequence: Synthetic oligonucleotide
  Antisense strand to SEQ ID NO: 1652703
aacugucucccaauaccgu

SEQ ID NO: 1652705 - RNA, 19 nt, Artificial Sequence
  Description of Artificial Sequence: Synthetic oligonucleotide
  Sense strand starting at position 37 of SEQ ID NO: 1561182
ggagacaguucccaagaga

SEQ ID NO: 1652706 - RNA, 19 nt, Artificial Sequence
  Description of Artificial Sequence: Synthetic oligonucleotide
  Antisense strand to SEQ ID NO: 1652705
ucucuugggaacugucucc

SEQ ID NO: 1652707 - RNA, 19 nt, Artificial Sequence
  Description of Artificial Sequence: Synthetic oligonucleotide
  Sense strand starting at position 467 of SEQ ID NO: 1561182
cgacgauguaauggaccua

SEQ ID NO: 1652708 - RNA, 19 nt, Artificial Sequence
  Description of Artificial Sequence: Synthetic oligonucleotide
  Antisense strand to SEQ ID NO: 1652707
uagguccauuacaucgucg

SEQ ID NO: 1652709 - RNA, 19 nt, Artificial Sequence
  Description of Artificial Sequence: Synthetic oligonucleotide
  Sense strand starting at position 537 of SEQ ID NO: 1561182
cagaaauguguauguggga

SEQ ID NO: 1652710 - RNA, 19 nt, Artificial Sequence
  Description of Artificial Sequence: Synthetic oligonucleotide
  Antisense strand to SEQ ID NO: 1652709
ucccacauacacauuucug

SEQ ID NO: 1652711 - RNA, 19 nt, Artificial Sequence
  Description of Artificial Sequence: Synthetic oligonucleotide
  Sense strand starting at position 938 of SEQ ID NO: 1561182
cagguugaggcuuaaguaa

SEQ ID NO: 1652712 - RNA, 19 nt, Artificial Sequence
  Description of Artificial Sequence: Synthetic oligonucleotide
  Antisense strand to SEQ ID NO: 1652711
uuacuuaagccucaaccug

SEQ ID NO: 1652713 - RNA, 19 nt, Artificial Sequence
  Description of Artificial Sequence: Synthetic oligonucleotide
  Sense strand starting at position 1122 of SEQ ID NO: 1561182
agauaaaccacgugggauu

SEQ ID NO: 1652714 - RNA, 19 nt, Artificial Sequence
  Description of Artificial Sequence: Synthetic oligonucleotide
  Antisense strand to SEQ ID NO: 1652713
aaucccacgugguuuaucu

SEQ ID NO: 1652715 - RNA, 19 nt, Artificial Sequence
  Description of Artificial Sequence: Synthetic oligonucleotide
  Sense strand starting at position 1132 of SEQ ID NO: 1561182
cgugggauuugugggaagu

SEQ ID NO: 1652716 - RNA, 19 nt, Artificial Sequence
  Description of Artificial Sequence: Synthetic oligonucleotide
  Antisense strand to SEQ ID NO: 1652715
acuucccacaaaucccacg

SEQ ID NO: 1652717 - RNA, 19 nt, Artificial Sequence
  Description of Artificial Sequence: Synthetic oligonucleotide
  Sense strand starting at position 1134 of SEQ ID NO: 1561182
ugggauuugugggaaguuc

SEQ ID NO: 1652718 - RNA, 19 nt, Artificial Sequence
  Description of Artificial Sequence: Synthetic oligonucleotide
  Antisense strand to SEQ ID NO: 1652717
gaacuucccacaaauccca

SEQ ID NO: 1652719 - RNA, 19 nt, Artificial Sequence
  Description of Artificial Sequence: Synthetic oligonucleotide
  Sense strand starting at position 1144 of SEQ ID NO: 1561182
gggaaguucguggguagga

SEQ ID NO: 1652720 - RNA, 19 nt, Artificial Sequence
  Description of Artificial Sequence: Synthetic oligonucleotide
  Antisense strand to SEQ ID NO: 1652719
uccuacccacgaacuuccc

SEQ ID NO: 1652721 - RNA, 19 nt, Artificial Sequence
  Description of Artificial Sequence: Synthetic oligonucleotide
  Sense strand starting at position 1145 of SEQ ID NO: 1561182
ggaaguucguggguaggaa

SEQ ID NO: 1652722 - RNA, 19 nt, Artificial Sequence
  Description of Artificial Sequence: Synthetic oligonucleotide
  Antisense strand to SEQ ID NO: 1652721
uuccuacccacgaacuucc

SEQ ID NO: 1652723 - RNA, 19 nt, Artificial Sequence
  Description of Artificial Sequence: Synthetic oligonucleotide
  Sense strand starting at position 1276 of SEQ ID NO: 1561182
aaguuugaguucuggguga

SEQ ID NO: 1652724 - RNA, 19 nt, Artificial Sequence
  Description of Artificial Sequence: Synthetic oligonucleotide
  Antisense strand to SEQ ID NO: 1652723
ucacccagaacucaaacuu

SEQ ID NO: 1652725 - RNA, 19 nt, Artificial Sequence
  Description of Artificial Sequence: Synthetic oligonucleotide
  Sense strand starting at position 1278 of SEQ ID NO: 1561182
guuugaguucugggugauc

SEQ ID NO: 1652726 - RNA, 19 nt, Artificial Sequence
  Description of Artificial Sequence: Synthetic oligonucleotide
  Antisense strand to SEQ ID NO: 1652725
gaucacccagaacucaaac

SEQ ID NO: 1652727 - RNA, 19 nt, Artificial Sequence
  Description of Artificial Sequence: Synthetic oligonucleotide
  Sense strand starting at position 1280 of SEQ ID NO: 1561182
uugaguucugggugaucac

SEQ ID NO: 1652728 - RNA, 19 nt, Artificial Sequence
  Description of Artificial Sequence: Synthetic oligonucleotide
  Antisense strand to SEQ ID NO: 1652727
gugaucacccagaacucaa

SEQ ID NO: 1652729 - RNA, 19 nt, Artificial Sequence
  Description of Artificial Sequence: Synthetic oligonucleotide
  Sense strand starting at position 1281 of SEQ ID NO: 1561182
ugaguucugggugaucaca

SEQ ID NO: 1652730 - RNA, 19 nt, Artificial Sequence
  Description of Artificial Sequence: Synthetic oligonucleotide
  Antisense strand to SEQ ID NO: 1652729
ugugaucacccagaacuca

SEQ ID NO: 1652731 - RNA, 19 nt, Artificial Sequence
  Description of Artificial Sequence: Synthetic oligonucleotide
  Sense strand starting at position 1302 of SEQ ID NO: 1561182
gcaucugagucaggucuga

SEQ ID NO: 1652732 - RNA, 19 nt, Artificial Sequence
  Description of Artificial Sequence: Synthetic oligonucleotide
  Antisense strand to SEQ ID NO: 1652731
ucagaccugacucagaugc

SEQ ID NO: 1652733 - RNA, 19 nt, Artificial Sequence
  Description of Artificial Sequence: Synthetic oligonucleotide
  Sense strand starting at position 1356 of SEQ ID NO: 1561182
cggaaucagugaucacucu

SEQ ID NO: 1652734 - RNA, 19 nt, Artificial Sequence
  Description of Artificial Sequence: Synthetic oligonucleotide
  Antisense strand to SEQ ID NO: 1652733
agagugaucacugauuccg

SEQ ID NO: 1652735 - RNA, 19 nt, Artificial Sequence
  Description of Artificial Sequence: Synthetic oligonucleotide
  Sense strand starting at position 1429 of SEQ ID NO: 1561182
uuuacuaagugcuacgcaa

SEQ ID NO: 1652736 - RNA, 19 nt, Artificial Sequence
  Description of Artificial Sequence: Synthetic oligonucleotide
  Antisense strand to SEQ ID NO: 1652735
uugcguagcacuuaguaaa

SEQ ID NO: 1652737 - RNA, 19 nt, Artificial Sequence
  Description of Artificial Sequence: Synthetic oligonucleotide
  Sense strand starting at position 1489 of SEQ ID NO: 1561182
aguccauccucucuaggua

SEQ ID NO: 1652738 - RNA, 19 nt, Artificial Sequence
  Description of Artificial Sequence: Synthetic oligonucleotide
  Antisense strand to SEQ ID NO: 1652737
uaccuagagaggauggacu

SEQ ID NO: 1652739 - RNA, 19 nt, Artificial Sequence
  Description of Artificial Sequence: Synthetic oligonucleotide
  Sense strand starting at position 1490 of SEQ ID NO: 1561182
guccauccucucuagguau

SEQ ID NO: 1652740 - RNA, 19 nt, Artificial Sequence
  Description of Artificial Sequence: Synthetic oligonucleotide
  Antisense strand to SEQ ID NO: 1652739
auaccuagagaggauggac

SEQ ID NO: 1652741 - RNA, 19 nt, Artificial Sequence
  Description of Artificial Sequence: Synthetic oligonucleotide
  Sense strand starting at position 2227 of SEQ ID NO: 1561182
gccucaaacccggaucaga

SEQ ID NO: 1652742 - RNA, 19 nt, Artificial Sequence
  Description of Artificial Sequence: Synthetic oligonucleotide
  Antisense strand to SEQ ID NO: 1652741
ucugauccggguuugaggc

SEQ ID NO: 1652743 - RNA, 19 nt, Artificial Sequence
  Description of Artificial Sequence: Synthetic oligonucleotide
  Sense strand starting at position 3101 of SEQ ID NO: 1561182
uagcccuagugucaugaaa

SEQ ID NO: 1652744 - RNA, 19 nt, Artificial Sequence
  Description of Artificial Sequence: Synthetic oligonucleotide
  Antisense strand to SEQ ID NO: 1652743
uuucaugacacuagggcua

SEQ ID NO: 1652745 - RNA, 19 nt, Artificial Sequence
  Description of Artificial Sequence: Synthetic oligonucleotide
  Sense strand starting at position 3103 of SEQ ID NO: 1561182
gcccuagugucaugaaagg

SEQ ID NO: 1652746 - RNA, 19 nt, Artificial Sequence
  Description of Artificial Sequence: Synthetic oligonucleotide
  Antisense strand to SEQ ID NO: 1652745
ccuuucaugacacuagggc

SEQ ID NO: 1652747 - RNA, 19 nt, Artificial Sequence
  Description of Artificial Sequence: Synthetic oligonucleotide
  Sense strand starting at position 3154 of SEQ ID NO: 1561182
gaugcaaugugauuccauu

SEQ ID NO: 1652748 - RNA, 19 nt, Artificial Sequence
  Description of Artificial Sequence: Synthetic oligonucleotide
  Antisense strand to SEQ ID NO: 1652747
aauggaaucacauugcauc

SEQ ID NO: 1652749 - RNA, 19 nt, Artificial Sequence
  Description of Artificial Sequence: Synthetic oligonucleotide
  Sense strand starting at position 3213 of SEQ ID NO: 1561182
aggaguuaaugcagggaga

SEQ ID NO: 1652750 - RNA, 19 nt, Artificial Sequence
  Description of Artificial Sequence: Synthetic oligonucleotide
  Antisense strand to SEQ ID NO: 1652749
ucucccugcauuaacuccu

SEQ ID NO: 1652751 - RNA, 19 nt, Artificial Sequence
  Description of Artificial Sequence: Synthetic oligonucleotide
  Sense strand starting at position 3215 of SEQ ID NO: 1561182
gaguuaaugcagggagaca

SEQ ID NO: 1652752 - RNA, 19 nt, Artificial Sequence
  Description of Artificial Sequence: Synthetic oligonucleotide
  Antisense strand to SEQ ID NO: 1652751
ugucucccugcauuaacuc

SEQ ID NO: 1652753 - RNA, 19 nt, Artificial Sequence
  Description of Artificial Sequence: Synthetic oligonucleotide
  Sense strand starting at position 3367 of SEQ ID NO: 1561182
guauuagucaccugcugua

SEQ ID NO: 1652754 - RNA, 19 nt, Artificial Sequence
  Description of Artificial Sequence: Synthetic oligonucleotide
  Antisense strand to SEQ ID NO: 1652753
uacagcaggugacuaauac

SEQ ID NO: 1652755 - RNA, 19 nt, Artificial Sequence
  Description of Artificial Sequence: Synthetic oligonucleotide
  Sense strand starting at position 3463 of SEQ ID NO: 1561182
aacagugacuaugaaauga

SEQ ID NO: 1652756 - RNA, 19 nt, Artificial Sequence
  Description of Artificial Sequence: Synthetic oligonucleotide
  Antisense strand to SEQ ID NO: 1652755
ucauuucauagucacuguu

SEQ ID NO: 1652757 - RNA, 19 nt, Artificial Sequence
  Description of Artificial Sequence: Synthetic oligonucleotide
  Sense strand starting at position 3601 of SEQ ID NO: 1561182
agggaagcauuccagacua

SEQ ID NO: 1652758 - RNA, 19 nt, Artificial Sequence
  Description of Artificial Sequence: Synthetic oligonucleotide
  Antisense strand to SEQ ID NO: 1652757
uagucuggaaugcuucccu

SEQ ID NO: 1652759 - RNA, 19 nt, Artificial Sequence
  Description of Artificial Sequence: Synthetic oligonucleotide
  Sense strand starting at position 3676 of SEQ ID NO: 1561182
guuucugacuuggcacauu

SEQ ID NO: 1652760 - RNA, 19 nt, Artificial Sequence
  Description of Artificial Sequence: Synthetic oligonucleotide
  Antisense strand to SEQ ID NO: 1652759
aaugugccaagucagaaac

SEQ ID NO: 1652761 - RNA, 19 nt, Artificial Sequence
  Description of Artificial Sequence: Synthetic oligonucleotide
  Sense strand starting at position 3926 of SEQ ID NO: 1561182
cugucagcuuccuggagaa

SEQ ID NO: 1652762 - RNA, 19 nt, Artificial Sequence
  Description of Artificial Sequence: Synthetic oligonucleotide
  Antisense strand to SEQ ID NO: 1652761
uucuccaggaagcugacag

SEQ ID NO: 1652763 - RNA, 19 nt, Artificial Sequence
  Description of Artificial Sequence: Synthetic oligonucleotide
  Sense strand starting at position 3928 of SEQ ID NO: 1561182
gucagcuuccuggagaauc

SEQ ID NO: 1652764 - RNA, 19 nt, Artificial Sequence
  Description of Artificial Sequence: Synthetic oligonucleotide
  Antisense strand to SEQ ID NO: 1652763
gauucuccaggaagcugac

SEQ ID NO: 1652765 - RNA, 19 nt, Artificial Sequence
  Description of Artificial Sequence: Synthetic oligonucleotide
  Sense strand starting at position 113 of SEQ ID NO: 1561183
gugcgacucagcgacauua

SEQ ID NO: 1652766 - RNA, 19 nt, Artificial Sequence
  Description of Artificial Sequence: Synthetic oligonucleotide
  Antisense strand to SEQ ID NO: 1652765
uaaugucgcugagucgcac

SEQ ID NO: 1652767 - RNA, 19 nt, Artificial Sequence
  Description of Artificial Sequence: Synthetic oligonucleotide
  Sense strand starting at position 115 of SEQ ID NO: 1561183
gcgacucagcgacauuagu

SEQ ID NO: 1652768 - RNA, 19 nt, Artificial Sequence
  Description of Artificial Sequence: Synthetic oligonucleotide
  Antisense strand to SEQ ID NO: 1652767
acuaaugucgcugagucgc

SEQ ID NO: 1652769 - RNA, 19 nt, Artificial Sequence
  Description of Artificial Sequence: Synthetic oligonucleotide
  Sense strand starting at position 132 of SEQ ID NO: 1561183
gugcacucccaauguuaug

SEQ ID NO: 1652770 - RNA, 19 nt, Artificial Sequence
  Description of Artificial Sequence: Synthetic oligonucleotide
  Antisense strand to SEQ ID NO: 1652769
cauaacauugggagugcac

SEQ ID NO: 1652771 - RNA, 19 nt, Artificial Sequence
  Description of Artificial Sequence: Synthetic oligonucleotide
  Sense strand starting at position 781 of SEQ ID NO: 1561183
uuaugcucaguguaauguu

SEQ ID NO: 1652772 - RNA, 19 nt, Artificial Sequence
  Description of Artificial Sequence: Synthetic oligonucleotide
  Antisense strand to SEQ ID NO: 1652771
aacauuacacugagcauaa

SEQ ID NO: 1652773 - RNA, 19 nt, Artificial Sequence
  Description of Artificial Sequence: Synthetic oligonucleotide
  Sense strand starting at position 1471 of SEQ ID NO: 1561183
uccguuugcccagacauga

SEQ ID NO: 1652774 - RNA, 19 nt, Artificial Sequence
  Description of Artificial Sequence: Synthetic oligonucleotide
  Antisense strand to SEQ ID NO: 1652773
ucaugucugggcaaacgga

SEQ ID NO: 1652775 - RNA, 19 nt, Artificial Sequence
  Description of Artificial Sequence: Synthetic oligonucleotide
  Sense strand starting at position 1539 of SEQ ID NO: 1561183
agaugaucagcaggugaca

SEQ ID NO: 1652776 - RNA, 19 nt, Artificial Sequence
  Description of Artificial Sequence: Synthetic oligonucleotide
  Antisense strand to SEQ ID NO: 1652775
ugucaccugcugaucaucu

SEQ ID NO: 1652777 - RNA, 19 nt, Artificial Sequence
  Description of Artificial Sequence: Synthetic oligonucleotide
  Sense strand starting at position 1551 of SEQ ID NO: 1561183
ggugacagcuccucuaaag

SEQ ID NO: 1652778 - RNA, 19 nt, Artificial Sequence
  Description of Artificial Sequence: Synthetic oligonucleotide
  Antisense strand to SEQ ID NO: 1652777
cuuuagaggagcugucacc

SEQ ID NO: 1652779 - RNA, 19 nt, Artificial Sequence
  Description of Artificial Sequence: Synthetic oligonucleotide
  Sense strand starting at position 1790 of SEQ ID NO: 1561183
gguguccuggcacaaagau

SEQ ID NO: 1652780 - RNA, 19 nt, Artificial Sequence
  Description of Artificial Sequence: Synthetic oligonucleotide
  Antisense strand to SEQ ID NO: 1652779
aucuuugugccaggacacc

SEQ ID NO: 1652781 - RNA, 19 nt, Artificial Sequence
  Description of Artificial Sequence: Synthetic oligonucleotide
  Sense strand starting at position 1802 of SEQ ID NO: 1561183
caaagaugaguuuggcuca

SEQ ID NO: 1652782 - RNA, 19 nt, Artificial Sequence
  Description of Artificial Sequence: Synthetic oligonucleotide
  Antisense strand to SEQ ID NO: 1652781
ugagccaaacucaucuuug

SEQ ID NO: 1652783 - RNA, 19 nt, Artificial Sequence
  Description of Artificial Sequence: Synthetic oligonucleotide
  Sense strand starting at position 1807 of SEQ ID NO: 1561183
augaguuuggcucacuggu

SEQ ID NO: 1652784 - RNA, 19 nt, Artificial Sequence
  Description of Artificial Sequence: Synthetic oligonucleotide
  Antisense strand to SEQ ID NO: 1652783
accagugagccaaacucau

SEQ ID NO: 1652785 - RNA, 19 nt, Artificial Sequence
  Description of Artificial Sequence: Synthetic oligonucleotide
  Sense strand starting at position 1835 of SEQ ID NO: 1561183
gugcuuaugugaccugcuu

SEQ ID NO: 1652786 - RNA, 19 nt, Artificial Sequence
  Description of Artificial Sequence: Synthetic oligonucleotide
  Antisense strand to SEQ ID NO: 1652785
aagcaggucacauaagcac

SEQ ID NO: 1652787 - RNA, 19 nt, Artificial Sequence
  Description of Artificial Sequence: Synthetic oligonucleotide
  Sense strand starting at position 1963 of SEQ ID NO: 1561183
gaaggauccuuccagaagc

SEQ ID NO: 1652788 - RNA, 19 nt, Artificial Sequence
  Description of Artificial Sequence: Synthetic oligonucleotide
  Antisense strand to SEQ ID NO: 1652787
gcuucuggaaggauccuuc

SEQ ID NO: 1652789 - RNA, 19 nt, Artificial Sequence
  Description of Artificial Sequence: Synthetic oligonucleotide
  Sense strand starting at position 2029 of SEQ ID NO: 1561183
cucugagaaagaugacguu

SEQ ID NO: 1652790 - RNA, 19 nt, Artificial Sequence
  Description of Artificial Sequence: Synthetic oligonucleotide
  Antisense strand to SEQ ID NO: 1652789
aacgucaucuuucucagag

SEQ ID NO: 1652791 - RNA, 19 nt, Artificial Sequence
  Description of Artificial Sequence: Synthetic oligonucleotide
  Sense strand starting at position 2035 of SEQ ID NO: 1561183
gaaagaugacguugcacuu

SEQ ID NO: 1652792 - RNA, 19 nt, Artificial Sequence
  Description of Artificial Sequence: Synthetic oligonucleotide
  Antisense strand to SEQ ID NO: 1652791
aagugcaacgucaucuuuc

SEQ ID NO: 1652793 - RNA, 19 nt, Artificial Sequence
  Description of Artificial Sequence: Synthetic oligonucleotide
  Sense strand starting at position 2061 of SEQ ID NO: 1561183
gaggaaaccgcuugugguu

SEQ ID NO: 1652794 - RNA, 19 nt, Artificial Sequence
  Description of Artificial Sequence: Synthetic oligonucleotide
  Antisense strand to SEQ ID NO: 1652793
aaccacaagcgguuuccuc

SEQ ID NO: 1652795 - RNA, 19 nt, Artificial Sequence
  Description of Artificial Sequence: Synthetic oligonucleotide
  Sense strand starting at position 2429 of SEQ ID NO: 1561183
uuuauaucccuagaugucu

SEQ ID NO: 1652796 - RNA, 19 nt, Artificial Sequence
  Description of Artificial Sequence: Synthetic oligonucleotide
  Antisense strand to SEQ ID NO: 1652795
agacaucuagggauauaaa

SEQ ID NO: 1652797 - RNA, 19 nt, Artificial Sequence
  Description of Artificial Sequence: Synthetic oligonucleotide
  Sense strand starting at position 2481 of SEQ ID NO: 1561183
gauguagacgucuaggaac

SEQ ID NO: 1652798 - RNA, 19 nt, Artificial Sequence
  Description of Artificial Sequence: Synthetic oligonucleotide
  Antisense strand to SEQ ID NO: 1652797
guuccuagacgucuacauc

SEQ ID NO: 1652799 - RNA, 19 nt, Artificial Sequence
  Description of Artificial Sequence: Synthetic oligonucleotide
  Sense strand starting at position 2599 of SEQ ID NO: 1561183
uggucugcccucgugcaau

SEQ ID NO: 1652800 - RNA, 19 nt, Artificial Sequence
  Description of Artificial Sequence: Synthetic oligonucleotide
  Antisense strand to SEQ ID NO: 1652799
auugcacgagggcagacca

SEQ ID NO: 1652801 - RNA, 19 nt, Artificial Sequence
  Description of Artificial Sequence: Synthetic oligonucleotide
  Sense strand starting at position 2610 of SEQ ID NO: 1561183
cgugcaauugugaggguuu

SEQ ID NO: 1652802 - RNA, 19 nt, Artificial Sequence
  Description of Artificial Sequence: Synthetic oligonucleotide
  Antisense strand to SEQ ID NO: 1652801
aaacccucacaauugcacg

SEQ ID NO: 1652803 - RNA, 19 nt, Artificial Sequence
  Description of Artificial Sequence: Synthetic oligonucleotide
  Sense strand starting at position 2611 of SEQ ID NO: 1561183
gugcaauugugaggguuua

SEQ ID NO: 1652804 - RNA, 19 nt, Artificial Sequence
  Description of Artificial Sequence: Synthetic oligonucleotide
  Antisense strand to SEQ ID NO: 1652803
uaaacccucacaauugcac

SEQ ID NO: 1652805 - RNA, 19 nt, Artificial Sequence
  Description of Artificial Sequence: Synthetic oligonucleotide
  Sense strand starting at position 2612 of SEQ ID NO: 1561183
ugcaauugugaggguuuau

SEQ ID NO: 1652806 - RNA, 19 nt, Artificial Sequence
  Description of Artificial Sequence: Synthetic oligonucleotide
  Antisense strand to SEQ ID NO: 1652805
auaaacccucacaauugca

SEQ ID NO: 1652807 - RNA, 19 nt, Artificial Sequence
  Description of Artificial Sequence: Synthetic oligonucleotide
  Sense strand starting at position 3001 of SEQ ID NO: 1561183
ggaugagguugcugaagga

SEQ ID NO: 1652808 - RNA, 19 nt, Artificial Sequence
  Description of Artificial Sequence: Synthetic oligonucleotide
  Antisense strand to SEQ ID NO: 1652807
uccuucagcaaccucaucc

SEQ ID NO: 1652809 - RNA, 19 nt, Artificial Sequence
  Description of Artificial Sequence: Synthetic oligonucleotide
  Sense strand starting at position 3005 of SEQ ID NO: 1561183
gagguugcugaaggauaaa

SEQ ID NO: 1652810 - RNA, 19 nt, Artificial Sequence
  Description of Artificial Sequence: Synthetic oligonucleotide
  Antisense strand to SEQ ID NO: 1652809
uuuauccuucagcaaccuc

SEQ ID NO: 1652811 - RNA, 19 nt, Artificial Sequence
  Description of Artificial Sequence: Synthetic oligonucleotide
  Sense strand starting at position 3242 of SEQ ID NO: 1561183
ugggucugacacuggagaa

SEQ ID NO: 1652812 - RNA, 19 nt, Artificial Sequence
  Description of Artificial Sequence: Synthetic oligonucleotide
  Antisense strand to SEQ ID NO: 1652811
uucuccagugucagaccca

SEQ ID NO: 1652813 - RNA, 19 nt, Artificial Sequence
  Description of Artificial Sequence: Synthetic oligonucleotide
  Sense strand starting at position 3328 of SEQ ID NO: 1561183
ggaaauguggugcaaagau

SEQ ID NO: 1652814 - RNA, 19 nt, Artificial Sequence
  Description of Artificial Sequence: Synthetic oligonucleotide
  Antisense strand to SEQ ID NO: 1652813
aucuuugcaccacauuucc

SEQ ID NO: 1652815 - RNA, 19 nt, Artificial Sequence
  Description of Artificial Sequence: Synthetic oligonucleotide
  Sense strand starting at position 3414 of SEQ ID NO: 1561183
augggaaaugauugcuuau

SEQ ID NO: 1652816 - RNA, 19 nt, Artificial Sequence
  Description of Artificial Sequence: Synthetic oligonucleotide
  Antisense strand to SEQ ID NO: 1652815
auaagcaaucauuucccau

SEQ ID NO: 1652817 - RNA, 19 nt, Artificial Sequence
  Description of Artificial Sequence: Synthetic oligonucleotide
  Sense strand starting at position 3423 of SEQ ID NO: 1561183
gauugcuuauuuggaguuu

SEQ ID NO: 1652818 - RNA, 19 nt, Artificial Sequence
  Description of Artificial Sequence: Synthetic oligonucleotide
  Antisense strand to SEQ ID NO: 1652817
aaacuccaaauaagcaauc

SEQ ID NO: 1652819 - RNA, 19 nt, Artificial Sequence
  Description of Artificial Sequence: Synthetic oligonucleotide
  Sense strand starting at position 3494 of SEQ ID NO: 1561183
caacauugggacugugcua

SEQ ID NO: 1652820 - RNA, 19 nt, Artificial Sequence
  Description of Artificial Sequence: Synthetic oligonucleotide
  Antisense strand to SEQ ID NO: 1652819
uagcacagucccaauguug

SEQ ID NO: 1652821 - RNA, 19 nt, Artificial Sequence
  Description of Artificial Sequence: Synthetic oligonucleotide
  Sense strand starting at position 3509 of SEQ ID NO: 1561183
gcuagacgacaccgaauua

SEQ ID NO: 1652822 - RNA, 19 nt, Artificial Sequence
  Description of Artificial Sequence: Synthetic oligonucleotide
  Antisense strand to SEQ ID NO: 1652821
uaauucggugucgucuagc

SEQ ID NO: 1652823 - RNA, 19 nt, Artificial Sequence
  Description of Artificial Sequence: Synthetic oligonucleotide
  Sense strand starting at position 602 of SEQ ID NO: 1561184
ucaagauagucccugcaga

SEQ ID NO: 1652824 - RNA, 19 nt, Artificial Sequence
  Description of Artificial Sequence: Synthetic oligonucleotide
  Antisense strand to SEQ ID NO: 1652823
ucugcagggacuaucuuga

SEQ ID NO: 1652825 - RNA, 19 nt, Artificial Sequence
  Description of Artificial Sequence: Synthetic oligonucleotide
  Sense strand starting at position 603 of SEQ ID NO: 1561184
caagauagucccugcagaa

SEQ ID NO: 1652826 - RNA, 19 nt, Artificial Sequence
  Description of Artificial Sequence: Synthetic oligonucleotide
  Antisense strand to SEQ ID NO: 1652825
uucugcagggacuaucuug

SEQ ID NO: 1652827 - RNA, 19 nt, Artificial Sequence
  Description of Artificial Sequence: Synthetic oligonucleotide
  Sense strand starting at position 616 of SEQ ID NO: 1561184
gcagaauguggaggacaau

SEQ ID NO: 1652828 - RNA, 19 nt, Artificial Sequence
  Description of Artificial Sequence: Synthetic oligonucleotide
  Antisense strand to SEQ ID NO: 1652827
auuguccuccacauucugc

SEQ ID NO: 1652829 - RNA, 19 nt, Artificial Sequence
  Description of Artificial Sequence: Synthetic oligonucleotide
  Sense strand starting at position 655 of SEQ ID NO: 1561184
ccuccaucugaggagucau

SEQ ID NO: 1652830 - RNA, 19 nt, Artificial Sequence
  Description of Artificial Sequence: Synthetic oligonucleotide
  Antisense strand to SEQ ID NO: 1652829
augacuccucagauggagg

SEQ ID NO: 1652831 - RNA, 19 nt, Artificial Sequence
  Description of Artificial Sequence: Synthetic oligonucleotide
  Sense strand starting at position 665 of SEQ ID NO: 1561184
aggagucaucuuggccaaa

SEQ ID NO: 1652832 - RNA, 19 nt, Artificial Sequence
  Description of Artificial Sequence: Synthetic oligonucleotide
  Antisense strand to SEQ ID NO: 1652831
uuuggccaagaugacuccu

SEQ ID NO: 1652833 - RNA, 19 nt, Artificial Sequence
  Description of Artificial Sequence: Synthetic oligonucleotide
  Sense strand starting at position 666 of SEQ ID NO: 1561184
ggagucaucuuggccaaac

SEQ ID NO: 1652834 - RNA, 19 nt, Artificial Sequence
  Description of Artificial Sequence: Synthetic oligonucleotide
  Antisense strand to SEQ ID NO: 1652833
guuuggccaagaugacucc

SEQ ID NO: 1652835 - RNA, 19 nt, Artificial Sequence
  Description of Artificial Sequence: Synthetic oligonucleotide
  Sense strand starting at position 728 of SEQ ID NO: 1561184
uucucagaacucugggaca

SEQ ID NO: 1652836 - RNA, 19 nt, Artificial Sequence
  Description of Artificial Sequence: Synthetic oligonucleotide
  Antisense strand to SEQ ID NO: 1652835
ugucccagaguucugagaa

SEQ ID NO: 1652837 - RNA, 19 nt, Artificial Sequence
  Description of Artificial Sequence: Synthetic oligonucleotide
  Sense strand starting at position 731 of SEQ ID NO: 1561184
ucagaacucugggacaaac

SEQ ID NO: 1652838 - RNA, 19 nt, Artificial Sequence
  Description of Artificial Sequence: Synthetic oligonucleotide
  Antisense strand to SEQ ID NO: 1652837
guuugucccagaguucuga

SEQ ID NO: 1652839 - RNA, 19 nt, Artificial Sequence
  Description of Artificial Sequence: Synthetic oligonucleotide
  Sense strand starting at position 741 of SEQ ID NO: 1561184
gggacaaacuguuuccuaa

SEQ ID NO: 1652840 - RNA, 19 nt, Artificial Sequence
  Description of Artificial Sequence: Synthetic oligonucleotide
  Antisense strand to SEQ ID NO: 1652839
uuaggaaacaguuuguccc
